United States Patent Application Publication US 2024/0093182 A1 - sequence listing, part 12

SEQ ID NO: 24891 - DNA, 1515 bp, Artificial sequence
  DNA replication origin
gagcccagacggaaaataaaaactttccggaaaagtccctgggctgggggagggcaaggggatgaggatcgggaggggaggggactaaggggaggagatggggaggagggaaaatggccgaggcgggaggactctgaggcccggaacgcggcagccggctcggggccgccggcactggggaggcgccgccgccgccaagaatctgccgcctggcgcgctcggaaggacggggcgacgggtcggcgcggcccgagcgccgggcgggggccggggcgggaagggggcgtgaggggcggggaaggggagctgggggcgggcactggggagccaccacccggcgggcgcgggagtcgcaggagcagcggccgcagtggccgcagggtgcccggtcgccgccccctccgcccgcagttcccggggcctgagcctccgcgagccgggataggaccgagtggcggggctcggagccgcctcggcaggcgcggcccttccctccctgcagggattcccgtcctctcgggtcccgctgccccgccccgactgcggacggagtggatggggtgcaccgcctcagacccgcttcctggggtcgcgaacttcccgggccccaaggtccctgccacctcttccaaatgctggaggactacgcacttctacaagtgaggtgacttttgaggaattcaagaatgctgatcacagcggttccccttgggtcttaccttcggagggtcaagggaggatgggtcatctggaacccacttacatccaggcccctctgggagccctggggtttgtggccaaagagggtaggaagccactccacagaaaggggtttaaacttgtctctaccctttttgtcgctctgacgcgcccttacagccaaacctacgtactccaccccagctcctaaggcaccggatatacacagtgatctaaggagagggtcgctttggaaagaaaaggcattgactgcccaagggcaggagggaggtctgatgcggtctcctttcctttaccttattctttgcgcctgaagtttctactttggagcttcagaaactattttccttctcctctatcaatctaaagtctgttatataggagcagtgcccccaagtccacctcagcaccgccaccgtcatcacaagcacagccatcaggattgggcacaacctgccctaatttggatcgccgtttatttttactgttgttttggcagggtggggattgctttacattcgctggagatgaattataattctcccctccaaccagggtgggcttcatgggtgtgcgactatgcagttgtataggccacagctcataagacccgtgtttggtttaatattctgggacaatagtctactgtcgctgttttgttcttcttcataatttttaatcaaggagtctcacatttgtattttgcaatgggccacgcagataatgtagtcagctttgcctctctcttcgccacttccctagactttccccttcctctgcgtaagtacacacaaa

SEQ ID NO: 24892 - DNA, 1155 bp, Artificial sequence
  DNA replication origin
ggggcagtggctagattactggatttctaagaaaagggtaattctctataccagggaagggagtaaatcttgaaagcagccatgaaaataaacatcaaaaacctcccagccctcaaatgttatttggtctctttccctccagaagacattcaggtagtaaagggaatgaaatcaacactccttagttgcctgatacaaatactaagtcattccaatcaggaagatagttgtaattaagactactacactagttgacttccaggtgatggtggtgtatttgtttctcagtataaaatggcatgggaatacttttcaacaataaaaagaaaggaagtactgttctataatgcctcatggatgaacctcaaaaacattctgtgcagtgaaggaagccgcacaatgtataatcccatctataagaaacgaccactaagaaaaatctatagagacaggaaataggttagtgattgcctaggactaggagtgggagaagagactgactgacaatggcgaggagatcattttggggaggatgaacctgttctgaaattggcttgtggtgatggttgtacagctctgaaaatttactaaacatcattgaactgtacactcaaaacggatggattttatggcatgtaaattgtaactaaataaggctatttgaaaaagtttatattgtaccagaaaggttagcgtctgggcctgggtctggttcttccgctgccatgcaggtcgcctgtcactaacactcctcaagaattctgctccttctccatttccatttgtaaaacgttagcaggatggtgcggggagaaggagaacacattatcaaatctgagattctgtgcagtcacaagacaccaagtctgggaatttcgaaaggcaatcaggcataaattcttcctgaggtgagaaagaagcaaaggtaccggctgctggggtcagggctgtctcacacgcgtggctctaggcaggagcacaaattgaaccactggggaaagtaggactccagcagaaacgaaggcgcaaggccgaatccctaaggtccaacgagctagcagtcagttgacagggtttctaacaaaaacgcggcatgcgtttaccaaacctagggtggttttatttcagaagtaggaactctttccacgagagcac

SEQ ID NO: 24893 - DNA, 1288 bp, Artificial sequence
  DNA replication origin
gcggggttgcacaccgatcctgggcttcgctcgatttgccgccgaggcgcctcccagacctagaggggcgctggcctggagcagcgggtcgtctgtgtcctctctcctctgcgccgcgcccggggatccgaagggtgcggggctctgaggaggtgacgcgcggggcctcccgcaccctggccttgcccgcattctccctctctcccaggtgtgagcagcctatcagtcaccatgtccgcagcctggatcccggctctcggcctcggtgggtgcgcgcccctcacgaccccggccccttgctccgctgggtggaggctggagccagccctcacgcttctctcttcgcaggtgtgtgtctgctgctgctgccggggcccgcgggcagcgagggagccggtgagtgggggagctggggtgcgtccaggcggtcgcaggggctgagcaccagcgggtacaagcgggactcagatccagccccttgggcttcagccctaccgcctgaggaggaaggcgcgaaggttgagccgccgcgtggcgcgcccgcgttaacccctgcagccgatctgctcctgctcacctgtttctcccatggtagggggcccctggggtccagtggggggacgttctccaagagcactaggaagaaggcctcctccaggcccacccacagccccagaccccgggcccgctgagcgccggcagcaggaggtcgaggaaggaggactccttgagcctcaccgaggagcgcaccagtcctgggctctgctgcgtttgggggtggaggagaagccgcccagacccgacttcaggttgccgtagccgagagagagggaggcgaacgtcgctgtcccaccttgtttgactcgctagctatgtttctaggtgtaacccctataatcagaagcactcgcggtctcactctacacgctagagagtttaaaaagtttgtaccacgtgtagaggtccgggtatgggtgtgtggtttggtgtattttccagtgtaaaaggcaacgctttcctaagagctaccgtttgttttccttgaaagtaggaatgagggttaagtatccctcatggctgtatttctcccgctctacttaacaaaagtcagtgttcgcaactaaaggcggtcggtcttggcaccggattccgatgccgcccccatctcagcggaaaatgggaggaaggattaaggctgtttgatgataggtatgaggctgtttaggggtaaggattttaacctctcagctctctagactgcttcagagctaagaaatgggcattgcgc

SEQ ID NO: 24894 - DNA, 1402 bp, Artificial sequence
  DNA replication origin
tgagggatagtgagggaggttggagaagagtagaggccgcttaccggatttgaaattggtgagatgtttcttgggctggtcggtctgaggacctgaggtcgtaggtggatctttctcatggagcaaagagcaggaggacgggggattgatctcccaagggaggtcccccgatccgagtcacggcaccaaatttcatgcgtgtccctgtgaagagaccaccaaacaggctttgtgtgagcaacatggctgtttatttcacctgggtgcaggcaggctgagtccgaaaagacagtcagcgaagggagataggggtggggccattttataggatttgggaaggtaatggaaaattacagtcaaagggggttgttctctggtgggcaggggtggatctcacaaagtacattctcaagggtggggagaattacaaagaaccttcttaagggtgggggagactacaaagtaccttaagggtgggggatattacaaagtacattgatcagttagggtggggcaggaacaaatcacaatggtggaatgtcatcagttaaggctgtttttacttcttttgtggatcttcagttacttcaggccgtctggatgtatacgtgcaagtcacagggggtgcgatggcctggcctgggctcagaggcctgacaggctcactgcagccttgacctctggggctcaagtgatcctccccctcagcctcctgagtagctgggactacaggtacatgccaccatgcctggctaatttttaaactttttagtagagacaaggtcttgctatgttgcccaggcttgtctagaactcctgagctcaagtgagcctcccacctccacctcccaaagtgttaggattataggcgtgagccactgtgcctgaacccattcattaacttgataaacatttatatagcatcttctttgtaccttgacagtcctaccatatttctcttcctttccctaatgccagtgattttgttctgaggcttgaggatggagttaagtactgaaaaacaaacgcaaactgccataaaggtataatagtgcttcaatccctgtagtgtccccagactggcaattactcaggagcttaagagtaagtctcccacactccggtgtaagtcatttctgggactgctgagccatgtgccgccatgacagtgcttctccagctgaggaggtgatttgactgggagcctgagctgggctcgttgaaatggcagcaggcccagggtgtggcagtggctttgggtaagggtgaggctcatgccttgttatgtcgatagtggctgctgcaggaaatggcaaaagaatagatacttaaggaagagatgcaggagaatttataacaacaggaagaagaaggaaaagaggaaaaggaagcgtataggagg

SEQ ID NO: 24895 - DNA, 763 bp, Artificial sequence
  DNA replication origin
ctctgcctggcaaccgccccgtctgagaagtaaggagcccctctgcccagcagccgccccgtctgagaagtgaggagcccctccgcccggcagccaccctgtctgggaagtgaggagcgtctccgcccggcagccaccccgtccgggagggaggtgggggtcagcccccgccaggccagccgccccatccgggaggaaggtggggggttcagccccccgcccggccagccgccccgtctgggagggaggtcggggggtcagtcccccgtccggccagccgccctgtctgggaggtgaggggcgcctctgcccagctgcccctactgggaagtgaggagcccctctgcccggccagccgccccatccgggagggaggtgggggggtcagcccgccgcccgggcagccgccccgtccgggagggaggtggggggtcagccccccgcccggccagccgccccgtccgggaggcgaggggcgcctctgcccggccgtccctactgggaagtgaggagcccctctgcccggccaccaccccgtctgggaggtgtacccaacagctcattgagagcgggccatgatgacagtggcggttttgtggagtggaggggggggagaggtggggaaaagattgagaaatcggatggttgccgtgtctgtgtagaaagaagtagacatgggagacttttcattttgttctgtactaagaaaaattcttaccctaaaacttaaagtataataaaaaaaaaaaaaaaaaaagaaaaa

SEQ ID NO: 24896 - DNA, 1176 bp, Artificial sequence
  DNA replication origin
cacctcccagacggggtggtggccgggcagaggggctcctcacttcccagtagggacggccgggcagaggcgcccctcgcctcccggacggggcggctggccgggcggggggctgaccccccacctccctcccggacggggcggctgcccgggcggcgggctgacccccccacctccctcccggatggggcggctggccgggcagaggggctcctcacttcccagtaggggcagctgggcagaggcgcccctcacctcccagacagggcggctggccggacgggggactgaccccccgacctccctcccagacggggcggctggccgggcggggggctgaaccccccaccttcctcccggatggggcggctggcctggcgggggctgacccccacctccctcccggacggggtggctgccgggcggagacgctcctcacttcccagacagggtggctgccgggcggaggggctcctcacttctcagacggggcggctgctgggcagaggggctccttacttctcagacggggcggttgccaggcagagggtctcctcacttctcagacggggcggctgggcagagttgctcctcacctcccagatggggttgcggctgggcagaggtgctccccacatctcagacgatgggcggccgggcagagacgctcctcacttcctagatgggatggcggccgggaagaggcgctcctcacttcctagatgggatggcggcggggcagagacgctcctcactttccagactgggcagccaggcagaggggctgctcacgtcccagacgatgggcagccaggcagagacactcctcacttcccagacggggtggcggccgggcagaggctgcactctcggcactttgggaggccaaggcaggcggctgggaggtggaggttgtagcgagccgagatcacgccactgcactccagcctgggcaccattgagcactgagtgaaccagactccgtctgcaatcccggcacctcgggaggccgaggctggcagatcactcgcggttaggagctggagaccagcccggccaacacagcgaaaccccgtttccaccaaaaaaatacgaaaaccagtcaggcgtggtggcgcacgcctgcaatcgcaggcactcggcaggctgaggcaggagaatcaggcagggaggttg

SEQ ID NO: 24897 - DNA, 1237 bp, Artificial sequence
  DNA replication origin
taaatgtacttctggttggcagcagctgcatcattataacacaaaagcaaccttggctaacttcagtaccttatgtaacataagaaataaagaataacttgaatttaaaatactttttatatgtttactaacattaaactattttcaatgcaggaaataaatatttccccaaagaggaatcccccctcaattactttctttcagacttaacaaattggagtagatgtggttttgctcattcttttatctgctggcaactattttaagtctcctgtgcaaggcagattccgatgacctcgggaaagtcacaggacctcagtttcttcaatggtaaaagcaaaggcagtggtttctaccgtcctttctcactgcaccattcagcgtcagtgccctcatgagaaacacacccaaagcccagtgtgctctaccccaaaacttgtgaaatttctagagtctcaaaaaagtgaatatgtttaaggcagtataataaaagccaggtggacgacagttcctaaagttaggctggtagtggcgtgaacaggggtcttttgggccaccctgagacccgccccacggggcttctcgatccacgtcttggcttctcgctccactttcacagaacgtactgaatcaggggcctgcatccccgtgccgtgccgagccgacggagaaatggactcctcttctcgctcctgtggagtttcgtcttctgggtgagtgtggcaccgggtcctgggcgggtgatgtctgtagttggcgagcgatcctcagccagaaaactggctgcgcacacaggcgcagacacgcgaacatgttcctgcgaacgagcttgggcgcatgttttcctcccttgctttctttaatgctcagagaccataaggggatttatcgagaagcattcggtgcccatgcccggtttggaaccgcgagcacaatatctggttcctttgcagtacggtggtttgctcttgagttacgaccagaaaccggaacagaaggaaagggagaagcaggggaggttcggggacgacggcgctccgggcagtaaggcagtagcttccaaagcgtggaggatgggactgaggaggagcagaatacggagaaagagggaagctgaggaaaaatactcacgccaatgggtaaaagggaaaaggtgagaaggaatggagtaggggagggaaccaatggtgggagaggcggaggaagaagggggaggggtagaagccaatgggggagt

SEQ ID NO: 24898 - DNA, 1280 bp, Artificial sequence
  DNA replication origin
gcgggagccgtggggctcagggtttcggggcgtgtgtgtcggggagggcggggggaggtggctgaagggacgcgccgctcggtgagcgcgccgaggaagagaggcgagcggagagtggaggaggaggcggcggcggcgggagcggtccccaggaatgtcgctgccgccgccaccgccggggccgctgccgttgaggaggagacggaggagaccgacgttgttaggtaggaccttgcggaccccgctcctccaagcctgcctgccccctcccggacggggaccctcctgcggctagctgccccgctcggtcgccgctgccggttgtaaccagttgaaggggctggggccccgcggccgccgaggggagcctggcgctgcgctcggttttcgcaggccgggcgggcagcagctgcagcgttagggatacgttcggcgtgaagggcagagaggccgggggagggggtgctttctccacaggtgacggggccagggtcggcggaggcctgatgctggccggggatcgccggccccgccaggcgtccgctctcgcccgccgcctcacttgctcgagtctcgggtggtccgtcgagaggggaggtggcggtgtccgttggccgggttgctgctgttaacgagttccacctggaaagggtacacggggcgggtgcagattcgcggaaacacagtctcggttgcaaacttaaacgccttgtaggggggatcggccctttcactttccctcatctcctcgactcctccctgggttctcttcaccaattttccatctgctttgaagcttggagtaagatatgagaagttgcactgcgcatccagagcccagagtcctatgggctgactgcgactgggttgaggctttgatactgagttttcgctagaataacctccagattcttcctctctttccactaaagaaaagtatcggggtgggggtggggagccgcgcgggagcgcgcgcgcacttatccacacagaaatactccctctcaccctccctcttcagcgttattagaaatgcaagagagctggaggctcggggtgtagctgaggttgaaaggtgcacggaagtaagggcaaactgttattaggccgtttagtaaaatcccgaaaaagttgtaggggagacgcttatacttctaccatgtgatagaaattcggatttggccatcgcttaataaatgggaattcaaatattttgagatagagcaagataggcatatagatgggtttgtgcttacgttttaagtttaaattcttatcga

SEQ ID NO: 24899 - DNA, 952 bp, Artificial sequence
  DNA replication origin
ggctgtttcccgagagccatcagggtgggaggggacgcccgggtctgcggcaagggcaggcgtctggcccctacaccgtgtgcggggacgctaggctgggcggcctgtgtcactcttggccttggcaacttctggccaatccgccctgcccctctgggtcccggcgggccggctgcgccctaggctcaaagggttaagcaggtgcctctccgggcgaggcgctattggccgagggctggggcggcgcggccgcggtcaccacgcttcgccgatcccaacttgggttcctgcggaaggcaaggcggccactcgtcccctggctgcggctgcggggcccaggccttggcgcgcagggagtgggaaggagaaaaggacgagaaggggcaagcaccagccgcaccagcaaagggggcgagggtggcgcgcgcaagatgaggggagctgaagccctgcatcccgaaggaggctgcgcccaccgcccgcaactccactccaggctcgccagccggaagaaagaggaggaagtgggacaacgggggtcctgggcaggggtaggggaaacgatcaactcccactgcccccacccactagtcgagttggaatgcaagtcgtcacttaaaaaggctcacccaaaccgcaggcatacctcctcaccccttaaagaaacattgatgtaatagtgtggagaagtaactgagagacgcgaggaaataaatgcacgtgttttctctttttgtttccctggtggttggaatttgcagagttcgtctcagtggtggctgctaatttattcgtttcatcggtcgaaaggggcgtatagaggtgggtcagcggggcacaaccggatccctctaaccggacctcacctcacaagtttgtcctggaccaacccgcccgcccaccagcagagggaagggcccattcttataaggagaacaaactctccattgca

SEQ ID NO: 24900 - DNA, 1371 bp, Artificial sequence
  DNA replication origin
ttgtcccgcggggacgccgagagcgggggtgacagcgggtcggaggcgacgggggccagggccgcggtggccgaggcgccgaactgagtcttgcgggcggccgcgccgtcggcgccgggcggggtgaggaccgagtcgggaatggccacgtgcagccccccgccaccgccacccccaccgccgccgccctgcggggacgggaagtgctcagagctggggggcttggtcatgctgtagggggactcgttcctggagatctcccggttgggcgggtagttccagatgctgctgtcattgtcgaaattgatgggttctgagatctccgtcttgatcttgagcaccgaggcactgttgggggaggacagcagccgcgggggctccaccaggcccgcgtccaggccgcctgggctcgacgcgctggacaggcgccggcggctggcgctgccgcccttttgccgtttccgccttttcttgcgcttctggtgcttgctggaggcctgcgcgcccgcctcgcctgcgctgtccgagtccttggcgctgtcggacgtgagtgactcgcagttctgcagccgcaggtccgactcgctctccacgtagcgctccaccttgatctgcatcgcgcccagagcaccgaagccgtcctcgcccgccttggggttctcaaagtccgagtgctcgaagctgtcgtcgctgtcgcggctgtccgggttactggagctgtggccgtcgtcgttgcagttcatgtcgttgtcacacgcgttgcccgacttcttccggtcgggctccgggtcttcgctgttctcggactggttccccttctcgtcggacttggagttctcgttgtcctctgtgtggggcggggggccggcggtggcgggggcggagagagaagagagagaagacaccaggttagcggggcgacccagcctgtcacctgcaggggctggggcggggagcagggcaagtgtccgtcctcatcacgggcttctccatcaccttcagaggacttaagacctgggctttctctctgctgagggcctgggttagctggatggttactcaaagtgcgggccagcagcattggcaatcatctggacacccgctgcaaatgcagactctctgctcccacccaggtagactgaatcagattctgcgttggaatatgacccccaggtgattctcaggcacattcaagtttaagaagtcccacaaagatactcaggaagtcaggttaaataacctggattaaggtgtgacacagaaaaatgatggcatgcaaggtgactttctaaagagtctgcattttcccttggtgaatatttgttcattactgagagccactctcctttctattccataagttattctccc

SEQ ID NO: 24901 - DNA, 882 bp, Artificial sequence
  DNA replication origin
ggagtgcagtggcgggatctcggctcactacaacctccacctcccagccgcctgccttggcctcccagagtgcagagattgcagcctctgcccggccgccaccccgtctgggaagtgaggagcgtctatgcctggccgcccatcgtctgagatgtggggagcgcctctgctccgccgccccgtctgggatgtgaggagtgcctctgcccggccgcgaccccatctgggaggtgaggagcgtctctgcccagccgccccgtctgagaagtgaggagcccctccgcccggcagccgccccgtccgggagggaggtggggggcagcccccacccggccagctgccccatccaggagggaggtggggggcagcccccgcccggccagctgccccgtctgggaggtcggggggcgcctctgcctggccgccccatctgggaagtgaagagcccctctgcccggccgccaccccgtctgggaggtgtacccaacagctcattgagaacgggccatgatgacgatggcggttttgtcgagtggaaaagggggaaatgtggggaaaagatagagaaatcagattgttgctgtgtctgtgtagaaagaggtagacatgggagactccattttgttctgtactaagaaaaattcttctgccttgggatgctgttaatctataaccttacccccaacccggtgctctctgaaacatgtgctgtgtccactcagggtaaaatggattaagggcggcgcaagatgtgctttgttaaacagatgcttgaaggcagcatgctcgttaagagtcatcaccactccctaatctcaagtacccagggacacaaacactgcagaaggccgcagggtcctctgcctaggaaaaccagagacc

SEQ ID NO: 24902 - DNA, 1015 bp, Artificial sequence
  DNA replication origin
cctgagtggacacagcacatgtttcagagagcaccgggttgggggtaaggttatagattaacagcatcccaaggcagaagaatttttcttagtacagaacaaaatggagtctcccatgtctacctctttctacacagacacagcaacaatctgatttctctatcttttccccacatttcccccttttccactcgacaaaaccgccatcgtcatcatggcccgttctcaatgagctgttgggtacacctcccagacggggtggcggccgggcagaggggctcttcacttcccagatggggcggccaggcagaggcgccccccgacctcccagacggggcagctggccgggcgggggctgccccccacctccctcctggatggggcagctggccgggtgggggctgccccccacctccctcccggacggggcggctgccgggcggaggggctcctcacttctcagacggggcggctgggcagagacgctcctcacctcccagatggggtcgcggccgggcagaggcactcctcacatcccagacggggcggcggagcagaggcgctccccacatctcagacgatgggcggccaggcatagacgctcctcacttcccagacggggtggcggccgggcagaggctgcaatctctgcactctgggaggccaaggcaggcggctgggaggtggaggttgtagtgagccgagatcccgccactgcactccagcctgggcaacattgagcactgagtgagcgagactccgtctgcaattctggcacctcgggaggccgaggctggcagatcactcgcggttaggagctggagaccagcccggccaacacagcgaaaccccgtctccaccaaaaaaatacgaaaacaagtcacgcgtggcggtgcgcacctgcaatcccaggcactcggcaggctgaggcaggagaatcagacagggaggttgcagtgagccgagatggcagcagtacagtccagcctcggctcggcatcagagggagaccgtg

SEQ ID NO: 24903 - DNA, 997 bp, Artificial sequence
  DNA replication origin
gcccacgtggctttcgagggggacaacctggggcgtggggacactgcagggcacagggcacccgcgagtggaaccacctaggcgccccctcccggggccggtacgtgcgggctgctggcgctgcgcgcgggagccctccctcggcccggggctgcgctggaacgcgctgactcacgctagcgctacgtgagctgcgagcctgccgggcggggctggctgtccagccccggccgccgcccgccgcagttaccgactaccttcggggcggccgcgggcgcaggcacagtgcgtgtggctcggtgtccgccgcggcgcgccctggcgagacttcaccccgcgccccgccgcgcgctcgccaaggctgcccgccgggcatttttgatcatttcgattgtccctccggctcgaaagctgcagcagagctgggatcttgcatccgaagcgagggcaccagccggtatctgctaggcaggagcggccagagtcgcgttagggcggccttgggcagggcgcttcggtttggcctctctttggctccgggggagcctgcggaggcccagggccggtctctggctctgcacttgatggcctcctatctaggggaagggccagttagtatcccacccgctccctcgccattgtagctcagttcatccccaaagaccccgtggagtggcaagggcaggcatcatccaatccatttggcagaggacatcaaagctgaggtttagatattcatctgttgacaatgatgaggatgtttcatcgtaacttttctatctagaacctagctctcagtttatcagttctagtgctaacgtggcctgttttagcggtgtctcccattctgtgttctctggaaagacaagttaaaggggagagtttgtattaacaggtgtcacgtcttctcactctcgccatatccctgtaccttctggtagatgtaaacggacacaactgtgcttataaaaccaataactcgccagtcttcctcagg

SEQ ID NO: 24904 - DNA, 1504 bp, Artificial sequence
  DNA replication origin
agcagataccggctggtgccctcgcttcggatgcaagatcccagctctgctgcagctttcgagccggagggacaatcgaaatgatcaaaaatgcccggcgggcagccttggcgagcgcgcggcggggcgcggggtgaagtctcgccagggcgcgccgcggcggacaccgagccacacgcactgtgcctgcgcccgcggccgccccgaaggtagtcggtaactgcggcgggcggcggccggggctggacagccagccccgcccggcaggctcgcagctcacgtagcgctagcgtgagtcagcgcgttccagcgcagccccgggccgagggagggctcccgcgcgcagcgccagcagcccgcacgtaccggccccgggagggggcgcctaggtggttccactcgcgggtgccctgtgccctgcagtgtccccacgccccaggttgtccccctcgaaagccacgtgggcgtggggctcgccttccctgggcggagtccccatcggtgcctgcccgcccggaagtaggggcgcgagggtgacgggcaagaccgagcccggcccgtgattcttcctcagccggagctcgaccttctccttgtcccttgcgtttcctttctttgaaccacacactcgctcgctcacgtttgtcccgactaagttgcccccggcccccgcagctgtcatgaagatagatggagaggtagctgcgagagcccagcctcggcgggtggtgcccagggcggactggggagactaaagacagtaaagggcgggtgggactcgagtcctctatccacctaatctcacatgcagtgggacttatcattccagtcggtctgcatttcctcaaatctgcacctgtttagttacgacaaccagctttataaaaggaagcggcctacgtgcctgacagctgaatgacggaattagaagtcattctctactaaatgtgtgaacatagcaggacctccgcttaagttctagacctacagggttgcaagtctgggcctcctgggggcaggaaaaaattccaagtcctcctttgcccctcggtaaaatgttctttcacaaattagagccaacggcacatctgtgatgtgcctatgtcactttttcaaagccttgctcaggggttggaatgtcgtggagagggagacgaggtgggtgcttatgaagggaaagagatacatggggaagggggagaggaaacgttgattaggaaaggagcttgcagtcatgagtaaagtgactgacagaacgttattgagcctgtcatggagatcaggcactatttgggcaccagtgacgcaaaataagtggctccccgtggtccctgctctcagggttacagatgagtgggagatattaactaagtagacagtgaaacatgaggaagacttagtatgacggttcagcacccagacttgggaaccaggctgtgcaggttctgatgctggctctgcaatttacagaccgtgtgatcttagccaagtgagtacccccatc

SEQ ID NO: 24905 - DNA, 945 bp, Artificial sequence
  DNA replication origin
tcgtctgggacgtgaggagcccctctgcctggctacccagtctggaaagtgaggagcgtctctgcccggccgcccatcgcctgagatgtggggagcgcctctgccccgacgccccgtctgggatgtgaggagcgcctctgcccggccgcgaccccgtctgggaggtgaggagcgtctctgcccggccgcccagtctgagaagtgaggagaccctccgcctggcaaccgccccatatgagaagtgaggagcccctctgcccggcagccaccccgtctgggaagtgaggaagtgaggagcgtctctgcccggcagccaccccgtcagggagggaggtggggggggtcagcccccggcacggccagccgccccgtccgggagggaggtggtggggtcagcccccggcacggccagccgccccgtccgggaggtgaggggcgcctctgcccggcggcccctactgggaagtgaggagcccctctgcccagccaccaccccgtctgggaggtgtacccaacagctcattgagaacgggccatgatgacaatggcggttttgtggaatagaaaggggggaaaggcggggaaaggattgagaaatcggatggttgccatgtctgtgtagaaagaggtagacacgggagacttttcattttgttctgtactaagaaaaattcttctgccttgggatcctgttgatcggtgaccctacccccaaccctgtgctctctgaaacatgtgctgtgtccactcagggttgaatggattaagggtggtgcaagatgtgctttgttaaacagatgcttgaaggcagcatgctcgttaagagtcatcaccaatccctaatctcaagtacccagggacacaaacactgcggaaggccgcagggtcctctgcctaggaaaaccagagacctttgttcacttgtttatctgctgaccctccctc

SEQ ID NO: 24906 - DNA, 2073 bp, Artificial sequence
  DNA replication origin
ggagacagaggacctgctgagttgtatttttatgatgaattttctttgtattatatgtttatattcattaatcctggaatccttactatgttgttctccaacatcctaaatacatacaacttaaggctacataattttttctgctgtgatagtcatacatcaatgatagaaggaacacaatcatttgggaatggatgggccttttagacttgcagtccagacttcagttttatctctggagcaggcagcatgcccagtttatgctgtactttgtttctaggttttgttaccttggctaatgtattttcagtgggtgaaatagcttgtgctctaccttcttgcatagaatattggttccaggggtagagaacagggagaacatgctttatttttctctgcctcctctgaccttagctccaagctcccacaacttccagggatgccttgaaaaccaatttcacttctaaacatgtattgagagccgaatctctgctaggtttatagtgggagaagggggagagcagcataaagatatctgtggaatgcagagatgtgaggagaaaaaaagtggcaggagcaggagagaaggcaagggacagtgaagcagcagaaaagaaggtgaaatcagtttctgttatattccccaaatatatttgaggaagatgattcttgaagagaataaatacttgtggtgatggaggctgtggtagagggggtggtaagtgtgaagatgcagggggaggagatggtgctggaggtggagatggaggtggaggtggaggtaaaggatgtagtggggggatggaggaagtagcataggaggttatggaggtgggacaagtgatagaggtggagctagggatggtggagggggtggaaaagatggtagtaggagtggtggaggtggaagtagtagagctggtggtggaggttatggttgggtgaaggtgatggagatggtgaagaaggtggtgaaggtggtggaggaattggtggtgaatccaaggtggagggagaagagttggttggggcgatggagggagaagagttggttggggcgatggagggagaagagttggttggggcgatggagggagaagagttggttggggcgatggagggagaagagttggttggggcgatggaggtagaagagttggttggggcgatggagggagaagagttggttggggcgatggaggtagaagagttggttggggcgatggaggtagaagagttggttggggcgatggaggtagaagagttggttggggcgatggaggtagaagagttggttggggcgatggaggtagaagagttggttggggcgatggaggtagaagagttggttggggcgatggaggtagaagagttggttggggcgatggaggtagaagagttggttggggcgatggaggtagaagagttggttggggcgatggaggtagaagagttggttggggcgatggaggtagaagagttggttggggcgatggaggtagaagagttggttggggcgatggaggtagaagagttggttggggcgatggagggagaagagttggttggggcgatggaggtagaagagttggttggggcgatggaggtaatagaggtagtgaatgtcgtggctaagaaggtgaaagaggtagtggaggtgggtgggaaggtggctgagatagtagaggaggttgaggtggtagaagtaagatagtggcggaggtggccggggagatgtatttgaggtgatggagaaggttgtggagtgagtgtaagtggagatggaaatacctgtagtgatagcccaaagtgatagggtttgtggagtcatctacaaatataaatatccactcttaagtcagagtgaaacaagtgcaccagcacgcgggagaacaagcagccatatgtactacttaaaacaattttctgcttaggactttcagatatttttctcactagtttaatgcatttttgccttgaatctaaaattgtttttgttttcttagatgagtcagagagcagttgatgcccattcattctcactgtaaatgctttctatccgccagactggac

SEQ ID NO: 24907 - DNA, 1279 bp, Artificial sequence
  DNA replication origin
gtttgtgtccctgggtacttgagattagggagtggcgatgactcttaacgagcatgctgccttcaagcatctgtttaacaaagcacatcttgcaccacccttaatccattcaaccctgagtggacacagcacttgtttcagagagcacagggttgggggtaaggccacagatcaacaggatcccaaggcagaagaatttttcttagtacagaacaaaatgaaaagtctcccatgtctacctctttctttttttttttttttttttttttttttgagacggagtctcgctctgtcgcccaggctggagtgcagtggcgggatctcggctcactgcaagctccgcctcccgggttcacgccattctcccgcctcagcctcccaagtagctgggactacaggcgcccgccactacgcccggctaattttttgtatttttagtagagacggggtttcaccgtttcagccgggatggtctcgatctcctgacctcgtgatccgcccgcctcggcctcccaaagtgctgggattacaggcgtgagatgtctacctctttctacacagacacggcaaccatccgatttctcaatcttttccccacctttcccccctttctattccacaaaaccgccattgtcatcatggcctgttctcaatgagctgttgagtacacctcccagatggggtggtggccgggcagaggggctcctcacatcccagtaggggcagccgggcagaggcgcccctcacctcccggatggggcgtcggggcagaggtgctccccacatctcagatgatgggcggctgggcagagatgctcctcacttcctagatgggatggcggccgggcagagacgctcctcactttccagactgggcagccaggcagagaggctcctcacatcccagacgatgggcggccaggcagagacgctcctcacttcccagacggggtggcggccgggcagaggctgcaatctcggcactttggggggccaaggcaggcagctgggaggtggaggttgtagcgagccgagatcacgccactgcactccagcctgggcaccatagagcactgagtgaacgcaactccgtctgccatcccggcaactcgggaggccgaggctggcggatcactcgtggttaggagctggagaccagcccagccaacacagcgaaaccccgtctccaccaaaaaaatacaaaaaccagtcaggcgtggcggcgcgcgcctgcaatcgcaggcactcggcaggctgaggcaggagaatcaggcaggga

SEQ ID NO: 24908 - DNA, 686 bp, Artificial sequence
  DNA replication origin
ggaatagaaaggggggaaaggtggggaaaagattgagaaatcggatggttgccgtgtctgtgtagaaagaggtagacatctcacgcctgtaatcccagcactttgggaggccgaggcgggcggatcacgaggtcaggagatcgagaccatcccggctgaaacggtgaaaccccgtctctactaaaaatacaaaaaattagccgggcgtagtggcgggcgcctgtagtcccagctacttgggaggctgaggcgggagaatggcgtgaacccgggaggcggagcttgcagtgagccgagatcccgccactgcactccagcctgggcgacagagcgagactccgtctcaaaaaaaaaaaaaaaaaaaaaaaaaaagaaagaggtagacatgggagacttttcattttgttctgtactaagaaaaattcttctgccttgggatcctgttgatctgtggccttacccccaaccctgtgctctctgaaacaagtgctgtgtccactcagggttgaatggattaagggtggtgcaagatgtgctttgttaaacagatgcttgaaggcagcatgctcgttaagagtcatcgccactccctaatctcaagtacccagggacacaaacactgcggaaggccgcagggtcctctgcctaggaaaaccagagacctttgttcacttgtttatctgctg

SEQ ID NO: 24909 - DNA, 1185 bp, Artificial sequence
  DNA replication origin
ggacgacgcgacgcgaggtagcggcctggccaatgagcgcgggtcgggcggggctgggggccggcggccggggcgcgcgcgggtctgggcgtgccgcgggtgacggcggggccgggcgggccaatgggcgctgggtggcgggcgggcgggcctggcggccgggggctttaggacgtgagcgggcggccggccggacagactgacgtgtgagctgcatcgcgggaggcgcatggcggggatggcgctggcgcgggcctggaagcagatgtcctggttctactaccagtacctgctggtcacggcgctctacatgctggagccctgggagcggacggtgttcagtatcctgtcccggccgcgcgcgcgggggccgggctgggggcgcgggccgcggggccgcatttccccaggccccgggcctggggtggaggctggagcggcggccccgccggtcctgtgcgcggaagccgggggtgcagggggaggtctgggggccgagggcggcgctcgcggggttaagtggggggtgggggagacgagaactcttgagatccggggtcacctgtgagtcgctggacccaagggggaagcgtcttgattcctggaggaaatctccgaaggtgatgtgtaaccctgtgtgtcgcctgcacttcggccgcaactgcctttggttcagtcccctgttcctgtaggaggcggggatcatgtaacagtggagcacatcgctcccggcttggacgcctttgacctttaagtgttcctgatttagttggctttgggtctaccaagaattctagtcagttaactagcttttaagccaggttctgaatttgtaggcatgacactccagtagtttttgaaagcagtttaagttattgtatctttttggtcttcaagttggggagttttaaaagtgtatttattgcttctgtgcaccgtccgtagaagtcggcccgaaaagtggtgcaatttgtggttagttgtcggtagggtttgaaactgtgttttggtggatagttaataaattcttgttaatgactattgagtggttactataagcaaagcatttgtgcaaagcacgttgtctgtatcttaactcatctaactttgagaacttcagttaataactcagggttgtgaagataggctccctgaaagtctgatgtttcttgtctctgcttgtcc

SEQ ID NO: 24910 - DNA, 1742 bp, Artificial sequence
  DNA replication origin
gctacctttcaacttccagtaaggcaggggaaagcgcgaacgcagtcccccactaccacaaattatgcagtcgagtttcccacatttggggaaatcgcaggggtcagcacatccggagtgcaatggataagcctcgccctgggaaaaccaccttcgtgatcatggtatctcccctgccaggtaagtatggactggccgtgcggcttcctctcataccctcgcgcccaccacactctcaacacacggtcacttctctcgtgcggccccagccccctcaccctctccagccccctcgctccaccgttgccgctaggggaagacaccccgacagcactcggatatcgcgcgcgggacatggggtcccaggccgagcgtgaccggcagcctccgcgcgccgtgctcatctgcatacgccacgcccttgccggggtcgtccccggcgctccggtctctcccgctcccggaccggggacctaccgacggcgtgggacaggcctgggtgtctccggggctggttgggcgcaagtgggcgcgcggccgggagtctgggacctgaaagggaggcctgagaggacgagagagtgccagagagagagagagagacagtgacagagagaagagagagacagaaagacagtgacagagagaagagagagagagagacaggagagaggggagagagaagacagagagagagagagagagagagagacagtgacagagggaagatagagagagagagaaggaagaaaagagggggagagagagcgagcgagcgagcgagcgagcgaaagagagtttgcggccccaccgcccagtccccaagggatctagcgtctgggccgggcagggctcgggtttgggctcaccttcctttcagcaaaaagcaagtttcggccccttctcttctcgccagcccaacagaagtcttccccacagggcacaactattatgaggttcgcctcctccccccggttaaacattaagcactaagatttccccaagcagcttgacagaacatcgttttccttgagcatcttccctggtaggcctgtcagaaacggctgtaactaacataggcggcgacgaaacctaggaaaacctaaaggaggggggccgggtggagtcgggggggaatcaagcctcttactttgagggaaaaaaaaatcaggacaaagtacaaagttgtccactatgcaaaccgtgcaccggtcgagttaagtgtataacgctggacaacaaaccatttttgaacacttgggaaaatctgtaaatacactattattattattgtattcttcttcttcttcttcttcttcttcttcttcttcttcttcttcttcttcttatgtgagacggagtttcgctcttgttgtccaggctggagtgcaatggcgcgatctcggctcaccgcaacctccgcctcccgggttcaagcgattctcttgcctcagcctcccgagtagctgggattacgggcatgcgccaccacgcccggctaattttgtatttttagtagacacgggatttctccatgttggtcaggctggtctcgaactcccgacctcaggtgatctgcccacctcagcctctcaaagtgttgggattacaggcgtgaagcaccacgtccagccactgttatgttttatagtcaactcacacgatctgagatattctatgtaatctgttcaaccttcgttttatgcttagatggtgagtcgtcctcgatttttttttttttt

SEQ ID NO: 24911 - DNA, 1142 bp, Artificial sequence
  DNA replication origin
aaggggccgaaacttgctttttgctgaaaggaaggtgagcccaaacccgagccctgcccggcccagacgctagatcccttggggactgggcggtggggccgcaaactctctttcgctcgctcgctcgctcgctcgctctctctccccctcttttcttccttctctctctctctatcttccctctgtcactgtctctctctctctctctctctctctgtcttctctctcccctctctcctgtctctctctctctcttctctctgtcactgtctttctgtctctctcttctctctgtcactgtctctctctctctctctggcactctctcgtcctctcaggcctccctttcaggtcccagactcccggccgcgcgcccacttgcgcccaaccagccccggagacacccaggcctgtcccacgccgtcggtaggtccccggtccgggagcgggagagaccggagcgccggggacgaccccggcaagggcgtggcgtatgcagatgagcacggcgcgcggaggctgccggtcacgctcggcctgggaccccatgtcccgcgcgcgatatccgagtgctgtcggggtgtcttcccctagcggcaacggtggagcgagggggctggagagggtgagggggctggggccgcacgagagaagtgaccgtgtgttgagagtgtggtgggcgcgagggtatgagaggaagccgcacggccagtccatacttacctggcaggggagataccatgatcacgaaggtggttttcccagggcgaggcttatccattgcactccggatgtgctgacccctgcgatttccccaaatgtgggaaactcgactgcataatttgtggtagtgggggactgcgttcgcgctttcccctgccttactggaagttgaaaggtagctgttattatgatcggcgctgggtctggatgtgtggtgttcaaaacacgggctgctgggcagttcgctttcgttttcacgtttttgtgggggtagggcgattgctgcttttttctcaccccgcgggggatcctttagtaacgcgccaattatactgtgggtttatgttctccagggtattgtcgtgaaaacgtcacgatctcgtgctttctccaggccaaagccgcgtttttcctgcaag

SEQ ID NO: 24912 - DNA, 899 bp, Artificial sequence
  DNA replication origin
aaacttgctttttgctgaaaggaaggtgagcccaaacccgagccctgcccggcccagacgctagatcccttggggactgggcggtggggccgcaaactctctttcgctcgctcgctcgctcgctcgctctctctccccctcttttcttccttctctctctctctatcttccctctgtcactgtctctctctctctctctctctctctgtcttctctctcccctctctcctgtctctctctctctcttctctctgtcactgtctttctgtctctctcttctctctgtcactgtctctctctctctctctggcactctctcgtcctctcaggcctccctttcaggtcccagactcccggccgcgcgcccacttgcgcccaaccagccccggagacacccaggcctgtcccacgccgtcggtaggtccccggtccgggagcgggagagaccggagcgccggggacgaccccggcaagggcgtggcgtatgcagatgagcacggcgcgcggaggctgccggtcacgctcggcctgggaccccatgtcccgcgcgcgatatccgagtgctgtcggggtgtcttcccctagcggcaacggtggagcgagggggctggagagggtgagggggctggggccgcacgagagaagtgaccgtgtgttgagagtgtggtgggcgcgagggtatgagaggaagccgcacggccagtccatacttacctggcaggggagataccatgatcacgaaggtggttttcccagggcgaggcttatccattgcactccggatgtgctgacccctgcgatttccccaaatgtgggaaactcgactgcataatttgtggtagtgggggactgcgttcgcgctttcccctgccttactggaagttgaaaggtagctgtta

SEQ ID NO: 24913 - DNA, 1314 bp, Artificial sequence
  DNA replication origin
tttcaacttccagtaaggcaggggaaagcgcgaacgcagtcccccactaccacaaattatgcagtcgagtttcccacatttggggaaatcgcaggggtcagcacatccggagtgcaatggataagcctcgccctgggaaaaccaccttcgtgatcatggtatctcccctgccaggtaagtatggactggccgtgcggcttcctctcataccctcgcgcccaccacactctcaacacacggtcacttctctcgtgcggccccagccccctcaccctctccagccccctcgctccaccgttgccgctaggggaagacaccccgacagcactcggatatcgcgcgcgggacatggggtcccaggccgagcgtgaccggcagcctccgcgcgccgtgctcatctgcatacgccacgcccttgccggggtcgtccccggcgctccggtctctcccgctcccggaccggggacctaccgacggcgtgggacaggcctgggtgtctccggggctggttgggcgcaagtgggcgcgcggccgggagtctgggacctgaaagggaggcctgagaggacgagagagtgccagagagagagagagagacagtgacagagagaagagagagacagaaagacagtgacagagagaagagagagagagagacaggagagaggggagagagaagacagagagagagagagagagagagagacagtgacagagggaagatagagagagagagaaggaagaaaagagggggagagagagcgagcgagcgagcgagcgagcgaaagagagtttgcggccccaccgcccagtccccaagggatctagcgtctgggccgggcagggctcgggtttgggctcaccttcctttcagcaaaaagcaagtttcggccccttctcttctcgccagcccaacagaagtcttccccacagggcacaactattatgaggttcgcctcctccccccggttaaacattaagcactaagatttccccaagcagcttgacagaacatcgttttccttgagcatcttccctggtaggcctgtcagaaacggctgtaactaacataggcggcgacgaaacctaggaaaacctaaaggaggggggccgggtggagtcgggggggaatcaagcctcttactttgagggaaaaaaaaatcaggacaaagtacaaagttgtccactatgcaaaccgtgcaccggtcgagttaagtgtataacgctggacaacaaaccatttttgaacacttgggaaaatctgtaaatacactattattattattgtattcttcttcttcttcttcttcttct

SEQ ID NO: 24914 - DNA, 786 bp, Artificial sequence
  DNA replication origin
gccatgatggtgggtgttctccgcggcgccgagtcccgggagcgcggtgggggcagcgggcgcggggcgggcgcggggaccgcgccagcctgtcactaatgtctccctttgtgtctcccccatctcatccttttccccggcgcgccgtgcccgccgaccccacaggaaggcctggacgacggcccggacttcctctcagaagaggaccgcggagtaagttctgccttcctttcgctcgcgggaccctggaccctccttccccatcctgggtccccgggtgtggtacggggatgggtccccagccgcgcggcactccctccccgtagtcctcctttcggtttcctcgctgcaccgcgccccaccctcccgcagcccttcctccctaggggccgctcggctccgattcccggggacccgcggccgctttcttgtcccccgccgctgttcgggccttctggtggacctccactcccacgcggggcggggtgcaggtggcgaagtggaaatggaggcgggagatggaacgcccccaccctccctcgacactttggggccatgaaaacccattctcggaccttcccagcggcaccctcaattttcacccggtgtggacatctcgaacttgctcccgcccacccttctgtctctctcaaatagtacaggtgtagtctacattaccattttgcaaggatttttatagtagccgaatcaactcctgtccagtgccctactagattatgcaaagtgcaggtagcccatggtatctttactttttctaatatccaa

SEQ ID NO: 24915 - DNA, 1349 bp, Artificial sequence
  DNA replication origin
tggggactccccccgcagcgctcttttgtctctctccttttcctcgccctgggcttctggcggggcgacttgaaagtgacgggtggcccccgggcccgcggttctctgcctcctggcctccacctggagaacgcgcggggccaactggcggcggcgcgcgtggggaacgcgggttggtagtggcggaggaggctgggtccctggccggcctcggggaccgctcctagccgctgctgtcgccctcccgccctcttggccgcggggcggcggaaactccccgcctcgcccctccccgccgcggccacacgcgcactccggggccagttccgggatcccctcccggcggccgaggggatccccgctagggtcagcgacgtggggccgcagtccctgggccggggaagggaattcctgccccggtgggcaggaaacgactgggctgggcttcgttttctcagtcgggagtggggtctgacgttggagctgcctggggtaggggagagaggagcggagttgagactcgctctagaagggaaggagggggcgtccctacgggccaggggtggagggcgcgggacgcgagagcctccgtccgcggcctcccgtccggcgctgctaggcctcggagtgcgacgcgagccgcgctctctgtcaccgcctcttcttggtgactaactcgtctccggggaactcagcgtctccgcccccgggagatcagtgaggaagaagtcgcggctgggcaaggggaagaggaagggggaagaagcagggccttgggcgcccctcgttttcactttcgcatagccgggaagcgcggtggaggttgttgggggagggggttaagacaagttcaactccagactcagccaggcgccgctttatccccctgcgcatgtgggctgcctgacatgtgccactcgctattgttttgataagaacgcggagctgctggtgtagttacagctcctacattttcagcccgtcgcttaatttatcccaagagatctagtcctgtgacacggagcaagggggtgtgttttagcgtcttgtgtttaaacaggatctctaagtgagaacctgacttgatcaatcactcgaagagggtgatcctctctttttcttatgctttatcctctgcactcaaaaggagtccctttgtggcttgcaaaccaagtgtaatagcaaccaagtaacgtcgcgtgtaaggaggcaccttttctgagtgggggcttgatcaagggagggttttgggcaaactgtacctgtctaagaaatgaatagtgaggttagaaaagttcctttgagcatttattttaagtaaacctttttcttcagctccacagaaaggg

SEQ ID NO: 24916 - DNA, 848 bp, Artificial sequence
  DNA replication origin
tcctgccgctgcccgggtgtcgagcgagcggagccgccgccgcccctgccccccgagcgcgccctacctcctctcgtcctgccgccgcctcacaatggggcaggacgccccgccgcggggggcagtgcgggagcggcggcggccccctcccccagcgccggctcctcgcccgccgccgccgccaggctcacaacgtgctcggcgcgcagctggccggccggccagcccaacgccgccagagcgctcgccgcgggcggaccccggagctgctccgctttgttcccggctcgcctccacttccccgccggcgccggccggctcccgagcgaccctcacctgcgatcacgccgactgccacttgtccaccttctccactacaaaggcaacgaggggagaccccgtcctcccaggggaccgcctctctccggccccgccgcgcccctggctgccgcttctcccgctgccactgcccgactccgcgcggggaattgcgtcccaccgccacttccccgcctctcggagctcctgggaagtttctgatctactttcggctctgaaggaggaagagctgttgggaggagcttttcactcctcgcttctacctttttattggctactcgatgacttttacagcctgtcactgatacaggaagagacagcggagagcctgggagaactacattattaattaatggagcaacccctcgtgaagattcagaagcatcctccatgtttgagattatcagccaaaagatctagggaaagcgctgggggttcataaacacatggctaacaaagtaaagccttcaagtctggcacagactcttgactacacgatgggaaaaggg

SEQ ID NO: 24917 - DNA, 933 bp, Artificial sequence
  DNA replication origin
cacctctgcccggccgcccctactgggaagtgaggagcccctctgcccggccagccgccccgtccgggagggaggtggggggggtcagccccccgcccggccagccgccccgtccgggagggaggtgggggggtcggccccccgcccggccagccgccccgtccgggagggaggtgggggggggtcagcccccccgcccagccagccgccctgtccgggaggtgaggggcgcctctgcccggccgcccctactgggaagtgaggagcccctctgcccggccagccgccccgtccgggagggaggtgggggggtcggccccccgcccggccagccgccccgtccgggagggaggtgggggggggtcggcccccctgcctggccagccgccccgtccgggaggtgaggggcgcctctgcccggccgcccctactgggaagtgaggagcccctctgcccggccaccaccccgtctgggaggtgtgcccaacagctcattgagaacgggccaggatgacaatggcggctttgtggaatagaaaggcgggaaaggtggggaaaagattgagaaatcggatggttgccgtgtctgtgtagaaagaagtagacatgggagacttttcattttgttctgcactaagaaaaattcctctgccttgggatcctgttgatctgtgaccttacccccaaccctgtgctctctgaaacatgtgctgtgtccactcagggttaaatggattaagggcggtgcaagatgtgctttgttaaacagatgcttgaaggcagcatgctcgttaagagtcatcaccaatccctaatctcaagtaatcagggacacaaacactgcggaaggccgcagggtcctctgcctaggaaaaccagagacctttgttcacttgtttatctgctgaccttccctccactattgtcccatga

SEQ ID NO: 24918 - DNA, 913 bp, Artificial sequence
  DNA replication origin
cctctgcccggctgcccagtctgggaagtgaggagcgcctcttcccagccgccatcccgtctaggaaatgaggatagtctctgtccggccgcccaccgtctgagatgtggggagcgcctctgctccgcctccccgtctgggatgtgaggagcgcctctgcccggccgccaccccgtctgggaggtgaggagcgtctctgcccggccgacccgtctgagaagtgaggagcccctccgcccggcagccgccccgtctgggaagtgaggagcgtctccgccaggcagccgccctgtctgggagggaggcggaggtgggggggtcagcccccgcccggccagccgccccgtccgggagggaggtggggggcgcctccacccggccgctgccccatccgggaggtgggaggcacctctgcctggccgccccttctgggaagtgaggagcccctctgcccggccaccatcccgtctgggaggtgtacccaacagctcattgagaacgggccatgatgatgatggcggttttgtggaatagaaaagggggaaaggtggggaaaagatagagaaatcagattgttgctgtgtctgtgtagaaagaagcagacatgggagacttcattttgttctgtactaagaaaaattcttctgccttgggatgctgttgatctatgaccttatccccaaccctgtgctctctgaaacatgtgctgtgtccactcagggttgaatggattaagggcggtgcaagatgtgctttgttaaacagatgcttgaaggcagcatgctcgttgagagtcatcaccactccctaatctcaagtacccagggacacagacactgcggagggccgcagggtcctctgcctaggaaaaccggagacctttgttcacttgtttatctgctgaccttccctc

SEQ ID NO: 24919 - DNA, 1068 bp, Artificial sequence
  DNA replication origin
tcttttccccacctttcccccttttctattccacaaaaccgccatcatcatcatggcccgttctcaatgagctgttgggtacacctcccagacgggatggtggccgggcagaggggctcctcacttcccagaaggggcggccaggcagaggtgcctcccacctcccggatggggcagcggccgggtggaggcgccccccacctccctcccggacggggcggctggccgggcgggggctgacccccccacctccgcctccctcccagacagggcggctgcctggcggagacgctcctcacttcccagacggggcggctgccgggcggaggggctcctcacttctcagacgggtcggccgggcagagacgctcctcacctcccagacggggtggcggccgggcagaggcgctcctcacatcccagacggggaggcggagcagaggcgctccccacatctcagacggtgggcggccggacagagactatcctcatttcctagacgggatggcggctgggaagaggcgctcctcacttcccagactgggcagccgggcagaggggctcctcgcatcccagacgatgggcggccaggcagagacgctcctcacttcccagacggggtggcggccgggcagaggctgtaatctcggcactttgggaggccaaggcaggcggctgggaggtggaggttgtagctagccgagatcacgccactgcactccagcctgggcaacattgagcactgagtgagcgagactccgtctcaatcccggcacctcgggaggccgaggctggcggatcactcgcggttaggagttggagaccagcccggccaacacagcgaaaccccgtctccaccaaaaaaatacaaaaaccagtcaggcgtggcggtgcgcgcctgcaattgtaggcacttgggaggctaaggcaggagaatcaggcagggaggttgcagtgagccgagatggcagcagtacagtccagcttcagctccgcatcagagggagacggtggaaagagagggagagggagaccgtggggagagagggatctctaatttttgtgaca

SEQ ID NO: 24920 - DNA, 1269 bp, Artificial sequence
  DNA replication origin
ggagcctgactcagtgcgtcgggggcaggaagcaccaacctgagcattgacatcagcacccaaggacaccaaaagctccacgatgcccaggtagccatggatagaggctaagtgtagacacgtgtggcctggaagaacaaaaggaaaaaagtataaccacctgtttcaaccctcactcctttcacctattcttttatggaacaagtagtcttatcttctgaattttaagaacccacagtctgggttctgaaagaactttataaaggcatccaataggcactttgcacacatattttctcaaccttccaaatgttaggagtttaagctcttgcctggactccttaagttggcccacctgccccttctccacgtcacctgccctccgagggggtggggcagggcagggaggcagacataccattgtagttggtagccttcaggatggagtggaggtgcggggtggtgcaggactgagtcaggactcccacgctggccaggcagccctgctcacaggcaaggtgtaggggggtatttcctcgaaagtctcggagctcaggatcacagccagctcccagaagtgcctcagcaatttctggctggttggtgatcacagccaagtggagtggagtctacgaatgcaagagagaccagagaaagtaagccatggaccaaacccacaccccgagttcccctcaacccgtgtctcctggttgggtgctgctcctcctagacaggggggtggggagggctggcaaatagcagaggctccaggtgggtcataaagacctcaccaaatcagtggaatttccttcactctctaggatgtgggctgatgtgaagtaaaaggtgagggtaaatagtgctcagtggccctgaattcagaaaggatctggggtgactctgctacatcagctacgtcccagggtcagagagaacccgggccaggcaagcggcgcacctgctgcaggttgttctggaagttgaggaaggccaggtctcccttcacctggcggatcacttccatggtcagtgccttttcttcatggatgatggccaagtgcaggaacctgtggggaagagagggaaaaaccccaggggtggtgagtgcaccgcgtggggcccagggaggcgcgggctgcgggggattgcgcaaggccggggtttctggaggccgaggccgcggtgttttccgcgaggttattatgagctgagtgttcctggcaggcgcccagggactttccgcccccctccccccgcggccccggcggg

SEQ ID NO: 24921 - DNA, 1686 bp, Artificial sequence
  DNA replication origin
ggtgccgcggcgcccgcccggctgcatcgctggtcccccggctcgggctccaggcccggcgcctcccacccccaggccgcgcgcgtcccgccctcccgacgacccccagccccgggcctccgccacttacgagtccccgtcctcggtgagctgctgcttccagggctccgagccgcgcggcacctcctgcggctcgaggcggatctcctgcagctccttgaccatctgctcgtactcctcgtctttcatggagtccaggccgctgtcgtggcggtcgtccagtagccgctccttcttcagcccgtcgcgggggccctccatggcccactcctgggggcgctcggccgcctggaacatggcgcggacgagctgcgggcgctgctgcgggtgcgctgggccgcgggctgcgcgctgcttcctcgctggggcgctggcgggcgggacggcggcacggactgctgtgggctctgcagcgccgccgcggcgccctataaacgctggctggggatttctctggggcggggtcaggctcggggaatttccaagccagtcagaccagaaaaagagaactggcttcgtcctctgctagggggaaaaagaagcctaaaccctgagctggggttcatcggagaaactccctgcgatgagccactagggtcacggacagggaactttttgatgagcgccgagtggctggaaagtccttccgaccaggccccctccccccggtacttccctgcagcctgcaccctgtaatcctgtccctctgcaagtgagccttctttccctggggtttcccacgatcgatttgaattggggtcgtcggctgctgagatcccaaggacgccgacctgatgggcggtccctctttggggtttgccaacctgccggtcctttccgttttttgatcttttgaaaacgcaagagtggaaatgatggctgggcgtagggatttgctttccccagacttctaaggggaaggacgcactgtggttagggggctgcaggccgcgccggtgtttctgcctataccaggctctttgcagcaaaggaacttttagcttcgcccccacccccccacgcacccccgccaggtagaagttgtgaaagctttggaggagtgaaaagcctaaatccttggagaactctcaaatcacttcctagggatgaacagccctgttgactgggggaggggcaaacgctccctgtatggggaaactgctgaataggaccatgattttttttgtttcccaagtaaagcaaggtgttaatgtttgtagtggtggttgtggataccttgcaatagcagagtagctattgtgttcataagtagctattcgtttatgctatctgacctacattgtgctcccgcagaaaaaggatcgtgagcctacttctgggcacccaaattcgaggagaacttagagaaggaggctgaagaatgagtttagttagtgccttaaccgcgattggaccttaaggaccactaagaaagtagttgccaggcatcctgcgggaggctcaaggtagtcccatcctgcccgcccctccttgctctcttgtcctgggggacagtagcagttggacccattcacgccacctgggtagaaaggggtttcggctcactatgctctggtttcacctgcagaaatataatttatgctctccactccacctccacctcca

SEQ ID NO: 24922 - DNA, 949 bp, Artificial sequence
  DNA replication origin
ccagccgcgaccccgtctgggaggtgaggagcgtctctgcccggccaccccgtctgagaagtgaggagaccctctgcccggcaaccgccccgtctgagaagtgaggagcccctccgcccggcagccgccccgtctgagaagtgaggagcccctccgtccggcagccaccccgtctgggaagtgaagagcgtctccgcccggcagccaccccgtccgggagggaggtgggggtcagcccccgccaggccagcctcccggacgggagggaggtgggggggtcagcgccccgcccggccagccgccccttccgggagggaggtgggggggtcagcgccccgcccggccagccgccccttctgggagggaggttgggggtcagccccctgcccggccagccgccccgcccgggaggtgaggggcgcctctgcccggccgcccctactgggaagtgaggagcccctctgcccggccaccaccccgtctgggaggtgtgcccaacagctcattgagaacgggccaggatgacaatggcggctttgtggaatagaaaggcgggaaaggtggggaaaagattgagaaatcggatggttgccgtgtctgtgtagaaagaagtagacatgggagacttgtcattttgttctgtactaagaaaacttcttctgccttgggatcctgttgatctgtgaccttacccccaaccctgtgctctctgaaacatgtgctgtgtccactcagggttaaatggattaaggtcggtgcaagatgtgctttgttaaacagatgcttgaaggcagcatgctcgttaagagtcatcaccactccctaatctcaggtacccagggacacaaacactgcggaaggccgcagggtcctctgcctaggaaaaccagagacctttgttcacttgtttatctgctgaccttccctccactattgtcctatgaccctg

SEQ ID NO: 24923 - DNA, 1341 bp, Artificial sequence
  DNA replication origin
tcccaaggcagaagaagttttcttagtacagaacaaaatgacaagtctcccatgtctacttctttctacacagacacggcaaccatccgatttctcaatcttttccccacctttcccgcctttctattccacaaagccgccattgtcatcctggcccgttctcaatgagctgttgggcacacctcccagacggggtggtggccgggcagaggggctcctcacttcccagtaggggcggccgggcagaggcgcccctcacctcccgggcggggcggctggccgggcagggggctgacccccaacctccctcccagaaggggcggctggccgggcggggcgctgacccccccacctccctcccggaaggggcggctggccgggcggggcgctgacccccccacctccctcccgtccgggaggctggcctggcgggggctgacccccacctccctcccggacggggtggctgccgggcggagacgctcttcacttcccagacggggtggctgccggacggaggggctcctcacttctcagacggggcggctgccgggcggaggggctcctcacttctcagacggggcggttgccgggcagagggtctcctcacttctcagacggggtggccgggcagagacgctcctcacctcccagacggggtcgcggctgggcagaggcgctcctcacatcccagacggggcggcggggcagaggtgctccccacatcccagacgatgggctgccaggcagagacgctcctcacttcctagatgggatggcggccgggcagagacgctcctcactttccagactgggcagccaggtagaggggctcctcacatcccagacgatgggcggccaggcagagacgctcctcacttcccagacggggtggcggccgggcagaggctgcaatctcggctctttgggaggccaaggcaggcggctgggaggtggttgtagcgagccgagatcacgccactgcactccagcctgggcaccattgagcactgagtgaacgagactccgtctgcaatcccggcacctcgggaggtcggggctggcggatcattcgcggttaggagctggagaccagcccggccaacacagcgaaaccgtctccaccaaaaaaatacgaaaaccagtcaggcgtggcggcacgcgcctgcaatcgcaggcactcggcaggctgaggcaggagaatcaggcagggaggttgcagtgagccgagatggcagcagtacagtccagcttcggctcggcatcagtgggagaccgtggaaagagagggagagggagaccgtggagagggcgagggcgagggcgagggcgagggagagg

SEQ ID NO: 24924 - DNA, 1935 bp, Artificial sequence
  DNA replication origin
attcatgcctgtaatctcagcactttgggaggctgaggtgggaggattgcttgaggccaggagttcaagaccagcctgggcaacatagcgaaaccccattgcaaaataaaaaaaaaatagtaaatacataccacaggtttaatagacagtataaaataatccaattattacacatttatgggcatgaatcttatcatatggaaacagaggctcagtgaagttaaagagacttatctaaatactgaacgactaattggtttcagaacctagaccacaattgtttgaatctaattccacttccatggtttcttcattgtatcacactgcctcaaaagtagaagatgtggtcgctgccctgaaggacttttgcaatctcctaaagggataagacatatccataaaacaatgattgaataacgaaagtaaaatgaagtgcagtatatgtgttacagctaaggaatagttgggaaggtcaagaaggtgagaaatcacaggctggaggatatggagagtaatcacaggccagaggacacggagagtaatcacaggccggaggacacggagggtaatcacaggccggaggacacggagggtaatcacaggccggaggacatggagagaaatcacaggccggaggacacggagggtaatcacaggccggaggacacggagggtaatcacaggccggaggacacggagagaaatcacaggccggaggatatggagagtaatcacaggctggaggatatgcagagtaatcacaggccagaggatatggagggtaatcacaggctggaggatatggagagaaatcacaggccggaggacacggagggtaatcacaggccggaggacacggagggtaatcacaggccggaggacacggagggtaatcacaggccggaggacacggagagaaatcacaggccggaggatatggagagaaatcacaggccggaggatatggagggtaatcacaggccggaggatatggagagaaatcacaggccggaggacacggagagaaatcacaggccggaggatatggagagaaatcacaggctggaggatatggagagaaatcacaggccggaggacacggagagtaatcacaggctggaggatatggagagtaatcacaggctggaggatatggagagtaatcacaggccggaggatatggagagaaatcacaggccggaggacatggagagaaatcacaggccggaggatatggagggtaatcacaggctggaggatatggagagaaatcacaggccggaggacacggagagtaatcacaggctggaggatatggagagtaatcacaggctggaggatatggagagtaatcacaggctggaggatatggagagtaatcacaggctggaggatatggagagaaatcacaggctggaggatatggagagaaatcacaggctggaggatatggagagtaatcacaggctggaggatatggagagaaatcacaggctggaggatatggagagaaatcacaggctggaggatatggagagtaatcacaggccggaggacacggagggtaatcacaggctggaggatatggagagtaatcacaggctggaggatatggagagaaatcacaggctggaggatatggagagtaatcacaggccggaggatatggagagtaatcacaggctggaggatatgcagagtaatcacaggctggaggatatggagagaaatcacaggctggaggatatggagagtaatcacaggctggaggatatggagagaaatcacaggctggaggatatggagagtaatcacaggctggaggatatggagagaaatcacaggctggaggatatggagagaaatcacaggctgggagagatggagagaaatcacaggctgggggatatggagagtaatcacaggctggaggat

SEQ ID NO: 24925 - DNA, 963 bp, Artificial sequence
  DNA replication origin
tccgggagggaggtggggggatcagccccccgcccggccagccgccctatccaggaggtgaggggcgcctctgcccggccgcccctactgggaagtgaggagcccctctgcctggccagccgccccgtccgggagggaggcggggggggggggtcggccagccgccccgtccgggagggaggtggggggatcagccccccgcccggccagccgccctatccaggaggtgaggggcgcctctgcccggccgcccctactgggaagtgaggagcccctctgcctggccagccgccccgtccgggagggaggtggggggatcagccccccgcctggccagccgccccgtccgggaggtgaggggcgcctctgcccggccgcccctactgggaagtgaggacccctctgcctggccagccgccctgtccgggagggaggtgggggggtcagccccccgcccggccagccgccccatccgggaggtgaggagcgcttctgcccggccgcccctactgggaagtgaggagcccctctgcccggccacgaccccgtctgggaggtgtgcccagcggctcattggggatgggccatgatgacaatggcggttttgtggaatagaaaggcgggaagggtggggaaaaaattgagaaatcagatggttgccgggtctgtgtggatagggaagtagacatgggagacttttcattttgttctgtactaagaaaaattcttctgccttgggatcctgttgatctgtgaccttatccccaaccctgtgctctctgaaacatgtgctgtgtccactcagggttaaatggattaagggcagtgcaagatgtgctttgttaaacagatgcttgaaggcagcatgctcgttaagagtcatcaccactccctaatctcaagtacccagggacacaaacactgcggaaggccgcagggtcctctgcctaggaaaaccagaga

SEQ ID NO: 24926 - DNA, 1279 bp, Artificial sequence
  DNA replication origin
ggcggctggccgggcagggggctgaccccccctcccccctcccggacggggcggctggccgggcggggggctgacccccccacctccctcccggatggggcggctggccaggcggggggctgacccccccacctccctcccggacggggcggctggccgggcagaggggctcctcacttcccagtaggggcggccgggcagaggcacccctcacctcccggacggggcggctggcccggctgggggctgatccccccacctccctcccggacggggcggctggccgggcggggggctgacccccccacctccctcccggacggggcggctggccgggcagaggggtcctcacttcccagtaggggcggccgggcagaggcgcccctcacctcccggacggggcggctggcccggctgggggctgatccccccacctccctcccggacggggcggctggccgggcagggggctgacccccccacctccctcccggatggggcggctggccgggcggagacgctcctcacttcccagacggggtggctgccggacggaggggctcctcacttctcagacggggcggttgccaggcagagggtttcctcacttctcagacggggcggccgggcagaggcgctcctcacatccgagacagggcggcggggcagaggtgctccccacatctcagacgatgggcggccgggcagagacgctcctcacttcctagatgggatggcggcggggaagaggcgctcctcgcttcctagatgggatggcggccgggcagagacgctcctcactttccagactgggcagccaggcagaggggctcctcatatcccagacgatgggcggccaggcagagacgctcctcacttcccagacggggtggcggccgggcagaggctgcaatctcggcactttgggaggccaaggcaggcggctgggaggtggttgtagccagccgagatcacgccactgcactccagcctgggcaccattgagcactgagtgaacgagactccgtctgcaatcccggcacctcgggaggccgaggctggcggatcactcgtggttaggagctggagaccagcccggccaacacagcaaaaccccgtctccaccaaaaaaaaacgaaaaccagtcaggcgtggcggcgcgcgcctgcaatcgcaggcactcgtcaggctgaggcaggagaaacaggcagggaggttgcagtgagccgagatggcagcagtacagtccagcttcggctcggcatcagagggagaccgt

SEQ ID NO: 24927 - DNA, 1243 bp, Artificial sequence
  DNA replication origin
gacgatgggcggccaggcagagacgctcctcacttcccagacggggtggcggccgggcagaggctgcaatctcggcactttgggaggccaaggcaggcggctgggaggtggttgtagccagccgagatcacgccactgcactccagcctgggcaccattgagcactgagtgaacgagactccgtctgcaatcccggcacctcgggaggccgaggctggcggatcactcgtggttaggagctggagaccagcccggccaacacagcaaaaccccgtctccaccaaaaaaaaacgaaaaccagtcaggcgtggcggcgcgcgcctgcaatcgcaggcactcgtcaggctgaggcaggagaaacaggcagggaggttgcagtgagccgagatggcagcagtacagtccagcttcggctcggcatcagagggagaccgtggagggagggggagggggagggggagggggagggggagggggagggggagggggagggagagggctactcgtaggtatttactcaagaaaaaaatgaaagcatgtgtccatacaaagacttgtacacaaatgttaatagcagttaataaccaaaagcacctgcaaataacccaaattcaccttcaacaggttaataaattgtcatagattcaaacaatggaactacttacttatatgaacgacatgaataaatttttttttttgagacagagtctcattctgtcacccaggctgtagtacagtggtgcaatctcagcttactgtaccctccatctctcaggttcaagtgattcttctgcctcagtctcccaagttgctgggattaacaggtgcgtgccacagggcccacctaatttttttttttctgtattttttgttagagacagggtttcactgtgttgcccaggttggtctcaaattcctgatctcaagagattctcctgccttggcctcccaaagtgctgggattacaggtgtgggccaccatgctcggctgagcaacatggataaatatgaaaataattactgagagtgaaagaagccacactaaaaagagtacatactgtatgattttactcatgtaaagttctagaaaatgtgaactataatgacagaaagcagattagtggttgtctgggtatgggtgaggcaggagtaagaaggcaggattacagcagtgcaggaagaatcttttggaagtgaagattatgttcattatcttgatatgggcaattttttcacctatgta

SEQ ID NO: 24928 - DNA, 1096 bp, Artificial sequence
  DNA replication origin
gcaacagaagtacctgtcggcgccggagcgcgagcacctggccagcatgatccacctgacgcccacgcaggtcaagatctggttccagaaccaccgctacaaaatgaagcgccaggccaaggacaaggcggcgcagcagcaactgcagcaggacagcggcggcggcgggggcggcgggggcaccgggtgcccgcagcagcaacaggctcagcagcagtcgccgcgacgcgtggcggtgccggtcctggtgaaagacggcaaaccgtgccaggcgggtgcccccgcgccgggcgccgccagcctacaaggccacgcgcagcagcaggcgcagcaccaggcgcaggccgcgcaggcggcggcagcggccatctccgtgggcagcggtggcgccggccttggcgcacacccgggccaccagccaggcagcgcaggccagtctccggacctggcgcaccacgccgccagccccgcggcgctgcagggccaggtatccagcctgtcccacctgaactcctcgggctcggactacggcaccatgtcctgctccaccttgctatacggtcggacctggtgagaggacgccgggccggccctagcccagcgctctgcctcaccgcttccctcctgcccgccacacagaccaccatccaccgctgctccacgcgcttcgacttttcttaacaacctggccgcgtttagaccaaggaacaaaaaaaccacaaaggccaaactgctggacgtctttctttttttccccccctaaaatttgtgggtttttttttttaaaaaaagaaaatgaaaaacaaccaagcgcatccaatctcaaggaatctttaagcagagaagggcataaaacagctttggggtgtctttttttggtgattcaaatgggttttccacgctagggcggggcacagattggagagggctctgtgctgacatggctctggactctaaagaccaaacttcactctgggcacactctgccagcaaagaggactcgcttgtaaataccaggatttttttttttttttgaagggaggacgggagctggggagaggaaagagtcttcaacataacccacttgtcactgaca

SEQ ID NO: 24929 - DNA, 1101 bp, Artificial sequence
  DNA replication origin
aagcacacgactccgttctcagtgtctgacatcttgagtcccctggaggaaagctacaagaaagtgggcatggagggcggcggcctcggggctccgctggcggcgtacaggcagggccaggcggcaccgccaacagcggccatgcagcagcacgccgtggggcaccacggcgccgtcaccgccgcctaccacatgacggcggcgggggtgccccagctctcgcactccgccgtggggggctactgcaacggcaacctgggcaacatgagcgagctgccgccgtaccaggacaccatgaggaacagcgcctctggccccggatggtacggcgccaacccagacccgcgcttccccgccagtaagtgaggccgccccactgcggggccgcgggctgagctcaggaggtgcggcgagagccgtccagaaggcgcggcgccggcaggctgcgcgctgggcatcagggagggcggcccggcagcggcgccagggacttgggtgcgggagctggggatgcttccccctgctcggctgggggtccaagaacaggcacttggtagcgctggggtcctgcggtcagatgcgggtactcggcgtctcctaggcgcggtggactggcagctctgctcggcgcagaagacctcggggagccaagggaagcgaccccgagctcaaggagcaggggcgagcagagcgcggagaggctagaccgggccaggagggaggctgccctgttgggaggcactcgagcgcccggcccggccctctctccagcggagtctgggcaggtgggaggactcgcagttccagaggggactctaagggtccgagcaggtgccctcactggggcctgacaggagagaagccaagaggcaaagcgtctgggggctccagcttttggaagtcaacaccccctctcctaacctctccaaactggggtctaccgtaggaccccagctcccggcctgagcccagttcgccgcctgtggccagctaatcctaatgctctgacccgggctgggcacgaaaggagcagaagcggcctttcccccactgcgtcttttggttcgaaagagggaactgagactgagggagggcagccag

SEQ ID NO: 24930 - DNA, 1525 bp, Artificial sequence
  DNA replication origin
gcaagttatttttttaaaaaatagagtatttttcctcgtagttcgagaataaaatgtgtggggttgggtcccctgcgcgcctgcggggaacgtaggcgggagtcgtgccccccagaccggtgttcgcatcgctggctcgccccttgactggctaagtggggcccggccccagctggatcgaagggcgggttgcagtcccgacacggctttaggaagatacctgggggatggaggggtggtgatgtcagggttgggcgcgggaagaaaaggagaggaggaagctgaggcaactttgggattcttgtcagcgggaggcgtcactggccccagagtgactccgactctccgctgggctcccagagctgctggcgtttcgaataccgaaaagtcaaccctgtggaccacgacagggcagaaggagtttctccggagatgagccggcgaggccaggtgcggggcgcgctgcaccggagcagcccaggccgggccgcaagctgtttccagagtgcaggagccaagtgctcggggaccctttgaaaagtgcctggggacctgaagagcaccggggaatttgtaacccctatttaagcctgcaagtgcctaagttagctgtgatttcctgtctcctcatggcgcagtacctggccagggtggggaggaggacgtgaagacatcaaagggtcgggggaacgaccggcacagggcttttcctctgggcagatccgggaggacgcgactcccagctgagggagggccgcctgggggagccttgggaatccgagattggggcaggtccaccccggccagtgcacactagcaccccttggatttgtaactgccccgctagggcctcttgtgcaagcagtcactttctcacagaagcgacgacctcgctcccaggcacccgctgctgggagatgcgccagaggagagcagttggggcatcaggtgcggggaagggagccaagggcccttatggaggtctctaaggaggagtcatgggcctgttaggggctctagctttcttgtccaaggaggaagaaggggaggatgaagggtggctgaggcagtgttatcacctgggattttggggggtggagagagaaagagagaaggggagagggggaagggagtggggtgtttgggtctcagctgccggccaccttgccttccatatggatgcggttatcttagaagaatctcgatccttaaacctctttttgtcttgggaactgaaaagggcattgtcaggcctgaaaaggacctagacaaaatccgcactgtttggattcaggactctgtttaatcagtccctggtgacaatgtagtgggtgttaggcaggacaatagtatctttttaaaccttgtggccttcaggaagacaaagggcttgaattttatgggcttacaacttcaattagaacagtgccagtgtgcatgggagattatcaaatttgtatcataaaacccctttctaataaatgattgctggggagggagcttgaacattgtaagacagatattg

SEQ ID NO: 24931 - DNA, 1143 bp, Artificial sequence
  DNA replication origin
gccggaagcgccgctccaactccagcgtctgcgccttggagaatagcacccgccgcttcttccttttctcggcgtccgagcccggagacgcgggcctagcggacggccgctgcgacgagtctggcgggctggtctccaggctgctctcgtccgaggctagggacagcaaaggagacacgggtgggtgagacgccggaccctacgagggcctgctgcccttctggcgcgggcgtggaggcactggccagagggcacgcccactagcccgagactttcgggatgaggccatttcctgagtccacatctggacatccacctctccgaatgcggtgacctcattcataccacagcggtcatcagcgggcctgagatcgtgccccgaaaaaacccaccccggggccctcttaacatgtccgcaccggtagttgcgctggccgaccagtttatcacaagctgggtcaccagcgccggcctcctccaggtcgactgcactgcagtgtgccgaggtttgcggagccctgagtgggaacggggtgggggtaaactcgccaacactggccatcccagacggaggcctggagatcgtggccgtgttttcaggcatggagagggggcggggggtggggtgggggcggcaggtggcggcgcgttttaaatttcaattattccgacctctagaaatcgtcagacacagaaaccccaaatctcggagcaccagtgccaggcagggatctgctcttaggatgtgccgaccgggatgaatgcgttaggggttcgaggacagggctcccgtttccaagactgaggaaatctagactctgggctgggatttcggctttccggcccctcgtgggctgggcccttgattctgctgccccacgcctcctacctcccaccccgcaccgcaatccaccacgcacttacaagggtagtggccgcgctccgaatccagccaggcggcgcaggggtcgggctggggggcgcgtggttctggctcccgcctcggcaggtgttgcgcgtcctgctcgggtaaatctagaaggctgcgcacggtgaagctcaggcgtccagaggtggccatggccgaggaggggaaggaggcgggggcagggcaggctgggaacggaggggcggccgggacgc

SEQ ID NO: 24932 - DNA, 1261 bp, Artificial sequence
  DNA replication origin
cagaaccccgtttacggctttccgcgcatacggaggttgctggggaccccgacacctgcgcgccctcgactggggcccgctccagcagtgaagacccaggcccttccctgggccgtggctgctcttggtgcctcatgggagcgcccggggtagggactcggctagtgacctgtaggacatgaggggcgagctgggagccgattcgcccacggcgtctccttcgccatggaggccccccacccattccactccggggttgcggccacgcaccataagagcaccttcaggtctgagctctttaggggtgggagtaggcagttcgtgagtccgggaaggcctgcggggtttcccgcctgctgcggacttagcgtggggccgaccggggctggcgagggctggcgaggactggcggggacccgcggggctgagccagctctcgcgaagccctcaagtgaggaacggcgcttgtggctgcgcgctctccgcagccaagttgcagggtccagcaggggctcaggtcctgttccctccgcagatcccggatctagggctctagtggtctcggccggagggaaggtgacgcgcagtgggcgcagacgcagagtgcggggcgccgaacgtgggaaggagcgggttcagcgcgctggtgagagtttcaggaaatccgggagagggcggtatttaccagtcccttccccgagagcaaccaggcaaatcggggaaggttagaggtgggggacctgcctgagccgggacaaaaaactttggagctagggccttctaaccctggagacttgccgactccggggcgggctctcgcactcaagtcccgagatgggatgattttccaactttcgtccagcctctccttccgctcccgccgctctgctagcactcccgcactctctccctgggtcacaaccctcgcctgcggaatacctgtctgaagggcgcgtcagtagaagcttcgtttcatactacctttcttactgttctcttcatctaaatcgcaggacattattctcggcttcatttccacatagcattcggcagtggacaaggagtaggcggacccgaacctgaacctgacagctgatgccgtgaagtggacacttgaagttcttggtttggctttagggagcgtttagggaatgtgttaggcagcaatcgggcaagcatgagctgtagcccaacccttccctccgtgggaaaattcaagttaggacgcaatgcgaggcctcttaaatctttaagatcctcg

SEQ ID NO: 24933 - DNA, 1061 bp, Artificial sequence
  DNA replication origin
tagagaagggcgtgggcgccaatctaggagacaaagcctgagccgctgcggtgagccaacccaaacccatccgcgggtcttctttccagagacattttcggagccgagggcgcctctgcgagagcgctgcgaacaggttccgacgcgccggagatcgcgcgacgaatctgcgcctcgaaccctcgctttccagcagtcgccggattgctgctccacagggagccaacgcgcttgaggaccagcccagccggggctctctggatcagtaggctgtgcaggctgcgagctcgttgacgcatctcagcccactcccttgtcctcccgcctggcgaagatgtccgccaagcctgaagtcagcttagtgcgcgaggcttctcggcagatcgtggccggtggttctgcaggtaaggacagcccgccctgccccgccggaggctagtcgctttccccaccgcgtgtcctgaaaccgttgcccagacaggtctccttactgaagttctgccctcttcctcaaaattcagcgctcccggagcagtgcttgagcccctagaggcgcgagagcagaggaggccgggagttgattgcgagtagtgggtgccccaagtaaagttgcctcggcgtccgcgccggccgctctcgggttcccggcattgtccgttcctagcctgtaaagcaagtggcagagccccaagggcagcgactttgaggcggtctttttgccttgctacctattttacttgaaaatgatccagttcggtctgacttagttttatcaattgtagagtctttcttcaagctcgctcaggtcttacataaatcctgcattcctcatcaaagtacttacaggactccacaggacttcttattgcatactgtgcttgcttggggatattcgtgccttaaataaggatattaaaattaaatgcatatgtaacacacataaacacctttgatataatgggctcacgttaatttatagagttatgctgtggggaaaaaataaacctttagaaaaaaatgttgtaattaatcttagaaatacttttaaatgtagctggaga

SEQ ID NO: 24934 - DNA, 910 bp, Artificial sequence
  DNA replication origin
ggccagccgccccgtccgggagggaggtggcggggtcagccccccgcccggccagccgccccgtccgggaggtgaggggcgcctctgcccggccgcccctactgggaagtgaggagcccctctgcccggccagccaccccgtccaggagggaggtgggggggtcagccccctgcccggccagccgccctgtctgggagggaggtgtgggggtcagccccccacccggccagccgccccgtctgggagggaggtggggggatcagccccccgcccggccagccgccccgtccgggagggaggtgggggggtcagccccccgcccggccagccgccccgtctgggagggaggtgggggggtcagccccccgcccggccagccgccccgtccgggagggaggtggggaggtcagccccccgcccggccagccgcccggtccgggaggtgagaggcgcctctgcccggccgcccctactgggaagtgaggagcccctctgcccggccaccaccccgtccgggaggtgtacccaacagctcattgagaacgggccatgaagagaatggcggttttgtggaatagaaaggggggaaaggtggggaaaagattgagaaatgggatggttgccgtgtctgtgtagaaagaggtagacatgggagacttttcattttgttctgtactaagaaaaattcttatcctgctgatctgtgaccttacccccaaccctgtgctctctgaaacatgtgctgtgtccactcagggttaaatggattaagggcggtgcaagatgtgctttgttaaacagatgcttgaaggcagcatgctccttaagagtcatcaccactccctaatctcaagtacccagggacacaaacactgcggaaggccgcagggtcctctgcctaggaaaacc

SEQ ID NO: 24935 - DNA, 1239 bp, Artificial sequence
  DNA replication origin
ctccctcccggacggggcggctggccgggcggggggctgacccccccacctccctcccagacggggcggctggccgggcggggggctgacccccccacctccctcccggacggggcggctggccgggcggggggctgatccccccacctccctcccagacggggcggctggccgggtggggggctgacccccacacctccctcccagacagggcggctggccgggcagggggctgacccccccacctccctcctggacggggtggctggccgggcagaggggctcctcacttcccagtaggggcggccgggcagaggcgcccctcacctcccggacggggcggctggccgggcggggggctgaccccgccacctccctcccggacggggcggctggcctggcgggggctgacccccacctccctccctgacagggtggctgccgggcggagacgctcctcgcttcccggacggggtggctgccgggcggaggggctcctcacttctcagatggggcagttgccaggcggagggtctcctcacttctcagacggggtggccgagcagagacgctcctcacctcccagacggggtcgcggccgggtagaggtgctcctcacatcccagacggggcgacggggcagaggcgctccccacatctcagacaatgggcggccaggcagagacgctcctcacttcctagatgggatggcggccgggaagaggcgctcctcacttcctagatgggatggcggccgggcagagacgctcctcactttccagactgggcagccaggcagaggggctcctcacgtcccagacgatgggcggccaggcagagatgctcctcacttcccagacggggtggcggcctgctcggcactttgggaggccaaggcaggcggctgggaggtggaggttgtagcgagccgagattacgccactgcactccagcctgggcaccattgagcactgagtgaaccagactccgtctgcaatcccggcacctcgggaggccaaggctggcaggtcactcgcggttaggagctggagagcagcccggccaacacagcgaaaccccgtctctaccaaaaaaatacgaaaaccagtcaggcgtggcggtgcgcgcctgcaatcgcaggcactcagcaggctgaggcaggagaatcaggcagggaggttgcagtgagctgagatggcagcagcacagtccagcttcagctcctcatgagagggagac

SEQ ID NO: 24936 - DNA, 1128 bp, Artificial sequence
  DNA replication origin
ggagcccttgcccggcttgtccggggagcgtgccaccttgacgaagcagtcattgaaggacagcgagtggcggatggagttctgccagcgctgctggttctgccggtaataggggaagaggtccatgatccactggtagatctcgctcagcgtgagcatcttgctgggcgcctgctggatggccatggtgatgagcgagatgtacgagtagggcggcttggcgtgcgggtagctgcgcttgaacgtcttggcgtcgccgccgccgcccgcgcggctgcggcccaggttggacggcgcgtacgccatggggctcatgcacgggttcatggcggccgcgtaggggcccaggccattcatggaggccgcctgctgcgcacccatggcgcccatgccgctcgggctcagcgccgtacccatggccgtcacgccggccgcagtcatgctgttcatggcgcccgccgagccccccggcatgccggctactgcgccgggactcaggccggcccctaggcccgggttggcataggacatgttgaaggacgccggggtcatgttgccgctcgtagtcatggtgttcatggtcatgtaggtgttcatggagttcatggagcccaggcctgagttcatgttgctgaccgggacggaggagtaggcctggagtggagacagcgagtgaagaagccccggagggcggggttagtggtgggcactggagggcggccgtccgggacctaacccgggggcaagtgcagagcactttgcagaacacgggacgcccccacccggggcaaatggctaagcgccctccccagaccgagcaaagatgtcttgcacggcagggggaaaatcctagcgcggcaggcatgaaagataaacgctcacagaaaatatgaccccaggaagatgtgtaatcgccttacacgccaggctcaggggctggcttccagggccccctcatcgcctcctccatccacgccaggcggtatcccaagtctccaccccaaccagcctcggcaaagcgccctttggggggaaatcgttgatagagcaaatcacctatggacatgggaccccctgaatcatctgtttcccaacaagtggctttattgtcctaggggtttttgccta

SEQ ID NO: 24937 - DNA, 1163 bp, Artificial sequence
  DNA replication origin
aagagcctaaacgctatccgatttgggataaagaaaaaggagcattaaccttgactatgcctttggctccagccacatttttaagagtaagttgctgggcaggagggggagggctagtcacggaacgaaactgtaagccggaccaggtgtgaggaggggaggtgataaaaagattatagggtggaggaggagaggctgaggaagaattgggaactagctcggcctggcgaggagcagcctggggaggaagggagaggtcatatgggtctatagaaaaggaagattagaaagactcagcaacgcttggcgttggtactgaggggacaggtgggagggaaagaaggaagatttgggacgagttgcactgggcacagagactaggaagggactgatatgtaaaagaatgcctggacgtcaggcacctaagactgtttgcctattttacgacaagaattatttagatcttgcaggatggaaaaattcaaagtgccattttctggctatttggaactactgtcgagtttgtattggggtcaagcggcattgcagaagaaaataaggcatttaggttttaggtcaggtgtgaattgaagaggttttaagtttttgagaacacaggccaagggagtagaaggaggaatggagggtggaagattgcccatagtgaaggaagcaagcctagagaaaagaaagagtagagaaatggagggaaggggttcaggggttcttaccttccagaaaagtgggaaaggggttggggcgcagagataagaggtcagggtgcagaaataagggatggggcgcagaaataagaggtcagggcatggaaataagggattggggtgcagagatataagaggttggggcgtggaaataagggattggggcacagagatacaaggttggggcgtggaaataagggattggggtgcagagataagaggttgggacacggaaataagggattggggcacagagataagaggttggggcgtggaaataagggattgggggttcttgccccgtagaaaagcgggacttgccactcagggtgaaagagaaggggttgaggggtacttgccccttccccagaaaagcagagaaggggtagagacagggagagaaggggttggggtacttgcgccttccccagaaaagtggga

SEQ ID NO: 24938 - DNA, 918 bp, Artificial sequence
  DNA replication origin
ctttcccgagtgaacacctaggtggattcccaacaccgcgcctggcacgtttctggagggagtctcaagctcctccagagctcccagctgcgcgtcctcgtttctgcagtcgatattcctgtgggagacacggggggctctgagcgctacgagctttattaagagatttgcgaatggttcactcaggtccctgaacactcccaatagcctaagctgcctgctgtgttatagcgcagaagcccctaacgcacggtggttgtcctttcttctcataacgctcgcagcttagggccagtttccgcgattctaagagtaattgcgtgggcacctgtgctggggccaggcgcaaagaagggagttggtctgcgcgaagatcgtcaacctgctaacagaccgcacatgcactttgcaccgaccatctacgtctcagtctggaggttgcgcactttgggtaaggagggcccggaacttccctggcgggtctgagctgcaaggcaagcgagggtgggaagagggaatttagggttctggactgcgggacgggagagaagctggggtctccagagaaaagggcagcaatggagggaaactgagatgaactccagacatccatgttcatggatccgtttgagtctttgctttgggtaggagaggagtggaatgagacagaatctatacctttggttcccacccgccctccagtaaggccgaggaactctcttggttcctctgagagcaagaggcagatggtgctgcgagggaaccccggaaggagccactaaagttgagcagagtgcaggactgggaaggaaaaaaatggggggcgggggggacaagccacctatgtgctctcctccctttctccaccccacccccttttttcgtagctgctgacgcgctggtggtgcctattaatca

SEQ ID NO: 24939 - DNA, 1663 bp, Artificial sequence
  DNA replication origin
ttgggagcagctctgcgtgcggggcctcagagaatgaggccggcgttcgccctgtgcctcctctggcaggcgctctggcccgggccgggcggcggcgaacaccccactgccgaccgtgctggctgctcggcctcgggggcctgctacagcctgcaccacgctaccatgaagcggcaggcggccgaggaggcctgcatcctgcgaggtggggcgctcagcaccgtgcgtgcgggcgccgagctgcgcgctgtgctcgcgctcctgcgggcaggcccagggcccggagggggctccaaagacctgctgttctgggtcgcactggagcgcaggcgttcccactgcaccctggagaacgagcctttgcggggtttctcctggctgtcctccgaccccggcggtctcgaaagcgacacgctgcagtgggtggaggagccccaacgctcctgcaccgcgcggagatgcgcggtactccaggccaccggtggggtcgagcccgcaggctggaaggagatgcgatgccacctgcgcgccaacggctacctgtgcaagtaccagtttgaggtcttgtgtcctgcgccgcgccccggggccgcctctaacttgagctatcgcgcgcccttccagctgcacagcgccgctctggacttcagtccacctgggaccgaggtgagtgcgctctgccggggacagctcccgatctcagttacttgcatcgcggacgaaatcggcgctcgctgggacaaactctcgggcgatgtgttgtgtccctgccccgggaggtacctccgtgctggcaaatgcgcagagctccctaactgcctagacgacttgggaggctttgcctgcgaatgtgctacgggcttcgagctggggaaggacggccgctcttgtgtgaccagtggggaaggacagccgacccttggggggaccggggtgcccaccaggcgcccgccggccactgcaaccagccccgtgccgcagagaacatggccaatcagggtcgacgagaagctgggagagacaccacttgtccctgaacaagacaattcagtaacatctattcctgagattcctcgatggggatcacagagcacgatgtctacccttcaaatgtcccttcaagccgagtcaaaggccactatcaccccatcagggagcgtgatttccaagtttaattctacgacttcctctgccactcctcaggctttcgactcctcctctgccgtggtcttcatatttgtgagcacagcagtagtagtgttggtgatcttgaccatgacagtactggggcttgtcaagctctgctttcacgaaagcccctcttcccagccaaggaaggagtctatgggcccgccgggcctggagagtgatcctgagcccgctgctttgggctccagttctgcacattgcacaaacaatggggtgaaagtcggggactgtgatctgcgggacagagcagagggtgccttgctggcggagtcccctcttggctctagtgatgcatagggaaacaggggacatgggcactcctgtgaacagtttttcacttttgatgaaacggggaaccaagaggaacttacttgtgtaactgacaatttctgcagaaatcccccttcctctaaattccctttactccactgaggagctaaatcagaactgcaca

SEQ ID NO: 24940 - DNA, 1571 bp, Artificial sequence
  DNA replication origin
tacagaagcattctatatttgtgttatctacatggttatttaaacttaagttattttaaatcagataaaatttaaaattcaattcttcagtcaaactagccacaagtcagaggctcaatagtcacatgtggctagtggctaccatattgaatagcacaggtacagaacatggcagcaacatttcaagtcttaagtgttaaccaaatgctcatatcagtcattaattttttttcatatgagcattaaagcaaccacagagcatctaacttgagcaatatatctttctagcatactcttcaggataagaagagttgcaaaatgtacacttaagcaactgaatgaagtgactttctatataggtttaactgtcaattcattgaaagtggaagagctagtgtttttaatggctttatagtttataaaacatttcacatagatcagagatttttttttcagtgaggatgtgtgtttatcatgtgttgggggtgggtacggtgagttctctattcaggtaggattggaagctggctcagagctcatccagtccagtctcccacaggtatagaagtgccctgataaaatttcagagctgactgtccagtcaagatttgcatgcctccagaaatggggctcttacgacccctcacagtagcccgttctgctcttgggcacctccaatggttggcattttccttccagcagcctctttcttgggttggggggtgggcagatactgtcactccagcctaaccctcaggacaagagaggcagctgggttgggaacagaggcagaaaaaacaataagttaaatccaagaatgaacagagacatggcaggatgggcaaggacatttctggggtgccagcagtctctagcttgatccaggaggcactggggaggaggttgctgatggcaagattccaggcaggaggtgactcagaaggctgggctgtcaatggccctctgatccccagtatatttttcaggcctgaagctgtagggagggggtggctctgtgggactctggccccgagtaggcttcagaatcactcactgtaggggggtgggggagtagagagggatgctctgaccctctctagggggatgatggagggcagttcccggggcccctggcaatccttcagggcgtctgggtccaggtctctgcagttgggacagaagcgcttagccaggccacagatgcacaagagaggcaggatgaccaggaagatgatgacgaagatcctcaaggggccagggaagaactcgttctcctggcagcagctgtcgccacagcatttgaatcctttggggcaggcgaaggagagaccacatttagctgcaacattttgggggccagccagcaggctgagcagcaaggcgggcatgaggccggggaccccagatattttttctttttttttttttgagatggagtctcgcccaggccggagtccagtggcatgatcatggctcactgcaatctccacgcctccccagttcaagtcattctcctgcctcaacctcccgagtggctgggattaccagtgcacgccaccatgcctggttaa

SEQ ID NO: 24941 - DNA, 1093 bp, Artificial sequence
  DNA replication origin
agaaggggaagtttgcggctgtccgcgcctccccgccttctcgcggctgcccggccgaaaccaaaccgaggggtggggtggcgaggacagggtacgtcgcaggcttgtgcgggtcgggctcggacctgcgctgcctcgggatgtaaagtataacaagagggtcgggatgggcagcgtaggcctgtgaggcctgcgggtgcccctgtcccccagctccccccgcagccggctccgcagtggtccactccggttgccgggtgcggattcgggttccggaccgaaggctgtgtgttctccgccgtttattgtggccccgacaggccggggttactgtggcgaccacgagagcagctttggcgctatggaggagcccggggttacccctcaaccgtatttggggctgctcctggaggagctacgcagggtgagcccaggcgcgatgagtgttacgtggcccaggggtcgcgggagccgccgggggaaggaagcagtagaccggctttggggtctaagccgccgtggtcagaggtcccgaagccagtcctcgtctgctgcccggctcccgcccgtgttcgaggcagtagttaggctcgtagggcgcttgagtggtttttgtgtgatggaggaggacctggggctctgggaaggtgaagaaagcacttgcttagctggactttgcaaagatgtaaatgtttcccgattcctaaaactaattagcctttccgctatgttgtttattttgagcagagacacgtggttccttcgactgtgagaaacttgaggactgttcctttaaattagttacatttactgatgtaacttctcgttgaaccttgaaagaacacctgaggttgggcggggagttgaaattttgattctgcattttttttttttttggtaaagaatgaatgcccttttgagatgctctaccatgagtgagattgttcttcgcttctgtcttgttaatgtacagtctagagatagtaaactcccagtgttcaaattttgttttttatttttcaggtctagtttataatcaagttgtagagatttttctccttaagtgtttctaggtatctttgttgacatgtgt

SEQ ID NO: 24942 - DNA, 844 bp, Artificial sequence
  DNA replication origin
gcccggcagccaccccgaccgggagggaggtggggggtcagccccagcccggccagccaccccatccgggagggaggtggggggcagcccccgcccggccagccgccccgtccgggagggaggtcggggggtcagcccccgcccggccagccatcccgtccgggagggaggtggggggtcagcccccgcccggccagccgccccgtccgggagggaggtggggggtcagcccccgcccggccagccgccccgtccgggaggaaggtgggggggtcagcccccgcccggccagccgccccttccgggagggaggtggggggcagcccccgcccggccgccgccccgtccgggaggtgggggggcgcctctgcccggctgccccttctgggaagtgaggagcccttctgcccagccaccaccccgtctgggaggtgtacccaacagctcattgagaacgggccaggatgacgatggcggttttgtggaatagaaaagggggaaaggtggggaaaagatagagaaatcagattgttgctgtgtatgtgtagaaagaagtagacatgggagacttcattttgttctgtactaagaaaaattcttctgccttgggatgctgttgatctatgaccttacccccaaccctgtgctctctgaaacatgtgctgtgtccactcagggttaacaatggattaagggcggtgcaagatgtgctttgctaaacagatgcttgaaggcagcatgctcgttaagagtcatcaccactccctaatctcaagtacccagggacacaaacactgcggaagaccgcagggtcctctgcctaggaaaaccagagacctttgtt

SEQ ID NO: 24943 - DNA, 1172 bp, Artificial sequence
  DNA replication origin
gggtacacctcccagacggggtggtggctgggcagaagggctcctcacttcccagaaggggcagccgggcagaggcgcccccccacctcccggacggggcggcggccgggcgggggctgccccccacctccctcccggaaggggcggctggccgggcgggggctgacccccccaccttcctcccggacggggcggctggccgggcgggggctgaccccccacctccctcccggacggggcggctggccgggcgggggctgaccccccacctccctcccggacgggatggctggccgggcgggggctgaccccccgacctccctcccggacggggcggctggccgggcgggggctgccccccacctccctcccggatggggtggctggccgggctggggctgaccccccacctccctcccggtcggggtggctgccgggcggagacgctcctcacttcccagacggggcagctgccgggcggaggggctcctcacttctcagacggggcggctgccgggcggaggggctcctcacttctcagatggggcggccgggcagagacgctcctcacctcccagacggggtcgcggccgggcagaggtgctccccacatctcagacgatgggcggccgggcagagatgctcctcacttcctagacgggatggcggccgggaagaggcgctcctcacttcccagactgggcagccgggcagaggggctcctcacatcctagacgatgggcggccaggcagagacgctcttcacttcccagacggggtggcggctgggcagaggctgcaatctcagcactttgggaggccaaggcaggtggctgggaggtggaggttgtagctagccgagatcacaccactgcactccagcctgggcaacgttgagcactgagtgaacgagactccatctgcaatcccggcacctcgggaggccgaggctggcagatcactcttggttaggagctggagaccagcccggccaacacagtgaaaccccgtctccaccagaaaaatatgaaaaccagtcaggtgtggtggcgcgcgcctgcaattgcaggcactcggcaggctgaggcaggagaatcaggcagggaggttgcagtgagcggagatggcagcagtacagtccagctttggctcggcatcagagggagactgtg

SEQ ID NO: 24944 - DNA, 1308 bp, Artificial sequence
  DNA replication origin
ctacttggttccgccgagacccacgacggttccgcccccttcttcctagtcattgatgttgttgttcttgtcagtgccgcagccccgaccgccgggagctcgaacccgagccggggccgcccgggtggcgcggtggcggcggctgcggctgcagcagctgcgacggctgcgggggctgctccgggtactgcgggggcggccgggagccggcagccggcggcggggccggatggctctgtgcgggcaggcggcgggcgctgcgtcgctgcccagcgagctgatcgtgcacatcttctcttttctgccggcgcccgaccggctgcgggcctcggcctcctgctcgcactggcgtgagtgcctcttctatccggccctgtggccccagctccgcatctgcctccgcgtctcgcccgcggagcagcctcggctggaattcctcatgcgcaagtgcggctggttcgtgcgagagctgcgtgttgaattcgccgccgagaactatctgagcggcggtggcccaggggacggaggtggcgcggacaccgggactggaggggaggaagtcgaggccctgcagctctcagctcgttggctggaagtgctgcgcacctacttggagctggtgctttgcgtgctggtcagcatccggaacaacaggtaggcttgccctgagccccgccccgcccggtaacggggggtcgctccgtccccgcaccccgacacagattctgtgcataatacgtgcccggccaacttcagtgttgccttcctcagtgacggagagtgttggttctaactaggcggtttccttgagcggaaaggcataacgggactcatcacgatactttataaacagtggtggacggggtgtttaacagacaccacttctggcgccttccaggcactcattcatcctcttggtggccgtgggatggagctgacaggcgctgtcacttttcattttatatatgggagcgttaagactgggagggtgaggcctgtgggtgagccttggaagaaacaaaacatacacataacacgattttctgactctgaatctgttagaaatagttcatggtgagggaaggagtaggtactcataggacgctgcctaaaagaaattttgtaacagccattttcttaccagaaatagtttcggctaactgaacaaggcccgaagaggaggaggagtgtttgttaaagggattggggaagaagttgatcttcagggttgaaagtccctccccatacaccaccacactcaacttctccccagtagttcacctaaaagtaacagtcgggcggaggagg

SEQ ID NO: 24945 - DNA, 1001 bp, Artificial sequence
  DNA replication origin
gaagttcgctttcattctccaggttttctgccttttcccttcccccttcctgcaacgcccccgcgcctcctcagcctggggatttcctggcgcttcgccggccctctccgcaaccccctgataaatcggttcagaaccagtctggctgggaggcccgagggctgacagcagcggagcggccccggccggggtctcacggactctcggggtctggccgacacggccgctcccgtcactgcagcgcgggctgagctcacggccgcgcgcccgccgccgccgccgccgccgccttcatgctgcagcgcagggctcagttccacgcggccaggaggccgccgttgcccacacgcgacgctttgggaagcccagctcccgggtccgccccggccgcggccgcagccccggacctcggctgcttgcctcgcgcctgaactgcggactcgccccagcgcggtggccagcgggcggggcgctgtgttccgcggcgcgcagggaggcggtgagcgtgtgcagagctgcccgaacggaggactatgtatgtgtgtgcgcgtgtttgcgtgtgtttgagcgtgtttttccttcttcccttgaggatgtgaattgtttagcagctggctgctcccttaggatccttgactttggggagctctggctgtgaacacagcccacccatataatccattttgcacggtccgttatatcagaaaaaaaaagcgcaactggacgggggtggggcagaccaacgaaacctagacagacacacacacactcagaggagagaggaagaattgaaagacttgagaagactttgataacctccctgctggcccttctgtgttccggaaagatcctggatgttggctaccttttcaagtcatcttggcatgtctctagtgttttgtaagccgctttccagctagctgcgtgtgtgtgtgcgcgcgcgtgtgtacgcgcgcgcctatctgatgcatttgactgtcttttatccaactgcccagaag

SEQ ID NO: 24946 - DNA, 1398 bp, Artificial sequence
  DNA replication origin
gcggccgggcagaggcgtccctcacctcccggacggggcggctggccgggcggggggccgacccccccacctccctcccagatggggcggctggccgggcggggggctgacccccccacctccctcccggacggggcggctggccgggcagaggagctcctcacttcccagtaggggcggccgggcagaggcgcccctcacctcccggacggggtggctggccgggcggggggctgacccctccacctctctccaggacggggcggctggccgggcagggggctgacccccccacctctctccaggacggggcggctggccgggcagggggctgacccccccacctccctcctggacggggcggttggccaggtggggggctgatccccccacctccctcccggatgggacggctggctgggcggggggctgacccccctacctccctcccggacggggtggctgccgggcggagacgctcctcacttcccagacggggtggctgccgggcggagaggctcctcacttctcagagggggcggctgccgggaggaggggctcctcacttctcagacggggcggttgccgggcggagggtctcctcgcttctcagacggaacggccgggcagagacgctcctcacctcccagacggggtcgcggccgggtagaggcgctcctcacatcccagacggggcggcagggcaaagtcgctccccacatctcagacgatgggcggccgggcagagacgctcctcacttcctagatgggatggcggccaggaagaggcgctcctcacttcctagatgggatggcggcggggcagagacgctcctcactttccagactgggcagccaggcagaggggctcctcacgtcccagacgatgggcagccaggcagagacgctcctcacttcccagacggggtggcggccaggcagaggctgcaatctcggcactttgggaggccaaggcaggcgggtgggaggtggaggttgtagccagccgagatcacgccactgtgctccagtctgggcaccattgagcactgagtgaaccagactccgtctgcaatcccggcacctcgggaggccgaggctggcggatcactcgctgttaggagctggagaccagcccggccaacacagcgaaaccccgtctccaccaaaaaattacgaaaaccagtcaggcgtggcggcgcgcgcctgcaatcgcaggcactcggcaggctgaggcaggagaatcaggcagggaggttgcagtgagccgagatggcagcagtacagtccagcttcggtttggcatcagagggagaccgtggaaagaggggacagggagagggagaggggagaggggagaggggagaggcgattttgttatttattgtatttattgca

SEQ ID NO: 24947 - DNA, 1056 bp, Artificial sequence
  DNA replication origin
cccatgtctacttctttctacacagacacagcaacaatctgatttctctatcttttccccacctttcccccttttctcttccacaaaaccgccatcgtcatcatggcccgttctcaatgagctgttgggtacacctcccagacggggtggtggccgggcagaggggctcctcacttcccagagggggcggccgggcagaggcgccccccacctcccggacggggcggcggccaggcggaggcaccccccacctacctcccggacggggcggctggccgggcgggggctgaccccccacctccctcccggatggggtggctgccgggcggagacgctcctcacttcccagacggggcggctgccgggtggaggggcccctcacttctcagcccgggcgctgccgggcggaggggctcctcacttctcagacggggcagccgggcagagacgctcctcacctcccagacggggtcgcggcagggcagaggcgctccccacatctcagacgatgggcggccgggcagaggcgctcctcgcttcctagatgggatggcggccgggaagaggtgctcctcacttcccagactgggcagccgggcagaggggctcctcatatcccagacgatgggtggccaggcggagacgctcctcacttgccagatggggtggcggccgggcagaggctgcaatctcggcactttgggaggccaaggcaggcggctgggaggtggaggttgtagcgagccgagatcatgccactgcactccagcctgggcaacattgagcactgagtgagggagactccgtctgcaatcccggcacctcgggaggccgaggctggcggatcactcgcagttaggagctggagaccagcccgggcaacacagcaaaaccccgtctctaccaaaaaaatacgaaaaccaggcaggctgaagcaggagaatcaggcagggaggttgcagtgagccgagatggcagcagtacagtccagcttcggctcggcatcagagggagaccgtggaaagagagggagagggagaccgtggagagagggag

SEQ ID NO: 24948 - DNA, 920 bp, Artificial sequence
  DNA replication origin
tgcccggctgcccagtctgggaagtgaggagcacctcttcccggccgccatcccatctaggaagcgaggagcgcctctgcccggccgcccatcgtctgagatgtggggagcgcctctgccctgccgcgaccccgtctgggaggtgaggagcgtctctgcccggctgccccgtctgagaagtgaggagcccctccgcccggcagcgcccgggctgagaagtgaggggcccctccacccggcagccgccccgtctgggaagtgaggagcgtctccgcccggcagccaccccatccgggagggaggtggggggtcagcccccgcccggccagccgccccgtccgggaggtaggtggggggtgcctccgcctggccgccgccccgtccgggaggtggggggcgcctctgcccggccgccccctctgggaagtgaggagcccctctgcccggccaccaccccgtctgggaggtgtacccaacagctcattgagaacgggccatgatgacgatggcggttttgtggaagagaaaagggggaaaggtggggaaaagatagagaaatcagattgttgctgtgtctgtgtagaaagaagtagacatgggagacttcattttgttctgtactgggaggggttcttctgccttgggatgctgttgatctgtgaccttgcccccagccctgtgctctctggggcatgtgctgtgtccactcagggttaaatggattaagggcggtgcaagatgtgctttgttaaacagatgcttgaaggcagcatgctcgttaagactcatcaccactctctaatctcaagtacccagggacacaaacactgcggaaggccgcagggtcctctgcctaggaaaaccagagacctttgttcacttgtttatctgctgaccttccctccactattgtcctacga

SEQ ID NO: 24949 - DNA, 1393 bp, Artificial sequence
  DNA replication origin
ccactctagtagtccacattgtggattattgccatctttatgtctatgagaacccaatgtttagctctcacctataattgagaacatgtggtacttgacttctgttcttgcattaattcactgaggataatggcctccagatgcattcatgttgctgtaaaggacgatttcattctttttaatggctacatagtgttccatagtgtatatataccacattttctttatctaatctactgttgatgggaacctaggttgattccatgtctttgcattacattcagtattgtaaatagtgctgcaatgaatgtaggagtacatgtgtctttttggtggaatggtgtattttcttttggatatgtaccctgtaattgtgtccggaattggtgggttctcggtctcactgacttcaagaatgaagccgcggacccttgcggtgagtgttacagttcttaaaggcagcgtgtcaggagtttgttccttctgatgttcagatgtgtccggagtttgttccttctggtgggttcgtggtctcgctggctcaggagtgaagctgcagaccttcatggtgagtggtacatctcttaagatggcgtgtctggagttgttcattcctcccagtgggttcatggtttcactggcttcaggagtgaagctgcagaccttcgcagccagtgttacagctcataaaggcagtgtggacccaaagagtgagcagtagcaagatttattgcaacgagggaagaacaaagcttccacagtgtggaaggtgacccaggtttccattgctggcttgggcaacctgcttttattctcttatctggccccacccacatctggctgattggtccattttacagagagccgattggtctgttttacagagagctgattggtccgttttgacaggctactgattggtgcatttacaatccctgagctagacacaaaagttcaccaagtccccactagattagctagatacagagtgtcaattggtgtatttacaaaccctgagctagacacagagtgctgattggtgcatttacaaaccttgagctagatacagagtgccgattggtgcattcacaatcccttagctagacataaaatttctcctctccccaccagattaattagatacagagtgtccattggtacatccacaaaccctgagctagatacagggtgctgactggtgtgtttacaaaccttgagctatatacagagtgctgattggtgtatttacaatctcttagctagacataaagattctccaagtccccaccagactcaggagcccagctggcttcacccagtggatccccgagcagggcgcaggtggagctgcctgccagtcccacgcagtgagcccacactcctcagcccttgg

SEQ ID NO: 24950 - DNA, 929 bp, Artificial sequence
  DNA replication origin
gaggagcccctctgcccggccagccgccccgtccgggagggaggtgggggggtcagccccccgcccggccagccgccccgtccgggagggaggtgtggggggggtcagcccccccgcccagccagccgccctgtccgggaggtgaggggcgcctctgcccggccgcccctactgggaagtgaggagcccctctgccaggccagccgccccgtccgggagggaggtgggggggtcggccccccgcccggccagccgccccgtccgggagatgaggggcgcctctgcccggctgcccctactgggaagtgaggagcccctctgcccggccagccgccccgtccgggagggaggtggggggggtcagcccccctgcccggccagccgccccgtccgggaggtgaggggcgcctctgcccggccgcccctactgggaagtgaggagcccctctgcccggccaccaccccgtctgggaggtgtgcccaacagctcattgagaatgggccaggatgacaatggcggctttgtggaatggaaaggcgggaaaggtggggaaaagattgagaaatcggatggttgccgtgtctgtgtagaaagaagtggacacaggaggcttttcattttgttctgcactaagaaaaattcctctgccttgggatcctgttgatctgtgaccttacccccaaccctgtgctctctgaaacatgtgctgtgtccactcagggttaaatggattaagggcggtgcaagatgtgctttgttaaacagatgcttgaaggcagcatgctcgttaagagtcatcaccaatccctaatctcaagtaatcagggacacaaacactgcggaaggccgcagggtcctctgcctaggaaaaccagagacctttgttcacttgtttatctgctgaccttccctccactattgtcccaag

SEQ ID NO: 24951 - DNA, 1507 bp, Artificial sequence
  DNA replication origin
ggaggttgtggcaaaccgagatcatgccactgaactccagcctgggcaacaatgagcattgagtgagccagactccgtctgcaatcccagcaccccgggaggccgaggcgggcagaccacttgaggtcaggagctggagaccagcccggtcaacagggcgaaaccctgattcctccaaaaatacaaaaaccagtcaggtgtggcggcgcgcacccgcaatcccaggcactcagcaggctgaggcaggagaaccacaggagcccagggcagggaggctgcagcgagccgagaccatggcagtacagtccagcctcggcaacagagggagaccgaagaaagaagaggggagagggagacggagagggagggggaggggagggggaggggaagggggagggaaggaggaggggagggggagggggaggggagggggagagggagagggagggggagagggagagggagatggagagggctacttctttactttcagctacaaggaggagggggacgattggccagccattgcagtggaactaaagaacagtgtgtgtcaaaaagagactatttagaattaaaactgttggtgaaattggaagtggcagttaaaattgtaggtggaatttctgtgagaagaatgtaattatccaaactggattttaaccaacacacctgagcacttcaaaaaaatatttttaataccacaaataaatacctcctttgtcccatctctcagtggaaagacacctattcttggggcaggttgaattcctgaggttttgctttagttctggctcagtagaaaaagtgccacctactgaattgccaatctccttcctgtggagatctttgatagagcaaagaaaaccattattaggtattttatggttcttattagcatttgatatcttagaatctgtattcaaatacttttcattatgtaggtcaaaagttttaagttcaaaaactctaccaaggtcacaactaaagatcactgatgtcatttggcctggggcggggagtggtttgaaaattattttcctcttgtatctcaaccaagaacatatttctccaattacacaaaacacgttagaactcctttccaggatggcagctagggcagaacacctacagggcagaacgttaaggaatactgaaagctgaggttagagagcaaagaggcagtgccaagcagaagttgatgatccctcacgatattatgtgaagcacacaacaagtattcctttgagcattttggaggaaacaaaactctcctttgaacataattgtgaaaaaataaaaacttagacaattaaatttaacagactgagtaagaatgatttacaaatcggtcagccctcagaagcagaaactgttcagaaagctcgactctgcaatgtgggtaggtagcatttatgaacaaaaaagaggtactgaaacagcttgattggttacagcccagtgtttgccttatttgaacaagttccaatcagttggtagcctatga

SEQ ID NO: 24952 - DNA, 1233 bp, Artificial sequence
  DNA replication origin
atgtggctggggtttgtctcacagtggaggcaaggaattgcaacttttttctattattgtacaccttgaaggcaaggttaattaagtcctgttgtggggtttgagggccagaatttaatttttggagttttatttaatgtcgggggcagattggctaataaaatgtattttgagaataagacggccttttgaccttttagggtctagggctgtaaagcgtctcagggttgctgccaaacaagtcatgaactgggctggatttttatattttatgaaaaagagcctaaatgctatctgatttgggataaagaaaaaggagcattaaccttgactatgcctttagctccagccatctttttaagagtaaattgctgggcaggtgggggagggctagtcacggaacgaaactgtaagcgggaccaggtgtgaggaggggaggcgataaaaagataatagggtggaggagcccaggctgaggaagaattgagacctagctcagcctggcgaggaggggagaggtcagatgggtctgtagaaaaggaagattagaaagactcagggacacttgaggttgggactggggggacaggagggagggaaagaaggaagatttgggatgagttgcagtgggcacagagactaggaagggattgatgtgtaaaagaatgcctggacgtcaggcacctcagatcatttgcccattttatgacaagaattatttagatcttgtaggatggaaaaattgaaagtgccgttttccagctatttggaagtactgttgagtttgtattggggtcaagcggcattgcagaaaaaaataagacgattagattttaggtcaggtgagagttgaaaaggttttaagttcttaagaacacaggctaagggagaagaaggaggaatggaaggtggaagcttgcccatagtgaaggaggcaagcccagagaaaagagtagagacacggagaaggggtggggggttcttgccctccataaaagcagagaaggggttggggcacgggaataagggattgggggttcttgccccctagaaaagtgggacttgctgctaagggtgaaggagaaggggttgtgaggggttcttgcccctgccccagaagagcagagaaggggtagagacacggaaagaaggggttggggtacctgcccctccctcagaaaagtgggacttgccgctaagggtgaaggaccaaggcaggcatccctgtgtggt

SEQ ID NO: 24953 - DNA, 967 bp, Artificial sequence
  DNA replication origin
cttgggcagttgatgggactgggcaccatggagcagggggccgcgctcctcagggaggctgaggcaacgcaggagtccatggtggggtggggcggggtggggcgggggcgggggggagggggggcgagggagggggcgggctgctagtcccgagccctgccccgcagggaggcagctaaggctggacaagaaatcaagtgcagtgctggtgggccagcagtgctgggggacctggcacaccctccacagctgctggcccaggtgctaagccccccattgctcagggccggcagggccagcaggccgctccgagtgcagggccgccaagcccacgcccacccggaactccagctggcccacaagtgcccagcgcagccctggttcccactcatgctgctccctccacacctccccacaagccgagggagccggctccagcctcagccagcccggagaagggctcccacggtgcagcggcggactgaagggctcctcaagcgtggccagaatgggtacagagagtaagcgagggttgtgagggctgccagcacactgtcacctctcagtaagtgctgtaaaatcaaagaggttatgcatgaatccaggagatagaaacaaatggaaaaacaaataaaataaggctatgagaaatacacaaatgtgtgtatctagaagaagagagaggaattacatttcctattgtggttggagaaaacttgaaaaagctcggaacagttaagacttgaaagtgggtaggcataatatagataaagaaggaagaaagggcattgctattgtgtgggttctaggtggaggaacagtggtgcagaaagaaaagtagtcctggaatgggtgtgtaataaagcctcagcaatttctttaaagtttaccccaactagaaagatgtatctgtcctttaacctgtgtcatcatacaattttattgtatgatactctggaacttgctc

SEQ ID NO: 24954 - DNA, 932 bp, Artificial sequence
  DNA replication origin
tcagtgacacttggggttgggactgaggggacaggcgggagggaaagaaggaggatttgggatgagttgccttgggaagagagactagagagggaccgatgtgtaaaagaatgcctggatgtcaggcacctcagaccatttgcctattttatgacaagaattatttagatcttgcaggatggaaaaattgaaagtgccgttttccagctatttggaactactgtccagtttgtattggagtcaagtggcattgcagaagaaaataagatgcttagattttagatcaggtgagagttgaagaggtttttaagttcttagaacacaggctagggagaagaaggaggaatggaaggtggaagcttgctcatagtgaaggaggcaagcccagagaaaagagagtagagacatggagaaggggtggggggttcttgccctccagaaaagcagagaaggggtcggggcgcagagatacgaggttgaggtgtggaaataagggatcagggtgcagagatataagaggttggggagcagaaataagggatggggtgcagagatataagatggggcacggaaataagggatcggggtgcagagatataagaggttggggtgcagaaataagggatcagggtgcagagatataagaggtcggggcgcagaaacgggatcggggcgcagagatataagaggttgggctgtggaaataggagatcggggctcagagatataagatgtcggggagtggaaataagggatcagggcacagagataggaggttggggtacttgtccctcccccagaaaagcgggacttgccgctcagggtgaaggagaaggggtttgtggtttcttgcccctcagaaaggcagagaaggggtagagacatggagagaaggtgttggggtacttgaccctaccccagaaaagcaggac

SEQ ID NO: 24955 - DNA, 1047 bp, Artificial sequence
  DNA replication origin
gtttctgaaattttgcgtgaaacaagcgcaaatgaagcagctgtccagttggggaacagtaaaataactgcagttctgttcagtgaattctttctcccacaatattctccctagcttaaaaaagcaggtcggccgccctccccacagttgccgtctcccccggggccggccggtcttatgatccggcggatcctcctggggaggccgggacggggagagggcgcgggcgccgagtggcgggggcagcgggcgggcgcggcgaccggggccggggcggggatccgggcggcgaccgcggcggcggcagcgccgcgggcctgcggccctctcccctccggcgaggggagtcgctgcttggggccgggggggcggccccgcggcgtggagcggcggcgacggcggcggaccctccaggcgggctgaggctgagcccggggccggggcgggggctccggggggaccatgcccggaggccggccggcagcagcatcatggctcacgggcccggcgcgctgatgctcaagtgcgtggtggtcggcgacggggcggtgggcaagacgtgcctactcatgagctgtgccaacgacgccttcccggaggagtacgtgcccaccgtcttcgaccactacacagtcagcgtcaccgtggggggcaagcagtacctcctaggactctataacaccgccggacaggaagactatgaccatctgaggcctttatcttacccaatgaccgacgtcttccttatatgcttctcggtggtaaatccagcctcatttcaaaatgtgagggaggagtgggtaccggaacttaaggaatacgcaccaaatgtaccctttttattaataggagctcagattgatctccgagatgaccccaaaactttagcaagactgagtgatatgaaagaaaaacctatatgtgtggaacaaggacagaaactagcaaaagagataggagcatgctgctatgtggaatgttcagctttaacccagaagggattgaagactgtttttgatgaggctatcatagccattttaactccaa

SEQ ID NO: 24956 - DNA, 1320 bp, Artificial sequence
  DNA replication origin
gtagctgccaggcgaggatgtgtggagcgcaggcggcgcggggtaaatgagaggtctcgggccccaggacccccggggcccgggatgagttagcgagggcagccgcgggggccagttccgaccgtgacaggccaaggcgacggccgccgcccgcccgccccttccgtgcagaagcagctgctcctttccgcgcccgcccgcctgcgctcccggccctggagaccatgaggttccgcatctacaaacggaaggtgctaatcctgacgctcgtggtggccgcctgcggcttcgtcctctggagcagcaatgggcgacaaaggaagaacgaggccctcgccccaccgttgctggacgccgaacccgcgcggggtgccggcggccgcggtggggaccacccctctgtggctgtgggcatccgcagggtctccaacgtgtcggcggcttccctggtcccggcggtcccccagcccgaggcggacaacctgacgctgcggtaccggtccctggtgtaccagctgaactttgatcagaccctgaggaatgtagataaggctggcacctgggccccccgggagctggtgctggtggtccaggtgcataaccggcccgaatacctcagactgctgctggactcacttcgaaaagcccagggaattgacaacgtcctcgtcatctttagccatgacttctggtcgaccgagatcaatcagctgatcgccggggtgaatttctgtccggttctgcaggtgttctttcctttcagcattcagttgtaccctaacgagtttccaggtagtgaccctagagattgtcccagagacctgccgaagaatgccgctttgaaattggggtgcatcaatgctgagtatcccgactccttcggccattatagagaggccaaattctcccagaccaaacatcactggtggtggaagctgcattttgtgtgggaaagagtgaaaattcttcgagattatgctggccttatacttttcctagaagaggatcactacttagccccagacttttaccatgtcttcaaaaagatgtggaaactgaagcagcaagagtgccctgaatgtgatgttctctccctggggacctatagtgccagtcgcagtttctatggcatggctgacaaggtagatgtgaaaacttggaaatccacagagcacaatatgggtctagccttgacccggaatgcctatcagaagctgatcgagtgcacagacactttctgtacttatgatgattataactgggactggactcttcaatacttgactgtatcttgtcttccaaaattctggaaagtgctgg

SEQ ID NO: 24957 - DNA, 1239 bp, Artificial sequence
  DNA replication origin
aggggcgtgcgcagcaccgcagcctctggggtccccttatacttggccttcagggtcttggcattcctgcggtccagcttcacgccgaactgcttctcgacggcctccagggccgtggcgtccagcatctggcggaagccctcgtgccgccgggccagcgcaagcgcgtctggatggaagaccacgtcgtagaccatgtagcggctgctgctgcgccccgcgtactcgcggccgggcgccaggctgtagggcagggaccagtggctgccaggagctgcgccccggtcgccaccggagccgggccggctgctgggcgcgcccaccaacgcgttgctgcagacattcacaaagcagcgccgcgccccgtccaggctggtgcgcagcacatggccgggctccgggtgcacgaaccgcacttccaccccgcgctcacgctctagcgcggtgatctccgcctcgtagcgccgccggttctccgggtcggtgagctcctcggcgtactgggagaacattcgccggaactccgggtcctggaaggcggaggtgagccgctggacctcctctccgctcaggtccaagtcctccagcgacgaggaggccgccgctttggccatactgtcctgtggctcctcgccctcgggccaaaggcgatcagtctgacactgggttgggggatccgcctcagagtttctgggcagcgtacagtgacgcggtggaggtcggtaacggctggaaaattgagccttgagcagcgcgtgcttgttgtcatagttacaccactaacattcgggaggaggggtagagatcatggtggaataggccgggcgcggtggctcaggcctgtaatcccagcactttgggaagcctaggcgggcggatcacgaggtcaggagatcgagaccatcctggctaacacggtgaaaccccgtctctactaaaaatacaaaaaattagccgggcatggtggcgggtgcctgtagtcccagctactcggaaggctgaggcagtagaatggggtgaaacccaggaggcagagctcttgcggtgagccaagatcgcgccactgcactccggcctgggcgacagagcaagtctctcaaggaaatcatggtggaatagtggaaatgccagaaatagccctcttagattcttcaaaccaacccaccaccgtactttgttttgttttgttttgtttttctttttttgagacagagtctcgctctgtcacccaggctggag

SEQ ID NO: 24958 - DNA, 975 bp, Artificial sequence
  DNA replication origin
gatcttaacagggtttagcgccacgcgggccagggccgaggccggagctgggaggggcgcgcccgggaaggggcggagctgcggcggtggcgccaaatcgcaaatatggcgccggagcggctgcggagccgggcgctctccgccttcaagttgcggggcttgctgctccgtgggtgagtgggctcgggcagcttgaagggcgagagggaagagctggggcccgtctgcctggtgcggcagcgggacgcaccgcggcggctccccgcgcgccgagagggggcttgaccttaaatttcagagttctaagaagcggtcgggcgcggtggctcacgcttgtaatcccagcactttgggaggtcgaggcgggcggatcacgaggtcaggagatcgagaccatcctggccaacatggtgaagccccgtctctactaaaaatacaaaaattagctgggcgtggtggcgcgcgcttgtagtcccagttagttgggaggctgaggcaggagaatcgcttgaacccgggaggaggaggttgcggtgagccgatatcgtgccactctactccatcctggcgacagagagagactccattaaaaaaaagttctaagaagcgaggtggatcttgaggctgccgtgccttctttggtttccccgacccatgcgaggagtttaatgtttcttctaggcgggccgaggctcttctgcacatgtcaaactgagcccgagaagctgcaacctatctatggcagccggttatcaacattgtgacctggacagctctcaggctcccgggaaggttgctgagacataagatgagagacccgagaaagcccacttgcacgtctgcagttgccaatttatgtgaaagtcaggtttcctgggcatatccgtgtttttgaggacctatagaacatatgaaccttcccaagatttctctcattaaatctgctccgtgttttagagttctatatgtacgtgt

SEQ ID NO: 24959 - DNA, 1293 bp, Artificial sequence
  DNA replication origin
cgggtggatcacctgaggtcaggagttcgagaccagcctggccaacatggtgaaatcccatctctactaaaaaatacaaaaatcagccgggcgtggtggcaggtgccttagtcccagctacttgggaggcagaggcaggagaatcgtttggactcgggaggcggaggttgcagtgagccgagatcgagccagtgcactcaagcctgggggacaagagcgagacttctctcgaacaaacaaaaaacaaaaacgatgatagaagggtaatgtagctggaaggaggacacagccaggaattgaagctggaaaggcaagctgggtctggaccatgctgggtcttcttgcacagcactgtgatatgaatttttttttttttttttttttttttttgagacggagtttcgttcttgttgcccaggctggagtgcaatggtgcccttttggctcactgtaacctccgcctcccggcttcaagagtttctcctgcctgagcctcccaagtagctgggattacaggcgccggccaccaagcctgtgtaatttttttgtattttcagtagagacagagtttcgccattttggccaggctggtctcgaactcctggcctcaggtgatccgcctgcctcggccttccaaagtgttgggattacaggcgtgagccaccgcgcccagccgagatattaattttggattctactaaggacgacgggagccagctcaaggtttttaagtgactcgatcagattcacgaggttggttcacaaggaacttcgataaccccaaagtctagtgagcataattcgactgggagaagacactgctgcaaggaattctgtgaaccagacagatttgagggcaccaaccagggtggatggcagataaggtcttaacagcctcaaggtgatttgcttccttgttgaaggctttaattaatcctcttaagtaactttcaagttcttgagttcaagtaaacacactggcacactaggggaggagtggcaggctataagcattttaataattaaaaaaaaaaagccttttattgttcaaagtgttccttttctatggagtgctcccaaccagaagatgagggaaatggagataatgaagcacgtccctcctaccaaacacgataaattctacaggcactgtaagatcaagaatttaagattatttttgtcccaccctattttacaggtgaggtatcaagcacagtaactcgtaattttcttttggcccaattgaaaggtatcatataagagaaagctgtgtgtgcgtgaaaaggatccgcc

SEQ ID NO: 24960 - DNA, 1052 bp, Artificial sequence
  DNA replication origin
cgctcgcggcccctctgtctgcaggcgtgccccggcggcggcggagagccgtcctcggccgaggaggctgggaaacgcgagcgcaggcggcagagaggcctcaacgccgtccctttcgccaccgccttttccttgcctcgcgccgctgtgcatttctctccttttcctttgtttttttggcccctcgcgggtgtgggcattgttggttagcaaaagtgcagcctcaagatggctgatggcaacgaggatctgcgggctgacgacttgcctgggccagccttcgagagctatgagtccatggagcttgcctgccccgctgagcgcagcggccacgtagccgtcagcgacgggcgccacatgttcgtctggggcggctacaaggtcagtgagtggccgggccgcgacggacgtcgctcggctgtgactcgggtctgcgttcgcggccaggcggggaggccagagcgggccgccgagggcgctccccgcctgcgtcgcgcgccccacctcagactctgcccgttggttgttttttttttgcgcgcgggaatcttccttctctcgagtaccccaacccgtctcgaacctccagggctgctgtcatgtcaccctggtgctcacaaagccaactcactcccacccccgttgttgccattggagcgttattccggggaaggccctgttaatgttgcttgggcggtgcattcggaagggttggggtgtgaaaggtgacggtgtgtgatatcactcagacgcgttatgaggacggcctacgaggacttcaccctctggagctgggaaccgctgcccacttacagggaggccgaggtgtaggaaaactggaattccaaaaggttacaggaaccaccttattcagccttcccgcctgtgcaaatggccatcaggactgttttccttctggcttcagctgggttgaagtttttcagcagacacccctattaagataatggaaaagctccaccagtaaccaaaaaatccccagcatcaaatgaactacagagtgcagctctttgactctccgatcccctggttat

SEQ ID NO: 24961 - DNA, 1289 bp, Artificial sequence
  DNA replication origin
gcagaggggctcctcacttcccagtaggggcggccgggcagaggcacccctcacctcctggacggggcggctgactgggcggggggctgacccccccacctccctcccggacggggcggctggccgggcggggggctgagcctcccacctccctcccggacggggcggctggccgggcggggggctgaccccccccacctccctcccggacggggcggctggccgggcggggggctgaccccccccacctccctcccggacggggcggctggccgggcggggggctgagccccccacctccctcccggacggggcggctggcctggcgggggctgacccccccacctccctcccgggcgtggtggctgccgggcggagacgctcctcacttcccagacggggtggcagccgggcggaggggctcctcacttctcagacggggcggccgggcagagacgctcctcacctcccagacggggtcgcggccgggccgaggtgctcctcacatcccagacggggcggcggggcagaggtgctccccacatctcagatgatgggcggccgggcagagacgctcctcacttcctagatgggatggcggccgggaagaggcgctcctcacttcccaggtggggagcactgagttaacgagactccgtctgcaatcccggcaccttgggatgccgaggctggcggatcactcgtggttaggagctggagaccagcccggccaacacagcgaaaccccatctccaccaaaaaaatacgaaaaccagtcaggcgtggcggcacgcacctgcaatcgcaggcactcggcaggctgaggcaggagaatcaggcagggaggttgcagtgagccgagatggcagcagcacagtccagctttggctcggcatgagagggagaccgtggaagggggaggagagaggggagaggggattttgtactttttgtagagatggatttcaccatattggccaggctagtctcgaactcctgacctcaagtgatccaccctcctcggccttccaaagtgccgggattataggcatgagccaccgcgcccagccgattattagctcttgatacaatactttcagaatctgaaacggagagggtaaggaacttcagcgaagtcatgcagtgaccagaggacaacgcgtaagtgctgacaggtttgaggaatgactctgtcatggcaccaaactcaaaaggtattcattaacttttctttgagccataaaaaggatcaaatgtgtcatttcaacaaacacacagacacttgcctg

SEQ ID NO: 24962 - DNA, 886 bp, Artificial sequence
  DNA replication origin
ccccgtccgggagggaggtggggggggtcagccccccgcccggccagccgccccgtccgggagggaggtgggaggctcagccccccgcccggccagccgccccgtccgggagggaggtgggggggtcagccccccgcccagtcagccgccccgtccaggaggtgaggggtgcctctgcccggccgcccctactgggaagtgaggagcccctctgcccggccagccgccccgtccgggagggaggtgggggggtcagccccccgcccggccagctgccccgtccgggagggaggtggggggctcagccccccgcccggccagccgccccgtccgggagggaggtggggggctcagccccccgcccggccagccgccccgtccaggaggtgaggggcgcctctgcccggccgcccctactgggaagtgaggagcccctctgcccagccaccaccccgtctgggaggaggtacccaacagctcattgagaatgggccatgatgacaatggcggttttgtggaatagaaaagggggcaaggtggggaaaagattgagaaattggatggttgctgtgtctgtgtagaaagtagtagacatgggagacttttcattttgttctgtactaagaaaaattcttctgccttgggatcctgttgatctatgaccttacccccaaccctgtgctctctgaaacatgtgctgtgtccactcagggttaaatggattaagggcggtgcaagatgtgctttgttaaacagatgcttgaaggcagcatgctcgttgagagtcatcaccactccccaatctcaagtacctagggacacaaacactctgcctaggaaaaccagagacctttgttcacttgtttgcctgctgaccttccctccg

SEQ ID NO: 24963 - DNA, 1368 bp, Artificial sequence
  DNA replication origin
agtgaggcggtttcctcggcgccttttccggcagcggcggcggcagaactgggaggaggagttggaggccggagggagcccgcgctcggggcggcggctggaggtaaccccttgggccgagctggaaaggcgggccacctcggtcttcgctcctttgtggagctctggcagtaactcccctccctctctgtttctctgcaggcagcgcaccgagttcccgcgaggatccatgacctgacggggccccggagccgcgctgcctctcgggtgtcctgggtcggtggggagcccagtgctcgcaggccggcgggcgggccggagggctgcagtctccctcgcggtgagaggaaggcggaggagcgggaaccgcggcggcgctcgcgcggcgcctgcggggggaagggcagttccgggccgggccgcgcctcagcagggcggcggctcccagcgcagtctcagggcccgggtggcggcggcgactggagaaatcaagttgtgcggtcggtgatgcccgagtgagcggggggcctgggcctctgcccttaggaggcaactcccacgcaggccgcaaaggcgctctcgcggccgagaggcttcgtttcggtttcgcggcggcggcggcgttgttggctgaggggacccgggacacctgaatgcccccggccccggctcctccgacgcgatggggaaggtgctatccaaaatcttcgggaacaaggaaatgcggatcctcatgttgggcctggacgcggccggcaagacaacaatcctgtacaagttgaagctgggccagtcggtgaccaccattcccactgtgggtttcaacgtggagacggtgacttacaaaaatgtcaagttcaacgtatgggatgtgggcggccaggacaagatccggccgctctggcggcattactacactgggacccaaggtctcatcttcgtagtggactgcgccgaccgcgaccgcatcgatgaggctcgccaggagctgcaccgcattatcaatgaccgggagatgagggacgccataatcctcatcttcgccaacaagcaggacctgcccgatgccatgaaaccccacgagatccaggagaaactgggcctgacccggattcgggacaggaactggtatgtgcagccctcctgtgccacctcaggggacggactctatgaggggctcacatggttaacctctaactacaaatcttaatgagcattctccacccatcccctggaaggagagaaatcaaaaacccattcataggattatcgccaccatcacctctttcaattgccactttctcttcttttgaatttgaactctggagttactgttctacagtttggcggggacggggcttgggggtt

SEQ ID NO: 24964 - DNA, 1400 bp, Artificial sequence
  DNA replication origin
acagatggtgaaggcttcagattccgaagaatctgaaggcttttggtgaacaccactgatgcattcaagaaagctaatgaaaggttggaggcgtttagccaccaattgaggtcatgtgtgaaaatcagaaggccttgtgctgtttaaagccaccacatttgtggtatctgttatgcagcactagaaaactaagagagatgtggctacccagaagtgggatgctataacaaatatctaaaaatgtgggaatgactttggaattacacagtgagtgaaggctggaagaattttgaggagcttgatagaaaaagcctagatttccttaagcagacctttcttagaaatatggataccggatatgaagcggagccgctgccgcgaccgaccgcagctgccgccgcccgaccgccgggaggatggagttcagcgggcagcggagctgtctcagtctttgccgccccgccggcgagcgccgcccgggaggcagcggctggaggagcggacggaccccgcggggcccgagggcaaggagcagccgcctgccttggcctcccaaagtgccgagattgcaggctctgcccggccgccaccccgtctgggaagtgaggagtgtctctgcctggccacccatcgtctgggatgtgaggagcccctctgcctggctgcccagtctggaaagtgaggagcgtctccgcccggccgccatcccatctaggaagtgaggagcgcctcttcccagccgccatcacatctaggaagtgaggagcgtctctgcccggccgcccatcgtctgagatgtggggagcgcctctgccccgccgccccatctgggatgtgaggagcgcctctgcccggccgagaccccgtctgagatgtggggagcgcctctgccccgccgccccatctgggaagtgaggagcccctctgcccggccaccaccccgtctgggaggtgtgcccaacagctcattgagaacgggccaggatgacaatggcggctttgtggaatagaaaggcgggaaaggtggggaaaagattgagaaatcggatggttgccgtgtctgtgtagaaagtagaagacatgggagacttttcattttgttctgcactaagaaaaattcctctgccttgggatcctgttgatctgtgaccttacccccaaccctgtgctctctgaaacatgtgctgtgtccactcagggttaaatggattaagggcggtgcaagatgtgctttgttaaacagatgcttgaaagcagcatgctcgttaagagtcatcgccaatccctaatctcaagtaatcagggacacaaacactgcggaaggccgcagggtcctctgcctaggaaaaccagagacctttgttcacttgtttatctgctgaccttccctccactattgt

SEQ ID NO: 24965 - DNA, 1016 bp, Artificial sequence
  DNA replication origin
agcgggagtcggggcggggctgggccagctgtacccctgacgggccgcgaacccagacaaaggaggaggagccgccccagaagcgggccagcgccgccgggaaaggaggtcgccgcccggggtcgcccgggcttgcgggtcgccgcgcttcctctgcgggcgctgcgggaggcgagggccgcctcggcggaggaagccgaccccggggtctccgccagcccgccggcgccgcctccgagccgcctcggccgtagcctcggcccgggcgggaggcggcggccgccggcgaggcgaggcggcccgcgccctgcctgtcaggccaccggcccggcccgcgggctgcccccgatgcggaggcgctgtcgccggggccatgcagcaggcgccgcagccttacgagttcttcagcgaggagaacagtccgaaatggcggggactgttggtctcggccctgcggaaggtcagtgctaggggcggggcggccggcgggtggcccgtggccccccgagcttctaacggggagcaggtcgtccctcccacagggctcgagtccccggggccgagccgtttctcgttggctggcaatggggggctcacaattgcctgttgcattctgaaggacgtttctcaagttttttttttttgcctggtcccggaaggaaggttttgttatgatcataaaactggatttcatgttgcagtcatttcgtcaggcaacttccgccgttgaccaatttgttgtcctcaggctggaatcgggcaagagaaagtcccgctggtatttagacagtttctaaaacaaaagcacattttcaggccgggtaattacttttaattaagttctttgggagtgttccccctaggcggtttgcttgtcaagggtatccacttatgaggcaatggttttttgtaatatggatgtttcacatgtgtgaaatgtcagtgagtcataatattcttattcattttacagttctcaaggtaaatttaaagcgccttcccacttcctgcaaacg

SEQ ID NO: 24966 - DNA, 911 bp, Artificial sequence
  DNA replication origin
tacagctggcccagccccgccccgactcccgctacggccgcggcgggcggtgagcagcggcggcggcggcggcggctgctcgtctcctcatcgcctcctccccgccctcccagccgacagcgccgcccggccctgcccactcgagtcacctccacagagctctggggaccgacccggagtgcgcgtcgggcgagcgagcctcgctatggcgcgcacagcgctggccgccgttgctgcccctttagcagcagcgcagagtgccttggggtcgccgctgagccctgagtcccagcagccgaggctcggcccgccccctcggcccggcgctcattatcccgaatagcccaagaggcctaacacggagcatgcgcgccgcggagcaggcacaggcgccagcccggcgcgggggtgcggggcctggggccccgggggagtccgcttttcccgagactgtgctgggggccgctccagactcttcagtttgactgctttttacccatatgctccctcctctcgacctgcttaagacaatccggactcggtgccactcttgtagcgctggagccccaggactaccgtcgtgggaggctgcatagggacgtggagagaaaggggcattcgggctggacaggatatttaacgtatttgtgctctacgtggcttgttttcatgagtaccgtatgtttacacaaagtaggtactatatataatatatcgttaggagatacagtaactatttcttagggtgatggtgtggggaccgagagatgaggcgtggaaagcccttagcctggtggtagggtcagaaggggcagatgacagtgacgttgatcaagcttgaattgaaaggtccttcacttgcacgggcccctgtgcgttcacaaaatcatatcgtttttacaaaactttca

SEQ ID NO: 24967 - DNA, 1062 bp, Artificial sequence
  DNA replication origin
gcggcgaggcttggccgcaggagaccaacccgcgccccgcgccccacgcccccgggactgggaaaaccctcccgcgcccggacgtgcacctcagccgcgccgcgcagcatggagcggtgccacgtgttggccagggacggcccgcgcctccttgcccgcccgggactcacggcgccgcggcggtcagggacgggcctggctcccgcctcgccttcttccgcccagctcggctcggcgtggctcggcccgcgatccctatgggaaccggctcccgccccgggtctgcctgggcggggccgccgcgccccagcttcccacccccggcccggcccagcccggccgccctcccggctgcagggaaaggcctcggagggccgccctccgtccatgggagctgtcctgaccgcgggccgagtcctgctgccgggagagcagacctgctagatttgcaaacttccgcaggccgtgcaaagcgcagctgtaaccgcgtctgcggagcaagacgcctgcgctaggagcccctcctgagcggtccacatttccctgcaacagcagtccccacacctcagaaccgcggttattccctttggtcccttggaggcatcttctgtgtctgtgctgatcagtgctgcggcgtcagtgaatgaatgagagggagaaaggaaagaagaggaaggcgtgactgcagaaattgcttaaagtcagcactttcctctacagtagggaaggttccacggcagtcttctgctgtgggacttttctggtgtgggaggtggaagcttacagagtctgccttaattgtttttggttcctttcccccatctttctcccaacggactcctactgctcaaatctgagcacactggcgggaagcggatggacctggggaaattatgaaatcatgtcagttgccactgggcagagtgcctcacactttatcatccgtcccgttcccagtgccagcatcaatgcgggtacttgtcctggaagcagtacccgaggagagaaaattaacacagtgtctatgaaacaggggccaatcccgtgtcaagcagcatgcta

SEQ ID NO: 24968 - DNA, 898 bp, Artificial sequence
  DNA replication origin
aaacccggagctgccggccggcgcgcgggaggaggacgcgggtgcggtctaggaagtaggtcccgggctccgcgctcaacaaagacggggccgcccccattaggtacggagccggccctgggccccggctggcggggaggcctcgtcgggcagttcgcgggcggccggggagggggaagggccgcagaccgaacggggatacggggcgccgggggcccttccaggcccctttctcttccacggcccctggcgggacggaagggaaggggccgggccgcgagggcgcgggccgctgggggtcgtagcctgcgacgccaaccagcctttgctcgtccctcgtgcagacggagctgcgggcggaggctccatgttgggaagcggcgccgttcgtgcttgttagcgggaatccgggagccgcggggtgagctggcgggggccgggccctaagtgaagatggaggccccgctgcggcctgccgcggacatcctgaggcggaacccgcagcaggactacgaactcgtccagagggtcggcagcggcacctacggggacgtctataaggtaagtgaggctggccgtgcttttttcctgcggtcgactgggtcccgggaatggggccactttcctgcgaagtattggggcgagaggaggatgcttttattgttgcctcttggggagaaagcggccggggtcccttttactcggttctgagcaccctcgactcatggcttgttctaatcgctaccaacaggcagaactaaccacacagttgcaaaccgctgttgcactttttttgtggtttaaaggctttttaatagggcttatttatggtattgaagggaatttgaatctgcttgtggaattacaccgaaggatgctctagtgttagcatggaaaa

SEQ ID NO: 24969 - DNA, 1294 bp, Artificial sequence
  DNA replication origin
ggtctgcggcccttccccctccccggccgcccgcgaactgcccgacgaggcctccccgccagccggggcccagggccggctccgtacctaatgggggcggccccgtctttgttgagcgcggagcccgggacctacttcctagaccgcacccgcgtcctcctcccgcgcgccggccggcagctccgggtttgccgtcgccgccgccgccactcagccgctgcacggcgcgtcctctcgggggcggcggaggcgcgtacagtcgccgccgccgccgccgccgcaccacgttccccacccggggctgcgtcaccgggagacacgttcccagccagcatgggtcggcgcccagcggcccgcccgagcactccggccgcagaaccagagtgccgccctgaggcctgctgagaacacaacaccctcccgaccgcgccaccgcgcccccctagccgggcgcgtccttgcagggcctgggctgtctccctcccactctcagaaataaggcacacgcctgggcattcgtgggccaacgggccttggctaaaccgtccccacatttgtcaggtaggcctgtagggtgacgggtagaggaagaagggcgatgggaacgtagccctccaagttaaacacggaaaaggtacgttaagggcaccgggccagaagtaacctggcagcggggcgccggggaaggaggtgggggagtgccaggttaactaagtcccggcacaccctactgcaccttcctgttttgcaaaccgatcccggtggtaccagtttgaggctgcactgcacacctgcacaacctgccttctacttagttcttctgagacatttctgaaagtctgaattcctaggactgctcaatgacctttgtccctgttgggcacacgcagtgtctcatcgctggtattgcacctttaatgagaccaggagttccgcaaaagtaaaacaaaggggtcacagactggttctggttctaccacttcctcagtatgtgctctgggacaaaacagcatatttggcaacatctcggtgtccttatctgcagcttgaagagggtaagattttgcatctgacacccaggaaagtgtttataaagcgttttacaggatagtaaggggggttatcgaatataagaggtcttaaaatacttaacaatgcacagcatatatggaacaggagttcggggaagtaatttggctgatatttcacaagctgttttgcagtttcagttccagtcttgctctgaaggtagaaattaagttgccagtgttacattatactggctaagttattt

SEQ ID NO: 24970 - DNA, 762 bp, Artificial sequence
  DNA replication origin
cgatcgctaaggcggaacccacaagtccccggaggcgcctggtgggtgctgtccaaatgctgggaggaggcgggaggggggtggggaagaaggagctggaggcccggcctgcgcgaagctgcagccctcaccccgacagcgcgattcggtgacgcgggtaccgctcggccatggttcctccgcccaaacagggagcggctcggctacggcccgtctcccagccgtggacgcaggcacctagcagcccttggccctccctgtctccacagaagcagaaagtggagggccagaagaccccgtgcaggctgcagaagttctcatttgctactcaccccaactgtttctgtccctgcggttcttggccatggtggtccaggagctggtggcggtgaggcgctgtcactgcgctcgctgccttctccggggccgcaggttgctggcggtgggaggctccgtgcccgcgctgggcgcagttcgctcagactctgaggatgttgctgtggcgctggtgggaaggagtggggaggaaaagggaggagaaagcagatgaaccaagctcagcatcacaagcccgagttcacacagataccagcgtcacaccctccctacctcagtccacccccagaccgtgaagacagtgatagaccacgtaccgcaacattttcaacggaaaacacaaacaaataaacagcacccccctcgaacacactctcaaagaatttaacagcgttatcagaaatacacaaaccgatatactgcatg

SEQ ID NO: 24971 - DNA, 1969 bp, Artificial sequence
  DNA replication origin
agccgggagccgagcgcgctgggcgcggccgtcccgctgccgccgccaagcccggagtgcgccagcggccatggttcccgcggcggcgccgggcgcctgagccccgggacgcagtaagtggcgcaaccccggggacccggacccacggcctgggggtgcacggaggcctcgcgctgcccccgcgccgtcggcgaggccctgagagcccggagcgaactgggcaccggatcactcgggggcttcccatttggggtccggggccagcggggcgcaatccctgcgggccgggaggaagcagcggccgggcgggaggacgaggcggggacggggctgcttcggaggcgggaggaggggccggtcccggaggcgcgggctgcgcgggcgggggcgggccggcgggggcggggaggatgcgcgctgcagcccgcggcccccgagagccgcgcttttgtaagagctggccccttacatatggaaatgacgctcacgcgggtccccattcgcgtccttttgaaggacgcccgcccggaaccgctgcgccggctgcgaagtattgtcccgtttctccagccctaacaaagcgtcctccttcgctttgcagagcgctggaggcgggctgccggctgtgcgggcgctccggagagaccgacagaaggtaggcgagggcggcggggccgggggagcgcgctgcctgcccacacaatgggctgtctgaggtttctggtagtggcgatgggcaggcgagttgaggacgcatcgcaggtggccagggacttgggaggcgcgcttgtcctgcggccgcacctccgcttccccgcgcggcagcaccgctgggtttgggcacttccagtacccccgacgccccggccgcctgcccggagctgaaagccgcttctgtgctttgaccgagagcaggcttgagtccccgagggagcagaaggggtggtggttccgttggcatgtgccgcccgtacagccttgtgattgagacgctgcagaggaaactgcatggggaaatccgaggtgttagcctgggctgtctgagtagcggagagctgcttggagcccggaaagtggagatttttggaggtgtgcggggtcgatgcgcgtaaacagtttcccagtataatgcccaggagaaggggaaagaacaaaatgacatttggttattgcctaaaaggtgtggcatggaggtatggagtgtcggggaaggaagcttccagcggctaggcttctgtagctaccgaagcggcccctgacagaaggacactaggtgatgggaacagtcactgcttccagctctcgctgcgaagttaaaagagatagagacggaaagaggcaatttccctaaccccagccctgacaacccgaggtgaaggcaccaacaaaatgggagctggaaagactgccctaccatatatcatgtttccagacaacttggatattatgagatctgctttctgctcctaactaggacagatcctctcctggtgttgaggacttctaagatgggcttgccatacagctcaactcctgaatttattacatcgaaacagattgcgtagttgtcttttgtgactgacatggtagctttgtaggatgagaatcctgataaagtccatcctgacacatgagggaagcccctggaaccacgacgtttctcagttaggtccccgtaaacaccataacatacacacatgtttgcatgattccggaggcttgatgatctaacaaggaaaattccttttttctgtcagtttaattttaccttgagtcttctctcgtggtgagcatattatataggtggctgacctggaatattggtggctcttgctccggagttgaagggagctgaggatttccagagtgtgtataggaggaacattacaggctggctgaaaaacgagtttgtgtgttgtggtctcttcagctattgtcagtgtcctttgggaggtgatgtgaactgccc

SEQ ID NO: 24972 - DNA, 1428 bp, Artificial sequence
  DNA replication origin
cctcgtcctcccgcccggccgctgcttcctcccggcccgcagggattgcgccccgctggccccggaccccaaatgggaagcccccgagtgatccggtgcccagttcgctccgggctctcagggcctcgccgacggcgcgggggcagcgcgaggcctccgtgcacccccaggccgtgggtccgggtccccggggttgcgccacttactgcgtcccggggctcaggcgcccggcgccgccgcgggaaccatggccgctggcgcactccgggcttggcggcggcagcgggacggccgcgcccagcgcgctcggctcccggctcggccgcggccacccggagctctggacgccggggaggaagggccgggcccgcgcggggaggaggagtcagggcgacgccggccccggcgcggctcctcctctgcggcccgcgcggctcaggcagcggagggaggagcgggcggcgccgcctgagccctcgcagacgcgccctcccgctccgagcgcccgcctccgagatctgaagttagaaacgccggggctccgggtgcgggtgtaggaggctggcgccccgaggtcgccaccgagctggggctggcgctgccaccctcgccccttgcctgtccgcctccctttctttcccaacacgcctacactcacccgcaccgcggacactcgggccgcagcgtcttcgcgcagaggaagggcccccgccttcagcaagcgggactttaagggggtgatttcccagccctcgggtgtcgattggccatcaacattggaaagggtgttcaggaggcagaagggctgtagaagtgactcggaaccctgtagagcgagcgcgaccctcctgccgggtctacactggcttccgcacctgcccaccacgtcctcacaggctcccgcccctgtgcagccttctccgggtgaagctaaccctcggtcgcaagccacacaggacgaaaactccttggagttggtggttcccagcccaacagttgctcgatattaatcgcctcctacctactaccccagagtctgcgttctcactcccccatccctacacttctgatctcattgcagtcaaataggatcccaagtccaggccatggttctttttgagctgcagggttaaatgtgttgcccttgaaggatccgcctgatggattacaacccacaagtctggttattttagcaggaaactggtgattccttttctaccgagaaagcaagcaacagacaagaggaaaccagcattccttgagaatccagtgcgctagaaactcgacagaaattatcttatctaattctcacatcactcttaggaggcagacattattttgcagatgaggaaaatggatctcccagaagtcaaagagcttcctcaggatcacacagcaggaactccacagaactgagattcaaaagca

SEQ ID NO: 24973 - DNA, 1070 bp, Artificial sequence
  DNA replication origin
agagtcagccaagggagataggggtggggccgttttataggatttgggaaggtaatggaaaattacagtcaaagggggttgctctctggtgggcaggggcgggggtcacaaggtgctcagtgggggagcttctgagccaggagaaggaaattcgcagggttaatcactcagttaaggtggggcagcttctgagccaggagaaggaaattcacagggttaatcactcagttaaggtggggcaggaacaaatcacaatggtggaatgtcatcagttaaggcagggcagggccttttcacttcttttgtgattcttcagttacttcaggccatctgggcgtatatgtgcaagtcacaggggatgcgatggcttggcttgggctcagaggcctgacattcctgccttcttatattaataagaaaaataaaacaaaatagtgttgaagtgttggagcggtgaaaatttttggggggtggtatggagggagaatgggcgatgtttctcagggctgacaggtaaaacgggggaattgtaaggagagtttataggctttaaaaggccatgctgtagcaggtgagtgataacaggctttaatctttttaaagcatgctgcaggacgggatattggcgttgagtggggtaagggtgattaggttttaatgagatggtaaggggtgcatgatcggtcaccaaggagggagtagaggtatcttatacttgtgggttaaggtcgggggatacaagaggaggacgcaaaggaggctttggattgggaagaagggcggcaatgagatatagctgtagtccaggaatagtcagggaagcagataatttagttaaagtgtctcagcctaatacgggaactgggcaggtggggataactaaaaaggagtgcttaaaagagtattgtctaagttggcaccagagttggggagttttaagaggtttagaagcctgaccgtcaatacccacaacagttatggaggcaagggaaacaggcccttgaaaagaaggtaatggggagtgagtagcctccgtattgattaagaaggggacgggcctaccttgcact

SEQ ID NO: 24974 - DNA, 1065 bp, Artificial sequence
  DNA replication origin
ggagaggtatgcatctctctttcacacatattcaccacatatgcacatctcacatctcatatatgtgtgtatatgtgtgtgtgtgtgtgtatatatatatatatatatatatatatatatatatatatatatgtcaagttatcagagttttcaaacatttactaaaagaactttatttttttttcccaaggcagaagaatttttcttagtacagaacaaaatagagtctcctctgtctacttctttctacacagacacagtaacaatctgatttatctttcttttccccacatttcccccttttctattcgacaaaaccgccatcgtcatcctggcccgttctcaatgagctgttgggtacacctcccagacggggtggcagccgggcagaggcgccccccacctcccagacggggcgtcggccaggcggagttgccccccacctcccggacggggcggctgccgggcggagactctcctcacttcccagatggggtggctgccgggcggaggggctcctcacttctcagacagggcggccgggcagagacgctcctcacctcccagacggggtggcggtcgggcagagacactcctcagttcccagacggggtcgtggcggggcagaggcgctccccacatcccagacgatgggtggcggggcagaggcgctccccacatctcagacgatgggtggccgggcagagacgctcctcacttcccagacggggtggcggccgggcagaggctgcaatctcggcactttgggaggccaaggcaggcggctgggaggtgaaggttgtagcgagccgagatcacgccactgcactccagcctgggcaacattgagcactgagtgagcgagactcagtctgcaatcccggcacctcgggaggctgaggcgggcagatcactcgcggtcaggagctggagaccagcccggccaacaccgcgaaaccccgtctccaccaaaaaatacaaaaaccagtcaggcgtggcggcgcgcgcctgcaatcccaggcactcggcaggctgaggcaggagaatcaggcagggaggttgcag

SEQ ID NO: 24975 - DNA, 1219 bp, Artificial sequence
  DNA replication origin
gaactcaagttttgaaaactttcaaaattaaatgtcattttcaaaaatttaaattcgactgttctgaaaacagtggtgtgtgcccagttaggcttcaatttgtgctaaatgaaatccccatcagtactaatatgatttaataggttatatgtgagaatagaatgactgtaaacatggatcacattcaaccgggttaaggagttgagaaaactttcactgattgctgaaaattaatgacatttttttcttgctgtaaacaaaatatcaatgttccagccttaactccacagttggccacttgcaaaagctaccctttctagtctccaaggaattctgggagactctgagcaaggccacagctgaggcctggacactatcttcactgctccatctcatccttgggtatgcaactcagtgatgtaaagaaaagctccttccaaccatcctgaatccctgccctgcactccacagccccaactaaatggatcatttaaaaaatgaaaagcaaattcatgcacatctcctcaagagttgctcccttccttctaagcagtgtgggcatattataaggatcttcttcctcatgaggcttatttcgtttatgtctgtgtgtgtacagggagcaatagataaatacaaaaaataacataattaaaatatatagcatgccacacagggataaatactactgaggaaaataaagctgagagggaactagcgggtgtctgggtgggtggcgctgcaaagatgatacctgagcaaagagctgaaggatgcaggtaagtgacccattcggatctcaggtaactggggaagagagcttcaggctgaatgaacaccaaatgcaaaggccctggagtagggaggtgcctggcgtcgtttgaggaacagtaagaagcagtgtggctggagcagagggagtaagtgggaggcaatgaggtcgaaggggccaaaatggaagaggtcatgtaggacaggctgagaagcgtgggaaaaattggagggttttgagcagaggagtggcacgacagaatatgttgctaaagcctcttcgtgtctagccatggtggaaatatcatcaaaagagactggaaagataaatctggtaacaggtgtcccaaagtttgcacatataactactgaaagaggaaagggcttgaattccggagaagtgggtgtgtgtatagttgggaggagaaggtttccctaggagatgcac

SEQ ID NO: 24976 - DNA, 1525 bp, Artificial sequence
  DNA replication origin
tgggggacttctggcacggggtagtgggggcgctggcgaaccccccgtaggagccatagccgctgtccgcctcgctgtataggctcatcttgtccaggtccagatagtcatagtcggagaccccggagcccgcggcccgatggctctggggggattcagactctggggtctgcaccaggatgttgcgggcgcacgcctgacacaaattgtgagagcagggcaggatgatgggctcccgatagaaggagccgcacacggggcatttcaactcctcttccatctcctccatggggaccggtctgggaggagacagcgacggctgcagcgggtgcctgagctggcgaggtggccgacgggcccgtcttgtccagcaccctggccagcggcggcggctgtggtggtggtgccttcccgcgcagcactggcacggacacccagagaggcgctagctctgtgagccgcagccgcgtagccgccgcgccgcgcgccagcccggaccgcccctacctgccctcctagtcccgccccggcccatgagcagcggcccattgggcggggggcaagagatcgaagctctcattggccaccagacccgtccgtctcctcgtctccgcaggccacagggggttcggtagagtctgaggatagggcagtcttcgctcgcggctgcaagatctctgaagggggccggcgtgcggaggctaggggaccgggaaggaggagttaggcgggatgattcatcctcgcccggcttacttccgacctccggtgcagtctcccaggagctgggggcgtgagaaacccctccccgcagcgagtgggctgccggagggggctggggcttctcgccagcgtttgcgtttggctcccagctctgagctccgcgcccacctaccgcgggcgagtgctgcgcagcacggaggacgccccttctcttccgctgctggcagccttcgcaggcgtctcacccgggcctaggcttctgcacggcagtggggcttttctccttctccgtgaatccgctgacgccgtgccctggagctcccccatcccgggagtctgacggcgctggcgcaagccctggcgacactcttggcttctttcatcctgcgtccctcgtttcctaaagagcatgtataaagtcgatttcctagtgtcgacatgagattcaactgggtaaccgatggaaatggtcagcattagtcagaatctatgaccccttcgtttcatgctttaaattatagctcggcccagaggcctcagtgccgtggtgtgaacgtgcttccttccacggatccttcttcctcctcgcggcctcccaaagcacctggctgagctttttcgaggcccgctgggcctttggttcggttgaggcaagaacagtttgtctatttctgagtgcccgtagtttagtaaagctctgtaaatgaatcactgtgtgactgcggagtctcagtgtttcactccaaacagcattattcaaccccacgtgccctgggcatctgccatagcttacagcatcgtg

SEQ ID NO: 24977 - DNA, 1251 bp, Artificial sequence
  DNA replication origin
aatgagaatatggatggcaaggtggttgttcacccccaaacatggctggaatacatttttttgttcctttttgcagttagatatggccaatgcttagttctggcaaaggaaatgtggatggagatgatgtgcccagtttctaggcctggcccataaaaaaatcatctcatgcaattctataccctttttcttttctgtctgccactgaatgcagagaatccagccaggactgtgaagccccagggaatggctgcacttcaagtcagaaggagcctgggtccctgaatcatcatgtggaaggctctccacccagttcaatggtgcaatggaccacaagcaggaacttaatttagaatgtgcttattttgttagattttgtaattaaaaaatggatcccactctgactgaatcagagatgttgaagtcattgatctgggagggtatgttcctgggagtgggtggctgaggtgagatttcaaacaaggttgttgaggaagaggagttcaagtgactgagaggacatattgttggataaattgtgcgtgcgtgtgtgtgtgtgtgtgtgtgtgtgttgaaatcaccaagaatagggaaagaagtgtataagagagtgtggcagtgagcccagagctaaaagaaatcatgagcagggagtaattcacgagcagaaagtagaagcaacgagaggcagttaatgagagaagcagctgagggattttagcaagggatgggggaggatggtatggaagcagtatctgggggccaagaggacgccgccccatctccaagcccggtggtcaggagaatgaggggaaaatgtcagcgcaggagaggctacgagggaggaggagcagcatcggcaggaggagccccaggtgagagggacattcagggaagagactgcagattacagggatttttctaaagagggtttctgaatccagacgcacattggaggactcttgagatgctggggtcttgtgatgggaagatggagacagaatgaaggatgtgtggagccctacggggaggagagaataaagaagtggggtgacctgggagcctgggattcttgtgaccatggacacaggtatcaaaggcatgatgcagttagccctggggaacctgaggcaggtggtggtgatgaggggcagggagcagtggtgtctgggactcagtcttggctgctgtcgctggaggcagtgaggcctgagacaaatgggattagtcccactttaagacccttctctg

SEQ ID NO: 24978 - DNA, 1084 bp, Artificial sequence
  DNA replication origin
agctcgcggcagtacggggagcgcccgcccgccccgccctggacccaaccaagcgtcccgcggaggggtgcggccacttgggggcaggagaaagcggagtacgccacccctctagggacccaggaagcgaggcgagcctcaggtggacgcggtggtgtggaccacggcgatcagggcctttccccctgctgtggagacggaggtgcgaggggacgccggcggctccccaccttctggccgagtggccttctccgcctccggctggactccctcggggcgctccctccagagccgagtcgggctggccgggggcggctgtttggcctgagtgtcgtcttactaaagcggaacgccggaggggaggccactccgagagaaggcggtccccggcggaggtggcttcgtgaatcctgcagccccctgcccgcccgccactcgagacgccgcgcctcgtgggtttcacgctggatggagggggcgccgccgaggatgcccagcctccccctctaattctacctctccagttcctcaggtagacacagcctctgtctgctgtggttttagtgcccatggcccctcagaaattatttttgtcccctcccgatagtggctttgggggatggagggcgagagatgcaaagggccagtggaagattttttatagcacaaggaatcaagccaggagatggaggtttcattgccacctcggggtctggggagggggcgagccacacctctccggtcagtctgcgcccaccaggacctgctgctgggaaccgcacacgaaaggagagacacccagcacctggcccctagacccgcagggcgtcaacctcctgggcttctgcctttctaggtttcctctgactttgctgacccaatgacccctggccacgggtggcaaaaacgccctcactgagcccttcgctaaaggagtgccggggtttatgtgtctggcttttaaaatgggatgaggagacaaggaaacaggacctgagaaaggacactatccaaaatctgatgctctcagaagtcaactttaaaactgccctgctccgcggtggctcacgcctgtaatcccagc

SEQ ID NO: 24979 - DNA, 877 bp, Artificial sequence
  DNA replication origin
cgctttagtaagacgacactcaggccaaacagccgcccccggccagcccgactcggctctggagggagcgccccgagggagtccagccggaggcggagaaggccactcggccagaaggtggggagccgccggcgtcccctcgcacctccgtctccacagcagggggaaaggccctgatcgccgtggtccacaccaccgcgtccacctgaggctcgcctcgcttcctgggtccctagaggggtggcgtactccgctttctcctgcccccaagtggccgcacccctccgcgggacgcttggttgggtccagggcggggcgggcgggcgctccccgtactgccgcgagctcagcgcgcagctcccgcggctcggctgccgccgcggccagttggggcgggtcgggggcggggtctcagggggcggggattcgggggggcgggtcgggtcgggaggcgtgggtggggggcggggcggacgcggagcgcccctctggctggcggggccaaggggctgagaggagtggggcaggctcggcgccggtaggaagagtcagaggggtgaccagagagcccaacgcctggtgctcaagactttctccgaggtatgaacaagaaccaggcgtctgggccctttccgctcgccccatcgctcagccgccgcgccccggacgcccgctgtgccccctgccggcggggcggcggcgggactgggtttcgggagggtttctggaagtcgcgagtcccagcgaaggcagtgcaccgctctccgcctctttcttcgccttcttctcgctcccttagctctgggtgtcgggcaccggtggtaaggtcgcttctccgtgagtcggaggtcgctcactctgggacgggcggacgagg

SEQ ID NO: 24980 - DNA, 990 bp, Artificial sequence
  DNA replication origin
cgggactgggtttcgggagggtttctggaagtcgcgagtcccagcgaaggcagtgcaccgctctccgcctctttcttcgccttcttctcgctcccttagctctgggtgtcgggcaccggtggtaaggtcgcttctccgtgagtcggaggtcgctcactctgggacgggcggacgaggccctagggcagccgagcccggcagcgggggaggcgtggagctcggggcggcttcagcggcgggggcgggaggctggtcctggctgcagactgcgcgcctgggctccgtgcgcggtccctggttctctgcatcgcggaggtccccggatcacagggctccctggcgggccccggcacccaggtctgtgtcgctgtggctgggcgccgggactagcacccgagtcccgcgctcccgggggctgcgccgtgccgcctgttgtgcgcgcgcagaggccggacagcccggctgcgggaagggacccgagcgcagggtctgccccgcgtcccggaaagtgcctagtctgcggagccggaggttgagctggggcagatcggcgccagacgggggcctgggtgagatacgagttgggggtgcggcctgcagaatttgggtttctggaggagcttacggcgcgctggcggagccccaggcgaacaggagcaccggattcggctccgggagggccaggcactgtcaggtatggacagctgcggtccacccgtgtaagtgtaaagtctacagagattaaaacaacacctcgagtcctgggacagcataacctaatggtgcgggcgttttcttaaaggcacgaatagatgggaaaatgtcaaaataagcatattttaaagttgaaagctggcagattttcaggccgtgtagttgtgtagctagtgtccaaagaaatattagctcgttttcccccttaacaccttttcatttttatttttttacgcaaaatctgttttgccagtatttccctcaggagctgtgcat

SEQ ID NO: 24981 - DNA, 968 bp, Artificial sequence
  DNA replication origin
aatgcaagcaagcaaccatgggcagctctgtcctgtgagagagtaaagcacggagagtcagtaatggataggctcttgccataggcagtatagatcatagggtgcctttgtatagatcatagggtgccttgtacgccatacaaaagggctgggtctcctgctctaggtggtggatggtcgctcaagggtttgatgaagacagttcatatttcaaatagattgctgaacccttaaggtggaggagatatttaggaaggctattcctgtaagtagggacccaatgggggcatggttgcagtaatgcaggaaagagacaaaaggggtcagagtcgggatatgggacaagatacagaggggcatttaggagcccactcaggaagaccccatcaactggttggatgtaaagctgaggaagtagagacgggtacagcgattacattctgtaatgtaatgggcgctggatgggaagaggagagaggtgggtgatggggtggggctggtgaagtggagctagtggggtggggactaggtagggctgagctgggtatggggaaaaggaagctcttgttttgttgtattttggggattgtttagaacaggagggcgcttgacacatttagggactgagcggggaagaaacaagtagagtgtgataaattgaaggtgcaggagaaagatgaagaggcacgatcctaagaggactggaggaggctcaggtgaggagcatgggctttgcaggagggtgtgtgtctttttccctgagactggagggaagaccatcaggctgggtggatgggcagagatgactttgttaagtgagagggcaggaagtggactctgcaaaagagcagcagaaaaaagattagaggtgggagatcttggagaaccgtgtagcctggtggccaccagcacaggctctggagtcaggctgacttagattgcagtgccagctccaccacttactggcc

SEQ ID NO: 24982 - DNA, 1423 bp, Artificial sequence
  DNA replication origin
caaacagtaaattgccttatgttcaaaggggctcccacatctgcactcccgctctcatatccgctaagcatttttttcctcaagggagtgaccacctgccagggcctcagaagatgcctagagacaacgtctttcctcactcccaagccactccagccctgctgcctccaaggtcaggttcagcgcaagagtaggctcagaaacaactccgagccagtccctgggtcgctgccccagaatttaagcccatccttcaatttcctcagcagtcaaatatccctggtcacttacctctcccgagggcagcgccccgcgcttgacctcctcgtaagcgcctacctgctcccaggtggccaggaaggcgtgggtgggggtaaagcgcgcagagcgcgggaagccagcgcgcacatagcgggcggccaggcccagcactgcgggggaggtgtcctctcggtacaggactcggcctctgccgtggctcgtgtcgatgtccgccagaaaaggggcgatggccgggaagtcggtggggaaatcatagtccacatactgcgtttccctggggaagtcctgagtggagatgatgccgttggtgcccacctgggagaggagagggacaaaaaggtgacagtcgctcaagcccaaggacgctaccctttcgcgcagggagggaagggaactgacttaggcaaaaagcctctctctccttccccactggccagggagtctggattcagggaaacaagcgcaacttttgcgactgtcccagctccgcgctgcagtaggtccaggggccctaaaactcgttcacctatcttctcactcccctcacaaccccggagccccatgtcctcggagaggaagcctccaggtctgaagagggaacaccccagctccgcagacgggcacagccttctcgcggtcctaactgcaaagcccgctggccgccctagcaacgccaccttttctgcctgggacgcgtacgtggctgcgaacaattcttgctctcccctccaggtcattcttgctcccctacagcagcggggcaggcagcggcatcgctctctggccgggtaccaccgcaagggtgctggggggctccaggagtggggtctgtttcctcccctctggaggcagggtttccgtgagaccgaccccagggaagaagctgcgggaaaagtgccaggagggggctgaacttacgtagaggttgctgaatcgggcttcgtagaagtgcaggggattcgccagcttcaccacggctgagctttcgtcgtcgccttcctgcaggagctggtccccccacgactccccgtgtgggaagagctcgtctgggtgcagcgccgcggcccgcaacattagcaacggcagcagcagtagcactggtaacgacgacagcaccggccgcccggccacccggtccccc

SEQ ID NO: 24983 - DNA, 1010 bp, Artificial sequence
  DNA replication origin
gccactgtcgcgtctcgcagtcctcagactgggagtcattggaggcattgcccatggtggggtgcctggaaaagagatgcgccctcctctcccggcctttacctgggaggaagagggtctgagagccggagcgttccgagactcagaggaaaaaggggagggaccgaaatccagagcccccttcccgcacccagcgcgccgacggcggcttgccctgggtctcccgccgcgcgccgagtggcggctcggctgctgcatccgagcggcgctcgaggctcccgcgcctacccgcgccggccaaggccgggagccagagcctaggggagccgtcgtctccgcccccgcactgtcggggggcgggcccaagagtgctggccaggccttgcaagtgcgagtgtccgcgagctgcaggggaggcaggacgcgtcacactcgcgggggcgttccgagtccctggggcgcgccggcggggagggagagaaggagtctgagcacccgctgggcgcggcactgggcagaggcgcgcgtgttgccggtgtactgaagctgcccgcgaccggcgggagcggcgtttctcgcttcctcggggtccggtactcgaagcgcacggcagtctgacctcggctgggaagcgttaagccccagcagagggctgggagggagtgcaggagcacttgcggggtctgcgcagaatacacagaagatcggggcaacgagcaaagcaaagcaactcaccaaacaatgaagttaggagaacccaatcccgtgaaatgagcggaacaagggaataacagtgcaaaggcagcttgaagtaagaccagaatgttttgctttgtttttactattcccaggaagatacactaagaggttgggacaaaaattgggatgaagcgtaaagcaagtgtgtccatccaaggaaccaaaccacacaatgcgcaccaccgagcggcctgttgcactgccgctttgattcggttactagcatttcaccgtttcctatgtcaacagca

SEQ ID NO: 24984 - DNA, 1374 bp, Artificial sequence
  DNA replication origin
taagaagcagtaatggaggcaggagataggataaagttacttctcctccagcttttacaggtcagacctgttaatagtaggcactgcccatctcttttctccaagattgtggcaggtggaagtcactattaactgctttgatgctgcagcatcagtcttgctcttctgaagattaggaagtggagttgccacaactcccaattcctagcccccgtaagaggccagcacattctcggacatattccaggctcagctaaaacgttacacttgaggagacttgaactcacagcctcatatcatttagcagttagttagcatcaaataactgctaaagttgccccaaatcaaggcagcacgatgccaggacttggtctcttgtccttcagttccccaggtagccccactcttcccttcctgagagggaccagccattcctgcctgtggctttgtgctcatcaagtgcataactgtaagctgaaggacacctgtgtgtatttctgacagtgacattaagagcgtgttttgcaagatattacaaatgcttagcaagatgttcctccaagtatttcctctagttatcattatggttttataaactttcatggccacaaagagttacattcaaatatataaattgggaaacctataaactagatgtttgttggacttttaggacaaataacaaatgctctaaacttctgcttcagggacccttctcatctgggaccattttcaatggcagctggaatgctatgggttgggtactacattttgccctggcaggaacagaaggcaagcatggagaaccagcaccagtggatgagaggtacagggcagcaaactgcagctccaggtcgtcaggctggaacagtgacagccatcctaaggtggaaggggctgcctctttctcaattactaagccaagataggcaacagcgagaaagggacactgcccagggctaggatgaggagattggctagcttagctgaggcccaggactccctttcggacggtctgtattattgtataagaaactctagcctagcaacgcccataagccaggataaggaagtgggctaaagaggaggggaaactagtggggaaggctacagatctttacaaattaggacatatttttacaagttgcaaaaagtttgtagggcggtggaaagggtggaggcgtcaggggagagcatgagaaggctgagcagagccgggctgtggaaacgtagggagtgacttaccgtgaaaggcaaggagcagacggcgaaggtgatggtcatgatagccaggagaatgaggtggtccgtctcctccgccatggacaccctttcccctctcctgcgggccccggggccgccccggccactgcc

SEQ ID NO: 24985 - DNA, 975 bp, Artificial sequence
  DNA replication origin
ccgcccccgcagccggccgcgagccctccacgcccggcgggggcagcggaggcggaggcgccgtcgctgcagcctcaggcgccgcggtgccgggctccgtgcagttggcgctgagcgtcctgcacgccctgctctacgccgcgctgttcgcctttgcctacctgcagctgtggcggctgctcctgtaccgcgagcggcggctgagttaccagagcctctgcctcttcctctgtctcctgtgggcagcgctcaggaccaccctcttctccgccgccttctcgctcagcggctccctgcccttgctccggccgcccgctcacctgcacttcttcccccactggctgctctactgcttcccctcctgtctccagttctccacgctctgtctcctcaacctctacctggcggaggtaaggcgggagggccggcatgcggggcccgggcgggtgcgcggggccgccgggatcaactcccgctgaggaccagcgggggcggggggtgggcagcgagaggcggactggaaaccagcctggggaaactgaggcacacctggagtgtgagccagtgttttcgccttaaacttaagtggctgattggcttgattactgaggggttcgggctagggggtgagtgagtgagtgtgtgtgtctgacaacttaaaacagcaacggaacgaaccctttgttcggtgttctggccctccgaggtaaggcgttggtggcaccaacaaagtggcatcgcaagaagtagcagccccggtggctctgccgaagccggactgtgttgagggaggttggatgctgaggtagcagcagctctgctgaagctggactgctgccagccattacgtcaccaggcagagctgttcctctgctattgttgctgcgtttcttttattagaagcttatattccctcctgcatctcctttcctgtggctcgataagcctcacataaatttcgttcgatagttcccc

SEQ ID NO: 24986 - DNA, 1338 bp, Artificial sequence
  DNA replication origin
gccggacccgctcagggcagctctgcgggcggcgaaggagggagccagcgcgcccagcccagccaggctcggacagagggggcggggagagggtggagcgcggggagccaggcgaggggccgcgacgacgggactccattagccgctccggccacaggcagcgcttcgccagccgaggaaccggacgcggacaccgccgccccgcgagcctccagcccctcgcctgttgccgcgcgagtcccgggcccggagcgctaggagcgcgcggtgagggagcgggaccccgccgggacccgagggggcgcggcggggaggggaacggggagtcagcccgcgctgtgtctcggggccggccggcaggtgaagccctccgcggtccgctaggcggggacggtgtggggcgggcggcgccgggaccgaggaacgctgcggggcgagcggggcgtagggtcctcccgcagccccggccgccgccgccctcccgagtttctgccgaaagccccgggtcctccaccacctcccagcccgtggccggcgctgcgaattcggtgggattcgcctttctttgggggagtgacgcttacgagagccatttcctccgcgctcgcaggaaggagccatggctctggacgggataaggatgccagatggctgctacgcggacgggacgtgggaactgagtgtccatgtgacggacctgaaccgcgatgtcaccctgagagtgaccggcgaggtgcacattggaggcgtgatgcttaagctggtggagaaactcggtgagtagcatcccagccgcgtccaactaatgacttcccagaattggtagggggaggaaagaggctcacgacgggggaggggcccatttgagaaatcttggcatctcgcaaatgctttttggagatgtaaaatctttcagtatttaagcagatagacctgttcccctttgcgtcttattttgttttgctattctctgaattttcatatgtaatgattcgagcctcccaattataaccttaattgcgtagttacgcgggacgggggatgtgtgccggggaactcgttaattcttaacatttactgacagaacgataaaagaatgaggaaagtgtgttgggagggtgatattacagtgtccgtggttatctatgtcttcagcatacctgaatgttagtgacgtttggtatagagaatgatgcaaaatccatttaagaaaaatctgtgctggaaaatgtgcaactactggcgccagtgtgaagtttctgtggctgttctacgtggtggagtgcattaaaatgttccagtcatccactcttactaggggtggggcagtgcttgaca

SEQ ID NO: 24987 - DNA, 1280 bp, Artificial sequence
  DNA replication origin
ggactcgcgcggcaacaggcgaggggctggaggctcgcggggcggcggtgtccgcgtccggttcctcggctggcgaagcgctgcctgtggccggagcggctaatggagtcccgtcgtcgcggcccctcgcctggctccccgcgctccaccctctccccgccccctctgtccgagcctggctgggctgggcgcgctggctccctccttcgccgcccgcagagctgccctgagcgggtccggccggcctcgcctctgcccccgccctcccggcgccgcgctcgggggagggggctgcgggtcccgggcggggcggggcggcgtggggcggggcggcgcgggggtggcggggggcgcggcggggcggcaatctcggccccgcggagcgctgcccttttatggaaatgaaggacccggctcaggaattgaatccaacatccgggctctaggcggcgggccctgaggagggggagcgggggagcgcgggcggcctttcccggggcgctggtggccggcggggcgtctagagctcaggctggactggggcccccgcggcgtgtgtccgcgctggcagcagggagagggggcttgtccgtgagaaacggccccaggaaattcccagggcaaggtcgttttcggagaacaaagtcctctcgccccctccccacgcctgcagcgagacaaaaagcctcagggaggtgagaggtgccgcaccccgggagctggagagaggagtctgggacggagaaactttaaaaagtaaatgcccaaaccaactccttgaatgtcctacaaaagaataagaaaaccccgagggaggtgaaccacaaaaattgctttgcaagcaatgtccggcaccatcagcaactcctactggactcccaggagtttgcaagcgttcttaaccccttcggacgctccagccagatgccagtcaaacagatgatgctcttgcctgaggggaaaggaaagacacaacctagtgccacaggttttactcagaaactgtttccccagcttctccagctctttgtacttatttgtgtgtttttatatgcaagttagaactaacagtctattaaagctgttagatggagatacatgttccatcccaccctcagccacaccttggattttaatacttctggaacggtgcctgcaggtaccaggaagagctaaacaacttcacctgttgaagactggctagtgatggggaacggtcctcctgcttcccgcttttgtttccacttcccccattaactgttgtactctgttgagggaac

SEQ ID NO: 24988 - DNA, 1693 bp, Artificial sequence
  DNA replication origin
gcggaagcgctgggggtcacggctccgcgcgccgccggacagccggcggcgtctccacagcatgaattacccgggccgcgggtccccacggagccccgagcataacggccgaggcggcggcggcggcgcctgggagctgggctcagacgcgaggccagcgttcggcggcggcgtctgctgcttcgagcacctgcccggcggggacccggacgacggcgacgtgcccctggccctgctgcgcggggaacccgggctgcatttggcgccgggcaccgacgaccacaaccaccacctcgcgctggacccctgcctcagtgacgagaactatgacttcagctccgccgagtcgggctcctcgctgcgctactacagcgagggtgagagcggcggcggcggcagctccttgtcgctgcacccgccgcagcagcctccgctggtcccgacgaactcggggggcggcggcgcgacaggagggtcccccggggaaaggaaacgtacccggcttggcggcccggcggcccggcaccgctatgaggtagtgacggagctgggcccggaggaggtacgctggttctacaaggaggacaagaagacctggaagcccttcatcggctacgactcgctccgcatcgagctcgccttccggaccctgctgcagaccacgggtgcccggccccagggcggggaccgggacggcgaccatgtgtgctcccccacgggcccagcctccagttccggagaagatgacgatgaggaccgcgcctgcggcttctgccagagtacgacggggcacgagccggagatggtggagcttgtgaacatcgagcctgtgtgcgtgcggggcggcctctacgaggtggatgtgacccaaggagagtgctacccggtgtactggaaccgtgagtagcgggccggggttagggcaggacgggctgcccctgcatgggccgatgcgcaccggtgtgggtttgggactggtcgccgcgaagagggaggcgcgtgaggcctggcgtttggctggggcaggatggagattgagcagggagcgtcggcagctgaagggtaaacgagcagatggcaaaacccaagctgcctggggtcaggaggactggataccttcgggggtagcgcctcctgggtgagccgggtgctgctgccatcccctggaagtgatccaggaccggatccgcagcccgaggtttaatttcgtgatcctaccagctttgtccacctggggatctggttctgtctcatttaccctaaacagcctatgatttaaatagcggcacgtcttctggagtaggaaggtttgagaggatctgctcgagaatcaacagcttagttatgggttcaggaaaagtaaaagaatccctggagggaaaggagataggttgttcccactgggtgtgttcggagaggtggaaagcactgcgtgaagcagctctggcaagtggctccgctccctcggtggaatactggattctgtctcttaggtcctcatttacatatttttgtgtttgcatcttaaccttgaaaaattaccatttctatgcctcgtcttcctcatttgtaaaaggggagaaattgtacctacctcacgggattgttgtgaaagtaaattagaaaatatacttcaagggcttggaactatggttggtacttacgtgtgatatgagtgttaacagtatttatt

SEQ ID NO: 24989 - DNA, 1128 bp, Artificial sequence
  DNA replication origin
gggcaggtgctcgaagcagcagacgccgccgccgaacgctggcctcgcgtctgagcccagctcccaggcgccgccgccgccgcctcggccgttatgctcggggctccgtggggacccgcggcccgggtaattcatgctgtggagacgccgccggctgtccggcggcgcgcggagccgtgacccccagcgcttccgccacacattcaacgccgccgccctctccacccgaagtttctaatctttcaaatcccgacccgagctgcggcggcagcggcgaccgctccgcccccacgagacccgcagccgccgcagctgcgttctgccgccggccccattgtcacgcagcccgacgtaggcggtgcttcggcccccgccccgccccccggccgcgtgcgccgccccggaagcccgggctgcaccggcgccgcgcgcggggttcccccctgcccctctggctgggagggcagggtggtgtcaggtcgcccgccgctcttgggcctcctcggctcccttcctccttccttgcggtcttcatgcacagctgcctcggtcccccgcttctggaattcacagcccagatgtggataggctttaccccactcatccttacaatgtgggtcatgagcccagagccttaagctacgtgttaggagggccccaggatgtaggattcagcattgctctttttgaccttaggccctactgcggcctcgcctggacgttttgtcacctggccctggtgcctccagacagaaccaggacgcataggtgggtggatacgagggcactccaccccacacccatcactcaccttggtgtcaccactcccactgggaaactggaatctaaaccttgcttcatatgccatctcatattattacttatcttttgatgcttggatttcctgttttctcaacctcattgctaggcccttgatggaaaccaagtccatgtcagcctctcccacacagtgggtgcgcaatcagtcttagttgattataatgatgtcaagtccaaccagctgtggtaaagagtgttcgattgagaggtagaaaacaaccaggttctagatttagctttgctaaccatccacaggcaaatcacataatcttcctgatctttttggtt

SEQ ID NO: 24990 - DNA, 1217 bp, Artificial sequence
  DNA replication origin
aaaaaaaaaaaggttgggggggtgtggagtgggacgcatcaaacattcccctgctttcgttgcataattcgcccagaacctgccaggtgacctgctgactttgttttctgtcttgaccgtgcttcgttccacacccccctcgccgccgggcagcgccacactgagagggctcggcgcgtccgcggcgcgggcagaccccagtagtcacccggccttggactggcgtcaagatccagccccgccgaccccgcctcccgcccgctctggagctcccaggcccggcggcggcgggggcaccagggggcgtcctccctgcgggggaccagggggaccgtgcacctggcgacggcccgcgggagccgcgcggcaggcggccacccctccccatccccgccgaccgcggactgcgggtcccccagcccgggcccgagagccggcccgctcatccgccctcggggacccaggcctcaggtgaagctctgcagacacagacggatctgattagcgctcgctggtccttggggcggtcgctctgcagatttcatgcgaaatggggtcaaaaggccgcgcagaagcgtggagtctgcaggggaaggctccccggggtggaggggcttaagaggggtcgagacctttaggggttttctgtagggggcagagagcgggaattagggagcgaggctctcctgcctccgagctcacagtgggcctgcatatgggggtgactcaatgggagcggggacgtgggcgagtgggaaacaggcccgctgggtgagggtcggacctgcagactggccctgaaggctgagccgctgtcttgggccccttggggacacggagagccctgggtcccagctgaactgcagccagggccccgctccccaacagtcgggggacggaggtgaacgggagaggccacgggtgtgcaagagtggagctggacgattgctttcagaaatgagatgccaagccatgatacataatgacagcacctcagctgacctccgcagggcctctggaccggggactcaccgtgcccgcccccactccctctccaaaggtgagccaggagcataaagcttatcccaggcccaggtctccgaactatttgtcatcaaagatacttttgcttcaacacaaaaccaattttacaaactattcacatactctcttttgaaaaggaaaagaataatgcaaatgcaacgttggtgacctta

SEQ ID NO: 24991 - DNA, 1003 bp, Artificial sequence
  DNA replication origin
cctaattcccgctctctgccccctacagaaaacccctaaaggtctcgacccctcttaagcccctccaccccggggagccttcccctgcagactccacgcttctgcgcggccttttgaccccatttcgcatgaaatctgcagagcgaccgccccaaggaccagcgagcgctaatcagatccgtctgtgtctgcagagcttcacctgaggcctgggtccccgagggcggatgagcgggccggctctcgggcccgggctgggggacccgcagtccgcggtcggcggggatggggaggggtggccgcctgccgcgcggctcccgcgggccgtcgccaggtgcacggtccccctggtcccccgcagggaggacgccccctggtgcccccgccgccgccgggcctgggagctccagagcgggcgggaggcggggtcggcggggctggatcttgacgccagtccaaggccgggtgactactggggtctgcccgcgccgcggacgcgccgagccctctcagtgtggcgctgcccggcggcgaggggggtgtggaacgaagcacggtcaagacagaaaacaaagtcagcaggtcacctggcaggttctgggcgaattatgcaacgaaagcaggggaatgtttgatgcgtcccactccacacccccccaaccttttttttttttttttaagctcctaggaagccggttccagtttaagggttgggtagggatcgaccaagcagctcctctgatgtggttacgactttgccgaactcctcaagggcgagcttccctccccatctttctttcagtaataggaacattactctggagaaaaaaaaaaaaaaaaaacatgaatggggtgaaatggtaggcttgatccaaaagcaacgccgagaatcaccctacgacttccgtcaggtactgaactgaatattaggcaaaaatagtaaatgccgaaacctaaatcacacacatccaattttttttattttttttttaatctccccggg

SEQ ID NO: 24992 - DNA, 1355 bp, Artificial sequence
  DNA replication origin
ctgcgtctcaaaacaaaacaaaaaaaccctttgctcttcccaaccctttcgcagcccgccccagcggtggcgcgggaccagcaaaggcgaaagccgcgcggctcttgccgggcgcggacggtcgcgcaggggcgcccgcggcctccgcacccggacctgaggtgttggtcgactccgggcatccacggtcgggagggagggctgagctgttcgatcctttacttttcttcctcaaagtctacctgccaatgcccctaagaagaaaaccaagtatgtgcgtggagagtggggcggcaggcaacccgagttcttgagctccggagcgacccaaagcagcaactgggaacagcctcaggaaagggaggtcgggtggagtgggctttggggcaggagtcatggggcccgggccccggggacgacctggcgctcccggccctgctgaacgctgagttgcgcctagtcgggttttcgaagaggcccttgcgcagagcgacccacgcgcgcggcagcatcttcgattagtcaggacatcccagtaactgcttgaactgtaggtaggtaaaattcttgaaggagtatttgctgcgtgcgactctgctgctggtgcaacggaggaagggggtgggggaaggaagtggcgggggaaggagtgtggtggtggtttaaaaaataagggaagccgaggcgagagagacgcagacgcagaggtcgagcgcaggccgaaagctgttcaccgttttctcgactccggggaacatggtgggatttcctttctgcgccgggtcgggagttgtaaaacctcggccacattaagatctgaaaactgtgatgcgtcctttctgcagcgacgcctctttctgaatctgcccggagcttcgagccccggcgtctgtccctcagcctggcatggcttcttcgggggtctgctttgcatggggagaggggccacgcagcggcggactaggtttggggattctcggtaatggacccggagcaatgactaacagccgctccctctcactttcccacagcgatcaccctctaacaccctccctcccattcccggccccgcgcgtgacaaggtcggctgctttcagccgggagctagatcggtggcccggctcttcggagccttagcaggcgttcgccaaggggtgactggctgtcattgggagcaatatttggccttgaggagaccctggggaggaagtggcggggagctcgtgtttgcttgtgtgtgtgtgggggggtgtgtgtgtacacgcgcgtgggcagggtccctctgcgctttcctttttaagtgcctctcggtggtgaggctttgggcgggtgagactttcccgacctcgctcccg

SEQ ID NO: 24993 - DNA, 1278 bp, Artificial sequence
  DNA replication origin
ttcccagagctggaggcagcggcgtcccagctccgacggcagctgcggactcgggcgctgcctgggcttccgggacccgggcctgctaggcgaggtcgggcggctggaggggaggatgtgggcggggctcccatccccagaaagggaggcgagcgagggaggagggaaggagggaggggccgccggggaagaggaggaggaaggaaagaaagaaagcgagggagggaaagaggaggaaggaagatgcgagaaggcagaggaggagggagggagggaaggagcgcggagcccggcccggaagctaggtgagtgtggcatccgagctgagggacgcgagcctgagacgccgctgctgctccggctgagtatctagcttgtctccccgatgggattcccgtccaagctatctcgagcctgcagcgccacagtccccggccctcgcccaggttcactgcaaccgttcagaggtccccaggagctgctgctggcgagcccgctactgcagggacctatggtgagcaaggctacctggtgaggggagacaggcagagggggtctaggagcctccttggggggaagaagctggtcacaggctgtgaccgaggcaaaaggtggcctaattattttccaatagtggtgctggaggtggggatgctggcgctgaaagacctttaaatatcggctactgcccctgcccaggccttctctgtccagcagtccctgggagattctcacctttgggaagtgcggggcaggagagcagaaacaagagaagcccttggtaggggggtcgttgggaaaaactgtggggtcttgggctgaacgcgttgcccacgggctggaggttgcgatccccggacggaaagcgcgggaggaggaaggagagaaccggctctgaggtccagagagagtgagggggcagagcgacggcgagatggggagagaacacctagctggagcaggttctgcggtagagagcgcagtcctgctggcctctggagagtgcgcgccgctccggaggctgcgtcgaggggagtgtcacccaatctggcccccagctggcggggcgccctgagagcttgcgaactgcagttgcaggacgcgccttctccacgagctattttcgtcgacttgcggaacccaaggaacctcgcctctatcatttcacggtgtagggtccctagagacgacagccaagatcccaggggctcccaggacgcttgttcctgcggtgtcgtgtcctatggggagttcctggcgggacgaaaggcggacgcg

SEQ ID NO: 24994 - DNA, 1248 bp, Artificial sequence
  DNA replication origin
taggggtggccgggcagaggcgcccctcacctcccggatggggcagctggccgggcgggggtgctgacccccccacctccctcctggatggggcggctggccgggcagggggctgacccccccacctccctcccggacggggtggctggccgggcggggggctgacccccccacctccctcccggacggggtggctggccgggcggggggctgacccccccacctccctcccggacggagcagctggccgggcagaggggctcctcacttcccagtaggggcggccgggcagaggtgcccctcacctcctggacggggcggctggccgggcggggggctgagccccccacctccctcccggatggggcggctggcctggcagggggctgacccccccacctccctcccggacggggcggctggcctgggggggctgacccccacctccctcccggacggggtggctgccgggcggagacgctcctcacttcccagacggggtggctgccgggcagaggcgctcctcacttcctagatgggatggcggccgggcagagatgctcctcactttccagactgggcagccaggcagaggggctcctcacgtcccagacgatgggcggccaggcagagacgctcctcacttcccagacggggtggcggctgggcagaggctgcaatctcggcattttgggaggccaaggcaggcggctgggaggtggaggttgtagtgagccgagatcacgcctctgcactccagcctgggcaccattgagcactgagtgaaccagactccgtctgtaaccccggcacctcgggaggccgaggctggcagatcactcgcggttaggagctggagaccagcccggccaacacagcgaaaccccgtctccaccaaaaaaatacgaaaaccagtcaggcgtggcggcgcgcgcctgcaatcgcaggcactgggcaggccgaggcaggagaatcaggcagggaggttgcagtgagccgagatggcagcagtacagtccagcttcggcttggcatcagagggagactgtggaaagagagggagagggagaccgtggggagagggagagggagagggagaggaaaagagaaaaattttaaataaatttcgtgtagcctaagtccacagtgtttatagtctatggtagtgtacagtaatgtcctaggccttcacattctctcaccactcacttactgactcatctagagcaacatccagtcctacaagct

SEQ ID NO: 24995 - DNA, 870 bp, Artificial sequence
  DNA replication origin
ctgcccagccagccgccccgtccgggaaggaggtggggggggtcagccccccgcccggccagccgccccgtccgggagggaggaggggggatcagccccccgcccggccagccgccccatccgggagggaggtgggggggtcagccccccacccggccagccgccccgtccgggaggtgaggggcgcctctgcccggccgcccctactgggaagtgaggagcccctctgcccggccagccgccccgtccgggagggaggtggggggttcagccccccgcccggccagccgccccgtccgggaggtgaggggcgcctctgcccgaccgcccctactgggaagtgaggagcccctctgcctgaccagccgccccgtccgggagggaggtgggggggtcagccccccgcccggccagccgccctgcccgggaggtgaggggcgcctctgcccggtcgcccctactgggaagtgaggagcccctctgcccggccaccaccccgtctgggaggtgtgcccagcagctcactgagaacgggccatgatgacaatggcggttttgtggagtagaaaggggggaaaggtggggaaaggattgagaaatcggatggttgccatgtctgtgcggagagaggtagacatgggagacttttcgttttgctctgtactaagaaaaattattatcctgttgatcggtgaccttgcccccaaccctgtgctctctgaaacatgtgctgtgtccactcagggttaaatggattaagggtggtgcaagatgtgctttgttaaacagatacttgaaggcagcatgctccttaagagtcatcaccactccctaatctcaagtacccagggacacaaacactgcggaagg

SEQ ID NO: 24996 - DNA, 1396 bp, Artificial sequence
  DNA replication origin
cagtcggctctccaagggtggttctggtggagaaagatgtgtctcagccatcttgagtttgcccggagaccaagcacttgtcagagacccacctttgggttggtgggtagaagagcagatggtctttgcactttctcactgggtggatctcagggagtaagtgattattcacccacagaaggcccacttggtgctagcttgagccgtctctggattgtattcatccattcaacaaatacctgctgactgtttattacatgccagggctcttctaagtagtggggatacagcagtgaacagacaaaaatctctgtcctcaagaaatttacattctgggagtgagaagagacagacatctaaagaaaataaagaagtaaagtagtatgttgtagaccagatagtgataagtgccatgaggaaaaataaaggtgagagaggaaatggggaatgccgtggtcagtggggtgggggttaaggggggtaggggttaggggtgctggtggcttgtactgtgatgtagggtggtcagggaaggcctccctgtataaaaggtgccttttgagtgaagagcaagtcatgaggataacaggaggaagggaactccgggcagacggcacagcaagtgcaaagcctctgaggaaggactgtggctgctgtgtctgaggaccccagaggccagacggcctgggacagagtggggaggaggagcatggggggaagtgcagtgagagaagaccaggaccaataggaggccagagggagtggggccccagcaccactgtgaggcctggcttctaatctgagagatccggaagccagtggaggggtttgtgtggaggagtgacacggtctggctgctctgctgggacagacggtggggtgtgtgtgggagggtggaggggagagccgggcagaatcagggagactcttcctggaatccaggggagagatggtggtaccagggaccagcgtgttggggagaagtggctgggttctatatctgcctggaagttcaggctgaaaggatctgcggcctagagtgaggactgtgaagtgtgtgtgtgtgtgtgtgtgtgtgtgtgtgtgtgtgtgtgtgtgttgttgaacaggggaggtttaaaatgtaccttcccatccagccctctcctgcacaacctcacatcaaggttggaaggggatggtctttagactttaggatttctgccctcaacacgagtgtctgagaactgcctttgggggctgttgtaggaggtgaaaccaatttgatcataatgggagagaaaacccctccatggcccagggtggatttacctgatcacccatctttcccggtccttggtgccgtgtggacatctgcgacccagtggccactcaaaggaaatgacctcatgagcgt

SEQ ID NO: 24997 - DNA, 849 bp, Artificial sequence
  DNA replication origin
cacctgggcccacagctgcggagggtgcgctgggtctcctagcactgccggcccgcccacgctgcgctcgaattctcgccgggcctcagctgcctgcccgcagggcagggctcgggacctgcagcttgccatgcccgagcccccgccccctactctccgtgggctcctgggcggcccgagcctccccgatgggcgccgctccctgctccagggagcccggtcccatccaccgcccaagggctgagcagtggcggcgcgccgcacgggactggtgggcaattccggccagggcgcaggatccactaggggaagccacctgggctactgagtcgggtggggacttggagaacttttatgtctagctaaaggtttgtaaatgcacatcaatcagcactcttgtgtctagctcaaagtttgtaaacacaccaatcagtgctctgtgtctagctaatctagtggggacttggagaacttttgtgtctagctaaaggattgtaaatgcaccaatcagcactctgtgtctagctcaaggtttgtacatgcaccaattagcaccctgtcaaaacggaccaatcagctctctgtaaaatggaccaatcagcaggatgtgagtagggccagagaagggaataaaagcaggctgagcgagctagcacgtaacttgttggagtctgtttctgtggtgagggggctgccggtggtttgttctttcaactaaatcctgttgttgctagccgtttgggtctatactgcgcttatgaactgcaacactccccgtgaaagtctgcagctttactcatcaagccaatgagactgtgaatctgctagaaggaacggacaactccagct

SEQ ID NO: 24998 - DNA, 1217 bp, Artificial sequence
  DNA replication origin
tgggctggccaaggctggagccggctccctcagcttgccgggtggtgtggagggagagcgggaatcggggctgcgcatggcgcttgcgggccagctggagttccgggtgggcgtgggctgggcgggccccgcactccaagcagacaggccgggcaatgaggggcttagcacccaggccagcggctgcggagggtgtactgggtcccccagcagtgccagcccaccggcgctgcactcgatttctcgccgggcattagctgccttcctgcgggcagagctcgggacctgcagcccgccatgcctgagcctcccacagcctccgtgggctcctgtgcggcccgagtctccccgatgagcgccgcctcctgctccagggcgcccagtcccatcgaccacccaaaagctgaggagtgcgggtgcacggcggcggactggcaggcagctccatctgcagccccggtgcgggatccgctgggtgaagccagctgggcttctgagtctggtggggacgtggagaacctttacgtctagctcagggattgtaaatacaccaatcagcaccctgtgtctagctcggggtttgtgagtgcaccaatcgacactctgtatctagctactctggtggggccttgcagaacctttgtgtagatattctgtatctaactaatctggtggggacgtggggaacctttgtgtctagctcagggattgtaaacgcaccaatcagcgccctgtcaaaacagaccactgggctctaccaatcagcaggatgtgagtggggccggataagagaataaaagcaggctgcccgagccaacagtggtaacccgctggggtacccttccacactggggaaaatttggtcttttgctctttgccgtaaatattgttactgctcactctttgggtccgcactgcttttacgagctgtaacactgtaacactcaccatgaaggtctgcagcttcacttgtgaagccagcgagaccatgagcccaccgggaggaatgaacaactccagactcgctaccttaagagctgtaacactcactgaaggtctgtagcttcactcctgagccagtgagaccacgaacccagaaggaaaaaactccgaacaccggaaggaacaaactccaggcgtgccaccttaagagctgtaacactcactgcgagggtccgtggcttcattcttgaagtcagtgagacgaaaaacccacc

SEQ ID NO: 24999 - DNA, 1175 bp, Artificial sequence
  DNA replication origin
ttgcactccagcctgggcaacaagagcgaactccgtctcaagaaaaaaaaaaaaatcacctcccaaccgtatggaccacgctgacatcctgccatcaagaagcaaagctttccagcgtcccccaagcgctagggccgccttctgactcttccgccccgcctccgccccctgcactctcccaactggcgggaggagggcgccctcccagccaatcaacgtcccacagggcccgcctcccgcgcgtctttcaaaggtcttctaggaaccagtcagcgattagaggccgagtcttcggccacccaaaggcggagtaagaaaccagaagcggatctgattggttgctggaagacgccgcgcccacctcacagaaggacgaaccagtgagctaagctgcggggcgcgggctcggccggggcaccggtgagtcgccggcgctgcagagggaggcggcactggtctcgacgtggggcggccagcgatgaagccggtgagtcggacgtgctggggtttggaggagcgaggcggcagggacgcaagcggtcccggggacccgatcctgggccggagggcagccctagcctggtagcagtgcgactggcgccgtaaccgttctgcgggtcggggaggtgactcgcacgggcccagcacgggcacgagagacgaaggagcagggtcggtggccgacgaaggaaagacggacattcgctgtgcacctgctgtgggctgtcacctgtcccctgcggggtctcataagcctcccagccgcccagccaaagagggccgagcctcgttgtaccgaggaaaccgagccgaagagcttgagtgtcagcgatgagtgggcgcgataccccagccccgaagggtggccgggcgctacctgcgcccacagggcctggggaaaccttgagtacgaatgccacgccgcggcttgtgggcgacaccaccgctgtcaccatgccccagggccacctggcaatgctgctcttttcccgtgacgttcagaatcacagggcctggggaagcagaaacgtccagctctgttaggattaataaacctggtgaatgggccacacaaatttgaaatatgaatcatcaaagttgctttaaagaaaaaacagatgcaggcaaggagctgaagatcccccacctaacccatatttcctactgcccggctt

SEQ ID NO: 25000 - DNA, 1043 bp, Artificial sequence
  DNA replication origin
gcggtgctgccacccgctgcttgtccttgggaatgtggttcgtccgctcggctgaccctcggcccttctggggccccggggtggccgaggtgtttggcccccgggcggtgagacccgaggtcactgccgcacttgctgggatgggttccgggggtcgtggaggcgaagggttcacgaggctgaggggcagtgcgcagggttggacctgcccaggcgctaggttccgtgccgccctagtccaagggcctggcccgggtcgggtgccggatgccctttgctctggcgcaggctcctagaggccggcccggcgcctggctgagtcccactcttccccggggaggtggccgaactcctgagaccggtcgggggagctgtgcctggcgcgcgggctgcggcttctggcctggagcggaggcgagcgccgccctgggcgacaaagaggcggggcgaggccacctgtcagcgcttaggcgtcgccaggcctcgcaaccttcacctggatctggagagtgcgcagggccgcggccacaccggggcttcaggtccttgccgcgcgagaggcgaggagggcgcagcgcagaggctgagtggcgcagggtgggctgcgaaagtgcctctgctagtcttgaaagtaaaggtttggttaaaaataccctaaaccctaaaaacctctgtacctcctgatatgggttgaatattcgcaagaaggactggatgactaaatctgggctatctccgtgatttcagaggaaacactgctccctccagcaacttgaggctttgtttatacgggagtaattctgagaaggcagtgaaacgcgtgtttcagacccagcctttcctactcctgctaatccactgttttgaagagaaagtatctgagatattattccactaattaacacttttgttttccaactccggcatatgtccctggaatttaaatgctttcttcccttcctcctcaaatttagtttctgcagcgtatagttcgtttcagacacgtgatagcacctaaccatctgttagggtttttgaaaggt

SEQ ID NO: 25001 - DNA, 1043 bp, Artificial sequence
  DNA replication origin
gcgactcagccttcaaggagccgctagcttccaacaacacgctgcttccggctcccagaacttctcgggcggagggggaagcccccggggaggggacccccagtgacccgcgggtcccccgccgagggccgtagggagggagcgctcacctcggcgcggctcatcccggcggctcgggggcccttgcgcgggtccggggccgcggcggctctcagcggggttgggggcgcccggagcgccggccgcgggccatgccgtcggggcgggcggcgcggggagagtgcggtgcttcgagtcggggccgctgcagccgccgctgctgctgcctccagtgtcggctcgcggaggactgagccgcccgagccggagctccccacatgctactgattaacatacaccattacatcatgggcttggcagggagcgcccgagcggggggagaggaacccgggcggcggcgacggcacgcggggggagccggggggaggaaccccggacccggcgcagggcggggggacggattcctaagtggggaccagaaaaaggggaggggagcggagtgggaggagctggtggcgcagaggggtcgggtagaaggaacctccgagaggaacgaagaagttcggggaagaggacgggtccgggtgaatttcttcctgcggccgcctgcgtgttctggaggggtcgggacactcaagccactggagccccggcagaaagggacccgagggcgctcgggcgggggcggtgctgccacccgctgcttgtccttgggaatgtggttcgtccgctcggctgaccctcggcccttctggggccccggggtggccgaggtgtttggcccccgggcggtgagacccgaggtcactgccgcacttgctgggatgggttccgggggtcgtggaggcgaagggttcacgaggctgaggggcagtgcgcagggttggacctgcccaggcgctaggttccgtgccgccctagtccaagggcctggcccgggtcgggtgccggatgccctttgctctggcgcaggctcctagagg

SEQ ID NO: 25002 - DNA, 1341 bp, Artificial sequence
  DNA replication origin
ggaagggcgagcggccccgcagcgaggaggataacgagctgaacctccctaacctggcagccgcctactcgtccatcctgagctcgctgggcgagaacccccagcggcaagggctgctcaagacgccctggagggcggcctcggccatgcagttcttcaccaagggctaccaggagaccatctcaggtcagtgcgcccgcgggctgctagagcgtgcgggcggcgggggcggtgcttgcaggaaacgcgcgccggctccaggaagtttccggagttgcctcacttttggcgcaggaagccgggcgctgtcacctccgaacccgccctagcctgccgccctgccgaggccctgcgtggggcacagtcggggcttcctgggtggcagcgacctctcagccccggaactcgctgcagccgccttccaggggcccttcccgctcccagcgcgcagccctcctagaacgccccgggtgggcgtggacgggagcccggagccctctcgcctgagcgcccagcgcgggattctcggggtacctgcggttccaaacttgcccacgataaggatcacctgggcacttgctgcggcgacggcttcctgggtagttccttattgagatcccattgtcagggtgtgtatctggattgaagcctcggcgcgatccttccccgaaacctcggggacctgcattcccactgatttgccaggggatcggagtcttagagttgtgcttttttttttgtccacctcaagtttactccagttcaggacatttacaaaattcggcacaattttgggcacgggcttccccggagtttgaggtgtgaggttgattgggtgagtttgctgctgaaatctgtttcctccccccacccccaaccccgcaaaaagcagtaaagctactccgggattcggagggctccgtgggttccaggactcagtctcatccccgcaccctcccaccctaaaataaagccgggttgacccggtgctgttagcgtctgaggcgtgtcggcttttcacccagagggtggggatgcaatcagtgtgggtaggatgcaagatggggtgatggagagtggaaaatggggactttgctgcctgttggccagagaagcagtattggtctgtgtttaaaaaaataaagcttctggcttctacagctgggaccaaagacattattttccagtctacaccttccgtgtgtcttggtgacatttatttatttgccctaagaagcattctaccgttcactgttttttgaaagaaaaacagtgcgctggaaaggcaatctccctgccccagttatttctctgaaggagtgtagagcgattccaccaaat

SEQ ID NO: 25003 - DNA, 1329 bp, Artificial sequence
  DNA replication origin
gggctgggagtatttgaggctcggagccaccgccccgccggcgcccgcagcacctcctcgccagcagccgtccggagccagccaacgagcggtgagctgcgcggggcgcgggggacgcggctccggccgggcaggggagagggcgcccgggcgctgcttggggcgcggtccggagagggttcggctccccgggaccgggccggggcgcgcgcggagagccccacagcctgtgctctgccctccaggagcggggcggcgggcagcgatctgggcccggggcagtcgcctttgattatcgagggcgctggcgttcggggaaggttggcagcaccttacgagacccacacacgtccccggggcggcacgggccaccttctgcggagcctcgtgggcttcgccgccgtcgcacctccgccgcctgcgctctgcggccccagagtaagccccatccggtgacgagccgcagtctggtcaccccagtcccaccaggtcccgctgcgaggggaggcggaggggctcgctcagcaaaccagacggccgctccagtttctctaattggggttggagccccgtcacccttccccagatcacggccgcgggggagcgaagggacttcccaggactgcatagggcgcctcccgggacccacagcttggctggcccggccccttttgagcatcagctgaggctggacttggaggagatctcgctgtggagcgcgaatgagttcttccaccgggaccagctgcggccgggctgcagccgctgtctggttgctgatcccacagaaaatggtgcttgccccatggcctgagtgggcatgacccggctttgcaaagactgcaaactctaagcttttccgaatcaaatgcccctccctgcccagactgtctgtgcccaggaaatggtgggtgtggcaaaatgttggtcctagcgtgcagagccctaccggggggctttcacaacatgtttgagagtttattctgaattatcgggtgctcaaatagaaacactaaaacgattgccctctgagcagtaggcgttcaggtccagggagtcggggacgcatggtggaggctgggacttaggtttcagccttacccttcaagttcgccatgcgggttccagagactgcggaatgtttgtaaagtgactctgggaattgggttgctgcgcaatgaggacacctggacctcagtgactcaggctgtctctaggattctggggaagaaatgggagaaggctcagttaattctgaagaaaatgagactgatacaattaactacttgggcacagggcctgagaagaaaaagctttcgtcagcttcca

SEQ ID NO: 25004 - DNA, 817 bp, Artificial sequence
  DNA replication origin
gtggcccgcggggacgctcagcgcccgggccgtgcgcgcggaaagagccgcaccggaggaggcgcaggcggccgggtccctaccccggacccgcgggcggcgcccccgcccccacccccacccgccccgcgccccgggagcgcaggcaggcggcggtagggggcggggagcggccacggtggccgccgccggaccccagtcgcgcggccctcgcgccacgccccacctcggcccggacccacctgcgctcctgccccggccgcggcctggcccggggctgcaccagcccgacgcagtggtggcggcagcagcggtggcgggaggcctggctcactccccaccgctgagtcggaccgagcacccagcgcggcgcggcggcgcccaacgctcgccccgaaacccatttgtttggctaaaacggagtgacgtcacgcgccggcccaatcgacggttggccgggggaggggccacggatccagagtttcacggcgccccctgccggacactgggggcgggaagggggaagtgaaaagggagacctggatgacgcgtctgcggcccccaagtggtagagaatgaaagtttgagcacgactgtagggaaaggaatcaaacctcccaggccagccaagaagggtagtgacgccagggttcaatcagcagacatgtcaagtttatgaatattcgtgggtggacctgaagctgtaaatggtctcagatactattagataacctagtagacctggatcctcatactggttctgctgctagcttggaaggctggggttcagagtttcaatttgtaaaatgacaaaatt

SEQ ID NO: 25005 - DNA, 1109 bp, Artificial sequence
  DNA replication origin
tctaatctagaagtgggagaggcactgggtggagaaacatcgcaggggcctctcctcctgctctgtggcttctcagaaatgtaggttgatcattggaaccaaaattgttccatactggccccttgaggagtcttccattcagtcgcttttcattgtacttagctgagcgcctgctccgtgccaggtgggtttctccacgcagagaaccggagtccaccgggaacttggacatttcctcctctctgtcccttctgcctgtctcctgggaaaactaagaccccaggattggagaaggcagcatcaaagaagaaaacaggctgagccttggagggagggaggaaagaaggaaggagctgtggtaaaaaggaaggaaggaaggaagggagcagggaggagcgaaggaaggagcaagctgtggaaaaagctgactggggaagaaaggaagggagggagggaaggaggaagggaaggagtgaggaagaaaggatggaaagaagggagggagggagaaagggaaagaaggaagggaggagtgagctgtggtaaaaagctgactgggacctttgggggatcctggggaagatgagagacttagcctggcagtcagttctgaggtcccctagactgcacagctgaacagaacagaatcagagcatctttggtttagtaaaggagggagcccagggaaggaatttaaattgtgaacttttttagtgggtgcgtgccaggaggagagaggcagctctccagcaagaggaggcagatgggaaagtggtggtgatatggtgaggacctgggccagggtgacaaattgagaatggaaagggggcttatttaatgataacaggtagccctggtgaccccagacagagtgggaggtgggaggggaggagtcccagccagctaaagttttgagactggttcagatatgtgagatgagcctgagggtttagtaaccagaggatatttgggagtggcgctaggagaggaatcggaaaagatggctctagagtagaactgtttgccaaggaaaagaaaaaggggagaaaagaaatgaagtgcaaggagaaacttgagaagagggtgctcagagctaaaaactgcagtgg

SEQ ID NO: 25006 - DNA, 848 bp, Artificial sequence
  DNA replication origin
gccatcccatctaggaagtgaggagtgtctctgcccggccgcccatcgtctgagatgtggggagcgcctctgccccgccgcccgtctgggatgtgaggagcgcctctacgcggccgcgaccccatccaggaggtgaggagcgtctctgcccggccgccccgtctgagaagtgaggagaccctccgcccggcagccgccccgtctgagaagtgaggagcccctccgcccggcagccgccccgtctgagaagtgaggagcccctccgcccggcagccgccccatctgggaagtgaggagcgtctccgcccagcagccaccccgtcctggagggaggtgggggtcagcccccgccaggccagccgccccgtccgggagggaggtgggggggtcagccccccgcccggccagccgccccgtccgggaggtgaggggcgcctctgcccggtcgcccctactgggaagtgaggagcccctctgcccggccaccaccccgtctgggaggtttacccaacagctcattgagaacaggccatgatgacaatggcggttttgtggaatagaaaggggggaaaggtggggaaaagattgagaaatcggatggttgccgtgtctgtgtagaaagaggtagacatgggagacttttcattttgttctgtactaagaaaaattcttatcctgttgatctgtgaccttacccccaaccctgtgctctctgaaacatgtgctgagtccactcagggttaaatggattaagggcggtgcaagatgtgctttgttaaacagatgcttgaaggcagcatgctcgttaagagtcattaccactccctaatctcaagtacccagggacg

SEQ ID NO: 25007 - DNA, 966 bp, Artificial sequence
  DNA replication origin
tcaatcttttccccacctttcccccctttctattccacaaaaccgccattgtcatcatggcctgttctcaatgagctgttgggtaaacctcccagacggggtggtggccgggcagaggggctcctcacttcccagtaggggcgaccgggcagaggcgcccctcacctcccggacggggcggctggccgggcggggggctgacccccccacctccctcccggacggggcggctggcctggcgggggctgacccccacctccctccaggacggggtggctgctgggcggagacgctcctcacttcccagatggggcggctgccgggcggaggggctcctcacttctcagacggggcggctgccgggcggaggggctcctcacttctcagacggggcggctgccgggcggagggtctcctcacttctcagacggggcggccgggcagagacgctcctcacctcctggatggggtcgcggccgcgtagaggcgctcctcacatcccagacgggcggcggggcagaggcgctccccacatctcagacgatgggcggccgggcagagacactcctcacttcctagatgggatggcggccgggaagaggcgctcctcacttcctagatgggatggcggccgggcagagatgctcctcactttccagactgggcagccaggcagaggggctcctcacgtcccagacgatgggcggccaggcagagacgctcctcacttcccagacggggtggcggccatgcagaggctgcaatctcagcactttgggaggccaaggcaggcggctgggaggtggaggttgtagcgagccgagatcatgccactgcactccagcctgggcaccattgagcactgagtgaaccagactccgtctgcaatcccggcacctccggagcctcagaaagaagtttagaacagcggtcggagttcagtcctcagttcccccttatcagagg

SEQ ID NO: 25008 - DNA, 929 bp, Artificial sequence
  DNA replication origin
ttttaacttcagcaaacggcactagatttaccccctgactatcccagatttcccccagaaattactggaaaacgacatcccccgtccctttctccaggggatctctctgaaatctccttcgggcaacgctagctacaaacggagaaagaaattagaaagcgacccaaataatggtcgggcgcggtggttcacgcctgtaaccccagtactttgggaggccaaggcaggcggatcacctgaggtcaggagttcgagaccagcctggccaacatatagtaaaacccgtctctgccaaaaaaagtacaaaaaattagctgggcatagtggcgcacgcctgtagccccagctacttgggaagctgagacaggagaatcgcaggaatctaggaggcggaggttgcagtgagccgagatctcgccactgcactccagcctgggcgagagagtaagactctccgtttctctcaaaaaaaaaaaaaaaaaaaggaaagaaaagaaagcgacccaaatgagttgtgtgcaaacattatgaaagtgttgtgactgccagctggtagccatttatgaagccggggtaaaaatctagaaactgctgcgcgaggagggatgggcccggatctctccttattcgtttgctctttgctgaaaggatggcagcgatcctccccgtccactggcaagtgagtttcgtgtggattgtttaccgatgatcaatctctcacaggaggccaggcactgccccactacatgtacaaaacactccaagctgtccgcaaatgttatgaaggcttaaaataatcctaacgattccagactgtggatagagatagaaaaaattaggactcaccaccaccacctcgccctacatctgacaaagtgggaacagaagcagttaaggaatgaacagcagaaccgtttctacaccaacag

SEQ ID NO: 25009 - DNA, 1058 bp, Artificial sequence
  DNA replication origin
cccctgcggcgtcccggccccaacaagagccccgcggcggcaaccggatgcccgaggcctacccagcgggcggcgtccgggccccgcggccgcgcccccccgcccggcgcggccctcccgcctgccccaggaccccgcggccggcgccgcctccccccgcgctccccgccgccggcgcccgtcccggtgcggcctgctctccctcaccctgtgcggccgggaaaggagaccgggaagacgcggcggcgccggcactacagcccgggccgcccgctccgaggcgccgccgccgccgccgccgccgccgcagtcgctcaggtgccgtcgcgccgctcggcaggaaacgggcggcttcggggcggggcggggcggacccggcacgtcctggcgtctgggccggcggcgccgggagaccggccccttaaagggacagccgccggcccgcctctgcctccgcgcgcctgcccacgcgctccggtactcgctgctcgcggctggccggctcgggattccgggctttcttcccgagaccgcgtcccccagctgggccgaaggtggacgctcaggggctggaggctcagcggaatcccctgcgttcagtagccccgctctcccctgtcccgaaggttggtctcgtctcgcgcggccctccctccagggcaccacctggctccccacgccttttaacttcagcaaacggcactagatttaccccctgactatcccagatttcccccagaaattactggaaaacgacatcccccgtccctttctccaggggatctctctgaaatctccttcgggcaacgctagctacaaacggagaaagaaattagaaagcgacccaaataatggtcgggcgcggtggttcacgcctgtaaccccagtactttgggaggccaaggcaggcggatcacctgaggtcaggagttcgagaccagcctggccaacatatagtaaaacccgtctctgccaaaaaaagtacaaaaaattagctgggcatagtggcgcacgcctgtagccccagctacttgggaagctgagacaggagaatcgca

SEQ ID NO: 25010 - DNA, 1380 bp, Artificial sequence
  DNA replication origin
cctgagcgactgcggcggcggcggcggcggcggcggcgcctcggagcgggcggcccgggctgtagtgccggcgccgccgcgtcttcccggtctcctttcccggccgcacagggtgagggagagcaggccgcaccgggacgggcgccggcggcggggagcgcggggggaggcggcgccggccgcggggtcctggggcaggcgggagggccgcgccgggcgggggggcgcggccgcggggcccggacgccgcccgctgggtaggcctcgggcatccggttgccgccgcggggctcttgttggggccgggacgccgcagggggcgggctcggagggacctcctcggcctcgcggggccgctctgggcccgaccccggctctgtcgcggcacccggggcgcggccgagggacaccccccaccctccccaaggacgactctcccgaaggcgaggtcgacccgagcgggccctggggtgaccgaggcacctatttttagccaagcctgagggcccccgggagggaaggcggattaccgcctcctcggccggtggacggaggcagcgcgtctccggcggcgtccccgggccggagctgggccacacttacgccatgctggagttccagtcctcgccgctgcctccggcggtctgggcgctcgcccccttccccggcgcccctcccgctgccctttgcgagtccccaggtcagggcgggaggcggttgggcacggaaagcagcatgaggggggactttggaaaaatccatggaccactctcgacaccggcgaagttatcccttcctgtccccgaggggtgtgtcctagcgattcggcctgaccccttcagtttccaaaagtgagatttttggccttggggacctcgccggaaaactacgcgggaagtctagagaagtcgtctggctctcagccatacgtctggtgtgggatgtgcagccccgcatgctggcggtgaaggcgctgggtgcactagatgtgggcagccccggacgcgggcagcggcgtcccagccggccccagttgcaccttgactaggttaggttgaaagtaagctgttcagtgttggcccttctttcctgtgggaggaaggaggaatctaaattcagaactgtgttggcaaacggattccttagccgctatttaagttagtagtgcttaaagagctacggttgaagttaactgttaaggtgtgtgtgtgtgtgtgagtgtgtgtgtgtgatgactttgtggaaagccttgagtaaagagctacggttgaagttaactgttaaggtgtgtgtgtgtgtgatgactttgtggaaagccttgagaaatgtagacactcatggccagcccagctaaagataagcatcttcggtgaactaaag

SEQ ID NO: 25011 - DNA, 923 bp, Artificial sequence
  DNA replication origin
cccgagaacggggtgagcgcgccggggaagggcacggcggcgaagggggcgcggggcggccagtcccgctgctgctccgtcgtggctgcgcggctgctccgcctgactccccggagctccgcgcgccgcggccgccccgagtcagagccggcaacaaatgggacccggcagcagggggacctgcctgcgctgagcgccgccgccgaagccccgcgggagggagggaaggaggagggagcgggcgcacgagaggctggggccgcgcgggggaggcgggggccagcgcgcgggcaggtgggagccgccccgccccacgcagagccaggcgcccgcccccggcccgcggggcgccccctcccccggcgcgtggggccgtccgcgcccactccccgcccccctcggcccggcggaggctcggcccctgtgttatgtaaacatagagtaaaagggaaaggaagttcttaaaggagcagctctgttttttttcctcacttccttccccaaacttagagcgcggggtcctcagccctcgccgcctggttcttcagccgcgaaggcccgcgggagatcctggaaacgagcggccgcggttcccaagcccacgttttcctggctggagttcgatgggattaacttcctctccgagtagaatagcgctctctcgacgtcactgtgtcccggcttacaactagaggtgtcgcacacacccacttgggtgcctccccttccaaaaccaagcagaaaggcgtctagaaaattagaaggttttgccagttggtgctggcgtagaggacgtttcgaaggcgcttggagcaccccaccgttgcactggatgtagctaccccggcttgtggtcaatagagctccacctggcttttggggggtggcggggggatgggggaagagttgttttttaatccata

SEQ ID NO: 25012 - DNA, 1548 bp, Artificial sequence
  DNA replication origin
ggccgtatcgtgggggcgggggcaggggctccacttcccgcgcgccgcgtccgggccggggagggcgggcagggactccatgtgaggcgccgcggtcgcgggcgcttcgcggggtcgcttcccgaagctgagaggccggccggcgcggagccccgtcttcccacctccctcgcggaccgtggtacccgcgcccccgaactccgagcgcggcgccgtgagcttgggccgccgcgggctgtgggatccccggctgcgctttgcaaattgttccgatgaccgccgcgggccgccgcagcccgagagcagtgaactgtgtgtgacccgggccggccggccctccgcttctccccgcttggagtgctctggaggggagggacaggatgcggctgctcggggcctggcaccggggcgcgggccgtatccccccggtcccggcctcgctgatgccctcccggctgcggggagctcgccagcctcgcccgcctcggctccctctctgctggtgaaagccgcatcttgaagatagtaattatgtacaatcgttaaacggcagcaattagagacttcatctacttcctgagtttccttgtgacatttctattgtttacccttaataagccaggagagaggctttgcgggcttaaaactggatatagtgggcagtgaaaggggagggggaagggggaagtgcaggaaactggggggaaggaacaacttgggtttagtgttgaagaaaggattattttttcctttggatgtgtcgctctgggaacccgcgcttttgtccttctgcgttgaaagacctgtattcagaacatcctcggcgctgataggtaggcttagcacacatatgaggagtcatggctgtgggaagactcagggaactttgcaaaacgtgttttgataagtgagtgccttgaagtaagtgctgacttaaaaataatttaaagagaggagtttttgagggaagcttccagacaccgcacaactcaaagcttcccagtcttcctgactttgttgctagtgcattaagtgggggtggtattggaaatctcattacctattttgaagctgtttgcagataagtgtttttctcacctacatcttaattgcacttcaaagacaaatatcagggttcacaggaaggcgggaggaatgacaggagaaaagccgcagtttagtctgtcttatgtaacttcagcccaacctaatcttgtggagtttggttttgtttgtgtggctggcttcagtgtgtttaacactgtgaacttgacgcggaagattaacgtatgccagaactttatttcattatttccttttgaggaaatcattgttgagatgtttcagaaaagcagcgagtgggcctggagaggttttgtgttcatagctggaagtgcagggcattccgaagccacggaaaggattgaaaccctggattgtcctagtatcatagtctcactccacaggagcccgggatataacgttgcagttgcatatggtctgccctttgctaatgcttttccaggagaccaaagtatgacatagttg

SEQ ID NO: 25013 - DNA, 1530 bp, Artificial sequence
  DNA replication origin
gcctgtacgcccgcgggagtgggccgccagccagagccgagagagggccccgcccgagccctgcagtcaggcctccaggtcggccgcgggccggggcgccggtcgctgggaaacctcgcggcctggcggagtgcaggggtcgggtcggcctcggggattggagggtggggtggcccggccgggaggcgagcgccctgcgcccgaaggagctaaaaccgagactgacagacgggacggcgagcggggtccactggccggggagaaggggccggggcggcgaaagcaagcccagcagggcccgcggctgctggttttccaggtctcccggtaggatgagccgctgacggcttaggagggggccgcttctcctggcctcgaagggcgaggccgccacagcgggggctcccgccacggctgaggcctcccgcgtcccgagcagacggggcccagctgggcctgcctcgggcccccggggatcctcccaggaaatccaggtcttcggccactggatttgggggagtctggccctccgttggggtctcccccggcactgagctgaggctttcgggggaagcccgagcaattcccagtttgccttggctcatccccttttccccagtcctctagatctcttttttttaaaactgagtgccttctctttcttttcggacctgtcagcggccctgaaggccagaggcaggctctggaatggggaagcggtcccttcggcgtcccgggcagggccaacttgccaggcaacccattccagttacctgcaaggcaggggacgcagtcaagtccccgcgtccacttaaccggaagcggccagccctggcgcgcacaccacatgttcgaacccgcatctcacacccagggagaacttcgctgttattatacggacaaagctgtaacccaaaaccaggcgtgccagtgctaggtgatggtttagtgcatatagaaacgtgtttttaatcatgcaaaagaggaacacaaaagagtcgggcaggagaccagcgcatcccacgcaaatgggagcagacgcggtggaaaacaaccagaatgagaagatgcaggatcagagtcagccatgacttccgcctgggtttttgcctccttcgagacttttaagatgaacagcagtctctctccttttcgtgccacgaaagggtccaagcccccatcaggcatctgcatgcccaggtttgtgaccaggtgccctgagcacctctgattttctcttctaaaccgcccgagcctgtcagcgcagggtgctctgataaaacctgattcccctagtcgccccgtttccgcccttgggttggtgtgacagaaaagactgggagcccctgggactttcccctggaatggggagagcaaaaccccaaacaaaacccatccccatgttttttggtattaggctctgaaactgcacagattataggatttgtcttggacagaattaacattacatgtgaaactgtagtgctctggtgtattgagacacgttgtataggattgcttggaccatct

SEQ ID NO: 25014 - DNA, 1079 bp, Artificial sequence
  DNA replication origin
agtaggggcggccgggcagaggcgcccctcacctctggggtggggcggctggccgggcgaggggctgacccccccacctccctcccggacggggcagctggccgggcggggggctgacccccccacctccctcccggatggggcggctggccgggcggggggctgaccccccacctccctcccggacggggcggctcctgggcggggggctgaaccccccacctccctcccggacggggcggctggccgggcagggggctgacccccccacctccctcccagacggagcggctggccaggcagaggggctcctcacttcccagtaggggcggctgggcagaggcgcccctcacctcctggacgaggcggctggccgggcggggggctgacccccccacctccctcccggacggggcggctggccgggcggggggctgacccccccacctccctcccagacggggcggctgctgggcggagacgctcctcacttcccagacggggtggctgccgggcagaggggctcctcacttctcagacggggtggttgccaggtggagggtctcctcccttctcagatggggcggctgggcagagacgctcctcacctcccagacggggtcgcaaccgggcagaggcgctcctcacatcccagacggggcggcggggcaaaggcactccccacatctcagacgatgggcggccgggcagagacgctcctcacttcctagacagggtggcggccgggcagaggctgcactctgggcactttgggaggccaaggcaggcggctgggaggtggaggttgtagcgagccgagatcacgccactgcactccagcctgggcaccattgagcactgagtgaaccagacaccgtctgcaatcccggcacctccggaggccgaggctggcggatcactcgcggttaggagctggaggccagcccggccaacacagcgaaaccccgtctccaacaaaaaaatacgaaaaccagtcaggcgtggcggcgcgcgcctgcaatcgcaggcactcggcaggctgaggcaggagaatcaggcagggaggttgcagtgagccg

SEQ ID NO: 25015 - DNA, 915 bp, Artificial sequence
  DNA replication origin
gagggaggtgggggggtcagccccccgcccggccagccgccccgtccgggagggaggtgggggggtcagccccccgcccggccagccgcctcgtccaggaggtgaggggcgcctctgcccagccgcccctactgggaagtgaggagcccctctgcctggccagccgctccgtctgggagggaggtgggggggtcagccccctgcccggccagccgccccgtccgggagggaggtggggggttcagccccccgcccaggagccgccccgtccgggagggaggtggggggtcagccccccgcccggccagccgccccatccgggagggaggtgggggggtcagccccccgcccggccagctgccccgtccgggagggaggtgggggggtcagcccctcgcccggccagccgccccaccccagaggtgaggggcgcctctgcccggccgcccctactgggaagtgaggagcccctctgcccggccaccaccccgtctgggaggtgtgcccaacagctcattgagaacgggccatgatgacaatggcggttttgtggaatagaaaggcgggaaaggtggggaaaagattgagaaatcggatggttgccgtgtctgtgtggaaagaagtagacatgggagacttttcattttgttctatactaagaaaaattcttctgccttggaaaaaaaaaaaaaaagtttcatcacagtttacaaactcagtgtccccagtttcatcagggtcctcccacacatccccattccaagctgcagggtcccattcttttccaatcaaaccctcactttaacagtagacacctggcaaggctgtacattcagctttcattgcaggtcagccactctcatgcttagagcttgtgtctgtttttccacaatttcagctctttctctacaggag

SEQ ID NO: 25016 - DNA, 1431 bp, Artificial sequence
  DNA replication origin
atgccccttggccgccaccgtcgccgactctccgcccgccgggctcctgctgccgccgccttcgtgctcttcgtcgtcctcctcgtcctcgctgcagcaggcgagggcggcccccgccgggaagggacagcggggctcgaccgccgccggggccggaggtgctggtggtgggaggaggctgctaggcccaggcggtacctccgccatcctagaagcgacacagaccgagaggggaggccatgaaacccggccgaggagcgcggagaacagggggcgacggatggggggcggccgaggtggggggaacaaaggcagaaaccgtccctcacggagctgccccccaattccccgccacccccccgctcttcagcgccgcccagctgctcagccggccaccgtccccgtccgcccgggcccacccgccagccctgtcactcgcggcccctcctcacggctcaccccgcacgggtccccgccgccgctgccgccactcctcttcctccgccaccgccgccgcctccttcgcagccgcggcagcctccacagccgccaaggttctcactcagccgccgtcgccgtaaagcgcctcagctgttaggccgggtaaagtttcctgggcctggctttacgacacttccctgcctgccggctgcccgggccaagagagaggggcgtggagggaggtgacctgtggaggggcggggacaaaggtgtctcctgcgggctgcggggaaggccgcgtgctagtgggtggggctgtggggccgggaagttgcagagggctttggagtcacaggctcccaaaccctcttcctcggtttgggggcgcctcaacctgcggtgcttgccacgcggggccggggagggatggaccgggcaggcgctccctgcttaaagtctaccgcgcactccgagctgtagcgaatctcgccaattcggggcctgtggaacaagccgtttacaagtcacctaaaaatgcccttttaaagctgcacagcgtttaatgtttgccctgaccaggggcaaggaggatgggggaggagcgattaaaaatggagcaaatcagagaagccgaccgaaaaagaaaggaagatttgagctgtgaaaatatggggatggctgtcgaaacgtggtggtttgcagtgtgaattaagttcagctggcccttgccactttgaggcaagggagtcagccctcttcctctccctccttactctgctcctcgcacccagtaaaattggaggcaaaagtgactgacaggtgttgggcaattgctagcacacctggggaagggttagagagaggtggtgaaagagagtgaccagggctaagaagcacactcctaaacttgtgacacaaataggttaggaagcactggtaaacaggtggcctgatcctcccaggggatctgcctatcgagtgcaaagggga

SEQ ID NO: 25017 - DNA, 1395 bp, Artificial sequence
  DNA replication origin
agccagggcgggcacacctactcaccgcccaatccccggccgtagccgcggccttatgaataagcaacaaagcgaagcgccctccccctagcgtcccagacagcggagggagtcgccgccgctaccgccgccgccgccgcagggcccgccgctgggatgccgagcgcccgcgccgccgctgcctctgtcctccgcgcgctgctcagctgaaggcgcacaggtgaggacgggcccggctccggccacttgggcggccgcggctgcagacgtggcgccggggcagggacggaaccggagcctcagtggcgtggggtcgctccgcgagcgtaacagtcccgggagcgttgcagccctgggtgcgccaggcgtgcgccccgatcctcctccggagcgcggtgcccaggtgtggggtgcgcgggggcagctctgggcgcgctgggcgcggcgcgcaggcctcggaggactcaccgcactcctagctccagcccagcctcccagctccgcaccagcgagccggcctttgtgctggcggagcttgcagggctggctgcttttgtgtgggcttttctttctctttctccctccgctcgcaatcccacagcagtgagagagaagttcccgaaaacaacggtttactcctttcaaaccgtcgatcgcagtgtccccaatgccactcagagcctaacaatcgaggagcgaatcgttgctgcggtcaccaccgaaatatgtcctgccactttgcagaaaacaaacagttgagtgtttagcgcagagatgtcgagcctccttgctcagcccctgactcgtcccccaggacgcggctggaggacgctccttggaaaggtcacttaattagaaagagggcctgcgggttagacctgggggaggcgaggctctgcttgagactccggaatagttgggaggtgctgccggaggtgcccaaatgtctcatgtgcctcgtggtcactgacagaatctgacttgtgtagattccaaacatgtagaaccttggctggcgaggaggcaagcaggagtgaacaaaacaggacccttaagagtttgggttctcaaagatgagatgatcccgaggatccgcctagcacttggcatccaatttcagtgcagaactgatgtggaagagaggagagatggctgctttaaagtgtctgccttctttctttggaagttttagtttgaaacttgagggggagtggggagtggttcacaaaaccatccctagggttctgaaggatctcttctccaaagggcaaaaattcttgagtggtcagaattcacatgccttctctttattttggtgtatttccttgatcacaagtgatgctgttgggctccagggagtctccttttagccaagcatctacagtcattgactga

SEQ ID NO: 25018 - DNA, 1377 bp, Artificial sequence
  DNA replication origin
cgggcccgcggtggcggcagcggagtgtcacggcgccattgctctccttccttcgctctgcaccatgtcagaaaggagaagcgctccttcacccaaaggggcaggggccgcggccttcagccgggagccgccagagccccgggggacccgcgtgggggagggggcggggggcggaggggaggaggaggggaggtggcccggacagggtgtgggaggggaggggagccgcaccgcagcagccgctgcctcctcccagcgcccgcctcaactttttgtacagcccagagaggtatcagctcgtagcccctcgagtcctgccacggactccgcagaggtggacgcgccgcggagttgggggacggctcccccaagcagcccgctcttcaccgcgcggaagcaaacttagcggcgcggccagccccacagccattttcccgggaacccgaggaagcggacgaggaggcggctgcaactgcggcggcggttcctgcagttgctgccgctggtcaatggctggccccttcccttgcgctcgccgtgccacttgcctagcatccctctccccacctccaaagcttccaactgcaccgggacctcgggcagcagcagctgctgctactgccacttcgtccattcagtatccccggattcccctctccccacctaccaactgcgggtgaagtgcgcgctgtcagctccagagtcctcctcccctctgacctccgtgggcccccgtccgggcagcaccactcccagccgcggctgcagttcctgcgccgggttccccactcgccccgatttactgccacaatccaccaaataacaagctgttgagcagactcgcttctacacgaactcctattggctgctcatgacgccgaagagcttcggataggacctcgctacctgccgtcctcattggatgtagctgtgaaacttcatggattggtgagaaaaacagcaggtaggacatcttccacttatgattggctttttccgaaaaccaactttattggagagttggttattgagtaagcaagtcctgagaaatgattggtagagacgactccggatgtgcttgactgggcactgattggtgaattgaggggtcaggaagagcagttcgacacgaggattggcggcggagtgtcccatggaaacggaacccagaattgcagccaggggcttgcacgggggcggggcagggtctgtccaaggcgcttgcgctaaaccagcttgtcggcgccattttgtctcggcagcggtggccgtagctccatcgcattttatgtttctggcgagaagggaacggagttttcatcaggtagattggtttttgtgcggccgtcctccaccgtttcctccaggacagcacct

SEQ ID NO: 25019 - DNA, 1025 bp, Artificial sequence
  DNA replication origin
tgtacaaaaagttgaggcgggcgctgggaggaggcagcggctgctgcggtgcggctcccctcccctcccacaccctgtccgggccacctcccctcctcctcccctccgccccccgccccctcccccacgcgggtcccccggggctctggcggctcccggctgaaggccgcggcccctgcccctttgggtgaaggagcgcttctcctttctgacatggtgcagagcgaaggaaggagagcaatggcgccgtgacactccgctgccgccaccgcgggcccggggcgggccgagggggccgagcggcggaggcggggcgcgggccgaagtcggggtatccgggggaccgcggagcggaggctcggcggtcgtctccgcgggggacctggggaagcccgaagggagctctggccttttccggagctatctgtcctggagctccgagttgagcattccgggtcaaagtggccagcgaggcgggggcgcggtgggccgctggcgagctccggggcggaacgggctgccctttggcgctcgtggggttctcgctgccccctcagctcctgcgtcctggctgccctcgtaaggggtcttgtcccttggctggtgaggattctgcccctccccgctggcgtttgtttactttctttcccttggtcgctccccgcagttgactgattatgtctgtgcctgtctttccccctccccatagttctagcgactgcgaagatagctcgctgagctggaaccccacagatcaccaacaaaaatgaaggtaagtggagtcaactctgccccgatcctcgcgccctgaacactgccaatcctaaggctagtgccgtggaatgtcatttgttttgctactcaaaattgatgttcctactgatcagcagtttcggcataggaggatgtgttgaatgggtgaaaaatgatctgtgtgtctaaatgcggagtttaggccctctctgtagcagtactttggaaaggctggtgcagcctttcaattgttgtccattcggatagtattt

SEQ ID NO: 25020 - DNA, 1008 bp, Artificial sequence
  DNA replication origin
tgccgggccgcggcgagggacgcgcggcgacagcggacggcgctgcccgggccgggacagcagcagccggcggtcgcgcgcaggactcgagggcttctagccaccgtccccgccagcgccgcgccccgccacagggcggcatgagcccacccgcggccgcagccctagcgccctgctcctccgcctgggcggcccggctgcggtgacggctctcgctgcccgactgggggccatgaagccgagtccggccgggacggcgaaggagctggagcctccggcgccggcccgaggcgagcagcgcacggcggagcccgaggggcgctggcgggagaagggcgaggcagacaccgagcggcagcgcacccgggagcggcaggaggccacgctggccgggctggcggagctggagtacctgcgccagcgccaagagctgctggtcaggggcgccctgcgcggcgccgggggtgcgggagccgctgcgccccgcgctggggagctactgggggaggcggcgcagcgcagtcgcctggaggagaagttcttggaggagaacatcttgctgctaagaaagcaattggtaggtcgtgcccgaaggtggagcacggctgttcctgcccaggggctggaggtcgggcaggtggcctggggcgggcgcgaggttgactctggctggggagatgctcgctgttatgggacgcccccgaccgccccatacctccctgatccccttcctgagtgcccgcggcgtgtgggctgccgacgcccacgcgtttctggcgtgtgcccgctttgtgtctggcgacctcgcgcggattgcgggaagggggtggccgctcttccctcctcctctgccttcgggattcttggagtcgcctagttctaacgttcggtctccttagttagatgagtatatgccctctccccagcggtttgcaaactcccacttaaaataccattttatttggaggttttcttgactttatctcctcccgccgagaggggccaaaa

SEQ ID NO: 25021 - DNA, 1019 bp, Artificial sequence
  DNA replication origin
gaagttcttggaggagaacatcttgctgctaagaaagcaattggtaggtcgtgcccgaaggtggagcacggctgttcctgcccaggggctggaggtcgggcaggtggcctggggcgggcgcgaggttgactctggctggggagatgctcgctgttatgggacgcccccgaccgccccatacctccctgatccccttcctgagtgcccgcggcgtgtgggctgccgacgcccacgcgtttctggcgtgtgcccgctttgtgtctggcgacctcgcgcggattgcgggaagggggtggccgctcttccctcctcctctgccttcgggattcttggagtcgcctagttctaacgttcggtctccttagttagatgagtatatgccctctccccagcggtttgcaaactcccacttaaaataccattttatttggaggttttcttgactttatctcctcccgccgagaggggccaaaagccaaggagggggtttgtggcgtgcttaactgtccagggccgagttttacgattacactggagcgcctgtagggagccgtgcctctccgagagctctccccagcatgccagctttcacccaggctggtgcttaatttcaaatagaagccctttgtataaggcagctcaaactagatggaaatgatggaaatttggctggagactgtgtcccctcctctcatattttatacgttctgccagctgtgattggtggtggaggtgggagaaaagagaacctgctctcggtaagcatttatcttactgggtttctgtcagtgtctcagtctttctatgcagtcttcattaatggggaagaaaaagaactttgtagcttaatgtattgatgaacagcttttgaccccgcctcagaataatggcgacagctttgttttcagtgaccttaaaatgtagttttggaaacagcaaacgtcctcacctgaccaagtgatactatctaaactagacacatgccaggtagtggccctcccacaataaagtggtgatgc

SEQ ID NO: 25022 - DNA, 1252 bp, Artificial sequence
  DNA replication origin
tccctgggtacttgagattagggagtggtgatgactcttaacgagcatgctgccttcaagcatctgtttagcaaagcacctcttgcaccgcccttaatccatttaaccctgagtggacacagcacatgtttcagagagcacagggttgggggtaaggtcatagatcaacaggatcccaaggcagaagaatttttcttagtacagaacaaaatgaaaagtctcccatgtctacttctttctacacagacacggcaaccatccgatttctcaatcttttccccacctttcccccgtttctattccacaaaatcgccattgtcatcatggcccgttctcagtgagctgttgggtacacctcccagacggggtggtggccgggcagaggcacccctcacctcccggacggggcggctggccgggcggggggctgacccccccgcctccctcccagacggggtggctgccgggcggagacgctcctcacttcccagacggggtggctgccgggcagaggggctcctcacttctcagacggggcggttgccgggcagaggcactcctcacatcccagacggggcggcggggcagaggtgctccccacatctcagacgatgggcggccggtcagagatgctcctcacttcctagatgggatggcggccgggaagaggcgctcctcacttcctagatgggatggcggccgggcagagacgctcctcactttccagactgggcagccaggcagaggggctcctcacatcccagatgatgggcggccaggcagagacgctcctcacttcccagacggggtggcggccgggcagaggctgcaatctcggcactttgggaggccaaggcaggcggctgggaggtggaggttgtagcgagccgagatcacgccactgcactccagcctgggcaccattgagcactgagtgaacgagactctgtctgcaatcccggcacctcgggaggccaaggctggcggatcactcgcggttaggagctggagaccagcccggccaacacagcgaaaccccgtctccaccaaaaaaatacaaaaaccagtcaggcgtggtggagcgtgcctgcaatcgcagacactcggcaggctgaggcaggagaatcaggcagagaggttgcagtgagccgagatggcagcagtacagtccagcttcggctcggcatcagaggaagaccgtggaaagagagggagaccgtggggagaggcagaggcagaggcagaggcaggg

SEQ ID NO: 25023 - DNA, 1423 bp, Artificial sequence
  DNA replication origin
cggcgcctgccgccgccgcggggccctggcgcggcttctgcgccgccagccgcttcttcagctcgtgcttcggcatcgtgtccacgctcagcgtggcgctcatctcgttggaccgttactgcgctatcgtgcggccgccgcgggagaagatcggccgccgccgcgcgctgcagctgctggcgggcgcctggctgacggccctgggcttctccttgccctgggagctgctcggggcgccccgggaactcgcggcggcgcagagcttccacggctgcctctaccggacctccccggaccccgcgcagctgggcgcggccttcagcgtggggctggtggtggcctgctacctgctgcccttcctgctcatgtgcttctgccactaccacatctgcaagacggtgcgcctgtcggacgtgcgcgtgcggccggtgaacacctacgcgcgcgtgctgcgcttcttcagcgaggtgcgcacggccaccaccgtcctcatcatgatcgtcttcgtcatctgctgctgggggccctactgcttcctggtgctgctggccgccgcccggcaggcccagaccatgcaggccccctcgctcctcagcgtggtggccgtctggctgacctgggccaatggggccatcaaccctgtcatctacgccatccgcaatcccaacatttcgatgctcctagggcgcaaccgcgaggagggctaccggactaggaatgtggacgctttcctgcccagccagggcccgggtctgcaagccagaagccgcagtcgccttcgaaaccgctatgccaaccggctgggggcctgcaacaggatgtcctcttccaacccggccagcggagtggcaggggacgtggccatgtgggcccgcaaaaatccagttgtacttttctgccgagagggaccaccagagccggtgacggcagtgaccaaacagcctaaatccgaagctggggataccagcctctaagacggttggaatggccagcttatgaaggcaaatttccactcgcattatttaatgatggaagattctgggggagagttgtggatttcataaagccaaacatttaaagctagagacgggggaggcttaccactttccccaaacaacataaaagacaatgtcccttcttcaaaagtgccaaaaggaatgtaaaatgcaaaaattaaaacaatcttaaaccacataaccaagcattgtgaactgtaagtgccaaaaatgacaaaaataacattcactataactgaaaagctcatattataggaccacactgtgaaacaaacaaaacattgaatgcaaccagtattgttcaactacacagaatttcaggaatgaatggagaccttcagagctgcttgaaagcccctctaaatcgctaccatccaacaaaactttagcttctagagcttgcacct

SEQ ID NO: 25024 - DNA, 1617 bp, Artificial sequence
  DNA replication origin
gccactgcagctccgtgcgacagcagcggcgccgcctccgggcctagcggccgcctcaccgccgcccccgcctcccgcgctgccccggacccgccaaggccgccgccaccgggagcggcagctgtgccgcctccgcttgcgtcgctcaggttccccagcgccgcggtcgccacggtgctgaaggagagcacggccgccgtggccgcggaggaagtcccgccaggtgggccggccgcggagggggcgccggagtgctggctgcccagtaaggccatgctcgctggtgggcggggcggctgcggctcctccatggggcccagtggcggccgcggatctcctcatcccgcaccgggggcggcggccgctaggtcggagtggtggctcggggccgggggctagcggccgccgcggggagctgggctcggccggaggggtggcggtcgctggggacctggcggagcctttgacgtgggttccagcgttgccgagggaaccgcgtgtttacgcaggagcgcggggcgggacggcagcccagtacccgctgcaaagccgacccgcgacaccgccactccggaggttaccggcccgggtgttcgggtttccgagagtgccaggtcgacctcctgagggaccaatgtccggccagataaagtgccgactggcatgcaaacaaatgaccagattcaacgaaagttcactcttgctctcttttgtagggtacaaatgttctacaggcaggccttttggggagtggtggggggggcactctgcttcctgtgggtgcttttggtatatacaggtaggaaaggaatctagaaagtgaagtgaaagaaaaatccagaagtctacatccagacatcttaaacttgagaagcagactaatttaaaccagtaattctcaaacttgagctaacagaattcacatagagggcgtgttaaaatacaagtgacgaggtctgaaccccagcgtttcgaatatgtctggggaagtacccaagaatttgtatctctaacgggttcgcgggtggtgatgatgatgctggtcccaggaccacacttacagaagcactgatgtcaagagtttcataaaatgcagattcccaggctgacagaattactaaggatgggcccatgactctaaaccccgtaggtgattctgatacaggtgctctgaggagctaggatagttcctttagatgttacttcatttccaagggcctggacctcaggcccctactggctgataaatggggggagagggattggtgccttgccctgctagcagccttcatctgttctcaggaatggggtatgttttgagtctaaggtgctgccagcctggcaatcaccacagatgcagctccaggtacctggctgggagatacggggaaaagaaaggcagggctacccagggaagttgcatctcaagtttctgggcatggcctctaatggggaaaagtgtgataaaccctcaggttaactaaccctgggctcttcgctaaagcagtggttcacagagtatggacattggaccagcagcatcaacatcccctggaaaccttgagaaatacaaattatcaggcctacagtgcataggatacccctgatctactgaaa

SEQ ID NO: 25025 - DNA, 986 bp, Artificial sequence
  DNA replication origin
gcggctggctggcgctaccggcccaggcagtgaggggcttagcacctgggccagcagctgagtaggatgcaccgggtcccccagcactgtaggcctccccgcgcagtgctcgaattcttgctgggcctcagccgcctccccacaaggcagggttcgggacctgcagcccgccatgccggagcccccagcctccccgacgggcgccgtcccctgctccgcagcgcccggtcccatcgaccgcccaagggctgacaacagtggtcgcgcagcgcagaactggtgggcagctccacccacggccctggcaggtgagccactagaggaagccagctaggctccagagttgagggggtgggggcttggagaacttttatgtctagctggaggattgtactctgtgtctagctgtggccggggggggggggtggggggtggggggggggtggtggtggtgtggatgcaccaatcagctctctgtaaaatggaccaatcggctctctgtaaagtggaccaatcagcaggatgtgggtggggccagataagggaataaagacccgccacccgagccccaactgcaacctcctaggaaccccttccataatgtggaaggttagttctttcgctcttcacaataaatcttgctgctgctcacctttcaggtccgcgccacttttgtgagctataacacacactgtgaaggtctgcagtttcacttctgaagccagcgagaccacaaatccactgggagggatgaacaactctggacgggaagaaccaacgactcgggatgcgccacctttatgaactgtaacactcactgcgaaggtgtgcagcatcacttttgagccagggagaccacgaacccactggaaggaacggacaattccagacgcgctgcctttaagagctttaacactcaccgcgaaggtccgcgtcttcattgttgaagtcagcaagaccaacaacccaccagttctgcacacaat

SEQ ID NO: 25026 - DNA, 1299 bp, Artificial sequence
  DNA replication origin
tcaccgcggcggcgacggcggcagccgggggaggggtcaccgctgcagcggcgggccaggtcaggctggggaaggggcggaggaggggaggagccgggctgcgtccgggcccccggctgtcggcgccctcgcggctcagatcatccgggcgttggagagggaggcagagagcgggtcccggagaaggaggaggaagagccgaggactcatcgctttcgcgcctcagctgtctagagtccccccacccccccctccccaaccacccgttccggagcaacagccgcctgaggacccgaagctgcgggccggacgagcgccgagaccactgctctctagctcccgcgcgcgctcccgtccctagcgccgccaccgccgccgccgccgcctctagcgcggccccgcgcaggcgcgctcacgaccgcgtcgcccctcccccacccctccgctcgccccgccccgctggctccgccgccgctacagctgcggcgcggcgcgcagctacagagacccggatgtcgttgggcaggaactgcggtgagggctggcgggcgggggaggggccgccacagatgacgtcactgccttacccagcttctttctctgccgctgctgctgccgccgcctttgccttacggcctggagcaccaggccgaagccgaagggagcgtccggatcccggatagcagccaggacccgggccttcacgttccggcgccagggactggacagaatgtgcggctattaggtgcccagtagatcgacagcccctccgtgccggcccttggccaagtagggactcggaagctacccctacggcgtccgcgcccggagccctggctcttctacctgcctgcagatacaaaccccactccctgcgaagatggtgtacacgcagccccgagcacagacccgaagctgtccacccttcttgggcgccgtcgcggtctggccgctgcccttcgaacccatggtgggtcccaggcagctgccagacccccctaccccagagtcccactcctccagagccttcctctcccagtgaccccaggaagcccaagcaggtgccacggccacacacctcgcgacccaaagggcagagacacaagcacgctaccaccgcccaccaatgtgcgagtgcaactgattcacgcacggggcacatgctctgagtttctggcaggttttccctctatagttcaggggattccacattgtatttatttgcacatgttagataatcacgtggttctgtcccaggggacctccaacgacctccaatgaggtaggttaagggaacag

SEQ ID NO: 25027 - DNA, 1018 bp, Artificial sequence
  DNA replication origin
ccgggtaagtgcggcgctcgggccgacggcgggctggcgggcggtgcgggcctgcgcggcggcggcggcgggcaggcctggggcctgtaaacaagccgggcgtctgcccgggcgctcccgggaggagacgcgacaactccaccccctggccggcctcctcccccgagccgggcggcggacggcgaggggttaacgctcggcgagggcggtggcggggaggcgggggcggggtgttagttgcggtggcgcggggagggggcgcgaccctctggccgtccgcggccgagatgggtgtttgtggcggcgaagcaggcgacggccgcaggccggcctggccggagagcggcctgcagaacttttcccgagcggggagggggcgtccccgcgcccccacccgctcgggcgcgccgccccggctgtcctgggcttcagcccctgggagggaggcggggagacttcctttgaaccgggcttagcctcgaaaaacctaattctgtagaaattgcttaaggttttacagggggcagggctgagagactccttcagaactcaagtcagtgagtgatgcctctagttcattcattattaaggcatcgaacaaatccattgaagtaaattccgatttcttatccttttaactacgtaaatcgggtaaaacttcttgatgttagagcttggttgaggtatggttctgttctgcttgtagattttaaataaacttggagccttttcttgaaagacagctggctgtggagagccttctaccaactgcagttttagatacgttttgaaaatttcatcacctgaggtatttttcttctctcctgaaacaccacatggtacaaatccacaaaagtcatgcttcagttgtccaagccatgggatctgtgtgctagccccacctccccgcaagtttcctgctcattggaataatgagctgaatgtgttttaagaagtggttggaagagtatgagagataggtatcattttctcaaaggaaatgattttgacattattg

SEQ ID NO: 25028 - DNA, 1247 bp, Artificial sequence
  DNA replication origin
cccttttcgcgcacccaccttttccatccagcgccccgcgaactcgcggacgtgtaggcctcgagccactcctactgttgggctgcgtgactcagcggctcgaggagagaaacctctcaaaaccgggggaccgagacggggttcaatttaaacctaggtgggagaatgagcccacaagcgcgcgcccctgcagctgcggaggcgcgcgcccgcccaccctcgggcgcctgaagtcgcagcggttgcagagcctcgagcccgtggatgcggcgcgcgccgcggtctgggcctgcgcgagaggctgccgcccgcgtcgggcctgggcctacgcgtgtctggcctgggcctgccggtgcaacagcagttgtcgccaccggtcctaggccgcgccgagcgagtcgccgagaggggcgggaagaggggagaggtccgagaccagggagcgggacctaaagggggctttccgcgcccgacaggtccgccggggttagccttcgaggcggggagagggagcggggtccttcaaggaccgcatgttcgcgatagcacatttgagccctggcaggccacctgggccgccttctttcggaaaccttgcggggtttccaagcaaggtttacaatgggaaactttatttcccattgtaagctcttacaaatctcctctggctagatccttccttgcagctctctttgctaggatttatattcccaaacttcttcagacgtgccctaccgcgagggaacgaactggttttcttcccgttttcacctccttgtctggagacaaaggggtgtgagggcgatcccagagctgaacaagcagtttcacgcctccctgcccgctcatgctgtttccgcttgccctgtggtttgctctgcctggaacgccgccccctacctcaactgctaccctgtcattccacaaagcctaccccacctccactaagttttccgtgagccagtgagctccacacagataatgtgccaccaccttttttaatgctcccaccgcaccttatctaaacgtctgttttagcgctctaacacttttgctcatttatttgtctgtctgacttcccccttcagcctttgctagaatgtaagctctttatttaaaggcaaggaccaactcttacccatctttgtattcccagcacctagcccaagtagtaggtgctcaataaatgttttaaagctgaatgaattcatgcatcttccttgaaatctgtctgctcttacgttagt

SEQ ID NO: 25029 - DNA, 1243 bp, Artificial sequence
  DNA replication origin
cctggagaggcgcgggaagctcgggcgccgctgtcctcgctccgcgcggggcagagcctcctctccaccggttcagagagaatcgcgcgcatctcaagacccggatcatagcgcagctccaggagcagggggcctagtggcccggcccgcggagtgcctgagaggagaggctgccagtatggattcgaaggccagacaagggaggaggcctcggcctgagcttcgtggtacaactcagctgtcgtcgccttgggtaccccgaagccaactcccaggcccaagtctcagtcgccctcttcggagtctgagagctaagctccaggcgaggcacgtgagcggcgctggacacccggctgccgggctggtccccgccctgtggcggcaggataaagccgccctggcagcgcgttgcgcctcctgcccgaccgcaggtgtgagcgctccctgcctcccaggccccgcgcttcccgcacagggcagatggcgcaggccttggatcctggttcggaggcggcctaggccctgctgccgattctccagtgcccttcttgcttcagacacctcctgtctccttcttcgcttcctggggtcttggctttggttttcggacccaaactcttcacccgcgcgctctgaggaggggtgccaggtagagaggacgtcactttctgggcttgtcgctagaacttcccgcggcagagagaggggccctggcttctagtgtctccagcagaactgggggtggaggagctccactttcttggtggggccaggtcaggtatttccttcttagccagcggccctagggagagcagcggccttgtcccccacgcacagccctggccccaaggggaaggcaccagcctaggtctgcagcgcgcttcgggtcaggctgtcgcggctcaccttctgccctgatttgttagggtggcgttgacagggacaggtgggttaggtttaaggtgagggtggtcgctggtagcccacgtgctctctccgctccatttctcttttttccaagctttcccttggaggggactctaaaaactctcggagactacctccttcagctgcccgaagccagcgcactagtgtgtgtccccaccgcgcccccatggacaattcacactgagggacccgaaggctcagtctcatcgcctgcacgcgtgttccgcgaccttagccaggtaggcacttctgagcctcttaagggcatagtggcccctcccccattctgaccgaa

SEQ ID NO: 25030 - DNA, 1803 bp, Artificial sequence
  DNA replication origin
ttccgccttgctgcagaacctcgcacacgcacgccacttgctcctgcgtaaagccaaacgacggcagcatcgacatggctggggcctgccggggcgcacggcccaggcgcacgcggcagggagcagagccgagaggcagggggcggcggccgcagggaggggggcgcggctgttcctaacctcctccttaggctttgcaaaggcgaaaaccggagtcggaacttggcggtgggcggccaaggaagagaaggcggaggagtaggggaggttctggacacggaacggccggcgcactcagtagcctttaaggccttgctgcctccgacctcccgcccggtggatgctgctagttgccggggaacttggtttctgttctccccgcagcggccttaaagcgcgcagcgtccccggcacgctgattggctgccggcggcgcctatccggggctggccagccagcgcgccgcccggctgggcagagaggccgcaccgcccagagcggggagggcgaggctgcggagctgggggttgggggtgttgccggggctgcgcgggtagggagtggtgggaggagaaggaagaggaaaggtgggaagccagttggggtctgagggagctgcgctgcggaggtgtggggaggtagggagtgggtgagcgcgtcaggaccctgcaacgcgggacccgtcgccagtatcacctaaggggagtcgcgcacaactccgcacaaatcaatgactccaaaccttaattcctcccctctccctccgtactcttgtcctcatcccttgcagacttgccctctcccggtgagctcatatttaattactttaatgttggaatgaataaataatggattgatgaatagcttatggaacgcgataaataattcaagagcagaccagggtccgcgcatgcagcctctggaagagtggcttcgggttggcttcagctcgaggagtccaaccctatttcctcctccctccccccaccaactaccactgtcctccccccactgctgcacaccaccctccaaagggcacaagtactcccagtcggacagcgtttccctcgttcacaaaagacctccatgatttgagaccaggcagagagctgtttagagcatacttgctgagcacctagagactccgagcgttcatttgtgatttggtatcttaatgttctgcgattgaaaccagcaggttcctgaagcttctggactcaatttccccatctgtgcggttgtgttttgcagtgccacctctgctactgaggaatgccgagaggctttacttgctattagcaaaaatgctttgggaacctcgtacgaaaggcgctggatgtggtgtaaattaaataaaactgtgcccggctccaataaccgtccggttgtaatataatccttaccctgctctgagagggacactgccctcaaagcgagaacgacagcggctccaagaagattaaataaagaggtgtgtgtgtgtgtgtgtgtgtgtgtatgtgtgtgtgtgtgtgtgttgcaatgctggcctattttgctgccagggaatgagagatgcactgcaatttaagtcccatcatctgctgttttgtttatgtgtggagaatgcttagtaaaactgcacaaacaagtgaagttgtaattatcttaagcctcatttgcacacctagttccaaagcaataattaaaaggattttgaaaacaattagcctctctaaacaaagataatctattgtcagtagctgagactagcaggagataagaacaatgcgtggagataagggaagccaaatggtggaagga

SEQ ID NO: 25031 - DNA, 1930 bp, Artificial sequence
  DNA replication origin
tgttgtttcggttcctgccggccaggcgaaaactcctttgccaggaagacagcgccctctttctcctccggccgcgccgccgccggcctgcgccggctctccgctccactgacctccccgcgcctcgttgtggtccccgcccttcaggccccggcccctcttccctcaagccccgacgcctgtgggccccatgcaccgcccgagggaacaaccccagagagcgccgggccagcccggcgagatagcgcgacctctggctacaagcctgggcggagtcggccccggcgcagacgcggcgcccaagagctcccgcacagcccggggagggagtttctggtgcaggcggcggggcgacgggtgaggcccagctctgcgagaccccgctctgcgagccagcgggcggggccgccagcacaccgggcggtgaagcctccccggcgtccgcgcgcggatacttggctgcgcgcgcgcacctggcacagcgagttatactgaggctcaggatcagtccgcgaaacgtggacccgggcctgcacgagggttgatgggtgagggtggcgggtgaacttgagtagaggtaaggaaagatcttacggccttcttcctagtcctaaaagcgtccctcgcagcccgcctgcttgctggcagcctcaccctgctggcttccaggagggctttgtcaagcactgcagcggtgttggaaaccttgttgcaaagtccaagcctaagcgagtgggcgagacgcgcagaggggcatggatgagtgggcaccttcccagcaccctctacccagtatctcttttcccactgctcagaggactggtgattcagacaaacgccgctcggcccttttgggaacagaggcggtcgagcttctgtctgcgaaaatctggatcctttagaacccgagcaatatgctcgtgtgagaatgcaaaaacagatcccacggcttgggtatgcaccgactgaggtacaggcctgaagtgctcccatcccccgaattcctacccgcttgtgggagccacaggggtagtttgcttccagctgaccctactgtacaacacaggcggctcccagaaatgcactaattgagtcacaaaccactggcctccactaacaaagcgatccatctcagcagctcagcgcccaatttgtccgcagcactttcttccgcaattcagaagcattatcttgttttaaaaagtatcacggcagagacgtggcaattatcctgagctcgggttacactaaatggcttaggctgagaaatggaagaatacaaatgccgcgaacgtgctgattgcctcgctgccgagcctggaccgggggtaggggaggcgaactagagctttcggccggggagaagggaggcaggcgcaagttcccacttgtggtcgtctccgggtggcaccagcgagaaaggagtgttggccctttatctctaaaggctaaggattcccagcgacgaatccccaaaggtcgagggagaagaggtcatatcccaacatgaccaggccaagcttctggtctcagggtctggggtttgggtcaggaacaggttgggaacttcaggcactgctgggatgaggaacaggagaaaggtcaagggttagtgaatgagatgggggcgggggggcgggacagagattccagtttctcttcaggacacccactctacaattgggcaattggggaggaggaaggcattgggagaaaacaacccgaaggaaaaagaagctggctctttgcaatgggagaaggggttcactcctgaactaggggcaggcctgcgcctgggcggacgctgtagggtgggaacgctcgataactggagagtcccagagaccaccaggcctttccgcaccaggaaaaaaaaaaaaaatctgctctgagaatcttcatctcggtccaccagggtgagtttgggcct

SEQ ID NO: 25032 - DNA, 1277 bp, Artificial sequence
  DNA replication origin
ggggatccagcccgcctgcgccaggtgaaggtgatcaccagcgcattccagagccggtctcagcccgcccttgccgcttctgggcccctgtgggggtccgacggctcgggctccggcgttcctcgcccaaggctgggagggaggcttggtgccctatccggccctcgcggtaaccaaaacaaaaggtgcaccgggatgtgcgtgcgccttccgcagatatgcggagaggtccagagaaggcgctttggttacgccgagccacctgccctgcgcccactagaggccgcggatcccgcgctcggaaaccaacggaatccgcagggccggggcagagggtggcaagggggcaccgcgagcaggccagctgctccgccgcctccgctcgcgagccgggcacgctccctgggactcccccacgctccactgctggcttcttcgtcccccccgccccaccccataaactccacacccaccccgccgccggcccagttgcctggtttaggcccctctccggatctacctcccacccgcacccccggtgagtcaccctcgcagacggcgacggcggctcagcctcagcttgtaaatcaaagcgctttctgcgctcctggccccgcagcccaaagcccgggtaatcccctcccctcggcatgaaagcgaaccgaccgcggggcactgcggggatgtcggatcctctgctgggccaagtcctgctgcgcttccaaaacgcctctgttctgctctcgtttgctctccctcccagcctcagaccaaatgggaaaccccatcactacccaccccccaaccccgatttggtatttctcccaagtcagagagctgaggaacagggtcctgcctggaacagagggaccaaggacgttggggaagaggtctaatagttagaaggcctctgagtgacaccctttccctcccacctcaccagggcactggatggtgtttgttaaataggcccctttggcttcctttggattcaaaggcgactgcacataactgttcttgggttgaaagtgccttttcctacaacaaggacagccactttgttgaatgagagagttgtcagtctggtggagtagaagtttgggagcaggtgagaaaacgatctcttgttaactaactgaccaaaaaagaaaagctgagcacttcctacctcctgctcctttggcagcttcatttacctccaagataacactaatctgaattggtttgaggggaggggaaggagttcctaaacaggaaagaccgaccacctcatttaa

SEQ ID NO: 25033 - DNA, 887 bp, Artificial sequence
  DNA replication origin
agggtgaatgattaactctgtcatatgaaacctcgacgttccgagaccccttctgcgccgccagtcccacaacactctcttcccttcaccagagcagccaccgcgacctccagcgcaggcccggggggcggctgaaccctggggatccgggagcgtgcgcgcgcgccaggcccggtgtgacctcgcggaggtgcagaccccggccggcgccggcagtctctgcgggcctcgggcggcagggagagctacggtgccggtgtccacatttgcttcgttagcccctccagaaacggggagagggtggcaacttcaaagccagcgggatgggggtgggaagctgggcagcagtgaccagccgaggtgggggcggggactgagacctaggcgggcgaccagaaacttctggggggagagggggagggtaaggagggaggttcccccgccccccgcctccgccgccccctacctctgccggccggggagcgaggtagggggcggggagaggtgggcagccggaccaggctggtggggaaggtaagcgccatgtttgcgagcacttggaggaaaagaaagccgggaagggggtgggggagaggaagggggaggaggaggaaagttggcgctcaccttttggactgggtctcggaggggttcctgtcgcgctgccggcggttcttgaaccagttgctgacctgggtgagggagaggccggtgatcttggccaggtgccgcttctcggcgggcgaagggtagcgattctgcttgtagagctccttgagcgcgttgcgcgacttctccttgaaacaatacaccgtctcctcgccgtcccagatggtgcggggcagggggaatttcctgcgcagccggtacttgtctacggctcccag

SEQ ID NO: 25034 - DNA, 864 bp, Artificial sequence
  DNA replication origin
aaatgcttgccccttagaacatttcctagtgtcattttatttttgaccgttttgaatacaaaatccttgataaagacatccaaaaagagggagaatggggaacagggacatactggggggcttctgaattgtcctctgaagttttgtcatctagatgctgagggtggtctctttgttaaaaatttaaccatccagaccttaaggccacacaattaatattccctctggaattgtagggcctctgtttgaaagagttgtccagttttcaggccacattaggtaatttcccgcccaggagcgtggcttggaaagaatgtcggtgttttccttcaggtataggtgcctgggggtcaggaggggagggaaaggcgaggggtggagtgggaggcgggtgatcgacagggatagaaactgtgtctcctcctccctctgaatgcgaaatagccaatgaggtggctaggccgggccggcccggccgccactgccatatagtatgcagcaaccggaggagtcacgttgggggaacggcagaaagcagctatccgtttacactactttgctctaacagctatcttaatggtgactgcgtggccggggggaaacctgatcggccagatacagccgaaaccaggagggagggagtgggctttccggagggggagaggagggagggagacgaaggaggaggagtaagagaggaggaaagaaagaggaaaagagtgcgagggagtgagggagggaggaaaataaacaacaaaaaatgtcctcttcctcccccaccgggcagatcgcaagtgcggcggacatcaagcaagagaatgggatggaaagcgcctcggaagggcaggaggcgcaccgagaagt

SEQ ID NO: 25035 - DNA, 1216 bp, Artificial sequence
  DNA replication origin
gtttgtctcacagtggaggcaaggaattacaacttagaaatatgttgctacttggctgcctctactctattattgtacaccttgaaggcgaggttaattaagtcctgttgtggggtttgagggctggaatttaatttttggagttttatttaattttgggagtagattgggtaataaaatgtatattgagaataagacggccttttgaccttttagggtctagggctgtaaagcgtctcagggttgctgccgaacgagccatgaacggggctgggttttttatatttgacgaaaaagagtctaaacgctaactgatttgggagaggtcggataaagaaaaaggagtattaaccttgactatacctttagctccagccacctttttaagaggaaattgctgggcaggtgggggagggctagttgcggaatgaaactgtaagctggactgggtgtgaggaggggaggtgataaaaggattatagggggaggagcagaggcttaggaagaattgggacctagctcggcctggcgaggaggggagaggtcagatgggtctgtaggaaaggaagattagaaagactcagtaatgcttggggttgggactgaggggacaggtgggaaggaaagaaggaagatttgggacgagttgcattgggaacagagactagggagggaccgatgtgtaaaagaatgcgtggacatcaggcacttcagaccgtttgcctattttacgccaagaattatttgatcttgtaggatggaaaaattgaaagtgccattttctggctatttggaactactgtcgagtttgtactggggtcaagcggcatagcagaagaaaataagatgcttagattttaggtcaggtgagagttgaagaggttttaagttcttaagaacacaggctaagggagaagaaggaggaatggaaggtggaaacttgcccatagtgaaggaggtgagcccagagaaaagagacagtagagacacagagaaagggtggggggttcttgccctccagaaaagcagagaaggggtcggggcatggaaataaggagttggggcacagagtaagaggtcggggtgcggaaataagggatcggggcacagagataagaggtcagggcacagaaataagggatcggggcacagagataagacgtcggggttcctgcccctcccccagaaaagcaggacttgccgctaagggtgaagg

SEQ ID NO: 25036 - DNA, 1371 bp, Artificial sequence
  DNA replication origin
tccagggcccagtgtacctctactacgagctgaccaacttctaccagaacaaccggcgctacggcgtgtcccgcgacgacgcgcagctgagcggactccccagcgcgctgcgccaccctgtcaacgagtgcgccccctaccagcgcagcgcggccggcctgcccatcgcgccctgcggcgccatcgccaacagcctcttcaacgactccttctcgctttggcaccagcgccagcccggcgggccctacgtcgaggtgccgctcgaccgctccggcatcgcctggtggaccgactaccacgtcaagttccgcaacccgccgctggtcaacggcagcctggcgttggccttccagggcacggcgcccccgcccaactggcgccggccagtctacgagctcagccccgaccccaacaacaccggcttcatcaatcaggacttcgtggtgtggatgcgcacggcggcgctgcccacgttccgcaaactgtacgcgcgcatccgccagggcaactactcggccgggctgccgcggggcgcctaccgcgtcaacatcacctacaactacccggtgcgcgcgttcggcggccacaagctcctcatcttcagcagcatctcgtggatgggtggcaagaaccccttcctgggcatcgcctacctggtcgtcggctccctctgcatcctcaccggctttgtcatgctggtcgtctacattcgctaccaggaccaggacgacgacgacgaggagtgattccggctttccagggatccctcctgcttcttgccaaaactcttgcaaggtgcttttggcatctcctcctcgcccgtcacccaattccaacctcgcctagcttttcctccctttgtgaatgaggggaccagataagggaattaccccccttgctcttggggggctgctagactgtcttgccgcggggagggatgttgactgcagagtgaaacatccttgcaaactcttcccacctccttcacgacactgagttgccatgtgaggttcttcaagtctgagagtggaagggatccctatggagactcctattaaacccctattagaggaagagattgagagacctagcaatgtgaagtaacaaagatcaggcagctgcaagtgactcctgaatcttgagtccagggctttcgccactacagtacagtggttttcttttctttggtcggggagagtgggctggaatggagagtgaggcccacaaattacctgcagagacgtggaggcgtgagggagaacatgcttgttaaatatgcaggtagattaggagacaccaaacagagattcagacacagtaaggctgggatgagatcctcgaagctgtgttttaacaaactccactggagag

SEQ ID NO: 25037 - DNA, 1047 bp, Artificial sequence
  DNA replication origin
ctcggcgagcttcaaaccaggaagcagctgccgccgccgcatccccggcgagaacctcgcaccgccaggttccaagttcacagaacccccgcgtccgctcccgcgccttccggaccccaggggcgtggcccgcggtccgcggcccggccctgcggtgggtggatccccgcgcaagcccccgggaggccagtgcccgcttgcgccgccctgcgcgccctccttgtagcgctgggtctggccgtgcgctgcgggttaggggccaccccgggcgcaggccaaaaaggaaagggttcgtggcccagcccgagcaaacacctgaggcgtggtagactgacctggggagcgatggaaggttgggaggacgcagaggagggcgctccagccaggaacccgcgcggcgaggagtcgcccgccccctctctcccaacctccccggtgggctggtgaccctgcagggccatccccaagaggccctggccggaggcgggggcacggcggggaggttctttttcctaatatttacagggatggctcatcccggggtcagctcgaacgcatcctgtttgtgcgcctttcctgcagaggctaattacacagttgtgtgtatgtgtgtgttttaatagggcagtagtaatgatggaaatcctgttcgcctccttcctcggaaggtgtgtcttgttgcacatagagcaggaaaggtcggttcttctggagacagacatggccaagaggtaataagtctcttcctctgcgggtggtttctggtccacccagctctgcgcggcaagggcagaaaatgttcacacacacaggctgtccccaacacacacgcggaagaaattgcctcttctaggaacactccagcttgttgtatttgcagtcagagtgggcagccttctgatgcttcccaccccgtggtccctgcagattttgtctccggggaggaccttttagcctacgctgctatgccgcaaagcttgctccctgagggccagccacaaccaatttgttccccaaaaagcctaggccactttttgttgttgttgt

SEQ ID NO: 25038 - DNA, 1635 bp, Artificial sequence
  DNA replication origin
tcgccggggatgcggcggcggcagctgcttcctggtttgaagctcgccgagtgggggagagcgtgagccttcggaggcgggggcaggaggagaagcaagaggaggcgggggaagagacgcttggggctggggctcaccggacgggtaggtccggctctccagggagaggagctgcccggccctggagaaggggcgagtcctgcgcgagtccccgggaggcgccgcgcgcttggaagggacggtcgggcttccccggcccgctgagggctcggcggcgggctcccctcctttccacctcgggagggagggaaggaggggagggaaaagtcccacggaggaggcagaatggccagtcgaggggcgcttaggcgctgcctttccccagggctgcctcgactcctgcacctgtcccgagggctggcctgagacgggactcccggttctcccgctgcgaagcagcgcggccccccggggccggggcagcggcgccggcatgtcgtctggcaccatgaagttcaatggctatttgagggtccgcatcggtgaggcagtggggctgcagcccacccgctggtccctgcgccactcgctcttcaagaagggccaccagctgctggacccctatctgacggtgagcgtggaccaggtgcgcgtgggccagaccagcaccaagcagaagaccaacaaacccacgtacaacgaggagttttgcgctaacgtcaccgacggcggccacctcgagttggccgtcttccacgagacgcccctgggctacgaccacttcgtggccaactgcaccctgcagttccaggagctgctgcgcacgaccggcgcctcggacaccttcgagggttgggtgagtagcggtgaccccttccctttgtgtccacccaacccccgttccccttatgtttttcaaaactcacccgggtcccgctttcccatcgctttgtggctgagggaattccctccagactttggtcttcgtccacgtggccgcggcactggtgacgcgaccgcggtgggtgtgtgcaggcgcaggtgtgtctccaggaagccggcctggacacgatcccctttcaggacagcggcttggcctaacgggaagtcgggcaggggtccagggcggtcaccctttccgcccagtctttgggtaaggagctccaactttcagcacgagagtgataggtaggaaaggcagggaaggagtgatacaaaagggacttgatttgggtaaagtgcttcaagcgctacttaggagaaagccgtacattctcgcgagtattattcataatgtttatggatacatgttggttcagccgctcagacgtgcacacgtgtttcggcttgcacatcccagaggtacatgagctacactggcagggaaatgagcgcctgggtctgcacgttggcagttttattatttagcatttttccaaggagatgagatttacatatacttgcaagtaacttagtcagtccgaggtgggagtcctgcagtgtgggtttctgctgctatgggtctgagaagaggctgtaaggactcctcaggaggttgttaactgtcttccctccccccatcaccagcctgtgttcctgggtattgacgtgtagctacccgcagctctccccttg

SEQ ID NO: 25039 - DNA, 957 bp, Artificial sequence
  DNA replication origin
ccaggctcgctccggcctaagcgctggctccctccacacgcggagaagagaaggaaaggcaagtccagaggtgggggtgcgaggcgggaaacccctcgtgagactagagagaagcgggcggcaatcgccggggtccgggcccggctccgagcctctcctcaggtggcttgtcagggcccagcccgacacactggccgaagcgacgaagagggtgatcctcctgtcccctcagacgaggcagcactgtgcactgaggagctgaggcagcgtcagggggcgggcaagggcggaggcgcgctcgggcgcgcggggaggggagagggggcgggagcgcgcccgctcgcctgcccaggccggcgcgcgctcccgcaagcccgcctcacctgaggtggaggcgggttcctcgagatccaatggcgagcgacgcaggcggcaagtccccaccccagcccacgccgctctcagccaatcaggaggcggtcagctgaggcacagctgggacgggctgcgacgctcacgtgctcgtctgtgtttagcggcggaggaaagagaaaggagatgggggtgcggctcagcccgagtctggggactctgcgccttctccgaaggaaggcggtgcccggctttgggaggcgctgctgagaagggatttcggttgcctggtcccaaacatgcatcatattttcctactcttggtgcagtaatgtaatgctcctgctctctttctcctcggcctcagtgctgggcacgattgccgcccaactctgctgggctctctgttcaaaaaagcagacttcgcctcgtggcagcaagcccttcctttggtctcgttgctcagatgtgttacaacggggtctttccttaccagattacctaaccatgggtcaatgtcacccaccgcactctttgccacggagcacaggggaactcaccttgtctactaagtttttctgtggc

SEQ ID NO: 25040 - DNA, 1203 bp, Artificial sequence
  DNA replication origin
ggcggcggccgcagggctggcggctgctgggcgcggggcggcgcggggcggcgcggcgcggcgggggcgcgcggcaggaggggctgtgcgcggcgcggcccccgagcgcaccgggcctgccgaggagcgcgcgcccggccgggctcggcgccggtttcccgaacctgggcggccgtcgggcagccccctcgtccgaccatggcgactgacagtgagtgcgctccggccgcggaggccaggggtggggggaggccgcggtgcccagggtgggaagttcgatttcagacgctgcctttgtgctggctcgcggcagcagcggccgggtccctctccgctcctcacccttggctgcctggcggggcttgaaagggcaggtggccctggcggcgcgccccgcgagggatgtggcagaagggcgtgcgcctggcgccgaggcggagggaccctcgatgccgtgtggcagcggggcctgccatcgcagcccttcgcgggcactgcccccaggcccagagccagccttcagcgagccgggcaaacgaaggcactgcgcgtttttggcgctgtgagttcaaggttcgcctcgagttctgggtcgggtttgtgcgtctgccttttggggatcagggtggcttgcatggctcggctgcccggtggcccacgggctgtattcgcagcgggcagcacaaggccggctggagaccgcatctggttaccatggtcagtgggtgggaggagtgcctggagacatcaggttgaaactctgaatggaagcgttggaaggcgctgggttggcctgcttttggcatcttggcaccgctgctcttatggctcagtgcctttggaaattggaatcccgtctgtgaaaactggttaagttagttgcgtttgaagccagatacgtattagtgaagcttcaaagggagttcagagtaaaaccaagtcacacctgcgtacctagcatccaaagtccctagcacaggtgtggcgcatgttagggacttcattagatgagtgaatggggctggatgtgctggctcaggcctgtaatcccagcactttgggaggccgaggcgggaggatcacttgagcccaggagtgcgaggctgctgtgagctatgaccctgccattgcactccagtctgggccacagaggaaaaaaacaaaaatcaaatggtgtgctggctacagaggccctttggaagg

SEQ ID NO: 25041 - DNA, 917 bp, Artificial sequence
  DNA replication origin
cttctgggctgtgcgcctggtggttgctcctctccccggagatcgaggcaagcgatcgctgtccaatcgggccggtggaatgggagaagagggtgccagagagagcagtggccagtcggaggctcacatctcggcgtctcccgctcgggtcccgaatccgggctgctggcgcggacgcggctcccggggcggaggtgcgggcaggctccagctccagccccagccgaggctgagagcagggcagggactggctgggcggcgcgcggggacgcagagcagccacctgacgctgctaccgcccccctccgggctccggcgcctgaaaccttcctgaacactggcgctttccgcaccgcccttaccccaccccggagcgggagcgcgagccctgaagtccgagcgcacagccggcgcccggaatggcccctgcgacccgggccgggcttggcgtctgggggagcgtgcggccgcccaggggagtttcccccaggaccgctgagcgcaggaggcgatccgcgagcccgccaccgctgcaaagttgcgggaaaggttgcacttgatgtgaagagtaggggaagagggtgaataattcacacccgagagagggggagtgaggagggcagtgttagcgatggaaaaacggtaaaggctgtgggggcgaagatgcgccagggtggagcagggcacgaatcacctctaacaaaccccccaatttccaggcgttgagaacggacagcagcggcaccgttacaaacagtccaaaagcctgaatgtgtcacagagaaaggaaaatggcataaatgcgaaaggggtggagagagatggaaaggaaagaggagcccgcactgaggcaccttccttgatctaaggcagtggttctcaaagtggcctggacgggcagcatccgcatctgcacc

SEQ ID NO: 25042 - DNA, 977 bp, Artificial sequence
  DNA replication origin
atcactcgcggttaggagctggagaccggccaggccaacacaacgaaaccccgtctccaccaaaaaaaatacgaaaaccagtcaggcgtggcagcgcgcccctgcaatcgcaggcactcggcaggctgaggcaggagaatcaggcagggaggttgcagtgagccgagatggcagcagtacagtccagctttggctcggcataagagggagactgtggaaacagagggagagggagaccgtggggagacgggagagggagagggagagggagagggagagggagagggagagctggatttcaaagcttcatccatgctgagctgcaaggggaatggacagaactggaaactggggcagactggagttgccagcctaggctgggctgtgagctccacggagcagatgccaggccatcctgccccggctctaagcccagccccaggccagggccggcacctggtaggctcttcatgagtgcttcctgaatgaatgactatttaatctagcccatgcttctaggtgagtcagctggtaatgaccctggaaaggcagagcttgcttttaggttctctagatggctgggctgctgcttttgctctgaatttgggtggggcagctagctgggctctgctatctggcaagaccactggctgacctctgcaatcaggctgagctactggataggcatttcaattgcctctgatcaagctgggccacagggtgtattctgtggccagaaggtactactatttcagttcagcagttggacagggttgcaggagggttcctgagattaagtatatcaggatgaatggaccaactgctatactcagtagaaaggtactgttgagatttgtctccctccctgggagggatctggggttgtgttctgtggcagcaaggaatgctgattaaactcctgggtatggcagaactagtccttactttttttgttgaaattcactgtcagggggtct

SEQ ID NO: 25043 - DNA, 1289 bp, Artificial sequence
  DNA replication origin
ctccctcccggacggggcggctggccgggcggggggctgaccccccacctccctcccggatggggcggctggccgggtgggggctgaccccccacctccctcccggacggggcggctggctgggcagaggggctcctcacttcccagtaggggcggctgggcagaggcgcccctcacctcccggatggggcggctggccgggcggggggctgaccccccccacctccctcccggacggggcggctggccgggcggggggctgaccccccacctccctcccggacggggcagctggccgggcagaggggctcctcacttcccagtaggggccgctgggcagaggcgcccctcacctcccggatggggcggctggccaggcggggggctgacccccccacctccctcccggacggggtggctggccgggcggggggctgaccccccacctccctcccggatggggtggctgccaggcggagacgctcctcacttcccagacggggtggccgccgggcggagaggctcctcacttctcagacggggcagctgctgggcggaggggctcctcacttctcagacggggcagttgccaggcagagggtctcctcacttctcagacggggtggccgggcagagacgctcctcacctcccagacggggtcgcggccgggcagagatgctcctcacatcccagacggggctgcggggcagaggcgctccccacatctcagatgatgggcggccgggcagagacgctcttcacttcctagatgggatggcggctggaaagaggcgctcctcacttcctagatgggatggtggccggacggagacactcctcacttcccagactgggcagccaggcagaggggctcctcacatcccagacgatgggcggccaggcagagacgctcctcacttcccagacggggtggcggccgggcagaggatgcaatctcggcactttgggaggccaaggcaggcggctgggaggtggaggttgtagcgagctgagatcacgccactgcactccagccggggcaccattgagcactgagtgaacgagactccgtctgcaatcccggcacctcgggaggccgaggctggcggatcactcgcggttaggagctggagaccggccaggccaacacaacgaaaccccgtctccaccaaaaaaaatacgaaaaccagtcaggcgtggcagcgcgcccctgcaatcgcaggcactcggcaggctgaggcaggagaatcaggcagggaggttgcagtgagccgagatggcagcagta

SEQ ID NO: 25044 - DNA, 1485 bp, Artificial sequence
  DNA replication origin
gggcgcctctgcccagcggcccctactgggaagtgaggagcccctctgcccggccagctgccccgtccgggagggaggtggggggtcagccccccgcccggccagccgccccgtccgggagggaggtggggggggtcagccccccgcccggccagccgccccatccgggaggtgaggggcgcctctgcccagccgcccctactgggaagtgaggagcccctctgcccagccagccgccccgtccgggagggaggtggggggtcagcccccacccggccagccgccccatccgggagggaggtggggggtcagccccccgcccggccagccgccccgtccgggagggaggtgggggggtcagccccccgcccggccagccgccccgtctccgggaggtgaggggcgcctctgcccggccgcccctactgggaagtgaggagcccctctgcccggccaccaccccgtctgggaggtgtgcccaacagctcattgagaacgggccaggatgacaatcgcggctttgtggaatagaaaggggggaaaggtggggaaaagattgagaaatcggatggttgccgtgtctgtgtagaaagaagtagacatgggagacttttcattttgttctatactaagaaaaattcttctgccttgggatcctgttgatctgtgaccttacccccaaccctgtgctctctgaaacatgtgctgtgtccactcagggttaaatggattaagggcggtgcaagatgtgctttgttaaacagatgcttgaaggcagcatgctcgttaagagttgtcaccactccctaatctcaagtacccagggacacaaacactgcggaaggccttccgcagggtcctctgcctaggaaaaccagagacctttgttcacttgtttatctgctgaccttccctccactattgtcctatgaccctgccaaatccccctctgtgagaaacacccaagaatgatcaataaaaaataaaaataaacaaaaaaaaatagtgaaggtctattcctggtaagggacacctataaaagccagaaaaggtagctgtctctgcaaatgcacagacaccaatgcaagaatgcaagaattacaaagactcaggaaatcatgatacctccaacagaaactaacaaatcttcaacaatagaccctaaagaaaaggagatctatgacacgtcagaaaaagaattcagaatgatcctctttaaaaaaagaaaaagaagaagaagaagaatttcaagaatatacaaattaaaaattaaatgaaacttggaaaataatacacaaacaaaacaaggagttcgacaaagaaataaacatttttttaaaccaaagagaaatcctagagatgaagaatacaataactgaaattaaaaattcaatagaaagcttcaacatccagctcaatcaagctaaagaaaacatcagtgagcttccaaacagaacatttgaaattacccaatcagaggagcaa

SEQ ID NO: 25045 - DNA, 1109 bp, Artificial sequence
  DNA replication origin
cccacctccctcccggacggggcggctggccgggcagaggggctccttacttcccagtaggggcggccgggcagaggcgcccctcacctcccggacggggcggctggccgggcagggggctgacccccccacctccctcccggacggggcggctggccgggtagagggctgaccccccgacctccctcccggacggggcggctggccgggcggggggctgaccccccccacctccctcctggacggggcggctggcctggcggtgggtgacccccacctccttcctggacggggtggctgccgggcggtgacgctcctcacttctcagacggggcggcttccgggcggaggggctcctcacttctcagacggggcggccgggcagagacgctcctctcctcccagacggggtcgcggccgggcagagacgctcctctcctcccagacggggtcgcggacgggtagaggcgctcctcacatcccagacggggcggcggggcagaggcgctccccacatctcagacgatgggcggccgggcagagacgctcctcacttcctagatgggatggcggccgggaagaggcgtttctcacttcctagatgggatggcggccgggcagagacgctcctcactttccagactgggcagccaggcagaggggctcctcacgtcccagatgatgggcggccaggcagagacgctcctcacttcccagacggggtggcggccgggcagaggctgcaatctcggcactttgggaggccaaggcaggcggctgggaggtggaggttgtagcgagccgagatcacgccactgcactccagcctgggcaacattgagcactgagtgaaccagactccgtctgcaatcccggcacctcgggaggccgaggctggtggatcactcgcggttaggagctggagaccagcccggccaacacagcgaaaccccgtctccaccaaaaaaatacgaaaaccagtcaggcgtggcggcgcgtgcctgcaatcgcaggcactcggcaagctgaggcaggagaatcaggcagggaggttgcagtgagccgagatggcagcagtacagtccagcttcggctcggtatcagaggga

SEQ ID NO: 25046 - DNA, 1003 bp, Artificial sequence
  DNA replication origin
gcccggccgcgaccccgtctgggaggagaggagcgtctctgcccggccgccccgtctgagaagtgaggagcccctccgcccggaagccgccccgtctgagaagtgaggagcgtcaccgcccggcagccaccccgtccaggaaggaggtgggggtcacccaccgccaggccagccgccccgtccaggagggaggtggggggggtcagccccccgcccggccagccgccccgtccgggagggaggtcggggggtcagccctctacccggccagccgccccgtccgggagggaggtgggggggtcagccccctgcccggccagccgccccgtccgggaggtgaggggcgcctctgcccggccgcccctactgggaagtaaggagcccctctgcccggccagccgccccgtccgggagggaggtgggggggtcagccccccgcccggccagcagccccttccgggaagtggggggcgcctctgcccggccgcccctactgggaggtgaggagcccctctgcccggccaccaccccatctgggaggtgtgcccggcagctcattgagaacgggccatgatgacaatggcggttttgtggagtagaaagtggtgagaggtggggaaaagagtgagaaatcggatggttgccgtgtttgtgtagtaggaggtagacatgggagacttttcattttgttctgtactaagaaaaattcttctgccttgggatcctgttgatctgtgaccttacccccaaccctgtgctctctgaaacatgtgctgtgtccactcaaggttaaatggattaagggcggtgcaagatgtgctttgttaaacagatgcttgaaggcagcatgctcgttaagagtcatcaccactccctaatctcaagtacccagggacacaaacactgcggaaggccgcagggtcctccgcctaggaaaaccagagacctttgttcacttgtttatctgctgaccttccctccactattgtcccgtgaccctgcc

SEQ ID NO: 25047 - DNA, 1277 bp, Artificial sequence
  DNA replication origin
aatttcagccactttagatttttcttttttttttttttctgacttctctatcctttccccaccctttcccccttttctattccacaaaactgccatcgtcatcatggcccgttctcaatgagctgttgggcacacctcccagacggggtggtggccgggcagaggggctcctcacttcccagaaggggccgccgggcagaggggcccccccacctcccggacggggcggcggccgggcagaggcgggccccccacctccctcccggacggggcggctggccgggcggggactgacccccacctccctcccggacggggcggctggccgggcgggggctgaccccccacctccctcccggacggagcggctggccgggcggggcctgaccccccacctccctcccggacggggcggctggccgggcgggggctgaccccccacctccctcccggatgaggtggctgccgggcggaggggctcctcacttcccagacggggtggctgccgggcggaggggctcctcacttcccagacggggtggctgccgggcggaggggctccttacttctcagacggggcggctgccgggcggaggggctcctcacttctcagacggggtcgcggccgggcagaggcgctcctcacatcctagacggggcggcggggcagaggcgctccccgcatctcagacgatgggcggccgggctgagacgctcctcacttcctagatgggatggcggccgggaagaggcactcctcacttcccagactgggcagccgggcagaggggctcctcacatcccagacgatgggcggccaggcagagacgctcctcacttcccagacggggtggcggccgggcagaggatgcaatctcggcactctgggaggccaagtcaggcggctgggaggtggaggttgtagcgagccgagatcacgccactgcactccagcctgggcaacattgagcactgagtgaaccagactccgtctgcaatcccggcacctcgggaggccgaggctggcagatcactcgcggttaggagctggagaccagcccggccaacacagcgaaacccggtctccaccaaaaaaatacgaaaaccagtcaggcgtggcggcacgcgcctgcaatcgcaggcactcggcaggctgaggcaggagaatcaggcagggaggttgcagtgagccgagatggcagcagtacagtccagctttggctcagcatcagagggagaccgtggaaagagagggagagggagaccgtggggagagg

SEQ ID NO: 25048 - DNA, 1146 bp, Artificial sequence
  DNA replication origin
atcatcctggtagtcacagaggtaaacgtttttgaaacaattgttccaaattgtgggtacaacttacaactaatttttcccattaatatatgtttgctgaatgcattatcaaacgtctaatctctgctctttgccatctagtttgagtcacttaaataattcaggcaagattctgtagccacagacatatatatgaacttggagttttaagaaaagttaaggccggttgcagtggctcatgcctgtaatcctagcactttgggaggctgaggtgggaggatcacttgaggccaggagtttgagactagcttgggcaacacagccaaaccccgactctaaaaaaatgcaaaaattaccggtgtggtgtcgtgcgcctgtggtcccagctactaagcggggggggggggggggggaatgaaatggatgaaatggggggggggggttgaggctggaggatatcttgagaccaggaggtagaggctgcagtgagtttagatcgcgccactgtactccagcctgggcgacagagtgagaccctgtctaaaaaatgaaaaagttaaatttgattgtgatagaaactcaatagagaaatattgaaaatccgctgctttttaatgtaataatagtgaggtgcgccttttatttggaacttcaagtgccttagtaatacggtaatcacagcgctagaggtaagtgggtgtcaagtggcatcatcctgggtccaaagggactgattatgggctggaaaatcaaactggcacctgcaagacgcagttccaaggatgcagttcgcagtgagttttcagacctggatgatgtatgtcaggtcggacgactgagacagctctccacttcccctcatccaaggggaaggaggaacccagttatctgcattaacaaacgcctccccttctctccaggtgaccccaagatccggaccacactacgaaatacggatccagattttaaaggccttcgaatccaaagtcctcgttttacaaagagcccgcggggtgaaatgacttgctcatggtctggtagctaatcgcagatctgctctctaactcctacttccaagacccaggaatctacgggtgttggagaagacccctcctgaaatcctccagaagagctttttgagggagc

SEQ ID NO: 25049 - DNA, 1152 bp, Artificial sequence
  DNA replication origin
agccgggccacaggaaactttgctcgggtggggagagcggggtgcgcggagggcgccgtaaacttgtcagcgggcggggcgctccggggattggagcgagcgccagcgggtggcgtttgtctctctgggttctttgtgtcacctccgggccccagcccgccggtccgcccggctcgggcaggcgctgcgcgggaggctgtgcccgggtgccccggccgccccctcccgggcccaggccccggccctcgggggccgctgattgttttcattcctcgcgtcacgcctgggcgggaaagattttgaacgccgcgtgagctggaaggcggacagccgcggcgcagagattgcaggatcgtgagcggtgcggtgctcgccccggggacccgggaacccgcgggtcggggcgcaccggggctggagagggcgcggggacgggcggcccgggcactggaggggcggcggcgggtgcggcagcctagcgcctccgcgggggcgggggggcgctccgacggccgggattataattccattttgattgcttggggtctttgttgtctgaaattgcctttagggtctgacggtggcaccttctcctccttaggttatttttcttctgttgaaaagggcggggcgggggctgtgtatggaatcagtgctgctgggaacattagcgccttatttgattgaggctgagaagtcctgtgtagcattcgcgtttgtggaagcctgctgtttccgaaagttatttccccctccctccgtgaaagggagcgtctgagctggacgccgcaggcacggttgtgtacaagcaccagcaagtcggagccaacccgtgagggttctttcaagccgctccacacttggcatcacttttttttttttttttgagtttgttttatttgaagcaacttttgtgtgcttttctagaagtccgaaggcttcgttgcagatactatttggctatgctaggatgggttcgatcatttttagagttggggaatacaattaaaccatgccgggctacacctggccttctcaccactccagtacctgccactgagacatcgtaaacatgttcagaggagagtgttcagcttttatgggatgaatatttggtgtgttttcatgctttaatgcatgactccttctcca

SEQ ID NO: 25050 - DNA, 933 bp, Artificial sequence
  DNA replication origin
gcatctctgcccggccgccccgtctgagaagtgaggagaccctccgcctggcaactgccccgtctgagaagtgaggagcccctccgcctggcagccaccccgtctgggaagtgaggagcgtctccgcccggcagccgccccgtccgggagggaggtgggggggtcagccccccgcccggccagccgcccggtccgggagggaggttgggggtcagccccccgcccggccagccgccccgtccgggagggaggtgggggtgtcagccccccgcccagccagccgccccgtccgggaggtgaggggcgcctctgcccggccgcccctactgggaagtgagaggcccctctgcccggccagccgccccgtccgggagggaggtgcggggcgcctctgcccggccgcccctactgggaagtgaggggcccctctgcccggccaccaccctgtctgggaggtgtacccaacagctcattgagaacgggccatgatgacaatggcggttttgtggaatagaaaggggggaaaggtggggaaaagattgagaaatcggatggttgccgtgtctgtgtagaaagaagtagacatgggagacttttcagtttgttctgtactaagaaaaattcttttgccttgggatcctgtagatctgtgaccttacccccaaccctgtgctctctgaaacatgtgctgtgtccactcagggttaaatggattaagggcggtgcaagatgtgctttgttaaacagatacttgaaggcagcatgctcgttaagagtcatcaccactccctaatctcaagtacccagggacacaaacactgcggaaggccgcagggtcctccgcctaggaaaaccagagacctttgttcacttgtttatctgctgaccttccctccactattgtcctatgaccccgccaaatccccctctgcg

SEQ ID NO: 25051 - DNA, 1953 bp, Artificial sequence
  DNA replication origin
ccgatttctcaatcttttccccacctttcccccctttctattccacaaaaccgccattgtcatcatggcccgttctcaatgagctgttgggtacacctcccagacagggtggtggccgggcagaggggcccctcacttcccagtaggggcggccgggcagaggcgccccgcacctccctcccggacggggcggctggccgggcagaggggcctctcacttcccagtaggggcggccgggcagaggcgcccctcacctcccggacggggcggctggctgggcggggggctgacacccccacctccctcccggacggggcggctggccgggcggggggctgacccccaacctccctcccggaccgggcggctggccgggcggggggctgacccccccacctccctcccggacggggcggctgccgggcggagacgctcctcacttcccagacggggtggctgccaggcggaggggctcctcacttctcagacggggcagttgccaggcggagggtctcctcacttctcagacggggcggccgggcagagatgctcctcatctcccagacggggtcccggccgggcagaggcgctcctcacatcccagacggggcggcggggcagagacgctccccacatctcagacgatgggcggccgggcagagacgctcctcacttcctagacaggatggcggccgggaagaggcgctcctcacttcctagatgggatgggggccgggaagaggcgctcctcacttcctagatgagatggcggccgggcagagacgctcctcactttccagactgggcagccaggcagaggggctcctcacctcccagacgatgggcggcccggcagagacactcctcacttcccagacggggtggcggcttggcagaggctgcaatcttggcactttgggaggccaaggcaggcggctgggaggtggaggttgtagcgagccgagatcacgccactgcactccagcctgggcaccattgagcaccgagtgaactagactccgtctgcaatcccggcacctcgggaggccgaggctggtggatcactcggcggttaggagctggagaccagcccggccaacacagcgaaacccggtctccatcaaaaaaatacgaaaaccagtcaggcgtggcggcgggcgcctgcaatcgcaggcattcagcaggctgaggcaggagaatcaggcagggaggttgcagtgagcccagatggcagcagtacagtccagcttcggctcggcatcagagggagaccgtggaaagagagggagagggagaccgtggggagagggagagggagagggagagggagagcactgtctcctcttttgatgggagagagcgtgaggaatttcagaagctgactggggcacggtggctgcaacataggaggcagatggcagaggagagtgacagagatgaggcctgagaggtaggtgtggctggctgtgccttacgagtcacattaacattttagatgttatactaagaaattggcagcctctgagactgtgttgatctggcttttggttttgtctctaatggtgatgatgtatgcttatgcaagagttgtttttcactgctttatattgtaaagctttagagaaaaaagaaatacatcctttagagctggtatgacactctgccccattgttgccaggttacaagtattggatttaggtttctgcctgtcacaaagttaccatagccatgggccatagcccctgaatgggaaaagggatagtgaaggttactgacttgcctcttgtgactgtgctaacatgttggccaagctggagaccatgctcagtcatttagagctcagtgttttcaatgctgaagtggaatgttcactttgtgagtcaggggatgtaaagatcaaaatgtcgtggtcctgcccttaggaggagttcatgatattcttctcacctcct

SEQ ID NO: 25052 - DNA, 930 bp, Artificial sequence
  DNA replication origin
aggagcatctctgcccggccgcccatcgtctgagatgtggggagcgcctctgccctgccgccccgtctgggatgggaggagcgcctctgcccggccgccaccctgtctgggaggtgaggggagtctctgcccggccgccccgtctgagaagtgaggagcccctccgcccggcagctgccacgtccgggaagtgaggagcgtctctgcccggcagtcgccccgtccgagaagtgaggagcccctccgcccggcagccgccccgtccgagaagtgaggagcccctccgcccggcagccgccccgtccgggaagtgaggagcgtctccgcccagcagccgccccgtccgggagggaggcgggggcagcccccgcctggccagtcgccccgtccgggagggaggtggggggcgcctctgcccggccgccccttctgggaagtgaggagcccctctgcccagccgtcaccccgtctaggaggtgtacccaacagctcattaagaacgggccatgatgactatggcggttttgtcaaatagaaaagggggaaatgtggggaaaagatagagaaatcaaattgttgctgtgtctgtgtagaaagaagtagacataggagactccattttgttctgtactaagaaaaattctgccttgggatgctgttaatctatgaccttacccccaaccccatgctctctgaaacatgtgctgtgtccactcaggattaaatggattaagggcggtgcaagatgtgctttgttaaacagatgcttgaaggcagcatgctcgttaagagtcatcaccactccctaatctcaagtacccagggacacaaacactgaggaaggccgcagggtcctctgcctaggaaaaccagagacctttgttcacttgtttatctgctgaccttccctccactattgtcctatgaccg

SEQ ID NO: 25053 - DNA, 1135 bp, Artificial sequence
  DNA replication origin
aatttgatttctctatcttttccccacatttcccccttttctatttgacaaaaccgccatagtcatcatggcccgttcttaatgagctgttgggtacacctcctagacggggtgacggctgggcagaggggctcctcacttcccagaaggggcggccgggcagaggcgccccccacctccctcccggacggggcgactggccaggcgggggctgcccccgcctccctcccggacggggcggctgctgggcggagacgctcctcacttcccggacggggcggctgccgggcggaggggctcctcacttctcggacggggcggctgccgggcggaggggctcctcacttctcggacggggcgactgccgggcagagacgctcctcacttcccggacgtggcagctgccgggcggaggggctcctcacttctcagacggggcggccgggcagagactcccctcacctcccagacagggtggcggccgggcagaggcgctcctcccatcccagacggggcggcagggcagaggcgctccccacatctcagacgatgggcggccgggcagagatgctcctcacttcctagacgggatggcagccaggaagaggcgctcctcacttcccagactgggcagccaggcagaggggctcctcacatcccagacgatgggcggccaggcagagacgctcctcacttcccagacagggtggcggccgggcagaggctgcagtctcggcactttgggaggccaaggcaggcggctgggaggtggaggttgtagcgagccgagatcacgccactgcactccagcctgggcaacattgagcactgagtgaacgagactccgtctgcaatcccggcacctcgggaggccgaggctggcagatcactcgtggttaggagctggagaccagcctggccaacacagcgaaactccgtctccaccaaaaaaatacgaaaaccagacagacgtggtggcgtgcgcctgcaatcccaggcactcggcaggctgaggcaggagaatcaggcagggaggttgcagtgaggccagatggcagcagtacagtccagctttggctcagcatcagagggagaccgtggaaagaagggagagggggctcggcatcagagggag

SEQ ID NO: 25054 - DNA, 985 bp, Artificial sequence
  DNA replication origin
cagtctcggcactttgggaggccaaggcaggcggctgggaggtggaggttgtagcgagccgagatcacgccactgcactccagcctgggcaacattgagcactgagtgaacgagactccgtctgcaatcccggcacctcgggaggccgaggctggcagatcactcgtggttaggagctggagaccagcctggccaacacagcgaaactccgtctccaccaaaaaaatacgaaaaccagacagacgtggtggcgtgcgcctgcaatcccaggcactcggcaggctgaggcaggagaatcaggcagggaggttgcagtgaggccagatggcagcagtacagtccagctttggctcagcatcagagggagaccgtggaaagaagggagagggggctcggcatcagagggagacgtggaaagaagggagagggagggggtggggagggggaggggagggggagagggagagggagcaatttaatttaaagacaggcatgattgttgacatttttatacaaactgatcgtcagctctagtaaacttccacaagagacctcattctatatattgtttgactccctgcttttttcatttagtctttatgaacattttaaagctctcgagacatacagccaaattgctttcctttcagccgtacattttggtatctgaaaacttgctgtgcagcagcaccatggcaggttctgggcactgaatccgtgagcagtgttgtcatggtccctgccatgtgtggagctaatggtccagtctgccagagagccacactgtatgcataggggtgtgtgtgtgtgtgtgtgtgtgtgtgtgtgtgtatgtgtatgaacatggtgagtgttagaggggaaaagggcagggcagtgagagtaaaacaggagtctcaaccttatccagtgactgtacactttccgattgtcaatattgtaagtattcaaaccaaactgattgaaacctggccgggcataactc

SEQ ID NO: 25055 - DNA, 1269 bp, Artificial sequence
  DNA replication origin
cccaactgaaggtgcacgttccaccgcaacctggtgcttacaacagctcgggaggccgcgctaccgcgcctgcgcccctctgaatatggaagcgcgcgcgaggtccttaagggaaaaggaagtaagggcggggacggagggagacgacttcaacgtagggagttgctgctgctacactgccggccggagaggacaaggaaaacgtggaggaagtcggtgatgactggctgaaggggatgattggcgggtgaaaagagccgggccagaaagcacctttgcatgtggctagaaacccgcctgaagaggggctgaaacccacgccggaacccgcccgattcgagccaatcagggagaggagccgggtgggggggcggacggggcggcctcgcggggggtggacggggcggtctgcggggagggggggcggtctgcggggagggggacggggcggcctcgcgggagggaggacagtttcgcgggttcgggcggcgagtctcccggatgctcctcagctctggggacgcggtgcagaagtgtgagggcgcccggcttccaggcagtaatgggcgggtccctgcgcgggagcgtggcgggcgctggactctacagcagatgtggaactggagagcttggcgcgccttccgactttgtcacacacctgcgccgccagactggggtcgggcccctccgcgttctgctctggagtgcctgggtctgggcccagcaccgcgcttttagaatctcctcagctgaatctgacgctcagcagtgggtgaagcgcagccccctgtttcaggccctgccgagctggaaggagtgtcagagctggagcgcgcgtggccccctctgtgttggggtcaccccggggttgccagggctcagggagggtcgtagtctggattttgtcacccgcacgtccccaccccccagcaggtctggggttggagaatccacgcgggcttcataagctagatgccagttaactgtcgagaggggacgctccctcctcgtaggcgtccacactggagaaggaataagatgggcgattgcctgggaagcctgacagggcggcggcagctgggatgctggagaggactggccccttgagttactgagtccgatgaatgtgcttgctctgctggaggaaccgcgctcaggttacagtcatcccaatatggttctgaaggtgcgtggttcaggtcacttaggacttgaccagataccgggtttcttttacaagccgtttctgacggtggcctgtttcaacta

SEQ ID NO: 25056 - DNA, 828 bp, Artificial sequence
  DNA replication origin
gccaggcgattcagaccccgccaccgcgtccccagagactgggcggaaaccggagactcgcctcccgaacccgcgaaactatctcccgcgagactgccccgccccaaccccgccccgcaactctactccctgattggctggaattacggccggattccggagtcctttccagctccctcttcggccgggtttcccgccgaatacaaaggcgcactgtgaactggctctttctttccgccaatcatttccgccagccattcatcaccgattttcttcatcttcccctccctcttccgtcccgcagtccccgacctgttagctctcggttagttaagggactcgggtccttccgaactgcgcatgcgccaccgcgtctgcagggggagaagcgggcaggggcgcaggcgcagtagtgtgatcccctggccagtccctaagcacgtgggttgggttgtcctgcttggctgcggagggagtggaacctcgatattggtggtgtccatcgtgggcagcggactaataaaggccatggcgccagcagaaatcctgaacgggaaggagatctccgcgtaagcacctgacattgttgttgagtgtggggctgtggacgagggctctgagggtgtgcaggtcccccggacccattttttgcgggagggacacttgtagcggaagagttaggcccataacacctgaagacctgcagccaaagaaagagaacccgggcacaacctgcgtttgcaagtggactgcctagtggctgtagccgctggctcctgtgcttcggggaaaagtcctgtgccgactatgctcccaaacgcgcagctg

SEQ ID NO: 25057 - DNA, 1265 bp, Artificial sequence
  DNA replication origin
ttgaaaccggacctcactatttagcgtctcagaaaacgcggggttcattgccctggtcccccccgccttcccccgccccccgaaccttccggctggctctcttgcggtccccgcctcggcgctgatgtggtctggcagtggagattggcgcccgggcggagcacgatgggcttccccgcggcaggcaggcaggctgctgctgcaggtgggtcccggcgcccgcgccgccccgcgcctccggcggtcgccccgcccctgcccgcccgctccgctccgctcgcattggcgctgcctgctgtctgtccccgcgcggtggggagggggcgcacccggcggcgggctctgcagagggcgccttgctccgggtgcgaccgcggctccctggaggcctgggcggcgggccccgcgagcgcgccgccacctcgggagcagtgttggccaaggaccccgacgccctacgtaagtaaaggcagggcggggagcctgcgggggaggagggtcgggggcaatgtccggtccgcggaccgcggagtgggcaagaggtgcccactggatacggggtatccgagccctctgaggtgctgggagtaagaacgcgggaggtcgcttgtccgctggaatccgcggccagggcgaccctcatcaggtctgcccacctatccccttcgcgttacagcttgtcttagaagcatgggttgccggtggcttttttccttctttatccctctttgagaaatgtgattttgggtttctggccattacattataattctgcagacagcctgaagctgggttatctgttccacgcccccggcattttcctttttgagtactttatcctgcgctctgtctcctgccataaggggcgtcaagccagaattcgagattccttcctccaggaggaagcttcgtggtccgtatctggtgctgggaaagatgcattgctttcctcgggtactggctgctcaagggaaaaaggaaagggggtgttttctgtgacatgagacttgcaattccatcaggaaatgagcacagggactttaagatttcctgaggcgataaagctacccttgctggttaagagcgaatcatttgcagtctgacattctgcaaagttttattgtctacagactgcattattttccctcgttagttaagtttctgtttgggtattcgttttatttctagtatgtgagatacattcaagtgagcttctcaaacgattgtctttgcgcaatccaggttagtttccaatgacagactcc

SEQ ID NO: 25058 - DNA, 1226 bp, Artificial sequence
  DNA replication origin
cgggcgagagggaggggaaggctggcggacgccgcagcgaactggtgggcagacccggagtcgccgcgtaagcggggccggctcagtgcggtgcggcaggcgcggctgtgcggcagcggaagtcctttgttgcagcacagtccctggcagagccagagcctctccgcgcagcccagcccgagcgccgagcgccgcgcgccgccgccactgcagctcgcggccccttcgccttcgcccgcctttcccgcggctgatttgccttaaactccctaaaatctccgcagctctggttcctgttgcggccggtaagtatttgccagttgtggggctatttgcgcaactttggcccaggccggagggcgacgggccgcgggcctggcggagtgcggggccggaggggcgccgatccgtgcggggagccggagcgcggcggacgcgctgcgaggacccggtgacgggcggctgccaggccgcctgcttgttgccggcgcgtcaggtcccgggcgtgcggcctccctgagtcggaggcgaagcccctacggagactagttcccaaattagttaccttcttttctttctttctctgcctttatttttttcgaggggggaggggaggtgtagacgggaggcgggagaacccggttgattgacgtgcctagagcccgcttctctcaacttacagctgcggctcggcggcgggtgggaggggaagtgtcccggagcccgaggctgcagacttgggcgcgctccgagggaggaggcgtaagatccgtgcaaattcttgttacgctgtttcccaccccctctcgccggcacacacgctttttgttcagtaaaaagtggaaggtctgagtttgggaattttaagtggaaaagatctgtttcttgggaagggagtgctttcgcttgcagcggtgggcgcttactagaagttcggtaaatgtgttggatgcagatcgggagtcgttactactaaagtatgtaggcagggtctgagctcagccaccccacccagtctccctttctacctaagcaacgcgtgtacatgatctgaagggttgacatgacattttctaaattgggcgaatcaggaagaggttgatgaaaatccttgacgttttctggggataggacatttgtgtgtgataacgttcttaagtcgaatttcagtgtggcagtgcacgcagattcttcattggtgttagtgtatttccatacggtatgta

SEQ ID NO: 25059 - DNA, 1061 bp, Artificial sequence
  DNA replication origin
cgtccaaggggagggaatagggaattggggtggctggggtggggggtgagggcggatcccttggacggggattaaagaaaagaaaaagtctgaaccggcggtcggcctcctgggattttatggtgggtgcttcactgcgtctcagtggttgtgagcgctcgattaaaactgcctggctggggccgggcgcagtggctaacgcctgtaatcccagcacttgggaggccgaggcggccggatcacgacgttaagacatcgagaccatcctggccaacatggtgaaagcccgtctctactaaagatacaaaaattagctgggcgtggtggcgcgtgcctgtagtctcagctactcgggaggctgaggcaggagaatcgcttgaacccgggaggtggaggttgcagtgagccgagatcacgccactacactccagcctgggcgactgagcgagactccgtctcaaaaaaaacaaaaaaaaaccccactgcctggcgggcggagagaacctgagcccagggcgaggccgaccgttttcccgcgccgcgtgagggcggctggcgggacggcagacaggggtgtggcggcgacttgtcctccgaggagcctgcatttaaacccttcctgcctcactcttcctttttcctgtttgtcctgccgctttaaactctggtttcgccttcctgttcattccattgcttattttaggtcgcaagtgctttatccactgctttgagtttttgactggaaaacccataatataatcagtcaaaacccacacgttgaaacaccataaagtcacccagtctcggtcaccctggcacacacggggttgtgatcgtgacctagtcatgtttctgactccgctcaatggaatggaatgattttctttggctgtgctgaggttaatattggaggcataaaccctccgagaaggtagatgaaaaggagcgcgattcacttcctcctgtttaacaggaatgtgaggacaggtctggaaaataccctggcaccaggtaataatctttagaagcaggctcccatataaatgggctcctggacgggt

SEQ ID NO: 25060 - DNA, 1134 bp, Artificial sequence
  DNA replication origin
gaaaggcgagcgacgttaggacgggaaaaccagggagatgaactccgcggagtcaactaacggccacctcgaaccaagcaccacgggcactaccagcaactcagctccccgcgcccagttcccggttcttatagccgcctctgggaactcccagacccaatccgctcccgggaccgccctcacaaactcttccagctccaccacaggcttgcctaggtcggagtgactggcccgtgacccaacagatttcaagttggacgaggggcgggactccggcccccgccaggagacagaggggcggccgttatgtaaatgaggttcctccctgactctcggccgccaggccgtggtgcctcgcgcgcctcctgctgctggctggcgttaggcgcgcgctcccagagccaggtgtacgcgctttttcgcggtctttgccctagccgacgtgcatcggattggcagggcacgcggccaatgagcagtgcggactgaggcgcggcacggggaggaggcgtggaaggggatcccggtgaggagagccactgggagagttcgctcaattcctgaggttttaaatgcagttcactgctagggtgccgactcactgagcacgcaggggcggaggaattcattctgagttggttgcaccgaagaaataaagctcgagcagcttgttttccccggcgccgtccaaggggagggaatagggaattggggtggctggggtggggggtgagggcggatcccttggacggggattaaagaaaagaaaaagtctgaaccggcggtcggcctcctgggattttatggtgggtgcttcactgcgtctcagtggttgtgagcgctcgattaaaactgcctggctggggccgggcgcagtggctaacgcctgtaatcccagcacttgggaggccgaggcggccggatcacgacgttaagacatcgagaccatcctggccaacatggtgaaagcccgtctctactaaagatacaaaaattagctgggcgtggtggcgcgtgcctgtagtctcagctactcgggaggctgaggcaggagaatcgcttgaacccgggaggtggaggttgcagtgagccgagatcacgccactacactccagcctgggcgactgagcgaga

SEQ ID NO: 25061 - DNA, 1320 bp, Artificial sequence
  DNA replication origin
gcaccatcacggggctcaatgtgctgcgcatcatcaacgagcccacggcggcggccatcgcctacggcctggacaagaagggctgcgcgggcggcgagaagaacgtgctcatctttgacctgggcggtggcactttcgacgtgtccatcctgaccatcgaggatggcatcttcgaggtgaagtccacggccggcgacacccacctgggcggtgaggacttcgacaaccgcatggtgagccacctggcggaggagttcaagcgcaagcacaagaaggacattgggcccaacaagcgcgccgtgaggcggctgcgcaccgcttgcgagcgcgccaagcgcaccctgagctcgtccacgcaggcgagcatcgagatcgactcgctctacgagggcgtggacttctatacgtccatcacgcgcgcccgcttcgaggagctcaatgccgacctctttcgcgggaccctggagccggtggagaaggcgctgcgcgacgccaagctggacaagggccagatccaggagatcgtgctggtgggcggctccactcgtatccccaagatccagaagctgctgcaggatttcttcaacggcaaggagctgaacaagagcatcaaccccgacgaggcggtggcctatggcgccgcggtgcaggcggccatcctcatcggcgacaaatcagagaatgtgcaggacctgctgctactcgacgtgaccccgttgtcgctgggcatcgagacagctggcggtgtcatgaccccactcatcaagaggaacaccacgatccccaccaagcagacgcagaccttcaccacctactcggacaaccagagcagcgtactggtgcaggtatacgagggcgaacgggccatgaccaaggacaataacctgctgggcaagttcgacctgaccgggattccccctgcgcctcgcggggtcccccaaatcgaggttaccttcgacattgacgccaatggcatccttaacgttaccgccgccgacaagagcaccggtaaggaaaacaaaatcaccatcaccaatgacaaaggtcgtctgagcaaggacgacattgaccggatggtgcaggaggcggagcggtacaaatcggaagatgaggcgaatcgcgaccgagtcgcggccaaaaacgccctggagtcctatacctacaacatcaagcagacggtggaagacgagaaactgaggggcaagattagcgagcaggacaaaaacaagatcctcgacaagtgtcaggaggtgatcaactggctcgaccgaaaccagatggcagagaaagatgagtatgaacacaagcagaaagagctcg

SEQ ID NO: 25062 - DNA, 1382 bp, Artificial sequence
  DNA replication origin
gataagaggggagagaggagaatcaggggacactcaccgagcggtagctgccccgcgggctcgggacgcgcacggcgtgcggggctgcccaggtgctgccgcgacgcgggcgcgagtttgaaagtcgctctctgaaggggctgaggccgccgaccgctcccgcccaccgccagcccctcagctggcccggactcggccagctgcaagcgcggcccccggagaccccaggcagcgcgcggcttgccagcgcccggcaggaagtcgagcggagccggagctgcagcgggagggcaggagggagcgagggagcgagggagcgagggagcgagggagcgagggagcgagggagcgagggaggggcgggccaggaatttttcctgtgggtggagactccagctcgcggctgcagtccagcaattggcggctctgcgggggccggggcaaccttcgcggcgcggcgagccagagccggggtaaggctgcggcggcggcgaggcctgggcgcggttaacgattaacgcccgcagggtgatgagcgcgcacccccgggcagcctagatgctctaggataccaagacgcacgtggtggggtcaccctggtgtcacagacctgctatcaccgcctcccgagacagcatggactgccagaacgtaccccttgtatggacagggaacaccgggccctgcgaagggggctgagggctttcccaagtgagtgaccagccgggatcgatctggggatcctaatcctaccagagccggccgtgtccgcttttccaagtcagaaaggcatgtcttgaattcctcaccataactcggtccctgtgacgctttacagtggtaaatgcagacctctgagaagctgacgggaaagagataaaggagacaacgtgaaggcaactccacaaggaactgttaaataggaaaaataaaacacagaaacctggatgatagaggacccgtttttataaaacaaagagaaccgtttgtctttatgtctctgtatatgaccgtgtatgcatggaaaggtacacacctggaaactggggggcaaggggtgaggatgggggacagagacattcaatacattttgagcaagagcataaatccaaaaacccataataattcatcagtaaagatcctgaagaacaacaagcccggaggagggaagcccagagtggggctccggaagaggaacaacgcccactggttaggcgctatcactagttccttgggaggaggaataggacgctgatattagaaccacggggtatatttgttatccaggtgtacagcaaacgatttctagaggtatcatttaaaacaaaacaagcgcccgccccaaaatgctgctctgggcaaatgcaagctccaggtgatct

SEQ ID NO: 25063 - DNA, 1538 bp, Artificial sequence
  DNA replication origin
gagcccgcggggcagctaccgctcggtgagtgtcccctgattctcctctctcccctcttatctccctgcattaggctgagcggcggtgccggcagtcacgctggggccccagtcccttcgcggcccccgtgccagccccctgcggggtgaggaccggggcgaccgaggagggcctggaactgtgttggctgcttcccgggccaccctgccgcagagtgcgcgagcgcaggagggtcgtatggggagactttttctgtctttttttccctccactccggaaacaaaaggggcaaatgcgccgggcggctccagagaggctcagtttgaaatccaggaagcccgcgaggccgcgcgcgcccgagggctggtgtttggctggagctgtgggcctggcgggtggacccttctgcgcgaggacccgagcctcggctcctgccagccccggaggcgcctgcagcctgttccgggttggcgccgcacggtgctcgctgttgggaatctcggctacctgtccggcagggaggagagtgggggccagaagcggggagcggaaagcccggccaccagctgcctcgacctcgtccactcctgaagtcggtttggttcttcgcacccctacacccagccctttggtttggaaagccagtataaggcgtgcaagcttaaatttttaaggcgttaaatagctactttgactcttcggggcgcctttggaacacaaaaggaagaacggaggggagaatggaatggttggaggctggagaggtgtggcttttggggagggtgttgttagaggccgcgaaagagtttgatcctcgaggtcactcgctaatctgttggcatatgtaggtgcctgtcccctgctctgggggccccagcaggagacccacactgcgttcaccttacggggaaccctggagtgggggttcccagagtctccccagccgtgcctctgcacgcagcccagtcacatggcccttgctcaagaaataataagcagggagggcaatgacagtccggagcgggggagggcctccccgttgagcacatcggccacctcgccttcagcagtgtggttttccgggccatcctttgttggacaaggatgggatcctgagtgattaaaccccagctgttccccaggaggaaactagggagtgagaaccaaaagtgtacatttatctctctgttatacatctctcccctgtggttccgggctggccccctggatgcaatggcctcacttctcctttcgacacctgctgtcctccactcccttcctggaagataggacaacccattagctccctgggtaacttgccctggggatggggcaggaagttgggggaagaggtacccagaggccaagtcctagctgctgagggagtgatttgttgaagagctgctttgggggcttttctactgccttttattagaagtggcatggcaggggaagtggaaagagcactggcctgatagtccagcacgggtttatgcctgagttttagacctggctcttctgcatagcatggaagatt

SEQ ID NO: 25064 - DNA, 1142 bp, Artificial sequence
  DNA replication origin
gtcttgtgctctgaacagcatgcaggcagtgctggaaccctcctggactttgggcagccctcccgtactcggggcctgcagccagaggctgaaggggctacccaggaggaggaagaggaagaggaggaggtggtggaggaggaggaggaggaggaggaggaagagcaggcctttcaggtctctctggaggacctgacagggcatgaaggcaacgagaagggggctgggccggagcccccaggctcagaggaggaggaggaggagcaggaggagagcctggcggtggcggagcaggtagccgactttgccagctccctgctggccgccctccactgctggcactatcgggccaacgctttacttttctcccggggcgctatggtgaggtgtctcttcgatctcccctcctccttgcatgctccctgggatgtgcatgcccacccgagggccccctctgctgccctcctcaccccaccctgccctggttttactcctcccctcagcacttaacaccatcgctcgctgtcacaccctggtgagcccctggcatgctctgttccagtactgggcactaatcaatataacgcccaacaagcatgacaagtggggtggggtggtgggggcagggagaagctagcacacagtggggctggaaaggtcaagtccactttggagggacagaaaggtgggctgaggttttttgaagctgcatgcctgacaaggctttccgcagccccaggcctggcagttcaggttggctctggaatggctcaggtccaagactggctctcagctcagcccagccccttggggcgtgggaggcactgcccgtgttgggatgcagaagggatcagcttccagttgtcttggagttgatgactgacctctacctctgcagggaaaggggcgcagggagtctgaaagctccaggagcagcagaaggcccagtggccggtctccaaccagtactgagaagcgcatgagcttcgagtccatttcttccctgccagaggtgagcgaccagcaggtgggatggggatagtaggaagaacttggagtccagattttcaagtctgcaaatagggctttcaggcacaggctctcccactgggcccatgggaacagagattccccacctccca

SEQ ID NO: 25065 - DNA, 1735 bp, Artificial sequence
  DNA replication origin
cttcaggtgctgatttggcacacgtggaagggggagggtgggcccttgtccctaggctccctaaagactggcccagggaaacagttgagggagatgtttgccaccatctgcccttcagcaaggaacctgctctctgccccagaggaggacatgcctgcaagtgcaccaaaggcctactttattgctaggtgagtgcagtcacctcactgccttggtttccccagatacagaaagaggctggtgagtgatacacactaggttccctgtatagggtcatatgtaccaaagccaaatgaagaccttgctcaccagggcgggaacctggggatgtcaggctccatcggatgacgtcttccttcctgtggctcctgcctgctgcagttggtgtcaccctgacatatagtgtcagggccacagggtggaactgatttctgccggcactggtcagcactcagggttcctcagggggcctcattctggatgcctgcccctgtggcttctacctgaacctcacccacttcatctccatggaactaaggtccttctcacggggaaggtgatagaaacttgactgcaggccctggggactttcatggtttccttgggggaaaatgcctgctgccctccgccctcccccccacccccgacccgcttgactgctctcttggacctaaccctagtttgatactgggccagaactgtgttgctttcggagtagagtggtggggaaaatatggaatgagctttctcttcctccagaagtatgacctgagcagcaaggggaaggccattcctggggacgttggttgcagagcttctggtgctcagggctggagggtggtagatatttgacctctgtactcatgtgaccccctccccgccaagacctggggccaggacgtggagaagctgatcaaggggtaccacaccttcatggctctggccctgacatttgtcccagttgtgcaggagtagctgtcacatgggtggtgataccaagacatggctgcgtctgccaccccgagaaaacagatgatcaactttactgtctgcccagccattaccctccaaagtcccagctgcagacaggatgcaattgagcatttggctttgggatgctttactgcaggtgcggggggtatccatcttatatctgggggcccacactgtcccgtagggggcctatgtctgttggatattgctggtttggctgccactgggagtggggcgagggtcccagcattgagagggagagccttaggcagtgttgtgacgcacctgtcactccttcagatcagagccctgtgccctagccacggttttcaatgaggaatggtctgaccttgctgcccttcctgggaccgcctgtggtggcacaaagggtgctagaggcactcagccaggccctgccaaccgtgggagggtaccctttgatctggggggagaagcagagaggagggatgtggtggcccctgaagtgagagtcccagttctgcggaagcccagtgggaaggaggctggcagctcccaaggccctgcacccagtctggtcccctcagccccccagagcccctggcccagagctagggctttgtgggccacctgaaggctccttcctcatgcccctagggggctggccatgcatttccagtgtcttcttcctttcccctttccctggctgccaccaggtgggaggtgacccgaagcaagacttgctttaggaacgggcagcgtt

SEQ ID NO: 25066 - DNA, 1326 bp, Artificial sequence
  DNA replication origin
ggggagggcatctgtctctctcagagggtgagaagggctgaaaaagggaggcctcactatctgtatatgtttctgggtgtgactggtgtaccagaaacttccatgtggaatgccagtcttcctaacctcacccccaggttcaggcgggctcacgggacacctggagaggtgggctgcaggaaggatctgtggctcccttggcccccagtgcagcctgccacagcggggacatgcagggggaagccgtgcaagccgtgtgctgaattcttgctttcttctcggtcagctgctccccagagcagctccctaagcctgggtgacagcctcccaggctccctgcacagaccccatggagtcctaaggggcctgctccaggtaaggtcctgaggcgcatgccctaggcctctggcagctgctgtcttgggctctccctgtcccttgagccaggcctctggctcatcctcctttccgacaagttggggggctgacctctgttactcaaagccctgggattctcctcaattttgcaggcttccttcaagtctgttcttgccccagaaccagctccatatccagactcactgacccacaggcctcaggccagatcggtggaaagaggagagggctctgcatagggggaaagaatcgcctacaaggatgggcacccccacttcaccactgaagatgcctgtggtggggcaggtgggatgggacagctgagtgattggggtgtgtgtgtgtgtgagtgtgtgtgtgtgtgggggtgtggtgtgtgcacatgtatgtgtgtgtgtgtgtggaggttgcggtgtgtgcatgtgtgtgtgtgtgggggtgtggtgtgtatgagtgtgtatgtgtgtgggtgtgagtgtgtggatgtgtgtgtatggggtgtggtgtgtgcatgtggatgggtgtggtgtgtgcatatttgtgtgtgcatatgtgtgtatgtgggtgtgtgggtgtgcgtgaggtgtgtatggggggtgtggtctgtatgagtatgcgtgtgtgggtgtgtgtggatgtgtgtatggggatgtggtgtgggtgcatgtgggtgggtgtggtgtgtttgtgtgtatgtgtatgtgtgtgtgtatgtgtatgtgggtgtgtggttgtgcgtgaggtgtctgtatatatgggggtgtgtggtgtgtgtgcatgtgggtgtgtatttgtgtgtgcatgcatgtgtgtgtgggcatgtgcctgtgtgtaggtgtgggtgcagggggtgagtactgcctagaggaaggagttggaaaatggggaaaaggacggtgtacagaaatgcactaatcatctctggctagt

SEQ ID NO: 25067 - DNA, 1174 bp, Artificial sequence
  DNA replication origin
tgcgtgagtgggtggggaaggcgggggctgggcttggcgctgcgggaggctgcggccccgcctccccgcccccgccgcgggactatctggtcccggcagcagcgatgtcccccggcaggaatgtccctcctcagataatgttatttatatctctgggcgggtccgcggctcggcagcaccaggcgcccggcggccgctgtgccaggagccccgcgctgccctcctccccctgcgccgccgccgccgccacccccgggctcggggtggcccccgcttcagtcccagggcaggtgagtcccaggagggcccggcggccaagggagctgggtgcgggtgcgcaaggctgggacgcgcggcgccagctcaaaggagcgctgggcccagggggcgcctgacgcgcagggcccagaggaccgggtgggagtccagccccggttgtcgggcgtggggtgggaggggtgcggggcccgggaagcccggcagctgcggcaaagatcatcccgggacgcgggaacgcgcgcgggcgtccgaggcacttggtgctagctttggagagcgggatcccggagagtccgtcaccccggggcgcagggagagggtgacgggggtgcgtgttctcgtccgccttctccaggaccccggcctgggagcgaaggggattgcgcctctagcccgtccgaccgcagcgctgctctctgcctttttttgtccggcttctcagccttgtggccgctcatatccctcttctggggaacttggctgcgctctcctcgggccacccagcgcccaggcaggagggacaggtgagggcagcagagggggccgggcctccgggtgctgggagccacccagagagtgaccccgtgtagaccgagggaggaaagatcctagtgccccaagccatacttcaaggacccctagtcttcctctcccaaagagttcctctcttcctctaagcttctccgggctactctaccctcaccctcctctccagtttcccctcttcctctaacttggtcttgagaaatagcagaaagtgggagaaataacagaagctgtaaaacaatccccaactcccaccaactcatccgtacttcccaggctggggaagcagctgcggggctggagtgctgtttccctgacaacgagcttcaggtagggccttgagttacag

SEQ ID NO: 25068 - DNA, 979 bp, Artificial sequence
  DNA replication origin
tgcctggccagccgccccgtccgggaggtgaggggcgcctctgcccggccgcccctactgggaagtgaggacccctctgcccggccagccgccccgtccgggagggaggtggggggggtcagccccccgcccggccagccgccccgtccgggagggaggtggggggatcagccccctgcctggccagccgccccgtccgggaggtgaggggcgcctctgcccggccgcccctactgggaagtgaggacccctctgcccggccagccgccccgtccgggagggaggtggggggaacagccccccgcccggccagccgccctatccaggaggtgaggggcgcctctgcccggccgcccctactgggaagtgaggagcccctctgcctggccagccgccccgtccgggagggcggtgggggggtcagcccccctcccggccagccgccccatctgggaggtgaggggcacttctgccgggccgcccctactgggaagtgaggagcccctctgcccggccacgaccccgtctgggaggtgtgcccagcggctcattggggatgggccatgatgacaatggcggttttgtggaatagaaaggcgggaagggtggggaaaaaattgagaaatcggatggttgccgggtctgtgtggatagaagtagacatgggagacttttcattttgttctgtactaagaaaaattcttctgccttgggatcctgttgatctgtgaccttatccccaaccctgtgctctctgaaacatgtgctgtgtccactcagggttaaatggattaagggcggtgcaagatgtgctttgttaaacagatgcttgaaggcagcatgctcgttaagagtcatcaccactccctaatcttaagtacccagggacacaaacactgcggaaggccgcagggtcctctgcctaggaaaaccagagacctttgttcacttgtttatctgctgaccttccctccactat

SEQ ID NO: 25069 - DNA, 1230 bp, Artificial sequence
  DNA replication origin
cccacctccctcccggatggggcggctggccaggcggggggctgacccccccacctccctcctgggcggggcggctggccgggcagaggggctcctcacttcccagtaggggcggccgggcagaggcgcccctcacctcccggacggggcggctggccaggcggggggctgaccccccacctccctcccggactgggcggctggccgggcggggggttgacccccccacctccctcctggacggggcgactggccgggcagaggggctcctcacttcccagtaggggcggccgggcagaggagcccctcacctcccggccggggcggctggccgaccccccccccccgcctccctcccggacggggcggctggccgggcagaggggctcctcacttcccagtaggggccgccgggcagaggagcccctcacctcccggacggggcggctggccgggcggggggctgaccccccccacctccctcccggacggggtggctgccgggcggagacgctcctcacttcccagacggggtggttgccagacggaggggctcctcacttctcagacggggcggttgccaggcagagggtttcctcacttctcagacggagcggccgggcagagacactcctcacctcccagacagggttgcggcccagcagaggcgctcctcacatcccagacagggcggtggggcagaggtgctccccacatctcagacgatgggcggccgggcagagacgctcctcacttcctagatgggatggcggcggggaagaggcgcttctcgcttcctagatgggatggcggccgggcagagacgctcctcactttccacactgggcagccaggcagaggggctcctcatatcccagacgatgggtggccaagcagagacgctcctcacttcccagatggggtggcggccgggcagaggctgcaatctcggctctttgggaggccaaggcaggcggctgggaggtggttgtagcgagccgagatcacgccactgcactccagcctgggcaccattgagcactgagtgaacgagactccatctgcaatcccagcacctcgggaggccgaggctggcggatcactcgcggttaggagctggagaccagcccggccaacacagcgaaaccccatctccaccaaaaaaaaacgaaaaccagtcaggcgtggcggcgcgcgcctgcaatcgcaggcactcggcaggctgaggca

SEQ ID NO: 25070 - DNA, 1451 bp, Artificial sequence
  DNA replication origin
gcgggcgaggcagccgcgggggccgggcccggcgtcctcctcgccgcccgcagcgtccccgggcgggcgcgggccgcgatggcagcggcggagcagggctgagcccgctgcccgcccgcagttcccggccccgctggccccagtcatggcgaagcagtacgatgtgctgttccggctgctgctgatcggggactccggggtgggcaagacctgcctgctgtgccgcttcaccgacaacgagttccactcctcgcacatctccaccatcggtaaggggcggtggcccggggcgcccctccctccccgcccgcggcccctttccccgccgcccccgtccccagctggggaggaattgccagcccctccggctggaggcggtggcgccggaggccggagtccgggataaatctcggggtgagcataggttttggcaggtgagggtgtccctgctgcctgccgtccggaccaggggtggggtctcccgcctcttgccgggaagccttccgtcccatcaaaccgagaaaccgggggtgaggggagctggtgtaggcctgggtaccccgagctggggtagcaagaatcgtagccgctggaataacatccccacacccccagggggaggggaagtaaagcttctgctacggaaaagggggtcagggtggagaccggagtcactgaggcgcccttggttctgtggtgacccaaggtggagccggcggggggcgagggggggaagagaggacgtacggaggggccacagggatcgagtttccagggcagagttgggaaggtaagccgcaaggtgggacacctgggggaggacacagatagggtgaggagcccctgcgcctgggaagaggagacatctgttctgagggaggctaaagaggatggaggagtgtcaggaatacctgcccagaccaaggggtcagaaggcaggcaggacccgcctgagggcatctctcatctggcagtgctggagcctgtggttagagggacaagacccggtggcatcccagacagcactatgatggggtcacttattctaggaatgggtccatggcctcccctctgagacagtcagtctcccgcttctaggctgtgaggggccccctccctgagaagtctgagtagagggaatttcatcctcagctgctacccgggtcagccctggagtagcctctgcattgcccaggcccctggaaacacctgctggctggctggtcatccatttggaatgctctcctagaagtccctgctgccatcagggatgggcaccagctctcagcttcctcttgaggattcatgtccacaccatcccccctccccccaacacacattccttgctgagagagaagtaggagcagatagatacagccaggaggaacagaaccttctggttaagaagccagctttattgtccaagagacctgagacctcactgtggggca

SEQ ID NO: 25071 - DNA, 1140 bp, Artificial sequence
  DNA replication origin
aactcgttgtcggtgaagcggcacagcaggcaggtcttgcccaccccggagtccccgatcagcagcagccggaacagcacatcgtactgcttcgccatgactggggccagcggggccgggaactgcgggcgggcagcgggctcagccctgctccgccgctgccatcgcggcccgcgcccgcccggggacgctgcgggcggcgaggaggacgccgggcccggcccccgcggctgcctcgcccgcccgcctgcccactcgctcgctgggtgccgggaagcgcggctgcggcgggagcccggcgcggcgcccgctcggctcggctcggctcggctgggctggcgcgaggcggtgggaggagaaaccggcggcggcccctgcccgccccttcccctgcgccgccgccgccgccccggagagagggggcggggagcgcgcgcaggagagcgggaccccatcgagcaggcgacgctggggcggggcgccagccccccctcccaaccccttcctgcccggggcgggggaacgttttcgtttttccgcggacgctccgaatgggggagttgaggtgagcccccacccagcccacttctaccgtgctccgctttccgggctcaccacttctccccatatcccaccccaagtctggcgccggtaattccgcccgccgtggcaccctgcatctgcaggatctggccgggctccccagtggctggtacctcagctgggctcacccgaggtaggaaggccttgagcaggatctggattcgaacacccgtctccatgagtccccgagagtgtgggtggaattccccctccctgccatctggctgccccttacctgtgtgactgtgtcacggccctcccccgtccccattttttctttaaatggggaaaatgcctattcacggcctccaccagggtgaaaagatagatggccataagaacatctccaagtgcaaaatcctttagaggtgtgcgggcaagtctccgttttccctctaaggtgcttaggataggtgcccaggtgaccaatgtattgtttcagacccctaaatttctctgtggtatagccagtggcaccaaagaatgaatggcccttgttcaagatccagtttcctaccactgaatgtgttagcaccg

SEQ ID NO: 25072 - DNA, 1334 bp, Artificial sequence
  DNA replication origin
acaagccgagtcccccccacacacacactcactcactcactcactcgctctctcactcacacacacacacaacacgggcaagaaccacctcctcactgcagcaccggatcaacggcggcacgcacgcccggtcggcccccgccacgtgaccaggctcgcagcgctggggcagccgagacttgtagttcttgtccctctaacagacggcccgggtagctccagaaaaactacaaatcccggaagaaaccgcatccaggcgacgccagcccggcttgttgacggagcccaaggcgcctgcgcgtcccggggaggggggggggggcgggggggggcggggagagccgcggcgcggcgcctcctgggagtcgtagtccgcagaccgcgagttgtcaggagattttcctcccgaggcggcagaggaggctgctgggaagacaggacacgtggagggagctggaactcctggagccgggcaccgtctgcgcgctggacgccgggcccaggggactgggtggagtctctgggggagtagccggctgtctaaataatgctgcctctctttggtgtgactggttatactttgtcttcttcatacggagtggttccgttttgcgcctaggggcgtaacccgcccgggagggaatctggctgcggcggaccagggggcgcggctcgggatgcctgcgcgaaccctcgggggctggtggggaggtgtcagtggcaggtgtttcgtggtgctaccggacaggcagaatgaccgacctcgccgggcgaccgctcccagccgcgagaatcctgtattcgtttatctgggagtgaccatcctcgctactcagctactcacgtgaggctccagcgttcacacaacgcgaaccctcaaccactatggacgtggaagtaaaagccccttcagagtttgttgtagcccagacagtttaggcaatatcccagctcagagtaccataattaagattgcaaaaaggatcaatatgggaaacttttgcagttccctgtccagttaaaatcatatttatatactgtggcatgaagtgtaatcacatgcattccaccgatatttattgaacacctaacttgccacaaggggatgccataacggataagaccaaaaccatccctgccttcatgcagctcacagctgtgcaagcaagcgtgccggtcctgccgccattgtaagagtgtgcaacaagtcccatgggaaggaagaaaaccataacagacactttccaccctgagacaaagtacccatactactcctttacatctggtctccaaagtgaatgacatcttgagcttttcccatgagttactgattc

SEQ ID NO: 25073 - DNA, 1482 bp, Artificial sequence
  DNA replication origin
tccgcggggagacgaagggacgggtcggctggggccaggcggcgggggtgggatggggagggggcctggagaggagggaaccggctgctcgggtcggccggagataacgcgcgcacgcgccggagcggctctgacaacgagcgcaggcggggaagcctcggccagcgccggcgtgcgcgcgcgaatgggggagcgcgcccctcggcgttcctggcttctgggagagggcgcgcatgcgccggccgctgccacctacggcgaccctggcatgtgccagggattctccccgcccccttcctcgctgcgccggtggagagcgtagcagcagcatccaccgcctagcagagccgcgggccacagcgggacggcacagttccagcagggcagcggctgcgcacgccggctccggctcgcacacaggcgtaggccgccctctaccgcctgaaggccggaggctgagcggggcgcgagcggatcctggatcccgggaggagactcgcctccagagaatgctgtgctccctacagcgccgggaatggaccggcccgtgccagctcagtcggcggccctagggggcacccgcactagaggttttgaagctggctccttgctacttttaggggtgcgcgctgctgctgctcagcccctgcagcccgcatttggccgcttgactgctgcttccagcgcgatcctacaatggcatcgctcccccaggagactcagcgaagccctactttatcttgtaagagctgtttccacattcactcgaagagaaagaccccccccacgagggcctgagttcgatgcccggcctctcccgacccgcggctgcgacagcccctctgaggcggaagtttatttagtacgggaaagagaacagcacggggagaggggagaggctttgccctaggatgcgtcctacccgctcggactcggaaaattcccggcgcccgcgatgcagagcagtggaccgaagggctgccccagagcagcccagaccgccagctgagcgggaggaccggagcgcgccgccccagcacacaaagtagtcgcgggacgaggggtgccgccgaggccaatcagagctgcgcgccgcgtgagtggagtgcgagccggccaatcagagggccggaagatgagcttcccgttccaaactcttccctgtagccttgggacccagatcccaagcctggggcgctttacggtgggagagcgaaatggtgcccttaagacaagaatcatttctctaggcttgggcattttaaagtacataccggggatacttatcccaaagcaagtagcggcggccttttagatgttaaatattaaaagatcacagaaaggagatttaagaggcagtggcctgtcaaggttgcaatctgcctaatattcataaattcacatatttattgagaccttcttatgtaccaggaactctatcacagatacacaaataaggtactgctgattcaaaagaaaatc

SEQ ID NO: 25074 - DNA, 1063 bp, Artificial sequence
  DNA replication origin
cgaaggctccgttaagcggcggcggcggttcctgtttccgtttcttcctctccgttcggtcgggagtagcatcctccactcagccacccttcccactcccccatcgtggggcagctgcggctgagggctgtggctttggcagctgcgacggggagcggcggagaccgcctctgctcccgcctggggtaagggggcgttttgggagccgggccccgcgcgcctcggggtcttgggctgggctgcgcgcgggatctgaggaggctccgcggctgtccctgctcgttcacccgggcctgttgctgcaactgctgccggttaaccagcggctctcggaaaagtggggagggagcccccgggacgctctggcggatgccttggcgcagccccgggggcgcgggcagagggtgaggggcgcccgcctctccagccgggacgcggagctgcgccgctgctgccctcggcgtcgcgcatccttgcctagggcaggggccaaagcctagggaaggagaagggttgggggcgggggtgggaggtgtccgtcgtttcccctccacacctaccttcccttcgtcagcagctcggtccctggagtcgcggtttgtggggaggaagatgcccgtgcgttatgggctctttctgagtgctgctcgggctagaaagcagggagtggaccctcacaaagatccgcgagggactgatgcagggcagttaaaggcttgagtgcagctgtactcccttttgatgtgcaaatgacgagctggcggcttttgagtatcaacttatttgggaaggttaaatgagtccatatttatcagttctaggaggtttgtcctgcaggattgagtgggttgtcgggtgcagcacctgttctttcttcacagtggggattgcaatcttcagagacgcagtgtatttcttaagtggcagtgtcatgcttagggtttgtcccggatgagcttttattttagcattttgccatataatatatagattgaggccttggttaaaggcacggacaggtggtgtttttttccttcctatgttttaattattcacagtttat

SEQ ID NO: 25075 - DNA, 1345 bp, Artificial sequence
  DNA replication origin
ggtggcggccaggcagaggctgcaatctcggcactttgggaggccaaggcaggcggctgggaggtggaggttgtagcgagccgagatcacgccactgcactccagcctgggcaccactgagcactgagtgaacgagactccgtctgcaatccaggcacctcaggaggccgaggctggcggatcactcgcggttaggagctggagaccagcccggccaacacagcgaaaccccgtctccaccaaaaaaatacgaaaaccagtcaggcgtggcggcgcgcgcctgcaatcgcaggcactcggcaggctgaggcaggagaatcaggcagggaggttgcagtgagccgagatggcagcagtacagtccagcttcggctcagcatcagagggagaccgtggaaagagagggagagggagaccctggggagacggggggggggaggggagaggggagaggggagagcaaaggacacccttttcaacaaatggtgccgggataattggctagccacatgtaggagaatgaaactgaatcctcatctctcaccttatacaaaaatcaactcaagatggaataaggacttaaatctgagacctgaaactatataaattctagaagataacattggaagaacccttctagacactggcatagccaaggatttcataatcaagaacccaaaagcaaatgcaataaaaacaaagataaatagctcagaggtaattaaactaaagagtttttgcacagcaaaaggaacagtcagcagagtaaacacacaacccacagagcaggagaaaatctttgcaaagtctgcatctgacaaaggactaatacacagaatctacaaagaactcaaaccagtaagaaaaaaaaaatcccaccaaaaagtgggctaaggctatgaatagacaattctcaaaagacgatatacaaatggccaacaaacatgaaaaaatgctcaacatcactaatgatcagggaaacgtaaatcaaaaccacagtgcaataccaccttactcctgcaagaatggctattatcaaaaaatcaaaaaacagtagatgtttggcctggatgcggtgatcagagaacacttctacactgctggtgggaatgtaactagcacagccactagggaaaacagtgtggagattcttaaagaactaaaagtagagctaccatttgatccagcaatcccactactgggtatctacccagtaaaaggagtcgttacatgaaaaagatacttgcacatgcatgtttatagcagcacagttcgcaaatgcaaaattgtggaaccaacccaaatgcccgtcaatcaacgagtgaataaagaaattgtggcatat

SEQ ID NO: 25076 - DNA, 1253 bp, Artificial sequence
  DNA replication origin
tggacacagcacatgtttcagagagcacagggttgggggtaaggtcatagatcaacaggatcccaaggcagaagaatttttcttagtacagaacaaaatgaaaagtctcccatgtctacttctttctacacagacacggcaaccatccgatttctcaatcttttccccacctttcccccctttctattccacaaaaccgccattgtcatcatggcccgttctcaatgagctgttgggtacacctcccagaccgggtggtggccgggcagaggggctcctcacttcccagtagcggtggccgggcagaggcgcccctcacctcccggatggggcggctagccgggcaggggctgaccccccacctccctcccggacggggcagctggccgggcgggggctgacccccacctccctcctggacagggcagctggccgagtgggggctgaccccccacctccctcccggacagggtggctgccgggcggagacgctcctcacttctcagacggggtggctgccgggcggaggggctcctcacttctcagacggggcggctgcctggcagagggtctcctcacttctcagatggggcagccgggcagagacgctcctcacctcccagacggggtcgtggccgggcagaggcgctcctcacatcccagacggggcggcggggcagaggcgctccccacatctcagacgatgggcggccgggcagagacgctcctcacttcctagatgggatggtggccgggaagaggcgctcctcacttcctagatgggatggcggctgggcagagacgctcctcactttccagactgggcagccaggcagaggggctcctcacatcccagacggggtggcggccaggcagaggctgcaatctcggcactttgggaggccaaggcaggcggctgggaggtggaggttgtagcgagccgagatcacgccactgcactccagcctgggcaccactgagcactgagtgaacgagactccgtctgcaatccaggcacctcaggaggccgaggctggcggatcactcgcggttaggagctggagaccagcccggccaacacagcgaaaccccgtctccaccaaaaaaatacgaaaaccagtcaggcgtggcggcgcgcgcctgcaatcgcaggcactcggcaggctgaggcaggagaatcaggcagggaggttgcagtgagccgagatggcagcagtacagtccagcttcggctcagcatcagagggagaccg

SEQ ID NO: 25077 - DNA, 917 bp, Artificial sequence
  DNA replication origin
tctgcccggccgcccatcgtctgagatgtggggagcgcctctgccccgccgccccgtctgggatgtgaggagcgcctctgcccggccacgaccccgtctgggaggtgaggagcgtctctgcccggctgccccatctgagaagtgaggagaccctctgccaggcagccgccccgtctgagaagtgaggagcccctccgcccggcagccaccccgtctgagaagtgaggagcgtctccgcccggcagccaccctgtccgggagggaggtggggggtcagcccccactcggccagctgccctgtccaggagggaggtgggggtcagcccccgcccggccagctgccccgtccgggagggaggtggggggtcagcccctgcccggctagccgccccatccgggaggtgaggggcgcctctgcccggccaccgctactgggaagtgaggagcccctctgcccggccaccacccggtctgggaggtgtacccaacagctcattgagaacgggccatgatgacaatggcggttttgtggaatagaaaggggggaaaggtggggaaaagattgagaaatcggatggttgccgtgtctgtgtagaaagaagtagacatgggagacttttcattttgttctgtactaagaaaaattcttctgccttgggatcctgttgatctatgaccttacccccaaccctgtgctctctgaaacatgtgctgtgtccactcagcgttaaatggattaagggcggtgcaagatgtgctttgttaaacagatgcttgaaggcaacatgctcgttaagagtcatcaccactccctaatctcaagtatccagggacacaaacactgcggaaggctgcagggtcctctgcctaggaaaaccagagacctttgttcacttgtttatctgtggaccttccct

SEQ ID NO: 25078 - DNA, 894 bp, Artificial sequence
  DNA replication origin
cgtccgggagggaggtgcggggggtcagcccccctcccggccagccgccccgtccgggagggaggtggggggggggtcagccccccgcccggccagccgccccgtctgggagggaggtgggggggtcagccccccgcccggccagccgccccgtccgggagggaggtgggggggtcagccccccgcccggccagccgccccgtccgggagggaggtgggggggtcagccccccgcccggccagccgccccgtctgggaggtgaggggcgcctctgcctggccgcccctactgggaagtgaggagcccctctgcccggccagccgccccatctgggagggaggtgggggggtcagccccccgcctggccagccgccccgtccgggaggtgaggggaacctctgcccggccacccctactgggaagtgaggagcccctctgcccggccaccacccggtctgggaggtgtacccaacagctcattgagaacgggccatgatgacaatggcggttttgtggaatagaaaggggggaaaggtggggaaaagattgagaaatcggatggttgccgtgtctgtgtagaaagaagtagacatgggagacttttcattttgttctgtactaagaaaaattcttctgccttgggatcctgttgatctatgaccttacccccaacccagtgctctctgaaacatgagctgtgtctactcagggttaaatggattaagggcggtgcaagatgtgctttgttaaacagatgcttgaaggcagcatgctcgttaagagtcatcaccactccctaatctcaagtacccagggacacaaacactgcagaaggccgcagggtcctctgcctaggaaaaccagagacctttgttcacttgtttatctgttga

SEQ ID NO: 25079 - DNA, 1471 bp, Artificial sequence
  DNA replication origin
cagaggggctcctcacttcccagtaggggtggccgggcagaggttcccctcacctcccggacggggcggctggccaggcggggggctgacccccccacctccctcccagatggggcggctggccgggcagaggggctcctcacttcccagtaggggcggccaggcagaggcgcccctcacctcccagacggggcggctggccgggcggggggctgacccccccacctccctcccggacggggcggctggccgggcggggggctgacccccccacctccctcccggacggggcggctggccgggcggggggctgacccccccacctccctcccagacggggcggctggccgggcggggggctgaccccccccccacctccctcccggacggggcggctggccgggaggggggctgaccccccgcacctccctcccggacggggcggctggctgggcggggggctgacccccacccccctcccagacggggtggctgccgggcggagacgctcctcacttcccagatggggtggctgccaggcggaggggctcctcacttctcagacggggcggctgccgggcggaggggctcctcacttctcagacggggtggttgccgggcagagggtctcctcacttctcagagggggcggccgggcagagacgctcctcacctcccagacggggtcacggccgggcagaggcgctcctcacatcccagacggggtggcggggcagaggcgctccccacatctcagacgatgggcggccgggcagagacgctcctcacttcctagatgggatggtggccgggaagaggcgctcctcgcttcctagatgggatggcggccgggcagagatgctcctcactttccagactgggcagccaggcagaggggctcctcacatcccagacaatgggcagccaggcagagacgctcctcacttcccagacggggtggcggccaggcagaggctgcaatctcggcactttgggaggccaaggcaggcggctgggaggtggaggttgtagcgagccgagatcacgccactgcactccagcctgggcaccattgagcactgagtgaacgagactccgtctgcaatccaggcacctcgggaggccgaggctggcggatcactcgcggttaggagctggagaccagcccagccaacacagcgaaaccccgtctccaccaaaaaaatacgaaaaccagtcaggcgtggcggcgcgcgcctgcaatcgcaggcactcggcaggctgaggcaggagaatcaggcagggaggttgcagtgagccgagacggcgagatggcagcagtacagtccagcttcagctcggcatcacagggagaccgtggaaagagagggagagggagaccgtggggagagggagagagggagggggagagggagaataattctttttatacattgttaggtttgatttgctaatattttgttgaggattt

SEQ ID NO: 25080 - DNA, 931 bp, Artificial sequence
  DNA replication origin
gttactacatgaatggatcataaaacaaaatgttgaatgaaaaaagtaggaaacaaaatgagaatgccaaactgtttatgtcaattaaaaatatatgcatgcaaatcaacaatttgcatcttttataccacttataagcacagagatacacattgaacacattacaattgccttgtgagggaagacaaagggagtggctttgggaaaaaagagtgaatcaattaataaataggacaatggagaggccttgcatggacagatgatgatactgtgataaagtggtgataacagctgaggactttaactgacagcacctgaagtccaaggacaacaaagtaacaactgaaaagaaaggaaggaggaaaggagggtaagggaaggagggagagagggaaagatgggagaaaagggagggagagagaaggaaagaaagaaggaagggaggaagggagggagggcgaaggaaaagagggaaggagaaggaagaaaggacagaaaggagaaagggagggagggagaaagtgagggacagaaagagggagaaggaagaaagcaaggaaagaagggaatgagggagaaggaaggaagaaaggaggaaacaaggctggaagaatctggagacatacactgcttctgttacagctttgacaactacatgggtttgggacccgtgacgacctgtaaggactcagcttgcaaacaatccagcgtcttaatggaggcagtggtggtagtgatggtgatgtgtgcatgtgtgcgtgtctgtgtgtgtgtgtgtatgtgtgtgtgtggcataagtagggtaggggtcagagctgggaaacccaagccaaatgagttcagtctagggctagataggatgtaagagtcccaggaaagttgaggttcaagccccagttggaattgacagcccagtcaacctgctgctctg

SEQ ID NO: 25081 - DNA, 843 bp, Artificial sequence
  DNA replication origin
acccccgcggttcccttcttcagccttccctcctcccgaggccgcagagaagggccaccacaggcgaaaagcctaaggcaatgcagggacagcagcctcataggtcccagacctcctcccccggttacctgtaaggactccgacacggatttgatggtcgtggttagtaaggatcattccctcggtcgccatgtttcccagcgcagtcaccgcactgacaggagccgggagaaaccggagcccggagcgcgcgggccgggagcgcgctcgccgaggagagcgcgacagctagggagccagagaagcgcgaggagagcggggaaggagggggaggccacagagtgcacggtggcctgcgtgggggagaggccgcgccgggagtgcgcgggtccgcgggaggggaaggagtcagggcgcgcggccccaagtccggcaagaaggaggcaagcttggggggcgcggtggccgcacggggagagcgcgcggaggcggcagaacgaggccggagagtgtcggaacgctctgcggagcgcgagacccaaggcagctagatggcaggactgagaggaaaggatagcacacgctctggaggttgcgggggcggactcggggacaagggcggagctacacccctaggcgtggaactcgtggagagtgaggggaggagtgagagctcgggtgctgagtattgggagcgggaaggagccggcccagcctgagtaggaccgcggatcgctcctgggcgcgcgagtagcaccggattggctgagtgaacgcggagcgtgtgcgcgcgaggcacgaacgcaacctcggccgggccccagacagaagcaatcccctgcc

SEQ ID NO: 25082 - DNA, 940 bp, Artificial sequence
  DNA replication origin
cccggccagccgccccgtccgggagggaggtgggggggtcagccccccgcccggccagccgccccgtccgggagggaggtgggggggtcagctccccgcccggccagccgccccgtccgggaggtgaggggcgcctctgcccagccacccctactggaaagtgaggagcccctctgcccggccagccgccccatccgggagggaggtgggggggtcagccccccgcctggccagtcgccccgtccgggagggaggtgggggggtcagccccctgcccggccagccgccccgtctgggaggtggggggcgcctctgcccggccgcccctactgggaagtgaggagcccctctgcccggccagccgccccgtccgggagggaggtgggggggtcagccccccgcccggccagccgctccgtccgggaggtggggggcgcctctgcccggccgcccctactgggaagtgaggagcccctctgcccggccaccaccccgtctgggaggtgtgcccggcagctcattgagaacgggccatgatgacaatggcggttttgtggagtagaaagtggggaaaagagtgagaaatcggatggttgccgtgtttgtgtagtaggaggtagacacaggagacttttcattttgttctgtactaagaaatattcttctgccttgggatcctgttgatctgtgaccttacccccaaccctgtgctctctgaaacatgtgctgtgtccactcagggttaaatggattaagggcggtgcaagatgtgctttgttaaacagatgcttgaaggcagcatgctccttaagagtcatcaccactccctaatctcaagtacccagggacacaaacactgcggaaggccacagggtcctccgcctaggaaaaccagagacctttgttcacttgtttatctgctgaccttccctccactatt

SEQ ID NO: 25083 - DNA, 1210 bp, Artificial sequence
  DNA replication origin
tcccggacggggcggctggccgggcggggggctgacccccccacctccctcccggacggggcggctggccgggcggggggctgacccccccacctccctcccggacagggtggctggccgggcagaggggctcctcacttcccagtaggggcggccgggcagaggcgcccctcacctcccggacggggtggctggccgggcggggggctgacccccccacctccctcccggacggggcagctggccgggcagaggggctcctcacttcccagtaggggcggctgggcggaggctcccctctcctcccggacggggtggctggccaggcggggggctgacccccccacctccctcctggacggggcggctggcctagcggtgggtgacctccacctccttcctggacggggtggctgccgggcggtgacgctcctcacttctcagacggggcggcttcgggggggaggggctcctcacttctcagacggggcggccgggcagagacgctcctcacctcccagacggggttgcggccgggtagaggtgctcctcacatcccagacggggcggcggggcagaggcgctccccacatctcagacgatgggcggccaggcagagacgctcctcacttcctagatgggatggcggccgggaagaggcgctcctcacttcctagatgggatggtggctgggaagaggtgctcctcactttctagatgggatggcggccgggcagagacgctcctcactttccagactgggcagccaggcagaggggctcctcacgtcccagatgatgggcggccaggcagagaggctcctcacttcccagacggggtggcggccgggcagaggctgcaatctcggcactttgggaggccaaggcaggcggctgggaggtggaggttgtagtgagccgagatcacgccactgcactccagcctgggcaacatcgagcactgagtgaaccagactccatctgcaatcccggcacctcgggaggccgaggctggccggatcactcacggttaggagctggagaccagcccgtccaacacagcgaaaccccgtctccaccaaaaaaatacgaaaaccagtcaggcgtggcggcgcgtgcctgcaatcgcaggcactcagcaagctgaggcaggagaatcaggcagggaggttgcagtgagccgagatggcagcagtacagtccagcttcag

SEQ ID NO: 25084 - DNA, 1141 bp, Artificial sequence
  DNA replication origin
ggaaacagcacaggatgaaaggtgaaaaaatgaaaacattattagtaggaaagaagtatgtataaggtaaagtacatcaaatcatgacttgtcacatgcgttctagggacatcagtaaaacattagatgttttgggaggtttcacctcctgcctatggtatactggaggtgggtagctcacactagtactcaagtatgagtgcagagaacgtgttaatggaagatgaagtctccttacatttttttttaaacaaggagtttagttttattttctctgtgcatttgcaaaatactcaggaccaacataaaaaagaaatacctcctgtggaaaaagttacattaaaaaggggaatggggtgggggtgctgaaagggattagtgccttagccccaaggagctacagcatctctgattggtccaaggtatcgaaaagatattgggaagatgtaataggaggaaggaaaatgtgaatttactgagggagagggctccaaagcgggcctcgaggggcaactggtggctggggagtgggcctggttggagggagaggctggtagccatagggtgtgggttgtggagggccagtgtatccatggggggcatcagtggaggaagtccacgcataccatgtggaggcataggacctgggtgacccatgggagatcagaatggaggccttcgggggggcatgcccattggaggaggtccaggataaggcattccaggtggtggttggggtggtggctgtcccccagagcctgggtgtccagaatggggatgtcctaaaccatgaggtccatggtgtgccagctgcatctgagacatccctggatggggcactcctcctggtgggaatgggtgagcttgggagtgtccatgaccaggatgtcctgcccctggggttcctgccgatggggggccatgtcctgcagccccaggaggcataggtggtggggcatggctgggggtatcccaggtgggagggctccaggaggcagcactgggggtgggaaggagccaggaggaggcatgcctggtggaggaagcccagaccccaatgatgataccacaggattgggggcagagggtgaaggaggtgcatctgcaaacagctgatgagggcggtcaggctgggagagcg

SEQ ID NO: 25085 - DNA, 909 bp, Artificial sequence
  DNA replication origin
gtatcgcttgaacccggggagcggaggttgcagtgagccgagattgcgccactttactccagcctgggcaaaagagcgaaactccgtctcaaacaaaaacaaaaacaaaagaacttagaaaaggaagtaagtcacacacagtaaccgttttttcttttggggtatggctagtagtttctaggaatcctggagactttatctggatttcagttaggcatttcaccagttctcatggcatctttatggaggaatatgggccaagaagacagttcggttgtgtcgtccacctgtattcgaagcctactgagaaatttttgatggcaggagcattaaggtctttagtggcatgcagcagagttctgtcctccgctctgtcttattaaacacttggacagaatgctgatcagatttgagaaggataacaaatctgggaagggtaggcatccccaaagatcttcaccaccaggaacaacggtttgcttcgttcaggccatcacagtgtccttagtgagggacaccacaacccataggctgtccagaggagcgtaatggggaagaatgtgaaagagcttgaaaatcaggacctgaggacattgcgagatggaaaaacaccgtgggacaaaatgaggaaaaccgagagaaatggaaatggcatatacgaaggctttgagggaggactgtgcccctgggggaaactgtgcccccgggctggagtcacaggcatagtttggcctcatagaaggagaggtcgattaacaaaccttgcaagtgttcaaatgtggaatgggcttgctcggaaggtactgtcaagacagagaccatccgagggcttttattgcaagtgtcgagacacattgctggtgtttctccttagaacgtcctccaatctgctctgacttccgcccgcac

SEQ ID NO: 25086 - DNA, 1151 bp, Artificial sequence
  DNA replication origin
aaagcagaagaatttttcttagtacagaacaaaatgaaaagtctcccatgtctacttctttctacacagacacagcaaccatccgatttctctatcttttccccacctttcccccttttctattccacaaaaccgccattgtcatcatggcctgttctcagtgagctgttgggtacacctcccagacggggtggtggccgggcagaggggctcctcacttcccagtaggggtggccgggcagaggcgcccctcacctcccggacagggtggctggcctggcgggggctgacccccccacctccctcccggacggggcggctggccaggcggggggctgaccccccccacctccctcccggacggggcggctggccgggccgggggctgaccccccaacctccctcctggacggggtggctgctgggcggagacgctcctcacttcccagacggggcggctgccgggcggaggggctcctcacttctcagatggggcggctgccgggtggagggtctcctcacttctcagacggggtggccgggcagagacgctcctcacctcccagaaggggcggtggggcagaggcgctccccacatctcagacgatgggcggccgggcagagacgctcctcacttcctagatgggatggcggccagtcacagacgctcctcactttccagactgggcagccaggcagaggggctcctcacatcccagacgatgggcggccaggcagagaggctcctcacttcccagaccgggtggcggctgggcagaggctgcaatctcggcactttgggaggccaaggcaggcggctgggaggtggaggttgtagcgagccgagatcacgccactgcactccagcctgggcaccattgagcactgagtgaacgagactccatctgcaatcccggcacctcgggaggccgaggctggcggatcactcgcagttaggagctggagaccagcctggccaacacagcgaaaccccgtctccaccaaaaaaatacgaaaaccagtcaggcgtggcggcacgcgcctgcaatcgcaggcactcggcaggctgaggcaggagaatcaggcagggaggttgcagtgagctgagatggcagcagtacagtccagcttcggctcggcatcagagggag

SEQ ID NO: 25087 - DNA, 933 bp, Artificial sequence
  DNA replication origin
agtgaggagcgtctgtgactggccgccatcccatctaggaagtgaggagcgtctctgcccggccgcccatcgtctgagatgtggggagcgcctctgccccaccgccccttctgggaggtgaggagcgtctctgcccggccaccccgtctgagaagtgaggagaccctccacccggcagccgccccatctgagaagtgaggagcccctccgcccggcagccgccccgtctgggaagtgaggagcgtctccgcccagcagccaccccgtccaggagggaggttggggggtcagcccccggcccggccagccgccccgtccgggagggaggtggggggggtcagccccccgcctggccagccgccccgtccgggagggaggtgggggggtcagcccccgccaggccagccaccctgtccgggaggtgaggggcgcctctgcccggccacccctactgggaagtgaggagcccctctgcccggccaccaccccgtctgggaggtgtacccaacagctcactgagaacaggccatgatgacaatggcggttttgtggaatagaaaagggggaaaggtggggaaaagatagagaaatcggatggttgctgtgtctgtgtagaaagaagtagacatgggagacttttcattttgttctgtactaagaaaaattcttctgctttgggatcctgttgatctatgaccttacccccaaccctgtgctctctgaaacatgtgctgtgtccactcagggttaaatggattaagggcggtgcaagatgtgctttgttaaacagatgcttgaaggcagcatgctcgttaagagtcatcaccactccctaatctcaagtacccacggacacaaacactgcggaagtctgcagggtcctctgcctaggaaaaccagagacctttgttcacttgtttatctgctgacctt

SEQ ID NO: 25088 - DNA, 1524 bp, Artificial sequence
  DNA replication origin
cggcgagcgggcgagcaaggagttaagccgggcggcagggcgagcgcctgtcagacgcgagcatgtgcagtttgcagcgcatccgtactatgggtgagtgccgccgccgccgccgccgccgccgccgccgggggctcctttcctcccgggcagcggcggctgcagccccccggaccccgcgccgccgcggcggacgccgacacacaatgcgggactaggcgcggcgcgggagtgccaggcggcgtgggggaggcacggcccgcaactcggcgcggggggagccagagcgccgggcttgggggcggggagcaggcggtgcaggagagcgccccgagtcccggcgcgggaggaggagcgggagccagccctggagacggcgctcctagccgcacctgcgcctggcaggcggccggctctgcccagcccctacccacggccccggccccgcaccggtaggtgccccctatgcccgcagagaggcctttccgccgcccagagaggtggccgcgaggggccggcagctccgaccgcggagggcgcgggcgatggggacggtgaggggaagactgggcgaccggacttggggctgtagcagatcccgcttcctctttgctttcggtttcgaggctgctgccccggttcgagatccagccgcagattagataggtggtgcgcccggggcttggattccctgcgggggatgggcgcacaggggggcgtgttggggaagggggtgcgcgttggcaactttccctgcctgaaacaaaggggtgtcagggggaagcgaggggcagcggtaggttgacacctcctcttcttccgggcggagagcacccaggaggccacctcagcagggtggaggggggtgacagtctgggtggaagctggggagccagggcttgggagtggaaaccaaggaccctcctgaattagaggctgaggactttccagaagggaagggaacgctgccaaaatgaccccgccgccttctccccagggtgcatggaaaaactgggtgatggaccccacacctaggcgccctccactccccaggtccgtgtcctggggcccagcccagccccctggctgccagctcttcacctgccctccctgatctctggtcctccgtgagagatgcctggctgggatggggagtgttacagcccggttcctggcaagggcagggagacattggcctctttcccaggtatcttcctttccctctttctatgctcagtcagaaacggacccctttcccttccttcccggggactgtctcttttctttccccagggtttccctgggggtgtttggctgccttaggtacagagcttggagataggagggcagagtgttcgggcactgctcaaggctctccctggagggaaagagcaggaccccaggcagctttctgctggtgtaaccttgggggctctgctcaccaattctcatgtgttctcagcaccctagtaataagtgagctattgctgtggctatcagccttgggtaattgagaggcctggg

SEQ ID NO: 25089 - DNA, 1494 bp, Artificial sequence
  DNA replication origin
accgcctgctccccgcccccaagcccggcgctctggctccccccgcgccgagttgcgggccgtgcctcccccacgccgcctggcactcccgcgccgcgcctagtcccgcattgtgtgtcggcgtccgccgcggcggcgcggggtccggggggctgcagccgccgctgcccgggaggaaaggagcccccggcggcggcggcggcggcggcggcggcggcactcacccatagtacggatgcgctgcaaactgcacatgctcgcgtctgacaggcgctcgccctgccgcccggcttaactccttgctcgcccgctcgccggcccggcccgctgtcccctccgacccctctgcctcccgcagcccggggtcggccccgccacgggcgcctaggagcacgccccctgccagggccgcggcgcaggtggctgcggtgcagggctcttcggccctccctgtcctagccaacccgcctgcatttgagtgtctgtcaggcccggagcttgtagttgtggggaccaggcgtgcaacatccactgtgggtaccattgcaggcccgggctacctgagggccacagaccacgtggtgtggcagacccactatgtgccagcactgtggacctgcggtcagttcatggaaacagccatgtaaggtcatttgtttatccccatttccaagatggagaaactgaggcctatggaagttaaggaatttgcctaaggcaaggcttgaacttctaaggctcacgatttgctttataccataaaggttacagagaatatgttatttcagaagtcaatctagattcttttattgggaggtggaaaataatgaatatcatctggaaactctggaaattccacaataccgaacgtaggaaatcggcagctgagggccctgacttgagacaggccccttggactggtcctgggtcctgcagaaaggctgagcagggagtgggaatgacagccagcccccattcgcacgccaagcctaggtcctggcactgggtgcctcagccaagaggaaagggcattttgaaaatttataacaccctctgggggtgtccttttgtcactaacccatccggagagggtaccctttctaattctctcgcaaaccctatgcatgccgaggcctgatctgaggggtctaatggccgcttttcaacctagctggagagggggggaaatgaggagagggacaacaagagaggctgaagcccttacccctttttgtaacataccccagtgacaaacagctctcagaagtccaaggcagcacagaatcttctaagaaaaggaacctatggttcatccagctgctcttgccccattctgggcaagaagctgagctgctttcctcctgtctgaacctaatacctaaccctaatctgatcctgtgtcttcccctaattgtctgatggggccgtaggtcttccatcaacctcctgtccctggccagaatattcaaagatcaacaaaggtgcctctcaaag

SEQ ID NO: 25090 - DNA, 1404 bp, Artificial sequence
  DNA replication origin
cgcggccgtccccgccgcgcactgggcacacgggcgccctcgggccgccgccgcagccgaccttgcgtcgctctcgccggagtcccgggctgccgccggttctcccctccccggcagcaggggtcgtgggctgcggggcggggcgaggctggagcgggaggggtgcccgcgggctcgctgcacaaagcccggccgagccttgctgcgccccattcaacgctccgccgggcgccctcctcccctcggctccccgcccgctccttaaaggcagagcgctgggctcagctctccaggcagctcgcggagaggcacaggaaatgacctcagcaggctccagcctcccacttctccgcaccgctgggctcgtccctggggcggcagggagggcggcggggtgtcccgggcgccggcccggagctctccgaggaggccgcaccagctgccgcaaggggtggccagagcgccccggggatctgcttgaccccaaatagcgggggaccctcgcgggctgcgggacaagaccagaccgtctccgccaaaggttccagcattctcctggccacctgtgggaactgtaacgtctggatatttggaacagaagtccatatttcagtctggcagaccaaatgttctgagttgcaatttgcaggagaaaaagaaaaaataagttacgacagcccagagagtaacttacttgcttattttctggtctcgctatgttgcccaggctggactcgaactccggagctcaagtgatcttcccgcctgggcctccaggccggcttatgtatatgttattttaaaggagggcccaggaggaccctggctgccaggcagtttgcagggcagtcatcagcgtgcccatgtgctcctcgttctcagacatttgcagatctcagatcgcccaaagcaatctcatacccagaggggttggaaaactcaacatttggctaggtgagcctggagtaaagaagatgcaaatagagaccattgcagggagggatccacacttcaaaacagagccttcttcctcaaccctgcaggctctctgtcagtgaaggactgaacagaagcaaaataccatcagcgcctgtttctccaaatggtccttggaagactcatcccaggcaccatgaagaacacccccaccctgggtttgaatctgaatctctaactaaagtaccccaggccattctcacgtagaagttttgagagcccagacactaaggaaagctggtagtgcaggaggccaaacgtgagaatttaactgggccaatgggacttcaatggctgaacttgcaaacagctttatagctcgtggggattgggatagattagccccattttgtgggacaatgctcaggctatccacttcaacattccagaagttgcataaggaagccc

SEQ ID NO: 25091 - DNA, 1311 bp, Artificial sequence
  DNA replication origin
caatgtggcggtgacgtcacggggcgggcggacgctggcgcgggtaggtaagagcagcggcgggcggtggcgctcactcccggcttccaaccgcgcggagcctctgccttggagattctcagtgctgcggatcatgtccctaaggggcagcctctcgcgtctcctccagacgcgagtgcattccatcctgaagaaatccgtccactccgtggctgtgataggagccccgttctcacaagggcaggtgagaactggcacctggaaccgccgggcaggatcctccgccccctagaacctggagacagcggcggtagggtgcgggggaccgggaggcgaggagaggatggggagaaatggcgaggggaagagctggccggttcccgctactgggcaccgtgggagcatgtgggatatcctccgacagagaatggagagggagggagggaggggtggagggcaccctgtttgggatgagggtgtgtttctgcggcctccccagaaagaccgagaaaacggtggatgcagcttggggtaatggaggggagagaatgaggaagaggattccttggaggggctggaggaggcgaaactggtcagaatccccagtggagaatcgatggaggaggttaaaaggagcgaccgaggatttaagtcttctggatccattcactcagaatgagcattaactgggagggaaattggagctggcctctccagcgcgggaggtggggaggagctgttttgttctcttcaatgaaggaaacctgcagtcgggagcgctcagtcatctcgaagcccagaagcccagtctctggcccgagccagccccacacacgcctagctcctggatcctaacctggctcagcctctcccgtcttggcttgggcagctgatgtgattccaacaatggagttggaaggacagtcattgatggaagggctgatgctgtcacaggttttcagaggaacctgctgggaactaaatgtaccaaatgggtttttttccgacaccttctctacctctaattgtgtaatttgtgtgactgacagaaaagaaaaggagtggagcatggtcccgctgccataagagaagctggcttgatgaaaaggctctccagtttgggtaagtggttagatttttagatattagtgcaggactagtaatagaccacttcagagtcttttctctgacatccagggactacacagctttgtgtttgggaacagtctgccacatcccgcatcctcctttggattccgtctgcggcttaagatcaaggagtcatcagggaaagtcttcttgcaataaaga

SEQ ID NO: 25092 - DNA, 1444 bp, Artificial sequence
  DNA replication origin
gattcggggccctgggccctttcctagcccggcggtcagccgcccagcccagtggccataacggcgaccgccgcaccaccgccgcccaggacgaggctcttccggagccgcggcagggtcctctcgagccggaacgcccaccttctccagccagtgattgctggagcgccggcgcgaaagcctgacgagaagtcgggagactgcgcggcctaggcgactcctgagggagcggtgccgcgccggggcgatcggcagtcgcggaacccgagaagtgccgggtccgggttggggaaaggccgcagcgaaaggggcctaggggacctgcgggactggcagcgcggccgccttcctcccgggccccgccggccggcgaggggcgggcgctgcagtgcacgccgggggatgtagtttggctcggacgagagcgtctcgtcccggggtcgcgcgttgctccgggtgccaggttcagcccgcgcggcgacagcgggcttcggcccgatttgatgtatgtttgcgtctagacgtcgtcctcactgtcatcgcgctttgctttgccaccctgacccgaattcctcgtttcgcgtcttgactgttagctttcggccctggaaagatagccgggccaggggctctgcctgccgtcgggaggtggagcacttttcttggaaggcccagcggctccccaagctttcagaagtggaacccggccgggcgagtggctcgcgcctgtaatcccagtactttgggaggccgaggtgggaggattgcttgaacccagtagttcgagaccagcctgggcacaatagcgagagctctaccagaaacccaaaataagaaccgggcatggtggcgcgcacttttggccccagctacccccggaggctgaggtcccaccactgcactccagctttgggagaccttgctcccaagtggagcgagatcttgtctccaaaaaaacaaaaaacccaaaaaccaaaaattcaaaagtggaacccagttaggatgacctcgaaatactctagctgctaggcccgagtaattctcctcgtggagactaattctcctcctaggctgcctcgtgcacttgttgacaacaggtgtttgtcaagcgtaggcattgcgagggatctgggcatgttggtgaataaaacatttaatctctgctccaggggaatttataatctggtgtggaaggtgggcctggcttcattaggtctcatctgccactaagtgtcacgtgttaaaaattacaaggtcccttcttgcactccatgggtataaattcctgtcttcacgtcgggcatggtggctcacgcgtcatcccagcactttgggaggccgaggcgggcggatcacttcaggtcaagagttcaagaccagcctggccaacatggtgaaacccccgtctctgctaaaaacacaaaaattagccaagcgtggtggt

SEQ ID NO: 25093 - DNA, 725 bp, Artificial sequence
  DNA replication origin
ttgttgcccagtcacacccttgttctagagctcttgactcctggatcagacacacactgcagcctatctccagaccaccatgtggttgagagccttaggaaatgtctaatttttgactctccaggggagtggtttttggggcagaacttcatcacttagcttaatataggtagctgtgtggctcctctgctctccaatgtgatgactcttcttcatttaagagcggggttgggggactccttctttgggcctctgcaggggtgtgttggttttggtggtgttggctggttgcgtcggttcaacctcaggcaatgggagatgtggtaaagtactagcaaaattggaatagggtagggagatctgtaagtccctagttagtccctagatggctggctggacttcctctatgagtcttgatggggctggattgttggggagcctcaggtcctggctgtgatgggaaggggtgagggctgatatctgggtgaggggctaaactctcaggcagggcacttaggcggtgggagccctagggaagatcacaggtctatgggggtaaggttttcgacagggctttgggccatgactgaaatgctcatgtaggggtcggctatgtgcagtagaagccagaaggcagcagtcctggttggggagtgggcagtggaggaagggggtcatgtggaaagcattctggccacctctctgaagggtagctgctggcactg

SEQ ID NO: 25094 - DNA, 1428 bp, Artificial sequence
  DNA replication origin
gcagtgaggttgtacgggaggacagggaggcctgttcctggcaggggagccacatgcatgtggagctcatatgggtttctgaaagggagacaggccactctgatgggctctgtgtccaaggacagggagaccacgggaagcgaggcccaaaggctgagaggtaaggtccagggaggagaaggaaagggtttgaattcagatagcaacaccggagtgggagggatctgaaaaatagagcagaagctccttcaggcatccggaggctgaccagacatgcagggagacagagaagaaagagatgaagagaatgctgggttttgagcctgggcagtggggagggtagaaatacagaaagagacaaacagcctcaaggagaggtttggggaggagaagatcagttcaatttcgtgagaagttctgcagggtgtctaagcagagacggccagcagagtaggccggtagaaatgtggggatctggggagctggaaatcgggggctcatggaagcactggctgaagatgtggacgcggaggagagagacagaagcgatgtgctgggagaggaggcccggccagcagaggagcaggtaaaaagcacggggatggagagaaaatggaagcctggcaggaagtcaccaggagaacccatggaggggaggcaaagggtgggtgggaagcccagaaactctgaggaggcagctagggggttggctcctgggccactgagaatggccttcagtagcagccgatggccagggctggagaagaggaaggtgaaaggacccagtgagaagtgtgtgatacgggggacaagagcagagatggtgtgctgagagaaagccatctaagggaagcccttttaggacaaggaagaggacgccatgcttgtggctgtgcactggaagcactggagatcctgctgccacacagcttccggtccaggctgaggacggcggccacttggtgtggaagacacaggagctgttgcatttgcacccaggtatggaagttagttttgcaaaggaggtggggacatcctctgctctcgagggaaggaagggtggtggtgtgagtgagtgagctctgaggggggtgagaggagactccaggggccctgtgggaaggcctggacctgctcagtaaggggcgtgctgagagattctgcaggtagaaggtagaggtggggatctggggcatctgaggagagtgacagtggccactgacagtggcctcaggggagagccagactcagcctgtgctgggcctgcagccgcacctcctctggggcctggcagccgaaggtttggagtgaatgcagtggatggccatgaggggccctcggggcaggcctgagtaaagttgagagtgagggtgctgaatgcctgagatcaggcgggcaagggagcccagggaagcttctagagggaga

SEQ ID NO: 25095 - DNA, 1042 bp, Artificial sequence
  DNA replication origin
aaaaattaaatcacaaagtcccacttaagtcaaaatcttcgtccgctttttcagccttccttcctgcagacctacacaaacccaggcaagattagtcaacaggggttcagatcgggaagaaaaaggttttgaatgtcaagacaggtttcccccaaaaccctggtctggcaacaactcttccaaggggcaggggtggggggggtgggggggcgggtacaggtggagaggtgccaccgggaagaggggaggaggaataagtgtgcgggagactgaaatgagggaaggtgcagttgtgtcgccagtggagggggctgctggttccgggtctccaccccgccatgggcagaggctccgggaggcccacgggtgccctctggcgctgaagaggtaatgtagtcacagtgacaaagttagattacaaggcactaagttgcttctgtaaactgttactgctttttctcttgtgatttggcacttaaggcttaagccggaaaaaaaaaggcatctactgacaaaatatgggacttgtctgttatgcatggtaagtgggctataaaatccagggagggggtttcaagccagaagaagctactgacaaattgacttgtccttatgttaggtggggttatgagggggagagggagggcacattctgaggtgctgggggaaaggggttgagcttaaccttgttaatgtagggcctgtggggaatgggatgggtagggagaagagggtatgggatgtgggtgcagggtaggggctggagtaggcaggaggtccctccctaccctggcttagtcatctgagatggaaagtctgctgaagatgggcaggcgtcttgagttgtccaaggtcggggagtctgagccactgtggctgctgctggagctgctcaggtagccctcctggtccgagagagaatcctgagggctggggggagagtcaaacatgtgaggggactcggacatgggccggaagaggaaggtggtcggggagccacccccgggcagccccatgctaggggcaaagaggcttgccagct

SEQ ID NO: 25096 - DNA, 1144 bp, Artificial sequence
  DNA replication origin
ccttggaaagtccccgaaatgacgtttcaacccgacaatttaaaaaagagtttaattatagagacaggctctgggagctggaacaaacccttggtcggcggggccggtaaacaactcgggagcgagcgggctaggccagtcgcagccttgcggagcccgcgcccccggggagagggggaggggagggcctccgggagttggaaaagccgaggaaattcgaggaatcagctttctttggaaaaatccactttgtagccattctggggcgcctgatggtgctcctggccggtcccgcagccttggagggaaagcggcgccgcccgaagcaggggcatagccggtgccccgcggggacaggccctgggccgggaagggggccccgcccgctcccagtccccttcccctttgcttttttccagcccctcctccggtccccccagctgagcttcgcgaaccctcgggagttaaagaccagccggcctcttttttggggggggtggggggtgggggagcgggaatgggtggaggccgggggaataaaaaaccgaaatagcttcacatcagaactcagactaaccttgtggtttcaacgcgcactctgctctgtcctgaaatctggaactcattacctcatcaccaagaaactgcacgaaatctctcccccaccgccccaacacccacttgggaaaggaacgagcaaacatccctctaagaaagaaacctacacttgaatgatttaaattaaggtggatggaagttatttccctttctggcgcttgccagatttcaagaaaagctgaaaaatgggagcgggggagggaagcaacagacggctggagggcagcagcagaacaagcgaggggcagcagccgagttaaagtgggggccatccatttcgggcagaggagacaaatgaaagccgaccccgctgggatcacgtaggttcgtggctgcagcaaaagttgggtttcacaaagttgaaaaacagccggtttctcaaacaattgtgatttggaaggtttcgctgggtttgcccagatgtttacgaataaataagaaatgcagttttaaaaaaaagtgtgtgttgggggtggtgagaatgcgctctcttcggcccgccccgtcctttccaaagaaacgtgct

SEQ ID NO: 25097 - DNA, 1006 bp, Artificial sequence
  DNA replication origin
ctaccaaggtccagggctctcctgggcttctgcgacgcccacgcactcctgcggccgagcttcgcggtcgggctctcccgtcgccaccccggcgtctgctcagccgcgagcgagaaccaagccgggccgggcgcggggcccgggcgaggccgccaagatggccgacgcgctcggcagcgcgcggatcacgcgggaaggctgcccttggcctcccgggaaacagccaaggttccgccgccctccttggcgctctgccccggccggcctgccgggatctcctccccggcgcggtctgcggctcccggggcctcgcaaaccttccaggcccgaggccatccagacgtgcacaccaggcccggcccgcgaggggagacacaggggccggggctgcggcggctgagctccctgggcggctcggaacgcaaggggccggcgagccgacgctgctgcaggaggctgcggcgtggggcgaggttctcgctacggcttcgttcccgtcctcccgcggccgctctcccccggaagccctcggaggcagcacgatggacgtggccacactgccctccagtggccagctcgccgaacaacacgtctgggccccttttgggggtctgggtgacgtgtccaccctctctctgccctttgctacatttgaaggtggggtttgctcatccatggttcctcttacaggtcaccaaagctgccacagtgcacactcacccaacagcaggggatttgccgccttcggtggttctcaaacttcagtgtgcacaggaatccccccttggacagttctttcaaacccggattgctgggtcccccaaccaagtcagagaatttgcatttctaacaaatcctcaggcgatgctgagctgctggtccgctggtcctggagccacacttagagaaccactggctcggctcactctttctctcacggggtttctgtcatctactcatttaatacagaatatgtcctgctagccccggaggacgagtggacgga

SEQ ID NO: 25098 - DNA, 1284 bp, Artificial sequence
  DNA replication origin
tcaataaaaaaaaaaactccaacaatgagaaaaaccaaagcgaaatggaggaccggacacttgattgacggtgaccggggactgtgcgtcttgagctggttgtgctcaggtctcgtcctctcttggaatctcgctgtgggccagcaggtggcgcttgtgctccccgtggccgcgatccgtgaaactggatttaatatagtaacccgatgttgccctgaacatataattttcaaaccttccagtccaccacaaggaaaacctctgaggattttcttctgggaagagcaattagcctaacctcttaggaggagaaattgcatcgctgagcttgtctgggaaagcaacataccctcccaagagcagtcttggggagggcggagagaaaccgccaagcagcctttgtgaagagggaggggtgctggagaagggctgggaacggcagggtaggatttggggcttggagtgggaagtatcctaggtctgaggacagcaagtcccgggcctgtgggcttctgggcttaggcgggagggtaacagagaccgaatgggtgcaagattacttgggtgggctgaagatgctctgcccagcccaggccaggctgggagagcccctccttcacccacctactgtgactaaatgccaggcactggtgacacagctgtgacaagacaggcctggtccctgccctcacagagcctgcaggacggggggcggaggggggtgggcaggaaatagcagtgaccaggatctaagggggttgttgaggtgtgtttggggagggagtagggcaactttctcaaggggtccaggccactgcccagactccagactccctgggatggggagactagactggaaggagccatcggggaatagggatcagctgaaccagggcaagggaagagagtggctactgggggtcacagggcaagagcagggagcttcgagctgggggatgcccagcctgagcctgtgggaggggagagtggcaccctgtgccctggtcacagatgaggctgggaggggtgtgtcctattttgaagaagaggccttgctttggcaaaggctgtagttgggaagagagggagagagatagagagaaagaggcagggagataaagacaaagggaagagagaaagagaattattttgtctctaccctcagggacagtgtaatcttggtggaaagtgaaaatgtgccagtgtacaagtgcacacacacacacacacacacacacacacacacacacacaaagactgttaccataaggttgtcagcaactg

SEQ ID NO: 25099 - DNA, 1499 bp, Artificial sequence
  DNA replication origin
caaaatcagtaggacattttcccagtagaagtgcccttggggaagaggtaaaaaatgatccagagacaccatatgggctggcagcagccctgttccctgcctggttgggcacccaagaccctccggaacttccttccagggctcattggtgcgggccagagacaggagaccagccccgtctggaggctgtttctcataggtatcccccgagcctgcccagcccctctcagcccctcctctggccttccttctgcttcctctttgtccttcccacatctcctgctgctgttcctgtgcccctcccctggcccctcgcagccagggtgtgaacagcttctctcccttgccttggttggcctcctggcccaatagccacgggtgtgcacctgcccgtgtccgtggtcaggctgagctctctgctatggtcttttcccctcttcccaaagctccttccttctcttccagtctctccccttctccttcaggggtctgtcccgggcttcatgcccattggtgctggccttccctgtctctgaagccttctctgtgtcctggctggtgacaaagcttggaagggaatgtgagatgcgtgtgggtgtagtgggtatgaagtgggtgtgtggtatgtatgggtatggggggttctgaggagtgtgtggtttgaggtatgtatggtgtgtgggggatgtgatgggtgagatatggggtgtgtgtgaggtgtgtgtgtatggtatggatgtggtgggtgtgaggtgtgtatggggagtgtggtgtgtgtatgtggagtgtggtgtgtaaggtgtgtgtctggggggtgtggggaatgtggtgtggaagggtgtagtgtgtgaggtgtgtgtatgaggtgtatggggtgtggggactggtgtgtgtggtgtgtaggaggtgtgaggggtgaggtgcgctgtgggtgtggtgtgctgtgggtgtgaggtgtgtttgtggtgtgaggtgtggcatgtgggtgtgtgtgtgaaggggagtgctgtgtgtgtggggtgtggtgtgtggtgtggaggggtatagtgtgctgtgggtgtgaggtgtagggtgtgaggtgtgtgtgtggtgtgaggtgtagggtgaggtgtgggtgtggtgtggttgtggtgtggaggggtatggtgtgctgtgggtgtgaggtgtgtgtgtggtgtgtgaggtgtgtgtggtgtgaggtgtggcatgtgtgtgtgtgtggtgtgctgtgggtgtgaggtgtagggtgtgtgtggtgtgaggtgtggcgtgtgtggtgtgtgtgtgtggagtgaaggggagtgctgtgggtgtggcatgtgtgaggggtgtgtggggtgtgtggagtgtgtgggatgtggatggcgtgtgggtgacagcctgctccccctcccaaatctcatgccacctccccatgcccccttccctttcactcatccctgttgcaaccatttcacgctgcttttgtccacacctgagggcaaggtcacagctgggtt

SEQ ID NO: 25100 - DNA, 1006 bp, Artificial sequence
  DNA replication origin
cgggcgcgcacgggagggggcgggggcggtgcggccgttgcgaggtggggtgttgggttacaggcgcctggcggaagcgggagcgcccctgccccggagcccgggaacgccgggccggagcgcggggaggtggcgccgctggcgggcaggtctccttgggggtccgtggtccaggccaccctgcggctgttgcaaccatccccgcgtgggctgtgctcgggggcggtggtcttcaggctggggctgagaccccggctcggggctgcttgctccggatcgattttcccttttcttccgcccctggccacctctccatatggcgtgcggtggcagcgccgcttcctgggccgccctgggttcaacctgagcggcgggcctcccgggaccctgctgccccttaggcggaggggagagcgccggagagatcggcggccgcctccggatctgcctggagaaggaccagctggagtgcggctggggacgagaaaactggggggcgtacgcgggctcccccgcgggccctgtgggggcggggtcaggacagcagaccgttttattgcttaactcagtgggttggaagctgtaaccccgacatgggcttgcgctacgtcctgcccctccgacccccgggaaaggtgggcagctcggttcgagttgaggggctgcagaacgagggtcagtcttaggggatatttggggccagtcactggggatccctacttagccacggagctgcatcccaggcaggcgcggtgtgccgggtgcgcgccccgccacgggagctgggctcggagctggcgatgggacccgggcacagtggccagtggcaggaagaggtcagaaaccactcgtggtggtggggggagggcgcctcaaccctaccgctgcttcctgcctgcgcggtgagcctgtgcccccaggcggccacgtaccctgaatacccctttccctccccctcctcccggctgcccacttccatccggtccctccccgtttcataccctcc

SEQ ID NO: 25101 - DNA, 758 bp, Artificial sequence
  DNA replication origin
aataacggtggcggggaacgggtccaatcccggcggctcctggggttcccaagcgcgctgccactcagtccccgagctcggggaggcgtctcccggcttcggtcccgttcagcttaagctggcgtcacatgagccgcgggggaacgggcaccgcgggagtgggcgggggtgtgcgcgccgggagggggccgcccagtccacctatatgcgccgcagcccggctgacggatgccaggaattcccaatgagaggcgatggggggaagtttgggcaactcggcctggccaatggagagcctcgggagggctctgccccttccccccgcccccgcccgcctcggctcccgcagcgctagtgtgtccgcctagttcagtgtgcgtggagattaggtccaagcgcccgcccagaggcaggcagtccgcgagcccagccgccgctgtcgccgccagtagcagccttcgccagcagcgccgcggcggaaccgggcgcaggggagcgagcccggccccgccagcccagcccagcccagccctactccctccccacgccagggcagcagccgttgctcagagagaaggtggaggaagaaatccagaccctagcacgcgcgcaccatcatggaccattatgattctcagcaaaccaacgattacatgcagccagaagaggactgggaccgggacctgctcctggacccggcctgggagaagcagcagagaaaggttagcagccgcccccgcccgctgcagcccccagcc

SEQ ID NO: 25102 - DNA, 1037 bp, Artificial sequence
  DNA replication origin
ttcccccgcggctcatgtgacgccagcttaagctgaacgggaccgaagccgggagacgcctccccgagctcggggactgagtggcagcgcgcttgggaaccccaggagccgccgggattggacccgttccccgccaccgttattgcgctcccacgcgcgctccaaaccccggggtgggagggggctggagaaaggacgcgaggaaacccgaagaacattcattttctctttcccagggaacctgggtctgggcaggtcggcaccctaggaaagggggcggagtggggcaatggaaaggaatttcttgggaatttcacgactccaccgccgccccccccggccccgccccaccccaccccaccctacaaggcgcgacccggctgatccctgccctgcaggaacccggtttctcgccagcgaactgctctcagaggctaccgagcgttcccgcctcgccgcaggaactcttctagctcgccctcgggctctggggaccgctccacagcggggcctcccggaattccctgccggtctccgcgggcacacttggctggctgctgcgaccaaaactaccttcgcgtggcagggtcctccctcctcctcacagacaccccgacatcaccctcaaaactggaagggacaaccccgagtgatctaggtaaatctactccgtacccccctcccacatacacacgcctgacagatggggaaactgaggctcaaagagccgagcgcggaaagagcttctggacttcacaggccaatccggtaaccttatgcctgacaaacaaaaccttattgtcattggaggaggatggagggcgggagtgactaaatagctctaacttctgcttgccacctgccaggactcctttccctgggcttagtaagaggagagtctaaacgcgctaatgcccgggaaggagcaggcctcgcgttctggcaggctcctctatgggatcccggttccgaagaacagtagcaaataaacctctcctaggttatgcactgtcttgtgaacaacagatgtgccagtc

SEQ ID NO: 25103 - DNA, 1616 bp, Artificial sequence
  DNA replication origin
ggcgagccaaagcccggcggccactcggattgttacgcgcattcaactccgcggagtgcggggcgctggggtgcagaggggtctccgcccggcgccacccaggtccccaggcgggaagcggctcaactgggaaagcagccggcgcccgtggtctccgggccggccgcccgcgttcttccggccagccccccgcggaggggaggggcgccgacgccgcgttctcggggccccgcagccggcggaagggccgcgcatcgcggaagcgcggcggcagctgaggatcagctgctggaggaggcggagaggcagagggaggagcctcggggggaaggagagggaggggaccgtcaggaagccgcgaacgccgccgagtgtctgcacacctcgctctgcctgccatggctggttaaagaaccatccggatcgcagcgcggggggagggccgggtggggggagcagcggccgcgcgtgaggccgagggaggggcggcggcgcgagcggcggcggcggcggttccagcatgaagaggagagctggcctggggggcagcatgaggtcagtggtgggcttcttgtcccagcggggcttgcatggggaccccctgctcactcaggactttcagaggagacgcctgcggggctgcagaaacctctacaagaaggacctcctcggccacttcggctgtgtcaatgccattgaattctccaacaatggaggccagtggctggtctcaggtaaatcaacccccttcccctccccgcgcctccccgcaccctcccagcctccccctctcgctctcccccgtcaccctcctcctgccctctgtccccaccccctccctttctctacccccttctgcggtgggaaggtttggtgtcaaattaaaaccattgcagggggaggggaaggagaggatgtcttctataaaaaagacctaaaatggttgacagctccttaattcgctttatcccaagtgcaaagtgatctctcctgatgcctgccctgaaagtgtaggtcggggaggggggcgaggttaccgctctacaaagtttgacggcaaactcttcctccgcgtactttaaaaggtgctgggggcattttggggatgtggagggtgaggaggccgaggagcgccggaggcaagggggagctgaagcccccgtcgccggcgttaaggaaaaggggtcttggggctgggaagcgggcggtgacagacccggacgccgaggggccgggggctgcgacccgggggctggcggggtctgcagaggggaagtgactggggcggtagggtcgctgtgggccgcccccctcggcgctcttagaggcccagcaccatcgcctttcgttcggttgtggcctcttctgcgtcttgtttttaatacagtttcgagagtggcgagggctgtggaggctaaagggcaccagcctgaacttgaatgcgcaacttgcgaggcaggcggtagggtgggggacccccgggagacttgttggcgggagcccggcgccccgcaccccgtttcccgcggccgctgttgcaagtggtctctgcttctcctccctctcgcccagacgggcctggttgcccccgggctctccctctggtttggggaaag

SEQ ID NO: 25104 - DNA, 1148 bp, Artificial sequence
  DNA replication origin
aggcagagcgaggtgtgcagacactcggcggcgttcgcggcttcctgacggtcccctccctctccttccccccgaggctcctccctctgcctctccgcctcctccagcagctgatcctcagctgccgccgcgcttccgcgatgcgcggcccttccgccggctgcggggccccgagaacgcggcgtcggcgcccctcccctccgcggggggctggccggaagaacgcgggcggccggcccggagaccacgggcgccggctgctttcccagttgagccgcttcccgcctggggacctgggtggcgccgggcggagacccctctgcaccccagcgccccgcactccgcggagttgaatgcgcgtaacaatccgagtggccgccgggctttggctcgccttcctcccgcggggacccgcgggccggctgctgcccggaggccagcgcccgtacgagttcggggaaaatgcggctggagtgggggaaggtgcgggcgggggctccggccctccttcctctgctggcctctgccttgggcagtccggccctgcccgaggcgggggaaccgggaggtagggccgcacacttggaggaacgttgcctgggggttttgttcgcgcacccgccccttcccctctcccggtaaatgtttaacaccaccgctcatccccaagtccagttctctaactcttccttcctccggtcctttagttgaaaaaggctaaattgttccgtctggcagattagagtggtacatggggggaaagagaaagggataaagaagtaggaagaaaattgccaaaaccgagttgatgaagtcccgagaagcacgaggtacttctctccgttccagataaatttgcacgacacaagaagcgtgatttgaaactaacgatatatgttatttaattgggttcggtgagctcctcttaaaggtctcgagtggggagcactgaggttggacagctgttaaccagcagctgcgctccaggccagaagtggctgcacttcagtaggatgggagtcaccgcgttgaccctagtgggtgttaaatgctttggaattctaccagatacagttaaaagtccccttttcgatgtattatagtacttttcctggaagctatcctctgtcattaagtggtaataagct

SEQ ID NO: 25105 - DNA, 1530 bp, Artificial sequence
  DNA replication origin
cctagctgctcagtcctgcagagcagaaaaaggagagaggtgggggggcgggggggtgatagggagagacaggatcgcggagcgatcctcacggtcctaatgcccttcagccccgagcgcgcgcgtcccccgggcgcccattcattcgtgcgcagggccggccccgcgctccagccgccgccggctgacccaccaggccactgcgcactgggagagaagcgcgccgagtgggaagcggcgcgggccttcctcccgcgcccgggaacccggcgagacagacgcccgcggcggaatggcgactggccaaagccagcctcggctcccaccgctaggtgaccgaacgcccggcagctgcccccgcgcggccctggtcggtcctgccgacccacacccacccccggaccgagcggccttgagtcaccgactggagacgcgcgacccccgacctgggcccgcgccgcgagctgcagttccgggctgcgctctggcgcgggattcaaggtgtgttcggcgagtccttgtgtaggggcggctgggcgggggagagtcctgagtttgtactggaatctgcagctgagattagccagaccgggcccgcccagaggagggattggaagctggtgcacttgacattcgaagagcgcgaaggggaaacgacgctgcctcacacccagtgctaggagagtgcgggtacggcccttccacatttttcgctggcctggggctcccagatttcacgatgcttccctctatcccgcctcattgacccctggacaaccctgaaatatcatcgtcagcattatttcatcggaaagaagggcagcaagagaggccggatgattctcccaaggccacacagctaattagtgggcagagcccagtctagaagccatctcaccatctgacacctttcgacaaagtgcaaaacgcggtggtgagagacgaggacacagacattaagattccgctccagccctagaggcactgagaatcagaacgtgaactactcttcactccaggcagaaagcaagaggcttggatgagttttaggaaaccagcacagtgtcgggcacagagcgctcaatgaatagatgtgtaacaacaaagtagggatccaacagaggaagaaataatttattgtaaggtggcctttgggaaagctctcagaaaggtggatgaatcacttaagaggtaaggaagggggaggtgaggacaggggagagactgcagaaataggccttgcaaaaatccagaggatggaagagcttgatgtgttcaagagagagagctgccaggcgttgcagggggcctaggatttgataggagttgaggttggccaggctgggtgagtctgaactcaggaggtccttgaatgccggggcagagttgttgaggagtctgcttcctgctggcactgctggacaccatggctactccgaagacccacatagggtccagcctctaaatgaagccatctggggaatcaggcaaactgaagtcacagcatcatgcccccccacaagcatccca

SEQ ID NO: 25106 - DNA, 770 bp, Artificial sequence
  DNA replication origin
gggcgcgcagagggcaggcaggaggtcggagcagctccgcgaggaccgcaccatcccgctcattgtgagtacgccccgagcgtcggccggccggctagggagccgcggcgcgcgtccagaccctgcgcggcggccgagggcgcggggcccggccagggctgagtgcccgctgcgccgggccggctttgtatatgttggagcattcctgcccgttgttatggcaacctctgccgggcggcggggctggggcgcaccgactaagggagggtgacagagggtgggggctgggagaaagtgctgcaagtttggtgggcccggcgtgcgcgcgcggctgggaacgtggcggctctcccggctctgcgctgccggggccgggagtctgggggctgcgggagcctcgtgtgccccggaaggctgccgggcccagcgcgcggcgagcgggcggtgggaaccactcgcagccgagcgcgtaggtggcagtgcgcagcccctctccagccttctgggggcagaggacatcgggtgggggcgtgggtaggggaaggctctctaggcgctgcgcctggcttcgaacccccttctgagccgggtcaacttgaacccgcttcttcggcgcggacacccagcttccccggagttctctgggttgaggagaggtctcgcactgtacgcgtctctcactcccaaccttagggtccgccaccacgggtaggtgggcagtgtcagcgcccgaacttggcgatacccttgcatgaagtcagcctcgcgac

SEQ ID NO: 25107 - DNA, 1950 bp, Artificial sequence
  DNA replication origin
cactcgcagccgagcgcgtaggtggcagtgcgcagcccctctccagccttctgggggcagaggacatcgggtgggggcgtgggtaggggaaggctctctaggcgctgcgcctggcttcgaacccccttctgagccgggtcaacttgaacccgcttcttcggcgcggacacccagcttccccggagttctctgggttgaggagaggtctcgcactgtacgcgtctctcactcccaaccttagggtccgccaccacgggtaggtgggcagtgtcagcgcccgaacttggcgatacccttgcatgaagtcagcctcgcgacatctaagcgggcagggaaacaaaggcagtgtggcacagcgggggcggcggcggggctgcgggggcccttggcgctctggggacccgggcgggggcgtgcggagccgcagccgccctgcagggggcgatcctgtcgccgtctccgtccgagccccaggtgacagagctgtgcgtggccaggcaggggcacctgttgaggcgggaggctttggcacccgccgagagtgcgctcgagcgggcgcattcttccagacgggggcggttggtggacgagagcctcggacgaccctcgggaactaccagggcggggcagcctggccggatgaggaccaggaagaggagagccgagtggggcgggggtaaaggagtgaggaagcgtggcgattccgacaaggaaagatctgggcctgggggtggaggggtgaggagatccgcgggggaggtgcaaggtccggagggctgaggcttgtgtggagccgaatccgagaaacgcatccagacgcggatctgaaccccaggaatatcgggaagttcattggagagtgtcccctcatattcccatcctgccccagattccgagtcccctgcaaaggaaacattatttcagggctttgcctgaggagacctggggcgggggggtgaggttgtgggttttgtcctagataccagtctgggtgaactctctgggggcaagcctgattaggtgcactgttcccttctgggctgttctcccaggacactgtttccaaagcacttgtcgccctttggacagaaaactgataaggaaaagcctcctgtgctgaggccccagagtgttgtgatctgagcagagggacaggttggagctggaactgtccaaaccagcagtggcctccagaccccagggagcttcctctccaggagcccaggctgccacattcatactcagtggcaggaagagccctagtctcaggcaaggcaggctggccagatgctctgtccctctttctggtgaggcgatgagaagagggtctgagttggaaggggcggagaaagaggctgggcagggaggagaggagggaagagagcacaggagactgctgctcagagcctctgctttggaacccggaacctgaaccctgacctggcccatgcacctctctcctgctccttccagagtcctgtaagatgcactgggagggccgctcacatttctcaagagtcccagaatggtgtaggggacctgctggaaggattcagcactcattttgaggggtgggaattggaggtcatgagaatcaccagtaaacatcctcttgtccctgcttattcccacagggtttgacttgctgcaggtaagaaaaggtctcagagcgggaagctaagtttaaagtatgaaggagtatcagggagatacctgggagctgggaagtgaaggtgcaggaagaaagggagaatggaagtccctgggagtggcagagccttctgtggccacttaggggcacagccagctccctctttgttcttaagctttagatgcctgttccaccagcactgacccccccgtcaggcaccacttttgacaactgccttgcattgtttcattgtattcctctcttccagttatttcttccatgtgatttgcagctgaatg

SEQ ID NO: 25108 - DNA, 958 bp, Artificial sequence
  DNA replication origin
tcaggggcccttgactggtgaactccagaccacaggctcctaacacaagttttctagctttcatcttagaaaagcaggacacctgtaatcccagcattttgggaggctgaggtgggaagatcacttgtggccaggaattcaagaccagcctgggcaacataatgagacccccatctctctaaaaaaaaaaaaagaaagaaagaaaaaaagaaagaaagaaaaaagaaagaaaagaaaagcagggctcctaaagtgggaagatttccaagcattagaccatgtgtcagaaatagacaaaaaatatacagaaaatgtccactttgtactctggccccgggctctcatcatcttcccagtcccacctcctcccacctgatggagccaagccccgggccctgtgttaaggcttggcctgagatgttctgcatgggggcctgagccatgagagaagtgcaaggaattcagatgggcacttcttgacagtgagcaacaaggggatgctgtctgagcttgggaaccccagagggggttaagggaagagtaccagggtgatgattagctagagtcataaaatggggagatctagcatggccttggggaacatctagtgggcgtcacacatccaaatgcctgcagaggggccaggcaggtcagacaataggggatgatggggcctgtggggatgcgcctttaggcattacattcaaagacttaagtctactgtgcagaggtggtaagaatgatacaagtggttgttgttggggggctgattgactataaaggggcatgaagaaactttctgcaggtgatggaaatgttctgtctgttgctttgggtggggttacatcttatataccttcatcaaagaaataacttagatgtgtgcattttaccatgaagtatacctcaatttaaaaacttggggcaaattcataaagcaatgtggatctggctctcg

SEQ ID NO: 25109 - DNA, 1002 bp, Artificial sequence
  DNA replication origin
tcggggcgagaggcgagggcggagccgtcggagagcgtcccagcgagcagagaagcagagcggcccggcccggagctgcagcatcaaagcgcgctgggcactggacgcggcaccaagggggcgcagggcgcgtagccggcggcttgggctccggattgcagagggccgggcgggaactccgcggggagggtggctcagcctcgggccggcagcatctcctcccctcccgccctagccacccacccccccggcgacagccccaattctggtggccccgattggctgggagtggcaggtgagccggcgggaggccggcctcgggcgccaatcagggcgggcgccggctggagggccgggctccgtgcgtccagaaggtccctgcgggtcgcagggcccggggacttggccgcagcgcgtccccgtccccgccccgcgcgcccaacaccaccccggggtccctctcggcgagcagcgccgacatcgagacgagggccacgtccgctttgcaatggggttggaggcactcctgcagacacctgctcgcctcggggtggaggagaggacggagctagggcgtagggtcacacactccggcctggaattccaccgcaattcctaccgctccgtgaactgcggcggtctggcttttctccccagtgaagtggcgatgcctgatgccccgggcaggcgggtggccaggtaggacttcaggaagtgcccaaagtgcccgcatggggaggggctccatcaagattgggttccccccaacccttccccctcaggtgggtttcactgtgctccgccgccgccgcctagcgcgcatcggatcggatttctcttcctggaacctgaccgtgtctgtgtcggcatttggcactcaacgccagtctggagctatccgtgcagtgtgtgtccgtgatttatctgcgcgcctggcccgcgctccctgggaccagctgttccatccgcttccgctcctttcggagttggcgtttggggtga

SEQ ID NO: 25110 - DNA, 1642 bp, Artificial sequence
  DNA replication origin
ggtggtgttgggcgcgcggggcggggacggggacgcgctgcggccaagtccccgggccctgcgacccgcagggaccttctggacgcacggagcccggccctccagccggcgcccgccctgattggcgcccgaggccggcctcccgccggctcacctgccactcccagccaatcggggccaccagaattggggctgtcgccgggggggtgggtggctagggcgggaggggaggagatgctgccggcccgaggctgagccaccctccccgcggagttcccgcccggccctctgcaatccggagcccaagccgccggctacgcgccctgcgcccccttggtgccgcgtccagtgcccagcgcgctttgatgctgcagctccgggccgggccgctctgcttctctgctcgctgggacgctctccgacggctccgccctcgcctctcgccccgagtccctgctgaccccggggaggtggggtccgggccgggcacagccccgctgaggcaggatgttcacgtccaagtccaactcggtgtcgccctcgccgtccctggagcaggctgactcggacgccctggatatcagcaccaaagtgcagctctacggcgtgctgtggaagaggcctttcggcaggccgtcggccaagtggtcccggcggtgagtgcgcccccgcgccccaaggagaccgccggggagagagcctgggcgtcgttacccctcccaccccctccagtcgccgtcgtgcctctgctttcctgtgtgaccttggcgtcaccccttttcactctacactggctcccgcaggaaaatgtggaccatagtctgggccgggagaatggagatggggcccctgccctggggcggtggcaaattctctatggaatgaacctgaccctcgagtgggaatgttgggtgtgggcagaagagaccgtggtcggggtgggatcccagctaggtcagatcaggccagactgaggggaggcagaaactccatctctagccaaagatgcccccaaccccgggacccccactgtcaattccatcgtcttcacaacccctgacccaggccgcgaggaccgggcctgagtgtctccctcccgccaaccacccacccttaagacggagagggacctggcccttctgaaaggctcaggctaaggagggaggaagggccaggaagggtgcttgtccatggggaagtgaccttggcaacccctccaactgtcccttgaaataatttttttaaaagtgagcacagggaagagagattctagtgcttcagacggaggagctggaaaggagggaggcagctggagtgaaggaggggatagattggttctgccaaggattgatcctctgaaaggggtggtggagagagacagggtagtcccaaccatccttcagccccagctgcctggtccccaactcagacgcgactccgcggacatcggtagccactctccacttacaaattagcctgggaggtattgagggaagagggagttcacagccctggacttgcaggaagctcccaactggctgcaggtgctgtgggccattttctggacagtttccactctccagtcaatttcagttctgagattcactactggtatggcctggagaatgcagaccctgtccag

SEQ ID NO: 25111 - DNA, 1687 bp, Artificial sequence
  DNA replication origin
cgggagctggccgaacgccagggcctcctgcggcgggagcgggcggagcgcgcggcccgggaggatcggctgcgcaagcttcagcaggagcagaacctgaagcaacgtgaggaaggtctacaggaagggcgggagcgggctgagcagatccgcagggagcgcgcccagcgcgcggcccgcgccaagcagcggcaggagggccagctgcagcgggagaagcgggagctgagccgggccgagcgggcgcgccacgaggcgctgctacagggtcggacccggcagcagcgccaggagcgagagggcctgcggagctcgctggaagccagtttgggccgtgcgcaggagaactacgagcatttggtggagcagcgcacccgggagctgcgggagcgggcccggcgagaggagctgcagggtcggcgggccaaggaggcggcagagcgcaaagagcgggaacatcaggcgcacctggaggcgctggcccgggcgggggagcgacggctgcagcacgcgacgcaggtggccgaggaagcagtgcagcagaaggcgcggcgcgtgggccagagccggctggagaaggaacgagcccagcgcgccaacaaggagaaggtggagagggacgaagactgccgccggcgagagctactccaggccatcgggcgcaagctggagcgcagcgagcagctgacgcgggaacggcgcagtgcgctggagagcgcccgctccacagcccgggcttccttccacgtgcgtgagaaggtgcgcgaggagaccaacacgcgatccttcgaccgcatggtgcgggaggcccagctacacgccagcctggaccgcaaataactgcggctctttgccagccagattggcacgcacagccccctggggcctccctcaaccactgaccatcgtgggagtccccgctcggtgcgcagcgcggtggcctctcgaggcttctgaccaatgaggcaacaacagtacagacgtttgggacctgtcagctggccccctttgtttttaaaacttacttcatttggagatgacagcacaatctgcccacatccacccttgatggctcccgcaccgacccttgccaaacttccctatgtgtctcttgggctggaatagagaagcttgggggaaaggggctgatcaggactggtgagagggccccccaggagagggcagaggtggttgtccccaccccttctgcagcagttgccccaggcacctgttcgacattggtgtctgagacagtgttgctactgctgagggaacatcaccctggctcacctccatctttcaaaatatggcaagctgcacaaatcgcggaggcctcccagagaaacacagctcctccaaggtgtcaagccacgcccaaatgatccaaaaagcagttgattttttagaccttttaatcggccacctgagcaaattctcaccagttttgatagttttccagtttagtcccttgggttttctagttagacagtcatctgcagataatgttcaatttttgtcctttgccccctccctcattctaccaagtggcacaggaaattggttggtttggtgatgctgtttagctttaatagaaacccccagcccctggaggggctggattcctttgggagcagtgttccattccattaagcttccttgcagggtggggcccactccatgaagacag

SEQ ID NO: 25112 - DNA, 1258 bp, Artificial sequence
  DNA replication origin
gcgctcggggccgaggccgcggcggcggcggcggcggcggcggccgcggggctcaaaggcgtgaaaagacgccgcttctcctcgcgcatgatgcgctcgcgctcggcccggcattgctgcagcttggcgcgccgctccgcctcgtaggcctcatacaggccggtggccacccgcatggagcggcccggagcctctcgcaccaggtcggccagggcccgtggcagcagctccaccggcttgaccgcacagcgggcgcaggcctctagcgagcgggggctggtcagcacgtagcggctgccctccgcctctgggcagtcgaagttgaagaggtcgaggtgcagcagcggggactgctcccgccgcccgccttctgcggctgcacatgggacttctgccttgcggggcaccgccgcggaggccgaggccgaggccgaggaagctgcgggctcctgtgcgccctgggaatcagggggcacggacgccacggcctcgtcccctccagagtcgccgggttccgctcctgccttctcttcttcaggcactgggtccaccatggctgagccccgtcctttgttggaatctctgcagatcacaaggagggacatcgaggaatacgtctgagagctcttcccccctcctcatccatagtcaccccatcccaacttaatccgctttcggattaggctcagaggctttggtggaacgtaaatcataaaaccgatgtcggaaagcccaggctgagcgccagaacggggatgggggtggggcggacactcgtgttcagagagcagcctgggtctccctcagccccggaatgcggggtggaggcctgtggcgaggctcctctgggcgcctagcccgctagatgcatcccctttctgctgcaagttaagatgaaaagatccaggtgcaggcaggagctagagagggaggcgctggaggattcccgggaggattagcgtatttgtttgtagcttaggcgggctactggggatgcagctttgcaggaacaaaaaagcaagaggcctgttcatcccaagggaccccatttgcctaagggaagaagtttatggttgatttcccctgccaaaggagactcggtcgcaaggcccccgggtgattaaagggctgggagaagtccccaaaggcctctccgggaggggtgatggattcttgctccagcagctctggcagggcttactgagggctctgcacgccgcctccgcccccacctccacccccaccgggtgtttgctgg

SEQ ID NO: 25113 - DNA, 836 bp, Artificial sequence
  DNA replication origin
gcgctggtcccgcgcccctgacagccggccgagcgcgtcgatggcacaatgccggccccgccgcccccgggccgcggtgacaactcacccgggagccggcggagacctccgggatgggggcgctcacagcttccacgccgccgcttgcgcgcgcccgcagtcttctcgggtctaggcgaggccccgcgtgcccttgtctagctcgctctggccggcgctgtgggcagaggaagcgggcgggagggagggaggaggtggggcggtcgccggcttcggagaatagaacgcggcggtagcgacggctgcagcgcccgcgtcactgacccagctgtaccgcgcgggcgggggaggccccgcggaggggagggggcggggaaggggcgggaaaggggcagggccaggcgcgcacgcaacggcgccggcgtcgcgccgccgcgaccgccccgccgggaggccctgcacgcacgcgccgccggccgggccaggtacccaagggagaagcgacgcggttggggaggtggggggtccttaaagagacagtccctctgcgctggagtggatggggcggtggcaccgactcagctggactatgcggcgtttccagtgcgctctccagttcgtttactattattattatttgcatgattgaattactattatttgcaaagaattgtactgccctgaggtttacaaggcttttggcgcatgttgccttgttagctcttgaattgctcgtctgacctagctcgtctgaagcaggttattatctccctgttaagcagtaatccgaactgtggttcctagcctgccaacattaaagctgcccggggggtggg

SEQ ID NO: 25114 - DNA, 970 bp, Artificial sequence
  DNA replication origin
gctccccgcgcttctctgcgccggcccgctgtcacccggccgcgagccgcgccgctgggagccccgcgctggcgtggcgcggccagccggccagcagtgggggctgcgcggccggggggaccggcggctggtttgcggccgggaacttggtgacccgcggtccggggcgcgccgtcccgcgtcgctgcccgggcagcaccggaagagccagacgccgtgccgatgggtgcagaggaggtaggcagaggccctctgtgccactgtcattactgccctcagcccagcaaagctgcggggcttgcgctggggcagggctggcttagagaaggtggatttcctgaggaaatctcagagcccgcctgtgcgcaccgcggcattcgggagcccccgcgcctcggctgctctttaatctcaaaaacttctcttattaaccaggctaaactccccgaaaccagctattttctttcaaaaagtaggcacgtacatacagactttccttttttcgcttggttttgagaccccagctatgagtgtggatctgactctccctcatgggagtcgtggctggggagctgctgaagtggagaaaagttaccctggacgaatttaggagcaggagggggaggtggttatggggacagcaagacccaggagcaaagaggcgtcaaaataaagtcttgggctggttaaagggaagttggcgtctgggcaaggaggcctaaagctgttgttcccacagaattttctttcagtggcaggcgacatgctgggctttgttgctctcgctaactgggctcctgtgtgctcttccagaggtgcagtaagattactcagttcaattaggcctagggatttactcccttttttgatctacagagatgggaagtatgtctttccttcacagtagttaattcatttcttgctgttttcgttcctctggtgtaaaaacatacataggagttacgcacac

SEQ ID NO: 25115 - DNA, 1216 bp, Artificial sequence
  DNA replication origin
taaacgtttgttgtttaaacgatagtctatggactgttcaggctgcccggtctatggaagattgtaaaggcagccctagcaaacccatacattcagtctcagaagtgggagctggaccagggcttcttcccacaacaagaacccatccaggccaggtgcggtggctcatgcctgtaatcccagcactttgggaggctgaggtgggtggatcacttgaggtcagaagtttgagaccagcctagccaacatgatgaaaccccatctctactaaaaatacaaaaattagcccagcatggtggctcatgcctgtagtttcagctactcgggagggtgaggcagaagaatcacttgaatctgggaggcagaagttacagtgagctgagatggcgccactgcattccagcctgggtgacagagtgagactctgtctcaaaaaaaaaaaaaaaaaaggaacacatccagagaatgggcaggcagccagcatggaaggggctggtgagggaactagtgagaaagggaagaaaacacccagtggggcaggactttgaatgccatactaaggatatggatgtgattccataggcaaatgggagccgttgaaggatactgaagagaagaatggtgtgctgtcagtgtaacataacgggaaagaacttgatggacaatggattggagtggacactaactggaaagaccactgtaggcatctggtaaaagatgttcattagccctcagatgatgagagcacaaggtgggcttgacttagctaggaagagttgacagaattgctcatgtatttgggaaaatcattcaggcgaaggggtcttgagctttgtggcggactgcatggaaaggaatgagaaacagacaaaggagtcaaaaagtctgcttatgtctatgcatagcaaggagaagaaaggcgggaaggacagaggaatgaacaaattgctttgatttggaaaagagtgtgcagggaacctgtgcagagggctgggacacatgggtctgtggactgtgaccaggatgcggagcagggtccatcacacttgttcagaggggaggaccaaagcctgtttcaggaaattgcttctggggtgaaatggaagtggtgtgtctcccacaggaagacgtaagggaacttgaaggaccagagtatagcccacctgtgagaggcagtaatttaaaaccctctcatttttctccatggccagatctt

SEQ ID NO: 25116 - DNA, 1071 bp, Artificial sequence
  DNA replication origin
tgcctctgtttccttgcttgttctgatccctctgtccggctcagagaaaccaagactcagggtggttattcttgagtaagatcccagagtcagaaagtggcagagccaggaatcaaacgtagggctgccttacctcagagcctgtacccttaaccactctgctgtgctggttctaggggctgattaatgaatttagcaaaggccccacaccaccctctttgttctagttccagcactgtcccctccctccagagcccctctcaccaaggggtcatgcatcccctttcatccttgttttaaatggaagacagctactcttcctccctgtccagaggccaggccatttcccccttgcccacctccccccatcaagctgcaaagaggcccagtgatgaatgggaggggaaagcggaaggtggggaggagaaggagaaggaggaggaggaggaggaggaggaggaggaggaggaggtggaggaggtggcagtggcggtacaagcaaggcagagtgggatggagtgtaagcagagtgccagagccacaaaccttaatttaatcacagggccccatgctcaatttaacagacacaagggctcagaatggggtccctgtgcggcggtggggcaatcagcctgctgcagttcctgggaaagcattaattgcggatgacaatgtgtaaacagtggggatgaatggagtgtgcaggtgtgagtgctggggccagcctgggctgttttcacacgagctgcagctcctccactgctgacctgctccccagaacaggattagtggaaacagttgggaaaccgttgagggtgttggagcttggcatagagcaagtggccgagagcagagtggaagaggggcagggactggaagggcagaggcctgggagatgaactgtagggtgtgtgtgggtgttgcggactgcctgcctgcggcctagcccctagccaagccacagactctctggaaaggaaggctggatttttaataacaatgaaggcggtcagacctgtgcagctcgggactgcgcttgggcttgccatccacctgggcaaagccaggtca

SEQ ID NO: 25117 - DNA, 1238 bp, Artificial sequence
  DNA replication origin
tcaacagcatcccaaggcagaggaatttttcttagtacagaacaaaatggagtctcctatgtctacttctttctacacagacacagcaacaatctgatttctctatcttttccccacatttcccccttttctattcgacaaaaccgccatcgtcatcatggcccgttctcaatgagctgttgggtacacctcccagacggggtggcggccgggccgaggggctcctcacttctcagacggagcggctgccgggcggaggggctcctcagttctcagacggggcagccgggcagagacgcttctcacctcccagagggggtcgcggctgggcagaggcgctcctcacatcccagacggggcggcggggcagaggggctccccacatctcagacgatgggtggccgggcagagacgctcctgacttcctagacgggatggcggccaggaagaggcggtcctcacttcccagactgggcagccgggcagaggggctcctcacatcccagatgatgggcggccaggcagagacgctcctcacttcccagacggggtggcggctgggcagaggctgcaatctaggcactttgggaggccaaggcaggcggctgggaggtggaggttgcagcgagccgagatcacgccactgcactccagcctaggcaacactgagcactgagtgaacgagactccgtctgcaatcccggcaccttgggaggccgaggctggcagatcactcgcagttaggagctggagaccagcccggccaacacagcgaaaccccgtctccaccaaaaaaaatacgaaaaccagtcaggcgtggcggcgcgcgcctgcaatcgcaggcactcggcaggctgaggcaggagaatcaggcagggaggttgcagtgagcagagatggcggcagtacagtccagcttcggctcggcatcagagggagaccgtggaaagagagggagagggagaccgtggggagagggagagggagagggctagatggttttcttaaagggtggtctcagggcagaggtcccacagggtgaaggcagaagctgcaaggaccccaaggcctagtctccacaactcacacagtgtcactcccaccaccttcaagagtccaggcaagtcacaaggccagcccagattcaaaaggtgtggaaatagaccccatctcttaatgaaaggagccacaaagaaactgtggctatatttaatctaccgtaggaagctactggctca

SEQ ID NO: 25118 - DNA, 1222 bp, Artificial sequence
  DNA replication origin
aagggaggtaggggaggtaggggaggtaagggaggtaggggaggtaggggagctaggggaggtaaaggaggaggagaggtaggggaggtaggggagctaggggaggcaggggagctaggggagctaggggaggtaggagaggtaggggaggaggagaggtaggggaagtaggggaggtaagggaggtaggggaggtaggggagctaggggaggtagaggaggaggagaggtaggggaggtaggggaggtaggggaggtaggggagctggggggagaggagctagagaaggaggggaggtaggggaggagtgagagtaggggagctaggagaggtaggggaggtaggggagctggggggagaggagctagagaaggaggggaggtaggggaggagtgagagtaggggagctaggagaggtaggggaggtaggggagctgggtgggaggggagctagaggaggagggatgctaagggaggaggggaagcaggggaggaggggaggtaggggaggaaaagaggtaggggagctaggggaggtaggggaggtaagatgtgactctcacatgtgtgtccatcttttttcctttagtagattggagggctcttgaggggaggaaccatgattgtccctagattttgtgtgggcagcacccaaggttgacattcaagtgtgtgctcaaatgtcacctcctcccctagagtctctttgcaatcacaggatccagtcccttgctgtgctgtcaccccattttattttcttcagagcacagattaccacccgacattgttttatccatttatgtgtgtgcttgtcccgatccccttaaatgtagagcccacggggccggggcttgtgtgtcttactccctgtgtctccgtctccggcactaagaacagtgctgggcacatagtaggttcaaatatttgttggctgaaagactgaacactggaggaagcaaacaaagagatgtgaatcagggctgctggctctctggaacctggaggggttcactgtagaccaggtagtctccatccagcaagttcattgtaggttagaggttgttctttttccaattttcttatcagaatgggcagagcaggaaatcaaaccctgtttcttgcttatatctcagaccaccacgaaagacagacacatctggagaagactgcgcacaccctggagaggagtcttagctcttcctgccccccactctcccgcag

SEQ ID NO: 25119 - DNA, 888 bp, Artificial sequence
  DNA replication origin
atgcagtgttgggggggcagatctggcagagtgggtgtctacaggagggtgccgccgggtggggaggggcagagagagatgcctgggcaggtgggtacagttggatcgtgagcatgctgggttggtagcgggtgctgtttggggagactgactgctgtgttgtgtgtgctggatgcatgtcggcatatgtgtgccacctgggccagggcgtgttgtgcttctggtgctgtgagtgtccgccgggtttgggggctagcagggaagcgcgttatccactcggcgcgcgcccgcgtgcacatacgcacgcacgcgctcaccccaatctcgggactccaccgccgcgggtcgggagctgcagccccagagcacccaccgctggggccaagggggcgagggagaaggagggtttctccagtgctgcactctccagcccctggtggtctgcgtgatccgggactcggtggagagaatcgaaatatataactaaccctcccccgatcccccaacacacacgcgcgcgcggacacacacacacacacacacacacacacacacacacacacagtcaaagccctgattcagaggctagcgctgctgctcctacaggccctggctgacctgcccagaggacccgagccactgggaaagatgatgaaagcaatttgctccggggaaaaaagcagttcttcgtcttaattcattgtattttatttttaacggtgtggtagtggtggtggtggcggggtggggttaaatagaagaaatgcctttaatgcagtaccataaatttacccgctcatcgcagcttccttctctctctctctctctctccccccgccccccgcttctcttctcttctctcctcctttcctctctctctctctctct

SEQ ID NO: 25120 - DNA, 862 bp, Artificial sequence
  DNA replication origin
ccgcggccgggactccgggcctctcccgggcgtagattccagtcaccgctctgggtcggggtttccctctttctgaaatccgtgcggaaggacccctcccggggcccctcgccctggccccagacaccctccctcccagaccccgcgctccagatgcgctgccccgcagctccctgacagctgcgagcccacgaaccccggcgggagggcggcggcggcggactgacatgccccggacgcggctgcggccggcgggcagcccgcgggggcgatgagccgctgcgaccggtgaggcgccgggcggcgggggcatcgcgtaccttcctcacccccctcccttgcccactccgctcgggaggccgagaggaaacggtgagtaatggggtgagcctcctgcccttcccccttagcgggcagccgagacatgggaggtagaggttggggggcttgggatgcccctaagaggatccctgattgtgagtaacggggttaagttatttctcaagatcattcatatgaaccgccttcctgtggatttagtgccaggagaagtggggtgagggtgccccggaaagtgtacattgtgtatgcagtgttgggggggcagatctggcagagtgggtgtctacaggagggtgccgccgggtggggaggggcagagagagatgcctgggcaggtgggtacagttggatcgtgagcatgctgggttggtagcgggtgctgtttggggagactgactgctgtgttgtgtgtgctggatgcatgtcggcatatgtgtgccacctgggccagggcgtgttgtgcttctggtgctgtgagtgtccgccgggtttgggggctagcagggaagcgcgttatcca

SEQ ID NO: 25121 - DNA, 801 bp, Artificial sequence
  DNA replication origin
cccccgccgcccggcgcctcaccggtcgcagcggctcatcgcccccgcgggctgcccgccggccgcagccgcgtccggggcatgtcagtccgccgccgccgccctcccgccggggttcgtgggctcgcagctgtcagggagctgcggggcagcgcatctggagcgcggggtctgggagggagggtgtctggggccagggcgaggggccccgggaggggtccttccgcacggatttcagaaagagggaaaccccgacccagagcggtgactggaatctacgcccgggagaggcccggagtcccggccgcgggcggcgggggattcctgcaggaaggggcaggaaggcaagcagcccggcgcgccctggcggctccgagggacctgggctcgggcttgcggtcgcgtcgcctgggctttccctgggctgggagcgcgccgggtctccgccttgcacgctgtcaccgcgggagacgtctcggcctcgccgcgcgcagaggggacgcgcggagaggctggtttctgggcgagcggagagctttgcccattaagctgccggaagaagccaaatcaaaaagccaatctccaagcctccaaacggaacgtcaccctatcagctgggagacagcgccgcactgactgacaagccgcgcatatttatcctcgcgcgcggaggggagactctcagaacgctcctcgaccagcagcgaggaagtcgagcccgcatcccgcatcccgcatcccgcatccagagcccccgagggacgaattcagatccaacccctgccccgcggccacccaccc

SEQ ID NO: 25122 - DNA, 1584 bp, Artificial sequence
  DNA replication origin
ctccgccttgcacgctgtcaccgcgggagacgtctcggcctcgccgcgcgcagaggggacgcgcggagaggctggtttctgggcgagcggagagctttgcccattaagctgccggaagaagccaaatcaaaaagccaatctccaagcctccaaacggaacgtcaccctatcagctgggagacagcgccgcactgactgacaagccgcgcatatttatcctcgcgcgcggaggggagactctcagaacgctcctcgaccagcagcgaggaagtcgagcccgcatcccgcatcccgcatcccgcatccagagcccccgagggacgaattcagatccaacccctgccccgcggccacccaccctagtcgttggagcctggcgcccgcgcctcccggccggcagcacgtcaaaacggcggcgcgtcctgacctggattccgccgagttgggagctccaggcagcaggcgggcgcgcggcaccggctttccccttgtcctcaggagacgctgcctgcaattccgaaattaagtctccaccaaacacatctgtggtttttaaatatagcagggaactattacccaggcagggtccacccaggcctaggggaggagttgagggggatggagattggcagcggagggaaaagaaaactccttttttccccctctttttttcttctcttcttggtgcagaacccagcctgtcattttctcaacccaagtcaaacaacagtttgtgagagacgcttgggtgagctctggtatgttggcttttcgggtttctaaagctaaaaataagagggggctgcctcccaaattgctgcttactctgggcctggaggctggaagagagctggtcctttgatgcagcagcgggactagggcttggggcttggctcaggcgaagtgtacacacgtagccttaaatcagatgcctgtaatttctgctatatttgtcaggcttggtcctagaggcatgcggggtgggcaagccactcctaagaatggggtttcaagccctcagcttatcggtggcattaggcagatctaaaatgagcctggtggctggccttctgtagcgacaccagtgcagaaaagtcagaatgtaagggcaggaagttgttctctttcaggcctctctgctgcctgaggctaagtgtgaggggccaacaaatgataataatacttaccaaatagcagcaccttttaagggccaggagtggtgctagtgaatttgattgtattacctcatgccatcctactaaaactctgtgagctaggtacaattaccaactccatttttttgttgaggaaattgagccttaggttaaataaccatcccaaggccacgtgcagcagagccaaggattgaaataaaatgcaaccaaccggagttgtgctgagacgtcaacagtgtgtgtgactcctgagatccctggctcctttgcccggctgctctggagcaaggcttggttcaaacagattaagggggtgtagagactagggaatctctaagcctgagatggcaggaggtctttgctggtcctttgactcagtgttccgttagcaagctgtgtggtggtttct

SEQ ID NO: 25123 - DNA, 1338 bp, Artificial sequence
  DNA replication origin
ttcgtgcggcacctcggagggaggctgagcgggccgcgccgggcggcgggtacacggcggtatggtcctgcgctcgggaacgcggaatgttccctggtcgccgccgcggtggggcgcgggcccggaggaggcgcccgagggaccaggccttgcggcgggcaaggaccaggaggcgagccctggagctccggagcggacgcccccagggagctggggacacccccatgggacagcccttcctggacccggagagagcagctgctgctgccccaccacccgccaggcccggccactgagcagccccccggaaccccagatcctcgttccccccaggtggcctgggaggtggccccctcgaggatgactccactagctccctgggaccccaactacgaagccaaagcaggacctcggctggtttggggggccaactgtagctcaggagcctcgttctcaggccagacggtgtgtcacccctcgttctggccgctgtacgaggcagcctcgggcaggggtctcaggcccgtggcccctgccacagggcattggaatggacagcaggcggccccggatgcagggttcccggtgatgtgctgtgaagacgtcttcctctcggaccctctgctgccccggggggcagcgtgtccccctgtacctgtccaaggccccccagcagatgatgggctccctgaaactgctgccgccgccccccatcatgtctgccaaggttctcccccgcctgtcaccctccctgggcccctccactgcctggctcagcgggccggagctgatcgctctcactggcctgctgcaggtgagccagggggagcctaggcccagctcctccgtggctggcccctcaggccctacctctgacccacccagcccctgtggtagccccagcagttttcagagtgctgacctctctctcccacagaccccagacacccattgtccatagccttctcggggcagagtgggctggttgtgttgacaatgaaacagtgttggtttgcaaacaaacaaacaaaaagaagatagggatcaggatagaagggaggtgagaatcagaggcataaactgaggtagacagaagggaggagtcctttgggaaaggaagaccatggaagttgttgaaaacaggactcaagactagagacttcaaaatctttcttttcttggtttcttcataccaattaaagtaagttattcatggagtgtcagctattctgctaccctgttcttctaaggtgacacaaaaatgcacaagtttgacatgtcccaagtaaccaaaggcagtgcatttcaaatttatacctgatgaaatcacgccactta

SEQ ID NO: 25124 - DNA, 1342 bp, Artificial sequence
  DNA replication origin
ccttggaaataggctccacatatttttggatcaagccttagtgttctatctcgtgtgtttgacagagcggattatgttttaacttttcttcctctacctgacaaagttattttgaggaataatcatgaaatgaaacaaataattaatggccaggaaactttaagtagtgaacattttctttcactaacccttatatggtcatgtcagtaaaaataaataaatgaaaataaacatgccatttcagattaggaagagtgaatttttttcattgacctttccatatacaatcataccactgcaaaagtttttaaaaataaaaagtaaaatgaataagaatagtaccaaatagggtagtgaaaaggtaataaattcttattaaatatattaatatatatttttaaaagacataggaaaacttacttcatattgtgtccggaattggtggcttcttggtctcactgacttcaagaatgaagccgcgaaccctggtggtgagtgttacagttcttaaaggcggtgtgtgcagagtttgttccttctgatgtttggatgtgtttggagtttcttccttccgaggttcggatgtgttcggagtttcttccttctggtgggttcgtggtctcgctggctcaggagtgaggctgcagaccttcgcggtgagcgttacagctcttaaggcggcgcatctggagttgttcattcctcctgctgggttcgtggtctctctggcttcaggagtgaagctgcagaccttgcggtgagtgttaacagctcttaaggcagcgcgtctggagttgttcgttcctcctgctgggttcgtggtctcactggcttcaggaatgaagctgtaagacctttatggtgagtgttacagcttatagaggtagcgtggacccaaacagttagcagcagcaagatttattgcagagtaaaagagcaaagcttccacagtacagaaggagacagggaagcattgccaccgccagctcaggcagcctgcttttattctcttatctggtcccacccacatcctgctgattggtccattttacagagagctgattggtctgttttaacagggtgctgattggtgctttacaatccctgagctagacacaaaagttctccacctccccactagattagctagatgcagtgtccattggtgcattcacaaaccctgagctagacacagggtgctgattggtgtgtttacaaaacttgagctagatacagagtgctgactggtgtatttacaatcccttacctagacataaagatacttcaagtccccaccatactcaggagcccagctggcttcacgcagtggatcccgcacagg

SEQ ID NO: 25125 - DNA, 1337 bp, Artificial sequence
  DNA replication origin
ttgcctagctatacctggggaatttgcctgatagttctattggggatcctcttgggggactgctctaatgccttcctggaggtctggctcgtgaagctggtggttattagcgtgagattgggctagagaaaaaactctttccctttcatctagggggagggtagaagtcaggatgacatttaagtcactccaggttaaactgtaggacagagagatattggaattgccgtatatatttagtggggtctgatgagaaagagcctaaacgctgactgatctgagagaggtctgatagagaaaaaggtacatgtaccttgactatgccttcagctcccgccacctctctaagaggaaattgttgggcaggtggggaagaactagtcgcaaactaaactgtaagccggaccgggtgtgaggaggggaggtgatagaaggattatagggtggaggagcagaggctgaggaagaattaggacttagcttggcctggtgacgagcagcctggggaggaggggaaaggtcagatgggtctgtagaaaaaggaagactggaaagactcagtgacgctgggtttgggactgaggggacaggcgggagggaaagaaggaggatttgggaggaatcgcattgggaacagagactagggagggaacgaagtgtgaaaaatgcctggacataaggcacctcagaccatttgcctatttttcaacaaaaattatttaggtcttgtagggtggagaaatcgaaagtgctgttttctggccatttagagccattgccaagtttgtattggggccaagcagtgttgcagaagaaaataaggggtttaggttttaggtcaggtgtgagttgaagaggttttgagttcttgagaacacaggctaagggagaagaaggaggaatggagggtggaaggttgtccatagtgaaggaggcaagcctagagaaaagagagagtagagacaaggagggaaggggttcgggggttcttaccctccagaaaagcgggaaaggggttggggtgcataaataagggattggggcacagagataagaggatggggcgtggaaataagggattggggcacagagataagaggtcagggcacagaaataagggattgggtgcagagataagaggtcagggcatggaaataagggaacggggcacagagatacaaggttggggtacttgcccttcctccagaaaagcgggacttgctaagggtgaaggagaaggggttgggggtttcttgcccccccagaacggcggagaaggggtagagacacagagagaaggggttggggtacttgcccctcccccagaaaagcaggac

SEQ ID NO: 25126 - DNA, 1284 bp, Artificial sequence
  DNA replication origin
cagggcaccatcaatcttcagcggcaaggccaatgagatccaagtaggaggttttggccggcttaggaagtgatggggccgcccttgcaggggccgctcacagtccaatttccattggggtcctctgcagagggggcatggcctggtgggcttacctggatttgggcattgtctggaccagtggccttcattgccgcacttgaaaaggtgccaagtggaggtaggttgctaggaggcttccgtgtggagctgcggacccgtgggcctgcagggcccctgatggcggaggcaagcatttgaaactccgcctgtttttgccttttactttccctatcacgattgttaaagactatgaaggctaaattaagacggtcttgtgaggtttgagggccatcatcaagcttctgaagcttgcaccgaatatcgggggtggattgggagatgaaccgaaggtttaagataatggttcgttctgagggtttgaagggggaaggagggttaacaggcagtggaggataggcaggggcgtaaggtggcgggatgagtttacaagctttaggagagggcagtgggggaggagaatgggtacaggcaatactagaattgtcccgaggaggggatggtgtaggaaaagaagtggatacagctgactgggaagatggcagctgggaagatggcagctgagaagacaacgaggaggcttggggggttaaaaaagatggttgagaggaaaaggtaggggttgggaggggtggatagcagtcagttggatcgaacgagaaaaatgaggtagggtcgggaggagaaaggcgatcagggcggtgagaatggaggggaaggatttgaacaggtaagcaagaattgcagaggttgggttgtgaactgagtgcaaaaaggcctggacataaggaatttcttcccatttttccagtcgtcggcaataattgcttaagtcagttaaaattgtaaagttgaatgttctatttgcaggccatttggacccattatttaatttgtactgtggccaggctgtattgcaaaaaagacaggtacttagagcgaatatcttgcctgaggcctaaggtttgcaggttttttatgaagcagcctagagggctgttgtttggaatggaggaccggagtttcccataacagagggtaggctcaggagaacagggaaaaaggagaccatcctggagggagatgataaaaggagcaactgtcaccgctgcctttttcgttcctggaacacgatcaaatggcttagaggcatccccctaagac

SEQ ID NO: 25127 - DNA, 959 bp, Artificial sequence
  DNA replication origin
tgactaagggggctcatatttgtgctttcttaggggagacccgatacctccgttctgccaagaagtttaaaagagagagatagcatgggcgttgcagtctctttgagaggggctacacaggagcagatcattaacacattgaaggagagtggacggttttagggataaggtacagaggtcatgagcaagggcctgtccaaaaagatgggggctgtctctgaaaccttgaggtagtacgcaccaggtgagctgatgtgaaaggtgggtgtcggggttttcccatgtaaaggcaaagaggttttgggaatcagggtgtaaaggaattgtggaaaaaagcatcctttaggtatagaacaggaaaatgggtggtattggagggaattgcagaaagtaaagtatatgggttaggaactactggacatactgggagtacagcttggttaatgagcctgaggtcctggactaagtgataagttccatctggcttttaaacaggtagaactggtgtgttaaaaggagagtttcttgggtggagtaggtgactggtgaggcggcgagaaatgataggctttaggcctatgagagctgcttgggggatgggatactgcttctgtgataggaactgggtggactctttaagggtaatgcggacgggggtgtggtgttttgcgactgaaggtgtggaaatattctaaacagcggggttaactacggatgggggataaggtaaagttgcatgttttaaggtggcaggttggaggagtagaagaaagttagatgccccgaggggtctgggttgatgcgttgggtactatggggaatgtgcaagtggagagtagtgtggagttttgaaaggatgtctctggtatgagggcaggactaagaaagggtgactgaaggaaaaggtgtgcagggagcagaaaagtggaggggtggctcagggtttggagtcttgtctg

SEQ ID NO: 25128 - DNA, 1041 bp, Artificial sequence
  DNA replication origin
aatgagctgctgggtacacctcccagatggggcggcagccgggcagaggggctcctcacctcccagaaggggcggccgggcagaggcgccccccacctcccggacagggcggcggccgggcagaggcgcacccccacctccctcccggacggggcggctggccgggcgggggctgacccccacctccctcccggacggggcggctggccaggtgggggctgaccccccacctccctcccggcggggcggctggccgggcgggggctgccccccacctccctcccggacggggcagctgccgggcgggggctgcccccccacctcccagatggggcagctgccgggcagagatgctcctcacttcccggacggggcggctgctgggcggaggggctcttcacttctcagacggggcggccgggcagagacgctcctcacctcccagacacggcggtggggcagaggcgctccccacatctcagacgatgggcgtgggcggccgggcagagacgctcctcacttcctagacgggatggcagctgggaagaggcgctcctcacttcccagactaggcagccgggcagaggggctcctcacatcccagatgatgggcggccacgcagagacgctcgtcacttcccagacggggtggcggccaggcagaggctgcaatctcagcactttgggaggccaaggcaggcggctgggaggtggaggttgtagctagccaagatcatgccactacactccagcctgggcaacattgagcactgagtgaacgagactccttctgcaatcctggcacctcgggaggctgaggctggcagatcactcccggttaggagctggagaccagcctggccaacacagcgaaaccccgtatccaccaaaaaaatacgaaaaccagtcaggcatggcagcgcgcgcctgcaatcgcaggcactcggcaggttgaggcaggagaatcaggcagggaggttgcagtgagcagagatggcggcagtacagtccagcttcggctccgcatcggagggagaccgt

SEQ ID NO: 25129 - DNA, 806 bp, Artificial sequence
  DNA replication origin
ccccaccgccgtgtctgggaggtgaggagcgtctctgcccggccgccccgtctgagaagtgaagagcccctccgcccagcagccgccccgtccgggaagtgaggagcatctctgcccggcagctgccccatctgggaggtgggggggcagcccccgcccggcagctgccccgtccgggagggaggtggggggcagcccccgcccggccagccgccccgccgggagggaggtggggggtcagcccccacctggccagccgccccgtccgggagggaggtgggggtcagcccccgcccggccagccgccccgtccgggagggaggtgggggtgcgcctctgcccggccgccgccctgtccgggaggtggggggcgcctctgcccggccgccccttctgggaggtgaggagcccctctgcccggctgccgccccatctgggaggtgtacccagcagctcattgagaacgggctatgatgacgatggcggttttgtcgaatagaaaagggggaaatgtggggaaaagatagagaaatcagattgttgctgtgtctgtgtagaaagaagtagacataggagactccattttgttctgtactaagaaaaattcttctgccttgggatgctgttgatctatgaccttacccccaacccggtgctctctgaaacatgtgctgtgtccactcagggttaaatggattaagggcggtgcaagatgtgctttgttaaacagatgcttgaaggcagcatgatggttaagagtcatcaccactccctaatctcaagtacccagagacacaaacactgcg

SEQ ID NO: 25130 - DNA, 953 bp, Artificial sequence
  DNA replication origin
caaaacccagagcttcttccaaccccttctctccgacgcttccaagagacgctccaagaactcagaaaaaaaaaaaaactcgtcaacgtttcgctagatcacagccttgggttgtccacaaaaaccactcaaaaaagcttgagacttcacacaaaggaacctaaaccttgaaaccgcgagctataacatcccaaactggtccacagacaatcaagagacaaaatatagcaatacagtatacctcggatatccaccgccgccataattccgagagcgtttacaggttctctttccggcgcaaagtaaacgtaagcctaggccgccggaagcagcgggttgaagagagtgcgcatgggtgaggagggacgtagagcggaagagggggcggggcgggcaggagagaggcagggggtggaggtgcgggtgggaggggaggagacgcgagggggcggaaagcgggagaggcgcgggaggcgggaaacgtggggtggggtggggtggggtggggtaggggaatgggaggggacgggacgcagaaagattggtgcaggggagcagggaaagactagaagagggatgggccaaagaaggagaacgggagggcggattactgggaaaaaaattagaagacttagaggacagaaagaccgagtggagtcccgccccacgcccaccactgatggaagaattctgccttgatcgtctgtgatcgtcaagaaaacaaattctgatgctgtagagttgtgcttgggagtgtctcttaattttaaaagctccccgggtgtatccactgagctatcagatttaggaacgatggtcatttatatttttctccctgcctcaggtattgggatgggacaggacttaagaatttgggagtcattggcttttatgtgactaaatccattaaaaatctaaaccaattaaagaagcctctgagaaaaatttcacaa

SEQ ID NO: 25131 - DNA, 1239 bp, Artificial sequence
  DNA replication origin
gggaatgggaggggacgggacgcagaaagattggtgcaggggagcagggaaagactagaagagggatgggccaaagaaggagaacgggagggcggattactgggaaaaaaattagaagacttagaggacagaaagaccgagtggagtcccgccccacgcccaccactgatggaagaattctgccttgatcgtctgtgatcgtcaagaaaacaaattctgatgctgtagagttgtgcttgggagtgtctcttaattttaaaagctccccgggtgtatccactgagctatcagatttaggaacgatggtcatttatatttttctccctgcctcaggtattgggatgggacaggacttaagaatttgggagtcattggcttttatgtgactaaatccattaaaaatctaaaccaattaaagaagcctctgagaaaaatttcacaacacaggaaatgcttctgaagtgaaatattaataagattaagagaaagggaatacccctgggtcccagagtaatgagcaaatgtctgcattccaagtagtctggagtaggtagcaaggctccaaagagggaatgattctgtgtacggggaagctacagaaagcctcagattctcaagcttcagtgtggctctgtaaaagcaaaacgatacagaaatatgcaaacaacacacagatactaggaagaggatgccaaaatctgaaggagggatgagggcgggtgcctacatcttctccaaaacttaggtactgtgaagactccccaagaatttaaccacaacccaggagcaagaggggaagaccagaaatttaattgggattttcaacctcatagacaaggaattaaaaatttgttaactccgtagaataaaagtacgttgcctgtacatttcagtttgggaattttctgcctgagatggtatgtataaaataggtgtcccaacagaagtatgtgcatgcacagagtaaagttttgagagagaatttttcaggagggcctggttgggagcctagtgggaggacattgcaaaaaggaagagtatcgtgtccaataaaaagtgtgatccataaagctttttgttttgtttttctagttttttgtttccttgtgttttgattaggctagaaggagattaggaagaatagtgacagaatgcagatctgtagataataaaacatatggtatgcatggtaaataagacctggaagctcaacctttattttgtaggcaatgggagaaa

SEQ ID NO: 25132 - DNA, 2018 bp, Artificial sequence
  DNA replication origin
gatgagctcggccggctcggccgccgccccgacctggcccctcgctggggctcctccgccgccgcccgggacgcacagcggcggcggtggccgctgcccctctccggccgcgggcgggctcgggttccccttggccccggccgccgagccctttctctccattcggccgccgccccggcgcctggtgcgcgccgcgatctgcccgccgccgccgccgccgccgcgccttcccgggtttaaaagccgcgggcgccggccccgcgcctcgcaggcttcgtggcggccgtgacaccccgcggcggtctggcgccccgcactcccattctccccgctgctgccagaggctgctccagccgccgccgccgccgcctcggacgccggcccctcccccgcctcccggctccgcgccgcccgctcccgccctcctccctccgcaacctgcgggtggcgggggccggtgctcgcgggcccgggactagcgctgcggggggaccgtggccccgagtggggtggcggggatggtcgctgacccggaagaagcttggcttgcccgaaggaggggaggattaatgacaaagacggccccgctctttcccattcaatcccgctctgcgaggcgcgcctagtctgaaaggaggtggggggaggggggtaggtgtaggggaaggggagtgtgtgtgtgtgcgtgtgtgtgtgtgtgtgtgcgtgcgtgtagggatggggggcggcggcgacgaaatgcgtgcagaaatagatttcttaactacaagaaaaggtgcggcagggaacaaggggcgcaggcgcaagccgtagctgctagttctttgcagtaaggtgttagtattttttaagggggcagggcctcctttttgtggatccaggttgtcgctgaggtgtgtctcggtgtgtgtggtcgccggggcgtccagaacgcgacgggcggtacagcgtgtggggcgccgtattctgggagcctgtgtatgcgtgtgctgtgtgcgcgcagctgtgcaggatgaatcacagacatcagagatggagaacacctgttactgtgggtcatcggcttggcgtgcgtccggtctagtttccatttacaggacagttctgtgcccttcctcaggaggtcccattccttccttcttttggtcggttctgagtgtcagctgtctactggggatctgctaaggctaagaggcaaagataggcaagtcactcccctgacctcaagaaactcccagtctacaggcgaagatacaccacccaccggtagagtcgctggaccaggtacagatggtgcctgtcattggggaggaacgaaaagtgctgtgcagccctgagggggggagggagaggtagctttttgagtagtggtagatcaggaggctttatggaggaaatagcatttgaggaccttgaaggctgggtaggatttggcatgaagaagtagaaggaagtggcatagccggagtgaggaaatccagcggaagtcctgatgtttgaaatctcaggtgtgtttagggcatagtggtttgattttatagcctaatgagaagtagtgggaaatgacggggttggattatgggggcttttggatgaagagtttggatttgattttggagtcaatggagaagcctgacatattttttagtgccctcccttccttaatgttaagaaaaagaaagattctagagcaccggttgtcagagtgctggccccagacctgcagtgtcagcatcacctgggaaacagttagaaatgcaaatcctaggatcctactccagacttaagaaatcagaaactctgagggtgggtctcagttaaccagtatattggttcagatatgctgctttaaaaccttcctactcaaaatgtagaccttgggccaatatcatcagcatcacaggagaacctatcagaaatgcagaatctgaaaatcccacacctactaacccagaagctgcattttaacgagcatactgggtgatttgtttacctattaaagtgtgagaaacactgct

SEQ ID NO: 25133 - DNA, 1279 bp, Artificial sequence
  DNA replication origin
cgcctctcggaggagcagagcaagacggtggaagccatcgagatcgactgttacaacagcctggcaggtgagccgcgccgcgccccccgcgccgcggtccccgttcttcggcccggtccctccgcggaccactgcggcgctcccgcggtgcagattctcctgctgtgactgtgttgctctggggagaacccgggagggaggcgctttggaaaaagtgtgactttcaggattatgcctttcaaaggccataatcatctcttgtcccttcgctagcatacatcgtaaatctcacctagaaatgactggaaggggacccagctggcctggctatggctgctgctgctactgctcaccagtggacctgggtccaaaatgcggaagcagcgcccggggtgggcccccgcagccaccgctagcccagctttttcctgcgggtgggtcccaagggaggccacgcacctgtctgctctccttaggtagcatgagcaccaggattggtcctcgccttttccccaactaaccgcatccctgtaggtaagatcttccccaagttttttggccccagtagcaaaggggagtttgacaccatgccttcagcatcttgagcaaaatggattccagaatgccactttcttctctctgagctctgctggggctcccggttgccaggtgaagatctctatctcaaaagaagcttggttcatggttgggcttgaactatgctgcattctccctctcctccctgcccgtttctcactatgtgtagcatcagtcctcacgccagctggctgctaggggtgaaggaaaagggggccctactcttgggcaaagaaggtgtacattccaacattccctttggggataagagccaaaatcagggatttaaaaattgtttaatttaggcgcaggaatatttaaagtctcttaaaaaaagaagagtctggctcttgctagggccttcctgggagaaggtgggagaggttggcaaaggcaacttaaaaagcattctctcctcttctcttgccccatttggtgagattctggcatggtcaaccttctccgaccaaacaaagggcagttcctcctagttcctgacatgtgaggttgcctaaactgtctatggacagttagagcagggtaggggtggaagagtgactgggtgtggcagggaatggtgaatgtgtctgaagccgaggcagtggtgggggagtaaaaataaatactggcaattctgctcggttcttaaatgcagatctctctgttccctctgaggtttcta

SEQ ID NO: 25134 - DNA, 724 bp, Artificial sequence
  DNA replication origin
ctccatggagccctccagagcgcttctcggctgcctagcgagcgccgccgctgccgccccgccgggggaggatggagcaggggccggggccgaggaggaggaggaggaggaggaggaggcggcggcggcggtgggccccggggagctgggctgcgacgcgccgctgccctactggacggccgtgttcgagtacgaggcggcgggcgaggacgagctgaccctgcggctgggcgacgtggtggaggtgctgtccaaggactcgcaggtgtccggcgacgagggctggtggaccgggcagctgaaccagcgggtgggcatcttccccagcaactacgtgaccccgcgcagcgccttctccagccgctgccagcccggcggcgaggaccccagttgctacccgcccattcagtgtaaggcgaaggcggggccgggcggggagggggaatgacggaggcctggggggcggtcggggaaggggggagcactgcgcgagggctgggatgagggcggggggtggggaggacgattgacctgggtgtgggtggcgcgcgcttaggctgcccgggctttgcttgctggataagctcgagacgcctcaggccctgcccgcacttcagacgcttgggcttcttcaccttcagttggccacctcagcagtggctcccgatttccacatcctgaagtcccagtctgagaatttgccagtttcccagtcccttctctt

SEQ ID NO: 25135 - DNA, 1104 bp, Artificial sequence
  DNA replication origin
tcatagctgcagagtgacagcagggagacaggagtgagcggagagtgtgggacagaggggaagaaagagaaacaggccatacgcagacctacaggcagctcctgagctacccagatcgcttctcctgtacaggaagagctgctggcccgagggaagggaagagggggtccctgttggagcaactggagtggcaggaggcgagtgggtcgagggagagttattaatatgcactagaacacatatttacaactggtggcttaaattaagggcagcacattcacacctagctactcccaggcttcccacaaagacatctgaagcgtgcaaagcgcgctccctgagcccagcccaccaaggggcgcggcccgccttggtagggacaaggtctctggcgctggcctgagcggctgcgggagttcgctcctgggagagcgcagcgaaaccgagggcatccttccctgtaagaggagggggcggaggaagggaggaggggaggaaggaaggaggggaggaggggaggaggagaggaggagggaagaaggaaagtgggggtgaagggaaggaggaaaggaggcggggagggagagacggaggaagagagggtgggaagaaggaaggagagagagagggcgaagaggggagagaggggcgaacgagagagatgtggggagaggggagaggagagggacggggcaggggaggggagagcgagggaagagagaaaaagagagaacgcaagggggtcggggagaagagagaggagagcgagagagagcgggaggagagggggagggagagagacgggggagagcgagacagagcgtggggagacggggagaggggagagcgagagagccaggggagacgaggagcgagcgagaggagaggggaagagagagagaagggggaaagcaagagagtggggggaaagcgagagagagagaggggagagacagagggcgggggagagcgagcgcgagcgaggggaggggagagagagaggcgcgcgctggttgctcccgcgaaaccctaagctccgccagcgctattgcccctcccgctgccagccccgcgtccacgtggggaaactgtccctcctgtgcc

SEQ ID NO: 25136 - DNA, 1006 bp, Artificial sequence
  DNA replication origin
gctgccccgtctatccacctccggagctccgggtgagcgagccggcgcttcggcggtcgctggtgctgctgcaggaggaggaggaggcagcaaacgaggaggaggagacccgagaggaggaggcggcgagcggcggggcggaggacggcggagaggaggagaccggccttctgagagccgccgccatcttgtctcctaacacccggagccgcggcccggcccccgccacccgcggcccgccagcgcccccactgccgccgccgcgacccccgccggccgccagccctgggccaggcagagaaagaggcccggcgccagggagcgaccgagaggaagccgcgccccctccagctcctcctctccgctccctccgccccctgggccggctacggtgcgcgccgcgcctggtccgccgcgggcgcctcctgccgacgtccgggagaagcgcgcgtcaacgcggccggggttcagggccccgggggctgcggaggtggctgagacgcggctggctggtccggaggaccccattctgcccctggtaggccccctggcaagttcgcctacgagtctctaaacggggtctttctgactccgaaactaacagatcttgactccagaaaagcgtcctgcctgtcatttatgatatttgtgaaagacctaggaacaactgaagctaacacctgagatactgaaggcctggaagagttaggtacggctgatgacactgttgaaaagtcataaacgcacccaagttgagcaagaactgtgttggcccgtgtgtgagaaaaaatagccacgtccagactgggagaatttactacttccaaagacaagttaatagaagcggcacaggacatggaagtatggagtggacaggttaccatttgtacgcggtgattgtatttttaaatgtgctgtaactagcagccatttttattaatgggccaatctaaacagggttgaaaaagattaaccgtgacgccaccccaaattacaatagggtctt

SEQ ID NO: 25137 - DNA, 1098 bp, Artificial sequence
  DNA replication origin
ctcttcctcttccacggggtctcgtcccccgggggccgccaccctctcggtgtgaggctccccgcccccactgcgtgctcccactcctctcttcggggctttcctggtttcggaggtgacacgagcaacgagcccacggcaacccgcgccggccgcccccgcccgctcactgggaagcggcagcgtcctaggccccttctcggggttccctcctgcggccactcggctaggccgtccccgccggggccccccgcccgtggggctgtgtggcaggcgccgagcgctctgcggctttaggggacgccgcatccatccttggcacgctgggttcctcgggcgcccggcatccggcactgcccgcccccgccgcggccctcgtccggggctcccgggagaggccgcccgccgcctcgccgctaatccgcgtgcggagccccgggagcgcgggggaccgtgcggctctgctccgagtgtgtgtgggggtcgtccgggctcgtcctccaggggtcctgggtggtggctgaaaacccggctcggaaccctcctgcctctaaaaaaccgttgttgtgcttcgcagcggttcttctctgttcggccccgtggccggtggccgtggtgcttcctggcctccctggggggagggagcggggagataacggggaatctggctggcatttcagcagatttgtttggcttggttcaaggcctttggcggataggagtagggagagagagtactgcctgttgctgaattcggtgcgatcagcttctctgaatcatctgtgtttttaaagcaacattgaaagttgttaagcgcagtttctaaagcacaggttagggtggggcgttagggaaactcgtgtggacagagatgttacttaaggcttcatataaaattttaaagtagtcagaggggaggaaaggatctgaactttttattttaggagaattcctttgaatgtatttctgctaactttgaggttctttgtggagctagagacagggtgctgagttagaaaatcccggaggaccactatgagaagtgcaaaaggtgaggacacccaattcttccctaagtgaagttcagtttcactaatt

SEQ ID NO: 25138 - DNA, 1114 bp, Artificial sequence
  DNA replication origin
agtgaggacctggaggccccggccaaggctacaaggaggcgtggctggggctgcacactccacagacccagtgggagctggggacaagcaggaaccccaacccttccgagttggtggggtggaagctccccgggtgcagcctgaagccaccctgccgtggctacagacccaggcatctgtgcactcctgggggcccaggaaggccccctgctacccgcccccatctcacccccgtcagaaatgcctgcttgcgctgcctggcttcctcccactgttggtgcctgctctgatctctgagcaaagtcgaggccaagccctgggctgtcacagcccagatgagtgtgcacacagtgggggcagtgctgacatgcctgacacgccagccccctggcacctcggccccctctggactttaggtaccaacaagcactggagggaggctgaggggggctgaggacagtctggcactggtctgcaggcgccccctggcatgaacagcttgggcgccatgaatagtggtagaaggcagacagactcctgggcagaagggggctggtccccagtgagtgaagccccaccttcaaactggggagggcctgaagcctgagggctatgccaccagtccccaaagactgcagggggaacttatggtgcttttccctgggcccgcccatggccacccatgaaccaatcagcacacacttcctccccggtaaggcccatacaagcctcagattcagattcagccagactccagcagaggaagaaagatgatggggagatgacacgccgaccagctgcagagaggaactaccctctctgctgacagctggacacttatcaggagacctgcctgcagagaggagctaccctctctgctgagagctgaagagaagatgggccaaccagctgcagagaagagaggagctaccttctctaccgaacacggaacactccttgggacgacctgcccagcagagaggagctaccctccctgctgagagctgaacactcatcgggacaccctggctatgcagaggagctgcacactccaggtctactgtgagctgttctattgttcagtaaagctcctcttcgtcttgctcacgctcca

SEQ ID NO: 25139 - DNA, 1068 bp, Artificial sequence
  DNA replication origin
gaactgagggggcggccagtacgggaagcaagtgcgggggtccgggctccgaaggtccaaggtgggcgcgaggttgccgggggggggatgaggaggtgcgtaccgcatgggggaggggacaggtaagtgcggacgggggcgggaaggccccaacgaccggtgggggaggaaatggggagggagccacagaggcgggagggaatggagtggctgcgggggcggcctctggggcccagacctggccctccccggggaccctccagccggggactcggcgctgcactgacttttcgctcactcgctcacgcacgcactgaactcgctcacaaagttgccggcagtggcggcgcctcactcgcccttcccctccccgccccgcctcccgccccattccttcccctccttcactcctccctctcccccaagtctcgggtgagatcaccacggagcggcttagcgcggcgcacaagtctcgcgagagaagcggcggctgggccctgcaggcggaggaagtggaaaaagtcgcgggagggtaggggaccgcggaacttctggttgctatgacgacggcaaagccctggattcctgtctcctgcggagagcagaggctgcaaacgtgggtgcagttttcaacctgcccggcgcactggcggtggggaaagctaggggtggttgcggaaggataatttttaagccgattcaagagggcatctcgagaggaccacagtcatgatatctggccaaatttggcaaatgagactaatgtattaagaggttctgggacaggtttctgcctttctaggcagcacatatctgcaccccaaatttctactatatattcagtttttcggccttctctttcaatctaattcctccatccccacactccccatgctgcctccctcctcctcttctcaactcgcaaacacacgcagactgggctccttcaggaactggctcattcatctctgtattctcagcgcctctataggcttggtccatactacatattggccacttttttgacaagttgaacgcaacagtccatgcctgtcctcagtacttgcc

SEQ ID NO: 25140 - DNA, 1336 bp, Artificial sequence
  DNA replication origin
gagccagcctcgggaattgggctgattccacccccgcctccctcgggcccccctccgctccgcgctcggcgcccgcctcgggccggcctcgccgctctccgcagaggaggcggcgagtgagcgcgcgccggccgtctacacggtttctctttctccccagggagagcgcgcggcggacgcgcccgggacgcgcggcggcaccgggaggccgggccgagcggtaagtggtccccgcgcccgggtcctggggggagcgggggtgcaggacggctgacagccccctgccctgtttctggccggggttggggtccagggcccggagcaggaccccaggaggccggttaaagtttgattttcgatttggtggcttgctggtagcttagcccggcgggggcgagtccggcttcaccgcgcccggcgcgcgcgcacgcaccccagaacccgaatctgcacaactactgggcaggcgtctctgcgggaggccaggagacccgcgtcccggtccgggcggttgcgtccaccccgctgagctggtcgccacctggcgacccttcccctccagtcacctgggtgagcgctttgcagcctgagctggagtaggcaggccgagttggttgagttgtgggaaatggagacgaacagctcggtgcccgagggtggttaatttcccctttgggggtcttggggacatgaaattttgggatgctctaacctgctttccggggagcgagtaaaccgcgaaagggctgggaaggcgtgagggtgccgcaaaaagaacttttcctccttcgccccatctgttaccagcttctctcctgaccttaaaggaaatttccgaggctcttaaatcgctccacggcatttctaggtggaccagtaatcgtgttgggcaggttgaaatttcatcgcggtttggagaacagagagacatgggaaatggctcacttccaaggaagatgtttagctaaattgttggcattcgttttctaagagaagcatttggggattgatggctcctagactacgattaccttatagattttatttttcctgacgggtagtttagaggcagcattcgctgaaatgcatactacctgtgaaacgatcatgtttctaaactggagccagcgatgtgatgcaaatttcagaataaaggtgtcgactttcatcaggttccaggtctatctggatggactgggattggcgtttcctctataaagcaaacctttcatgttgaaactctgagtcagactcttaaagccattgtctttatgctggtactctgtgggagttaagtgtcaactttctcctgttttctcctatggagtatccgtcc

SEQ ID NO: 25141 - DNA, 1129 bp, Artificial sequence
  DNA replication origin
tatagattaacagcatcccaaggcagagaaatttttcttagtacagaacaaaatggagtctcctatgtctacttctttctacacagacacagtaacaatctgatctctctttcttttccccacatttccccctttctattcgacaaaaccaccatcgtcattatggcccgttctcagtgagctgttgggtacacctcccagacggggtggcagctgggcagaggggctcctcactttccagatgtggcggccgggcagaggggcccccccaccccccagatggggcggccaggcagaggcagcccccacctcccagatggggcggcggccgggtgggggcgcccccccacctcccagatggggtggcggctgggcgggggtgcccccccacctcccagacggggcggcggccggacgggggcgttctccacttctcagacagggcggctgccgggtggaggggctcctcaacttctcagacggggcggccgggcggaggcactcctcagttcccagacggggtcgcggccgggcagaggcactcctcacctcccagacagggtggcagccgggtagagatgctcctcacttcccagactgggcggccaggcagagacgctcctcacttcccagactgggtggccaggcagaggggctcctcacatcccagaccatgggcagccaggcagagacgctcctcacttcctacacggggtggcggccgggcagaggctgcaatctcagcactttgggaggccaaggcaggcggctgggaggtggaggttgtagcgagctgagatcacgccactgcactccagcgtgggcaacattgagcactgagtgagtgagactccgtctgcaatcctggcacctcgggaggccgaggcgggcagatcacccgagttcaggagctggagaccagtccggccaacacggcgaaaccccgtctccaccaaaaaatacaaaaaccagtcaggcgtggcggcgcgtgcctgcaatcccaggcactcggcaggctgaggcaggagaatcaggcagggaggttgcagtgagccgagatcgcagcagtacagtccagcctcggcaaccgagggagaccgtggaaagcaggagatggagacgagggaga

SEQ ID NO: 25142 - DNA, 1130 bp, Artificial sequence
  DNA replication origin
agctgaacggcttcgcgagttggggcagctcctcgcgctcggccctgctcggcggcgagagctccgcctgggcgccgcgttcctacagccgccggagccgccaggcgccgagggaacggacagacctccgcgcacccttgccgaccggggcgggcagaggcgggcaagcggcgaacgcctgggagcgcggagagccaggccagcccggagcgcgccggggacaccctgtgcgccccgagtcccggcaccatgcgacccgccgcgcgtcctcgcgggcccggggcttcgctcttcgctcgctgagcccctgcgctcgccaccacggaaactcggaaagaggaggcgaggctgtggggagcggcgcggagacggactagacttcccctccgcccccaagaggctgccggtccccggttccctgggcttctccagctttatcatgaacctggcgcaaggttggctttaggaaaaattctggagccagagggagagtcaaggcaattctttggttgctaaggtaattgtagttgtgataaaaaatgggcaagaaacaaatgggggaaaaacatggtttaaaacagtatcctccctccccaccccattaatatgtgttgatttcatctcctgggtgtgggtgcttgtccatttcagatgcgtgacaggtgcccgtgtgtgtgtgtctgcagtttgggactgtggaagcacgagcttacataagtggttaggcaagctggcgtgtggacttgtgtgggatgggtgcaggtctgcatataaatcatgttcctgggtttctgggtgtgaagcgcacaccgacggggacgagagcgcagaggatggcgcttttagatacttccagtcttccgatgttgtgatcgcaggtagggcagctttgcctctaatcaggcgttcattaactttttccctgaacaagctcgcccatttgtggtttggaagaaaagaaagcgagtctccgcggtgaggtgtggagggcaggggcgggtggggaggtttgttgtttgggaactgcgctagcaaaggaagcggtggctattcgcttggagaggatgacaaatgaactggttgcgtgaggagtgaagagaccgtgtttacagtcaccagcaggctgcgta

SEQ ID NO: 25143 - DNA, 1308 bp, Artificial sequence
  DNA replication origin
tcccaaagtgttcatctgtttggatgggagcttggggttggtggatagttgggttccatcagtgttggaatttggtaaggatagtgtgacacagaaagggggtgtattagtgttccctagagggacagaactaatagtgtgtgtgtgtgtgtgtgtgtgtgtgtatattctatttttatatatacaatagtatatatataacagtgtgtgtgtgtatatatatgtaggagtttattaagtattatcttacatgatcacaaggtcccacaagaggctgtctacaagcttgaggaagaaggagagccagtccgagtctcaaaactgaagaacttgtagtcccaagtttgagggcaggaagcatccagcaagggagaaagatgtaggctgggaggctaggtcagtctcaccttttcatgtttctctgactgctttatatttgctggcagctgattagattgtgcccaccagattaagggtgggtctgccttccccagcccacggacttaaatgttaatctcctttggcaacaccctcacagacacacccaggatcaatactttgcatccttcaatctaatcaagttgacactcagtattaaccatcacaaggggagatgcaggagtagagggtatgtgcaagggagtgattatgagtgagtataatgatggagccagtgtgaatagtgaaggtgaagcgaagggtaggaatggatagtaaaagtgctgtgtgttcaatggattaaatgtctaaataagtttgaagattgtttgcagtgaatgcagagtaagtaagtgagctgaacagaggaagggtggacagagtggaggatgcttgtagtgggatttgaggtgatgacaaagtttaggatgtggccatgtgagatagtgactcagaaggaaaaagcttcaggtgaggaaataaggaactgagaaactggcttttctggtaggtctttgactctgatgttaaagtcactgaaagtggtgaaggtgttagggaagcagaagaaaccctctgagaggcggaagctggagtcttcagggaatgagaaggcataagcaggagggaggtgaaaaacagcagtgaggatgagcagaaagtggcagagccagatggcctgagtgccacagagcagggatttgtgttggagggagggagggaaatcatttgaaggagcggtggagagccaggaggctgcctgccctactccctggtcttcagatatatgacgtgaggacagagggctgtaggagaggagaaggcaagtttccattaaggtcacagaaggttaaagttcagagaggagat

SEQ ID NO: 25144 - DNA, 1239 bp, Artificial sequence
  DNA replication origin
taaatagttgaaaatatatttttaaataaggaaaacaaataaaaaattaaatcatcaaaaagaaaggaaggtggaaggcagataagaaaaaggagagagagaggaaggagggaaggaagaaaggaaggaaggaaggaaagaagcaggaggaagggagggaaggagggagggaaggaaagaaggaaggaaggagaagggaagagatgaaagggacagaagggaaggaagggaaggaagggaaagaagggaaggagggaaggatggagggaggggaaggggagagaagaggggaaggggatgggaaggagagaggaagaggaggggaagggaggggaaggggaggggaaagggagaggggagggggaaggacaagagaaggggaggggaagggaggaaggaaggatgaaggggctgtacgctaaggaaagaattgttgaggggtgggagggtacaggaatgtaagaattgttgccaggaagctagttaggaggctaatgcagctaccaggagagatacaagaatgattcaactaaggtggaaatttgagaaatgttaaagaaatacttgacaggacttgactattgtttgaatgttgggaatatgggaaaatgatgagaaataatcccaagttctgacccatgaaactaggtagattgtagattacagtgaaacttagatgagaaagactgtagaaggattgcagggaccacatagaggaagaggattccttctgtgttgagcatgctgaaactgagaattctggtggaaatgttgagtggatagttgaatgtatgggtcgaaattcagaagtttttgctaaataggtgataagtgaaaccatgagaattaatgaaattatctagggaaaagggaatgaggaagtatctagggaaagaaaggaagaggagagaagaaaggagaatagagaaaagggtctaggactgagcttggaggagctcaagtcctccaagatcaaaagaaagaaccagcaaaggaaagagagaaacatggcaagaggtaagaagcaaatcgggtgagtatggggtcacagtaaccaaaagaagaggtttcaagaaggagaaggtggtcaactgtgtttactgccacaggttctctagtttgtccttgctcaataaagaccccgagtgagggaatgttgacagatcagggcaaaagctaccctactaataataacacgcttcagtcatgccatcttcccaaggaaggaaagtcagcaca

SEQ ID NO: 25145 - DNA, 1415 bp, Artificial sequence
  DNA replication origin
gaatgtctattgtcagagacaatggagataatattcgaacaaaaagcaaagctgggaatcacaacctaacccatgtaaaatggcaaaaatcaccatttgaaaacccgcctaagtaccattccatagcattttgttcctgccgctcctgtgcttatcacaacacatcatgtttgcttgtagtccttctcaaacagatggcgtgttccttgagggcaaaggtgatatcactcatatcctccagacagtgcctgacaccagtgtgccataattatttgttgaaataaactgagaactgagcagtttctgagataattagtggaagtcttaccaaatctcactctatgcatagaggatgcttaataaatattgttgacagaaagaatggagaagtctctggacacagcatccagtggttaagtcagagggggcaggtgggaggtggtgaggtggtggtgaggggtaaaggagagaaaagggggatgtcaggacaggggtggggaggggttgaccatgtgtgtggaggggtagaaaactatgccttcttgcaggggattgagagcaggagactaagaacacagctgcacattgtttcatttttgtggcctgcagttgacctgaccagaggaaacaaaagagaaaatggaagttaggagtgccaagttgggactcacgcatgattttctaggtggctttagtggggcaaaggaaaaatacatgtgtgtgtgtgttgggaggtcggggtggaaatttgaagaaactgaaaggtgtggggtaagcttatgagacagactcactacagagtggcaggtaacatctgaccagaggggtcagggcactgggagagggacagaaagactcctggcagggagtgaaatgatgacagatgcccatggagagaacaatcggcaggcgttctgtgggaggtcccaggaaaggtcacctgggtttgatcagtcaagggaaggagctagaggcaggtggtgacagcaaagagcatgagggaagtgggggtagggtgcaccagcaaagcggatcagaaagggagacagtggggtgggatggggtagaggcaaggaacaggagcaggtgtggagggaggacttggtcaaggaggaaagttggatgaatggagtctcagctttggaagagcatctaatccaggcctgtgcacctggccattgagtgatgcttgggtaccaggagaggtggggcaggggaggggcctttcaacttggaagaggctgagctgctcatttgcttttgagcttttttccttgctggcttggccattttccatttaggcccattctccctcttctccctcccttatcgctcagcttaatgtgatctaggcactgttgggacacccatctctgctttcagaaactgcttccggggtgaaatgtggcagtact

SEQ ID NO: 25146 - DNA, 852 bp, Artificial sequence
  DNA replication origin
attttgcaattgaggaaactgaggcaaagcgagtgtggcacagagtcactctgctggtcagccctgctgtaggagatgaaaacctggctcccacagcaccctccctttcctgctggcagctcccccagaagccctcgtacatccagttctgctcgactcctccccttccccatggaggtatttttagtctcccagagccccttccccagtctgctgttgcctcgtcattctgcttgacttgctttcacctgctcagaggcggctgtgacagggctgcaggctacatgtcaagctgtccctggcttcacagaggggtgtggagggggagggcagctgagggtgaccaccctcggcagtgcgggcaggcaggaggcctgtcagtgcccggggtgactgccagcacctacagatccttcttggggtcaactctgagtaatgagggcgaggggaggagggctgctggctgtcagcgctgcaggggtggggtggggagggagactggtgggagggagggaggaagtggaatttgttttggagagagacaagctgaggaggtggcagaggtggtagcttggcaggtggtgttgattgggaagtgggtgtgttttctgagtgggtgtgttgcaggcctagggtacaggcctttccactgtgaagtccccggtgagtgtgtacatggagtgtgtgtgtgcacagagtgtgagtgtgtgtgtgagagtatccaaggcctttccaccatcaagtccccatggccacttttccaagccaggccccaggggctgccccatttcccctgcaccccaggctgctgccaggtcttattcctcacctgctgccccttcctctctgtcc

SEQ ID NO: 25147 - DNA, 1208 bp, Artificial sequence
  DNA replication origin
cccccggatctcggaggcgctccgggcgatcgagcgtgtgtctgctcgtgtatttgcgagcgagctggctttagtggattaacgactcgggttaacttggggtggatttggaggcagggaagccgcaggtcttatgaatggtgttctcgccacctctgggtgaggcgctgaggcaggcggagaggcggttttggggctcctggcccgagggggcagcgtctgctcccggccgggcgaggggcaggtgcctctggccgcctcggggagactttgagcgcttgcccagatcctggacagagtggggcgggccgggcgaggactcgcgggggccagccccgggtccaacagccaatttctgcctgcctgccttcctcctccttttcatccttccttccttccttccttccttccttccttccttccttccttccttccttccttccttccttccttccttccttccttccagtcagtggaactgttaagccgccaagtccgctcgcgatcgcggagccaggggtggcctcggaaaactagtgtcgctctgaaaggggtgctattgggtgatgtcggcagagggtggctccctccgtatccgaggtgggctggggggtcctcaccccttcgaccgggacttccccgcccggacgaagccgcaggcgaagtggcagagggaggtgcaggtcgggtggggggcggttcatgccgaattctccctggtgcgtggccgctgtcgaccctggttcttttaattcagcgcattctcgtcttcacccctggccactcctggagttgaaaaccaggttcgctcccggggacggtagggggttcctaacgcaaaggaatgcacagggagaatcggacgtgtttgcgccagctcgtcgcccatcagaaatagggaaaggggtaggaaggccccaggtttcaaatatatttatatgaaagctgccgttaagaggacgttggaagctgaggctgatcagataggagctcctggcttcagttctggctcggaagctcggatacactgcgcttgaacgccacagcgtttcacccaagaaagaaaatgttttatggcagaataaatgggcgtaacttcgccgcatcctcgctgccggttgctttcgctgcaacaccgctgatgctgtttctaccgaacccacaactgattttcagtttccccatttccagccgaaatcacataaccg

SEQ ID NO: 25148 - DNA, 989 bp, Artificial sequence
  DNA replication origin
cgcttcatgaagcttgagcggccttgaagagaaggcagagaaaaattctagctgaacaaacaacgtgactggaggccggttcaagccggctggatgggaggggagtcttggaaggaaaactcagcagggtgggttggggcttggtgacgcagcaattgccagggaaagagtagtcaggccgggtgcagtggctcacgcctgaaatcccagcacattgggaggttgaggcgggtggatcacttgaggctaggagttccagaccagcctggccaacatggcgaaacccccaactctactaaaaatacaaaaaattagccgggcgtggtggcgggcgcctgtaatcccagctactcaggaggctgaggcaggagaattgcttgaacccgggaggcgggggttgcagtgagccgagatagcgccattgcactccagcctgggtgacagagtgagaccctgtctcaagaaaaaaaaaagtagacaatgggaggctctgagggttctagagttgggaagtgacaggactagagctgtgcttctgggaaatcaccgtgtagggggttggggagaaaagattgtggaagtcagctgggagacccctaaggaacttattgcagcaacagtccttgtgaaaggtagtgagggccaaaccagggtgggggtagccaggatggaaggggggtacagatgggaggcagaattcagagggagaatcggccagacttaactctcggggaggagtcaagctggattttccactgaagagccaggggacacttgaggaaggtggcaggaggagttggcttgggcttgctgagtcaatgagtggctggcagccggccagcaggctctgttgaatgtccacagaggggacagtgacgtgggcatgagatatacctcggggacctgcaacacacacagatgaaagattaaagaatgtttgcaaatcagtgaacaaatgaagcttgctgggccttgggcaagtcatgagg

SEQ ID NO: 25149 - DNA, 985 bp, Artificial sequence
  DNA replication origin
gggatgaggggcgagagcgcgcctcgaggagctacatctcccaggaggcagtgcgcactacgcccttgctggcgccgggatcctccctctctcgctcctccctttctgggctgcaccgctcacgccttcctgttagtccgagctgggagaagttcactccgatcagctgatcccaactgacaacaggagaggaggaagcccgggaggcaacgaaggaggagggtggcggagatggagatgaggatggatctgccggtgtcctgaggaatagcctctgcccccactggcgccctgcggccccccgacgccgccttgctgcggccgagcttctcagtggtgggatccccgggccgcggcgggcagggcagggcggggagggcacggcccagcgcggggcgagtgatcgtcctggggctcaggctgccctcgggaggaagggggggcgggtgcggcgggggtgggggtggggtggtataaacaatggattcggctccgggttttgccggcgtgggggggattttgggggaccttctttgttcttaggctccgctcctgcccctcgggttgtggcggtggtgtccgggtggaaggaagggtgaggaacccccggctggggagaggtgtcgaggtgggggcccgagtgggcaaaatgtttggttgacatggccgggcgtgaggtgtacttttgaaggttgattttatatttttctcaattgtgacaagtttgatttttgtttctgttttgggagctggctgggcatgtctgaggttagattgtagtaaataagatcccctagtcactcccttcgccttccttgtttatctgaaaataaggttgatagattgattactgtaggggaggagtgactatcagaaaggcagggctttacaccttgtcggggccttggaatgcgggtcaaggctagggggaattaggaatataattgtcaaagtgacaaaagcccctttcttgccccagttatct

SEQ ID NO: 25150 - DNA, 1197 bp, Artificial sequence
  DNA replication origin
gggtcagccccccgcccggccagccgccccgtccgggagggaggtgggggggtcagccccccgcccggccagccgccccgtccgggagggaggtgggggggtcagccccccgcccggccagccgccccgtccgggagggaggtgggggggtcagccccccggccggccagccgccctgtccgggagggaggtgggggggggtcagccccccgcccggccagccgccccgtctgggagggaggtggggggatcagccccccgcctggccagccgccccgtccgggaggtgaggggcgcctctgcccggccgctcctactgggaagtgaggagcccctctgcccggccagccgccccgtccgggagggaggtgggggggtcagccccccgcccggccagccgccccgcccgggaggtgaggggcacctctgcccggccgcccctactgggaagtgaggagcccctctgcccggccaccaccccgtctgggaggtgtgcccaacagctcattgagaacgggccaggatgacaatggcggctttgtggaatagaaaggcgggaaaggtggggaaaagattgagaaatcggatggttgccgtgtctgtgtagaaagaagtagacatgggagacttttcattttgttctgtactaagaaaacttcttctgccttgggatcctgttgatctgtgaccttacccccaaccctgtgctctctgaaacatgtgctgtgtccactcagggttgaatggattaagggcggtgcaagatgtgttttgttaaacagatgcttgaaggcagcatgctcgttaagagtcatcaccactccctaatctcaagtacccagggacacaaacactgcggaaggccgcagggtcctctgcctaggaaaaccagagacctttgttcacttgtttatctactgaccttccctccactattgtcctatgaccctgccaaatccccctctgtgagaaacacccaagaattatcaataaaaaataaattaaaaaaaaaaaatacaaaaattagccagacatagtggcacacacctgcagtcccagctatttgggaggctgaggcaggagaatcacttcaacctgagaggcggaggttgtggagagctgagatcgcaccattgcactccagcctgagcaacagagcgagactccatctcaaaaaaacaaaaaaggtaagctgag

SEQ ID NO: 25151 - DNA, 1361 bp, Artificial sequence
  DNA replication origin
ccgggcggggggctgacccccccacctccctctccgacggggcggctggcctggcagaggggctcctcacttcccagtaggggcggccgggcagaggcgcccctcacctcccggacggggcggctggccgggcggggggctgacccccccacctccctctcggacagggcggctggcctggcagaggggctcctcacttcccagtaggggcggccgggcagaggcgcccctcacctcccggacggggcggctggccgggcggggggctgacccccccacctccctcccggacggagcggctggcggggcggggggctgacccccccacctccctcccggatggggcggctggcctggcggggggctgaccccccccacctccctcccggacggggtggctgccgggcggagacgctcctcacttcccagacggggcggctgccgggcggaggggctcctcacttcccagacggggcggctgccgggcggaggggctcctcacttctcagacggggcggccgggcagagatgctcctcacctcccagacggggtcgcggccgggcagaggtgctcctcacatcccagacggggcggcggggcagaggcgctccccacatctcagacgatgggcggccgggcagagacgctcctcacttcctagatgtgatggcagccgggcagaggtgctcctcacttcctaggtgggatggcggccgggcggagacgctcctcactttccagactgggcagccaggcagaggggctcctcacatcccagatgatgggcggccaggcagagacgctcctcacttcccagacggggtggcggccgggcagaggctacaatctcggcactttgggaggccaaggcaggcggctgggaggtggaggttgtagcgagccgagatcacgccactgcactccagcctgggcaccattgagcactgagtgaacgagactccgtctgcaatcccggcacctcgggaggccgaggctggtggatcacttgcggttaggggctggagaccggcctggccaacacagcgaaaccccgtctccaccaaaaccagtcaggcgtggcggcgtgagtctgcaatcgcaggcactcggcaggctgagtcaggagaatcaggcagggaggttgcagtgagccgagatggcagcagtacagtccagcttcggctcagcatgagagggagaccgtggaaagagagggagagggagaccgtggggagagagagggagagggagagggagagcgcttaaaacaatttttaagatgtatttcttttctcatagttccagaggccagaagtcccaagtcaagggttggaagcaatttttgtatttttagtagaga

SEQ ID NO: 25152 - DNA, 1069 bp, Artificial sequence
  DNA replication origin
caggtgacatgctgggcacggtggcactttggcaggccacggtgggaagattgcttgagctcaggagttcgagaccaggttgggcgagaccttgtttctatttaaaaaaagaagaagaaggctgggcgcagtggctcacgtctgtaatcccagcactttgggagtccgaggtgggtggatcacctgaagtcaggagttggagaccagtctggccaacaaggtgaaaacctgtctctactaaaaatacaaaaattagccaggcatcatacagacgcctgtaatcccagctactagggaggctgaggctggagaatcgcttgaacccaggaggcggaggttgcagtgagccaagatctagccattgctctctaccctgggcaacaagagtgaaactccgtctaaaaaaaaaaaaaagaaaaggagggaggaaagtagaaagaaagaaaagaaagaggaagaaagggagggaggaaagtagaaagaaagaaaagaggaagggagggagggaaagaaagaagaaagtgagggaggaaagtagaaagaaagaaaagaggaagggagggagggaaagaaagaagaaaggaaggaaagtgacatttgaccaaggttttgagggctgactacgggtttgagaggtagaggggattgggagagcgcattctgagtgagaaaacgtgctgggagatgggtaacagcagcgtgtgcggagaaactcagttgcggctgaagaataggatccaggggtggagaaggtggtggctggacacaggtgtgttgtgtgtaggataggcatgaagaggagcggatagggcaaagctagaaggcttgggcaaggggaaatgggattggagaggtgactggcgctgacccaagagaggacagacggggtgaccagagtggaggatgagccaagccttggcacagacccaagcgggtggaggccccgggcaacaccggtcaccacgagggcctctacgaagggctctgtcctcccacggggattggaggtgggtaagtgagacagggcggggtggagggtgaggccaggcagcggcggagagagaaagtc

SEQ ID NO: 25153 - DNA, 881 bp, Artificial sequence
  DNA replication origin
gcctggaggaaaggaaatgcagagagccggggagctggtgcgggacggccccggcgcgcaccctccgcccgctcggaccttcccttcaggcgaatgccgctcccggcgcgtggtacaagcgaggccctggagaccgtgcgcccctcccgggaggtgccactgggccgcgggcctggagcgtccgggagccccagcggctgccggcacctgcgcggccaccccgggcctcccgtgggaaccgcgcctctccgcctcgggggtgcgcggcgcgttcctggggtggggacgcggggtgcctggtcagggctggaccgatgcagaggggggccgtgggcgggggccacggggacgggcgtctgcggactgcggcggtcccggagtcggctggggaccctgtagggggaggcttggtcggcggccacccgccttcccgccctctggcgcctagggtcgccgccttcggccctagctcaaggcagacgcgttccccgggaacaacacgttgagggcgcccaccctgcgtgcccggggccacccggtccctgccctcgggcggcaggagaggtcgagcttccacggccctcggagtagccccgtgaccagacccggactggccttggagttgaaggggttgtttgccaccaaatgaaccgaaaaaactgaacttttcagacttcggaatggcagatatgggcttggagttcagtgaaattgcagcggaggcggtggtgttctgagtaattacaagtaaaattcttctttcacccgtcttttcctcagcctcgcccgccctagcaggcctagcctggccctagcagggggctcctgctctgggagctgcccccagcagagcagaggcagggctctggcagcaaccccct

SEQ ID NO: 25154 - DNA, 807 bp, Artificial sequence
  DNA replication origin
gtgggcgcgtctctccctatggcccacaggtgaccaggagacccgcaacaggacagccgggtgcgcctcggtgcaccgcagagaacacagcgtgagggcgccccgccgggcggctcaacatgtgagcaagaaaggaatggcccatccgcaactggcagaagttcaagaacaacttgtttcagagttccagaggggaaaaaaagagagagcaattaaaaatacttctatgtggttgaaaaacaagttcagaatccgagtaattagactcacttttaattcagcaagattccttttaaaaaagctattacatcagatgtttaaaaactcctaatataggctttaaaaaaatcaagtctctgaagacactttgaaaacccaaatgctctaaaagtgttaattgtagcccatttaaaacccaagccagcatttctctgcacagggaagctccataagcagcctccataaccaacgtgtgtatgcagtgcagtgtgcgccgtgcagtgtgcgtggtgcagcgtgtgagccctgaaagtgcagtgcagtgtgcagtacagtgtagtgtgctcagggcagtgtgcagtgcagtgtgtgtggagtgtctgtggtttgatgtgtgcatgcatgcaaagtgcatgtgcagtgtgcggggcgggtccatgtgcagtctggtgtgtactatttggtgcaggtgtccagtcggtatacacgctgtgcagtgtgtatgtgtacatacatgtcgctgtatcgcagaatgacataaacaatgtgcgcccttcagtacaaaacattaaacaagtactagcgtgc

SEQ ID NO: 25155 - DNA, 868 bp, Artificial sequence
  DNA replication origin
cccagcacatgcccgtggcaacaccatggcagccattttgaggtctttccatcctttctccccttatgtatgtatattttcaaacgaagctatggtgtgtctataccattttgagccctgtttttgctcagtctgctatgggaagcgttcctcccgtcgcacagagacggagatggggaaccccgggagcggtagcaatggtgccccacggtcatcctgcaggaggggctggaaggggcttggtacaccaagacttcatttatcaaggatctgggggccagaggagatggtctgtgcacctctgaggagggtataagtcattaatttttagagaaatacagttcagggaaaaaacacccaggtaagcaccaacatgtatgtcattaagcattttagatgaatcagaagattcctcaagacaagtcttctgagtgttcgttttccctgcttgcggcaaatgacctctggagaccctgtggcactctagattccagatcaaggagcacttatattctctctgtgtgtgtgtggtggggatcgtggctgtgggcatggcccagtgggagtctcatatcctgtgtatgtgtgtgtgtgtgttgtggggatcgtggctgtgggcatggcgcagtgggagtctcatgtcctctgtgcgtgtgtgtgtgtgttgtgccgatcgtggcagtgggtgtggcccagtgggagtctcttatcctgtgtgtgtgtgcgtgtgtgtgtgtgtgtgttgtggggatcgtggctgtgggcatggcccagtgggagtctcatgtcctctgtgcgtgtgtgtgtgtgttgtgccgatagtggcagtgggcgtggcccagtgggagtctcttatcccgtgtgtgtg

SEQ ID NO: 25156 - DNA, 1039 bp, Artificial sequence
  DNA replication origin
tgggggagctgtcacacacacctgtcagggaaggtaggggggctgtcacacctgtcagaggaggtggggggactctcacccacctgtcagaggagatgggctggccatctttctgccaggcagcctgggattccggggcagtgtcgtctgagcaggagagccgcaccaactgccccagggctgcctgcaccaacgagggctccacacctgccaagctaatcctggagaggtgggaagtgagatctgctgactggcatgagcgccaggaccagaaccaccctaagcagtgtgttccatgacagacagcttggggcccatcctgtcacaggcacttttggggctagagggtccctatgggaggcagagccccagaagcccatggattcaggaatctaccctccccaacctgcccccggctcccccaagcatcactgcctcaacctgttcttgtagcagcaacaaggtaggtgcaaagcccaaggggtggggagaggtcgggagggacggcacacaccaggttcatgtgggggctaaactacacgctcgacccatgtggaacacaacgcttttaattttgtttttaaccttcccaaatccttcattaatatgatccagtcccaggagtcatcttgaccagaacccacacctgtgaggtatacagggcagaaggtaatgccaccattttacaggtcaagaaactgaggcttggagaagttgggtgacttgccaaaggtcacgaagccaataaacttttccagccagacaggccccggggtatactggcgagatctgatggagaaccccggagccaccatctgcacagatgtctattagacatcagagtagcctcaagtctctgaagccccagcttctccatctgtagaatgatggcaacaaggcccaccaggcagggctctcgggagaaacagaagttagggatggggagggagggccggctgacttcaggggtttagctccaactggcatgctccttgtctgggcgtcctaaccccctcacctggggaaggtgggcctcacc

SEQ ID NO: 25157 - DNA, 1969 bp, Artificial sequence
  DNA replication origin
aaccaattacaactaaagcttgggctaggacgctccaggtccgggcgggggcgaataccgggtttaggaaaaggggcggtaaagagcgatgacgggcgggtatactaaaccaatcagagaggagagctgccgccccactatccaatggataggttagaagtatgaaagagggtgggcctgttgtcatgggggaggtggtggcgcttggtggccactggcggccgaggtagaggcagtggcgcttgagttggtcgggggcagcggcaggtgagtgccggtaacgcgggtcagagatctgggggccgtcgcggggcggaatctccagctcagcactccggaggcggaggccggaggaagggggcctggacttcgggtcggggcccgggccggggccggggccagggcggaggcggcgggggcggcggcgagttcgcgctgactgggctagggggagaggggctgggcttctggctgcggagttctcccgaggaaggtaggctacggccggacccgcgcgggtcaggccaggaggtcccttgggacgtccagctgctccggtctagcgcgctgaccggcggccactgtgtgaggagtaggtatctgaggaaacggaagcggccagggtcccagagagggggtgacctgtaacgacctgcttcaagggcggggtgtcttgggaatacccaggacggcttgggtgccagggagaaaaggaatccgggaagcccggcagcggccggtgaggagagagcggggtggggggcaggggaactgggagtggccccggtccgagggaggtaggaaggccgagggtggccagggtcccgggtgacagggagcagacttgctccaagtaggggcgtctgaggaaacgctcggagggggttggggaccctcctgagaaaagcggctgtccaagggagggggctcctggagagatgaggagcagcaggtcttcggagggtcggacgagtagagatcttgcaccgcctgggggaagaaccggagctccctgcgcccccatagctgagctgggatgggagacccaactggcctggccgctccggctctgaggatccctaagggaccaggaaagaagtcctcgaggagtggctcgcgtttgagaccggggtgaggagccagcaggggagtggaagttccctcggtcggagaggagtcatgcaaaatgggacggagatgggcggaggtgggagagaatccctataggaggggataaggtagagaaagaaagttgcccgaggagagagtaatggtttcgtggaactggctaggacagtagatatatgagaaattaacagtggagccatgtaggttcacaggtcttcacaaatagaagaaacttcagtttcgtaattaatatcaagatgacatctaggaccaaagcaaagctcctaaaagcaaggttaagtgacttgttttagaaaagaaatttgttttaggatgatggcagtaatattaggaaataggttcattgacagggtggggaatttgggagggaaaaggggaggagtagctgaactaaaggagtagaagtaaatacttatcagaaagagggtaggcatactcggctaaagtgaaaagaagttttgagttctagttccaccacttagctaagtttctgtgcagtttcctcatcagaatactaatagtaatagttcctactttataaggtggtggtggtgttttttttttcatgtgagttggtatttgtagagcttttaggatagtgactggcacatagtcgtgtgtactggattgttcaatagacgataaagacctgacttcttaaatagaaggtaaagacctggctcgcagatgttagcttgcatcaaaatcacctggagggcttggtaaaatgtagattgcttggccccacctgggggtttcagtaggtctggggtggggcccaataatttatatttatctcaaatgatgatcacgttggtca

SEQ ID NO: 25158 - DNA, 958 bp, Artificial sequence
  DNA replication origin
cttcctacctccctcggaccggggccactcccagttcccctgccccccaccccgctctctcctcaccggccgctgccgggcttcccggattccttttctccctggcacccaagccgtcctgggtattcccaagacaccccgcccttgaagcaggtcgttacaggtcaccccctctctgggaccctggccgcttccgtttcctcagatacctactcctcacacagtggccgccggtcagcgcgctagaccggagcagctggacgtcccaagggacctcctggcctgacccgcgcgggtccggccgtagcctaccttcctcgggagaactccgcagccagaagcccagcccctctccccctagcccagtcagcgcgaactcgccgccgcccccgccgcctccgccctggccccggccccggcccgggccccgacccgaagtccaggcccccttcctccggcctccgcctccggagtgctgagctggagattccgccccgcgacggcccccagatctctgacccgcgttaccggcactcacctgccgctgcccccgaccaactcaagcgccactgcctctacctcggccgccagtggccaccaagcgccaccacctcccccatgacaacaggcccaccctctttcatacttctaacctatccattggatagtggggcggcagctctcctctctgattggtttagtatacccgcccgtcatcgctctttaccgccccttttcctaaacccggtattcgcccccgcccggacctggagcgtcctagcccaagctttagttgtaattggttgagggttgggcaattcgaagttatgataggctgctaaaagtgtctgttaagctaactggcaagagacgtgacggttaaggttgattcacgcttgtgcacagtttggttgcgcagtagaaagcaaaggaggggcagacgctcacattcgtggtt

SEQ ID NO: 25159 - DNA, 1403 bp, Artificial sequence
  DNA replication origin
tagcgagaactcggaggaatcgagggtggagtcgacggccgacgacctgggggacgcgctacccggtggggcggcggtggcggccgtcccggacgcagcccggcgagagccatacggccacctggggcccgcagagctgctggaggcctcgcccgccgcgcgctccctgcagaccccgtcggcgcgcctggtgcccgcttccgcgccgcccgcgcgcctggtggaggtgcccgccgcgccggtccgggtggtggagacctcggccctgctgtgcaccgcgcaacacttagcggccgtccagtcgtccggggcccctgcgacggcgtcggggccgcaggtggataacacgggtggggagccggcctgggactccccgctgcggcgcgtcttggccgagctgaaccgcatccccagcagccggcggcgagcggcccgcctctttgagtggctcatcgcgcccatgccgccagatcacttttaccggcgcctatgggagcgcgaggcggtgctggtgcggcggcaggaccacacctactaccagggacttttctctaccgctgacctggattcgatgctgcgcaacgaggaggtgcagttcggccagcatttggacgccgctcgctacatcaacggacgacgcgagaccctgaacccacccggccgcgcgctgcccgccgccgcgtggtccctgtaccaggccggctgctccctgcgtctcctctgtccgcaggctttctctactactgtgtggcagtttttggctgtgcttcaagagcagtttggaagcatggcaggctccaacgtttacctcacgccccctaactcgcagggctttgccccccactacgacgacatcgaggccttcgtgctgcagctggaaggtaggaaactctggcgtgtataccgaccccgagtcccaaccgaggaactggctctgacatccagccccaacttcagtcaggacgacctcggtgagccggtgctgcagaccgtgctggaacctggagatttgctgtattttcctcggggcttcattcaccaagctgaatgccaggatggagtccactctctgcacctcaccttgtccacgtaccagcgcaatacctggggtgacttcttagaggccatactgcctctggcagtgcaggctgcaatggaagaaaatgtggagtttcggaggggtctgccccgagacttcatggattacatgggggcccagcattcagattctaaggatccgcgaagaaccgctttcatggagaaggtgcgggtcttggttgcccgcctgggacactttgctcctgttgatgctgtggccgaccagcgagccaaagacttcattcacgattctctgccccctgttttgactgatagggagagggcactaagtgtttacgggcttc

SEQ ID NO: 25160 - DNA, 1030 bp, Artificial sequence
  DNA replication origin
tttggatttttagtagagatggggtctcaccatgttgcccaggctggtcttgaactcctgagcccaggtaatccgcccacctcagcctcccaaagtgctgggattacaggtgtgagccaccatgcccagcctcaatgcgatagtattaaaaagtggggacttggcacctgggggagaagaaggggaggcacaggaccccagaaagtgtcctgagcaggaggcttgtgtccttcggggtggggcaccagccctggtgctgacctgtccttgccctgacctaggcctgtcctgctgggccaggcaggggctatggcagatgagcgagacaaggtggccaggccgtgagccaggaacagtgggagtcaggaatgccgaatagtgtgtgcttgggtcggggaaaccctggataggacccatgggggatggaagggagctggtgggggagctgcccacacagacaggcctgggtggcacccaagaggtgtaggggtcaggggcctcagactcatggcataagacaggcatgaggtgttgggggtctgggtgagggggttgacaaactgccaggctggagcagcgggttatctggagggcccaaggtgttgtgggatcaggaagtgggggacactggagtgtttatggggtgctagaatagctgtgggatgcactggtctaagttggggttgacagtggttgggacatggggaggttgatttgtgtcggcacaggggattgtgggaatgggggctggtagggtctcaaaaaatggggcccaagctcagaaggagaaggcaaatgaggattagggaggggatgctgtagtttagaatgaagcctctgcctcctctgagcttggagcctgggaaaggggccagggtgggtttatgatggtacaggcagtgctgggggctcccaacaggccccgggcaaggaagaggctgcagaatgcccactctgctgttacagaccaattacactgagacagcagggtttgcagcacagaaagagcttcatgatcacagggcaccta

SEQ ID NO: 25161 - DNA, 1691 bp, Artificial sequence
  DNA replication origin
aactcctggtgctcaagccatcttcctgactcagcctctcaaatacctcaaaggactaccggagctccccatgcatcgcgcttttttctactttttcgtaagctattggtttcaccagaggtgtggtgtttttttttttcatcacttaagctttaggcccctgccaagcccttgtacctgattttataatttcctacctgtgtaattagagaaagctataaatgtgtaggcttcaaacccacaaaacctgtgtttgcctctgctcctaataaggctgtcctcaaggtaagcctttttatctcgttccaaatctctcatgtcccacgtcattaatcatacaattccctgtcagttctaattacctttgtataacacctcaagtatgttctgtgcctagaactctcaggaagtaagaaggcaaataattctgtgtctggaattggttccttctggtggattcttggtctcgctgacatcaagaatgaagccgcagaccctcgcagtgactgttacagttcttaatacagttctgaaaagtagtgtgtctggagtttgtttcctctgatgttcagatgcgtccggaatgtgttccttctggtgggttcatggtctcgcttctcaccgacttcaagagtaaagccacagaccttcaaggtgagtgttacagctcataaaggcagcaggtccagagttgtttttcttgttcctctcagtgggttcatggtcttggcttcaggagtgaagctgtataccttcacggtgttacagctctgaaatgcagtatggacccaaagaaggagcagtagcaaggtttattgtgaagtacaaaagaacaaagcttccatcagcctggagcggaactcacgcaggttaccactactagctggggtgaccagcttttattcccttatttggccctgctcatgtcctgctgattggtccattttacagagcgctgattttccattttacagagtgctgattggttcgttttacaaagtgctgattggttcgtttttacccagtgctgattggtgcgtttacaaacctttagctagacacagagtgctgattggtgcatttacaatcctttagctagacaaaaaagttctccaagtccccacccaacccagaagcccagcggtcttcacctctcaatagtagctaatggttaatacttacaagaaccctatcagtaaattaaggcccagagaatttaactgattttctgaagatcacacagctagaaagtggaagttgggcaagatggctcacgcctgtaatcccagtttacttggaggctgaggtggcagggttgcttaaggccaggagtttcgcaccaacctggacaacatagcaagaccctgtctctaaaaagaaaaaggggatgggcgcggtggctcacacctgtaatcccagaactttgggaggctgaggcgggtggatcatgaggtcaggagatcgacaccatcctggctaacacagtgaaaccccatctctactaaaaaaaaatacaagaaattaactgggcatggtggcaggcacctgtagtcccagctgctccagaggctgaggcaggagaatggcgtgaaccccagaggtggagcttgtgagaggtgacagcgtgctggcagccctcacagcacttcctctgcctgggctcccactttggcggcacttgagaagccctt

SEQ ID NO: 25162 - DNA, 830 bp, Artificial sequence
  DNA replication origin
taatccgcccacctcagcctcccaaagtgctgggattacaggtgtgagccaccatgcccagcctcaatgcgatagtattaaaaagtggggacttggcacctgggggagaagaaggggaggcacaggaccccagaaagtgtcctgagcaggaggcttgtgtcctagggggtggagcaccagccctggtgctgacctgtgaccttgccctgacctaggcctgtcctgctgggccaggcaggggctatggcagatgagcgagacaaggtggccaggtcgtgagacaggaacagtgggagtcaggaatgctggatagtgtgtgcatgggtgtaagaaacccgggataaggcccatgggggatggaagggagctggtgggggagctgcccacacagacaggcctgggtggcacccaggtcaggggcctcagactcatggcataagacaggcatgaggtgttgggggtctgggtgagggggttgacaaactgccaggctggagcagcgggttatctggagggcccaaggtgttacgggatcaggaagtgggggacactggagtgtttatggggtgctagaatagctgtgggatgcactggtctaaattggggttgacattggttgggacatggggaggttgatttgtgtcggcacaggggattgtgggaatgggggctggtagggtctcaaaaaatggggcccaagctcagaaggagaaggcaaatgaggattagggaggggatgctgtagtttagaatgaagcctctgcctcctctgagcttggagcctgggaaaggggccagggtgggtttatgatggtacaggcagtgctggg

SEQ ID NO: 25163 - DNA, 1200 bp, Artificial sequence
  DNA replication origin
cttcagcccgccgctgcactgtgggagcccctttctgggctggccaaggccggagtcggctccctcagcttactgggaggtgtggagggagaggcgcgggcgggaaccggggctgcccgcggggcttgcgggccagcgcgagtcccgggtgggcgtgggctcggcggccccgcacttggagcggccggccggcccgcaagccccgggcagtgaggggcttagcacctggggcagcagctgctgtgctcgatttctcagcgggccttagctgcctccccgcggcgcagggctcgggacctgcagcccgccatgcctgagcccccgcccccgccgtgagcttctgcgcggtccgagcctcctcaacgagctccgctccctgctccactaacgcccagtcccatcgaccgcccaagggctgagaagtgcgggcgcacggcgcgggactggcaggcagctccacctgcgaaccccgtgcggcatccactgggtgaagccagctggactcctgagtctggtggggacttggagaatctttatgtctagctaagggattgtaaacacaccaatcagcaccctgtgtctagctcagggtttgtgaatacaccaatcggcactctgtatctagctaatctagtggggaggtggagaacttttgtgtctagctcagggattgtaaacgaaccaatcagcaccctgtcaaaacggaccaatcggctctctgtaaaatgggccaatcagcaggatgtgggtggggccagataagggaataaaagcaggctgccagagctagcagtggcaacttgttggggttcttttctacgttgcgggaaggtttgttctatttagttttgtaataaaggtagctcagtttttgggcccgcactgctgttgtgagctgtaacactcattgcgaaggtccgcagcttcacttctgaagcctaccagaccacgaactcaccaggaggaacgaacaactccagacatgccgccttaagagctgtaacactcaccgcaaaggtttgcagcttcacttctgagccagcaagaccacgaacccaccagaaggaacaaactctgagcacatgggaacatcagaaggtacaatctccagacacgctgcctttaagaactgtaacatctccgcgagggtctgtggcttcgttgttgaagtcagtgagaccaagaccagtctggaaacac

SEQ ID NO: 25164 - DNA, 1122 bp, Artificial sequence
  DNA replication origin
cgcgcgcaccggctcgcgccgcacccccggccggagaaagtcgcgcttgttctgcgccaggcacagcagccgcccgggctcggtgtcgtggccgtccagcacttccagctccacggcgaagggcgtccgcacgtcgcgcttcaccagccgcaccaaggctttctcgggctccaacgcccacagcagccccatgggctggagccccgcgaagctgcctcccagcgcgggcgcgcgctccaggtccagctcgtcgcgggcgtcggcacggtagcgcgcgtgggcccggaagagcgcgccctcttcgtcgcgcagggacgtgcgcagcgtgactggctgctccggggccaggccgcgcactgcgatgcgcagcggctcgtcccagcagcagcggcccgcgggctccaggatcagcgtcgctgccatcccaatctgggtagaacaggggcgacccagctccgcggagtcagtgggcgggcctggcggctttgccgagcgctggaaagtagtcgagggcggagcccttaacactactcccattggttggacttggggacaggctccaggccgctgcgtggggcgcctagaatttgtgcaaatacaccagtgtcccaaatgaaagagtatctgctgaaataagagttaatgaccaatccggccgggggcggtggatcacgcctgtgatcctagaactttgggaggccgaggtgggtggatcacacctgaggttaggagttcaagaccagcctgaccaacagagtgaaacctcatctctactgaaaatacaaaatagccaggtgtggtggcgcatgcctgtaatcccggctacttgggaggctgaggcagaagaattgcttgaacccaggaggcagaggttgcattgagccaagattgcaccattgtactccagcctaggcaacaagggcaaaactccgtctaaaaaaaaaaaaaaagagttaatgactattcctgcaatccaatgtggtgagtgtcgaaatagaggcacaaaaaccactgagagctaaaggattgagagagatacagtccaagaatctagattttgaaaaagcatcccaggtgattgtactcaggtgaccccttggagaaacatggtcgtaatccgtc

SEQ ID NO: 25165 - DNA, 1444 bp, Artificial sequence
  DNA replication origin
gctggagatgtggctggggtttgtctcacagtggaggcaaggaattgcaacttttttctgttattgtacaccttgaaggtgaggttaattaagtcctgttgtggggtttgagggccagattccaatttttggagttttatttaatgtcgggagcagattgggtagtaaaatgtatattgagaataagacggccttttgaccttttagggtctagggctgtaaagcgtctcagggttgctgccaaacgagccatgaactgggctgggtttttatatttgatgaaaaagagcctaaatgcttctgatttgggataaagaaaaaggagcattaaccttgactatgcctttagcttcagccacctttttaagagtaaattgctgggcaggtgggggagggctagtcacggaacgaaactgtaagctggaccaggtgtgaggaggcgaggtgataaaaggattatagggtggaggagcagaggctgaggaagaattgggacctagctcggcctggcgaggagcagcctggggaggaggggaaaggtcagatgggtctgtagaaaaggaagattagaaagactcagcgacgcttggggttgggactgaggggacaggcggaagggaaagaaggaagatttgggacgagttgcattggggacaaagactaggaagggactgatgtgtaaaagaatgcctggacgtcaggcaactcagaccgtttgcctattttacgacaagaattatttagatcttgcaggatggaaaaattcaaagtgccgttttctggctatttggagctactgtcgagtttgtattggggtcaagcggcattgcagaagaaaataaggcatttaggttttaggtcaggtgtgagttgaagaggttttaagttcttgagaacacaggctaagggagaagaaggaggaatggagggtggaaggttgcccatagtgaaggaggcaaacctagagaaaagagaatgtagagacatggagggaagggtttcgggggttcttaccctccagaaaagcgggaaggggggtcagggcacggaaataagggattggggcacagagataagaggttggggtgcagaaataagggattggggcacagagttgagaggtcggggtgcagaaataagggattggggcacagagataagaggtcagggtgcagaaataaggaattggggcacagagataagaggtcggggtgtggaaataaggaattgggggttcttgccccctagaaaagcgggacttgccgctaagggtgaagaaggggttgaggggtacttgcccctcccccagaaaggcagagaaggggtagagacacggagagaaggggtagagacacggagagaaggggttggggtacttgccccttccccagaaaagcagagaagggatagagacaaggagagaaggggttggggtacttgcccc

SEQ ID NO: 25166 - DNA, 846 bp, Artificial sequence
  DNA replication origin
cagcgcctgaaccgctgcgggccgccgcggccgccccttcccaccctcgcctctgctgtctccagcctcgcttctccgactttcctgctcctctgctgccttcgtttctggtcctcggccgtcctcgccgcccgcccagaggagtccccgcgcccgccaagaagccgctttccgctggcccgcagccgccgcgacttcggcacagtttctccctctggctagtctcccaaacggccgctcctcgcccgcgggaagaccaggctgcgaccgcgaacgcccgatcctctccaggagccgcagcgagcgcccggcggccacgccccgcgaccacaccccggcggctctcggcccagcgcgcctgccttcgccgcccgccgtcgctcctcgcccgctgcacgacgacgcgacgcccctgctgcaggcggcggacccgaccggacccagacccagacgcaagatggcgacggccgcgtgactgcctcagcgtccccgagctcggctccgagtgcacctacggactgactgtgggggcagagaagggcgagatcaggactctgtctttgttaatcgtgactgcatgaaggtcgcctccctcgggcctacttggtgggagtgtctggtattgttctaaggccaggagcacggtgagccacagtctgttggtagaatttggcgtcttgatagttgagaaaatggcgatgacactgttggaagactggtgccgggggatggatgtgaactcccagagagctctgttagtctggggcatcccagtgaactgtgatgaggctgaaatcgaagagaccctccaggctgcgatgccccaggtctcctaccgaatgcttg

SEQ ID NO: 25167 - DNA, 1007 bp, Artificial sequence
  DNA replication origin
gctatgggactggaagtgaaggggcctccagaacctcctggccctttcacttcacccatgccaaatatggcttcttcaagccagaatccaggccccataaaccaaactagaattctggcctcttgccaactcttccctcaggcaaagcacagccagagaaggggcagcaagaactgccttaatctcccttgctctgtgtgggtctggtgacaccctccaccttcccacgctctttcagtgttgctatcattcctatcagcaagagcttccagagcaaccaggtgagggaccttagggccttgggaatttagggggtggggataggggatgtcaagatgcctcgttttgggataaatgcactcgggcctctgaaaagcaggaggcccctggtccctgagaggatgttaaaaattaaatactaagaataaataaatagctcccaaatgacacgagtcaaggaatgaaggctcctgtccaatcgagttaggagacctctccctcccagggaaggatccagaaatctccaaagtgcaggcctgggggctgggttgtggatatcgacactgggtagggtgcggtggggttaggtgtagctgctgaggtcagagcagaggcaaggaggctggccccaggaggggcaggctgagcctctccgggacctgctcaaggcgaagcgcccttggcagcctccaggacccaaaggtattcagccaaaaaggtgggaagcaggaagagccaggcttgtcaaaagctctctcgggcctaaccctgcagcttccagcctccgtacagctcccttccctgcagcaggatgagtgctttggacaagaacgctagcccctcccccaacgctgagaaaactttctagccctagcaaggccgccagcaagcagcaaagggagagtacctgccgcggcctccctcccaaggaggaggtggccactcaggacacggtcacgggagcagctcagacaggcctagagactgcagggacagcacaggtgtca

SEQ ID NO: 25168 - DNA, 843 bp, Artificial sequence
  DNA replication origin
gctgggacccccgcgggctggtgcgcggagggggcgggggtggggtggaggggagggggaagaggtacaggcggtgtccgcctcgtttctggttggctcagcgggtttctagggctgtgacgtcatggggcagctttcggaaaatgacgcgagctggccggccgcggctgtgcagcgtgggggtgaaggtgaaggctggggctcctcgcgcacccgcgctgggggcccccgggtgggctaggccggttctgagcaacccccacccggctgcagggtgttttacaaggtgaagagccgcagtgcgcatatgaagagccacgcagagcaggagaagaaggctgcagcgctgaggctgaaggagaaagaggccgctgctgccgccgccgccgcccaccagcaggccctgcgggaggagagcggtgcgggcgacaagggctgagcgcgggagccaggctggcccagtcctgggcctcggcccttcccgcaccgccgccagcgcccgcagacaccctggcatctcaagagggagtgaggagaggattgcagggacttttccctgcgaaacaaatgagacaatgacataaacggctcttttatttatgaaggccctgggagcagcgttaagggctccaggatccagctctctttgcatttggtctgtcggaagctgtcctcgtgctttcctggaccgggagagtcccggtcccctcgggagggactccaccgcctctcacactccgatttctgctgctctgctgccccgcagtcttttccctttatttgcttccccctcctcccctcggcctccaggaagccaccgtggccggccaagcacaagctcac

SEQ ID NO: 25169 - DNA, 1269 bp, Artificial sequence
  DNA replication origin
agagaggattaagtggaagtagctagcttatagatgcctttggccaattaacctttgactgtgacctcacccatggtgtagctctctggtgccccctggtgtctgtggatgcaaaatgtttgccctaggctggccagccttctgtactgcttcctggggaggcttctccctggctaggctgtgtaggaagaggaagtcattgtagagatcagactggcagccagcgagaggtcagtctgtccacgagtatctaccgaacactcgggcgtaaggccttgtactgggtcctgtgagggctccaagaatgtacaggacaccatggtctgttctatagagaatgcaaggtcattagggagttgacatgaaagccttggagttgaaaaaacagaggttcccggtagtgtgggatctgcagccagtgagcaaagccccagcagctagcctgggatggtgaggactgtattcaagaggggtggggccagagctgagccgcagcgatggaggagggcggggggcagggaggacacaccaggcggaggaaatgactggtgcaaaggcctgtagatgggaccgtgcagggagagtgaggggttgggaggtaagcagtcagctaggatgcaggtccaggcacatgggtggtgggaggtacaaatggaagcggaaccgccttgaaccctgaggggagggttgcaggttttatctcacattgcaggagggagtcagtaaagagcaaagatttttttttttttttttttttaagcaaaggagtgttttgatcatgtggggccttaagaagaccaacttgggcctgggcacggtgactcacacctgtaattccagctacttgggaggctgagggaggagaattgcttgaacttggaggttcaactccttgagccgagatcgcaccactgcactccagcctgggcggagacagagtgagactttgtctcaaaaagcaacaacaacaacaacaaaaacaaaaaaaaaactagcttgggagaaactgaggcagaaaatccaaagaggaagtgagacgataactataaaacagcgatccccttcaccacctccctagtgtgctcaaagtttcagtctctttactagaaaaccacagctttatgttggagttagtgttggagcttctgggggcaaggatatggctttggtagtagaagcagtaataataatctttatcgagtgccaggctctgtgcattattttatccagttctcacattaaccgtaggagacaggtagtgatagcccc

SEQ ID NO: 25170 - DNA, 1833 bp, Artificial sequence
  DNA replication origin
cgggaatccggctgctcctcctccgctggagagaaacgtggtgtccgtggggaccggctgacgtgacggagcccaggcccggaaggcgcggcgaggggctagccagctgagggaacttggcgcgggagccccttcccctgccagcgtgcacgggaaagtgggcctggacgcggcgtccacgccaggagtttgggggacagaggtgcaggggcgttggggaactggggcaaatgcagtcagcagaggcctaggctggagcgcttcgcgcgggcgggcgcacctcagacctgtcatcctcccgcgcgcccccgcacgcccgcgccgccgcagccctcccagcccgcgcggtgcctcgcggggagctgtgttccctggtgcctggcggcagcgccgaaacccgggattcggccgggccctgcatatggccggcttggtggagctggtcacgtcgcctcccaagtcgcacatgcaggaccatgtgtgtcaggttgcccccaaggcctctgggtaaaggtctaggggaggaaggggaacttcgtgtgccctggggccttcaggcttcagccccaaggcgggccgacatggaggaggtacctgccacagaaagtggaggccgggtgtccgtcccagcccagcctccagcgagagctggtgagaagatgaaaggggaagttatatgccccatttaaaactttgttggtcacaactacggtggctgcttcctgtttccaccatcccacgtgggacctgtgtgccagcctgtggagcctcgcgcggggggcggtgggatgggggaagagaggctggccacggaggccccggtggcccgcgtatgcaggggatccctgttggcagctgcggctgggggagggaggggatgtctggcttgctccagcagggggagcctggccaggtgatctgggatcttcttgttcctgtagcttcagggttgagactgaaggcctagtgaaggtggaccgagaagccagtcctccctagggggcctcagctgaggggagaaaccacctgtcttgctctagagcctcccaccaaaggtgtggcacacgccccttttggatcagagaaatgcaccctttccttgggtgttaagtggcttcagaacccagggaaaaggagaagccttcccgggttgagaattcgtaggtcttccttttccaactgctctggacagtgaataataggagcgtaaacattcaattactgtgataaaccatctcgttgcatggccctggtccagtctccactctaattggattggcctctggctggttactctggtccgtgtagctcccggggggacaagggggtgaagaacctggaggatgcccccaggtcatacagcttgccagcttgctctggaacagcctagccactgccagtgtggcctctccaagtgccagcagaacccccactcccgtgactctgtcagctcctcaccccgccccaggaaagagcgccctggagtgcccatggggatgagaatttaatttttacatgtgggattttaaaatagccccagtgtttgaccctgtgtgctgctgctttcaataagtggaacacaagaaaagacaacatgcagttgtggattcagctgagggcctcctgtgtctagagtccccagagaaaggctgcccaggggtgccaagacctctgacagaagaggggaaggggaatgggcccagtccaggaatcttcaggttgagagcccctctcttgcatttgggtctcccagaagaaaactttgctcatgctggggtggggacagccacaaagtggctgggggtttccagcttatccttctaatcctgtttc

SEQ ID NO: 25171 - DNA, 722 bp, Artificial sequence
  DNA replication origin
gcgagcgctctgcctccctccgtgtcacccccagtcctgcgatgcagtgtcaggattgcacggctctgactcatcggttgagctcacagcttgaaaaaaaaaaaaagagagagggcgagaggcaacagcggaggaggaggactctggcgtgctacaaaggattgcacaactcgaggctgggagcgcggagcgcccagcggccggccggcgcgcgcggcaccgcggcgagcaggaaccagctctaccacttcatcagcacaactgtctcggggcggcctcagccagcaggcccggcgccgcccacttcctgcgaccaaataaggccggggaaggcgtccttaaacctcaggcggcggccggggctggggatttccagcagacctcacctccactcacgagtcggtcgccgtccccatcccccgcccaggctggcgcccccgatggctttgctggcgggccacgctgctagttcctttcacaccaaggtcaggaggagacggtgacgaaatgtttggaaacccattgagcctgccaggaaagtgtgtgtgtgatgctggggaaggcacaagtcgctttcttccacaaagaaactctctctggttttggatacggtaaatcatgcacaatcctctccatggcattttattaacagactctccgagtttcactttctggctcaaaagcgtcctggtgcgtgtaaaggttattgagaaactggcctc

SEQ ID NO: 25172 - DNA, 930 bp, Artificial sequence
  DNA replication origin
gcagagtggggagacggcgcctggggccaggggcgcgcggagccgggggcgcgggcggggcggctggctgcagggccctgcgcgccaccgcgcgagccgctgggtcacagcccgggccgcacagcccgggccgcaccgcccgctccgcgaggaagtgacgactgcgccgtcccgagagcaacaaagttagagtctgcgggccgcactcgcctgcgccccgcacccctccgagcagcccggggatccagcacgcaggtaagccgcgggctcggcgccccctcccgccaccgggcgccggcgtggggctcggaatcgttccggggctcgggctgggccgcgcgggcgcggatgtggcgggccgggttgggccgggcgctggggtgccggggtgctgcagggagggagctcggcggccggggtcggggcgccgggctgcgccggtgttgtcgccgctttgccgcgggacttcaaacagcaagggctgcagcggggccagctccaggcgccgttggcctgaggtagggtggggggaaggggctttccggggcctacgtctgcagccagccctccgcccagcgcctccatccctgcaggctgggcgcagctctcggcccctgcccggtgcttccctgggaaatgacctcttcctcttcgcagcccttgtcgagggcgcaggaaggaagttaaaggaactttccccggacttttatttgcttggccttcctgggacgaagagcagagtagctcggaagtttgggaaaacaaccctacgcattttcagaaaaccaaaccggaattgtccccaagcccccttgaaatgaatcgctcctgactccccctttacccttcccaaccatgtcccaaacctgacagtgatcgctaaggcctaacactttgcaatttagccataaaaactgtcagcacacccac

SEQ ID NO: 25173 - DNA, 833 bp, Artificial sequence
  DNA replication origin
ccccacgccggcgcccggtggcgggagggggcgccgagcccgcggcttacctgcgtgctggatccccgggctgctcggaggggtgcggggcgcaggcgagtgcggcccgcagactctaactttgttgctctcgggacggcgcagtcgtcacttcctcgcggagcgggcggtgcggcccgggctgtgcggcccgggctgtgacccagcggctcgcgcggtggcgcgcagggccctgcagccagccgccccgcccgcgcccccggctccgcgcgcccctggccccaggcgccgtctccccactctgcgcgccctcggctgcggggtagcgggcagccctgcgctgccggccgcctagcctgcaccccccgccctgggagggaagcctcgctccagccgcgtcgtttccgcgccgaagtgcgatccggggccccgcgctggagtcccctgctctcaggctggtctggaaggtggtggtggggttcagggtccccggaaagctggggttccagggtaaacaccagtacacaaacaaagcggtgggggaggggaaagaaaaagtttttccgtttggtgttggggctaaaagggtcatgtcagaaagcagtgtgctctatgtgttcttaatgcctaaagtgggccttaaaacaagggtccctgtccccacgttctctctaaaagtctgcatgatgtccctcgtcatttctacgggttataagtgagcaagacgtttaccacgtatcacacttctgggggctatttcaacgcccaagctggggctgcagaatggtttctgttctaatcctcccccgcgatttccacctctttacactcaa

SEQ ID NO: 25174 - DNA, 1165 bp, Artificial sequence
  DNA replication origin
ctactattcttggtgggaatacagtggggtgaaagacagcaaagcctctgttgtcatggaatttatgttctgtttgtggggtacagttcacaaacaggcaaggacataagcaagaccatctaagaaggtgaaaaatgccaaggaggaaatcaagtggcatttgagtgactgtaggaggggcctcttttgtttgtttgtttgtttgtttgtttttgagatggagtctcgctctgttgcccaggctggagtgcagtggcacaatcttggctgactgcaacctccgcctcctgggttcaagcgattcccctgcctcagcctcccgagtagctgggattacaggcgtgtgccaccatacccggctaattgaggggcctcttttggatgcagggcaggaggggcctttctgaggagttagcattggggcagagacctgggtggggagaagaagccaatcttgtggggtgcaggggcagggggtggggttaggggatctgcatgtgtgcatatcctgggggtcaaccaggtaggtgtctctgaggaccagtgaggaggtgaaggaggctagaggggaaagcggaagagcaggtgagcctctgagaaaagctcattagggttcataagccgggcctcctgggccagggcaaggactttgaatgttatccccagtgggagagagagaaagctgttggcaattgtgaaacagggaggccagcgaggggctcacagtgtggtccaggcaagagccagcaggggatggcttcagggtggagggtagcagtggagatggagagaagaggatggccttgggattcacacagaagaaatttgaaagtacccagtgctctcccaaggcggagtatgattccgatagtctgtagctcagagaacttggaacctgaagtctttttgaaaaccacttctgtgttctcccaacagagtcccagcagcccccatgtcagcttctcctgggtcaagggccctgaagcctctcttctggctcctggaagtttggctttcatctctttgtcaaaatcaagggcaaagctagaatcacatgatgaacagtcggcgcccacagcagccattactattaagctattaagctgttgtaaatgtgtggaaaggcagatggatgtgaggaaggcagagagcacatgaccttgag

SEQ ID NO: 25175 - DNA, 1877 bp, Artificial sequence
  DNA replication origin
ctccaacagagtgccgtggccgagccctgcccgacgcggggactggagaactgcgcggccgcccgaaacgcttggggccgaaaccctgcggacgccgaagcatcctcccgggccccatcaccaggcgcgtcggcccaaggcccaggcggcgacccccggcctggcaggaacttttccgcctggaggcctggtccagcaagcgagagccgacggcgcggggctcccggctgtcgccccccagtcaggcagcagcgcaacctctcctcacctacccgagctggccgtctggctggtgtccagcggccccgatgctctgcccaatggctgcaagtggacgctctgcgggtcggacagcacttccaggaaggtgggctgcgtgtagaagccagggagccccccgggccccagaagccccatgccgcccacccccgcggggctgagcactgagcgcgccgccagcaagtgcccgggggccaggccgtcgagcgctgcccgcgggtgggagctcgggggctccttgttcaagcccaggatctcctggatgccgaacccagtgcacctggccggggcgccccccgaggtactcttggccactgtctcggatttgggcttgctcagcgcttcccctgctttccccgtcatctccctgttctttggaggggctgaggccgcaggtctttagctccccccacccccccgccgggcttcccgcttcgcgaagttggtcccaggtgccccctccggtgtctaatgctctggagcccaaggagattccccttttatccaaccaggcggcagcccaagtggggtcagagctgagcagccaatcaccggggccaggagcgattaggaattccaaaaagctggcagctcccgccgcaggcaatgtcgaatggccagggtgctgggggtggagcaccgggtgggctctgcaggatgcccatgggcagggaccccaggggccgaagtgagacaaccaggttcaggttcagggctgttccgggaggcagagtggcttggggctctgggcagattctggcagggacaggtccctgaggtcaggtggaaggatgggctaagggcagaggtgagagactgggagacctccttccctcaactcctatgcaggttggcagcatcagggcggcctgaatatggcacctctgtgtaaacggttgaacaagggagaggtaagtgctggggcagtgtgtgtggtggtaagctgggaaaagatcaggccaaggtgtgcagagggtgatgtaggggtagggaaagtttgcttccccagcacaaggtataatgcctagttcggaagagctactcaacacatattggcccaatgaatgaatgataaatgggtcagaaagaggggtccctggtgggaaagaggaacagtgatgattacttttggagaacaaccatggacatccaaacctcttcctagagtaagcatgaagcatgcccaactttcatgggaggacttgattcttccacccaattcattcgactaatatgtattgagctactagctccgacctggtagccaggggttccgcagtaaatcagacaaggcaagggccctgctatacttcagagttcattgagcaaacagaatgaagaggaagggattgttgatgtggagggagaggaaggaggaagcgggtgagaggaaattaaaaggtaagctgctttcccctgcactccaccacctcagctaactcttctgtgaccttcttggggctgggaactatcttatcgaccttgaggctcccttcttcactgcgcctagcatatggtcagttcatggtaggttccttgaattgaaggcaccctatggggagataaggactaggtccattgctttaagcagagattgg

SEQ ID NO: 25176 - DNA, 1133 bp, Artificial sequence
  DNA replication origin
caaatgcaaacagctgccggaaaaagaatagaccgagatccggagaaaccaagtcgaagttcacctgcattcaagccaaaacctattagggcctaaggggtgaggataggccgttttaaaaggtggcggtcaacagtggagtttcccagggccaaggaagaacgaagcatagaaaagcgcagagagggtgcaaagaggctgaaaacaaattagggtgggagaaaacgatgtggcggcgggggtgccagagaacgccctagtggagaaatgtcttgaaagggcgcagagtctgtggcggccccacctgatggggacggagtggggtgcggggaaatagctccgaggtgagcgccggggcagcacctgcgagcagcacccgcagaaaggcaggcagatttttggttctttctcctttatttccttgaaaaccaccttacaaatgtacccaaggaactggtagcagtgcggctggtgcggaagggaatgagggcgggggtgggagaagggtaggttacttttcaagatatacctgtcggcatctactgagttttaactttgtgcaagtaatttccatttaaagacaaaaacaaaacaaaacaaaacaaaacaaaaccctttctagtctgtaccccgatgcagtccaccctactccagctacggctggtgggaccgtccagtctacatcgcctaccactccattttgcagacgaggaaactgaggctcacagaagggaagcgactcggtcagaatcacgaatgagcagaagccaaaagaaaatgctctgtcagtgcagagatcgctccagctttggagaacggtgggagcagaaagcttagggagttggcagagaggacagggaccccgggagagaaatgggggcggcggttgaggccgagggcaaagaaccggctctggcaggaggtgggagctaatctgcccgccgccgggtctgtgtggctctcagaatgtactggtgcggggatctggggaccgcccccactctgtggctcagtttggcctgtgttggagcctttcctttctcctgaacaaggaggagaaagcccgaaccgggccgctttcccggcggccactcatcctgctcaaccggtgccgacgccaaggcccccgggca

SEQ ID NO: 25177 - DNA, 1485 bp, Artificial sequence
  DNA replication origin
taaacccacctctggccaaggggagaggagggtacagaccccaggccaacagccacactgttctcacaggacaaaataatccacagttagggactcgttcatgatgagagttcttggcacccagtgcaagtgacagacaccaggccccaggcccaccctgctctgagtcccccaggatagaccaagaggtttgctttgaagaatttctctcctgctaggctgctgtggcccaagtgcccctgcctcaaggctctgtcccctcctccaaggagcccgctctcctcaccgcagggcaggaccccaaggagggtgcgggctcttacccagtagccacggggcacaggagtccatgatgccatccttggctgacttgaggatggactcgggcagggggatggagtgccgcaccatggccccgtagagcccatactccgccatgacactgctccggccccagcacttctcccgcttcctccacttggctcgacggttctggaaccagacctgcaggtgcacagaacaggtcagaggcttgctctgagaggtgctgggcccaaggcccttaccccttgtaggcttggagtgaagatttctccagcagggcgtccttaacctaagctcgcctactccatggtgccctctgtgttcctccaggctcagggagtattcagaaggaggacatcagtcttatgagaatatcatgggtagttctagggagatggggtatggatgcttcctggacagggtcttgcaggtgcgcaggacccagtgtcatcgactgtttgcagctgagaagcctgccctgccactgatggctctcttgcatgtgttcacacctccagcatataaatctttttttctgatttgcagagggacaaattcctttcccagcactggactagcagtgtctctggctcagggcttcctctctgccagaagcccagagtcacaaccatccaggagggctgcaggtgagtgagggatcagggacaaagggcaggggacagtcttaggggcacttcacccaggtatcaggaaggctgggaactcagggagggagactcccctcggaggcctgggtcagcctgcctcctccaccctgtcccagctaagctctgccaaaccacatgtgccctccaggtacctgctccccacagctccgagcctaactctgaatagtatttggggagctggaccagggatgaagataacattctccagggttgaggagcaaatgggaggagggacctgggagggagtgggggcggaggaagcactagcgaatgtgtctctggccccaaagctgattggtgcagggtctgaatgacagtggggtaccctggggtgtctgcagcactctagcccattctaggatcccagaatccctgccaagtttgaggagggaacatttcttggtcccccagagcagctttccggagatttcccgcagctgacagagccgggagcccctcgcattgtccgcca

SEQ ID NO: 25178 - DNA, 1753 bp, Artificial sequence
  DNA replication origin
attgaggggtttatgggtttaggacagcctcagaaagccctacagaatatcagggcttgaaatcttaactcatctagcccaactctcttcttttacagatgagaaaaatgaacccccagaggggaatggacctgcctgagacagcggcggatctgtgaccagaacacagggcttctgactcccagttaaatgcttttattctgatacactttaacatttcattccctcattttacacccgattaccgagtccttactatcttccaggtgctgttggggagggggtcatgaagggggacaaagagatgaaaacaacacaattcctgccttcagggagctctttccctagatctgtggttcttagggagaaaaaataaaaaccggtgagtcagactcttaccttatattatctcctataggtgatgatggaagaggagaagaagggagggcacacttttttctccttaaggtttataagtttggcttcactgattctgggaccccacggtggccaaggacaaagggagacatggccatgctgggagaagagggggtaggggtgacaataatcaggtcactgacagcaggcctggctaggggttgggaacagtgacagcagcgcacactggtatggagatgtacaggtggcaagcctccaatcaggtgcattgtttttcattgggccccaaggcagttccctgaggtgagcagagcggtgaccttatccccactccaggggtgaggaggatgaggttgaaagagcttagggaactagctaaagccagtaaatgccagcacccagccaggaactcctactctagtgctctttctacccctgggggtagggaagttgtgttgggttggagggtggggataaagcagtagaaagaagtggtcagccacaagggtaggccaattcttcctccacgcagttttattttgatcgctacattctgccagtcatagagaactctgctctgaagaactagaagcactttgcaggcctgaatgagctcattcagcgcactcttgccagaaagagagagaactcctaatggaggctctgtctagggtcaccagcacataatagaaaacaggacccaggttccctgactctttgccctcatgcgccaagagatgtgatgcaaatcctgcctgcttctgtgagcgtcaagagtgtcataggaaaaaaaattgaggtatcttccaggacctccttccttccctgaagaaatgggttaatccatcctaaggggccttggcccaagagccaatcccttggcccaagagccatttccagggcagagaaatctcagagcagggggtaccacagccacctcagtcacctgggtgaacaggtttgggtgcgagaagaggggagcttagtgaagcctgctcagattttgctagtgtcgcaaaaccttggtggggactggggtaccagggagtctgaggctctaatcagtatttcttgccgtcagtaggcaggatgtctaggagctgcctgaggtcagggtcaaggcctgatgttgtgaggttatggtgtcttgaccccagttcatcagccccctcccagcacccccagcctgcaggatgaggggtagggagggacgaagtgcaagccttggcggagcgcaaggtgcggccaagcagggagtcagagcccctagccccgagagggctcccgtgccctccccagctcactccccgctccgtgcctagctctgcgctcccgcggcgcccccagaccgccc

SEQ ID NO: 25179 - DNA, 749 bp, Artificial sequence
  DNA replication origin
tcctccgcggggctcgggggctcggcatgggccggtgagcgacggcgcccccgcctcgcggtcgcggtggaactcccaggagggctcccctgctctcgtccccgcgtccctgagcagccgccgcttcagcaccgcggacagctcccgcccgcagcccgccgccgccgcccgccccgccccgcgcggtcccgggagccccgcatcctggccgggccccgccgccgccgccgccgcgcagccctcggcccggcccgaggcggctccgcgccgacttgggagagcagcgaggagggtccccctccttcccgcctcccgccgccgccgcctccctctcgcttccgtgctccgtgctcccttccacgctccggaatcagcccaccaggcactccggacccggctccggggcggggcggggcgggaagtcgggggagcccggaggaggcggcgaagcgaggggcgcgcagctggaacccgcgtacccgcttcctggagccgagccctctttcccagcccttctctcccctcctcccgcgcaccccagagcgatgggaggcccttgggcttcttgaagcattttggagctcctaggctccaaagccagccctgagtttttaacattgatctgccctaaaaagaaaaacaaacagaaagcatttattgagcacctactatataccagataccaagcccgataatgtgtttaatcaacataagctcatttaattttcttaacaactctattaggcaat

SEQ ID NO: 25180 - DNA, 936 bp, Artificial sequence
  DNA replication origin
aaattgccatttttgtaggttcctatggctgagtgttggtatttttcatatatccaacctactgtgtccattttacagctaagaaaaatgaggcccagagaagtttgggtgctcaagtgacgcagctagcaagtgatgcagctgggctttgaacccaagggcagggaacagaatgcagccccagcttgccagagaggagagttttctaagagaagagaagataaagcctgaaaggattagagtcaggttttgtgggggacctgattaccagaacaaggatcaggcactttatttggtgggtgatggggaagctgcagaagacttttaagcaagacatcatgctggctttgatgtgctggggggtccggaggcagggtgaccacctgggaggtcatggcagcagtgcaagctgaggccgcttcatttcccaagagtggtggcaatgaaattgggctattaattcagtacggggagcctggggacagaagccagaggcagaaggttgagggagaaatgggaggggaggaaattgaaaaaatatgttttgaccatgagtttgagaagcttgactgtgaagggaggagataggaagaaagcggagaaacgtgtgtgtgtgtgtgtgtgtgtgtgtgtgtgtgtgtgtgtgtgaatgagagagctgtaagcaattgtacacgttgaggggaaagggctgagagggtgggagagggtgaagatacagaagaggggggacaagtgatgccagcgttccagaggaaatgacaaagggtgccagaacgtgccttagataagagggacacctccccctcaagatggcgtgaaaggaatcgtcaaccatgaaaaggaatgaagcactgatacacacagcaacatggataaacctcagaaacgttatgctaagccaggcacaggaactcacgcctgcagtcccagtac

SEQ ID NO: 25181 - DNA, 1012 bp, Artificial sequence
  DNA replication origin
gcatggtggtgcatgcctgtagtcccagctactctggagtctgaggtgagaggatcacttgagctcaggagtttgagattatagtgagttgttatcatgccaccacactccagcctgggcaacagagcaagactctgtctcttaaaaaagaaaaagagaagaaaagaaaatgtaacgctaagtgaaagaagccagacacaaaagatggtacattgtacgactccattcatgtaaaatgtcaaggatatgcaaatctatagagacgggaaataggtgagtggttgccagggataggaggggagataaggagtgactgctgcttagtgggtacaaggattctatttggagtgataaaaatgttgtggaatgaaatagtggtgacggttgcacacaattataaatacactaaaagccactgcagtgtagcctttaaaatggttaattttatgttatgtgaattccacttcaatttttaaaatggaaaaaaaaggaaggaggtgagctcaggcacagatgtaaacagggtagtggtgggtgtgataggcaggaagttgaggagctctctgggaggtgggggcatgtctgtgggctgatggatggggcctcgggaaaggaggggaggggaggggaggcctggagtagctgctctgagaaatggagggagaaaatgtccaggcacacagggaggggttgtcaggcaataacaaagagtgtgccatggcgtgaatccacagagattctgtgggaagcagaggcgcagctgtaggtgctgaggtaacaactggttgggttgatccaggagagttggggtttgtaggagggatgaggtggaacgagtgggaccagggagttgaggttcacagcgggatatgagggaagcaaaggcaggaggggatgatagattgggcagaaatagagcagtctaggtctaaaggttgcaacggggtgaagtccaggtccaccggtttaggacccctggaccccggcacaaagcaggtgctcaacaagcgtt

SEQ ID NO: 25182 - DNA, 1711 bp, Artificial sequence
  DNA replication origin
gtccgaggcgggtggatcacctgaggtcaggtgttcaagaccagtctggccaacatgatgaaacgtctctacaaaaatacaaaaattagtcaaaacgtctctataaaaatacaaaaattagtcaggcgtggtagcacacacctgtaatcccagctacttgagaggctgagggaggagaactgcttgaacctgggaggccgagattacagtgagccgagattgcgccactgcactccagcctgggtgacagagccagatgctgtttcaaaaataaataaataaataaataaataaataaataaataaaaattaaaaacaaagaagtggagcagaacttggtacgtgagggatggaggagacagtcgagggcccaagatccagaagaacaaggccggtgggggccactcaagcaagagtggccagggcagcccctctgaggaggacacctcaaaacagagactgggtagatgacaagggccagccgcacagagagatgacggggagcagacacagaggcagcagcatgtgcaccagcctagaggccagtggcccaggctgcactcagggagctgggtgagtgtggagatgccgctgcaggaagtttcaggtgggatgtgttgagggcggcagggagagcgggcagcaggctgtggtatcacccaggagagctgtgacagggccctggcccagagaggcagcagggaagcaggcaggtccacgagggactgaggaagtaaaacaaacagggcttggtaatgggttgatgtcaaagcctgagtgagaggaaggtgtccctgtagcccctgggtggctggctcgagcagtcaagtcgatgggggtgccagttaacagagtgagtaagacctgcacgggggagttagctcagaggaagggaagtcacgagttcattttagacaagttgggatgaggatgtctgggagacatcaagcgcagatgttgagcaggcagcagatgtgaaagactgaaggtcagacaagaggcctggcagaggattcatgtgaatttgggcgtcattggcccggagatgatgtttacatccatgagaaggcagcagattgttccgggagcaatgcaaaaacaaaatagaagaccccagactaagtcctgggaaacccacagtttagtagtgagcagaggagaagcagcagccagggacacaggaggggaccaggacagagaacaccatgagggtttgaaggaagatggcagcatttggcacatccaggcagagtgagccccgggcattactgttagtattgcatgtcaattgtcgggcacagtgcctgctggcactcaatacccaggggcagttcatgctccgcttggctcctatggcctccctctttggggtgagggatttggaaggtctggggaaagtcctggggaagcccaacattaagacgtcaggtagagagggagaagccagtgaaggagactgagaagaggcagctggggatggagggaggaaactgccagccacccatgccatcatttccccactcagctctttgataaacaggtcccaagcatgtacaaaggacacaggtgtggagagagggccaggcactccactggtgtcagcaggacacagcacctggcttcaggaagctcccagtcaaggacatctcctaatcacctcgttggacaaagagcctcagggtaacctgctccccaggaagatctccccagg

SEQ ID NO: 25183 - DNA, 1509 bp, Artificial sequence
  DNA replication origin
ccaaagcccgcagcccggggcgcgccctgcggaacccctggagaggcttcctgccgctcaccctggctctcttcgtgggcgcgggtcatgcccaaagggaccccgtagggagatacgagccggctggtggagacgcgaatcgactgcggcgccctgggggcagctacccggcagcggctgcagccaaggtgtacagtctgttccgggagcaggacgcgcctgtcgcgggcttgcagcccgtggagcgggcccagccgggctgggggagccccaggaggcccaccgaggcggaggccaggaggccgtcccgcgcgcagcagtcgcggcgtgtccagccacctgcgcagacccggagaagcactcccctgggccagcagcaaccagcaccccggacccgggccgcgccggctctcccacgcctggggaccccacagcggtctggggctgcgcccccaaccccgccgcgagggcggctcacggggtgagcatgggagagggaagtttggagggtacagaggggagccagggctcatttgtggaggggcgtgcaggcgagaggagagggcgccgctctcataccctcgtccctctgtctttagtacttcgggaaacagccccgaggttccaaaatcgggattggaagatttgatccgctttcgaagagttgaaggcagatagatcatcatcctcatcctttcttaccaactctcccggagccccgacgttaaatcctttcgcaaggcgcctctccactcgcccgcgttcctcctgcctgcaactaacgagctcttgtagactcttgcagcgctgccgggatctgagaggcagcggggagagggcaggagggtgggcgctccaggctcttgacgcccaggggaggttgagctggctcagagcgcgggttggcggaggtgtcgggggccccatggagagaaggtagatgcgtctccaggaggggagccggcagcgaagctggtgcgtcgggacaagtgtcgtggggcgtgggtcggcctgcgcacgctgagggctggatgcgggcgtgggcgtgagctctgggtactttgggcgggaagcgtgtcctgatgaggctgcgacacagtgggcgcgtggagaattggatcagtgtgctcttgtgcatctaggtgtaagcgtgacttgggcgcgttgcagggctaagccaccgcacaaccctgcaatttacttttttgctccccctgggcaccaccccctgcccaccgcgggcgccgtcgcagagtgagaagatgccccagtaatccccatccccaatcggatcatcatggctgcgggcacgctccgccttgcctgggtatggcaggtgcctctggaatggagggcactgagccctgggcagtgaggggctgggtgggggcaccatcgggaagtctgggaagggctttggcagcctctctttgcctgggcccgatttgccagttgggtttagtcctggggaacagcatgaaagacacttgtaccccgagtcctactcca

SEQ ID NO: 25184 - DNA, 1230 bp, Artificial sequence
  DNA replication origin
acttttcctctaacacctctctcccagccttgacaaagaggagccacagcagaaaagggaggtcaggaaaacagaccacaccccactctcaccactgcaggatctctagcaaagggacaggggagaggaggactattaaatgggatgtgatattgattaacttggatgagattttgatctggacaggagcagactttttgtgtctgaaaatgggtcttaattatattaatagaatagttctcgtgtctggtagggatgacctctcaagccaaggactctgcctgagatgtcattaagggtgggaaagggaaatttaccataatatggttgaaggtagtagtggagcagtttctggatagtccctctttaggttcagcccattaaaaaattcagttacacgagcaaacaaatcaataacaagatgatgtcaactgttttatgaagatgaaacagggtggtgtgttagagtcatgactggggtgagggagggctgctctagattggaggtcagggatggctactccaggagctgatatttaatctgagaggagcagtgatgaggaactaccctctaacatcctggagaggaaccttccagtagagggaagggggcattcacttggcttgttcaaggagcagagagagggccaaggcagcacagtgtggtgggtaagggagagcaagaggccagatgaaatcagagcgggggcagccagctagggtttgtaggccaaggccaggggtcgaggctttatttcaacagtagatattacctgggcttgtcttttgtgtggtgtgggaggttgtgaactggtgcccacatgccagctccttcactctgcctctctgggaaataggctgtacaaatgtgccaggggcagccctgttgatccaagcctttaggctgtagggagggagcatgggtgagaatggtgtgctgattactggggacacgcagacagcggcagtcagcattcccacacccctgcccgcctccctgctaacacaagatgtgaatgcacacactgggtcaatcggggtcaccgaatccccctctgggaaattcccgagagagtgaagggctgggtgggatcccgggaatggattcagccagaggcgggaggcctagattccactcccctctttcacatgcgctatctccttgagtgacttactcaagaggctccgtgtctttgcctcggtgaaaaagaggaccccttggccgggcgt

SEQ ID NO: 25185 - DNA, 1075 bp, Artificial sequence
  DNA replication origin
aagacaagatttccatcctttttctgaaacctcttaattcaggaagctgacaactatccctggcccctaagtaatatttttaaaagaagctaactaatcataaagtttacaaacattcaagtgtcagcccttggcgaggcctctttttcatgctttctctcaaatggaaactttcgtttaaaatacaattttaaaacaagaccctctgcaacaaaatctatttgcaacagcaacaaaatctaagaggatggtcaaagaaaccaaggaatgtatctgagaggtaacttttgagccaccccaccactgtatgtaatccatacacatctacaaacgctgtttttttggtaattcacatctagctaattaaaaagctgagctgtcagccctctgactcttacggaatcctttggagtgttagctagtcattgtgtgttggaattagactaaccactggttaaagccctgaggcctgctcattcagggccctctaggtgaaagatgaggttcaggcagatgctttcttacctgtggagtcatcgtagagggatctggctcaggggcggcttgctgctgttcagtactcttgtttttggccccactctccaaaggctcttgctggacagttgtcttatttccagggggggcggacggtggtggtggagctagtagttgggatttagaatggccctgggaggggcgggaaggagatgcctgagaagagggcaagtaggactgggaatggctcaaataggattgcgaggaagaggaggaggatgagtaagaaggggtgggcgccaggtaggattgggaaggtggggactgcgaaggggacggctgagcaggaggcaggtagggctgagatgaggtcggggggtagtaagagggtggcggctgaggtgggggcatgtaagactgagatgggggcatataggacccaggcggcacagggggagattcagggggggattccagctccattggaaccaaaccaggaggcccgtctcgttggtggtggagcatctggtgtttgtactgctgctgcttctgatagctgagggccggcccgggtggcggg

SEQ ID NO: 25186 - DNA, 1255 bp, Artificial sequence
  DNA replication origin
ggtactgaaaaagggatgggacttgagtttgctgacaccaccttctcccatgcccaggcgccgggtaggctcgaactgcagcagctgcagagagaggcccagtcagctgggccactccagctgtggaggcatggggtgacctccagggactccaaccactatggcctctagggggcctgctccctggcagcctggcccacagaacccccattttaccctgggaacattggtggtggttggccaccaacatatagaaatgtgttgcccctactgccctctgcacccacatcagacactgagcacgaagcacacgtggttcagacacagttctgtgcccctcccagcaccttcctcaggctaggcagctgcttcctctggccgggctacacctcacctcagtcagcagagaggccgctgggcgactgagccactcgggcagctggagctgggtgtgggcctggattcctgaagggtggctctgggacagtgcctgggaggacacagggaagggcctctgaggaggcaaccccaggaccgtctacactccagtggcagccaggattttttttccccatgtcacagcccatgaggaggatgacaataatgatagttgctacagccagacacagtgcctgatggctaagcagtgcctttatgttatccacgaaaggcaagaaacaggcccagagaggtaaagggacttgtgctgagttcagggtttgaacctaggtctcttggctccaagcttgctagaagcaactatcttgggttgcaatcagggcaggcactcttgggaatagtgatggaacttgtctccttattttaaaaatccacacgggctgttcatttggcagcaggccatggcatgctaccatcggggccaaggcagcggcgtggcaataaaagaaaataggacctctccacaccccagaaaggcacagctttgaggagcagagggtctgtctggagggaagtatgagcttccaggaacccccaggaggaaggccaagagctctgggctggagaggtgggaggagacaggaaaagagagagccactctgggggaaattgcagccaggactttcgggaccccgtgccatgggacgaaagcaggagggagcctggatggactggtcagctctggacttcagttcacgctgcatccatttcggctatttcctgctcaaatgcaatttggcctcccccttgctgcctacataactggcctcagttgcagtgttcagctcatgagggg

SEQ ID NO: 25187 - DNA, 1270 bp, Artificial sequence
  DNA replication origin
gcaccggctggccccgcacgctggatgccggaaagcagcggcccgcggcgcgctctggcgtgaagggccggtacgtgagggggaggcctggcccgcggacccggctcccagctcgggcaggtacggtgttttgtccggtcccttctccaccctcccaggcgaggggccccctcggccgtccctccaccctgggaccgtgcaccttgcggctggggccccgtgggttgcacgcgccgctttctgtgtccaggcggggccggcggctctgcccggcaggaccctgcccggcggggtggaccctgaagccagtcctacccgggcaccccccagagcaaggcctcagagcctcaagttcccctgggcttggccgagcagggatggtgcggcctccctctgcctcctggccgcatcctggccgggattcagctccccgccggctgaggctgtgggtctccctccccgccccaccgcccatcctgctctctcctctttctctccaaatgacctggggttggaagttccgggtcctgcccattcccagtgggacctgggagagcaaaggcggggtagctttgtgggcctctctctgagccccttcccttcccgcagccacggctgtcatccctttggccgcctgggtcacacattgctcaggaagaagctgctgtcaggtccttggaggccacatgaccttctcaaaagtaaagccaggaggacagagcgaccctccctggggctgggtcaccctgccctcttctaccccccatccaacgtggcaccgagtctgccactcagtcattccgtctgccaacagttcttacagcccagctctgtgctctgctctctgctggctccaggaggggtcctcactcgctgaccacactgacctcaggaccaagggaacaaaacacagcaggggcaatccatccggtccacggagaagtgctaaaccccaaagggtaaatgagattcccacaggaggagcagggaggagacaacaggcagggtggagggaacagcatgaggaacagcatttgagcccagcgtgtgtggcctccatgtgctgaatgcgtactggataccaagcttgctctacggaggccctgtgaaggtggctgtggatcacagatatcctcagctctctccagagctcaacacagtaccagatgctccagaaatgtttgctgaactgaatttgactggaaaggaaaacagagccccaggcctgcgcggtggctcacgtctataatcccagcactgtgggaggccg

SEQ ID NO: 25188 - DNA, 1460 bp, Artificial sequence
  DNA replication origin
cttattattgtctttttcgttgtggtcatcccagtgggtgagaagtggtgtctccttgtgattttaatttgtatttctctaatgactaatgatgtagagcatcttctcatgtacttatggcatgcatttgcatatcttctttggagaaatgtctattcaaattacttgcccatttttaaatgggatgtctttttattgttgaatttaagagtcctttatatattctagatactagacccttatcagatatatgatttccaagtattttctcccattctataggatgtgttttaaaagtttacttttgggccagatgtcatggctcacgtttgtaatctcaacactttgggaggctaaggtgggtggatcacctgagctccagagtttgagaccagcctgggcaatatggtgaaaccccatctctactaaaaaaaaaaaaaaaaaaaaaaaaaaaaaggaaattagccgtactgcaaacctagggtggtaggtaaagaagtgaggcctagagtgtattttggtttgttttcttgttttgcttttaagaggggagaaacaagcattatgtttgtatcaggtgggaattatctagtgggagagacgggagaatcgctggagtggtgtcgctgagtaggtgatggcacgggactgatgcccacctggaagggtggccttcgatggggcacagacagtcacctgtggaaaaaggttggaagcagagtgtgggcacagccccgcccgcgggccaagagcaagcctgtgggagtctgtgcgccactgctgtcaagggaaggatgaagcaacagtgctggctgagagtgaggatagggggacgggtgggagtcagagggagaaagtatgaaagggtgtctaaggtagagcaagtgcagccgggggacagtgtgaagccagtcagcactgaacctgcaggtgagatctgtgtcacagggttgcctgtgatctgttgccccatcacccaggctggagtgcagtgacacgatctcggctcgctgcagcctcaacctcccgagctcactccatcctcccacctcagcctcctgagtaactgggaccacaggcacacgccaccatgcccagctaaattttgtaatttttatagagattgggtctacctatgttgcccaggctggtcttgaactcctaggttcaaatgatcctcccgcctcagccttccataatgcagagattacaggcatgagccaccgcacccggcctatgtcttgaattttaagctcggttctgatatcaaaagccttctattgctgggttctttactctcggtagccctcactagactgtaagccccatgcggatgtaaacagcgctgtctagttcacggctgtatctcaacatccagctcctcatgcatgggagactctcaatacatagcattgaatcgttgaataaatgaatgaagcaatgaatgagaaaagtcctag

SEQ ID NO: 25189 - DNA, 1547 bp, Artificial sequence
  DNA replication origin
ggctcctgggtgggctggggacgagacaaggggtctcgctgtgccttttctcctgggtgggtggccggaggtcctgagtgcagggcctggggaagtgagcagggcccttttcccaggagccgggtgagtctggctgggagccagcttgggcagtgaaatcctgacaaagccaatgaactgccttcccactgcgttgtcccactgccctgggagtccccagccccagcccaagagtaggagtgggctgggcagtccctgaggagtccgagcagcccagccacccgcctgcctgctgcagggctggccagaggtgtaacgttaccggctgcaccagctcatggcgccacccgctccagcccctcagctcccaccagctgatcacctccccctgggctctggcacccagccaaggcgggctgtgcagggcccagcagggttggcctgggggctgggtagaaggcagacccgcaggattggaagatctttgggatgcagcaggccaagggtctccaaaagcttctagcctcccatccttttccaaatgaggaaaactgaggccagagaggggtgggacctaacctacccagggtccagtgagtttttagtggtactcaggctgctctgagacagggcagagcatgtgcagcaagtgggaaggaacccagaggggcccctaccttcttgccatcacacttggcccaagagtgcagagctccaaggtacccccagctcacctctgcacttttctgtccatagcagtgggccttgtctgctgggaacggctcgtcagaggtggaaggtaagctggccaggctgggggtacgcatgctccccaagcccctctcttcctttctcccaagcccaggtgtggcatgaagcgtgggtgcaggttgataaaagctggggagagcctacaagctagacatgctgggtgatgactttggcagggcctaagagatcccctcatggtgacccagagactagagaggtgtgggctggagtcaccagcacacggagagtggggctggggccagtatagccagggttcatccagctggctcagagcccttccccagcatgatttaagggtatggatggggtcttggaggacagggtggggagtgagtgccaggggccagaatgggggtctgggagctgaatgcagtgggcagtcaagaggatcaggaatgggtgaggggccctccccagcagcccagccctggtggaactgccgggatctgaccatgcgtttccattgattataaacagacagaacatagtcgcgccctccctggcccctccactccccgccctggttgcatcaagagggagtcttcaaagggcaacgagacgtttgccaaagagacatatgtacagaaggcaggaggcccatgccaggccccctacctcgctcctccctccctgcctctccaagacgtgcaaagtggccacacaccaccgctgaggtttcccctgcgccatgggagagtgggcatgtagggacatgcacacgcacacgcgtgatagccatctgcgtgctgggaaca

SEQ ID NO: 25190 - DNA, 832 bp, Artificial sequence
  DNA replication origin
ggagtcaggagcccgtaggtaaggctgtggctggggaacccgacggggagcggcccggcggggcggggcgccgaggggcaggcgggtcccggggatggtccgtcgggcgcccagtgccactccaggtcctcccgtagctgggcggccgtccgtcgatgcagtttcctccgcagacagcagctcccttctgagactgcagccggtccgcgcctgggtttcagggactgagccggggcggggctccgggccggccccgcccaccgcagacgaggttcccgagccgagttcccggagcgcccggtcagcccgcagcgcccggccagcccgcagcgccggagcccgcagtgcgtgcgaggggctctcggcaggtccagacgcctcgccgagcccagcccgcagctccccgggccgcgccgcgcccgcccacagggcccacagccctgcttcggctctcagggcggtcacctgggatgggggcatccaggagtccagcgtcagccgtcaaggctcatgatctaaccgcctctgcaggaagggccgtccgggatgcctgggaaggcagccatgcccacacccctagggggccaagggattcctagccaggttatatagatgaagaaaccgaggctccgagagcacccctgcctgcatatgtcgaatggacataggcattcttggaaagtgtgtgtgtgttgtgtgtgtgcgcgcatctgtgtgtccgaggaactggcagagacaaaacccaagcctacgtgactccagaactctaacccgacctaccaccctcctagccaggcacggacacagtgggcctcccacaggaaacctctca

SEQ ID NO: 25191 - DNA, 882 bp, Artificial sequence
  DNA replication origin
gccgtcaaggctcatgatctaaccgcctctgcaggaagggccgtccgggatgcctgggaaggcagccatgcccacacccctagggggccaagggattcctagccaggttatatagatgaagaaaccgaggctccgagagcacccctgcctgcatatgtcgaatggacataggcattcttggaaagtgtgtgtgtgttgtgtgtgtgcgcgcatctgtgtgtccgaggaactggcagagacaaaacccaagcctacgtgactccagaactctaacccgacctaccaccctcctagccaggcacggacacagtgggcctcccacaggaaacctctcagggcacctggctggaggatcaggcctgttgcctccttgggaagcagtcttcccaggccctccctgcggggcagccccctgtggtagagagtggtctcactcaggcatctcctcctggtccctggccgaggaggaactgtacgctgcgcgggggtctgtgtgcatctgcgcgtgtgcatgggcatttgcgggtctgtgaatatccatgagcggtgcatctgagcctctgtgtggtctgagtacgtgtgactactgtacctccaaatacgcctctgtgtgggggtcaggtctctctgtatctctgtatgcttgtgtgatctgttcgtgtccgctgtgtatctgggtgtgtttggaagtgtctgaatgtgtatctttcggtgggactgtgagtctgcacgcctgcctgtctctgcgtgtgtgtgtctgtctctgtgggtgaagactgtgcctctctctctgcgtttgtgtgtgccctcccttggttctggatctttctttaccaccactcctctcactgccttctgtgtccagctcccaggctgcaggaa

SEQ ID NO: 25192 - DNA, 1297 bp, Artificial sequence
  DNA replication origin
aggatccaggttttcctcaggcagcggagcctggggccctggaggcctaggctgggcagagctgagcagctggcagtggaggggttttcaaggcaaacctggcaagaaggcaagacggattgcatttcagcctgaacgtgcctgggatatgcacatgtctccccaggccttaggggcatttcttgcctaacaccaccagtgggagctggctctgcccctgcctactgaggctgacagctgggcctgtgtgctccctccacggctgctgccgtctctagcgccctggcctccagcacatccagcagtggaggggatgccccttattccagccatagcctagagcagccaagagccagctcttactcacagagagcctggggcactccctcagggaagagcctgaggggacaagcaggtgggaggccgatgtggcctgggcctcggcctgaagagtaaacaaggaaggctctggaaagctcgtgacccacaggccttcacgccagacacacagccttcctccttcctgcctaggacctccgagagggaccccgggaagccaagaggacacggaggatgcgtggggaagaaaatagccagtgtccctcctgggcggacgtaagcacacatccccaggtgcatgcatgcgcacacatgctcatgcacacaggcacgaatgcaggggggagaactcagaagtgtggaacagctgcccagcagagagggctggagggatgctcttgggagaggcagggccagggacctagtggtctttggagagctcttcactcctgagattgtaaaaaaatgctcccacaggtaccacccagaccttggagggggtcacagagattctcccacaaggcacttaggccaatcagggaagaggacatccatccattccgtttgccaatatccttagtaaacttactctgtgccaggctccatgctgggagtacagaggccacccgcaaggcttgactagcgccaagcaccagtgggaatgtgggaaagaaggtccctactggaaaagctcatcctccacatggagctggctgggcagttgcggagggactgcagagcaggctttggccaagcttagtcctggatgaagaccctgcacccccaccccagctagtggccagcttaaaaggagcctggaaaggctgatgtctgctctctgcccacagcccacccccatccccacagtcctggccctggctggggccccaggaaggaaatcactaaggaggattgagtgtcaattcacaacctaatcccatcagcgcacacagctaca

SEQ ID NO: 25193 - DNA, 1139 bp, Artificial sequence
  DNA replication origin
actgaacaacccgagccccacgtctctgattggctcaggcagaggaagggggcgggagatcggcaacgaagggcgtagccggcttccactcaaacttgaggtttccccccatcccctcacagcggaagccgacctcgcccgccccggaagtgcaaactgtgtggtctggcaggtgtggattccgccggtgaaggctgaaggcagctaccttaaagatgccgggatccgcagcgaagggctcggagttgtcagagaggatcgagagcttcgtggagaccctgaagcggggtggtgggccgcgcagctccgaggaaatggctcgggagaccctagggttgctgcgccagatcatcacggaccaccgctggagcaacgcgggtgaggccggcctgcctccgccggcgaacctggcccctgtctgttcccgatcccagggctgaaaatttcccaggcctcacttcgcgttggctcctcttatcctctctcttttggactgtaggggagctgatggagctgatccgcagagagggcaggaggatgacggccgctcagccctccgagaccaccgtgggcaacatggtgcggagagtgctcaagattatccgggaggagtatggcaggtcaggctcacgtcctgggctcctggttggatccagtgacactttttgcacgggcccctctacctgctcggagactttattggagctgaacagcccttgttacctgcctgaccactcctccccacctctctctttgggtcttgttgcctctatagactccatggacgcagcgacgagagtgatcagcaggagtccctgcacaaactgttgacatccggaggcctaaacgaggatttcagcttccattatgcccaactccagtccaacatcattgaggcgattaatgagctgctagtggagctgggtaagaggcctgatcgctgggaaaatgggactggtcacaggcacataagggaacagaagcctctgaaggttgttcattagcagagatgggagattagctgtcttctggttctcagaggtttgtcctccttcctgattaggaaatgttgcaacaggtgacaggaccaaagtaatcctctctacttttccttacagaccaacccttgatagactaca

SEQ ID NO: 25194 - DNA, 1359 bp, Artificial sequence
  DNA replication origin
tgggtaggagcacggtcactgctcgttcgctgcgccgcggccgccggctcagtcttggcttctcagatgctcgctgcagatgcggttggagtacgaggcgccgcagccactgcttttataacaagcgttttatgaatgagtgtaaacgtcacgggctcaaccacggtggcgccagaggggtggcgcgcgggcctgggcgcttctgcggccgcccggctgcgtccccagcgctcgcagctccctgcccccgccttggcgcgtgtcctaatctcgtgagcatttcgcagttcctgtctcagaggtctcgtgggccccccaagatgaggggtttcggggatggctccccccagggctacagggaaaggccgtggaaacctgctgacgcagatgtcctaatatggacatcctgtgtaaggggggagggattgacgggaactgctcgcgggctgcagccaacaccgagggtgcagtgcggggggaggcgggggccgcggctgggggaggggaggcgggaacggcgcagaatgagagagaacattcgcacctggttcaatgcggacccttgttcccgaggtcgggggggatggggcagagagcgcctttttacccttgtacggaaactgaagacagttctgaggctcagagataggagaaacggcatcgagtacaggaccccgaggacttaagcctcggctcccgaaggaatgcgcccctacccccatccccaattctagccctaattcagtgcaaagcgtggaagcagaccttcatcccctaacctccagccctcgggctcgagcaatactagcactgttcctgcgtttggaagcagaaagtggaggatccaaaataagagaatacgataacctactttacgatactgggtactttatttatttatttttttaaagaagacagcgcatttatttatttatttttctcggccatgtgtgggaatattaaggaaactgtcaaatccctgagacaccagcagataaacactgtgcaaaacctacgtgcgaagacatttgaagggggtgtctgcccggttctgagctgggccccaggggtagggagtgcgaggtgtggttatgtgggcagggtggtcagttcgggatgacaaggcggggtgtgcttcctgcggggaactcaaatctgcgctgagggctggttcggtcccgccaggaagctgtgcttacgggagcccgcagcgggtgattttccagcgcggacttggagggtggaggacgggggctggaaggacagtgtccagctgcgcctgggcggaatacctcgactgctgggaccccaggagcggctccacgtcctggaacacggggctttggggaggcaaggtgc

SEQ ID NO: 25195 - DNA, 1685 bp, Artificial sequence
  DNA replication origin
tccctctagccactcccagaggcagtgactacgtagaggggcctagtagggagtatgtggcggaagggaggccttgaagctgtgttcttatagcgtcctatatgaaactgaaaagcatcaatagcaaataacagagaagatctaatggagattatagagaggtagaggggactaaaggcctcccaagtcaccccttggtgccacccctgtaacatatttaatttgtgggggaagcaaaggcccagtaggactgctggtggcccagccacagtccaaaacaggccctagagaggacgcgctctaaccacacaccctaattattagtccctgaatatagatcagtttagtttatccaaagccccagctgaagacacatcaagtactattgcctctgttccatgttttgttccatataaacatccagacacaggtctcatgggagaaacatcatgaggcagtttcacagtccctggctttgatctttacgctgtagtaaaggtgtcattggcctttctggggcgaagagtcatgctcttccacaagagtatcaaattactgctcattttccaatgtatattctttcagggccttgctttcttcttacctgcccacaccaatgctgtgagggagactgctgatggcgaaggtgaaaatggtcaggcaatgtcattgggacttggtctgtctctccttccattagcccacttcttttatccagaaagatttcactgcactggggaaataaggagaataaagtctcatgcactcactcacatgagagagacatgcatgttcgggtttgctcaatggcacccatctgtctcaagtcttgttgtttctttcactctgagcatctgcactccaagaaggcatgaactttttctttcacttcctttcttctatgggtgatgacctgacatcactctcagaaggaggccgaaagtcgctgagtataaaaatcgtcactcctatctggcttaggcagaaggtagggggctcgatgggtacccaggagctctggaggtaggagatgccatctagggaaccccgttctacctgagggctctgtgtctctgcctttgtatactggagggcaccatggatgtcgccttccctctggagtccccttcaccatttcctctctagaaggatggaaggtgggagtggggttggctattgaagctggaacggggaagaaggccacttggggtctgctgagggctgggtctgctcactgctgtgtccggagtggaaaggagaagcccgctggagcagggtacaagcccaagggtcaaactgcgccagcagtagagcaagccgcggtctcaggctgcagccctagcagaggtcaggctggtgcagccagccgtctcggggcctaagggcgctggcgggggccggtgggtaggggtaggagtccccaaatgccttcatctcagcccatccttctccaccgaaaaataaagcaggctggcgagatcgcctcctcacccgctcagtcctgaagtgtccaaggatgaaactgtgcggaaattctccctgtcgctctcagtttgtgggggaagcgccgggactgaggtacatggttaacacaggctgtgcgtgaaggggcttttgacttttcccccggctccggcctctcgcgtctctctcctagggctgcggctgctgctgcctggcgggca

SEQ ID NO: 25196 - DNA, 1578 bp, Artificial sequence
  DNA replication origin
ctgcgggagggacgctcggcggccgcgacggggggcgctggcggcggcggacgctgcagcggcggcggggctggcgccgcggcggctcccgggccgggacaggcctgggcaccgggcggagctccgcggccgggcggcagcggcgcggagcgggcacggcgcctgcagccgggccccggccccgggggcgccgcctccccccgcaccttctgcacggtgggtgcgagggcgcgcgctgggggcgccgggacgggcggggcggggcagggcgcggcgcgggcacctgggacggccgcccccgcacgggcggagcgcgaggagccccagcccagccccgcggggaggctcccgcagcccagggacctcgagctttccccgcgccgggcgctgcagccgggcccctcccgcgaggcgcccggcagcctgaggcttccttttggttcccgccccgggacgggaggctccgtccgctccctggacagccggggtgctccctccttctccctcccgcgctctcctcccccgtccgtttgcagggaggtgctctcctcgggcggcggggaaggcggggtgagtggggagaaaagtgcccgcggagatgggctgtgcgggtggaggtggagggtgaagggccagggaggtgcggggttggggtcggggttagattgtggagggatgacaaggacctcctggcagtgaggaagcgcgactcccggaggacccggacccggaggagagtattgagaagggctcgggatttccatccaatgaaggcagcttctctcatggccattgcttcggagctctgggctgggaggggatctaggggtggccggggtcccctttgggctctcctgtctcccacgccaggttatataaggaggcaagcaggctcctgtaggtaaccagcctctcccttgcccagcccagcttagaaggctctcctctgctcctcccttcaaaggaggttgtcgaggggtaggggtgcagtggggggtgggagagtgtaggggtggattgggccttccacctggatccctggaccctgggatggcagagccaggctttgcctgggtcagtaggaggagcagggaagatgaggaggctggggaagatggggaggtcctggctcttttgcagggatggagaggctggtggaaggagaaatcagccgacccccttgggtcatctccagttgcaagatggcgtggcccttgcccagggtgctgccctccctgttggaatccagggcatggggctatggcccgaccacgtgtgctcagggcaaatgtgctcaggtctatatctcagaaagggcttgcagcctgcttaggcgtgtgtacccaggcttaaatcttggtggtctctccctagggtcttaattggaggagcatcaggaattgggaagctttgaaccatgtttgggtacatttgtacccaaacgtcctttaagcccttggtagaaactgcattcgcgtatcatctcccttccccccaaccttccttccctgagggttttaaaaaacacttcccattgcttttacctttccagcaaatctggctgcagcttggatggat

SEQ ID NO: 25197 - DNA, 931 bp, Artificial sequence
  DNA replication origin
tgaggagaccctccacctggcaaccgccccgtctgagaagtgaggagcccctccgcccggcagccaccccgtccgggagggaggtgggggtcagcccccgccaggccagccgccccgtccgggagggaggtgggggggtcagcccccgccaggccagccgccccgtccgggagggaggtgggggggtcagccacccgcccggccagccgccccgtccgggagggaggttggggggtcagccccccgcccgaccagccgccccatcctggaggtgaggggcgcctctgcccggccgcccctactgggaagtgaggagcccctctgcccggcctgccgccccgtccgggagtgaggtgggggggtcggccctccgcctggccagccgccccgtccaggagggaggtgggggggtcagccccccgcccgaccagccgccccatccgggaggtgaggggcgcctctgcccggccgcccctactgggatgtggggagctcctctgcccggccaccacccggtctgggaggtgtacccagcagctcattgagagcgggccgggatgacaatggcggttttgtggaatagaaaggggggaaggatggggaaaagattgagaggtcggatggttgccgtgtctgtgtagagggaagtagtcatgggagacttttcattttgttctgtaccaaaaaaaattcttctgccttgggatcctgttgatcggtgaccttacccccaaccctgtgctctctgaaacatgtgctgtgtccactcagggttaaatggattaagggtggtgcaagatgtgctttgttaaacagatgcttgaaggcagcatgctcattaagaatcatcaccactccctaatctcaagtacccagggacacaaacactgcggaaggccgcagggtcctctgcctaggaaaaccagagacc

SEQ ID NO: 25198 - DNA, 1184 bp, Artificial sequence
  DNA replication origin
tccccacatcccagtaggggcggccgggcagaggcgcccctcacctcccggatggggcggctggtcgggcggggggctgacccccccacctccctcctggacggggcggctggccaggcggagggccgacccccccacctcactcccggacggggcggcaggccgggcagaggggctcctcacttcccagtaggggcggccgggcagaggcgcccctcacctccaggatggggcggctggtcgggcggggggctgaccccccaacctccctcccggacggggcggctggccgggcgggtggctgacccccccacctccctcccggacggggcggctggcctggcgggggctgacccccccacctccctcccggacggggcggctggcctggcgggggctgacccccacctccctcccggacggggtggctgccgggcggaggggctcctcacttctcagacggggcggttgccaggtggagggtctcctcacttctcagatggggcggcctggcagagacgctcctcacctccgagacggggtcgcgaccgggcagaggcgctcctcacatcccagacggggcggcggggcagaggcgctcctcacatcccagacggggcggcggggcagaggcgctccccacatctcaggcgatgggcggccgggcagagacgctcctcacttcctagatgggatggcggctgggcagagacgctcctcactttccagactgggcagccaggcagagggtctcctcacgtcccagacgatgggcggccaggcagagacgctcctcacttcccagacgggctgggggcccggcagaggctgcaatctcggcactttgggaggccaaggcaggcggctcggaggtggaggttgtagcaagccgagatcacgccactgcactccagcctgggcaccattgagcactgagtgaaccagactccgtctgcaatcccggcacctcgggaggccgaggctggcggatcactcgcggttaggagctggagaccagcccggccaacacagcgaaacccgtctccaccaaaaaagtacgaaaaccagtcaggcgtggcggcgcgcacctgtaatcgcaggcacttggcaggctgaggcaggagaatcaggcagggaggttgcagtgagccgagatggcggcagtatagtccagcttcgccttg

SEQ ID NO: 25199 - DNA, 1661 bp, Artificial sequence
  DNA replication origin
agacctcatcttctccctgcttttcacaactcattgtgacacgtctccgtttcagtttttccagttcttgggaagaagaatacctgccccaaattaatgtctgtcaagctttttgaagcccaggcaggagacagcttcttgctgcctgggccctttggtctaccccacccacgtgacccacgagacccacgtgagctgtgtgtgtggaaggaagagggtatgcacgaatgttcccagggccgtgtactttagggtgacatgcagtcttgtgcagtagacagattcatgtgctcaaaatgggcgccctccaggccggtgggcacggggagagcgggttttggctgtggatgcgtagaggaggctggcgccctttgtgtctgcgtgtcacgggagagcgggtggaggggtggcagtgggtgcatggtgggggggggggatatgtctgggagcctgccgtcccaggaggctctgtctgcatggaggagccgggcggcttctgggcgagatgtctgtgtgtgttggtacacgtgtggaagtcatatgtgtttactgaaggggattttaaaaacctcaatacaagagagagaaatttggcagatgttgagaaactgacagcccaggaaagaggaatgtgagccactcgtgggccgtagactccgggagcagctctgtttgcttttcctaccagcaggtgtcctcgccgccctgactacctcagcccaggcccacctgggaggtgggcagctcctggagtggggtggagggcatgggatggagctggcaggcaggggagggtggtcagcagagcacacagcaaggggtgaaaggaacctggctggagagaaggaacaggagtgggtaccgatgggtggaccagctctggctggaggtgcaaaggccccgttcacggctccacgccaggcagaggagcctgtggttactggcgaggggttcccgctccagcttcctgtggctgcctggagcgcctttcttcaggatgtggctgccatgtggggcggaggctggaggccgatgcagagctactactccctgcccagggtctctgggtggggctggctcagagacccacagttcccagaggcacctagcagctcgatggccaaggctccaactccctgggaacccaccaacgcgggagatagtgaccacaagcatcagaggaaggtcgaaatctgaggccggcaggagaggtgtgaggagagtccagggcaagagggcaggactcagaccttcatggtctgggtcagcaggaggagtccaagggaggaagcattctgagtcaccaggacccccccatcccggaatcctgagctgagaatgaatgagccacgtggaggcaaggccatgcaggtgcaagtggacactgattttgtgcagactcaaagcacaaatagcagatgtccttgggaaaagcccgggcagggccccatagatgctgggcagcttccaggctgcagtaccaagaccttacaactgcaacagatgggtggatgtggggttatggagcaatggtctggcctggggcaacccagcacagtgagcaggatgctgttcaggatgctggggaggagccaacgtgcgatgctatgaggctcacaggtacaaaccggaagcaggcagactctgcagctgttggaggt

SEQ ID NO: 25200 - DNA, 1061 bp, Artificial sequence
  DNA replication origin
gtaagaagctctaattttccttgaagacctcctcttttctttctatcaatgttggtagagtggggctgaccgcccccggccccggctccccgacatgccccctcccccgcccgccggggcacgtgaccagctctggccaatcagcttgctgtgttctccgggccacaacgatccgcgcaggaggagcgtgaggtctcaggaacttaaagagaatgaaccctggggattttgttgaaactatttgtaaagacagccaactgctaccatttacgtttcccctggggttgttaggctgaatggacgcggacctggggctgctgaaaaccctgttgtctccaggaggggagcagtttcctggaaatgaaactcgtccagaggaacgtagggcctagaggtaaacggggctctttcagcccccgctggctcatggtaaatcccaactacatttcaggattggggaataaaaatgaagagctggaataagaagaaagaaagtaggggcactgggcaccacgtggcccctatgttttccctctccagcataattcaactcctcttggctatgaatatctgtagaagccccacgtctccattatgcctctggctggcgggaggttttgtttgtttgtttgttttaaccagactccttggcattcagagagaacattcaggaaatgtattgtggaggcagaccattaaaaacatgcacctgggccgggcgtggtggctcacgcctgtaatctcagcactttgggaggccaaggcggaaggatggcttgagcttcggagtttgagaccagcctgagcaacatagtgagacccccatctctattaaaaaatacaaaaattagcccggcatggtggtgcgtgcctgtagtcccagctacttgggaggctgaggcacgagaatcacttgaatccagtaggtggaggttgcagtgagccaagattgtgccactgtactcccccctgcgcaacagagcaagactgtctcaaaacaacaaacaacagaataaaaccatgcacctggtacaaggagtgaagttaacatctcaaaaacc

SEQ ID NO: 25201 - DNA, 1099 bp, Artificial sequence
  DNA replication origin
agacagagagacatacagagacatacagagagagaggcagagggagagaggggtagagagagggacagaaagagagagacagagagagagaggaagagagaggaagagagagagttagagacacatacacagagagagagggagtgagacagagagaaagagagagagtcagagacacatagagagggagagagagggagtgaaacagagagagagaaagagagagggagagagacagacagagagaaatagagacagagagacacagagagacagagacacagagagacatatagagagacatacagagagacagagagacacacagaaagaggcagagagaggggggaggggagagagagagagggacagagagaggaagagagagagagacagagaaagagatagggagtgagacagagagaaagagagagagagggagagagagatagagagagggagtggacagagagagaaacagaaaggcagagagagagggagagagagataagggagggaaagagacagagagagtaagagaaagagacagacagagagggagacagagagagagggagtgagacagagaggaagagagagagaagggacacacacccacacacatgcacacacagagagagtgtgctcttgtatctcttcttctaagggcactaatcccatcaggaaggctctaccctcatgaagacaccatctccaaatatcatccttctggggcttagggttccaacacaagaattctggggggataaacatgtagtctatcgcagacataatgatgcaaagagctggagagggtgagtcaggcaggctagaggctggaccccatcaaggctcacatttgggttgtaaggatggggaggcgaggctgagaaacagcatgtgcagctctggagaagcccgagagcctgtttctcacattggggaggctggagagtgggggtcagagtaagaatgaatggagacactaggagtgcatgctctgttttcggttctctgcctggtccctgcctgttagcctggtggattcaaggttgggccctgagtcagacagacttcaattgactccctgttctgctac

SEQ ID NO: 25202 - DNA, 1150 bp, Artificial sequence
  DNA replication origin
acagcccagctctccactcatccgcacgctccggagagagcgggcagaggggatgcgaagccgtggaggaggctggggcacaagagacttggagcccactaaccctactgtagctttaaggctgggagactgatgtatagtttggctcctattggctatctctcaggggctggacttaaagtgacagaatcaagctggggtggggggagggggtgagacagagagacttcatggaatgagacgctcagcgcgcgaggtccccacctcctgagcagtaggagtactgggtgttagagccctaaggcctgccttctcgcagttaaaggggggtgggggggaatgtccaaccgccaggtgggtctggggtggggggagatttattgcttacataccccccgggccacccctatcccatcttttaactggcaggtctagcaaactcacctctcagcctttctggaatggatctgttttccaaattaaaaatgagtcacatttctccacccacgcaccaaagagaagaggcagcctcaaaccctgcgctgtgtgcgcaaaagtgcaaagggtcaggccagcaggtgaggcacagcaagaaggcaggagagaaacagattcccttcccagttctcatcacctgggccagtcagttctgcaccactctcatatggctagatgcagggtgcgcatctataaaacgttctctcaatgtatgaagtgatgctctagtcattggcagctctctgaaatgtacccaggacacagacatgagcaaataaattcctgtctgcttaggaaaatacaatcgtggtgaaaatgatcaacttacccgccacatccactccaaggcacaagtacacactttgaaatacacacctgaatccccagctacaaacgcacctgcatccccgtccgctgctccctcagtgaacccgaatattatgggatgccactgtaccaaaatgagctgtaagtcatgccccagccctgcttctgggtttttcatcttttgagatgcaccagccacagggataataatcaatttgatgattcaaatgagtgtggggaggggggtaggtatagaattatttaaaaggggggaaaagccctcaggagacaccaccaccttattctcctatattctgcagaagac

SEQ ID NO: 25203 - DNA, 2068 bp, Artificial sequence
  DNA replication origin
ggcactgctctaagtaccgaacacagattaactcacttcctattcacagcaaccctaaggggtcagaactattatgatcttgttttatagatgaagaaactcgggagcaaaataatttggttaaggtcacagctggggtggagccaggatttatttgaacccctgtggtctaacaccagggtttttgtgcttcagggcatgcagtatgcaggggcggggggacgctgcaggggcggggggacgttgcaggggcgggggggacggtgcaggggcgggagacggtgcaggggcgggagacggtgcaggggcggggacggtgcaggggcgagggatggtgcaggggcggcggacggtgcaggggcggggaccgtgcaggggcaggggacggtgcaggggcggggacggtgcaggggcggcggacggtgcaggggcggcggacggtgcaggggcggggacggtgcaggggcgagggatggtgcaggggcggcggacggtgcaggggcgggagacggtgcaggggcaggggacggtgcaggggcgggggacggtgcaggggtggggatggtgcaggggtgaggatggtacggggtgggggacggtgcgggggccgcctctgctgcatgtggctggggatgaaacacctgctgcacatgagaagttgttactattcgcttacttatttcatttactacacatctactgagtcaaacacaacagggaccctgcccctaagctcagtagctcatggcagatacaaataagtgatcaatgaccataaagtcactggacaatgaaggatctcaaagcaatacgatagggtcacacacacattcatgggacctgcgagtgcagaggagtgtctaaccctccttagtgtaaggtagtcagggaaggcttcctggaggagaagtttagcctacgtcttgaaggacaagtaggtgtttgccaggccaagaagggaagagggtggggaatggcattctgggcactgggaccagtatgtgcaagtcacagagatagggaacagcagtatacagccaaggaactggagttggtgtgggaagtccgggacacaggtgtgtggccggggccggggcacaggaagaagccaggtgggggtctgtcaggagaccagcatggacaggtgggcagaggccagctagaagattcaacaccaggggtttcgacatcaccctttgaggggcaggctcatcacaccaacagcactgcggtgcagctttgcctcacctgactgcctgcgcccagctctttgcaaactgcctgcacagtcctctcctgcaatgctgggtctgggtagggtggtcaccgctcactttcctcatcaaagaaacccaaggcttcaagaggtaaaatgaccagttactcagctggcttagaactcgagccttcttttctttatttttctaaaggcacaagccaccatccctagttaatttaatttaatttattgtagagatagggtctccctatgttgcccagactggtgttgaactcctgggttcaagtgatcctcctgccccggcctcctgagtcatttggattagaggcctgagccactgcaactcgggccttctgcttcacaatcctgtccttatttcccccacccacctttctttgcaatacaaatgcattagcaaagccagctatttaaaggaaccccgcagctaatccttatgtaaatggaaaatctttcagcaaagctaataatcactccataatccagcagttatataattctggattttatagtacagcatccaaagctgaggtattctggtcccttcaaaaccttctttgttgggggaggatggggttggcatgacgatctggtgaaaaggtgtggtttgcaaggaggaggaggatggaggctcccaggtcgacagcccagtggaggagcagcttccagccagggtagggtgggagagaggtatagggtacttggtggtgagggagaggtagaggggtaaagaaaggggctcagcccactggttcccacaagactgaaaccacatcagccaggttgttccacatcttccaaataccaaga

SEQ ID NO: 25204 - DNA, 870 bp, Artificial sequence
  DNA replication origin
cttgctcacgtctgggtccccacagcaccctgagaagtgctggcccagaggtagctgtgatattgaatggatgggcgactcacaaaccaaggctgggggcactcaggtgtagagttttcatagaatttaaaagtgaggggattcagaggctcatttacttcaatccccttcttacagatgaggccctgagagggccggggacttgcctcaggtcactaggcctgggaggaccaggctcccagcccacacagccaccacaagccactgcacctccaggccacgggcagtccacctggtgcctctctgggaaaaggcaccggaggaggagagggttacagagtatctccttccaatcagcgattgtgctaatcaatcaactcaattaaatctagaatagtttttttttttttttttttttttttaaggaacaaacaaaaacagcagcagaaagtaatgactaataatcaagtaaaatttgattatttctgtgctgactggttgggggagtggggatctgagacaggtcactagagcaagcgaagaaagtaaagaggcagagactgcaagctcagcaacacaggggactgagctggggaggaaccacaggggcacaactcagggccctccgaaatgaaaaccgccatcagacgcagaaggtactgcgcccaggcactgctctaagtaccgaacacagattaactcacttcctattcacagcaaccctaaggggtcagaactattatgatcttgttttatagatgaagaaactcgggagcaaaataatttggttaaggtcacagctggggtggagccaggatttatttgaacccctgtggtctaacaccagggtttttgtgcttcagggcatgc

SEQ ID NO: 25205 - DNA, 1558 bp, Artificial sequence
  DNA replication origin
tataacagacataaatataaatcatccttccaaagtgctataaagtttctaaatgcttactctcagtttcttatcacagaccagtaacctccagagggcaggcaggaaccagtctgtgtaccatgctttgagcaggctgggtttaaagcgtgtacttcagggtcagtgagacctgggttcaaatcctgcctctgccacctgctggctgagtgtctggcaacctgacctttgtgagtctcagtttcctcatctgtgaaatagggagaacagcagctcattgtgaagaatgtgcagtgacgcacataaggctgtggccaccgtgcttggcacagatccctcctagctcattgtgtttctgttgggctctgtggggtatagtgggtggcctggggaagaggagccagttggatgtagctcctgcttccaagggagataagacatgagcctggatgtggcagaaagagccagtgattcctgacatgagagaggatcatgtaaagggctcaaggagggaagagtaaattgttttcagctggggaggtagactctgagtggggtcttaaagcaagagacggttcggtaggatgggaagagggagtgtaaacttctgtagtggggccatcagctccaggcaggaaatggggaaagaacaggccagtttcagggagaggctagaaaagcaggctggggtcagaccagaagctcaagggctgtgaagggattggattgtgatggggtcagtacagggaggcaggaagggttgtgcgggagtgacctgcctcagccttgagggagaaagatcacccaggcatcatagagaaaatgtgttggctggaggagggatgggtgccaggagaccattgaggtgtcctagcagcagccctcagggcgaccatgggtgccactgctgaggctcagtgcacgggatgactcaggtgtggctccagtggctcagggggctgacgctgggcagaagtgcccaagcacatcagaggcagactgtgaccccacaccatggccccctgggagcctgctggctgcggtttaccccacatcccagccatccccaaagctccctgacagcaggaaaaattcatagccattgattttgtaattaacagtttatcaatgccatcgatacagaccggctgatggattgcaaagaaattaatcttgcaatgttattttatttcatttttggtcgaaggcagctgccaattttgtcctccttggggagagtcgggggaggatggagagggcggggagagggagctggcaggagtcaggagcccacatggcaatgcccagccatgttaggtacacactctgtaagtggccgagagtgtaggattagggccttgcttcatctcccacctgatgacgaaggagtgctcactgccttggtagcagggagcagaaaaatgtggaggaggcttgggtgtggggccagtgaagactcagccctgcaaggacactcacccccagcctgagtccccacaggaataacactacctgacattgaccaggtgctgatcacgctctgggtaatgtgctgctt

SEQ ID NO: 25206 - DNA, 791 bp, Artificial sequence
  DNA replication origin
aagggaaggaaagggggagggaggggaggggaggaaagtggagggaatggcagggaaggaaaagggaatggaaagaaagggaagggaaggaaaagggaagggaggggaggggaggggagagaagggaaggaaaagggaagggaggggaggggaggggagagaagggaaggaaaagggaagggaggggaggggaggggagagaagggaagggaaaggaagggagggggaagggaggggaggggagggaagggaagggaagggaggttcttttttttccaccaagtagtagcattgattccacttcatgaatgaggtcagtggaacccagagcctttatatgtttcccatatatttaataatttattatttttaaatcactccttgacaaaaaaatactttagatcacgtattcacttagatgactacatccatccttcaaacatgactgagtaggcatccagtcaggcacagcaaagagtcagatttctttctggaatcatagaagccagtgggagaaaagattagctggtggcatgaatgagatggagtaagtaaagaaaggagcgtctgctgcatgatcaaggggagcgggaattatgccagaaagcttaagctgaaggtgattgtcaaaacttcacaggatttagccctgagcttccctggtaaatacagtagctgccatcaaccaataaaaagcatccccgcctgtgacctgtcggatgagagatgatctccccagcactaaactgaaagcacactttggtgctgagaatctttacataaggggcacc

SEQ ID NO: 25207 - DNA, 958 bp, Artificial sequence
  DNA replication origin
tgaggagcccctctgcctggctgcccagtctggaaagtgaggagcgtctctgcccggccgccatcccacctaggaagtgaggagcgcctcttcccggccgccatcacatctaggaagtgaggagcgtgtctgcccggccgcccatcgtctgagatgtggggagcgcctcggcccggccgtgaccccgtctgggaggtgaggagcgtctctgcccggccaccccgtctgagaagtgaggagaccctgcgcctggcaaccgccccatctgagaagtgaggagcctctccgcctggctgccaccccatctgggaagggaggagcgtctccgcccggcagccaccccgtccggaagggaggtgggggtcagcccccgccaggccagccgccccgtccgggagggaggtgggggtcagccccccacccagccagccgccccgtccaggaggtgaggggcgcctctgcccggccgcccctactgggaagtgaggagcccctctgcccggccaccatctcgtctgggaggtgtacccaacagctcattgagaacgggccatgatgacaatggcggttttgtggaatagaaaagggggaaagctggggaaaagactgagaaatcggatggttgctgtgtctgtgtagaaagaagtagacatgggagacttttcattttgttctgtacgaagaaaaattcttctgccttgggatcctgttgatctatgaccttacccccaaccctgtgctctctgaaacatgtgctgtgtccactcagggttaaatggattaagggcggtgcaagatgtgctttgttaaacagatgcttgaaggcagcatgctccttaagagtcatcaccactccctaatctcaagtacccagggacacacacactctgcctaggaaaaccagagacctttgttcacttgtttatctgctgaccttccctccactattgtcctatga

SEQ ID NO: 25208 - DNA, 1196 bp, Artificial sequence
  DNA replication origin
cagagagcacagggttgggggtaaggtcatagatcaacaggatcccaaggcagaagaatttttcttcgtacagaacaaaatgaaaagtctcccatgtctacttctttctacacagacacagcaaccatccgatttctcagtcttttccccagctttcccccttttctattccacaaaaccgccattgtcatcatggcccgttctcaatgagctgttgggtacacctcccagacgagatggtggccgggcagaggggctcctcacttcccagtaggggcggccgggcagaggcgcccctcacctcctggacggggcggctggctgggtggggggctgacccccacctccctcccggacggggcggctggcctggcgggggctgacccccacctcccttccggacggggtggctgccgggcggagacgctcctcccttcccagatggggtggcagccaggcggagaggctcctcacttctcagatggggcggttgccaggcgcagggtctcctcacttctcagacggggtggccgggcagagacgctcctcacctcccagacggggtcacggccgggccgaggcgctccccacatctcagacgatgggcggccgggcagacacgctcctcacttcctagatgtgatggcggccgggaagaggcgctcctcacttcctaggtgggatggcggccgggcagagacgctcctcactttccagactgggcagccaggcagaggggctcctcacatcccagacgatgggcggccaggcagagacgctcctcacttcccagacggggtagcggccgggcagaggctgcaatctcggcactttcgggggccaaggcaggcggctgggaggtggaggttgtagccgagatcacgccactgcactccagcctgggcaccattgaacactgagttaacaagactccatctgcaatcccggcacctcgggaggccgaagctggcggatcactcgcggttaggagctggagaccagcccggccaacacagcgaaaccccgtctccaccaaaaaaatacgaaaaccagtcaggcgtggcggcgcgcgcctgcaatcacaggcactcggcaggctgaggcaggagaatcaggcagggaggttgcagtgagccgagatggcagcagcacagtccagctttggctcggcatgagagggagaccgtggaaagaga

SEQ ID NO: 25209 - DNA, 1140 bp, Artificial sequence
  DNA replication origin
ccgggcagaggtgcccctcacctcccggacggggcggctggccgggcggggggctgacccccccacctccctcccggacggggcggctggcctggcggggggctgatcccggacgtcgcggctggcctggctggtgctgacccccccccacctcccttccggacggggtggctgccaggcggagatgctcctcacttcccagacggggtggctgccgggcggagaggctcctcacttctcagacggggcggctgccgggcggagaggctcctcacttctcatacggggcggctgccgggcggagggtctcctcacttctcagacggggcggccgggcagagacgctcctcacctcccagacggggtggcggctgggcagaggcgctcctcacatcccagacggggcggcggggcagaggcgctccccacatcccagacgatgggcggccgggcagagacgctcctcacttcctagatgtgatggcggccgggaagaggtgctcctcacttcccagatgggatggcggccgggcagagacgctcctcactttccagactgggcagccaggcagaggggctcctcacatcccagacgatgggcggccaggcagagacgctcctcacttcccagacggggtggcagccgggcagaggctgcaatctcggcactttgggaggccaaggcaggcggctgggaggtggaggttgtagcgagccgagatcacaccactgcactccagcctgggcgccattgagcactgagtgaaccagactctgtctgcaatcccggcacctcgggaggccaaggctggcggatcactcgcggttaggagctggagaccagcccggccaacacagcgaaaccccgtctccaccaaaaaaatacgaaaaccagtcaggcgtggcggtgcgcgcctgcaattgcaggcactccgcaggctgaggcaggagaatcaggcagggaggttgcagtgagccgagatggcagcagtatagtccagcttcggctcggcatgagagggagaccgtggaaagagagggagagggagaccatggggagagggagaccatggggagagggagaccatggggagaaggagagggagagggatagggagagcttgagttctttgtagattc

SEQ ID NO: 25210 - DNA, 861 bp, Artificial sequence
  DNA replication origin
accctccgcccggcagccgccccgtatgagaagtgaggagcctctccgcccggcagccgccccgtctgagaagtgaggagcctctccgcccggcagccaccccgtctgggaagtgaggagcatctccgcctggcagccaccccgtccggaagggaggtgggggggggtcagcaccagccaggccagccgcgacgtccgggatcagccccccgccaggccagccgccccgtccgggagggaggtgggggggtcagccccccgcccggccagccgccccgtccgggaggtgaggggcacctctgcccggccgcccctactgggaagtgaggaacccctctgcccagccagccgccctgtccgggagggaggtgggggggtcagccccccgcccggacagccgccctgtctgggaggtgaggggcacctctgcccggccgcccctactgggaagtgaggagcccctctgcccggccaccaccccgtctgggaggtgtgcccaacagctcattgagaacgggccaggatgacaatggcggttttgtggaatagaaaggcaggaaaggtggggaaaagattgagaaatcggatggttgccgtgtctgtgtagaaagaagtagacatgggagacttttcattttgttctgtactaagaaaaattcttctgccttgggatcctgttgatctgtgaccttacccccaaccctgtgctctctgaaacatgtgctgtgtccactcagagttaaatggattaagggcggtgcaagatgtgctttgttaaacagatgcttgaaggcagcatgctcattaagagtcatcaccactccctaatctcaagtacccagcgacacaaacgctgcggaa

SEQ ID NO: 25211 - DNA, 1456 bp, Artificial sequence
  DNA replication origin
gctcgggctgcagctgccctggctgagggtggaggaaggaccgcggggcggggaccgcaagcccggaggctcgcgcagcctcggccggcggatgtagctggaggcgagtgacgaagccgggcgagcgcgcgctgcgctggtgcctggggagcagcccgccaacgcggagcccgccaacgagaagcccaccagccgatcgctgctcggcgaagctggggccgccgctgctgcagccccgccgcccctgggccccgctgccgccgaccacgtcccctgccagccagccgcccaccaggctcgactacggcccgcgccgcgcatgcgctccgtcccccccttaaagggccagcgccttcgcgcccagtcctccgccccccgcggcggtgcctctgtcccaagttaccccaaggacgccggtgggcattcgctccctcctcacccagctgtcagggcgccgcgaagccggtgcgaagctgcggaggacgttttcaacgtgccagagggagcgcaaactccatggagattcctagcgcagaaggaattcctgcggtcgggaatttcttgaaaaagattcttcgcaggggccctgagccggtaggaccgagagcactggcctggaagactgggattctagaccggattcagtgcctgtgttgctttgggacgttcagcagttcccttccctctgtaggcctcagtttccccatatcccagccgaggtggtcacagtgagtgagcgcagagtccctcccagcgcgcacagttcttagaggaggacatctagggattgagacggggggtcactatctctggaaacgaaaagggttaaaagtcaccctgttttattcgattgcctgcactggtgggaatggggtgcgcagagctcacccctagaccatctgcctagaccgggctttggacgctctggaccccgcggaccagggtgggaccgcgacgtgggcgtgggaggcaatgcttggggagggtccgctggcctagaggaaggtgaaagtacaaccagctgtggtgcgtggttggacactggacgcaccctccgcctccctcatgccatagagttgtaaatggtgggaaaggcactatctctaggctgaagccaagaactttaggaagagacggccgagtgtgtgctttaagatgctccccctctcccctgcctgtagttagcatgaatcacagtcttgtgggagaatgcagattccttggccttagccggcagattcagattccttagttgtggggtcgttgcatttcttgacaagctgaggttactacacaagggctgggttaaaggccttagagagaccccagggcctcagtggtttcacatctgttctctaaagctgtccctagtatctgaactttctgggtaccctgtgctcccgtagcaacctcttactacctccagggtcagaaaccaagggttatcagtgatggg

SEQ ID NO: 25212 - DNA, 1054 bp, Artificial sequence
  DNA replication origin
ctccgcccgcccgggccgcgccaccgcccatgctgcagccagtcccaggcagcgaccccgcggccgcagcccgccgctcagtgacctcagcctggcccctgcgcgccgcccgagccggtcccgctgagccgcgggccccgtgccctgcgatggctcggctggtgcagcgcggcgccaggtgccagccgtcctcccgctgagacgcgcccgagtggggacccgctgggcctcggggctcgcagccttcgcctccccgccgcgcccgctccctttctggggactccgccgctgtttctggggacgaggggacaggggacccagacaaagcccactttgtgcagggagttggccgcaggcggggaatgtgcgcgtcggcgcgcgccccctccccgctcccggccagctgcgagtcttggctcccggacttgtctcgtcgcgtcggagaaatcgccccccagcgccgctctcccgcccgggggtcttggttccgagctcgcgcggccgggagtcgcctcggtcttccttggggcgcgcgcagatgtgagcgtgcgagagttgtgtaggggattttgttccctccgaaactgagacccagggcgcccagtgggcacccgtgccttgactctgtcctttctgcagccgctggtccgagctgtctggcctcagtttccctccgacttttctccgctctgccagccctcactgctgcccgtcattgttctcgcagttagatgggggtgctttgtgacggctgccaagttggggtgtgttctctttattccgtttttcaaacagaacaaggcctccaaggctgaccccagacaacccaccccctcggaccctaattcaccttattgcactgattttttttatcaagtcgtattttattgtacaggagccacgccctgatttcttaaaggcgccttgcactctggccatgtgttatctctgcagccggtgtgtgggaggcctcttgtgagccagttgttttcccgcctccaccacccccctcgaagatttagggatgccaggggggaagaaggtggctgggggt

SEQ ID NO: 25213 - DNA, 2203 bp, Artificial sequence
  DNA replication origin
gagaggctgtcctccccagccccacagtcaacagcgggagaggaggaagtgtttatggctggttctccatcctaactggtcaatgcctgagccctaccttttcttctcagtcattttattattaaaaatgtcataaatacacgtgaaacctagaacaacatcatgaactcctgtgcacccgttactcagcttcaccaactcaaagccaattctgtttcatctcttccaccctgcccgtattctttaccagcttttaaacattttgcctgcgcccctggggtaggcagcccactgggctcagtgctgcagaggagcacagattaggtgggagccaagagggtgacggggagggggtctgatggaacaggagtcccatctgagggcaggtcctgggaggactgtgatccaggggtccatccccaccccccacacagacatgcctgcctgaagttcacacaaagaggctgcgggtgcccttctcttcccgcagaggtctcggagggaacgccactatggcaggcatttgctaacagggcaggcccatttctggagcccgacatccctgccctgtttatggggttctttgctgggataagcctgaggccacccgagaaattcaggctgcaggcagtgcctccttcatgtcttcacgttcacttctccctcaggggtcacacaccaaagtggaggctcccaccctcataggagagagactggtccttttccccaggaggacacacagaagtcactccaggcagggtcctatggtctcaaagcttttcaggggtcacctggtggcttgtgggcaggaataaaataggaacagcccccatctgggtgaggggctccttctcagtgtccccacagctccctcaggcacagcacacgccgtggttctcacgtcttgtcctcgccgcactctgagcctctgcagggccgggctgtgcatttctcatcgctgtatccttggtcacttacaaggagtcaggctcagtaagcattggtggaatgagagtagtgctggagggaccgtggcataatgtctcaacacagactttggggtcaggttgacctggacttgaatcgtggctgggctgctgactcactgtgtgacccccaaggaagttccttaacatctctgagcctgggagtcctcctctgcaaagggggatagtggcagtgtgtagagttgttaggacaatgggccgagccggtgccgtgagacgcagcacagtgctggacatggtgtctgctacacgcttctatccattcatgtccttctacccatttgttcgagaactttcactgagtaactgttgtgtgcccggcttgatgctgggccctgaagaacatgacagacaagggccctgtgcttgggaggtttgcattctagtggaggagacaaaataagcaagtaaggaaaaagaagcagtaaacactggtcatggtgagagtgccgtggaggaggtggacggtggcgcaggctcagcttcagtcctgagcagcagccaactttggcaggcaggggaaaaggccggtgtgagaaactcaggtgggaggccccgggggctggagaggtgagcaggtggggcagaggtgtaggaagtgggagtgggcctggggctggctgggggcacctcccaggcctcagtagtacacgtgattgtatttgaagggccacaggcagggttgcatgtggatatggggagaggacagggtgagggtaagagaagagtgaagccgcgtctgtggcctgtgtgtgtgccaaggtgcgggatggagggcgagggagtgaggcaggggagggaaggcttctcttccgtccttgggccactgggctctggaaagccctgcagtgtggcaccagccctgctggacttcagagcggtggccacaaatccctggaagccccgtgcctattcgaggttccctttattgagctccagctggataccaggctcaatgctagatggcaggaataccaggaggagacgccaggcgtatggagatgagcaggactggtgtctgcaccccaaggctggcggtgcgtggaccccgtggctcccggtcccagtccctcccggtgtgctggccccgtgcttctcctggctctttccttagcggggcactggccagttacctcaccaacagcatgcccaccctggagcgcttccccatcagcttcaagacctacttctcaggg

SEQ ID NO: 25214 - DNA, 1086 bp, Artificial sequence
  DNA replication origin
tggccccgtgcttctcctggctctttccttagcggggcactggccagttacctcaccaacagcatgcccaccctggagcgcttccccatcagcttcaagacctacttctcagggaactacttccgccacatcgtgctgggggtgaacttcgcgggccgctacggtgcgctgggcatgagtcggcgcgaggacctgatgtacaagccgcccgccttccgcacgctcagcgagctcgtgctggacttcgaggccgcctacggccgctgctggcacgtgctcaagaaggtgaagctgggccagagcgtgtcacacgacccgcacagcgtggagcagatcgagtggaagcactcggtgctggacgtggagcgcctgggccgcgatgacttccgcaaggagctggagcgccacgcccgcgacatgcggctcaaggtctgcccgccttccacgccctcgccccctccctcgccccctcccccgccccagcagaggcgatgtgaggattgagaggactggggagcttctcaggggactggggtgctgggaccttgcttagtggtcgatattgttcaggtggtcccctggggtgggcagaccaggacggctgcggagggaggaggtgggtgggctgggtttggatggtggtaggtgttgggcacatggcaaggtcactggtggagaatcacggcctgtctggagggtgtgatcgggtgctgtgatgggcagcctccccactcctcctgtaacatatcctgactctgccccccaaccctagcaaccattaaaggactaggaggtggtcagaagaaagggaagtcagaccatgtggaagacaatgagggcagtgttccttcttcctcttcccacccacacttgagcaggaggtgatagggagttgggctgggggctgttgtaccaaaaacagctgggctgagctgttgagccctagagcctttcagcaggcagaattctgacatctgcctgggttctcctggggctgccagggccccctgctgggtatctccatagctcagtcactgctgcactgtgactgcccctccaggcagcctggagcctccgcctcaacca

SEQ ID NO: 25215 - DNA, 891 bp, Artificial sequence
  DNA replication origin
ctcgtggctcaggagagccttcaggcccttgaggcccccatgggcagtgctgtgtgggcagaggaggggtgatatgagagcgagcccagggaaggacctctgggcaaaaagttcccaggccctaactgcgtctacttgctcagtcccagctctgcctgttgctctagcccacaggctccctgcggagggtctgggcttggcggaggacccagaatggcactgaggccagcatggctgtgggagttgagcaaaccctgggtgccagtccaggagctgtggctggacatggggtgatggggcgggatgcttgggcctgggtctctccgccagcagtgccaggagcccttgctggggaaatcaagaccagactaggatgcttctgccccaggcctgccttccattctttaacagcccatcttggcttggggttgcaatgatggctgggccagtcacttgtggcagggcatcagggccctggcagggaagaacctaggcacctggggttgtccccagcctgcccgtcagcatgagatacccagtgggaaagtgagaggatgcggagaggttggcagagccaggggtaggttctggaggctcaagcaacaaggaggtgcaggtaaagggtgcagtgcagccactgagggacagctgggaactgggggatgcaagtgagaaagggatgtgggggagagttcaggatcaggctgcttgaggagtaatgggttacctacagcagagacgagatggctgtttgtcaggaggcggtagaaaggtagaaaggattcagattgtggaagggtaaacggatgagatgaccattaaggttttgttttactgagaggctgtaagtctgccagggacagctgtcagtaaggctgcagaagggctggg

SEQ ID NO: 25216 - DNA, 1014 bp, Artificial sequence
  DNA replication origin
tggctagttgccatgggaaccggctcctcccacttcctgcgtgcgcacccgtagacctgcgctcccaataaagttgttgttgaagcgcggcggcggcaccacgtgggccggaccgggccgggggcggggccgagctgagggaggacctgctggctgcagtgaggagcggaggcgggcgcgggcggccggccatgatcgcgtcgtgcttgtgttacctgctgctgccggccacgcgcctcttccgcgccctctcaggtaccggccaggcgtaccgacagacaggagcccggccagggctcgcctctgcggggctccgcgggcctggggcggcgtgcggttggccgggcctcacgactaccgtgccccgggcagtgccgaggtgtagggaggcggtcctgagcccctgccccgcgggcccctcctgaccccacgaggcctggacctggccgacgtccctcgtgggcggcccctcctcccgcctgttgtcagatggcgtccggccgcggttaaggtggagaggagctgtggacgggcagggccctttcctggccctgggggtgcagagaaattgtggggtcggccaagtcagcaccccggcgggtcgggaaggggtagtagctcggacctaggcgagtgcccaaattctcagcgggcgaggcgggtcggctctgggaggtttatggccgaagtactggacgcaccgatcttccccaggttaacttcacactcgcctttcactgccacctggcagctctcgctcaccggtgtctttggttgaaaaacggacgttcaatcagagacacatttagatctcagctttggagcattcctgcccccactcccggcggtttagagggagatgtgctggggtgggggcaatgcccagtcgatacctcaaagagggggtgtttatttcgttattgtttcataatttgtctgcattctctatttctgggctttgaaattacggagggttttatgcgaccatcagtttctgagatcccatggaactcg

SEQ ID NO: 25217 - DNA, 995 bp, Artificial sequence
  DNA replication origin
gccccgtccgggagggaggtgggggggtcagccccccgcccggccagacgccccgtccgggaggtgaggggcgcctctgcccagccgcccctactgggaagtgaggagcccctctgctgggccagccgccccgtccgggagggaggtgggggggtcagccccccgcccggccagccgccccgtccaggagggaggtggggggatcagcaccccgcccggccagccgccccgtccgggagggaggtgggggggtcagccccccgcccggccagacgccccgtccgggaggtgaggggcgcctctgcccagccgcccctactgggaagtgaggagcccctctgcccggccagccgccccgtccgggagggaggtgggggggtcagccccccgcccggccagccgccctgtccaggagggaggtgggggggtcagccccccgcccggacagccgccccgtctgggaggtgaggggcgcctctgcccggccacccctactaggaagtgaggagcccctctgcccagccaccacctcgtctgggaggtgtacccaacagctcattgagaacgggccgggatgacaatggcggttttgtggaatagaaagggggaaaaggtggggaaaagattgagaaatcggatggttgccgtgtctgtgtagaaagaagtagacatgggagacttttcattttgttctgtactaagataaattcttctgccttgggatcctgttgatcggtgaccttacccccaaccctgtgctctctgaaacatgtgctctgtccactcagggttaaatggattaagggcggtgcaagatgtgctttgttaaacagatgcttgaaaggcagcatgctcgttaagaatcatcaccactccctaatctcaagtacccagggacacaaacactgcggaaggccgcagggtcctctgcctaggaaaaccagagacctttgttcacttgtttatctgccaaccttccctccactattgtccta

SEQ ID NO: 25218 - DNA, 924 bp, Artificial sequence
  DNA replication origin
gtgttggggggtggggtgtgtgtgtgtgtggtagtgtgtgtgggggtgtgtgttgggggggtggggtgtgtgtgttgggggggtagtgtgtttgggggggtgtgcctagggaggggtgaacagagttctattaactgcacatgttccatccacctcctcagcaaaacaaggtccccctgaaccagtaccaggtcagggaggtgataaagaagctcgatgagaagacaggcatggtgaacttcaggtcagcccaggccccgcgacgatccccgttctctgcaaggggccctggctgggctgatgtgagctcctccagctttcctgtctacactttattacttgaggcttcacccacctgcctgttccctgcatgccaagtctgggccccactgtctaccccccttctcatccccaattcacttgttcagcgaaacttgagcccaatcaggcgctgctggctgctgggccggatgctggggatgccagcgggaggagccggagcccacactcacagcccaggaggagggcaggcaagggagcagatctttatgccctggtgaggtgagaggagccgtaggggtgtgtaccaggcgcccttgcagcccaaagaggaagtgtcgctcaggcgggaggcggcaatgtttcagccgagtctggcaagacggagacctagacagagggcggaggcacacaagcaccaaatgctaacggtgtgttagggactacaggtcccgctactctgccatggcttggcaagtgagggatgctgtatcttagactgaactccttgaagagagaggaccggtccatgatgacggtgatgccagtaagcaacccataataagtccccgccacatgcctgtcctctccacttgcccaataggcacgctctgcagcctcacggtgccccatggcaatgctgcc

SEQ ID NO: 25219 - DNA, 1122 bp, Artificial sequence
  DNA replication origin
agagagcacagggttgggggtagggttatagattaacagcatcccaaggcagaagaatttttcttagtacagaacaaaatggagtctcccatgtctacttctttctacacagacacagtaacaatctgatctctctttcttttccccacatttcccccttttctattcgacaaaaccgccatcgtcatcatggcccgttctcaatgagctgttgggtacacctcccagacggggtggcggccgggcagaggcgccccccacctcccagacggggcagtggccgggcggaggcgccccccacctccctcccggacggggcggctggccgggcgggggctgacccccacacctccctcccggacagggcggctggcggggcgggggctggcccccacctcccggacggggcggctgccgggcggaggggctcctcacttcgcagacggggcggccgggcagagacgctcctcacctcccagatggggtggcggccgggtagaggcgctcctcacatcccagacgaggcagcggggcagaggtgctccccacatctcagacgatgggcggccgggcagagacacgcctcacttcctagacgggatggcggccgggaagaggcgctcctcacttcccagactgggcagccgggcagaggggctcctcacatcccagacgatgggcagccaggcagagacgctcctcacttcccagacggggtggtggccgggcagaggctgcaatctccgcactttgggaggccaaggcaggcggctgggaggtggaggttgtagtgagccgagatcacgccactgcactccagcctgggcaacattgagcactgagtgagccagactccgtctgcaatcccggcacctcgggaggccgaggcaggcagatcactcgccgtcaggagctggagaccagcccggccaacacggcggaaccccgtctccaccaaaaaatgcaaaaaccagtcaggtgtggcggcgcacgcctgcaatcccaggcactctgcaggctgaggcaggagaatcaggcagggaggttgcagtgagccaagatggcggcagtacagtccagcctcggctttcacaactttggtggcatcagagggagaccggg

SEQ ID NO: 25220 - DNA, 1386 bp, Artificial sequence
  DNA replication origin
gtgagccgagatcacgccactgcactccagcctgggcaacattgagcactgagtgagccagactccgtctgcaatcccggcacctcgggaggccgaggcaggcagatcactcgccgtcaggagctggagaccagcccggccaacacggcggaaccccgtctccaccaaaaaatgcaaaaaccagtcaggtgtggcggcgcacgcctgcaatcccaggcactctgcaggctgaggcaggagaatcaggcagggaggttgcagtgagccaagatggcggcagtacagtccagcctcggctttcacaactttggtggcatcagagggagaccggggacagggacagggacagggagagggagagggggagggggaggggagggggagagagagggagctgtatttttaataaagatgggatttcatcaggttggccaggctggtctcgaactcctgacctcaggtgatccacctgcctcggcctcccaaagttcaggaattataggcatgagccaccgcgcccggcctctaatgtcactttctaaatgcagccccaggatggaacacaaaactcccttgtgttttgcagagtggaggacaatgggctatttactgtccttattccgggcactgtacttcctactcacactgcctagatagctgcctttgatagccttgtgagcccagattgtggcaggtaaagggaaccccacactcacttctcctcctctctgggctcttggcctgttgaaaacagacagaaggagctaagtagggacctgcacagaaagtcaggctttattactgaagagctgaatgcagaattggcagggtctccgactgccttcctcgaatctagtccttgcacaactctgacaaatcttccaattgcagctaaagaacttagaacccagagagcaaggacccacctgaacctgccggcaggagaaggcctgctctgtctgcttaatccaggacagctggaagtagagccccagctgtacatcctgcctccaccagcacaggtgagctgtgccccctgccacgccctgcaggagtgctgtgtgctccccaggctatcccatcagatgggtggctttgcctgcagctagaacaagagtgaggagggcggtgaaggaggctatggtaggccaaacaatgcctgccacccagaagaaatctacacccttatccccggcacctgtgaatccattaccctatgaggcaaaaggactttgctgttgcaattaagtcaaggaccttgagctggggagattctcccccatcatccaggtgagctcaatgtaatcacaagggcctttataagaggaaggctgggcggtggctcactcctgtaatcccagcactttgggaggctgagacaggcat

SEQ ID NO: 25221 - DNA, 1410 bp, Artificial sequence
  DNA replication origin
gaccctgccacacccgcacacacccacgccacacacccctgctggagggaagggaaggaagagcctctgcctcatttccgggcctcctcctccaaagcggagggaaaagccttctgcagaagtgctgagtcagcagcgggtgacaaatgagcctccgggcggcgggaacgggcgcgagcacttagcatgcagagcgcgttcgtgccagcgccagccccggcccgcggcgggcgagggggcagggagcggcggccggctgcccgctcgggggaggcctgggggaggaagtgactcgctttgactttgcaaacgcccgactttgcagcccaaggtcacgcagcaggcgccgccagccggcttcctgcagggaggcggggtgggctctggctggcgctgggcggcagccgggccaggcaggggaggggctggacccggggaggggaggggagcaagaggagggggtggccctcccagtgtggcaggactccgcaagaacagacaatggaactgcgaggagaggtccctgagcgcgagggccgtctcagaaatgcccagggccggcccagggagctgagcgtggctagagctgatccctggggttcttctgctcgcccgaaagcccccactggaatctagtcaaagggcacctcgcagcacgcctgggttgctgcagccgccccaggcagacttcttccctcctgcccctctaatttattcttcacggaacagccagcgagttcttttcaaaacatcaatcacatcatttcctgtgatggcttccctctgcccttagaataaatccagcccctcattgcgggtaactcatctccggcatgagccactcttgattgtgaaaggatgagctattaaaaacgacaccaggaggacatgcctgaactgggactgtcccagcaccaggcccaacttctagcctgttcccactgcggcacttctgcctacaccccccttctttgcatggctggcccaggtctcagcatgaatgtcaatgtcgtctctgcagagagaccttcccttgccatccacctgcagaggtccctgctccttaagcagttatactgctttatttccttcatagcttttaccaccctctgattttaccttttttgtttgtttgcttctcttttgtctatttccctccttcaataaaagcttgagggcagagactttctcggttttgtttggctctgctgtatccccagtacctggaagagtgtgtgggacatagttggtgctcagtaacattaaatacagaaatgaatgcaccaatgggtggcagacctgaaagtgaaccaagtcctgggaggacagcctcagggacacataacaaggagagggccagggcctgcgtgggggtgttcctgtgcaggatctatggataagagccgcagg

SEQ ID NO: 25222 - DNA, 814 bp, Artificial sequence
  DNA replication origin
gggcatttctgagacggccctcgcgctcagggacctctcctcgcagttccattgtctgttcttgcggagtcctgccacactgggagggccaccccctcctcttgctcccctcccctccccgggtccagcccctcccctgcctggcccggctgccgcccagcgccagccagagcccaccccgcctccctgcaggaagccggctggcggcgcctgctgcgtgaccttgggctgcaaagtcgggcgtttgcaaagtcaaagcgagtcacttcctcccccaggcctcccccgagcgggcagccggccgccgctccctgccccctcgcccgccgcgggccggggctggcgctggcacgaacgcgctctgcatgctaagtgctcgcgcccgttcccgccgcccggaggctcatttgtcacccgctgctgactcagcacttctgcagaaggcttttccctccgctttggaggaggaggcccggaaatgaggcagaggctcttccttcccttccctccagcaggggtgtgtggcgtgggtgtgtgcgggtgtggcagggtctgtctgtatgtctgatgcctgtccatcaccggtgtatattttcgcggctgtgtctgtcttttgtgtatggctgagtctgtgtatgtgtcttagtgcatgttgatccctgcgcctgtctggtgggtctttgtccctgtctgtgggcatctgtgttggcctgtgggcctgtcatgtgtgtgtcatacgtgtgtctgggtgagtgtgtgtgtgtcccccccacccccctccctcagccccagcctcctcccctcagacttcacc

SEQ ID NO: 25223 - DNA, 908 bp, Artificial sequence
  DNA replication origin
tgagtctgagccgcgcccccagcgcacccccggggaccggggccttgccgcccgccgcgccgtcgggccggggcgcagccgccagcctgcgcaagagaaaggcctctccggagcccccggactcagccgagggcgcgctgaagctgggcgaggaacagcagaggcagcagtggatggcgaaccagagcgaggcgctgaagctcaccatgtccgccgggggcttcgcggcgccggggcacgcggcggggggtccgcctccgccgcccccacctctgggaccccattccaaccggaccaccccacctgagtcagccccccagaacggtccgtcccctatggccgctctcatgtcggtggcagatactctgggcacagcgcactcgcccaaggatggcagttccgtgcactctaccactgcgtcggcgcggcgaaacagcagcagcccagtctcgccggcctccgtgccggggcagcgccgcttggcatcacgtaacggggacctgaatttacaggtggcgcccccgccgcctagcgcccacccgggcatggaccaagtgcacccccaaaacattccggattcccccatggccaacagcggacccctctgctgcaccatttgccacgaacgtttggaggatacgcatttcgttcagtgcccttccgtccccagccacaaattttgcttcccttgctctagagagagtatcaaggcccagggggccaccggcgaggtgtattgccccagcggagagaaatgccccctagtcgggtcgaatgtaccttgggccttcatgcagggcgaaatcgcgactatcttagctggggatgttaaagtgaaaaaggagagagacccttgaaccactgggcagccacctcctttgccctagaccagctcctctccaatcctg

SEQ ID NO: 25224 - DNA, 1053 bp, Artificial sequence
  DNA replication origin
gtcctctccccgacgggccccctggggcgagggccagagggttcagtgccacccggtgcccgggtccaatcttgctgaagccgctgcttccccggaggaccgggggagggggtggcagccgagaaaggaccttctcccctccgcagcgtcggccgttctgctggcggcgactgggtttgcaccccggagggagccgccgcggccactgcttccaggacgcacgagagcagaggagaggagtgcacgcacgcaggctcccgccgcccccaggcctggccggcgcccgggccgccgcggctggcggcgctcacgttggctgcagggcgctcgcgcggcgcctcggcccgggtcgcatcccttcccgctcgtgctcacgctcgcccggaatgtggggttgtgattgttactctacgttccggaggcgcgtctcggcgctcctgctccggctgcggctcgcgctgtccccggcttggccgcgcgggatgccgcccgggcggagcgctgacgtcaccgccatgctctgcaccagttcttccccctcccctttacacttcctctgtggagcccacttgttgctcaggcaaggcgcatgcgcggcaggacgcccagattcctcccagccggcccctcctccgcgcctccgccctcccctcccccctcgccgtgtgtgtacaacagctgaggcccggcgagctaatgctggaagtccagagctgggggtggaaattaaacagacgatgacctttcctttccctgccgggcattcccaagtaaaaacgcatttaagaaccactagcgtcgtttccgatccctgctccccaccccacccccaagcctcggcagtgaatttaaatgtcctgtttcaggatttttcgccgtgaatttcgtataaggtattaaccatttcatctgcggttgaaccttatcccccccggcatggatgttaaattcatcgccaccactgatgccgaagcacctgcaaaattagctgttttccaatcttccagaaattgtcttttctatttgtttttgtgccctgatctaggaacccgg

SEQ ID NO: 25225 - DNA, 1190 bp, Artificial sequence
  DNA replication origin
ctccgcgacggctttcgccagccacgtgacccgactcggatgacccggcaccatggagaccgcacgctgttctcctagaagggcccttggaaatgcgccctttccccgcccccgccggaagaccaggccggcgcggggcggggccagcgctcagaggcctacgctctgtccgcggccggcgggcgtctctatggttggttcctcaggcctcgccgccattttgtacgggggccttgagcaatgagcggcttgggcaaggtttccaggcggggttcagaggagccgggggtggggccggcttggagtcgatacagagagaggagcgactctcgcactgtcttggtgcgtgccgccgtgccgccgtgccgccgttgggggtgggggccggggcgagtcgtgtccggcctgtgcgcgtgccgggagcgacagtgcccggcgtgggagagcgggcgtgcgggcggcctcagcctggagtcgccgtgacaggggtgccagacctccccgcgtgctcctcgcattttctctacgcctgtcgccctgtttgttttttgttcccgtccaccctcgagaccgtgcttcacgaggtcgaggcgcgatgagttattttaagtagatgatttcatgacctttgatgtttgactgactttgtcatgtgctatgggttttatatggatgctgtttcttggtgaaggttcacggtgaacacacgtgtgtaacagctaaagaaaaaaagggcttgggatcagttgacgttctgatgccttgaatcagtgaaggttacttagaaaaagaattatttcgctagtgaaaaagaggacatgggcgagtttaaagagttgacgggtcgaggcagattcaagagctgagctgtccagtaagatggtcactaacgactggataagtttctcagttgtactagccacatttcaggagctcagtgacctctttattggacagtgcagattatatatagcccattcccagcatcgcagaaagttatattggacagtgctgatttagatagtggggaattgttttatactggtcatccaggcctttgtaagtgctgctaggtcgtggttaatcacgttagtcctctagacacaggtaattctaatgtattactgggtatgggtgtacttgttagtagtcagctttaccaacaagtaatatgcctacaccatgtaagg

SEQ ID NO: 25226 - DNA, 1763 bp, Artificial sequence
  DNA replication origin
acggcggcacggcggcacgcaccaagacagtgcgagagtcgctcctctctctgtatcgactccaagccggccccacccccggctcctctgaaccccgcctggaaaccttgcccaagccgctcattgctcaaggcccccgtacaaaatggcggcgaggcctgaggaaccaaccatagagacgcccgccggccgcggacagagcgtaggcctctgagcgctggccccgccccgcgccggcctggtcttccggcgggggcggggaaagggcgcatttccaagggcccttctaggagaacagcgtgcggtctccatggtgccgggtcatccgagtcgggtcacgtggctggcgaaagccgtcgcggaggcgtggggaggagaaatgggcgggaggctgtggggatagcgagacacccagcgacgacgaggttgtcatggtgccgcggggccgtgctcgcgcatgcgccacctgacccacaggccggtcgtggagctgcgaccccggccctaggtgagaaagggagggctcggtccgggaggaggggagcagggatgacggcgggagagggattgggcgaggagcgtggggaaaggaggtggaagtaggggagagaggaagaggagcgagtaggcaagaggggcaaaccgggactttcggaggacggagagccaaatggtgggagcagggctttggtttgctgtgaggggcgtgggagagggaatcgcgggtgaggagggggctgcgtgtggggaggaggcttgtgtgaggggcaggtgggccctggtctagccctgggcgcaaccgccagccggctgggcggggagagagcttggagtccagcccggctgggagctgagggccaagcaatgggcaggtgagtgggcgccagaactagtaactgggcgagggtcctgggcttccggtttgaggtcgggggtggtaccctgttctggctccagggcacaggtgtgctgccttttccagagacctgccgtcaccctcgttgctggttgtttcccctgagtggccagcttgccaggcttggtgtcgggggtagtgtttctggggagaaggtgggcagtgccaagtaaggagttaagtggttagtgggtgggttcgggggagctctgatcccggcccaggtcacaggctggagctaggctccctgttattgctcaagtcctggcagtatgcattgcctgggcgtttgccctggaaggctggtggtatgccagtcacagcacagtactagggtctgcccagttttgccctgctgagctggcaggctggtggatgcctggagggtgcacatgctgcctggcacagatgcaacgtgggctggtgcgaatgggtaggtgggcactgttactgtgaactaattgcagcaggggatcggagaaagttctctaagctcatctcccctttgaaaggtgaaaatagagccaaactggtctaaaacataggaaattgtatggaattggggttcaggatctttgacacgaattttcagccaagttggagaaatggaatgaatgtggaagggaagatgaatattagacatttaggtagacagggtttttccactgttaagatacccagacattctcccagaatggtatccctgaatatgcaggccaaaagaaaatgacttcggagaaaagctagtaatgtatttataattctaacggggattactcaaggttttctttctgtgaccttatcactttattgtatttaagcctctggttgggcttttacctcacac

SEQ ID NO: 25227 - DNA, 1157 bp, Artificial sequence
  DNA replication origin
caggaggacagagcttagcctcctgctgggctgggctggcaacaagttcaatattactgcaattggttggtgagacctctggagagcagagtccttgggtgacatgtaagcagaactggggaccaggcagaggaatgtcatagcatggttgtacctcatggggctacatggaggaatggccagcacctagtcctgcctggcacagagcaggtgtattacctggatgccacaactctgtgagcatatggacagcatgatggatgagaatgatgggggcaaggggggatgttaccaataaaatacagcatgtccgcttaatttgcatttcagatagccaatagcaaattttctcagtgtatctcatacaatatctgggacataattatactaaaaaattatgagttgtttatctgaaattttaatttagcgggacggtctgtatttttatttgctaaatctggcaacttttggggttggggtttggggcccggcaacctttggggtgggaggtctttgtgtagagcccaacctgcccgccaaggcccactcaccggagaagaactggctgatggaggtgggcaggagcgtgaggaaggccaaggggtgggcgaaggagatggaaaggacagcggagatgtaggccacgccggccaccatggagtagaggcaggccagggaggtgtagaggcagaacaggacgaagttgcgcatgttcctgctgccgatgcagttgccggtgaagaaacagtgatggtcgtgcctcagggtgactctggcgcacactcggcagaagtgggtgctaggtgaggggcatggagtcttcctggccgaggccccctggcaggcccccaggtcgtctggggagttctggatgacaaggacgtaattgcccagggcgttggccgagaggaataggaagagcgccccgtggagcagggcgggcgagaagagccgggcggccgcggggtcctcgcgcatgctgggcaggaagaggaagagctgcagcacgaaggtcaccagggagatgcacaagaagtaggcgggggccaccacgttgagcagccgcagggccagcatcctcgattacattcctgcggggcccggggtgagaagaggactgactgactacggcgtccagggggcgccctcgcccgctc

SEQ ID NO: 25228 - DNA, 1532 bp, Artificial sequence
  DNA replication origin
cggggggcggcttcccgtgcgtccgggaggcagtggccgagaagcccgcggctgccggcgctgccggtctttccaaggctccggctgtgccgccctctgccgcgggcgaggcgggcgccagggctgaacggacagctccctacaccccggggccccacgggcggtctctgctgtcccttctcccgcgcagggccagggctgaggctgcctgccgagcgcccctcactcccctagcccctgtccttcgccgccttcccagcgctgcggcgcatctggctgctcccgcgcccccctggcgaccggcgccgggaaggcacttgcttcgccggagccccaggccgagggctctctggggtgggcagcaccgccgcagcccccggcggcgcaggactgggggcgtgcccagcccccggcgaccaccctcaggcgtgcactgcgctgcgccccagcggtagggagaggcccacgctctccgcggaggctgcgggttcccggggggcgctgggacctgcaaaggggattccaaggtgaccagtcgacccgtgcggacgggacagcctggacggaggccccgtggcatccacccatcctaggtgcaaccgccttcccagaacttttctcgcgcctccggctggccgattccttagcccctggaaaagttctctcgggcgcacggaatcctatttctcggtggcttccgaagctggccaggaaccccggctgtgaggcgtggggtgggatggggacgtggtgagggctgagcacggcggcggggtcgatcccaggaaaggctggccaagcatccactcgtgcgcccagggcgggcttgtcggcatggaaaggatttcggcgccatgagggttgtttgggtttctctcagcaggagggcgggaggcgggcgcgaaggggggattttaatttcgcctcaaatgaaaacgctcttcgcaaagaaatagcccgggcagccagcgttggagagatgtgctggccaggacccgctgacacaggtattctggttgcgcccccacctcacccggtgcccgagagcgagtgtgagtgtatcgattgtttcaattgatttttttaaagctagatagcagaggctgcgtgtctgtacacgcagatatatacatacacaaatacagatactcaagcgcacacagattacacgtacagagtcacagacaaggacacacacacacacatcgtggtccctcacgcacacatacctccaaagagccttgggtaacctggtgaggtccctgagtgctgcccaagatgtgtgtgtgggtggggacgcagggacggagaaaggggagtgtgaagcaggatttccagcaggtcaagtgccgctgattctcctgcccccgaccccaaatccttccctttctcctcctagggaggtctgaaccagaaatcccaaacctgggcttgtttccacatccacagaggggaggagtcctatcccccggtgccccccaccctcacaactcctaaagactgcaaacgagtccctccctcctgtgccagac

SEQ ID NO: 25229 - DNA, 1074 bp, Artificial sequence
  DNA replication origin
ttcccggcgccggtcgccaggggggcgcgggagcagccagatgcgccgcagcgctgggaaggcggcgaaggacaggggctaggggagtgaggggcgctcggcaggcagcctcagccctggccctgcgcgggagaagggacagcagagaccgcccgtggggccccggggtgtagggagctgtccgttcagccctggcgcccgcctcgcccgcggcagagggcggcacagccggagccttggaaagaccggcagcgccggcagccgcgggcttctcggccactgcctcccggacgcacgggaagccgccccccgcgccgccgccgccgcactgccgccgtcgcagaggggtgaggaaatcaactcaccgagctctggtcgccgacaagaggagccccggacgccggctctcgccctgcccgaggctgcaaagttgtggactcggcccggctggctcgcagcctgcgcttcgcttcgggaactgggcaagtagcggggatgtggggaggagggagcgggcagctgctggcttcccacttgggcgccagcgagtaagggccaggaagcggcggggatggcagctgggcaccccccagccccgccacccctccctccgctcctgggggcggtgctctggccgccagtctcagcatcgtggacttgccccctcctcccctctcgattccccttgagcgggctggggcgccctgcctggtttcagcgcccgttccagctgggagattgggattcagccctgatgtggattctccagccatcatcctgcccttccctctcggctaggtcccacgaccttccctgctctccactcggactgaaggaaccctgggggcttgagaggtcagcttgccagggcaacacccatgaagatcagcgtcatctcctcggaagggctgtgtacagagggttgggagttgggactctggagcctgtctacctgggtttgaatattcaccattcactactgtgagatctcagattccagtttcttcgtctgtaaattccagtgtgatcttagattccagtttcctcatctgtgaaatagagatatgagggtta

SEQ ID NO: 25230 - DNA, 1316 bp, Artificial sequence
  DNA replication origin
gagtgggagaggaggcatgaatgggaggcgtgagtgggaggtgaggcatgagtgggaggggaggcgtgagtgggagggggcgtgagtgggaggtgaagcgtgattgggaggcgagagggggagggaaggcgtgagtgggaggggggcgtgagtgggaggcggggcgtgagtgggaggtggggcgtgagtgggaggggaggcgtgagtgggaggcggggtgtgaatgagagaggaggtgtgagtgggaggtggggcatgagtgggaggggaggcgtgagtgggaggtggggtgtaagtgagagaggaggcgtgagtgggaggcagggcatgagtgggaggggaggcgagagtgggaggggaggcgtgagtgtgagggggcgtgggtgggaggggaggcgagagtgggaggggaggcgagagtgggagggggcgtgggtgggaggggaggcgagagtgggaggggaggcgagagtgggaggggaggcgtgggtgggagaggaggcgtgagtgggaggcggggcgtgagtgggaggcggggcgtgagtgggaggcggggcgtgagtgagaggtgaggaagtggtgacagcagcatgggccactgtcagttcagctgtgtgtgggggtggggagggaggacgttctcagggctccctctcagagtattcagggccccgccgaaatgtcaccactacccgagaccatctctgacctcctcctgtggcgttctccaccatgcctctgtctggtcgtctcccctgcctggggaagacagcgccatgaggcaggacttggtccccagctcccagaccagtggctggcacacagcaagtggctgaaggaatgcatgagtcgggtggagggctggccttcaccagggaagaggaggaaacagcagactgcgctccactaaacagggctgggaagcctgaggctgagggaatccctaccacatgactagaatcttctatgtgaaatgggaggtgaggccttgattcagagtcagaggtagggacgtgggcaggacgggactgtgagaagggttggagatttgagcagagaagacaaattaatgttaaaaatctctctaagatatcttaattcgttaacacttacttggcaccctagtagtaggtatggtcaataactccatctttcaggtggggaaactgagtctgggggaggctgaggaatttgctcaaggtcacactgccagagtggttgaggctggctgattacaaagccccaaggtctaagccgtgtttcttcctgtgcacaccacgcctgcctgcccagtgctgggactcccaccgcccaga

SEQ ID NO: 25231 - DNA, 2100 bp, Artificial sequence
  DNA replication origin
aaggatttatcttcttagatttttaaaaataaaactttttttgtcattgtaacaagaaaaaaaaaatcaaagtgatatttccaagaataaacctgcgagccaccttgcaaggtagatgttgctgccttttttctatccaggaagccttcaagagatgaagtcacttgtctgaggctctgcactttggagagggcagattctagcaagtgaaggaccccgcctctcgagggatgacaatggaaggaatttggctccgcttacttagcgcaactgacaaatatgcatcagatgctaagtacatggcaggctggattggatgtggggtgcagtggtgagcaaatccaagttcagggcctgcggaaagcagacacactagactgatcttgcagatgagggatcgttacagacagggttaaaaatgttgaagaaaaggaatgcattttctgtggctatataacaagagatctggacccaggaggggtggtcagggctccctggggaagtgtgcttaagctgaaatctcaacaaaaggtgagtgactcagagaagggccactgcggaagggggagagggaagagcctgggaaagggctggtggagggaagcaggtggccctgttgagaagctaaacggtggactcatgtggcagggataggggagttgggaggagtaagggaggatggaccaaactaccaggccacggcacagcatctgcaattgattccacaggccctaggaagacagtgaaggtctctgcagcagaatatatgtccccaggcaggggaatctctctggatgcaggtggaaaatggataagggccctagagcgtggacctaaagggatcagttagagctactgcagttgtccaggcaagaggctgatggaggcctggaccaggggatggtaggagtgatggagagaaagaaagctgggaaggtcaaagcaacacaacgtggagacacattggctatgcttggggacctgggtaagagggagaggagaccctggggagaatggtgggaggtctgagaccaaggtcagaggaacaggtgggtgtgtggtgggatatcatgaaatgttttggacaaatggaaccccaaatgactacaatatccatatggaggtattttgaaaggcattgaataatcaggctggggcccagtgggagaggattagctggagacaggaatttaaaagtttatgtgtagagatggcaaaggaagttgtcagtgtgggtgtcattgcccaggagtcagggtgaggggaaggatatgggatcagctggttggggggactcccggtgtggaggagaagtctgctaaggagacacaggaggagcagacagagaggcagaaggaaaacccaaagaatgtgacatcacctatgcaacggagagcacctgtgcaagagagaaagacggtctacagggtcagacgtttcagagaacgcaggcaagatgtgaactgagaaaagtccattggatttagcggtggggggaaccactgctgaccttcagggttgtctgggtggagtgagggacgggagctcacatttgaggaggttgaggcgtgagtgggagaggaggcatgagtgggagaggaggcgtgggtgggaggggaggtgtgagagggaggggaggtgagagtgggaggagtgggaggcaacgagtgagtggggggcaggcttggtgggaggggggcatgagtgggaggggaggcatgagtgagaggcgagagggggaggggaggcgctagaaggaggggaggcgagagtaggaggggaggcgtgaatgggaggcgtgagtgggaggggaggtgtgagtgggaggtgagtggggaggggaggcgtgagtgggagaggaggcatgaatgggaggcgtgagtgggaggtgaggcatgagtgggaggggaggcgtgagtgggagggggcgtgagtgggaggtgaagcgtgattgggaggcgagagggggagggaaggcgtgagtgggaggggggcgtgagtgggaggcggggcgtgagtgggaggtggggcgtgagtgggaggggaggcgtgagtgggaggcggggtgtgaatgagagaggaggtgtgagtgggaggtgg

SEQ ID NO: 25232 - DNA, 937 bp, Artificial sequence
  DNA replication origin
gtgcctgcccgtggccccccgtcagtcatctctgcacaccaacacctgcagcatgcttcaaatactgcgactgctctttcccggccttggggcatgttcagcttttgtgcagggccaagtaggggaggagttaaagcccccaagcgcaaccctcaatgaacggtggacagggagctggtggaaaatacccacgattgctcacctccaggaaaattctggggcatgtgctctacaccagctcccagagttccctggtcatgaagctccacttgcccacaggggtaagttgcccctccatgctccctttttttggttgcctttgcatcctcactcccttactggcctttcctgggatcacctcccataaacaagcgctactcattccaagtctcagggtctgcttggatggggtcacccaaactgagacggtggggatacacgggggtctctgatctccgagagactgcagaagggcgaggcacgggcctagcaggggtgggcagggccaggtacactaagtagcagcagctcagcagggcccagaccacttagcatggaggcccccgctggtccactgggccttgttaatcctttagttttcagatggtgggaagtccaagagtccctggggaggggcggggcagcagaggggcagggataggaggtacctgggcagcagctatttaccaaccagtctgaaagtttcattaggggtgagaggatggagggtgagagggtgagagggtggaggagcgtgagagggtggagcagcgtggaggagggtgagagggtggaggagcgtgagagggtggagcagcgtggaggagggtgagagggtggagaagggtgagaggtgggggccaggtgattgttactaggactgaagggaggaagcttggcccctgctcaggtgaaaccgccccctcccatctatcac

SEQ ID NO: 25233 - DNA, 988 bp, Artificial sequence
  DNA replication origin
ccgcgctccgcgtccccgggacagcatggagcgcccggagcccgagctgatccggcagagctggcgggcagtgagccgcagcccgctggagcacggcaccgtcctgtttgccaggtgagggctacacgagcgcccggggatgcgggtggaggctgcctcggcgggaaaggggtcacgcggcaggaccggccccgaaggagggaaaactggccgctgccggggcgctggggcgcctgccagatgtgcgccagaggagcggggcgcggcgacgggtggcacagcccctctgcctctctctcgaccgtgggcgcctgttgccaaccagcgccgcacaccactctcccagcggggctcaccgggccgggcgggatcccctcccgcggatctccccacatctgggcgggtggacctccgtccctgcgcggcgcctccaccccgccttgtgcctcctgcgtcttccttaggtagcgactgcaggggtgcaccccgctgccggtatcagggtactggggtgccccgagagccggggaagggagatgtgtggggcgagctcctgcgcccgcgtgtgagcggtctggctccaggtgtgtggatccctgacaaccaacaagacaaacctttccgaggaaagagccagagagcagccggggaaggggtgacagatgcgggagcctcaccgcaggggagaggggtggggggtgtgcaggccgggtgggaagggaaggccagtctccaacctcagctcgcagttttggtaacccttccgctatcaccaaccgggcactgcttccctcaccgtggtgttacctatccttggcacccttggacagtccagaacttctacccaggcttccgcaaaaccacccccaagacaaaaggggaaaacattcagttacccggtgagacctcccaaatgccgaggagggcctctgcttctgcctccggactccccccagctcacttttttctcaggcacccgctgtggctg

SEQ ID NO: 25234 - DNA, 1122 bp, Artificial sequence
  DNA replication origin
ttgctgcacaactgaggaaacagggccagagaggcgtggacagacagaggagataggctcggagacccctgagggaataatgagagagaaataaaggtgaaaacgggcttgctctcccaaacctgggccaccagcactgggctggggcttgaggaactttctgcttgaaagagaaaagtttagttgtaattggcaggtggccaattgcacaccctgagtggggagcatggattctattatctgaacttctattgaaaaaattaaacagtacttccgttaaaaaaaaaaaaaaaaggccgggcgcagtggttcacgcctgtaatccccagcactttgggaggccgaggtgggcggatcatgaggtcaggagatcgagaccatcctgtctaacacggtgaaaccccgtctctactcaaaatacaaaaaatcagcctggcgtggtggcgggcgcctgtagtcccagctactcgggaggctgaggcaggagaatggcgtgaacccgggaggcggagcttgcagtgagccgagatcacgctattgcactccagcctgggcgacagagtgagactccgtctcaaacaaacaaacaaaaagatgaaaaatcatggaagtggggaaggcccagggagggaagaggtgaaaaattaaaattaaaattaaaattaaatcatggaacggtagaatgttagagctgaactccctcaagattccaccctggccaagcagagctgggattagaactggatctcacggctttctaaagatggagtctcaaaaaaacccaggcctggctgggaatggctgtggtcttggccctgtccctacggctgaaagccctggtggcccccaacgtgtgctggtgccctagtcagaccgagaactaggcccctaggccgcctccccaggcctgacctgcaggccaggtgggtggcaaactcaaatgcctctggcaatgcgtgagttgaggggcctgtggagagggggcgcatgcagcgcctacctgaggcgaccaaattcaacacagtgccctcggggctcgggaggagaaactgaggcccagagagcctccgcgatgtcagttacgttctgcaggccgggcctttcccaggccaccatagcggc

SEQ ID NO: 25235 - DNA, 1217 bp, Artificial sequence
  DNA replication origin
tgtgcggcggctcgtccaagcggtggaagcgggtggcgaaggacagcagcgtcaccaaggccagcagggcccaccagccgaccgcctcgaagcgccgtgagccccaagcaggccgtttggggcttcgcgccacagcctcagcggccacgtcccggcctgcggccctagcagcctgggggccacagcggcccctccggggacgcagctcggactctgccaggcctccgcccgtggccggcggcatcttccccctcctctgggtcgccctccggcccggaggcacactttgtctgaccagccgccccgccaaggagtcacaagagggcagctcggggtaccccgggaaatgcaacgcccttcactgcagcggagcgcggggccccgggctcggggcggggcgggcagcgtggtcgcggcccgggccgctaggaggcggcaggaggcgcagagcatgtcgggaccgggagggccggccggcccggggcgggggggactgggcaggaggggtcgggctcagggaactgcaactcccagcagcccccaggtacggggcgtggcgggagagctgggcgagccagaggcgaccggaaggatctttctagtccagcccctcgctttacccggacgaaagacacgggcctgattcgtcgagtctcactgagccttagtcgtcggcaggtcccaggcgcgaagtttctcggcctggaggagggggtcgcgcgaagtgccagatgcaggcggggaaggtctgtgacgcgcacccgggtggagggaagctggttagacacctggagaccctggggggcggggtcagaagtgagctgcaccgcccgcccaggccgacaacgactcccggcatgcagtgctttgcgccgggcacgctctgcgcctgcgtgctgcgcgctgcccgctggggctcgaagttccgggagggttgggccagaggaggcggtcctggtagggagtgcgtagcagggtggagtcgctgtccggtcgcgcttcacttctgctccgccctccctgctccccataacagacccctccctccactaaggcttccaaacgtcgccccaagcctcccaatttctcgcagcccttcatgctcttctcttggccctagcaggaggtgaccttccagtaatgtttgtattttaagagtccccgggccgggcgcggtggctcacgcctgtaatcccagcactttgggaggccgaggc

SEQ ID NO: 25236 - DNA, 1318 bp, Artificial sequence
  DNA replication origin
gaaacaggagtgagtagaaaataacctcgagcccagggcccgggtggtggcagcggcggggaaggggccccgcgcgcgaaggggctgccgaggtgggtccgctccgcggggaagcccaggacagagcgcggcggaggctcgcgccgtggtgcggggccctgaggccgggcggcacccacccgccagcgccccggccttgcgtacctgaggcggccgcctggctcccctccactccctggcagtccccgacgccgccagccgaccctgggcgggctgtggggctccaggagcccggcccctcagccgcctgcaggtcagacatctgcagcccgcgcacggagctctccgctgccagccgcgagtggctccggaaacagccgaaggccgagcgagcgccgagcacagccgagcgcagcctgcaggccggaagaagcggcgcggcggccgcttgaaaagctagctgacccaggggcggccacaggagctctggcccgctgaggctggcgatgaggccgcagggagggttactgcgtgcttgtgacagacgatttttaaagtcagggcttgaaagaacaaacaaaacctggggaagagtcaggaagacactgccggaaatcgtggtatccatagagacgctatcggaagttggggttgctaggaagccgcggcgcgtctgctaagctgcaaatggctgaagtcccggaggattatgattccggcccagatgaagatggagagctggagcctgagaggcctgaactgcctggacttcataaattgtatgaaaatgccgaaccagacaccatggcaaaggcagactcgaagctaccagcagagatttaccaagagccacagccagagaccgaggaagaggacttcaaagagggggagccagacagtgctaagaacgtgcagctgaaacctggcgggacgtcccaggaaggaattgccaaggagtccaagagagacgtaccaagcgaaactgaaccagggatacaccaagaggtaaagtcggaaacatccagagagatgggagagtttttcaaagatttggaggcccctatggatgaaacgcataaagagtcagacctagagccaccagaggaggctaaaccaaatgttacagaggatgtgttcctagagtcagctatggaaacagatccagatccagtgccaccaacggaaaccatgtctgaggtttcgggggccacagtcagagagagaaatttagaattactagaggaggagactgaaccgggggttccagaggaatcacttagagtgcaacatgaagagacaggtctagagcctccagagc

SEQ ID NO: 25237 - DNA, 1076 bp, Artificial sequence
  DNA replication origin
cctcaggatcgccgggtcccgcccccggaggaggcgaggcggggcgcgactgggttcgcggccgcgtgcagaggtgcaggcagagcagcctcggaaccgagacgatgcgtgcgctccgcgaccgagccgggctcctcctctgcgtgctgctgctggcggcgctgctggaggcggcgctagggctccccgtgaagaagccgcggctccgcggaccacggcctgggagcctcacgaggctcgcagaggtgagtggcggcggcaccgggctgcggagcgcgctgtcggtcccacctccccagcccgccggctccagccgtgcggggagcgggaccgggacacacacaggcagcgaccccccgatggagagaggggccggggccggccggaagctcccggacaccgggcgttgcccaggtgcgccggacttcggggcttccactcctcgcgcgtgaccgcgagccgggctgccgcggaccagccgggtgacaagtttgacttctgtgcggagtgaggtggccgacactccacggtggccgggcttcctcgccctgagcggacctcgcctgcagccccctttccaggtgcgcgctagctcggagaggagtcccgccggtgcgaggaatctggcgctttgcggagtggcgggccagggccgctgaggttcaaacggtcaggtgagccccttccatgagacaagcggaggcacagtggggctctccagccgccggcaggggtggccagcctgagactggctctgtcctcgtggcctgtgggtgggcattggggtataaaacaggaatgagatggaagagtggtgttggccatggagagaagccatggtctgtcaaaccctgtgtcttccagtcactgaggggtctacagtccagcttattgccccctggaatgcagcggacgttcattcccatggggacaaagacagccagacttgtattagggtatgcaggagcagtcctatgtggcaggtggtcttaggtcttgggtcctgggtccttccatgtactaagctgtaggaggcccgaatagctcttcccatcttgccgtttttccttccttcc

SEQ ID NO: 25238 - DNA, 839 bp, Artificial sequence
  DNA replication origin
gcatcgtctcggttccgaggctgctctgcctgcacctctgcacgcggccgcgaacccagtcgcgccccgcctcgcctcctccgggggcgggacccggcgatcctgaggggcgcgcggggcacggggccgcgcggggcgggggcgcgcagctcgcacagcctctctggccccggctcctcgcgtgggcgcccgcacagctctagggtccgcgcacctggacgtcccccaccctcctccgaggggcccctcggcgctccccgacccgtcttgaccctgtgggcggctctctttgatctggccgcctccccgccctcagtccccgccgctgtcgccgtcgcagcccccagcgaattcctgttcgcgggaagctgcggcccggcgcgctccggccctgcgctgcgactcctgcggggccctgagggtccgacgccacctctgccctccccgaccgcgctccaactgcgacctggaccggcggtgccgcgcgggcgagggaggcgcagcccgacgggagagtggcgcgagtcttcggatgccgggcagatgtttggttatgcctcgaggaaggtttgctggggaggaagcctagaagtaactcccccagggctcttcccagtctactgccggaggtggagaccagagcagaggcacaagccagcacctgccattctgcacccagtgtcctcggaatgttctcagagcacttttaaaaaccggagagtcggccggtggctcacgcctgtaatcccagcagtttgggaggccgaggcaggaagatcacttgaggtcaggagttgagaccagcctggccaacaaggtgaaaccccgtctctactaaa

SEQ ID NO: 25239 - DNA, 1116 bp, Artificial sequence
  DNA replication origin
ttctgcacccagtgtcctcggaatgttctcagagcacttttaaaaaccggagagtcggccggtggctcacgcctgtaatcccagcagtttgggaggccgaggcaggaagatcacttgaggtcaggagttgagaccagcctggccaacaaggtgaaaccccgtctctactaaaaatacaaaaattagccgggcgtggcagcgcgcacccgtagtcccagcgggtgggagccccgaggtccggcgcacctggcccacacacaggtgggagaatcgcttgcacctgggaggcagaggctgcagtgagccgagattgcactattgcactccaacctaggcgacagagtgcgaccctgtctcagaaaacaaaacaggagaaagttgagactcagatgtgaggataaagtcccagaaggacagccgggagtctggtcgtcgcctagttgtatcctgggtgaaacagtgaaactgcccacttcatccagtgggacccttggtgcagggatcctcacgtaggccacgagggtcaccaagatggcctgcctctgagcaaccgacacaaaaccttagcttgtggcaaagatcaggaactcttgagaggcagtgccaatctggatggggcagcttgggaatgtgaacgcagtgacaccaggtagggggaggggttgggacaggtcggtgaggagcagtcacaaggcactggggacatgcccacccaggggtcatagcagggcgcacaaaggatgactcaagtttcagggcagggttggtggatccccaggggtggtagagaggatgaagagcaagcccagctactggtgtaaactgctgggtctgggtcaagttagagtaagactgtggggggactgtgtgcttttctggaactactcctattcccaggggcacagctgcagggttttgaatggtgcatcacagggatgacaacctgggtctggattcggccatggggactggaatctttcaccatttaccaagtaggtgatattattggacaaattatttgacgtcttcgtgctcttgtcatctgtaaaagtgtgggggcccgggagcaggagaggttacccctctcacctgggcaccaagtgtgagaagtgtgag

SEQ ID NO: 25240 - DNA, 980 bp, Artificial sequence
  DNA replication origin
ccccgcggattgcccagcggatggcccggagacctcgccccgcccggccgcccctccgccagtccacaccgccaccccggccccgccgcgcgggcccctcgtacctggccggcggcggctgcggctgcggctgcagcgctgctcctcacgtacccgttccgtacttccccgttcgccacgcagccattcgcccgcaccgtgcggcggcagcagcagcctccgggctccggccgcatcttcctggcagcaccaggcgcaaggcaggctctgtaggcggtggcagcggcggcggctgctccaagtcccgctccgcaccccacccacctccccgaaaccggaaatggctgcagcgccgccgccaattcccgggcgggccttcacagagggcggggccctctccgcagaggaccggtctcggccaaggccacgcagcgaagggaaaaagcggcggggacctgccgagagggatgtggtcctgaggaccgctgaccaatctggaagagaaggaggcggaccccatgctgctgcctggccaatcacggacgagagcaaagcgcctcgccggtggagagggggcttctctagagggactccagggcctggcacctgattggaggccgcatccaggtccggggtagggcttgcctgtttaatggtccagaccgaggaggaggcggagcccagggaaaagtagccaattagagtgtgaggaaataaaaggggctgagccgaagtctctagagcgggttcccaggttctccaggacaggtggcgccctctttgcccttgcctcgtgggaagttttggagtttatgtcctagcccaagacaggcagctcgcttatttaattagctgattcctctgtgagtgtttatagaatagattttttgacaatctctcatcattcttcaatatgcgccacacattcactatttctgaattattataagtaataattcagatgccttttcacgtgccct

SEQ ID NO: 25241 - DNA, 1167 bp, Artificial sequence
  DNA replication origin
ggttatgattaacagcatccaaaggcagaagaatttttcttagtacagaacaaaatggagtctcctacgtctacttccctctacacagacacagcaacaatctgatttatctatcttttccccacatttcccccctctccattcgacaaaaccgccatcgtcatcatggcctgttctcaatgagctgttgggtacacctcccagacggggtggcctctgggcagaggggctcctcacctcccagacggggcggccgggcagaggcgccccccacctcccggatggggcggcggccaggcagaggcgccccccacctcccggacagggcggctggccaggcaggggctggcccccacctccctcccagacggggcggctgccggggcgggggctgccccgcacctccctcctggacggggcggctgccgggcggagtcgctcctcacttcccagatgggacggctgccgggcggaggggctcttcccttctcagacggggtggccgggcagagacgctcctcacctcccagacagggtcccggctgggcagaggtgctcctcacatcccagaccgggcggcggggcagaggcgctcaccacatctcagacgatgggcggccgggcagagacgctcctcacttcctagacgggatggcggccgggaagaggtgctcctcacttcccagactgggcggccgggcagaggggctcctcacatcccagacgatgggcggcctggcagagacgctcctcacttcccagacagggtggcggccgggcagaggctgcagtctcggcactttgggaggccaaggcaggcggctgggaggtggaggttgtagcgagccgagatcacgccactgcactccagcctgggcaacattgagcactgagtgagtgagactccgtctgcaatcccggcacctcgggaggccgaggctggcagatcactcacggttaggagctggagaccagcccggccaacacagcaaaaccccatctccaccaaaaaaatacgaaaaccagtcaggcgtggcggcgcgcacctgcaatcccaggcactcggcaggctgaggcaggagaatcaggcagggaggttgcagtgagccgagatggtggcagcacagtccagcctcggctcagcatcagagggagaccgtggagagg

SEQ ID NO: 25242 - DNA, 808 bp, Artificial sequence
  DNA replication origin
agtgaggagcgtctctgcccggccgcccatcgtctgagatgtggtgagcgcctctgccccgccgcccggtctgggatgtgaggagcacctctgcccagccgggaccctgtctgggaggtgaggagcgtctctgcccggccaccccgtctgagaagggaagagcccctccgcccggcagccgtcccatctgggaagtgaggagcgactccgcccggcagccgccccgtccaggagggaggtgcggggcagcccccgccccggcagccgccccgtctgggagggaggtgggggccagcccctgcctggccagccgccctgtccgggaggtggggggcgcctctgcctggccgccgccccatccgggaggtggggggcgcctctgcccggccgccccgtctgggaggtgaggagcccctctgcccagaggccaccccgtctgggaggtgtacccaacagctcattgagaacaggccatgatgacgatggcggttttgtcgaatggagaggggggaaatgtggggaaaagatagataaatcagattgttgctgtgtctgtgtagagggaagtagacgtaggagactccattttgttctgtactaagaaaaattcttctgcctttggatgctgttaatcataaccttacccctaaccccatgctctctgaaacatgtgctgtgtccactcagggttaaatggattaagggcggtgcaagatgtgctttgttaaacagatgcttgaaggcagcatgcttgttaagagtcatcaccactccctaatctcaagtacccagggacacaaacactgcg

SEQ ID NO: 25243 - DNA, 686 bp, Artificial sequence
  DNA replication origin
aaccaccctgatgcctctgaggagcttacattttatggtacagaaagagctatagactgaactttgaaagaggtcagcacaagaagagagaaagttatctgaggtttaggttacagcatttgggtgttcttggaatctgcaaatagggttgcaggaggggtggatggggctttctggaggaggtgagaggtgagcaggacttcagtgtggtcaagaggagaatgtacagaaaggcatggagaaggcctttggggcaggactgaagaagtcctttatggtgtcacctgagggtggggtctgaaccttgaggccagactagggaggcctatgtctcccaggctggggtggggcaggtgctgggcctggatggcttgggtgtccacaggcaggggctactgtatgtggactctgcgtgtcccctctccctgctggggcttcaccaatcatttgtgtattcattgtttgactttgcaggtatttagtgcgcttctgtgtgctggccccaggggttatgagggtgaacaagctaccatcagggcactatgatctatttataggggaatagcagctgttaaatgtgtgaggagaaaaataaagctttaataacacctgtggtaagtgccctagacttttcctcttggcatttgagtgactgcagggaggttgcagtattgaagctgagacca

SEQ ID NO: 25244 - DNA, 957 bp, Artificial sequence
  DNA replication origin
agtgtggtcaagaggagaatgtacagaaaggcatggagaaggcctttggggcaggactgaagaagtcctttatggtgtcacctgagggtggggtctgaaccttgaggccagactagggaggcctatgtctcccaggctggggtggggcaggtgctgggcctggatggcttgggtgtccacaggcaggggctactgtatgtggactctgcgtgtcccctctccctgctggggcttcaccaatcatttgtgtattcattgtttgactttgcaggtatttagtgcgcttctgtgtgctggccccaggggttatgagggtgaacaagctaccatcagggcactatgatctatttataggggaatagcagctgttaaatgtgtgaggagaaaaataaagctttaataacacctgtggtaagtgccctagacttttcctcttggcatttgagtgactgcagggaggttgcagtattgaagctgagaccagaggatggttaagggacaggtggatgggacaatgagaacgagaatgcagagacctcaggatgggaaagagcctgggtctgtccagggacaggaggggcttggtggcagcagggcagacagagaccctgaaagataaggctggagagctgagctgggtgtgctgagggggtctgaggctggtgtggggaacaagagtagaactcactggaagaccagttatggggcagttatggtcatccaggcaaaatggggcggtggcttggacatagggaagtggagaggagaggactgacatatttgcagatggaaaccacaggactcaaggatgggttacatggagaggtgtggaggaggtggaggtgccacagtcacctccccaggttctggcatggacggtggtgggtgttagcaggtcatcctactggcagtcggggaaggaattttctataatgctggaatttgcatagttgcctc

SEQ ID NO: 25245 - DNA, 917 bp, Artificial sequence
  DNA replication origin
ccctctgcgtggctgcccagtctggaaagtgaggagcgtctctgcccgctcgccatcccatctaggaagtgaggagcacctcttcccggccgccatcccatctaggaagtgaggagcgtctctgcccggctgcccatcatctgggatgtggggagcgcctctgcccggccgcgaccccgtctgggaggtgaggagcgtctctgcccagccgccccgtctgagaagtgaggagaccctctgcctggcaaccaccccgtctgagaagtgaggagcccctccgcccggcagccgccccgtctgagaagtgaggagcgtctccacccggcagccaccccgtccgggagggaggtgggggtcagcccccaccaggccagccgccccgtccgggagggaggtggggggggtcagccccccacccagccagccgccccgtccgggaggtgaggggcgcctctgccctgccgcccctactgggaagtgaggagcccctctgcccggccaccaccccgtctgggaggtgtacccaacagctcattgagaacgggccatgatgacaatggcggttttgtggaatagaaaggtgggaaaggtggggaaaagattgagaaatcggatggttgccctgtctgtgtagaaagaagtagacatgggagacttttcattttgttctgtactaagaaaaattcttttgccttgggatcctgttgatctgtgaccttacccccaaccctgtgctctctgaaacctgtgctgtgtccactcagggttaaatggattaagggcggtgcaagatgtgctttgttaaacagatgcttgaaggcagcatgctggttaagagtcatcaccactccctaatctcaagtacccagggacacaaacactgcggaaggccgcagggtcctctgcctaggaaaacc

SEQ ID NO: 25246 - DNA, 1339 bp, Artificial sequence
  DNA replication origin
ttgcaccgcccttaatccatttaaccctgagtggacacagcacaggtttcagagagcacagggttgggggtaaggtcacagatcaacaggatcccaaggcaaaagaatttttcttagtacagaacaaaatgaaaagtctcccatgtctacttctttctacacagacagggcaaccatccgatttctcaatcttttccccacctttcccacctttctattccacaaaaccgccattgtcatcatggcccgttctcaatgagctgttgggtacacctcccagacggggtggtggccgggcagaggggctcctcacttcccagtaggggcggcagggcagaggcgcccctcacctcccggacggggcggctggctgggtggggggctgaccccccccacctccctcccggacggggcggctggcctggtgggggctgacccccacctccctcccggacggggtggctgccgggtggagacgctcctcacttctcagacggggcggctgccgggcggaggggctcctcacttctcagacggggtggttgccaggcagagggtctcctcacttctcagacggggcggctgggcagagacgctcctcacctcccagacggggtcgcggccgggcagaggcgctccccacatcccagatgatgggcagccgggcagagacgctcctcacttcctagatgggatggcggccgggaagaggtgctcctcacttcctagatgggatggcgagcgggcagagacgctcctcactttccagactgggcagccacgcagaggggctccacacatcccagacgatgggcggccaggcagagacgctcctcacttcccagacggggtggcggccgggcagaggctgcaatctcagcactttgggaggccaaggcaggcggctgggaggtggaggttgtagcgagccgagatcacgccactgcactccagcctgggcaccattgagcactgagtgaacgagactctgtctgcaatcccagcacctcgggaggccgaggctggcggatcactcgcggttaggagctggagaccagcccggccaacacagcgaaaccccgtctccaccaaaaaaaatacgaaaaccagtcaggcgtggcggcgcgcgcctgcaatcgcaggcactcagcaggctgaggcaggagaatcaggcagggaggttgcagtgagctgagatggcagcagtacggtccagcttcggctcggcatcagagggagactgtggggagagggagagggacagggacagggacagggacagggacagtttttgatttctttaccattaagtctgccattatgctctcagggggactag

SEQ ID NO: 25247 - DNA, 1849 bp, Artificial sequence
  DNA replication origin
gtcattacattgctttccctctgcgtgtatctgtgtccaagtcaccacttgttataaggacaccagttagattggattagggcccaccctaaggacctcattttaacttagttagctctttaaataatctaactccaaatacagtcacattaggtactggggttaggagttttggtgggaggggggatgcagttcagcccccaacaattcctgtccaatatacagggtgactatttccaggggatggggagaatcagtggaaatttcatgtgacatctgatgctgagatttttaacccaatgttaaatttaaagttagtaggattggaaaattagacctcttaaagtgaggtccactgagattttggtttccaggagacattgaatagggtgagaaatttccaaaaggccactgttgagaaacctcatcagataaacacagaagaccatgtagcccaagtccaaattattaatctcaaaggccgaccaataaaggactcagtggaaagcaccctgatccaagttagaaggcttgggtttcatcttggccctgcctcttagctgtgtgaccttgaacaagttacttagactcgacgtcttaattttccccacctctaaagtggaagtaataatacatcagtggatttatgcaaggataagatgagcacagtgctgggtatctggtgagttttcaaaaatgttatttgttcctagaatctgaatctaaggagcttggactctttcctattggcagaaaggagcttctttagaagcctgggagtgatctctttaaatgtgagttttagaaagttaattctggcttggaagcagtacgttaggagagttggaaggagagagaggttggaagtacaaagatcagctattaggcttttgaaataatccaactgatgaagacctgtttgaactgagttactgaggtggatggggatggagggtagaagggaagaggggtatagaagagaaaaggagagagaaggaaaggaggagggatattgagaagatagcatcagaacataagaaaattgattggatgtgacagtgtgagagagaggagatgaagagcgtgggataatgcccaggttgctagctgggcctgctgagtggatgagaatactaaggaaggtaaattcagaaggaacagttaagagaggaagtggaggaggaaaacaatgagtttggttgtagtcagagtatgtctgagttgtctagggggcatccaggactaagagggtcaaggagagtgggtagtttgtgaagagatctggagatggagctccagggaccctgacatctgaagggtggtggggagaaaaggagcacctgagagtgactttcaaaggtgtgcagagagggaggaggggaggcacccgaacatgccaggaagggggcccgaaagcagcagatgcagcaggaaggcctgggaggtgggaactgagaagaagctctggtttggtattttggaagccactggtaactttggggagagctgtgtgagtcagggacatgtgggggcagaagccggaatgcagaggatgaggatagaaagggagagatggagatgatgagttttgatggagaaaaggattacagagaatatcttcaaggcgagggaagagggaagagtcccgttttcttttaaggtaactggcatgctgctgggggcagggggtgagtggggagcctatagaggttcaagaaagtgttgatagaacagggtcccagggaggtggcagggcttggagaaagagcactggggataagtcagttttaaagggaccgtttttcattgagaagggaagtagggaaggtaggtaggagagaaagtgagt

SEQ ID NO: 25248 - DNA, 1106 bp, Artificial sequence
  DNA replication origin
tgagaagaagctctggtttggtattttggaagccactggtaactttggggagagctgtgtgagtcagggacatgtgggggcagaagccggaatgcagaggatgaggatagaaagggagagatggagatgatgagttttgatggagaaaaggattacagagaatatcttcaaggcgagggaagagggaagagtcccgttttcttttaaggtaactggcatgctgctgggggcagggggtgagtggggagcctatagaggttcaagaaagtgttgatagaacagggtcccagggaggtggcagggcttggagaaagagcactggggataagtcagttttaaagggaccgtttttcattgagaagggaagtagggaaggtaggtaggagagaaagtgagtagccagaggggagagaagcacaggccttcatgactaaaaacctcaatttttttttttcagtaaaaaaggagcccctgtggcatctgaatgaggaaggggaaaagggtttagaagagctggagaagggagcatattggggaaaagttgaaggattgctaagtagctgaggttgagagtgacagaaccatattgtagttgcatttgttggcatagatggggttttggtttctagtgcctatctgttgctcaggagcaggggaagtggttgcttagattcctcaagatagagaactggtggggtggtggaagttcaggggatgaggtaatgattgactatgcagcctcttctaggtaagaagtgaagagaatggagtatgggagggatgatagactgtgagtgaagagattagggtgccgtatagctttggtgaggttagcaaggagggttaggaagagacaggagatagaaataagattttcctgagataggtatttgctggagaggtagttctgggttgggttgaagtccaggtcggtgataagggagtaggaaaaagggtacaggttactggagcggaggcacaaaggccatgaagccagggcattgagcacatgggcattgatcacagtagtgggagtcagggtacagagggaaacatagccagttaaatatctcagtggatgtgggagagtaatcttggggtgatat

SEQ ID NO: 25249 - DNA, 890 bp, Artificial sequence
  DNA replication origin
aaatcaccaggagttcgagaccagcctggccaacatggcaaaacccagtctctactaaaaatacaacaattagctgagtgtggtggtgtgcacttgtaattccagctacttgggaggccaatgtgggaggatcacttgaacccaggagacagaggttgcagtgaggtgagattgaaccaccgcactccagcctggaccacagagtgggaggagaaagaggaggtggcgggggagaggggatgggggagggaagggagatgaggaggaggaagagaaagaagaagaggagaaggaggagaaggaagaaggaaggaagcaaggaagggaagggaagggaggaagggagggagagaggaaggaaggaaggaaggaggaatgaacgaacgaaagaaggaaagaaagaaagaaagaaagagaaaaagaaagaaagaaagaaagaaagaaagaaagaaagaaagaaagaaagaaagaaagagagaaagagagagagaaagggaaagaaatcctgcagagcctgtagggggagaaaaggcagaatcctgtgggataagccagtcagtaatagcagaggggaccctcccatgggctaggataaggaacagaataagaaggtgatgagatttaggacagtggaagaaggaataaatgaatgcaatgacagatgataagaaggtaagagaaagccggatgaagaaagaaaaagaaatgaagtacacgcaaagaaggcaacatgaagacagcatagtacgctagaaaaagaaagttagtgataggtttttaaaagtgtgaagtcaaaaatagtgttgcaagaagtccctcccaaaatgcttatgtcattaaagcagaaaaccctttacatacctgtgtttccattaatagctccatttaac

SEQ ID NO: 25250 - DNA, 782 bp, Artificial sequence
  DNA replication origin
cctctgttaagcaatgtttaaagtgtgtgtgtgtgtatgtgtgtctgtgtgcacatgtgtgtgtgcatgcatacatgtgtgtgacagaaagagacagaaagaaaggctgcctgactgattataggtttataaggttcacttcttagttcatctctgaaaacaagagattttggctgctgtcttatttgtccttaaataatttgggtgatccacctgggcattaggtcacagccttgggccctctttttaaagcacttgcatgcctgggaagaaggtggtaggctcttacagcagcaaataagagtgtattgcttaaacctctctttgaaggcagggagggcgagggggaggtgtgagatattttaaaaataagatgtgctgctaaattctctgccaacctccgttcatgctgagtggagtgtaagtaacaagtatcagatagttcctccagatgtcagctatttaaagagtcacatgctagaagttctgtggatagcaattgtcttattcctggtggtggtggtggtggtggtggtggtggtggtggtggtggtgatggtggtggtggtggtggtggtggtgatggtggtgatggtggtggtggtggtggtagtgatggtggtggtggtggtggtggtgatggtggtgatggtggtgatggtggtggtggtggtggtagtgatggtggtggtggtggtggtgatggtggtggtggtggtggtggtgatggtggtggtggtggtggtgatggtaatgatggtggtggtggtggtggtggtggt

SEQ ID NO: 25251 - DNA, 1054 bp, Artificial sequence
  DNA replication origin
tgaagagttagggcctttctctgcattagggtttggttaacaggaatgttgtggctagtttgatctatctagaccactaaaatattttccatatcagcaataaggctgttttactttcttatcattcgggtatttactggaacaacaattttaatctctttcaagaacttttcctttgcattcacaactcagccaactgtttggcccaaaaggcctagtttttggcctatttcagctttcaacatgccttcctcactaagctcaatcatttctagctttaaagtgagaggtgggtgactctttctttcacttgaacacttagaggccactgcagtgttattaatttgtctaatttctatattgctgtgtctcaggaaatagggagatgggggtggggggctggagagagacaaggatagacagagagagagagagaccgacccagagagacagagagagagagagacagagagagagacggagacggggagagagacggagacggggagagagacggagacggggagagagacggagacggggagagagacggagacggggagagagacggagacggggagagagagggagacggggagagagagggagacggggagagagagggagacggggagagagagggagacggggagagagagggagacggggagagagagggagacggggagagagagggagacggggagagagagggagacggggagagagagagatggagagagagagagatggagagaaagacagagagagagacggagacagagagagatggagacagacagagacagacagggagagagatggaggaagggcaggttggtgaagaagaacacagacaatattaagttcactatcttatgagtgtggttcatggcaccccaaaatagttataatagtaacatcaaagatcacagatcaccataacagatacagtaagaaaaaaagtagaaatgtgagaattaccaaaatgtaacacagagttgcaaagtgagcacaggcaggtagaaaaatggtgccaacagagttcctggat

SEQ ID NO: 25252 - DNA, 1261 bp, Artificial sequence
  DNA replication origin
tcttagtatagaacaaaatgaaaagtctcccatgtctacttctttctacacagacacagcaaccatccgatttctcaatcttttccccacctttcgcccttttctattccacaaaaccgccattgtcatcatggcccgttctcaatgagctgttgggtacacctcccagacgggttggtggccgggcagaggggctcctcacttcccagaagggacggctgggcagaggcgcccccccacctcccagacggggcggctggccgggctaaggcaccccctacctccctcccggacggggcagctggctgggcgggggctgacccccccacctccctcccggacggggcagctggctgggcggggactgacgccccccacctccctgccggacggggcggctgccaggcggagatgctcctcacttcccagatggggcggctgccgggcggaggggctcctcacttctcagatggggcggctgccgggcggaggggctcctcacttctcagacggggcagcctggcagaggcgctcctcacatcccagacggggtggcagggcagaggcgctccccacatctcagatgatgggcggccgggcagagacgctcctcacttcctagatgggatggcggccgggaagaggcgctcctcacttcccagactgggcagccaggcagaggggctcctcacatcccagacgatgggcggccgggcagagactctcctcgcttcctagacgggatggcagccgggaagagggctcctcacttcccagactggacagccgggcagagggactcctcacatcccagacgatgggcggccaggcagagatgctcctcacttcccagacagggtggcggccgggcagaggctgcaatctcggcactttgggaggccaaggcaggcggctgggaggtggaggttgtagccagccgagatcacgccactgcactccagcctgggcaccattgagcactgagtgaacgagactccgtctgcaatcccggcacctcgggaggccgaggctggcggatcactcgcggttaggagctggagaccagcccggccaacacagcgaaaccccgtctccaccaaaaaaatacgaaaaccagtcaggcatggcggcactcgcctgcaatcgcaggcactcagcaggctgaggcaggagaatcaggcagggaggttgcagtgagccgagatggcagcagtacagtccagcttcggcttggcatcagagggagaccgtggaaagagag

SEQ ID NO: 25253 - DNA, 841 bp, Artificial sequence
  DNA replication origin
ctcttcccggccgccatcccatctaggaagtgaggagcgtctctgcccggccgcccatcatctgagatgtggggagcgcctctgccctgccaccccgtctgggatgtgaggagcgcctctgccaggctgccccgtctgagaagtgaggagcccctccgcccggcagccgccccatctgagaagtgaggagcccctccgcccggcagccgccccatctgggaagtgaggagcatctccgcctggcagccgccccgtccggcagggaggtggggggcgtcagtccccgcccagccagctgccccgtccgggagggaggtgggggggtcagcccccgcccagccagctgccccgtccgggagggaggtagggggtgccttagcccggccagccgccccgtctgggaggtgggggggcgcctctgcccagccgtcccttctgggaagtgaggagcccctctgcccggccaccaacccgtctgggaggtgtacccaacagctcattgagaacgggccatgatgacaatggcggttttgtggaatagaaaagggcgaaaggtggggaaaagattgagaaatcggatggttgctgtgtctgtgtagaaagaagtagacatgggagacttttcattttgttctatactaagaaaaattcttctgccttgggatcctgttgatctatgaccttacccccaaccctgtgctctctgaaacatgtgctgtgtccactcagggttaaatggattaagggcggtgcaagatgtgctttgttaaacagatgcttgaaggcagcatgctcgttaagagtcatcaccactccctaatctcaagtacccagcgacaca

SEQ ID NO: 25254 - DNA, 1346 bp, Artificial sequence
  DNA replication origin
gttatagtttttttttttttggttttgtttttatcttgttttcttggggttgccccctcttgtttgtgttgtgtgtggaaatggcgaactcggcaaatacaaacaccgtggtaaggacgtggttcggtggccggcgggggcttcgttcaggctgcagcaacggccggaccgggcgggggcggggacggcggcgactcccggcctcgactcttcagccgcccgcgcggccgccgccgccgccgcttcccgcctcgggcggatcgggccggagcgccgggcggcgggcgcgggggggcgccgagggctcgcggcgcggggagggcgggggcgccggtggggcctggggccgccgcgggccgggccgggccgcggaggcggttgggcccggtcgggcgcgcagccccggccccagaacccggccgccgggagggagggcgggaggggagccgccgcttccccccgaggggcccgtccgcgctggcttgacgagggctccccgagtggctacagaacaaaaactgtgtgtggggaatcgggcgaacccccgagacccatcgtgatccactttaatgcagtggaagattaatggttactttgggggtttcttaggttgtttttggcggctgtgctttgggaaccttctctgaggccattttatgtttaaaaaaaggacgaaggttggttgaaaagcacttatctcagttccttccgaatgggtaaaatggcgaaggggaagacccccatcgtatcttcgcctagcagaagcaccaaaacaaacaaaaaaagcctgcagtggtccaagtgtccccgctttcgccttgaaatttacctacttcttcccgttggtccctttttgttacttgcgatcacgtaggtttgcaaaaagcagtcacataaataaccttttcagtcaccaacgcagtgtgatcactagtccacccaactcttatttttatgatgacaataaaacacgttttttgcccggtcccaaatgccgcagaccagcccgcggccgcccgacaccgtaccgttggcgactcgggtctaaccatcatggctgcggccgcttaccctgcttttcagtccctgagccttgtggtcctcctccctttggctgccctgtttatatagagccattgccgctctctaatatagactctgccaggatgggaaggtgcttttcaggcctacgtcaccgcctctccatttaaacaccagatccggctttaaatagtgagagctgctgagagcggggctgggaggtgcgtgctcccgaggcaagagccaggcgtgtgcagagctcagtttatttctaggtccttttttcaccctgtgatttcgcaccc

SEQ ID NO: 25255 - DNA, 1042 bp, Artificial sequence
  DNA replication origin
tgcgccgccgctgccgccaccggctgcagctccagccgtccggtccgcccgcttctctcctttatatagcgagccaacaagctgcgcgagccaccaccgccgccgccgccgccgccgagagacagggtgaagggggagggaggggcggaaagggcgggggcagaggtgggcggggctgagcgcgagacaccgcgagagccgcgtgcgcaggcgcgccggggcggaggccgccggcgagccgcgttgtcacgcgccgtggcgggtactggactggcggagcccggggagtgaagtagtgaaatcggacctacgcctctccaacgctcgcgtgatcacgtggttggcacccaggcggaagtctgcggcagttctttgcggtgaagaacttgcaaagcgttgctggaaaagacgggagttctactgacactccagtccaaagctaggtgggaccgcctcctgtcgcacgtttccgcctggtcccgcgctttaggagctaggaaatgtgacagaggcggtgcctactgcctcgctaggaatggccgcggaggaggactggtcacgtggcgtggcttccggcctctggcgcgttcctattcgggaaggttttaaatgcggagtcatctcttgatttgtcagcgaggctttgactgtgagcttcgcggcgttcgcgcctcaccgcctcaccgagggtgggtctttcgcgcgcagaattgtgtaggattttccaaagggagtaaaagccgatcggggcctacttttaacattccacaattagtaacgtctgattcgtttgtttccacagtgggtacgctgcgaagactaggcttatgttacccagaggttagtcctctactaggccacgtactttaaataatttatcacgctagtggaaatgcggggtggaagaaaaccccaccagcctttggattgtaacagcacagtaactttccctggtttttaaaaatattgccaaaatactgcgactccatgtggccaacgtatagtgactgatcactttgaaatgcatgcccttgacccacca

SEQ ID NO: 25256 - DNA, 883 bp, Artificial sequence
  DNA replication origin
gaggcaggagaatcaggcagggaggttgcagtgagccgagatggcggcagcacagtccagcctcgtatgggtatcagagggagaccgtgccgagagggagagggagggggagggggaaggggagggggaaggggagggggaaggggagggggagggagagactgtttgcttctttttatgatatctatctttttgttgaatttctcattcaaataataaactgatttttgtgatttcattagtctatctgtattctcttgcatcttactgcggttctttaagattattattttgaattctttttctgtcatttcatattgttttattagagtctgttactagagaagtattgttttccttgaaagtgacatgtttctttccccttttcatggttgatgtgttcatacattgatttctacacatctggtggaaaagttatgttttccagttttatgaagaaggcttcatagggaaacacttatttgtaccaataaacctttgggtgtcagttcagtggggtgcattgaccttgattctaggtatgtacagtagtgtactctccatttagtctcttcagctgtaatccatactagtggcatttgtgtgtttctcagtggtctaggctgagagaatttgtgataatgatgtggctttgctggagttgggcttcccagactgtttctcaggcctggtgtgtgtgtgtgtatgcacacagtgggtcagccaacttggggtttggctcactgtggtttaggtcacagggttgttactctggctgggggcatgcacacatggttgctcagttggccttggggtgtgcctgccaggaatggtttgtgggacttttttttttttcttttcacatctgcaacagatttatttt

SEQ ID NO: 25257 - DNA, 1279 bp, Artificial sequence
  DNA replication origin
gggaagcttggccagcagatcccggcggcgcccggccagtccccccgccccggctccccggctgcccaatcatggcgcggctcgggagcgcgccgcggccaatcaggagcggcgggagcggcgccgggagccggcgggcgcagagcgagctcgagtctggagccggcgtcggcgctgcggccgggagggatcgtggcgagagcagtgcggccgggtgggtatcccgcggccagagaagccggctttgccgcggcgacctttcggcggacgccggggaccctgcggaccgcggcgcaggtaactgcacccacgccccgcagcaggaggcgagcgcgccccccaagaggggccccgcaggtggagcgggcggggggcgggggcgggggcgggggcgggccggccgcgaggtcctagcgccgctgtgccccctggcgcccccgagcctgcctggtcgagccacgcggaggcgcggcgtttccaccagccgcgggcgtcccggggtgggggaggacgaggggactctgcttaaggcaggtaggggtggaggaggactcctgcgacacctggccccatacacagacacttctggccgacgggtgtcttcgagattgggacgcccaggatgtcttcatcggcccgagtggggaggcgacaacaggtgtccctggggacggtgcttcccctacactcccctcgcctgaaaccccgggttggcgccgcgccccgccttcggggtgtcgggaggcaggaccccagcttggcctcaggcgctctgcccgctggacagcgcccagaggcggcctggacgtggggcttggatggagttttctctgcgcgttgccaagcaatttgcctgacacccgcctctcgctgggatgaagagttgaagatgagagtgcgtgtgtgcgcgcgcgtgtgcgtgtgtgtgcattcgtgcgtgtgtgtgcgcgtccgtgtgttctggtgcaacccctactggaaggagctgcctgagggctgtgagtgaatcattaactgtgcttttgtgcagctcctggtctctgcctgcctccccgcctctcccgacgctccccgtttcccccttgagcaggtccttcttactctctgtgcctccctctcctgatctgtaaggtggcgataatgattgcaccggtctgatagcgttgttttgaggattatatgagccaatgcctgaaaaacacccagcacagcgctaagcactcaataaataccggctcttattatttattatacggagtggatgggcttttaaagagta

SEQ ID NO: 25258 - DNA, 1272 bp, Artificial sequence
  DNA replication origin
ccccgcccgctccacctgcggggcccctcttggggggcgcgctcgcctcctgctgcggggcgtgggtgcagttacctgcgccgcggtccgcagggtccccggcgtccgccgaaaggtcgccgcggcaaagccggcttctctggccgcgggatacccacccggccgcactgctctcgccacgatccctcccggccgcagcgccgacgccggctccagactcgagctcgctctgcgcccgccggctcccggcgccgctcccgccgctcctgattggccgcggcgcgctcccgagccgcgccatgattgggcagccggggagccggggcggggggactggccgggcgccgccgggatctgctggccaagcttcccgcgccgcagactcgctttcccgcggctcccggggccccaaccagaccccgaagctgggattcttcccctctgcgcctagtggggccggccgtccaggcacgaggcaacacggaaagcatcgattcgagcgacatggaaatggcgtggaatggggagcgcatgggagtcccacccgctccgcctgcgggctggtagttgagacctcctaggagcgggaatcattgctcaaccagcctcactcctgtacgttcatttattgatacttttgactctacaaagggcgtaggctcaggacagtggcttgtaaacagcgggcgccaaatagttctgtggactcatatcggactctacacacaacctctcagtggtcctacctgagctctcaaagggagagcaacttgtttaaggtcttaatcacgccaacaaattattaaaaacaccgtgctaggtgtttagggggaaaaaagataaaaatggtgagatcttcaattacagggaagttcatacctagctagagagatgaggctggataatgataatgaccctaacgtttttatggtgcatattatttactaggcactattccaaacgctttacatttattaattcagaaatacagaggctgtcataagaacatccatatgccccgtgaacatgtggacaagtgacaccagtttttagtctggagagattttcattgaaagacacaccagcagtcactccacactgtggaggagaggcactggttagaaccgagggcgtatagggaattgaaattgctctgtcctccgtctcttctcccacctgccctgaatctttctaaggaatgaaaacaaaacataaatctgggtgccaccagacctttgttctgctactcataaaacaccctctctaaacacc

SEQ ID NO: 25259 - DNA, 796 bp, Artificial sequence
  DNA replication origin
ggtaaggttatagattaacagcatccctaggcagaagaatttttcttagtacagaacaaaatggagtctcccatgtctacttctttctacacagacacagtaacaatctgatctctctttcttttccccacatttcccccttttctattcgacaaaactgtcatcgtcatcatggcccgttctcaatgagctgttgggtacacctcccagacggggtggcggccgggcagaggggctcctcacttcccagacggggcggcctggcagaggcgccccccacctccctcccggacagggcggctggtgggcggaggggctcctcacttcccagacggggcggccgggcagagacgctcctcacctcccagatggggtggcggtggggcagagacactcctcagttcccagacggggtcgcggccgggcagaggcgctcctcacatcccagagggggcggcagggcagaggcgcttcccacatctcagacgatgggcggccaggcagagacgctcctcacttcccagacggggtggcggccgggcagaggctgcagtctcggcactttgggaggccaaggcaggcggctgggaagtggaggttgtagcgagccgagatcacgccactgcactgcagcaggggcaacattgagcaccgagtgagcgagactccgtctgcaatcctggcacctcgggaggccgaggcaggcagatcactcgcggtcaggagctggagaccagcccggccaacacggcgaaaccccgtctccaccaaaaaatgcaaaaaccagtcaggtgtg

SEQ ID NO: 25260 - DNA, 943 bp, Artificial sequence
  DNA replication origin
tgtggggcgcgcctctgccccgctgccccatctgggatgtgaggagtgcctctgcccggccgccctgtctgagaggtgaggagaccctctgcctggcaaccgccccatctgagaagtgaggagcccctccgcccaacagccgccccgtctgagaagtgaggagcctctccgcctggcagccaccccgtctgggaagtgaggagtgtctccgtccggcagccaccccgtcccggagggaggtgggggggtcagccccctgccaggccagccgccccgtccgggagggatgttggggggtcagccccccgcccggccagccgccccgtccgggaggtgaggggcgcctctgcccggccgcccctactgggaagtgaggagcccctctgcccggccagccgccccatccgggagggaggtggggggggtcagccacccgcctggccagccgccccctccgggaggtgaggggcgcctctgcctggccgcccctactgggaaatgaggagcccctctgcccggccaccaccccgtctgggaggtgtgcccaacagctcattgacaatggcggctttgtggaatagaaaggggggaaaggtggggaaaagattgagaaatcggatggttgccgtgtctctgtagaaagaagtagacatgggagacttagaaaaattcttctgccttgggatcctgttgatctgtgaccttactcccaaccctgtgctcactgaaacatgtgctgtgtccactcagggttaaatggattaagggcggtgcaagatgtgctttgttaaacagatgcttgaaggcagcatgctccttaagagtcatcaccactccctaatctcaagtacccagggacacaaacactgcggaaggccgcagggtcctctgcctaggaaaaccagagacctttgttcacttgtttatctgctgaccttccctc

SEQ ID NO: 25261 - DNA, 1214 bp, Artificial sequence
  DNA replication origin
gtcacagatcaacaggatcccaaggcagaagaatttttctaagtctcccatgtctacttctttctacagagacacggcaaccatccgatttctcaatcttttccccacctttcccccctttctattccacaaagccgccattgtcaatgagctgttgggcacacctcccagacggggtggtggccgggcagaggggctcctcatttcccagtaggggcggccaggcagaggcgcccctcacctcccggagggggcggctggccaggcgggtggctgaccccccccacctccctcccggatggggcggctggccgggcagaggggctcctcacttcccagtaggggcggccgggcagaggcgcccctcacctcccggacggggcggctggccgggcggggggctgaccccccaacatccctcccggacggggcggctggcctggcagggggctgacccccccacctccctccgggacggggtggctgccggacggagacactcctcacttcccagacggggtggctgccaggcggagaggctcctcacttctcagacggggcggctgttgggcggaggggctcctcacttctcagatggggcggttgccaggcagagggtctcctcacctctcagacagggcggccgggcagaggcactcctcacatcccagatggggcagcggggcagaggcgcgccccacatctcagacgatgggttgccgggcagagacgctcctcacttcctagatgtgatggcggccgggaagaggcgctcctcacttcctagatgggatggcagccgggcggagacgctcctcactttccagactgggcagccaggcagaggggctcctcacatcccagacgatgggcggccaggcagagacgctcctcacttcccagatggggtggcagccaggcagaggctgcaatctcagcactttgggaggccaaggcaggcggctgggaggtggaggttgtagcgagccgagatcacgccactgcactccagcctgggcaccattgagcactgagtgaacgagactccgtctgcaatcccggcacctccggaggccgaggctggcggatcactcgtggttaggagctggagaccggcccggccaacacagtgaaaccccgtctccaccaaaaaaatacgaaagccagtcaggcttggcggcgcgtgcctgcaatcgcaggcacttggcaggctg

SEQ ID NO: 25262 - DNA, 939 bp, Artificial sequence
  DNA replication origin
tgcttggccgcccattgtctgagatgtggggagcgcctctgccccgctgccccgtctgggatgtgaggagtgcctctgcccggccgtgaccccatctgggaggtgaggagcgtctctgcccggccgccccgtctgagaagtgaggagcccctccgcccggcagccaccccgtctgagaagtgaggagcccctctgcccggcagccgccccgtctgggaagtgaggagcgtctctgcccggcagccaccccgtccgggagggagggggggcagcccccacccggccagccgccccgtccgggagggaggtgggggccagcccccgcccggccagccgccccgtccgggagggaggtgggggccagcccccgcccggccagccgccccgtctgggagggaggtggggggaacctctgcccggccaccccttctgggaagtgaggagcccctctgcccggccgccaccccgtctgggaggtgtacccaacagctcattgagaacgggccatgatgacgatggtggttttgtccaatagaaaagggggaaatgtggggaaaagatagagaaatcagattgttgctgtgtctgtgtaggaagaagtagacatgggagatgccattttgttctgtactaagaaaaattcttctgccttgggatgttgttgatctttgaccttacccccaaccctgtgctctctgaaacatgtgctgtgtacactcagggttaaatggattgagggcagtgcaagatgtgctttgttaaaaacagatgcttgaaggcagcatgctcgttaagagtcatcaccactccctaatctcaagtacccagggacacaaacactgcggaaggccgcagggtcctatgcctaggaaaaccagagacctttgttcacttgtttatctgctgaccttccctccactattgtcctatgaccctgcc

SEQ ID NO: 25263 - DNA, 1083 bp, Artificial sequence
  DNA replication origin
caacaacatcccaaggcagaagaatttttcttagtacagaacaaaatggcatctcccatgtctacttcttcctacacagacacagcaacaatctgatttctctatcttttccccacatttcccccttttctattggacaaaaccaccatcgtcatcatggcccgttctcaatgagctgttgggtacacctcccagacggggtggcggccgggcagaggggctcctcacttcccagaaggggtggccgggcagaggttccccccacctccctcccagacggggcggctggccgggcgggggctggcccccacctccctcccggacggggcggctggccgggcgggggctggcccccacctccctcccggacggggcggctggccgggtgggggctgccccccctccctcccggacggggtggctgccgggcagagacgctcctcacttcccagacggggcggctgccgggcagaggggctcctcacttctcagacggggtggctgccgggcggaggggctcctcacttctcagacggggcggccgggcagagacgctcctcacctcccagatggggtcacggccgggcagaggcactcctcacatcccagacggggcagcggggcagaggcgctccccacatctcagacaatgggcggccaagcagagatgatcctcacttcctagatgtgatggcggccaggaagaggcgctcctcacttcccaggctgggcagccgggcagaggggctcctcacatcccagacgatgggcggccaggcagagaagctcctcacttcccagacggggtggcggccaggcagaggctgcaatctcggcactttgggaggccaaggcaagcggctgggaggtggaggttgtagctagccgagatcacgccactgcactccagcctgggcaacattgaacactgagtgaacaagactccatctgcaatcctggcacctcgggaggccgaggctggcagatcactcgcggttaggagctggatattagccctttgtcagataagtagattgcgaaaattttctcccattctgtaggttgcctgttcagtatgatggt

SEQ ID NO: 25264 - DNA, 1266 bp, Artificial sequence
  DNA replication origin
gctgggatttgtctcacagtggaggcaaggaattgcaacttctttctattattgtacaccttgaaggcgaggttaattaaatcctgttgtggggtttgagggccagaatttaatttttggagttttatttaatgtcgggagcagattgggtaataaaatgtatattgagaataagacggccttttgaccttttagggtctagggctgtaaagcgtctcagggttgctgccgagcgagccatgaactgggctgggttttttatatttgatgaaaaagagcctaaacgctatctgatttgggataaagaaaaaggagcattaaccttgactatgcctttagctccagccacctttttaagagtaaattgctgggcaggtgggggagggctagtcatggaaggaaactgtaagccagaccgggtgtgaggaggggaggtgataaaaggattatagggtggaggagcagaggctggggaagaattgggacctagctcggcctggcgaggagcagcctggggaggaggggagaggttagatgggtctgtagaaaaggaagattagaaagactcagcaacacttggggttgggactgaggggacaggtgggaggtaaagaaggaagatttgggatgagttgcactgggaacagagactagagagggaccgatgtgtaaaagaatgcctggatgtgaggcacctcagaccgtttgcctattttacgacaagaattatttagatcttgcaggatggaaaaattgaaagtgccgttttctggctatttggaactactgtcgagtttgtattggggtcaagcagcattgcagaagaaaataagatgcttagattttaggtcaggtgagagttgaagaggttttaagttcttaagaatacaggctaagggagaagaaggagggattgagggtggaagattgctcatagtgaagcccagagaaaagatagtagagactcagagggaaggggttcgggggttcttaccctccagaaaagcgggaaaggggtcggggcacagagatatgaggtcagggcgcggaagtaagggattggggtgcagagatataagaggttggggtgcggaaataagggatcagggcgcagagatatgaggttggggcatggaaataagggatcggggcacagagatataagaggttggggtgcggaaataagggatcggggtgcagagatataaggggttggggtacttgtccctcccccagaaaagtggtacttgccgctaaaggtgaagg

SEQ ID NO: 25265 - DNA, 905 bp, Artificial sequence
  DNA replication origin
gagcccctctgcctggctgtccagtctgggaagtgaggagcgcctcttcccggccgccatcccatctaggaagtgaggagggtctctgcccagccgcccatcgtctgagatgtggggagcgcctctgccccgccgccccgtctgggatccgccccgtctgagaagtgaggagcccctccgccaggcagccgccccgtctgagaagtgaggagcacctctgcccggcagccaccctgtctgggaagtgaggagcatctccacccccggcagccaccccgtcgggagggaggtgggggtcagcccccacccggccagctgccccgtcagggagggaggtggggggcgcctccgcccggccagctgccccatctgggaggtggggggcgcctctgcccggccgccccttctgggaagtgaggagcccctctgcccggccaccaacccgtctgggaggtgtacccaacagctcattgagaacgggccatgatgacaaaggcggttttgtggaatagaaaagggggaaaggtggggaaaagattgagaaatcggatggttgctgtgtctgtgtagaaagaagtagacatgggagacttttcattttgttctgtactaagaaaaattcttctgccttgggatcctgttgatctatgaccttacccccaaccctgtgctctgaaacatgtgctgtgtccactcagggttaaatggattaagggcggtgcaagatgtgctttgttaaacagatgcttgaaggcagcatgctctttaagagtcatcaccactccctaatctcaagtacccagggacacaaacactgcagaaggccgcagggtcctctgcctaggaaaaccagagacctttgtccacttgtttatctgctgaccttccctccactattgtcctat

SEQ ID NO: 25266 - DNA, 1674 bp, Artificial sequence
  DNA replication origin
gagcacagggttgggggtaaggtcatagatcaacaggatcccaaggcagaagaatttttcttagtacagaacaaaatgaaaagtctcccatgtctacttctttctacacagacacagcaaccatccgatttctcaatcttttccccacctttcccccttttctattccacaaaaccgcctttgtcatcatggcccgttctcaatgagctgttgggtacacctcccagacgggttggtggccgggcagaggggctcctcacttcccagaaggggcggccgggcagaggcgccccccacctcccagatggggcagctggccgggcggaggcgccccccacctccctccctgacggggcagctggccgggtgggggctgacccccacctccctcccgacggggtggctgccgggggtggagatgctcctcacttcccagacagggtggctgccgggcagaggtgctcctcacttctcagacggggcggctgcctggcggaggggctcctcacttctcagacggggcggatcccagacggggcggcggggcagaggcgctccccacatctcagacgatgggcggctgggcagagaccctcctcacttcctagatgggatggcggccgggaagaggcgctcctcacttcccagactggacagccaggcagaggggctcctcacatcccagacgatgggtggccaggcagagacgctcctcacttcccagagggggtggcagccgggcagaggctgcaatctcggcactttgggaggccaaggcaggctgctgggaggtggaggttgtagcgagccgagatcacgccactgcactccagcctgggcaccattgagcactgagtgaacgcgactccgtctgcaatcccggctcctcgggaggccgaggctggcggatcactcgcggttaggagctggagaccagcccggccaacacagcgaaaccccgtctccaccaaaaaagtacgaaaaccagtcaggcgtggcagcgcgcacctgcaatcacaggcactcggcaggctgaagcaggagaatcaggcagggaggttgcagtgagccaagatggcggcagcacagtccagcttctgctcggcatcagagggagaccgtggaaagagagggagagggagaccgtggggagagggagaccatggggagagggagagggagagggagaggggtcctatttttctttaaatacttggaagcagaaaagtgaaatgatatgaaatatggaccttgtgttagccagtctcccaggttatctccaatgattcttccctcattcacactgctatgactctcctcccctctcattgaataggattgacctgtaaccaataggatattgcagaaatggtgaaatatggcttctgaggctagctcatgatagatatcgtggtttctgccttgttctcaatgttgtatgttttggatgcttcatgcccttcaaatctcatgttgaaatgtaacctccaatggtggaggtggccctagttgggaggtgtttgggtcacagggctggatccttcatgaatggcttggtgctgtccttgcagtaatgaatgatttctcactctgagtgaatgtgagatctagttgttgaaaagagcccagcaccttctccctgtctctcccactcttgccatgtgacatactggt

SEQ ID NO: 25267 - DNA, 831 bp, Artificial sequence
  DNA replication origin
cggatttggaggatcccgggactcggcgggagagctaggcgggctctcctccgacgcgtgtgtgcggacagctcggagccgggcgtgcggcgctgcgcgggggcgggcgcagggctcgctccaagtgctgcgcccgcccggcgtgggtctggaggctgctcagaccacactactgcctcaatccgacgcggccgggctaatgtaggcgccgcggcccccacccctacccctcctgacacccccggatatgtttacagtaatgaattcgcgggatcgcctccgcagctcccgcgctcctcctctccctccgtccctcgcgctctggcgcgctccgctcctggagccctctttctctccctccctcattccctccctctctcccggagtccctcctacttttctggtttaaagaatgcttgggaggcgcggctgctacccagtgatttccaagaggcaaagtcagacttggcttttaaccctgtcctctctgaaaagagttgaagagcgcctggctaacccggcagatgccaccctgaccttctctctatctacccggcacatgccgttcctaccaccagtccttagggataatgtcaccatctgaaccctgaaaggagaattccccatacctgcttaatggtgtactgccaagagggaggatctattacttagacactgagaaatgatcgaaatgtgagattagagggtaaaatacagcaaacctctcaaccaaaatggcgttatttcaaatgcaggcaaccttggtgatgtgccccccactcctcaccccatcactagttccctcatcctggaccaccttaaatgacttta

SEQ ID NO: 25268 - DNA, 1024 bp, Artificial sequence
  DNA replication origin
gggcgcagcacttggagcgagccctgcgcccgcccccgcgcagcgccgcacgcccggctccgagctgtccgcacacacgcgtcggaggagagcccgcctagctctcccgccgagtcccgggatcctccaaatccgaggagctccggcgccgcggggcagctttctgccgccttccccgctcgctgtacttcttttggggttcgttggcttggcgaagcggagagggggaggcggaggaggagagaaggcgggggtcgcggcggccgaagccaagagaaagtggcatgcccgaaccctggaggcggtggtggcggaggacgggggaagacgatgccgcagctccgtaggggacgtaggcgagagcaagcgaggcgagctgggcgccccggccccggcccgctgcggggaggcgcgcgccgctctgaggctccggcctccgcacccccgcgccccgacgctgcgggcgacagggcttggctccagcagccgccgccgtcgccgccgccgccacccggaggacccagcaaaagtttggatctgggggagggcgcggcgctgagcgggattaccaccagggctggaaggagacctcgagaacctttgcaggtaacgcgcgcccccaaccctcttcttccatgccccgccgctgcgctcccgcttcctcccagagcccttcctggccctcgcgggtctggcagaaagtaagagggaggcgaagttcaagatcccggggatgagcaccgagcgctggcagatcactagtcacgttagaggggcagctgtgctgagaggcaaattcccccaggagtgggtgagaaccctcagccccagctggtgcctcatcttgtagctctttggaaatttggaacgtgaatccaggggcttttagtattcttcagtccagagaaatggttcatggatttcacttaccgcacgctccccccttcacactctcacccgtttagcatttttaaaaaatgatttgagcccactccctactctcctgcttcgtttagctggacag

SEQ ID NO: 25269 - DNA, 857 bp, Artificial sequence
  DNA replication origin
ggtaacgcgcgcccccaaccctcttcttccatgccccgccgctgcgctcccgcttcctcccagagcccttcctggccctcgcgggtctggcagaaagtaagagggaggcgaagttcaagatcccggggatgagcaccgagcgctggcagatcactagtcacgttagaggggcagctgtgctgagaggcaaattcccccaggagtgggtgagaaccctcagccccagctggtgcctcatcttgtagctctttggaaatttggaacgtgaatccaggggcttttagtattcttcagtccagagaaatggttcatggatttcacttaccgcacgctccccccttcacactctcacccgtttagcatttttaaaaaatgatttgagcccactccctactctcctgcttcgtttagctggacagcaaatttcaggggtgaaatattgcaagcaaagaggaaaaaatatcctttccccttttgacatccctggaatcctccttccctcccttcaccttctggcatcataaaataggaactttagaagttacattttcaggggtgaggtgaaacgtgttagctattggtgatgtgaatttgccacgactgtccgtatgtgtgtctgtgtgtgtgcgtgtgtttgggggagggggttagtggtgttgcagagaggcggaatttttctcggtggcctgatgcgcagtggtcctaaggtagtgagtggccgcgtgtgcgcattgaggcggcggcagcggagagaagacggtcacgtttcccgaacggcagccttacttaggctaagaaaatagctgcagctcactccaaaagcaaaaagattccagccccaactccccgacgccccc

SEQ ID NO: 25270 - DNA, 1316 bp, Artificial sequence
  DNA replication origin
gagcccctctgcctggctgcccagtctggaaagtgaggagcgcctcttcccggccgccatcccatctaggaagtgaggagtgtctctgcccggccgcccatcgtctgaaatgtggggagcgcctctgccccgccgccccgtctgggatgtgaggagcgcctctacccggccgcgaccccgtctgggaggtgaggagcgtctctgcccggccgccccgtctgagaagtgaggagaccctccgcccggcagccgccccatctgagaagtgaggagcccctccgcccggcagccgccccatctgagaagtgaggagcccctctgcccagcagccaccctgtctgggaagtgaggagcgtctccgcctggcagccaccccgtccgggagggaggtgggggggtcagcccccccgccagaccagccgccccgtccgggaggttaggggcgcctctgcccggccgcccctactgggaagtgaggagcccctctgcccggccaccaacccgtctgggaggtgtacccaacagctcattgagaacgggccatgatgacaatggcggttttgtggaatagaaagtggggaaaggtggggaaaagattgagaaatcggatggttgccatgtctgtgtagaaagaggtagacatgggagacttttcattttgttctgtactaaaaaaaattattctgccttgggatcctgttgatctgtgaccttacccacaaccctgtgctctctgaaacatgtgctgtgtccactcagggttaaatggattaagggcggtgcaagatgtgctttgttaaacagatgcttgaaggcagcatgctccttaagagtcatcaccactccctaatctcaagtacccagggacacaaacactgcggaaggctgcagggtcctctgcctaggaaaaccagagacctttgttcacttgtttatctgctgaccttccctccactattgtcctatgaccctgccaaatccccctctgcgagaaacatccaagaatgatcaataaaaaaaaaaaaaaaaaaaaaaaaaaaaagtcaggaaacgggtgctggagaggatgtggagaaataggaacacttttacactgttggtgggactgtgaactagttcaaccattgtagaagtcagtgtggcgattcctcagggatctggaactagaaataccatttgacccagccatcccattactgggtatatacccaaaggattataaatcatgctgctataaagtcacatgcacacgtatgtttattgcagcattattcacaatagctaagacatggaaccaacctaaatgtccaacaacg

SEQ ID NO: 25271 - DNA, 1479 bp, Artificial sequence
  DNA replication origin
gagagcacagggttgtgggtaaggtcacagatcaacaggatcccaaggcagaataattttttttagtacagaacaaaatgaaaagtctcccatgtctacctctttctacacagacatggcaaccatccgatttctcaatcttttccccacctttccccactttctattccacaaaaccgccattgtcatcatggcccgttctcaatgagctgttgggtacacctcccagacgggttggtggccgggcagaggggctcctcacttcccagtaggggcggccgggcagaggcgcccctaacctcccggacggggcggctggtctggcgggggggctgacccccccacctccctcccggacggggtggctgccaggcggagacgctcctcacttcccagacagggtggctgctgggcagaggggctcctcacttctcagatggggcggctgccgggcggaggggctcctcacttctcagatggggcggctgccgggcggagggtctcctcacttctcagacggggcggccgggcagagacgctcctcacctcccagacggggtcgcggccgggtagaggcgctcctcacatcccagacggggcggcggggcagaggcgctccccacatttcagacgatgggcggccgggcagagacactcctcacttcctagatgggatggcggccgggaagaggcgctcctcactttccagactgggcagccaggcagaggggctcctcacgtcccagacgatgggcggccaggcagagatgctcctcacttcccagactgggtggcggccgggcagaggctgcaatctcagcactttgggaggccaaggcaggcagctgggaggtgtaggttgtagcgagccgagatcacgccactgcactccagcctgggcaccattgagcactgagtgaaccagactccgtctgcaatcccggcacctcgggaggccgaggctggtggatcactcgcggttaggagctggagaccagcccggccaacacagcgaaaccccgtctccaccaaaaaaaatacgaaaaccagtcaggcgtggcactcggcagtctgaggcaggagaataaggcagggaggttgcagtgagccgagatggcagcagtacagtccagcttctgctcggcatcagagggagaccgtggaaagagagggagagggagaccgtggggagacggagagggagagggagaccgtgggaagatggagagggagagggagagggagagctctgagctgttgaagtagacagagctggttgtatgcaatgcatctgcttttatgtcctgagagtgaagagtgagcgatctataacactaattgtcccttcgtgcactaaagcagattcaacttccataaatcaaagaacagtttctctgcctcttcaaaccatccacaggaaagtatttgatgcatgtcttttgtgagcattccttatttctagttattaaagagaaaggc

SEQ ID NO: 25272 - DNA, 1073 bp, Artificial sequence
  DNA replication origin
tggttcgtgttaaacgagaaagcacccgccccagccccgcagcgggcccgccccaaccgcctgctgactggcaccctaggggaatgcggcggagagtggagccggtggaaacgcagggcaacgccgcgggggcttgtggggctggccccacggggcgggctcttgccgccccccgcgtatccccgcagcttgccgctcaccccgccgccgctgaccgcgccgatgccgtcgaactcccggcccagcccgtcggagtcgtcgagcacgtacgcgccgccgggcgccagcagcgcacacagcagcaagggcaccgcggcgcggcccgccgaacccgcggccgcagtcatagctttcgctcggcgttgccaggaagccgagagtagccactcagccattgtgtgggtcacatgactccggcgcccagggaggcgggtcccgtcgccgccacgatagatacgggcaggaggccgctgatgctgacgccgccgccgccattttgagtgcgggtcaagggcctctgacgcagctggcggagtgttgagaaaagaagcagcgagctttttcttatcgctcgcgtgtctgtggtcagctactggatttcacatgtacttactgctggcttctcttccggcgtcacctggtggagcactttaacgcagggaaggtggattccaaggtccgccaaaggaagagggccatgagtggccctaccatggctcttccccagcatctcagggagtatctacctcgtgcgaggaccaggcttggacaccaggtcccgattccattgtcatcttggtggaatcactttgcttttggagcctgagttttcccttatgtgagatgaggcgagaagagcagcagagtgagggactgagagaaaagttaataagcactcagtacatttgaatgcattccacaagtggcaaatagctgagaaggttctccagtctggtaactaccccggcatattcaaagcttttagccttgaaggagttaataatataccacctcaaaatatgctgctgtggcatattgactattttaaattaaaggcacttaaaaacagcagg

SEQ ID NO: 25273 - DNA, 1047 bp, Artificial sequence
  DNA replication origin
gggagcccaccgagacggctcgcggcgccacctctgccgccgacgcggatagggtgcgctccttgagccgcaggccctccaggccgtggctgagcccggccacctcgatgctgttccgtttgtgcagctgcgcgtggcgcgcggcggtgaggggctcgctgacctcctgcagcgagtgcgccacgggcaggctgtcctcctggaacgtttgcaccgagtggtgcacgcgccgcgtgatgaggtcggggttgctgctgctgatgtaaaggtggcgggacaggtctggcgtgctgttggcgggcctggggggcgggtagggtgggggtggccggtacacctgcgtccgcatgatgttgggagacgggtagtcctgcgcctgcagctgcgcattggtcagctccggcacgctgaccgcgcccaccacgggccgccgctcggcagggtaggggtagggagacgggctgtggaagctgtagctcaggctgaacgggcagtgtgcggccgctggcgaggggagctgtgcgtgctcgcggatctcgggctggctgtagaccagcgccgcgggcctgctgtaggcgtacgagctgccgatgttgaggtttcgcagcgagtggctctgccgttccgcatgcaccaggcccctgttgagctgcttcatcacagtctcatagtctggggtggggcggtaggacgggggtatcacggcgctgtgccgatgggacgggaggtagtcaggcctcatgacgtcactcccggtgatgctagggttggacgacatcggcgagggctgcaagtagggctgaggattatttaaggagttggtgctgtgtgcactgtagacactgccattacggatccgaccgttgaggtcaatctgggctctatccaagcttgtctgagagtgacagtagtatccgttctggttgggcacaaagaggttatctagaaaaaatgagttcaaaatgagatttttttaaatggactaattactccaaccaaatactgagatcggcccttacctctgatgacatttttaacacagcttgt

SEQ ID NO: 25274 - DNA, 1746 bp, Artificial sequence
  DNA replication origin
ggcaaaaaaaagaagccccaaaaagccatctcataaagctcattacattgagccagccagcttgtaaggaaaaatttaacccaagtccaaaatgttttcattacccataactaacttttccctcaactcctcaaaatctgtgtatactgcgtgtggccaaaatgcatacaaactggggcagttaccatatacccatctgcttaaacgtacagaattcttaaggaaccccaggtatttcagtatctcacaggtccgaggcacaaacaaagcccccccacccttgcctctcaacaaacatacatgaacaagaaatacgctactctggagagggccatggtaattgtcactccatttagttataaaactaaaaacttgtccacagaaaaacaaaaacaaaataaggtgtaagatacagacactaaactgaaagccaaaatcagctggctatgacttgcagggtgagatggggatggtattcacttgcaggatgagatggggatggtattcacttgcagggtgagatgggggatggtattcacttgcagggtgagatggggatggtattcacttgcagggtgagatggggatggtattcacttgcagggtaagatgggggatggtacttgcagggtgagatgggggatggtacttgcagggtgagatgggggatggtacttgcaggatgagatggggggatggtactcacttgcagggtgagatgatacttgcagggtgagatgggggatggtacttgcagggtgagatgggggatggtacttgcaaggtgagatgggggatggtactcacttgcagggtgagatgggggatggtacttgcagggtgagatgggggatggtactcaattgcagggtgagatgggggatggtacttgcagggtgaggtgggggatgatacttgcagggtgagatggggatggtacttgcagggtgagataggggatggtacttgcaggctgaggtgggggatggtacttgcaggctgaggtgggggatggtacttgcagggtgaagtgggtgatggtacttgcagggtaagatgggggatggtactcgcacttacagggctagatgggggatgatacttgcagggtgagatgagggggtggtacttgcagggtgagatgagatggtacttgcagggtgaaatgcagggatggtactcacttgcagggtgagatgggatggtagttacagggtgagatggggagatggtacttgcagggtgagatgggggatggtacttgcagggtgaaatgggatggtacttgcagggtgagatgggatggtactcacttgagggttgagatgtgggggatggtacttgctgggtgagatgggatggtacttgccaggtgagatgggggatggtacttgcagggtgagatggggggatggtactcacttgcagggtgagatggggggatggtactcacttgcagggtgagatggggtgatggtaggcacactcatccccatttttacaagcaggccagtacttgcagcgctccaaaagtttttctggtttctgtgccacactcagttcactcatctcagctacaaagggaaaggaaataaaagtatttcattcattatgatcaattcagtacacagcacctttaacatatttccctcaaacctgtcttagaatcttctgttaaatgtacagtcatataaaataagtgagctcaaattatgggattaacactggccatagaatcctataaaa

SEQ ID NO: 25275 - DNA, 1089 bp, Artificial sequence
  DNA replication origin
ccgctcggctcggctcggctcggctcgctcggtttcggggtgcgcggcgcgggtccgccaggctgtggctacaaagccgcggcggggcgcgagcgccgcaggtgaccggggctgggagctgcgtgcgcgggcggcggctgaggagctggaggcgggccctcgctctcggcccaggcgctacgggctgaggagactaggcgagccgaggcgggcgaagggctctgggcatccacttgacagccggcggcgctcgcggccctcagcatgttccgcgaggcgagggttttcctcccgcctgtgggctgaggcggcggcggcccccgaaacgagatgcacctgacgggcgcggcttagaggacgcggctggcgggaagtcccggcagccagcgggagggctttcgttgccgggccgccgccgcctcccgtcgccgccgcgggcccgagcgggagcggcgggtgggcgccccgacatggcggcccggagcgccccgagctgccacctgcggctcgagtgggtgtacggctaccggggccaccagtgccgcaacaacctctactacactgcggccaaggagatcgtatacttcgtggcgggggtcggcgtggtgtacagcccgcgggagcacaggcagaagttctaccggggccacagcgacgacatcatcaggtaccggggagcgggggccgccgccgtcaccctgcaagccgctcccggagtttgcacccgcgggttcctctggacgccgtgaccgctcctgcacggagcatcaccccgaggggaatccgcagctgtctctctggtcccgagtccaccagttaacaccctacaaatgcctttcccctcttcctcgtctagggactctctctcgggtccgtgcaggaagatcaggtccgcggatccaccgggcacccggtttgacggctttgtcccctttcccactccatcacaattacgaaaactgcgaaaaggttattttggtggcactttattccgttagatcctgtgagaaatttcttattaaacgcattcttaaagcacccggggtggggggaaaccctttacctaataaaggactgatggaagcacag

SEQ ID NO: 25276 - DNA, 907 bp, Artificial sequence
  DNA replication origin
ccattattcctcccgcacctgccggatccaagagtagacgcagaacccggacctcggaatgggacgatgcgacgggcggggaaggcctggcccggccgaggtgccctcggccccgccctccaccgagggcagggaggcactgcctccgctccgtccactcgtaactggtgacgctggcagccccgccggggggcggggggagtgcaagaaaatcctgaggtgtgtcgggggacctggaccagatgccctcctgcaccgccctagctccggggaagtcgctctccggctccgcggcgcgggacccgccagcgggcagaggcgcggcgctttgatgtcgcgcggccacacggtggcgctgccgcaccgcccgctggcggagactgggggccaggggtgcccggggtggggtggagccgggacgcgcgcactccccagccacgcccggggctcatcctggaacccgggcgcccgcagggtcgcgaggccaagtgtaggtcattcccctccccgcgggacccgtgcctggtggacgcatcgccgacgcggaccctgaacgctcacatgagatccttagggaaactgaggccgaagaattgggaatctgcatttagtccactctcctgtccgtaagaagaaaggggcgcgactaaggggaagggaaggagccacagggattcattcccagccggtcccagtagccgccacaacacccggcaggtccgagttaatccgttctgcaagctaggaaatgaggctcggtattggcggaggccacactgttgagaggcggtgttcaaccccagggctgtgtgtcccagctctgcaaactcggtcacagcctctatctccgtggcattcacagtccttaccggtttttgacagtgacctacagtgagatgtctgttta

SEQ ID NO: 25277 - DNA, 2915 bp, Artificial sequence
  DNA replication origin
gtggagatggtggtggtggtggtggtggtggtggtggtggtggtggtggtggagatggtggtggaggtggtggtggagatggtggtggtggtggtggtggtggtggtggtggtggagatggtggtggaggtggtggtggagatggtggtggtggtggtggagatggtggtggaggtggtggtggtcgtagagatggtggtggtggtggtggtcgtagagatggtggtggtggtggtggtggaggtggtggtggagatggtggtggtggtggtcgtagagatggtggtggtggtggtggagatggtggtggtggtggtggtggtggtggaggaggaggtggtggagctggtgctggaggtggtggtggtggtggtggaggaggaggaggtggtggtggtgctggaggtggtggtggtggaggtggtggtggaggaggaggaggaggtggtggtggtgctggaggtggtggtggtagaggtggtgctggaggtggtggtggtggtggtggaggtggtggtggtggaggaggaggaggtggtggtggtgctggaggtggtggtggtggaggtggtgctggaggtggtggtgctggaggtggtagtggtggaggtggtggtggaggtggtgctggaggtggtggtggtggaggtggtgctggaggtggtagtggtggaggtggtggtggaggtggtgctggaggtggtagtggtggaggtggtgctggaggtggtagtggtggaggtggtggtggaggtggtggtgctggaggtggtagtggtggaggtggtggtggaggtggtgctggaggtggtagtggtggaggtggtggtggaggtggtgctggaggtggtagtggtggaggtggtgctggaggtggtggtgctggaggtggtagtggtggaggtggtggtggaggtggtgctggaggtggtggtggtggaggtagtgctggaggtggtagtggtggaggtggtggtggaggtggtggtggaggtggtggtggtggaggtggtggtgctggaggtggtggtggtggaggtggtggtggaggtggtggtggaggtggtggtggtggaggtagtgctggaggtggtagtggtggaggtggtggtggaggtggtggtggaggtggtgctggaggtggtggtggtggaggtggtggtggaggtggtggtggaggtggtggtggtggaggtagtgctggaggtggtagtggtggaggtggtggtggaggtggtggtggaggtggtgctggaggtggtggtggtggaggtggtggtggaggtggtagtggtggaggtggtggtggaggtggtgctggaggtggtggtggtggaggtggtgctggaggtggtagtggtaggaggtggtggtggaggtggtggtggtggaggtggtgctggaggtggtggtggtggaggtggtgctggaggtggtggtggaggtggtgctggaggtggtggtggtggaggtggtgctggaggtggtggtggtggaggtggtgctggaggtggtggtggtggaggtggtggtggtggtggaggtggtgctggaggtggtggtggtggaggtggtggtggtggaggtggtggtggtggtgctggaggtggtggtggtggaggtggtgctggaggtagtgctggaggtggtggtggtggaggtggtgctggaggtggtagtggtggaggtggtggtggtggtggtgctggaggtggtggtggtggaggtggtgctggaggtagtgctggaggtggtggtggtggaggtggtggtggaggtggtggtggaggtggtggtggaggtggtgctggaggtggtagtggtggaggtggtgctggaggtggtggtggtggaggtggtggtggtggaggtggtgctggaggtggtggtggtggaggtggtggtggtggaggtggtggtggaggtggtggtggaggtggtggtggaggtggtgctggaggtggtagtggtggaggtggtggtggaggtggtgctggaggtggtggtggtggaggtggtggtggaggtggtagtggtggaggtggtggtggaggtggtgctggaggtggtggtggtggaggtagtgctggaggtggtggtagctgaggatgagttttgtggaaacatgggggaacctgcggctgtgagggtatcagctcttgccccagccttccttccttccctccttccctccttccctccctctctccctttcttcttctctctctctctctcctcacctccttccgtcactccctctgtgtccctttttttccttctctctctcaccgtttttccctcccttcctctttccttcccctctttctccttccctccctctccctctcatcctttccctcctcccttcctccctctctttttacctctctccctgtcttcctgcctccctccctccctttccctttctccctccctccctccctccctttctctttctccctctttctttccttctctttcttcccctctctctctccatccctctctcttcctctctcatccctccctctttccctctctccttcctcctttaggggcagctgggccctgaggagttgagccagagccaggtccagaggaggaggcagttttggcgggaggggagggcattttgtgcagtgggggcagaaacgcaaggccagtgtgcaggggccccggggaattaactgggcactcatagtgaaataaacctaggccgtttccaggagaagccttcaagcctgccagatcctgggagaccgtggcatatgctggacagaatgacagcttgatgaggagtaccaactctaggccacctctctataaagttacaagtatcttttggtgatgaggaagtggaccatatccgctccagttcccaccatgagctcaaggatccgtgagagaacagtggc

SEQ ID NO: 25278 - DNA, 1223 bp, Artificial sequence
  DNA replication origin
tcccgccggccccgccgctctccccgccccgtcccgcctcccgctcgcctccgccgcggcgcgtcgggccggggcgcgccgagcggcgagaaattgtttccactgcaaacaaaaaaaggcgacacatgaccaggcaggaggaggggaagcgcggggagggaggagggcggagggagggacagagcggagggcggagggagccggagaaagggaaaacgtgggcctggccgccagcggcctggggcgcggggcactgacccgccggggcggaccctgcccgcgcccctcgcgcgccccagcactcagccagggcggaggccggggctgggccgcgcggcctcgcctcttgggccccgcggggcgggggtgaccggcgcgggtcccgcgacccagggcggccgcgaccgtgggcggtggggcaggtgggtcaggcggcgcgtgccctgtcccctccccgggctccggccacacgagcgggccggcgctgcgctgctggcaacgtgtcgcgggaacgctcctaccccatctgcatgccttacatggctcgaaagtaaaaataaaaagaattacgatgcgggcgaggcttgtgggggtgagaagaggagattccacgtctccccagtgctgcgtcctgataggacccccagggccttccgagccctctcccagcgaccacctcgtgtcccggaggtaagcaccgcagcgtcccacccaggtggccgcgtgtctcccgagggagggccggtggccattacaagacaagaggcaccgtcctaaaggccacgccggtggggcctctcaagtgggttgtgcggaacgccccggccggcctagagagaaaacaggtctcatttccatctcagtttgagctctcaggaaccagactgacaattcgcaagccacccagcgaaatggtgcagccaccactctaagtctctaggcacctccaaataatagcacccactgctaaagccacaccaaccagccgccttgggagaggatgagaggagagagtccaacaggacaccctggtggtgacaaaaataaaaatgtgattgcacattactcccaggtagccaaattggttggttcctctacagaggagaagcccagggcacccttcctgccaccccctcctgagccagtggacaggacatcgtgagcggtctgaaaactacagaaaaaaacagcgagtagacctggagaaagctttctagcatgca

SEQ ID NO: 25279 - DNA, 1010 bp, Artificial sequence
  DNA replication origin
cggggtggtggccgggcagaggctgcaatctcggcactttggggggccaaggcaggcagctgggaggtggaggttgtagcgagccgagatcacgccactgcactccagcctgggcaccattgagcactgagtgaacgcaactccgtctgccatcccggcacctcgggaggccgaggctggcggatcactcgcggttaggagctggagaccagcccggccaacacagcgaaaccccgtctccaccaaaaaaatacgaaaaccagtcaggcgtggcggtgcgcgcctgcaatcgcaggcactcggcaggctgaggcaggagaaacaggcagggaggttgcagtgagccgagatggcagcagcacagtccagcctcggctcggcatcagagggagaccgtggggagagggggagggggagggggagggagaaggagagggagagggagagggagaggggacagtgtttcattagctgtgtagcgttaggcaacctacagactaaagcaaagaactatacaacaacaataacaactaaaactgcctcagtcatgctgcatctctgatctagtttaggctgcagaggtaagatttgaccatcataactcagccaggcagaaaccacatggggaagtaattcacggagcatgcatctttttcaatcctttatcccaccgtatgctgtatttcgctgaccaggatggagatcattctcattctgcatctctgggatgcatgaagttctgttggggaagaaagtactcattacaagctcatgtctggtttagaagttcctgggtgagtggggaatggatccaagagctctgggcatcaggtctccagacaggactaactggggttggggaagtggtaacagctggtcctgtgggccgtggttgctgttagagggagttgcctttggtaatagtggtaagattgtgatgtgtcatcttacaagaagtctataccaagaagagtgtctttgcttaaccactgtgaagccactcctcagag

SEQ ID NO: 25280 - DNA, 1169 bp, Artificial sequence
  DNA replication origin
ggacggggcggctggccgggtggggggctgacccccccaacctccctcccggtcggggcagctggccaggcagaggggctcctcacttcccagtaggggtggccgggcagaggcgcccctcacctcccggacggggcggctggccgggcggggggctgacccccccacctccctcccggacggggcggctggccgggcggggggctgacccccccacctccctcccggacggggcggctggccgagcagaggggctcctctcttcccagtagaggcggccgggcagaggcgcccctcaccgcccggacggggcagctggccgggcagaggggctcctcacttcccagtaggggcggccgggcagaggcgcccctcacctcccggacggggcggctggccgggcggggggctgacccccccacctcccttctggacggggcggctggccgggccgggggctgacccccacctccctcccggacggggtggctgccaggcggagacgctcctcacttctcagacggggcggttgccaggcagagggtctcctcacttctcagacggggcggccgggcagagacgctcctcacatcccagacggggcggcagggcagaggcgctccccacatctcagatgatgggtggccgggcagagacgctcctcacttcctagatgggatggtggccgggaagaggcgctcctcactttccagactgggcagccaggcagagaggctcctcacatcccagacgatgggcggccaggcagagacgctcctcacttcccagacggggtggtggccgggcagaggctgcaatctcggcactttggggggccaaggcaggcagctgggaggtggaggttgtagcgagccgagatcacgccactgcactccagcctgggcaccattgagcactgagtgaacgcaactccgtctgccatcccggcacctcgggaggccgaggctggcggatcactcgcggttaggagctggagaccagcccggccaacacagcgaaaccccgtctccaccaaaaaaatacgaaaaccagtcaggcgtggcggtgcgcgcctgcaatcgcaggcactcggcaggctgaggcaggagaaacaggcagggaggttgcagtgagccgagatggcagcagcacagtccagcctcggctcg

SEQ ID NO: 25281 - DNA, 962 bp, Artificial sequence
  DNA replication origin
cgggaggtgaggggcgcctctgcccggccgcccctactgggaagtgaggagcccctctgcccggccagctgccccgtccgggcggtgaggggcgcctctgcccggccgcctctactgggaagagaggagcccctctgctcggccagccgccccgtccgggagggaggtgggggggtcagccccccgcccggccagccgccccgtccgggagggaggtgggggggtcagccccccgcccggccagccgccccgtccgggaggtgaggggcgcctctgcccggccacccctactgggaagtgaggagcccctctgcctggccagctgccccgaccgggagggaggttgggggggtcagccccccacccggccagccgccccgtccgggagggaggtgggggggtcagccccccgcctggccagccaccccgtccgggaggtgaggggcgcctctgcccggccgcccctactgggaagtgaggagcccctctgcccggccaccaccctgtctgggaggtgtactcaacagctcattgagaacgggccaggataacaatcgcggttttgtggaatagaaaggcgggaaaggtggggaaaagattgagaaatcggatggttgccgtgtctgtgtagaaagaggtagacacgggagacttttcattttgttctgtactaagaaaaattattctgccttaggatcctgttgatctgtgaccttacccacaaccctgtgctcactgaaacatgtgctgtgtccactcagggttgaatggattaagggtggtgcaagatgtgttttgttaaacagatgcttgaaggcagcatgctcgttaagagtcatcgccactccctaatctcaagtacccagcgacacaaacactgcgcaaggccgcagggtcctctgcctaggaaaaccagagacctttgttcacttgtttatctgctgaccttccctccactattg

SEQ ID NO: 25282 - DNA, 1172 bp, Artificial sequence
  DNA replication origin
agggacggcgcaacgcagaatgagccgcgaggccccgggccaccacgtggcttcccgatggcctcccccgaccctcccccactccggccccgcaggggaagtaggtgaagggtggaagccgagagaccgcgccgcggaggcggcccgccgccggtttcctagcaacgcccgccccgccccgccccgctggcgcgccggcgccgggaagcggggggggggcggaccgccgttgccatggcagcgcggcggccgcgcccgacgccgccggcgcctgcgggaaacgcgggccaggggcccagagtgggctgccaggtggcgtccctgcctagctcccactccgggatggaccagacctcgcgcccgggggtgtcagtggagaaaccgagtcgccccgaaaggtggcagggccgcaaggccggtcggccccactcactcccccgccgactggggcgactgagagcttggagactttccagtttgtctggtggggtctgagttggtcttcggggccggagtaggccaagggaatttttttgattttggaatctcttcggaccttttttccacacctagtcaagactgcacgcgtgtgcacacacgcatacgcacgtctgcagcctgatgtcccatccttttaccctaggtgttgtcacctgaaggttctttaatctcggaaagagaatatgcaaaagatagcagctgccaaaagctgccttttaaaacgactttgaaaatcagtgttatttcccgagggccatttaaacggaaaacctccgtgcctggaagggtgttctagattctggactcaaatttgcattattctaaatcactttttgcagtgagctgcgattggagaattcagttgtggagtattaaatttaaccgtacacccatttagctagtgtaatgatcgcttggccaaaagacccactcacaaagacaaagccacacgcttctcagtcgttctctggcttgagtgtttttaatagaggcggagtcagtcacatgtttgtgagtttaatcaaattgacaagggctctgagcgagaaaagcttactgtctaattcgaaggcaacattaggtacatagagatgcattctctttggacttatttgaatcagagcttttcaaatggaatcctctcctgcacatatttttctcgatctgctgca

SEQ ID NO: 25283 - DNA, 873 bp, Artificial sequence
  DNA replication origin
agattttaaattctcttttcaaaaatgcagcaactctgctagaaaatgaatgaatgtgattgcagctatatatttttttgaccggtgctcttgcagctgtggaagtttgacccacactgagatgcctccctgagtcagccctatctgtgtccttgtctctgcagcgcaaatctgtccaaggctgcctggggagcattggagaagaatggcacccagctgatgatccgctcctacgagctcggggtccttttcctcccttcagcatttgtaagtttacacttccaactgcacagtgggtcacatgggagatgaattgggctttgtgttctcttcctttagtcacaacagcttgcctaaggtaggcaggaaacagtcgggattcttacccagagcctgcactcttaaccgctggtctgtacctctgagcttactgaacactcaccagtctgggtgcagtgggatacctgctttcaaggcatgtacttgattaggaattgactgtgtgcttccagcgaaattaataacatttaaaataaatattgtgaactacaatgtgaagatttatctcgaggtggtagatgacaagtcaccaaaggaatggcccaatcaagcacaagttgttttaggtaggggtgactggaggatgaagttgggaagcaggagagcttggcagagtatttgaaagatgcttaggatgtaggctgtatagagagaggtgggaatggcatcaacgttggaaaggaattggtagtagcacaaactgggaagcagagattggttcacatcatcggctagagtttggctgggcggggccagtggggtggcacaaaggacatgtgcttctggcccagtaagccccctggaaaagcaccg

SEQ ID NO: 25284 - DNA, 1233 bp, Artificial sequence
  DNA replication origin
gccatggccgggcccccgggggcagcccccaggcccacggcaccgggcgtcggcggagtctcgcccacacccccgggaaataagggccccggcgctcagccagctcccgggcgccccaccgccggctcgcccatgaccgccgggctctcccgcaggccgcgaggctcccccggccgccgcctcggtagctcctgtggcgccagctccccacgtcctccttgactcctagtttcaaatccgctttgtcgccgccgttcccctccactccccctgctctcctcggagttctccttaacgctgaaggtcccggggaacgggcgcagagttcacgtctgcttggcgctgggatgcgggcgcagtttccaccccggctccctgtccggctcagataggggagggggcgtggcgcgtcttcagggcaagctcgagccaactcgagtttcccgcaaagagacggtcgcggggcggggcggggcggggcggggcggcggggggggggcgcggtccggaggtctgcgggtaagcagagcgccggggtcctgggtcctggttcctttgactatcgcttcgcaggccgccgacggctaggacacgggtgtcagtctgctggctttgtaggtgcctccccaggtagatcgacgatggtgcctcctagttgtggtcgtggtgtcgcgctgagcctgtggcctcccgagtctccgaatcggctgccggggcttagggatggagggggtccagggcgggcgcacggagagaggggctgtgctgagcggcgtccgagggctgcggcgtccgagggctccgacctccggccgggccccaacgctgcgcatccgttgggcggacgggctggagagaggagaccagaaagggaggttggaacagggagcaaaggaagttaggggcttctcccccgggcagcctccctcgccttgaccatgccagagcgcccttggtctctggatcctgcgcgggggcgtcctctgcgcctactagtaggctccgcccggaccaagcgcgcaccgcgagccagccccgcttccggagaggaggccaaacactgggggctggaagggctccgcggccaggagaccttgaccttggagcgttccatctcttccccccgggcttggctgcctagtgcgttccagagttttgcctggacgcggggtccgcgcagaaggcatcccccacctcatgcagaacagtagcaaggctctccagcaaaccgcc

SEQ ID NO: 25285 - DNA, 1916 bp, Artificial sequence
  DNA replication origin
ctaccgaggcggcggccgggggagcctcgcggcctgcgggagagcccggcggtcatgggcgagccggcggtggggcgcccgggagctggctgagcgccggggcccttatttcccgggggtgtgggcgagactccgccgacgcccggtgccgtgggcctgggggctgcccccgggggcccggccatggctggccggggtttcagctggggcccgggccacctgaacgaggacaacgcgcgctttctgctgctggccgcgctcatcgtgctctacctgctgggcggcgccgccgtcttctccgcgctggagctggcgcacgagcgccaggccaagcagcgctgggaggagcgcctggccaacttcagccgcggccacaacctgagccgcgacgagctgcgcggcttcctccgccactacgaggaggccactcgggccggcatccgcgtggacaacgtccgcccgcgctgggacttcaccggcgccttctacttcgtgggcaccgtcgtttccaccataggtaagtgtgctggccggactcgctgacaacctccgggcggcctccacttcctccggggggcaggaccgaccctctcatcctttcattcatccatctgggcgcccagccagactccactgacatgagctgtcgcctgatcaacaggtggtattgcctccccgctgctctaatgtggtccaggcaccggcagcttcagcgtcacctggcagcttgttagaaatgcagtctcagtcccctctgcagacctgccgagtcagaatctgcatgttaacaaagtccccaaaggattggaatgatccttaaattggagacgctctgctctgggagattttcagtctaatgaaggagacacggcttgagttcatggggaagaaggcttttacagatagggacaggaaactaaacatttactgagtcagtcagaggggaagtgcagattttaaaagattctgccctcgacttcacacttaccgagaaaaaatcagaacagcagactgaaagtgaggaagcaaaagtgccaatgacggttcaaaagatggaaaattttccaccaggaagaaccagggaagtgacctttgggctgaatcaattcgtgttaggcataacttgggtttgggaactgaaagcgcggttgcactctagagtaggagagaatcgcactcaggggccccatgagctggttggagtggtggaaggaagactaggaaggtctgctggctaatgggatggaggcgggggtaggaccttcactgacagactgaggagctggaatttacctagaggcacctgggagccattgagaattttttagcaaagatgtagcacagctacaatcagctgtgtttatttcccagcagaaggaaaatgatttgggggagtctgcgccacacccctaaagattgttcatccttgaagaataatcaagtgattaatgggggttagggaagatgctgtagaaataaattctgaggggggcaaaaagagacctggagcaggggagggaggttggaagagttagacggagaggaagtggcctccaagctgcaaaaaaggctggcagttgcaaacagcccagggtgcatgtgctgagcgctctgtagctactgcccctgtgcactctagaagagctcgctggtgaggtggggcgacaagttgagcctccttgaggctcccacacatggctgtgctacatagacattctgccaggagaagcagcacaaaagacaaaagagattggcttcaggtcagattcatcatgaaagacttcccagggctagtccaggaatccagggcttcagctgatgcacaggaggcgaggcagaggaccagtatgattagggacacaccggctgtatctgaagtgcctggctcccagcccccatcccatcccagatggtgc

SEQ ID NO: 25286 - DNA, 930 bp, Artificial sequence
  DNA replication origin
ggttgggggcaggaaggcgaggggttgggggcggagagggcggaagcggcggccgggccgccctgcgcccgggcggggccctgcggtgtggccgtggcttgttcctgccgctttcgcaccctgcggccccccacccagtgcagcagtgcgggcgggcgtgagcctcggtgcaccaggaggcacttcccgcgggaggcgctgggctcgcgctaattggggcggggggggggggcggcgggggaggagggaactggcgcgcggcttggtttccattagagacgcaaagtttctgctccgggaggaggcggcggcgccgcgggctcgtcgcctgggggagcagaagcgggtgggaggtgcgggtggccttggcctcagccctggtgcgcgggggccgggggtggtgaccctcctggccgaggaggggcggcgtccagacgcccgctcgggggccgccttcccccccacgcctgcccccgggcacgcgccctgcccggtccctcgccccgcgccacttccagtccgcagagagatgccctccacgtttctgctttctctgcagcctctagattgccagatgcgactgtgcgcctcgctgggtgtgttttccacagccccttcctcctcggcgtgcagggctgacatcaccgactgcgtttctggtttggcgggtggggagatggttccccgcagggttctggtacacctttgcccccagggctagcgccatttgggggaggaggttttcgttgtcgagaaagttggatgctcctggtaacccctctaacaagagagttctgtagcgaggtgggactgttctccccataaggtgacagtttctcttgcgaggtgtggcagcgcttcctgttgtacaagacagatgttgccttggcgttacgtaaatcatcgtgtctccgtcatttaaagaaagcc

SEQ ID NO: 25287 - DNA, 782 bp, Artificial sequence
  DNA replication origin
tctgggcaaagctggcaccagggtcagaagcctggggagcagagaggcccattgttaaggctgggaggcggagtcaggaagcccaggatgtaaaccaatgggagaccacggtgatgatgtaatgctcggccttcaccttcattggctgccggtcctgccactccagaccctgctctggggctctgcctttcgccgcaggttctcccgcagagggggtcattggtctgggaaggagattgaagagtgggggttggaggctgaggactgagccgggagctgtcgtccttccctgagcctaccagggaactgactgctgcctttactaaacacaaagctcctgggcgagcccggggagcgggttctaaacaccccacctcctggggcagcgccgcgcctggcgtctgcggggatgcaaatctcaggagtgttaggaggagacagaggcaccagccccgctagcctgggaggcagcctggtacccaggagggaggagggtgggggcctgggtcagcagaaataaagcatgcagctctgtacttaccacctcctctaaacatctgtgatgattataggtctgggtgaaaagcgtgggaccctcagcccagagccgcacaagacttggatttgctttggaaaccactgtgcttttcaacaagatcgttcaaatggcctgggtggagacggggagctggagagttggggatggaagccgattttaagcctggaggaatccaaactgcacacagtagtccaaggccctgccccgcctccgtccaccacca

SEQ ID NO: 25288 - DNA, 1031 bp, Artificial sequence
  DNA replication origin
tgcctgagtccacctagcctagataggggaggggaggatgaggaggcagagggtgcgcagcaggagcagggtgggggatggcaggctgagccaggggatggtttggaaccagcagaatagagaagaccaggaggcaagacgggagggcctggctccccagagctgggagcataacatgtggggtgtggaggggagcagaagggaaagaaggggggaaggggacaggaggaaaggggaggggaggagaggggaggggaggggaggagagaggggccacaggctacaggagcagtggtgcctcagagctgccaactctgccaggaagggctgtgggttctgctggtggtcttggtgcactgggcctggggataaacacttctcttccaggaagagaagagggggaacccttctctcctggagggggtccaggagtttggattgggggacattctttctgcttttcccccaacctgccccttctttgacaggggctttcatctggccggagtggggtctgtgtggaggcctcagctggactctggtcagggttggatcaggactcttcttgctgagggttgggagacaaggagccctaccacagatcccactgcagcagctcatcccctgggcctgttccctgggctgctgaatcccagcactttgggaggctgaggtgggcggatcgcttgagtcctggagttccagaccagtctgaccaacatggtaaaatcccgactctacaaaaaatacaaaaactagccaggcatggtggtgcatgcctgtagtcccagatacttgggaggctaaggcaggaggatcactgcagcccgggaggtcgaagctgcagtgagccatgttcacaccactgcactccagtctgggtaacaaagaccttagagaaccacttgtctccatcatcccactgttttccttgtgcccagcagggttcctgggctcccaggcctaagtgtgactcaccaggctccccttgggtctgtgactacagccttcatgcagtttgagagctgaca

SEQ ID NO: 25289 - DNA, 1215 bp, Artificial sequence
  DNA replication origin
ttaggatgctggaggtgatattagggtgctggaggtgatattaggatgctggagctgatattaagatgctggaggtggttaggatgctggaggtggttaggatgctggaggtgatattagaatgctggaggtggttaggatgctggaggtgatattagaatgctggaggtggttaggatgctggagctgacattaggaagctggaggtgattaggatactggaagtgattaggatgcattggtcagcagaagtaaagttaatgcccccagacagctcatatcctagtgggtgcagacagataataatgaacacggtaatttaaattatatagcacattcaaagtggttagtgctctgggaaaaacaaaaaaagcttagcagggtaagggggtggggagtgcggggatgggcttgggtaatgtgtttgggggtcagggggctgcaattttttaaacagaggtcagagtgggcctcactgagaaagcgacccctgagcaaagactcaaaggggctgaggggcttggtcatgcagatgtgggggaacagggcttcaggcagaggggacagccagtgcaaaggccagaggaggggaatgtggctggtgtggaggaggacccagcacaggaggcgtggttggaaggaagtgagggggcaaggggaccaagccatggggagccctcatacagactggcttctgctcaacgtcacagcagggttagagcagaggaagaacatgatctgacttagatttaaagggctcttgtggcgagaatggattgtggaggaaaggggattggttaggaggctctagcagttacccagatgagaggtgacggcttggaccaggatgacggccagggccgtggagagaccagtcagacttgggatagattccgagggtagggacagcaggatgtgtggatggatcagaatggaagacagaggggattgaaggatgacttggaagtcttggcctgagctactggaagcatggagttgccatccccagagatggggagactgcagaaagggcagcctgcgggacagaatgggagttggatttggatgtgttgtctgaggtgcccactggacatcccagggagacactgaggagggatttggaaacaggattctggatttcacagcccagagtggctcaaatgggacccgcccttagaaggccacctgaacccaaggcccgtcagagctgggaca

SEQ ID NO: 25290 - DNA, 1695 bp, Artificial sequence
  DNA replication origin
aggtcagaagtcaaatcaagctttcagtggggctgtgctccttccccaggctctggaggaggacgggtgtccccgtcttctccagcggctagaggcttcctgcggccttggctcgtggccacctcacgtcacctttccttcctctgctccgtcactgcgtcacctttctgcctttgacctcctgcctccctctaaggactctgctggttgctctgggccccctggatagtccagggccattgccccacctcgagagccttcgttcaatcacatctgcatcgctccatctgtcatggaaggcaacatagtcacaggttccagggctcgggatgtggacgtctttgaggggcagggggagcacgttattctgcaggccgcagcgtgggagctgggaggctgtcaggctcctgctgtcacacagcgaccatggtgcttagaccaaggggcgtggaggaagtggcgagaggcactggactgtgaagattctgaagacagagccaagagggttgctcacacatggagctgggtgtgagggaggggagacgccagggatgagggtgagggtcttgtcctgagctactggaaggatggcgatgatggccaggaaacaggaagaataggttggggaggagaggagaaggcaggagtctgctttcaggcaggttgaatacaaaatgcctgtggagcctctgagggggaggcagctggctgggcaggagcccaggcgagagcccaagatgaggcgagagtgtgggaggtgtcagggatgcggggctgggagccatgggcctgacggggccacttcgggacaagcatagacaaagaggaagaggtcagggctgagctccggggctggcggggtttacaggctgggaaatgaagagatcaggaaagaaggcgcaggagcagctgcaagggaggcggagagcaggcagggtgagcttcctggaggaggtgggtgggctctctcaatgcctggagaccccgtcagggtggcctgagagctgaccgtgggcctggtggtgtgcaggttggcagtgaccttgaccagagccatgctggggatgcagttttgctcccccagattcatagggtggagcccccgcccctgtgtgactatatttggagataggccccttaaggaagtaattcaggtgaagtgaggtcatcaggaggggccctggcccagtaggattggcgtcctcaccagaagaaactctaaagtgcaagtgagctcacgctcagccacgccaggacacacggagaaggcggccacccgcaagccaggagggagcctcacaggaacccagatgggctggaacctttgctttgttctttgaacctccaggactgtgagaaattaagttcattgttgaagccacctgtctgtggcggttttcttacggcagcccaagctgactaaggtggggtcaagccaggttggagtgggctcaagggggaggaaaaggtgaagtctctttcaagagcgtagctgcagaggggagctgagaacacaggttaggagtccggtggggaaggggccgtgttgagtgttgaaggcggcctcgctgagcaccttgtgtttccagcagggcaggcgtgaggaaggagagagggaagctgaggggggctgccttggctgggggcctggtggttccccagagcagcagcagcagggaggcagaggcctgggta

SEQ ID NO: 25291 - DNA, 2258 bp, Artificial sequence
  DNA replication origin
taaatgatgcacctggcctgtgttctccccagcctgtccccaggagcccagcccacagccagggggagccccatgcagccaagggcaggcccccctcccactggtgctgcaggaccctctggtgcctgtggaggggcagcccatggaccccacaggctcttcagccctgagacatcacactccctctctgtcctcttccctacaagctacacagggaagctgtgtttctgtgcccttcgatggaggaagggaggaagggggtcttcacgtataccctagaggcccaggaggaggccctggagccaggctggcctgggttagaatcacagctctggccccattcgctgtggggccttggacaggttattcaccctcttggtgcctcattttcctcagctatataaatgaggataaccgcgccaatacaacatgcagacagattaaacccaagaactgacatctcttgctaagtcacaaaaggttctgtctctaccctcacggaaggtggattggtttgcaagcccctgagttaagaggaaggtgtcagcagggagatgagaggctgtcttaccaggtcaagccccagggaggaggcagggccccgacctgtgtggcggagagtggcggaaacagagctgagcgttgacagttgcctggcacacagggagagcggcgagggggaggccagggaggccagggtcagaaggtcaagactagaaggagtttaaagaacagagccctagggagcatcaaagagccaactacggaggctccaagggaaggagccaactgggagacaggtcgtggatcatgggagagggtagaaagtgtgcttgcagcagccctgatgctcagagaggaaggcaaggagccaggggacaagcagtcagtgggggctgttagggagaaggaagcctcattgtctgtgtcacaggtggtggtcaggtggctgatgtgacggcagagaacagttatgccaggagttgtaagtggcagcaggtgccagatcagcagcttgcaggagggctatggcttaagcagaaatgcaaacctgttagtattgttaaaaagcaagagtgactttagtattcatgaacagtaaatcagaggtcagacttgacaagagaaatgtaaattcaaccccagaggaaacggacgatcttctaatagctttagccttcatgtatgtgtctaaattcatgtgtagtgagaagggagcagagaaatcatgtgtttattagcaataatgagttagcacaagacaagggaggcagagattgctgaggatgggcaggtattacgggagcagcatgctagagggataaggagttgccaagtaatgttgttgacaaggggaggaattcatagactgaccagactttttccagaaaatctaaaggcatatttttgtattatttttgcataagtgtataaatttacatttattcgtgtgctatgttaaaaagcctttagctcccagtatgcaaaatgaattaaagaaacatagagcaactttttccaaagcagttattccatgttctggggtggggagaggagagaagcatggctcatggtggacagaggagcagagaaccagcatccctggacagtcattcccaggccaaggacaaaatcaccaggacagggacaggctgtgcaaacactgacatctggttgccctctgataacgtcagcctgggcttttgagggcaagtgtgaggttggaaagtaagaagggaacaagggctttcaggagagagaagaacatggaagggagccaagaaggttgcgtggaggggagctgataaggccaggatgggaagtattgctagggaacaaatgtgtgctggagaatattagcaggaggctcgggtccgcctccagtccctttgacaggttgagaaaaggtgtgaagcagaagcagatggcaggggtcagccagggcttggcggagtggacagcaagtggagtgaagtggggtgaggccgctttgaagaggcctgtgggccgagagggaccgtgagccagagagggaccatgagcccgaaagggaccatgagccagagagggaccgtgagctgagagggaccgtgagccggagagggaccgtgagccggagagggaccgtgagccggagagggaccgtgagctgagagagaccgtgagccggagagggaccgtgagctgagagggaccgtgaggcggagagggcctgtgagccggagagggaccgtgagctgagagggaccgtgagccgg

SEQ ID NO: 25292 - DNA, 901 bp, Artificial sequence
  DNA replication origin
gaaggctcactaatgcgaggttaatcaagagagttggcaagtttgcctttcttctccatccctgaactcgagttgaatcgcggaatcaacccaagtacaggggcttcaaatggtcagccggccttggggcaccactgtcccggtggccgcggcaggaaccagtcctgcagtcctgcggcggcacctgcgcgagatgcagggcactggctccaggacggcggggcggggcggggcggggcgcggcggggcgagagcgcaaggaggggcggggcgagacggggcaagagagtggggcggggcggggtcggggacagcagtgagcggggcggggcgaaacgcgaggggaggggagatgggcggggcggggcagggggggcacggtcccaaggccgacccggccgaggacgcccggagcagctccgcgcatgcgcaactgtggcgcgcgactgcgctagaacgcggctcccgcgacccctggcggcggctgccgaggggctgcgggacgaccttgggcggcagctagcagcgagtcctagctgatgtggccctgagtcagcttttagaggtcccaagactcgttcacaggccgctaaacgcaaactaaggcacctcccagcacaccaggatcgacgtgtcctccttcagtccggactcggcggaatctgcacctgggagcccctccccaaatgacctgctagccgcagtccaggaagcaggcacccctcactccccttctcaaatgggggctctattcctgtctctagctctggagttgttgtgaggataaagggaggtaagggacaagtgcttagaacagtgtctagaaggaattattttaatgctgtagtcattattaataatgtattatatttttacaattccagaacctggcacacagtag

SEQ ID NO: 25293 - DNA, 1940 bp, Artificial sequence
  DNA replication origin
cgggagccggagcccgagcccgcggcggcggcgggaggcggcgagggggcgccgcggcggcggcggtggggcctgcggggcgggcggccgggcccggccaggccgcgatggcgaccaagaaggcaggctcgcggctggagacggagatcgagcgctgccgctccgagtgccagtgggagcggatccctgagctcgtcaagcagctgtcggccaagctcatcgccaacggtacgctccgggcgcgccggcctgggctgcggggggcgccgcggcctccgcgggaacgggcccccgaggcgcggccgggcgcggggcgcgggcaggggcgcggccgggccgcgagggagctgcggcccaggggatgtgcgcgggaccggggcctgggggagcccgggtgccccggagtcacgcggtgtgggggcccgggggggcgccaggggctgtcccggcgcctggggttcaagcgtgcagggcgggcttctgcggagtctggggtgtccgggggtctcagcgagtccgctgctccactgggaccacaggaggtcaggggccggcctggggcttccaagaagttggaggtgatggggtgagggggtccctcaggacatgggtgaagtccacagtgtgtgtatggtgtgctcagggaatcaggatgtgtttatggggtcttgagaatggggtgttgtacatagacccctggggaatctggtttgtaaacatatggtgtttaaggggttctgggtggaagcgcagactcgaggtgtgtggggtggtggtagaaagcaggctgggatgtgcgtcctggcgttcggagaagtagcatcaaggctgccgacctagagaggtcagggttgggaatagaggagaaatagagtcagggggacctggagggagaatattgtggagcgagatgggaatgtggttgaagaatgtcgggagatggagttgggtgggtgaggggttggtgcctgggccagaagggggtctgaggcagcctctgagtaggagcctggtgcctggagttggttcatgacccctttaactggattggttcttgtacccaatcaaataaaattgcatccagaatcccattccagtgcacagctccacgtggccttatttgttttggaagcgagtatctttaatatttgcttgtcttttagtacccgcctaaagcgcaggcaccagcacaccgtggccagagggcagagggtttgtctcatttcatcctgggcttccccaggcccagtgagcacatgttggctgaacaaatgaatgaaagagtgaatgaatggatggcggggctgctctaagaaaggacatctgcactattttcaaccttctcacttcagactacccagaaaggagagggatgtcaggtgtcctcctggagggtggtttatgtttgtgtcctatggtattagtgcctggaaattagaacttggttttgcgcactctcaatgatggatgcatgctgtgggcaggtaccttctgggtgaacgcaggtgccatggtgtgtcaggggcatggagatagcaccgaccctacacgggctccacttggtggaaaatgtggacccttctcagttatgtcagcctttgaggagatggtgttcagtgccctgggccccagaggcagcttgcctttgccctccgtgtcgggctcacctgcttctccgcttacctgcagcattttctcttttcctctcggagttgcacagtcctgggtctactttgtggcttcccagcggtgtaggcataatgacaccttctgtgcaggttgattttaggattaaatgggtttatttgtgagcctcctggtcttttttcttctgaatccacttgtttcctgctgtctttgcttattcattcacccaatatttgcgtgcccacctgtgccagtcacagaacagtggtgaacagcactgaccaagcccctgc

SEQ ID NO: 25294 - DNA, 1683 bp, Artificial sequence
  DNA replication origin
gcttggccgacagctgcttgacgagctcagggatccgctcccactggcactcggagcggcagcgctcgatctccgtctccagccgcgagcctgccttcttggtcgccatcgcggcctggccgggcccggccgcccgccccgcaggccccaccgccgccgccgcggcgccccctcgccgcctcccgccgccgccgcgggctcgggctccggctcccggctccgcggcgtaacgggagcgccggctggggaaggggcggggaggcgggcggcggcggcgggcgcggcggggccccgggcgccgcgaggagcggcccctgccggccagggccggagccgcagcactgaccggggccggagccagggctggggcaggggcgggggctagggcgggagacaggggcccgagggaggaaaggcggggtgggcatggaggacagggagagggactgggggtgtctggggcggggtgaagaccgaggggaagtggggatgggggtgggggagcggggtaggagagagatctgaccaagggcgggtgaggggtctggtggggtaggggtctgggcaggatgaaggggagggagaggatcgggagggagctagcgacagcctgggagcgggttggatccccaggagtagggccaagaaagggcagtgaccctggggaaggtcaccgcccggtgggaccagtgagccaggtgtgaggggtggggggaggcctgcccgagtttgtcctgccatctcaggtggccagcggttccctggggcccggttggcctgtgccccttagcagatgcccctctgccccgcagccttagcccctacccagccagaggtggacggagactcctccatcccaggcaaggcacagcacctgccaggggtgccctagatggctgagcggagccaggcaggggctgccactctcacacgccagctctcggaccccctgaggggaaggcacagtcactggtggggcctcctgtcttggccacctagactgagacctagggaggtgtccctctgtgttctctcagtgaatcaactgtctagtgatcacctactatgtgctgggcgctgctttaggtgccagagatagaattgtgagctaaaaaaacaaaattcctggcttgagagagcttacattccagtttgggggaaaaataagcaaaataaaatagtaaactagactgtaaaaatggctatttgaagaaacagggaagggttcagtgaggaacataaagagttgggacaggcgggtggctcatgcctgtaatcccagctactcaggaggctgaggcaggatgattgcttgagcccagaaggtggaggctgcagtgagcagtgaacgcacttcagcctgagcaagtgttgccatttaaaatggagcagtcagggatggcctcacggaggtggcattagacttgaagaaactaagggggagccatgaggatatctctgggggaggagtatcccaggcagagaacaccacaagtgcgaaggctctggggttagagcacactgggtgggatggagaaatggcagaggccagaggggctgggtggagcgaaggagaggggccgaggcaggagatgaactctgagaggttggggggagttctgtgtagtgcctggtgggccattataagaccttggcttttggctgggcacggtggctcacgcc

SEQ ID NO: 25295 - DNA, 1034 bp, Artificial sequence
  DNA replication origin
gccccaggcccgcccctccgcgcccacggctgcggccccgcgcccccagccccgcgcgggcacccgcgtgccctcaggcgcgcccccgcgccgggcccggccggcagagggcggggtcgctcaccagtccgcagctcgtgcttgacagtgaggagctgctctcctccgtcgccgccgtccgcgctggtccccgcggcgccgccgctgctgccaccctcctcctccatcttctcctttttttccgatcccgcgggtcgctacgaggggaacccaggagacagcggacgcccgtcccctcgcagccgctgccgcggccccaggagtcggggtgcggcggctccagaactcggacgcaaagacgagtctctttcccgctctggccgcacggctcgctcctcgcctcctcccccttcggcgggcaccgctagtaccgcgcaaccaaaccgccccctgctccaccgccgcctcctcaggccgctccgcccacagccagcaaggtaagggagccattcgagccgccttcgctgattggacacagggcgcgcgcgtctgccaacgccggttcccattgggcagtacgctgtgacgtttcacgagcctccccgcctcgctcctcgaattgttgttgcttggcggggaggcaggagagggaggagcgccgccactccgattggtgagacccaaagctctgccccgcccatttcctctggtgcgcactcgcagtcaagaccttcccttccctgacctccccagaacggtcacaccccttattccccagcttcgatctgttagtaaacagtgtctagtagtcaggaggcgctcggggtctctgattggctactgccgaaagaggcggggagggatgattggaacgtttggtccgccaatcaccgtggacagaggaggggcctggagggtagcgcttatcacccacgtgtttgcagacaaacctaagggtcccggcagcgatccatgcgtgtgtgacaaccagcgagacggcgtgccctaaaaaggtcttactcgctctagtgaac

SEQ ID NO: 25296 - DNA, 941 bp, Artificial sequence
  DNA replication origin
tcccgggttcacgccattcccctgcctcagcctcccgagtagctgggactacaggcgcccgctaccacgcccggctaattttttgtatttttagtagagacggggtttcaccgtgttagccaggatggtctcgatctcctgacctcgtgatccgcccgcctcggcctcccaaagtgctgggattacaggcgtgagccaccgcgcccggcctctgttaggttcttgagatccacccgtgagcaaaactgacaacagtcctgcccccacggagagtatcttccagtggagtgtgacagacaagaaacaacttgtaagatgaatgcacagtgtgttcgagtgatgatgccatggggaaaatggaccaggatgaggagactggagagtgaggggctgggcggtggcagcagtggggggcagctgtcactttacacagaatggccaggaagacctcctggaggaggtggcctttgagtccagaattcaggttgatgatgagggcgtgaggcttgggctggctgagggaagggcatcctggactgtggcagtggctggggcagaggtcattaggtggagtgggggcccagtgggtttaagagaggatggcatgctggctgactggcctggagtgaatgaggaaaagagaagtgggacgagggacagagaggtaacagggaccagatgggacagggcctcgcaggaccctgtgggcagctgggcttttgttctgggtgagatggggagcctgggatttctctgagtcagggacagccatgttctgtgtgggttgtaagcaatcactggggtgcagagacaagggtggaaacgggagactggtgagttatggaaggtgggagaggaggacggtttggagtgggggtgcctcatggcacatcccttcagccgcacttctgatttcagctgccactgcggtggatgttctg

SEQ ID NO: 25297 - DNA, 975 bp, Artificial sequence
  DNA replication origin
ctgacccgatgggaccccgccacaagctagggccctgcagggcctctccaaagccatgtggaatcactggctgatggcttcagggcaccctcaacccctgggggacaggacctgaggtgtaagtgacacatgctacaacttggatgaccctcgaggacatcttgagaagtagattaagccagtcatattgtatgactccacgcatatgacgtgcctagagtaggcaaactcacagggcagaaagtagaatggtggttgccagtggctgggaggagaggggaatggggagagttgtttataggtacaggggttcagtttgggatgatgagaaagttctggagatgaatgggggtgatggttgcacaacaatgtgaaatattttatgctactgaacgatacacttgaaaatggctaaaacaggccgggcacagtgactgtcttttggacagttccctgtcttttggagacacataggtcctggtggaactgacgccccactccctagagcagcaaccttgaaggtgcacgttccctccttcccagcctcattctccctgttccctcccacatgcttcgtggcaccatctcccaagagaccatctgcacccaagtctcaagttctggtttcaaagaaacccaaagagacaaaaagtacagatacagagggcagggggtattgtgagaagtagccagatgttgtatctattttgcaggtacagtcaacatgatttccagatggattgggtgtgggtgtgaggagaaggatcagggcttgctctaaggtttttgtcctggtaactgaaaggatggagttgctgtgaactgagatggggaagactggcaggtttaggggtaaatcaagagtccaggtttgacatttgcgccctgatggaaggattgtaaaatggtgcagatgctatgaaaaacagatggcagtggctcaaacaattaaaaacagcaaataccatatggtct

SEQ ID NO: 25298 - DNA, 1764 bp, Artificial sequence
  DNA replication origin
tcgccaagggcgttttcaacgcctaccacttctccctcctgctcaccagcttcaactgcgtcgccgaccccgtgctctactgcttcgtcagcgagaccacccaccgggacctggcccgcctccgcggggcctgcctggccttcctcacctgctccaggaccggccgggccagggaggcctacccgctgggtgcccccgaggcctccgggaaaagcggggcccagggtgaggagcccgagctgttgaccaagctccacccggccttccagacccctaactcgccagggtcgggcgggttccccacgggcaggttggcctagcctgggtcctccgcgggtggctccacgtgaggcctgagccttcagcccacgggcctcagggcctgccgcctcctgcttccctcgctgcggaggcagggaagcccctgtaactccggaagcctgctctcgcttgctgagcccgctgggaccgccgagggtgggaataagccccggttggctcgtgggaataagccgtgtcctctgccgcggctgcgatgtggccaggctggggctgctggtcgggggaagacagtgaactgcgttccctggcctgcttcctgcagagtttgtgcatggggagtgtgaggacatggagggtgggaggctgggcgttcagctgccagggccttccaatgccaccgttgtcacagacaatgcctgtccaaacgtcccggtgggatcagcactgcagcccgcccacaacagggtgggaagggaagactggagggggaaggaaggcaggagggggaaggaagaaagagggggaaggaaagaaagaggggggaaggaaaggaggaaggggagaaggaagggaggaggaaagaaggaaggtagggggtgttgggttgggagaattgagggagttataggcagaggaggatcctagctccagccataagaactgggagagccgcctgctgctccagaagacctgcccacctccacagaaatgctagcccttcagaccttctggtcagtgaactgggaccagctctgactaaggatgccttccatggcctgggactcgagttcttcagaaccaagaggctaactgggcttcctccaagaagggaccaggggctagaagcagaagttggcatcagcaaacatttctggaatctaccaaagggaggcccaggcagaaccccttcctcagtctcccttcccctcttccccccagccttgaagaggttgatcctttgtgctgtgtctcttagccctttcatcggggatgcccagaggcaacagcccaggctggaggtgccccagggaagggtgctcacagtggtcccagggctacacttggctttgactgcacagcccctgctcagatccttgtggagggtgtccgatgacttggggaggttctcttccccttcctagaggaggaagtgaccaagtttgaaggcggcagaaatggccacacagccaagaagagcccatgcaactcagtccaggattttactgggtcagtgacattggtggaagccttcatgcctcctcattccacagcacttcctcctatgttgaccttaaacactggcttcccactgatacagactgggatgagctgagggcagtctcatttactgtcaagagttgtatttttgtattgtcctttttgccaagtctacatgtgttgactctgtaatggatttatgtagcccacttcagtctgcaaataaagcaaagtaactggacaccttgggagtatgctgcagtc

SEQ ID NO: 25299 - DNA, 1378 bp, Artificial sequence
  DNA replication origin
cggaggacccaggctaggccaacctgcccgtggggaacccgcccgaccctggcgagttaggggtctggaaggccgggtggagcttggtcaacagctcgggctcctcaccctgggccccgcttttcccggaggcctcgggggcacccagcgggtaggcctccctggcccggccggtcctggagcaggtgaggaaggccaggcaggccccgcggaggcgggccaggtcccggtgggtggtctcgctgacgaagcagtagagcacggggtcggcgacgcagttgaagctggtgagcaggagggagaagtggtaggcgttgaaaacgcccttggcgaagtcgcagctggcctcccagacgctgcgcaccagcagcaacacgtggtagggcaggaagcaggccaggaagatgaccacggtgctgagcaccagccgctggatctggtccttgcggctcttctgggtgccgtggctccggcgcacggcgcgcaggatgccctggtaggacgccagcagcaggcagatggggaagaggaagcccaccaggaagcggtagtagttgatggcgcgctgccatgcctggatggggtagtgctcaaagcacacgcggtgctggttctcgtcctcgatgacctcctcgtgcatcaggaagtagatgctggtcagcagctccttggcccagatgaccacgctgacgccgacggccgccttcagggtccggaactggtggaagcggaagggatgggccacagccaggtagcggtccacggagatgcagcagaggaagcccacgctgatgtagatgttctcgtacaggaggatgccgcacacctggcaggacaggtcgccgtgagaccagttgtcgtgctgcagcacgtactgcagccagaagggcagcgagcagatgtagaagaggtcggccaccgtcaggttgcacaggtacacgcccagctcgttccgggccttgatctgcaggtagccgaagtagagggacaggcagttggccgggaagcccaccaccagcacggtaacatagaccaccggggccagcgtctggtggatggtatggtcgatggtacagctcatcgaggagttgtctgcagtgatgttccccatctttgggcctgaaggggccacactcctcatgggctcagggactgggcctgtctctccaccgccatcctgtttatagaaggtggttcaagctctaccaagggctgggcatcgctggtggtgggcaagaccctgaaagtcagaggcaggaaaggtttataatagtagctaacatgaatgtagcacctactgtgtgtcaggcaccattctaaatcctttactcatttaatttagaaggtgtactagcccaccaactccaattcaactaga

SEQ ID NO: 25300 - DNA, 1022 bp, Artificial sequence
  DNA replication origin
atgtgtggaaacagacgaaatgcaagaggaagagaaggggcagctctgcggaactgaaagtaggttggtgtgactggatctaaataagaggtaggcagggcgagagaggaaacagtgtgaagctgtagaactggcaagtaattacaagggaggtggggaacaaccaggggcaaattggagatttttcttggtgcctggtccttatagcctccccagaattatttgttggatggatggtggagaggtgggagggtgaatgagtaaatggagggataggggtagccagatagatggatgactggatggctggatagatggatatatgggcagctggagaggtgagtggatagatgggtgggtggatggataagtggatgggtgaatgtgtaaatggatgcatgggtgaggggtagagggatagagggatgagtgaatgggtggacagacggacgtatgggtgggtggataggtgagctgatggaagggtgggtgggtgggtgggtgggtggctaagtggatgggtgaatgtgtaaatggatgcacaggtgaggggaagatggatagatggatgagggaatgggtggcagatggattatgggtgggtggataggtgagtaggtgagtaggtgagtgagtggataggtaagtggtggggggttgaggctgggtgctgggacagtgaggatatcattaatagaaacaggaaagtgaggaggaggaatcaccgtggtcccctctctgctcagcctgcctgagctggtctgagggtcctgatttttcaccagtgccttcccttctactgttccctgaggacaggcacccccagatggaaactctgacttgccctctacctcatctccacaggaaccttcctcctcaaaaatcaaagaacacagtggatgcgaaaatattccataaatggaaaaacgtagatgtagagaagaactaagccacatctgtcgagggccctgcacttgccaggcaagtttctgaatgtctgttctctctttcaacaccactct

SEQ ID NO: 25301 - DNA, 1320 bp, Artificial sequence
  DNA replication origin
cccgacgtgggtggggggggcgtggaatcggagcacaacttggccctgcgttcccaggaagggacccgaagacctccccaggccaccccgccatctgcgtgcgcgctggcaagaggaggggcgcggggtaatggtggccggcgccacagccccgcgccgcgcaggtaggtgtccccgcgagccaacccctttctctcgcctcgcctgtgggtccccggcgcgccggaccccggaaaccgcgcgcgggccaaggccgggtctcggcacctcccccggagcggccccgcgagcgcgggggaaccgggcgggccagtgcgggtgcaggcgcgtgcgcgtgcgaggcgggggcgcgccccaagcgaggccgccggggcgtggcgggggcgggagacgcggcagcggccgggaccgcgggtgtctgtccgcgagcgccggcgcggcccggtccctgtcccgggcggggcgtctccgcctgcggtcgccgcccgggttagcagccgccccctcggctggctccgcggccacctggtaattactcccgcccccacaaaaagtgcgagacaccgcgagcccttcatttcccagagcccggccgcaccggccattccgagtccgtttgggcctttacatcccccagatctgcgcggcccctcagggcagccctgagatcccgacagctccccctgccaccgatgaggggagagctggctcactgctcggtgggctggggcagcgccaggtggggtcctaggttgcaggccccccaccccccaactactccgccaagcaaatggcccaacggaggcagcagggtccaggtggtcctctgggtggtcccccagctggagaacaggggctgcggtggcgagagggcacaggcaggggagagagccctgccttggagccagaggctgtgtagctttgcgcaggtcacctgctgtggctgggcttctgtaaaactgagatgaaaatgttagccattgtcacctcactgaggtgtgaggctggtttgagagtctgcaaatctgagatgctatagttacgtttggctttactccctctgcccctacctgcacacacaggatcgcttccaaaaggaggcagggaaacaaattcctgagctcaacagtggaagtggggctggacagtgaggatgctgtggactgtgggcttttcacttgccagcccagttccagaaccagatagtctaagtccaatcccagctcttccatattttagagctattactgggcaagtcgcttttttttttttttttttttgagatggagtcttgctttgtcacccaggctggagtgcagt

SEQ ID NO: 25302 - DNA, 1200 bp, Artificial sequence
  DNA replication origin
gcagatctgggggatgtaaaggcccaaacggactcggaatggccggtgcggccgggctctgggaaatgaagggctcgcggtgtctcgcactttttgtgggggcgggagtaattaccaggtggccgcggagccagccgagggggcggctgctaacccgggcggcgaccgcaggcggagacgccccgcccgggacagggaccgggccgcgccggcgctcgcggacagacacccgcggtcccggccgctgccgcgtctcccgcccccgccacgccccggcggcctcgcttggggcgcgcccccgcctcgcacgcgcacgcgcctgcacccgcactggcccgcccggttcccccgcgctcgcggggccgctccgggggaggtgccgagacccggccttggcccgcgcgcggtttccggggtccggcgcgccggggacccacaggcgaggcgagagaaaggggttggctcgcggggacacctacctgcgcggcgcggggctgtggcgccggccaccattaccccgcgcccctcctcttgccagcgcgcacgcagatggcggggtggcctggggaggtcttcgggtcccttcctgggaacgcagggccaagttgtgctccgattccacgccccccccacccacgtcgggcacacgcagccctgagtgagggtccatgccctgcctttcacgctgaccacagcccctaggcttggcgcctgccgggaagggccgcaatggctcagggacccctgcccccactaccatcctgccctggggggacaggctctagaacactgcgtggggctcagagtgggcctagctgtaaaaggacaggggtccttctccagccacgcccactcccgggtgccctggctgtcagcagcctctcaccacaaccgcagggtgagaagcccagagaacagtccaggagtagcccttctgtcctttaccacgtccgtgtgcccagcacgggcaaatcagtagccacgcaataaatgaagtgcggtgttgcagctctgggcctctctgcacctgccctgacctcagcctgtccagcccagcctggggatctgcacttaggtttgcagcctcctgggtccctgcccggtgctcctcagagccggagcctgtctgccgcagggatggcttagaggacctcctactgaccttcttgataattcaaggaggccttaggcccctctgcc

SEQ ID NO: 25303 - DNA, 1414 bp, Artificial sequence
  DNA replication origin
gggaggggcggggcggggagtagaactggggttagagggagagcatttggaggctgagagtcttcgagagctggaagtggagctactttctttagaaggtgggttactatctgctctctctcctcagtcaggagccccaggggtcaatcagaggtaacagaatttgtaccacaggggcctggaaatgatgaactctgcccaggaaattgaggagcacagacggaatctgaaaatagtgatggtaagacataagtttcgagtttccattttttgagtggaggtcctgcggtaatccagctcccaaggtaaaatattcaaataaaaacatgatgtatatactagacatggaacttgagggggctgagattttttgaaactggttagaagggaaaaccaggatgaatacagcaagaacaacattctgataacagctatgattggaggataatgggcagggaggagccacgcctcaggagccaaagtaaaaagcacctggtctggagggcgggaagtcagggaagccttcctggaagaggtgattctgaactgaaacccaaaagtgactaagaggtatcctaggacttctctcagtgactggtgtgtgtgatgctgtggatacagaaggggcccttgaatgttgatggtgggggctcactggcccaggagtgtattgctgggggccacttagtttgattttgatcatcttgggcaagaaggagaagcagtgcagacctcccatcggtaactctgaattatagtctgtctcccatgtagcgtgcggtcgctctgaattacagtctgtctcccatgtaaagtgtgaattacatgggcagtgaccagctccctccagctcaggccaaagcccagcagagtgcccgttttgctgaataaatgaatgagggaagatggaaggataaaacgaggcagttaaataatgtgtgagaagtacctggcaccaggcgggcattcagtaaatattagtgtgcccctccctcctcctttcgcctctctcctctctctgggcccgggtggaatagcatttccccagctttaagagttgccacggagcccagacctcccgcctgggcccgggtccttggactcctcccgtagtgttcctctcggtgcctcagctgcagctgacctgtgaaaggtcatgtcctcattgggtctggacagtgctggacttttgagatctgcccccactccaggaaccctgggcaagggagcccctctggcctgccgtccccctagacgccactccatgacaccctcagggtgggaagtccctgggccccaagagccccatccatttgtatcctatcctagcacagagacctaccccagtccttctcctgctccacttcccccgaaggcctttattccacagattggatttgaattttccgccccg

SEQ ID NO: 25304 - DNA, 1295 bp, Artificial sequence
  DNA replication origin
acctaccccagtccttctcctgctccacttcccccgaaggcctttattccacagattggatttgaattttccgccccggtagctggcggggagccggcctcgctgaaggtcagccgttcccgggtgcgtccccgcgctggcgccgccgtcaaccctcgccccggccgcccggcgcactcacctctgtcgggtcccgggtgcaggaagcgcggccgcggttcggctgggcccgcgggagggagtggccgcggggacggcgcctgcggggcgtggcgggaccggcgcggagctcgccgtgcggggtcctcgggcgggaggcggaggctccgccgcccaccccgccacggggacagagtccaggccccgccggacaccagggcacctgcacccccaccggcctggggagggtgcggctgccaggacagctcctagggcacctccctccccccggggctcgaggggcccaggtttccctccctgcggccgggctggctggatccctgcccctatctatttgtggtctctttgtgggaagggagatggggagcaggtagctggttctgcctctgctctcagatgtgacacgatgaacccaacttcgtggggctgggccaaaaggccggagcttggagaggggacatttctgcgcttgacttcgggctatggactctgcccggtggagaccattgtaccccatacggatggagaggtgacgggcttgcccccgggcctggggtctgtcattcccctggcggactctttctgctgtctctggagaagggcaaggagggagggtggaaggtgagagagaagccgggacagagtttcccagcctccagacaagcccgagtggccattctctgtgccttgtgcgggaaaaccacgtctctcaaacctaggctcttccagggctgagtttggggccagctgagtctgaggcggctgggttgttctgctctgagcctgctactgggcctgcctcagcagacctttggaatcggatccctgtggccatcctgcacacctggtacccctctccctgaggcctttcatggggctgggagggcagaaatgagagggaaatggcctaggagacagccagcggctggcatagctgcgtacaccttaggacggtcagctccgcaaagcccctagcttctcttctcttctcgttccttcttcacctttggttatttctgctcaatcattcagactcttcccctgcagcccatccctaagaggtggtgctccctgtgccaagccgacctgtgctggcttgtgaaagcacatctgtg

SEQ ID NO: 25305 - DNA, 734 bp, Artificial sequence
  DNA replication origin
gaggggagcggcccagattcccaccccaccctcaggtccaggatgtgacgtgtgatatgtgggatgtgaggaaaggaggggtccagctcgaatctcaggctcctgaggctgcagagatggtcctgggaacaggggagctgggttgatgagggcagcagtcctggcctgaaggtcaggagacgctgggctggaggtcacctccacaagcgctccctttgtagggagggtggggtcaggcctgcagggggaatgcacgacaggagagtggtggaggcagaatccagggctctgcccgcagccctgatgtccccgggagggatgaatgaagggacgaaggagcaggcagcacagagctgtcccagagggacaaagaagcgtgcagcagaggctaagggtgccaagaagtgcctggccagctgtcaagtattgcaaaggccacacaggatgaagactgcgggtggccaccgctcagtctggctcaaaacagcatggatggcagtttctgtggagtggccagatacaaggacagattgcagagcctcggggagaacgggcaaggaggtgagaggagagagccaaaaaataggcttggtgagaaggaaggagacactgaggcagcagctggacagaaaaacatcagaagaaccttggtcaggcatggccattttcatgcctcctccttccctctcttcctcctctccaccatgcatccgatttcagtatcttcggcccct

SEQ ID NO: 25306 - DNA, 985 bp, Artificial sequence
  DNA replication origin
ttgcatgccccctgtggtggtggtgacccattagaaaaacaaataaaataggattcaattgatgccaacttaaacacacctgaggaggggtggaaagctgtcaccgtacaggaaatctttgtccttcacatctgtctctggttgcacgtgtaacagcttcccccacctagtggcaaggaaagtggtggattccaactgtggaggaagggtcgccggcatgcagagggaggggtgcagggggaggggtgcagagggaggggcacagagggaggggtggaggggcgcagagggaggggcgcagagggaggggtggaggggcgcagagggaggggcacagagggagcggtgcagagggaggggtgcagagggaggggcgcagagggggggtggaggggcgcaggggggtggaggggcgcaggggggtggaggggcgcaggggtaggggtgcagagggaggggcacagggaggggcgcagagggaggggtggaggggcgcagagggaggggtgcaggggcacagaggaaggggagcagagggaggggtgcataaggaggggcgcagggagccccaagtccccaggggcccacccgatgctaacaatgtgcagtgaggaaagccagaacgcacttcggttccattccattttattacagtcctgtccttgagttccagaatgaatggctatttaatacacaaccccaaacactcctaaaatggatcttgttaacattcaaaagtctcccatttctttctcagtatattaaatcaaaaggaaaaaaaaatcttaaaaaaaaaaaatcaataggtttagttcaccccaggaaaagcacctttacaacaggaaactaaattgtcaggaatctgaccaaagacacaaagcagcagataagattcccgacagaagagagtgactcccactggaacataaatagatccccccaaagtatacatatttcacatgagtgtgtacatatacatgtcata

SEQ ID NO: 25307 - DNA, 868 bp, Artificial sequence
  DNA replication origin
gaccccacttgtgggaaaggctggcagctcctgtcagggcccaggtccccgcagccggccgctggacacgaggcgcttctccctggctcccccaaaggaggagaggctggcccccctgcatcagtctgccacagcccccgccattgccactgcaggtgctggtgctgctgctgctggcagtggcagcaactcccagctcctgcacttctcacctgctgcagccccggctgccaggaccaagcccaaggcgcccccacgctcaggggaggtggccaccatcacccctgtccgggcagggctcagcctctcagagggagacggggtcccggggcagggctgcagtgaggggcttccggccaagagcccaggtcggtctcccgatttggctccccacctcggccgggccctggaggactgcagtcgagggagcgtctcaaagagcagtccggcctccccggagcccggcggggatccgcagaccgtgtggtatgagtacggctgtgtgtgactgtctcgtggttgagctcgcaaacctgaaaactactgacgcgccttccgactctcacggccttttctcttgcttgcctgcggtgccaggagagggtttggaatgaggaaaggggttcccacgcatttctgctgtttgttctgtgaatggaaacactgtgccaagccccaagaggattacgcttccaggtgtgtaacgtgttttctgtgtctgccgcttccagcagctgatatctttggaacaaataatccacgtcagcatggggaccaattaggatgcaatgacaaactgacttcccccaaagcagacactactccagtatgtcccagtagaacactcatttgcaatgtgttgagctcc

SEQ ID NO: 25308 - DNA, 1896 bp, Artificial sequence
  DNA replication origin
gagccagatccagctgttgagccagcagaaccagatgcttctggagcagaacatggagaacaaggagcagtaccatgaggagcagaagcagtacatgtaagcagggagtccctgaacccctctccgcaccctcaccacagctgcacatcctcagtctctggaggtcctggcttcccatgcagagaggagcccctgggcccgttgggatcctgagggcagggcacagaccgatcaccagcacggactgcccttagtttcctggaatgttctcagtttctagagttctcagttggcttttgtttgctctttcagaggcgctttccaccaccagaaacttcttttctctgcttctagaattaaattcacttgaaaaaatcatgagaacactgaagtatctcaagggggagaattcaaactgaaggctgggaatgagtgctgtacacctgcctgtgtccccctggatggagggaagtgggcttgttgggccctgtgaggtgcacagaaccagttccctggtagccaggaaccagtagggggaggtaaaatgtgaacagagcttcatccattaccagccagatgtgaagggttacatgaagcatggaaaaaaaacagggggagttgaagtccacagctaccccagggggtctgggggaggcccacaggaggtgggccatggcaggcgaggggacaggaaggtgggccgtggcaggcgaggggacaggaaggtgggccgtggcaggtgaggggacaggaaggtaggccgtggcaggtgaggatgggaaggtgagctgtggcaggtgaggatgggaaggtggaccgtggcaggtgaggacgggaaggtgggccgtggcaggtgagggggcaggaaggtgggctgtggcaggcgagggggcaggaaggtgggccgtggcaggcgaggggacaggaaggtgagctttggcaggtgaggatgggaaggtgggccgtggcaggtgaggggacaggaaggtcggccgtggcaggtgaggatgggaaggtgggccatggcaggtgagggggcaggaaggtgggccgtggcaggtgaggggacaggaaggtgagctgtggcaggtgaggatgggaaggtgggctatggcaggtgaggatgggaaggtgggctgtggcaagtgaggacgggaaggtgggccgtggcaggtgaggacaggaaggtgggctgtggcaggtgaggggacaggaaggtcagccgtggcaggtgaggacgggaaggtgagctgtggcaggtggtctaagtgcggggaatgtgcaggaggcacccagagagaaggctggaaaaggaggtgggcgctcagctgtggtagcttccatgtccagctaaagatgttggattcctggagttgttttggaagggatactactctggcagggccagggaagcttccagaaatagaaggcaaggggacgaaccctggtgccaggaatctcgtggttcagaagtcgaggaatcgagaatctagagtggtttctggatcctagccatggtggttgggctgtccttccacgtgatcgggaatggctggtattggcgtccgggcaggcattggtgtgctggcatcagtgtggggaaggcaagaagggacgtgcttgtggtgggacgtggtcactgtggtcacagtgaacactggtgtgctatcccaactctctgatgtaacgatgctcctttgttattctgtcggcttcacctacgtgtctagggctggcgtgccaccttcgggaggatggtttgtatgtaaaagcacactgtaattgtggggtggaaatgaccctgaagttggccctctataatcccggtgataaaatatcgccagcagaggttgggcaggtgctaactggaagaagtataggagcactcagggggat

SEQ ID NO: 25309 - DNA, 1696 bp, Artificial sequence
  DNA replication origin
cgagtggctcaggactgaagtaccctctgagtgcccgtctatgcggtttagtccccttcccacagcagttgcttaagttctggaacagccatcctgggtaccctctgggtcttctgccctgagggtcccggctattttcgtgtctgctcgagcacttgacctgctccccagccctcctcgctgactgtggggcctgcgccacgccgcgcttctccctctcggcaggtggagaactccacgctgagttcccagagcgcagcgctcaccgcgcagtacacgctgctgcagaaccaccacacggccaaggagacggagaacgaaagcctgcagaggcagcaggagcaacttacagcggcctacgaggccctgctgcaggaccacgagcacctgggcacgctgcacgagcggcaatcggccgagtacgaggccctcatccgccagcacagctgcctaaagacactgcatcggaatctggagctggagcacaaggagctcggggagaggtagggcctggggaaggaaggggatctggggaggggtagagtccagaggagaggctgggcccagggggaaaggtggggcctggggtagatgggtgggacctaggggagaggcagggcctggggaagatgggtggagcctggaggagatgggtgggacctgggggagagtgatagagcctggaggaggggtggggcctggggagaggggtggagcctggaggagaggcagagcctggggagagaggtggagcctggagagaggcggggtctgggggaggtgggtaggacctgtgggaaaggcagggactgggggagatgggtggagcctggacgagaggcgggggcctcgtgagaagggtggagcctggaggagaggtggagcctggagcagaggtggggtctcaggagagggtctcaggagaggcagggctttggggaagtgggcagggcccgggggagaggcagggtgtgtggggaggggaggtgaaggagggtggaggtggggcccctgggtaggcctgcagcggggcctgaggccaggcctggggagtctgtcaggctgcgcggaggactgggacttccctggacctcccctgcaggaaatctcttggccagctgcttcccattgttggggcacctgagctttcccaaaaggaaggaaataaacgttacctttagcaatttggaatttgtgcaactgaagacagtagtaagaggggctcctgtgtggagaaggggatgcctctactatttccagtgggcctttggggccctgatccctaagggttctcttctgtctcttttctccccaaaacagaaataaggagggaattctccacggctccgtttgtaggggtatgccttctctggcctcccagctcttctctttcatatcaaggtctcgcttgctttttttcatttttaacctttaattatggaaacttccgaacatatagaaaggaagcagaatcatatagtgaaactcttgtgtatgcatcatgcactctcgacagtcatttatgtcctgctgttctcatttcatgtgcacctcccactctccacaccctcaccccattttttacaggtaaaacttacattgaaatgcacacatcttaactttgcactcttgacagttcatggtcttgggttttgtattcattaagtcagccaatctgggctgggattctgtctcc

SEQ ID NO: 25310 - DNA, 1841 bp, Artificial sequence
  DNA replication origin
gcgcgccccgcctttgtctcccgggcgcgagccgccgcagccccgcgcccgctgctcgctgcggagccgttttgtgccgcggcgcgggggaacggggacgcggggcggggggcgcggagccggcgggcgcagcctcagcatggacgtgacagtctcggagctcctggagctcttcctgcagagcccgctggtgacctgggtgagtgcgcctggctccccgcccctttgttggtgcaccggcttctctctagcccggcgacgggacgccgcagacccgacacggccggggccccgggtggctccggggcgcgagggacgcagcaagtggctcccggccggggttggggccgcgtcctggagtccggagctttgtaactctggagccggcgcccccgttgtgcgtccggcgcgggaccccgccgcgctttcggccgggccaggagccgggcgggtacacctgttcccgctggggctctaggctggctgcctcggggcggaccgggtcccagtggtcactcctgtccctggggtttagccactcccgaaaaggaccccattcttcccaaccaaatatctcatgtagtttttctgaatccctgagaccagccggtggatggcggtgacgggtggggaatggggggcgccgaatgggaaagcgaacagactggggtgggcgcactgatttacaatggatttgagacgtgagacatttattgaaaagtcctttttatttttatttcttccgctctggaacgcgggagaaaagtggcgaggaagtttttcctcctgtctcgtgtctgttgccccgcgcggggaggggagacaggccctaggagaaggccgggcttggtgcctgctgaagggtggtgtgggcgtgggtgacccccttctgctcacactgacccgtccagtctctgcctgggagagctttggaccgtttgtgcgcacggggtgacttcctgtctttctctcctcgtccccctccccgcaggtgaaaacttttggcccgtttggaagcggcagccaggacaacctgactatgtacatggatttagtggacggcatctttttgaaccaaattatgctgcaaatgtaagttaccttcttctcggaggaaggaaagaatggtgcgttagaaagtttgagagtagaaatggagtggaaggttgcatggcggggtgtgtgtggggtggggggtagttctctgaaggtggagacgctggtatctcagtattaacgtgcctgttggacattcgtaggtgtttgaagaactccaggacagtgggtctggcagttggtttgatgaaggaaatttggaattgaatgactgtcatttacgtggtgtagatagtgcaattgacttcagactcaaggacttaattgtggtttgagcaatgaaatgaaaaagtccccttttggagggcaaggaactgtaacggagagtgtctggttacaggaagtgtcggggtgggcccaggcatccgagggttactgtaaagtttcattttagatgagggtgtctgtgtttctgagctcctttacatttcatcttcctttttcagttgccccaaagcaagtgcaattcattaagtcctactgtatggactgagtttaaagtcacagtgttaggagggtcccatggtgctgtttgtttggaagcatgcagcctgaacagggtcttagtagaagttactcttgccagcgagtacatctgaccacatcctttcctgttgctgagctctgcacggcctgattgacagcttgccacaacgtaggtgttggcttctacctttgcattctgtttttaactcaaactgcagggaacattggaactgagtgtc

SEQ ID NO: 25311 - DNA, 1483 bp, Artificial sequence
  DNA replication origin
gggggaaggggagggccagccgctcggggaggaacaatacgggcggccccgcccctcggcggccctgggcgaccggcgcgccgcctcgcggtgccagcccgggagcccgggagcccgggcgcgggaccaggctacgcggggcgctgggaggggactggtggcccgaggcgggtgggtcgcggggcccggctccccgcccgtgggaccgcgcgccctcgccgagcgcagcctccccgcgtgtggggccccagcacgtggcgcatccctgcgcgcgtgcgcgtgcagccggggcccgagcgccacgtgcgagctggggtgcgcgggcactggtgcgtgccgggagcggggacgccctgccctccgaggttgctctgccctccgaggtcgcccgcagctgccgcccgctctgggcttggggacctcggccctgcgcctttccgcactcctggcaggtgcagccccaggtacagtcaagaggccccgcaaacccccgctcctcacgcttgtgcgcggcgcgataaacgcgccccgaccctggggctgggctggagggcaaagaagaaactttatgttgagtttaggccttaggggcgcggcccctcgcgccctaccgtgccccaccgtgccatgttccgggctgcctgccttctaaaagttcctgcaggaagcaggtgatgtggcctccccgacccgggcccgcccccaccactttgccggaggcgagctaaattccagccggggttcctagcagcagcttagtggcaggcgacaggaaaaagggcaaaggccccaactggctggaaggcaagcccgggggcaggacctccttgcgggacggcacgaggcaggagccggctccaggctggtctcggcctggtaataatttcacaccaccagccggtcattgttcaaagcactgtagaccattttactaatttaaccctaacgatcgccgcatttcgcagctgggccaactggtacagggttgacccgaagggccctgcgtggcgcttggcaagtatacagcaggcactaaatggctgccgacaggctcggtggtaattttgaaagttggctctgtgcagcgttggggctgcggcatctgctggtggcgagtggtattacagcccagcgctggcggaccccgttgggctggggagggttgtgagattatggcctgagagccaagggggtcggttaggggtccctagagactgtggaaggcggggtagcataaaacacaatgggggactgcggaggaactaaaatttcgagactacatggttttgttgtgcaccagaagttcattagagaagttccttaattgcttctccgcccgccgcgatggcactcgaccccgcggattaatttaacaactctgatggttgctctgtgaaatttaaagaacagtggtttaagcaaagaccacaagaaagaagaattgagatcaaagaggagtgtgtgccatcgctgtggaggagtt

SEQ ID NO: 25312 - DNA, 1108 bp, Artificial sequence
  DNA replication origin
agggggagcggaagggagccactggccgcggtggcagggccaggtataaggaaggaaaatatggcggcggcggcggcggcctgaggaggcggcggcggcgcgggaagctgcttcgcggagatcatggcggaggcgggagcagggcagtgacgggagccccgagttcctagcgctgcggggcgggaggctacgaagcgctgcgcggccccctcggggctgccgggcgccgggctcgccaggcctggacaatagcgccggggagccggaggcgaggaaaggcggcggcccagagctcggtccctggagcgggccatgcaggcggcggcgcggccccgcggcgcccagcggcggcagtgaggccggggagccctccgctcgcgggcgccctcacgcctcgcccctcgcctctccagggcccctttcctgggcgtctactggcggggcccccgccccggttcccgggcggcacgatgaccgacacccggcggcgggtgaaggtgtacacgctcaacgaggaccggcagtgggacgaccggggcaccgggcatgtgtcgtctggctacgtggagcggctgaagggcatgtccctgcttgtcagggctgagagcgacggtaagtgaagccccgcgcggcgggaccctcgcagcccccacggccctgggccgcctccctggttcttgcggggcatggcgctcgctccacgagaacagagggacggctggggagggcggccacctcgggggaggacgggccccaggtaccccagtcttgcgggagctccccggagagcgcttgaaatgtttcctttctctgagtgcctggtggcattttgggtacgaggagagccaagcgtgtttgagctgtgccgccctggagtgtggagaggtcgaggacctgagatagggagtccggagtgtgctgttcttttgcactagagtgaccttgagaaagacactgattaatccgatctgctgccttagttcacccatctgtaaagcaggcatgaaactttgcttggagctaagaaagttcttggacctttcacactttgaagaacgttttgctgtgctttttttgtttttctttttaaacatctttttgctacatg

SEQ ID NO: 25313 - DNA, 912 bp, Artificial sequence
  DNA replication origin
ctgcaggggcggctcgtagccccaccatttaaagagacagcagcgagaccgggagccttactgcggcggaggcttccgacggaggcgggaggcgggcgcggagttgccgaggtggcgggagcgcagggagcggaggaggcgggacgcagattgcgccggtgacagcccgaggctccctcccgcctccttgcacgcaccgtcgtgcgagcgctgggcggtgtgtgcgtccgtcgcgccctgtgttcgtcatcagccccgctccaggatgcacgaggggcgtggatacgtttgcggcctctgcccgcgggccccggcgcttcggcctcgcctccgcccgccgccaccttcccttgttcctgccccgtccctgcctctgcccctgcccctggcctgcggacgccgggcagcgtgggcctgggcccctacccgcttccgagagcgttttcccggggccgcctttatggctgagtcgggcgctcgggacccacccggcgccttgcggacttgagggaatgaaatggaaacgcttccggggaaggtcgcgggtgtgggcgcctaggtcggcgcagccttgggagccgccgtgggtcgcggactggcgtggccagtgtggaaacttgggactgtttgcgatttctgggcgtgggaccgagttccaagtgacaattctaaaacttcaccttacagcctaggcaagccccaagtgctccattccttcatccctatcagaactgtctgccagcctttcttgtcggaaaaggaacttaaggcgctcacaaaaacaaatgcgacactgtgtaatcgggaggagtaattctcagcattaggtagtcctgtgttttgaagacctacttgatgtcaagtattgttgatcttcacaaaggaatatcattctcgttcctatcatgcagc

SEQ ID NO: 25314 - DNA, 842 bp, Artificial sequence
  DNA replication origin
aggtgggggggtcagccccccgcccggccagccgccccgtccgggagggaggtgggggggtagccccccacccggccagccgccccgtccgggaggtgaggggtgcctctgcccagccgcccctactgggaagtgaggagcccctctgcccggccagtcgccccgtccgggagggaggtggggggctcagcccccccgcccggccagccgccccgtccgggagggaggtgggggggtcagccccccacccggccagccgccccgtccgggaggtgaggggtgcctctgcccagccgcccctactgggaagtgaggagcccctcttcctggccagctgccccgtcctggagggaggtgggggggtcagccccccgcccggccagctgccctgtccgggaggtgaggggcgcctctgcccggccgcccctactgggatgtgaggagcccctctgcccggccaccaccctgtctgggaggtgtacccaacagctcattgagaaagggccgggatgacaatggcggttttgtggaatagaaaggcgggaaaggtggggaaaagattgagaaatcggatggttgccgtgtctgtgtagaaagaagtagacatgggagacttttcattttgttctgtactaagaaaaatccttctgccttgggatcctgctaattggtgaccttacccccaaccctgtgctctctaaaacatgtgctgtgtccactcagagttgaatggattaagggcggtgcaagatgtgctttgttaaacagatgcttgaaggcagcatgcttgttaagagtcatcaccactccctaatctcaagtacccagggacacaaacgctg

SEQ ID NO: 25315 - DNA, 1229 bp, Artificial sequence
  DNA replication origin
ccggacagggcagctggccgggcggggggctgacccccccacctccctccaggacggggcagctggccaggaagaggggctcctcacttcccagtaggggcggctgggcagaggcacccctcacctcccggacggggcggctggccgggtggggggctgacccccccacctccctcccggacggggcggctggccgggcgggggggctgagccccccacctccctcccggacggggcgactggccgggcagaggggctcctcacttcccagtaggggcggctgggcagaggcacccctcacctcccggacggggcggctggccgggtggggggctacccccccacctccctcccggacggggcggctggccgggcggggggctgacccccccacctccctcccggacggggcggctggcctggcgggggctgacccccacctccctcccggatggggtggctgccgggcggagacgctcctcacttcccagacggggtggctgccaggcggaggggctcctcacttctcagacggggcggttgccaggcggagggtctcctcacttctcagatggggcggccgggcagagacactccttacctcccagacggggtcacggccgggcagagacgctcgtcacttcctagatgggatggcggccgggaagaggcgctcctcacttcctagatgggatggcggctgggcagagacgctcctcactttccagactgggcagccaggcagaggggctcctcacgtcccagacgatgggcggccaggcagagacgctcctcacttcccagacggggtggcggccgggcagaggctgcaatctcggcactttgggaggccaaggcaggtggctgggaggtggaggttgtagcgagccacgatcacgccactgcactccagcctgggcaccattgagcactgagtgaaccagactccgtctgcaaacccggcacctcgggaggccaaggctggcggatcactcactgttaggagctggagaccagcccggccaacacagcgaaaccccgtctccaccaaaaaagtacgaaaaccagtcaggcgtggcggcgcgcgcctgtaatcgcaggcactcggcaggctgaggcaggagaatcaggcagggaggttgcagtgagccgcgatggcagcagtacagtccagcttcggctcggcatcagagggagacggtggaaagagagggagagggagaccgtgg

SEQ ID NO: 25316 - DNA, 1042 bp, Artificial sequence
  DNA replication origin
tcacgccactgcactccagcctgggcaccattgagcactgagtgaaccagactccgtctgcaaacccggcacctcgggaggccaaggctggcggatcactcactgttaggagctggagaccagcccggccaacacagcgaaaccccgtctccaccaaaaaagtacgaaaaccagtcaggcgtggcggcgcgcgcctgtaatcgcaggcactcggcaggctgaggcaggagaatcaggcagggaggttgcagtgagccgcgatggcagcagtacagtccagcttcggctcggcatcagagggagacggtggaaagagagggagagggagaccgtggggagagggggactgtggggagagggggaccgtggggagagggagagggagagggagagggagagggagactcttaaataaaaaaatttccaatccagaatctcatatctggcgaaactaaacttcattagtgaaggagaaataaaatccttttcagacaagcaaatgctgaggaaatttgtcactgccaagactgccttgcaagagctcctgaaggaagcactaaatatggaaagggaaaaaatgttaccagccactacaaaaacacactgaagtacacagaccagtgacactatgaagcaactacctcaacaagtctggaacataatcagctagcatcatgatgacaggatcaaattcacacataacaatgttaaccttaagtggaaattggctaaatgccccaattaaaagacacagaatggcaagctggataaagagtcaagccacatcagtgtgctatattcaagagacccatcttatgtgcaaagacacacataggttcaaaataaagtgatggcggaaaatctaccaagcaaatggacagcagaaaaaagcaggggttacaatcctagtttctgacaaaaccaactttaaaccaacacagatcgaaaaagacaaagaagggcattacataatggtaaagggttcaattcaacaagaagacctaactattctaaatatatatgcacccagtacaagagcacc

SEQ ID NO: 25317 - DNA, 1224 bp, Artificial sequence
  DNA replication origin
ctcttcatgttactttcctttccatttagacccagttaatgtatctatattacgtatgtttaatgtgtatggacacacacacacacacacacacacacacacaccataaaagattaagaagtatgcctaaattttaagtggtatgatttatatttttttcatacttttattttctaaattttccagttattactcttagaaagttagaaagttagagaccaaaaaaaccaattcccttataattatatatatataatgattccccaaagcctcttattttgagttctttctttgtattcattttcaggcaatatttattgagtgtctagtctgtgcctgaaatgtattttatatgaacttctcttataacaagatgttcttatgtcttatttatattctcatagtctcccctgaacctgattataaacagcatttttctttttcttgttttttctttttcaatcatttgttgaatatcacccatgtgttggtcactcttttaggaaggcattaaaaagaaatgtgacagaaagttagcactgtccctattgcaggggagagataagcatgtaaataccaaaaccgggccaagaagcttgatatagaaatgtgcaccatgctaccccactcaaaggagagaaagaactaactatcagagagaactggggagaaacttttctacagaggtgacatttcaactaggccttgaatgacaggtcaaatgatcttagatgaaaagggaggagggggctggtgagaaggaagaggctggcaggggaggaggaggctggcagaagagggggagactggcagggaagaggggggtggcaggacagaaggttggcagggaggaggaagctgacaggagaggaggaggttggtagggagaaagaggctggcaggaaggaggaggcttgcagggagcaggaggctggcaggagaggaggaggttggcagggagaaagaggctggcaggaaggaggagacttgcagggaggaggaggctggcaggagaggaggaggttggcagggaggaggaggctggcaggagaggaggaggttggcagggaggaggaggctggcaggagaggaggcggccgatgggggaggaggaggctggcagagagaaagaggctgggcagggaggaggaggttggcagggaggaggcggcttgcagatgagaaggctggcaggcaagcgctgcgggcgaccgtgggtggtgg

SEQ ID NO: 25318 - DNA, 989 bp, Artificial sequence
  DNA replication origin
agccacgccgcgcctttccccgcccgggtcccgccgccctcctccgggtctccacgtcccacgcccgcgctgggccggcgccgcgcggccgcggccggttacctgctggaggcagtgggcgctctgctgtcgccgcctgcgggaactgtgactccggtcacctcgcgcggccgcgcctcgaggtcctgcctttcccagggcctcccctaccctatcacttaccccctcccctccacttccctccccgtacccactcccacaccacccaccagggccgccccgcccctcgggacgggcgctaaggggcgaggcgaggcaaggcggggaggggcgaggcaaggcggggaggggcgaggcagggcggggcagggcggggagtggagtggcgcagaagggctgggcgcggaggggcggggcctcccgcgtacctgagccgcgctgcgcctgcgtcctccgcgactccgcgcttggcagccccttcctgggaaggtgtaaaatgccgccaggtgtggggtgtgttttgggagaagaagggagacaagcggtaggagggggaagagaggggaagctattggcctgaggaaacttctctgacttggggaggcaggggcagtctttctggcgatgtttatgcacactttacttagaagcggagtagtcatgttgttacttgacttttagagtttttataaaaagtctataaagtctttgaggatcagccctgctctctgcttttgttgctatctgctactgccttgccatcaatgggtgtcttggaaagaatattaaatgtatccaccacagcacctcacacccccgattctatgagggatcccctctaaccctggtaaagcggggggcctggcccttttctctgggcttccttggtggaaatctcaacactgcttggaaatgagtttcctagactgtctgatgaagaatggcttagcattttttgtttgttttgttttgacagaggttctgtcgcc

SEQ ID NO: 25319 - DNA, 1122 bp, Artificial sequence
  DNA replication origin
ggccctcggggctcgcgggtgttttattccagaggggccgagcgagtcgtggagaggacacggggagagcgccggggtcctcccagccactgcagagccctcagcgcaagcacctggttttgcttagccctcttcagtaattcagcattaaaccaattggaggaggaatgttaaaaatgaacacttcattttctaagtatgttaaacaatgcaaatggggcctcagtctggacacagctggttcagattacagcgctcaccaactggctagactcctcacaacaatcttggggcgtctgccagggcccagtgctcggcgctgggaggagagcccttccccggccgcgctcggctgcgagcgcccgggcagaaggcgaggggcgggcgcgcgcaggggtgcgggggctgggagggcccgggccccttgaccttcccacccaggggcggggcggggctggcagcgcggcccggcggggaggggcgtgcacgcccgcgctgcgtggcaaggggacccgcgagaacgttgtcgcctccggaaggaaagggacttgaactcacgacccacgcagctccagggactagaaactcacgatcgattgggaaaccagaacctacgaagcagaggcttggggcgagcgacgggagagtcgcgatcttcccgaagaaggggtggggagcagcggggtggggtgggggggaagaggatggaatcccgctggtgcgaattccagacttcagcttgtgcaatgcaagtcttaggacgcttttctctccccgccctcattccccgattctccctggcattttctcgctttcctggaaaagtgtcccctggctcgaaagtgattttaacaagttaaacggtgatttgaagaagggacagtctggaaaagcagaatggtggagacagcacataagacatgctgagtcctttgcattcattctagtggaggcttcaacctgtttctttttcctgtttgtttgtttgtttgtttgtttgtttttaagccattggagtacttttgtcaatgaaatcttacagaaggcactcactctataaaacgccagtggatggactgtggcctatcccatctgcttccacctgcatcttcctacctgcag

SEQ ID NO: 25320 - DNA, 1118 bp, Artificial sequence
  DNA replication origin
ctcccgagtagctgggattacaggtacatgccactactgcctggctaatttttatatttttagtagagacagggtttcaccatgttggccaggctggtcttgacagagtaatatattttctaaagatgtgtgtgaggctgggtgcagtggctcatatttgtaatcccaaaactttgggaggcccaggtgggagggtcacttgaggacaggaattcaataccagcctgagcaacaaagtgagatgcccatctcagaaagaaagagagaaagggagaaaggaaggaaagaaggaaggaaggaaaggaaggaaggggaggagggaaggaaggaaggggaggagggaaggaaggaaggggaggagggaaggaaagaaggaaggggaggagggaaggaaggaaggaaggggaggagggaaggaaagaaggaaggggaggagggaaggaaggaaggaaggggaggagggaaggaaggaaagggaggagggaaggaaggaaggggaggagggaaggaaggaaggggaagcaaggaaggaaggaatgaaggaaggaaggaaagggaagcaaggaaggaagaaagaaagggaaagaacctatatatttaaatggctgaggaaagattctaacccaggtctgcattaaagatgaaaattttccacatgttcaatgaattttactaattctttttcctcaatgagtacctaaagctgaaagaaaatgatatggatgtcacacgaaaatccttacctcctctgtcctcagtgccagtatacaatggagctgaagagaggcagtagaggaggtgatggagaaagaggggaggaagaagaatgagcaggaggcagaggagactgcctggaggcatttccccagggtcccccactgcctagccttgcatgaagtggacccctgtctctgaggacatcgcaatgtagtccaatctatgcccctctcatttccaatacatgattcattgcatttttaaaagtctggacaagttctgatattaaatacggttttatgtgagatgatttaagaacatgtacactttctttggcaccagtatgtagggtcttgtaggccttggctatccaaaatgaatggcagtcatggtgagtgaga

SEQ ID NO: 25321 - DNA, 823 bp, Artificial sequence
  DNA replication origin
cgctgctctcgcctccctactcctcccctcctgcccgcctctcaccccccgcccttcccagcacgtgtactcgtcccgtagggcgcactcccccgtgcactcttctcttcagtagttggacctctactgaccaatataatccccttccttctccctttttctctcctttcttccatatggagctgcaacgagcccttcctttaccctctgaggctgctgcagagagaaacaggttatggcaccgctggggactcttagaaaaagggtttctgcagtgtagtcgctcctgtccgggctctccgacccccgagccgacccgaggccccgccacacaccccctccccaccccgccacccaccacggggggaagatgcaggagaaaattaattggtcgtgcagagctaacaaacaggcttgcaccaagccaacacgagcttggacccgctgggaccagctccttcagggctctcggggctgttggggatctgcgaggccgcgacaccgacctgcaaaaaagctggagacggggcagagaggggaaccagagagatctgcgggccccacaaccgacggttgagctttccatgttcctaagcctaccgcttcccagggcttgctggtttggttttgtatctctcctttctggtcggctctctggtgtaaaccgctttaaaaatggggcaggagggaaaatttcagaacagcagctgaggggtgatacaggtgcaggcaggtggaggggaccccagcccagggggtctgtgactacccctaggaccgacttccttcccggccaattcatcgccacctgttcagtgccgct

SEQ ID NO: 25322 - DNA, 792 bp, Artificial sequence
  DNA replication origin
agccggggcggccgccgccaaacttggaggaggaggatgctgcgagtgggcgcggcggcgcggggcgcgggggcgcactgagtgctccctacggcgctgctgccagggctgtggccgggcgagccggccgaagcggagcgggcaggtagcggctctagcgccgggactgcgccagccctgcgagcccgggccgccagcgccaccgtgccggcgtcgcctcctcgccacggagccatggtgcgcgcagcgcgcacgcggcgcgcgggactctgagctccggccgcgtcgcgcgtccccaccttcccaaggggctcccccgccgacctcgccctcgggccatgaggctttggcccggagctcctcgcctctgagtcgcgcaccgcctgctccagccccagcgccgctcggccactgattgcactctggccgctgaagctccccatcctctcccagagacggcacccaggcgctccgggatggcgctccgcgggaccctccggccgctcaaagttcgcaggaggcgagagatgctgccgcagcaagtcggcttcgtgtgcgcggtgctggccctggtgtgctgtgcgtccggcctcttcggcagcttgggtgggtgctggtacgggtcccctcttcctggggagttgggggctttggctggggagtctcggggcggctgcgagatgttttcccctccttcctcatcaggttggtcccaagggttcatccagtcccctccccgccgggcaggtagagcgcgcccagaagagctgatggacgctctgggctgtggcg

SEQ ID NO: 25323 - DNA, 1553 bp, Artificial sequence
  DNA replication origin
cgcgggcgccccggcgtgtcggatcatgccgccggcagctccgggacggggaacggaggcgctcaggcgccgggccgcgcggaacgcggagtcccgggcgcccgcatgtccctggctctggccctctggaagggccaggccgccgctgccgccgcgctctggggctctcgctcccttctacttcctgtatcggagcgagcggggctttcaggaagaggctggccttggtggtcaagggtttttttgtcaaaagccattcggcagcggctcgcggcccggagccccctggggcacacggaggcccgggcggccgcgcccccggggccgggcctcggggcggggggtgctggggccaaggcgccgcacgggcgcccaacctcggggtgccgcctccacaggctgtggctggggctggggcgcgggaggcccgcggggcttcggagagggaaacttagagaaaagtcttccacttggcttggggccgcaggggaaggaagacgccctccgcctgtgccggcgccgaccgcgggccggcaggtggggaggcccagagctggcggggagttcgtcccactcggagccacagccttgcccgagggagcctcgaaatcgttcaagggcaacctcagaccagagccagggcgcctcctccacattcctgacagatgtgcacgccgcctcctcttggatgcttcccgtgacaaggagctcactcctcaacaaggcggactgctcgtccatcaagcctggcatctaattcacctgtgccgggtaccgcagatggagaacgccagacagctgacacaaatgcaagacccacagcaaccccaggtgggaccgtgaggcctcttctaagtgcctgggtgttcaaaaatgcctcccgagcccagtgttttcccagagcatttcccagagtgactgagcaggactggaccctattaggtcacctcagtctcatgcaggatttctttacctggccgctactgccatttggggccggctaatgctttgttattggggctaatgctttgttattggggccagctaatgctttgttattaaacctccttcaaaactgcaggaggtttaacggtatccatggcctctccatgattcataaaatacccatagcatcagcctctctctgtaacgaccagaaatgtctctagatatcacaagtgtcctccgggggcaaaatcgtcgaggtctaataccatcattttagagataaggaaactgaggcctagagagtggaggtgacttgctcaaggccatatggcaagtgaggaccagacaggactgagcccagggctctggtgaaaggatccccaggcctctctgccctgctgctctctcctcacaccctcctcctccatcttccctggatttccaccaaatcagcctgccttctagaagttagaaagaaaagaattcacatctgagcatacacgaaaagtccagccttccccctgggatgtaaaatggtgcagccactttggaaaagagtctagcagttcctcaaaaagttaaacgtcaagttaagcatatggccc

SEQ ID NO: 25324 - DNA, 1439 bp, Artificial sequence
  DNA replication origin
ctgggcaccctctcatccattcctgtcttcacagaggaggaaatggcttcagagaacagggcaggtgggataatgaggaaggagcgggagacatggctggaaagggggtccccaggccttaaacactaggaagaaacacagaatcgggaccacccatcctggggccctggcagtgccacattccccttcctgagcgtgtgaaacagccctaggccaaaagtcaggagccctggcctcagcacacagtgtcttcaactaccatgtgggctggccaccccttttcctttccgggcccctgtttccccattagtccgaactccttctgggagatctctggagggaaccctgaacagttgcctgttgtgaccaaagtcatcagatggacctgcctgactgtgcgtttgctgggagatgcctgactgtgtgctcgtcagaggctgcctgactgtgcgtttgctgggagatgcctgactgtgtgctcgtcagaggctgcctgactgtgcgttcgtcgggggctgcctgactgtgcgtttgctgggagatgcctgactgtgtgttcgtcgggggctgcctgactgtgcgtttgctgggagatgcctgactgtgtgttcgtcgagggctgcctgactgtgtgttcgtcgggggctgcctgactgcgtttgctgggagatgcctgactgtgtgttcgtcgagggctgcctgactgcgtttgctgggagatgcctgactgtgtgttcatcgggggctgcctgtgtgtttgctgggagatgcctgactgtgtgttcatcgggggctgcctgactgtgcgtttgctgggagatgcctgactgtgtgttcgtcgggggctgcctgactgtgtgtttgctgggagatgcctgactgtgtgttcatcgggggctgcctgtgtgtttgctgggagatgcctgactgtgtgttcatcgggggctgcctgactgtgcgtttgctgggagatgcctgactgtgtgttcatcgggggctgcctgactgtgcatttgctgggagatgcctgactgtgtgttcatcgggggctgcctgactgtgcgtttgctgggagatgcctgactgtgtgttcatcgggggctgcctgactgtgcgtttgctgggagatgcctgactgtgtgttcatcgggggctgcctgactgtgcgtttgctgggagatgcctgactgtgtgttcatcgggggctgcctgactgtgcgtttgctgggagatgcctgactgtgtgttcatcgggggctgcctgactgtgcgtttgctgggagatgcctgactgtgtgctcgtcagaggctgcctgactgtgcgtttgctgggagatgcctgactgtgtgttcatcgggggctgcctgactgcatttgctgggagatgcctgactgtgtgttcgtcgggggctgcctgactgcatttgctgggagatgc

SEQ ID NO: 25325 - DNA, 1627 bp, Artificial sequence
  DNA replication origin
gggtcatcatggtgcgaatctcctgcagcatctccgtgctggaggtctggcgcgccatcatctccaggctgtacaccttgtagtcctgcaccaggctgccaaagtacgagcccttgtcctgcgccagctccaccaccttcttgtacagcttgcggttgttggagaggaaagcgtggaacatgctgctgaaactggcaaagctcagccggtgccgagccttgcccaggatcatggagggcttcttcttcacgctggggctgctgaactgctccagctcctcctccgtgctgctggtggagtaggagtcctggtcggtggccatgacagacacccccaagctgtctgagagggaggccagggagcccttgaactctggagagctctgggaatgggcagtggcctgggcaggagggtgctgagtcccagcctgagaagcagggctttggccctctctgggtggacccggcgtgggtgtctccaaggccatcgcctgtgtgcagagctcagcgttctctaagggagctgggagggtcgaggccagttgtcgagagatccgttttttcctggggggcgggactgggggttgtttggctgtcctgggcagctctggcatgctgtgaggatcgctggctttcacctctgtgtcctggccttgctccgtgctctcccggggcgtgtcctcagggccgtctgaggtcccttggggaggcaggctgagctggtccccctctgccgccatccccggactttggtcttctaaggacaccctctcggaaacgcggcgtctgggaggggcagtgggaaggttcttcttcgcaggcagtggcggggcggggacctgctgcaagggactggaggctgcccctggcttcatcgcttcctccctgagggggcccaggcctgcagtggggcatgggagtctctcgcaggtcatcatgggcggctggttcggatggtctgggggacctggggcatggggtgtgacgtggggggcaggcactgggggagaggtgggcaaaggacaggcaggggcgggggcaagagcagggagcacagggggctgggctgggctgcagggctgcaggggcagcactgggggagggggtggtgggcggcgtggggcccacctggaggtgggtgaggtggcatcagaggtgggcggcaaagggcgtgcagggcaatttccaagaggtggctggtcggtgggcagggcgctgctgcagtcctcgatgaaaataggattcacaaaccacaggcggtcatttcctaccgacagctcgatttcacaggcacagtttgcgtcatgggctgtgggcctgaggctggagactagggggaatccgggggcccggtctcttgggggctctgctggcttccctctttcttgtggaggattcagcgaggagtcccagaaacctgtggaagcaagagaggggcagggggtcagtctgtgccagggactaggtgttgctgtgctgggcggggtctgtgggcggggtccacgggtgggagggctgttcaaggcatttgcttcactactccgaggttgaggttgttttcccctcttggacgctttcaaacctctcccaccacttcctgcctcgagaggggaagccccactcagtcc

SEQ ID NO: 25326 - DNA, 2030 bp, Artificial sequence
  DNA replication origin
cgtgcctgtggttcttctgtgtgcatgctgagagcttcccttccttggggaaaccaaggaagaaggcccacaaagtcctgatgaggtagaagtcccaaaatgtgggatgcagaatgaggcattcattcattcacacaaggctatcagccttacttgtcttgtcctacaccacagcccatgtgtttggcatggataaatgggtgggtggatgagtggaagggtagatgggcgagtggatgagtggatgggtggacgggtggatggatggatggtagatgaatgggtgtgtgattgcgtaggtgggtggatgggtagatggatatgtggatgggtagatgaatatgtggagggtgggcaaatatgtggatgggtgcatgagtgaatatgtgggtgggtggatgggcgaatatgtggatgggtgggtggtgaatatgtgggtgggtgggtgggtggatgggtaggtgggtgggtatatggatatgtggatgggtgaatgaatatgtggagggtgggcgaatatgtggattggtgggtgagtgaataagtggatgggtagggggatgggtagatggatatgtggatgggtggatgaatatgtgggtgtgtgggtgaatatgtggatgggcaggtgggtggacagatgagtggacggatggatgggtgggtggttaggtggatgagtggatgcatggatggatgggtgggtgaatgggtgggtggatggatggatggatgggtgaatgggtgggtggatggatggatgggtagatggttatgtggatggctgggtgaatatgtggatgggtggatgagtgcatagatggatgggtgaatggatgggtggatgggttaatggatggatgaatgatggattggtgggtagatggatggataggtggataggtagatggaaatgtggatgggtagctgaatatgtggatgggtgggtgggtgaatacgtgggtgggtaggtggttggatgagtagatggatgcatggatggatgacggatgggtgggtggacgtatagatggatagatggataggtgggtggatgggtagatgggtgggtggatgggtagatgggtgggtaggtggatgagtggatgcatggatggatgggtaggtgaatgggtggatggatggctatatggatggacagatgaatagatggatggatatatggctacactgggcagcagataaccattgctgaagaaaccttggcttctcttgaattcctggacttcctagaagacaacttgttcccattacaggacatttttaactacagagaaaaaaaaaaggtagatacagaggtcccagtgccactagccaaagttatatatgacagcaaacgtcatggctttaacacgctcccctgagctgtcaacaactcatggaactatctcatcaaactatcaccccagagactggaacatgcaaaaaaaatgcgaacagatacaaagagggtctgctcatctcaagaaccacaaagcccaaggggaaccctcagggcctgggaggatggttccctcctttgaagctgatgtctcagaggggaagtcagggctccctcagagctgatatctggactggctgcccctcaggaaattcttggtggatgggtggctgaggctaagtgggtgggaggatgtggtgggaaggaggaaaggggaagggaaactgagcatggggtggaccaaaccacacctctgccttcatcctattggggagcacagggcttcttactcatatcattaacttcccactgatggaggtcctgacccagggcttatgagcaaggggccgagagtccctgggggtcacccctgtctaagaactgattgtcactgtctctcagactcttactgtgagcactgcctgccacttcagccccttcttttatactactacctcctgctgttcccgctacaaagactgccttttcccttttttttttaatcagctggctcctatttatccttcattgctcagctcagatgtcacctcctccaggaagccttccc

SEQ ID NO: 25327 - DNA, 962 bp, Artificial sequence
  DNA replication origin
tgctcacagctctggatgtgcctggctcactagtccaactctcacccttttttacacacccagtcctgctctgtcccaggccctgggcttggcgcccctgaggcatgtgaaccatgggctgtgccctcccagaggtgacagcttcatatgcagaggatgataggatgtgatatgcactgtaaaaggggaggccgcaggaagcccagaggagggcaccccacccagcctgtgtgaaacggtgtgtgtgtgtatcagggaaggcttctcagaggaggggctgttggagaaactgagtcgtcttaaaggatgggcagtgacagccagtgaagaaggggagattgaccagtgagggcagcggttgagcagccagtgaactgggctgggcatgtttggggaactgggggcagctggatttgatgcagcctgggggtgggtggggtgatggagttggggaggggcgggactggtttgaatactgagtctgtatagagagaggtatggggaggggtgggccactgggttggtgggggttacgcagacccttggcagctgctgcatttgtccagggactaaggagcaaggctgtagatgagcctgtgggctccttaaagcagggactgggatgacaagtccccatctccagcccctgcagggtgctgggtcctaggaggggctaaggaatgatgggtgtgtctcattcctcctgcacccttcctgcttgcccagggagaacaccaatgcctgctgatatgtttctagacgcacccaagtcctggacacacactggcagcaggggctgggggcccttcctctggtgtggggagtctcactgctcccctaaggcagggctgggcggctggagcagccaggtgatgtcacggctccttagccagcaggcagcagggatggtgtctgggacatggccccaccgggcccctcccgctctcaggcctcacctgtac

SEQ ID NO: 25328 - DNA, 1575 bp, Artificial sequence
  DNA replication origin
agggcagcacagataagaagggaggtgcgagcccgcccgggcatcccatagtgcgggcgggcaacacagtccagccccttagggctgcaagagccctggggctctgaggagctgcgtggggcagggattggtaaagcgggaggggaccgggtgaaggaggctgggcgcagtcgggtggggaaggcccggcatgagcagggcgggcaaggcgaggcgacgcctgcgggctggggctgggcactcgcagcacgagcagggcgcccgcccgccgtcctccacccctagggacccagccccacacctgccgggctttgcctttgctcccactgcctgtgtggccttgattcgtcgagccccggctgtaaagtggggatagcgcccgcctcccataaatgggcgagcaggcgctggaagctccggcccggagcggcctcgccttccccggggctcagggctgcaggcagagaggctgcgcgcggggctgcccccttgtggccggattgggaacagcaggcctgcgcgggaagcggctgaggatcccggctcggcggagaccgtgatggcaactggtggctagggcttaggcgaggccgggctcctgtcaagagcttcacggggaccgcccatttcttccaggaggggaaaagcccggcccactccctccgtcttagtggctgcctcagggctccttgtcctccattaggcctcccagggcactatccacctgctagtgactgtccagctctgggcttcccctccccagggaagggtgcccaccccccaaggcatggtgtgcggaggaggcactgggagggggcagagggtggtgccctccccagatcccagatgtggtgctgaggggacccccctccgaagcttccgtctcccaaacagtgggtggtccgtttcatccatactctgcctggctcagcatcaggaacccctaaggtagaagcaggaagtacgggatgcctgggccaggcttggaccaagagtgtccatgtccctacagtctgtgggagtccggggtgttgggaggggatgggaacagaggtgtgctggagctggctcacacccgccagggagagccgactgcatacacttctttccaactccacattcagtgatgccaagttgaagttggccatggaggactcacaccatggaaatggacagaagctaaaatcagagcttttgttttctccccagagagtcagttattaaattgattagccatagtcagcctgtgtgggcaggaaaactgagtcccagagtggggcagggattgctgagggtcacacagcaagctagtacagggctggggccagaactcaagcctcctgtctcccaggcctgggctctgcttattatagatgcaccatcttgaaagccaggagtgtggctcaggactggtctgctctgggtgtcagaggagtgagtctgcatagctgctcacagctctggatgtgcctggctcactagtccaactctcacccttttttacacacccagtcctgctctgtcccaggccctgggcttggcgcccctgaggcatgtgaaccatgggctgtgccc

SEQ ID NO: 25329 - DNA, 1490 bp, Artificial sequence
  DNA replication origin
gagattgagccactgcactccagcctgggtgatagagcaagactctgtctcaaaaaaaaaaaaaaaaaaaaaaaaaaaaaaaaaaaaaaggaaagcagaggcatcggtagatagttacaatttgatggtctctctcttgtgagacagacaagtccagggggctgtgggagcatggttgggccagacagaccatgggaggactgtctggcccaacctggggaattaggaaaggcttcctaccagcctgggcaacatggtgaaaccccatctctacagaaaataccaaaaattagccaggtgtggtggcaccagcctgtagtcccagctacttggggggctgaggtgggaggacttcctgagcccaggagatggaggctgcagtgagccctgatcacacaactgtactccctccagggcagcagaacaagatgagaccccgtcttaaaaaaaaaaaaaaaaaaaaaaaaaaaagcttcctggaggaggttggataggagttgaccaggcaaatactacaggcaatggtatccctgggagaggtgacagatggttctgatcctaagctggggatgacgggagccaaggatggtgggaggctgacgggccgacaggggccagggtcccaagggctgagggtgctgagggtggctgagagtatgccacaggttctggcagaggacaggatccccatggcaaagagggggtcttctgaagccacccgggaaggaggtgaggctgtgaatgcggggctggctgtgcagagctccagccccttcagaaaagatgtcattttcaaaagggcttttattaaattctccccacacgatggctcctgcaatctgccacagctctggggcgtgtcctgtagggaaaggccctgttttccctgaggcggggctgggcttgtccatgggtccgcggagctggccgtgcttggcgccctggcgtgtgtctagctgcttcttgccgggcacagagctgcggggtctgggggcaccgggagctaagagcaggctctggtgcaggggtggaggcctgtctcttaaccgacaccctgaggtgctcctgagatgctgggtccaccctgagtggcacggggagcagctgtggccggtgctccttcctaggccagtcctggggaaactaagctcgggcccttctttgcaaagaccgaggatggggtgggtgtgggggactcatggggaatggcctgaggagctacgtgtgaagagggcgccggtttgttggctgcagcggcctggagcgcctctctcctgagcctcagtttccctttccgtctaatgaagaacatgccgtctcggtgtctcagggctattaggacttgccctcaggaagtggccttggacgagcgtcatgttattttcacaactgtcctgcgacgttggcctgggcacgtcatggaatggcccatgtccctctgctgcgtggacgtcgcggtcgggagtgcgcagccagaggcggggccagac

SEQ ID NO: 25330 - DNA, 1163 bp, Artificial sequence
  DNA replication origin
agcctgtcttcacccttgcgtggacagggagttgcattaggaacatttttctcttatttataatgttgtcttcctttgtattcttgttattttttaaaacttaagagcaatttctcaattcctgagttggacttttgagtgttcagtcagttctctaaacagtgtctttggcagacaaagtacttggatcagaagaatcctgtgggaaatagaactagctctgttgatcattctgagtcattctgtttttgagactaaaatctatgctttccagagactattatatagtctgaaaaataaaaacaagttacttaggactttcagaggtccttcttacctatatatgtggtggcagtggtggtagtggtggcggtgttggtggcggtgttggtggcggtgttggtggtggtggtggtgttggtggtggtggcggtgatggcggtggcggtggcggcggcggcggtggcggcggtggcggcggcggcggcggcggcggtggcggcggcggcggtggcggtggtggtggtggcggtggtggcggtggcggtggtggtgttggtggcggtggtggtgttggtggcggtggtggtgatggtggtggtggtggtggtggtggcagtggcggtggtggtggcggtggcggtggttgtggtggtggggtgtgtatgtgcacgtgtgctcacatgtgcaatgtgtacgtagcccacgtgtgcactagtttcctgctgaataatactttggatggatgggagatctttttaaattgagataaaaaatatcaatgtatgtgttttaaaataataatttaaatgcctgaccgacgggatgattcacagtaagtcttccaggagacagaacacatcactccttagaactccaaaattggcctcccaggcaagatctaaaacttcaccaaatcatttctcccaggcagacgcgtgccatgcctaccagatcattcaccgcaatgggattcctgacgaacagatcgttgtgatgatgtacgatgacattgcttactctgaagagtaagtggggaacacttggaacttggtggggaaggacttcagggtatttaaaaaaaggtcacatagactcacaggaatcctagtggcctaatgttaaaatatataagagactcccagacagaagatcacagggat

SEQ ID NO: 25331 - DNA, 794 bp, Artificial sequence
  DNA replication origin
acccattcagccttcaaaagctgtataccaagcacccatctttgtcataaaataagtccatttgtttgggacatccacaggcaaagtgccagtctgcatgttttatgagctttagttttattgctgtgctcagtgttgtttagagtgcactgtgtgtacacccagttgctcaggctgtcttccttggggagacaaatcgctgggcacacgcctctccttatgcttacttatgtctttgttctaggaatgacaaaattaaatgtaagcagacaggcaacatttttcctttctgtcttcagatgatttgcaaggcatgaagtggtagtatgtttcacctgagataaggacgcaagcctgtcttcacccttgcgtggacagggagttgcattaggaacatttttctcttatttataatgttgtcttcctttgtattcttgttattttttaaaacttaagagcaatttctcaattcctgagttggacttttgagtgttcagtcagttctctaaacagtgtctttggcagacaaagtacttggatcagaagaatcctgtgggaaatagaactagctctgttgatcattctgagtcattctgtttttgagactaaaatctatgctttccagagactattatatagtctgaaaaataaaaacaagttacttaggactttcagaggtccttcttacctatatatgtggtggcagtggtggtagtggtggcggtgttggtggcggtgttggtggcggtgttggtggtggtggtggtgttggtggtggtggcggtgatggcggt

SEQ ID NO: 25332 - DNA, 946 bp, Artificial sequence
  DNA replication origin
ctgttcctaggtcgtaaaggctggaaccaagccccagtcccagtaggggcccttggctgcgggatctcagcaaatcccgtctcctcccgcgcctcagtttccccctccagagcactgagcccttccagccacaacacgcgtgagaaacgagaaacctccacccccagccccaccaagcagaggccacagggtttcccttccctcgggattcactgtttcctgaaattccccctcgcacggtgagaaactgattactcagaaagggacgggaaaaatgaaaatcccagccctgaggtcgagagcctgagagagcagacgggaggccctggcctcgggcgtggggactgaacccggttctgtgctggggctcgcggttacctgtggcaggcgaccgtggtggcagtggtggcggcggcggcggtgagtgaccgcggtggtggcgccggcgggaccgtgagaactcgcggcggctcgcagcctcacaccaaacacccacgacgtcggcactgctgtgattgctgcgggcgccgccgctcctcgcttaagggccactgtgccgcggtgactggtggagctatggggcgtggcatctgccaaaaccaatgggaggagaggacgaggccggcgagccaaagggactacaaatcccagtgtgcatgggcaggggcttctgggctgggcgcgggggtggaggggcagtagttgcgcactgaagtgaggtggggaatccgaggtacttgaggtctgggggcgcggtgattccagaagcatctaccgaaagatcataccagctcttggagcaaacctgtccgcacattggagccacttaggaaagcctcaaaaatactgatgcccctgtgaaaataaaattgaaaagctgttggaacccccccaccgaaaaaatattttaagccttgaactgactgtaatgtcagtcacgtatgct

SEQ ID NO: 25333 - DNA, 948 bp, Artificial sequence
  DNA replication origin
gtctcaagccccgcccaactcaggcctcgcgttccttccaggctgggcaccgcctttggtcacccacgtggcccgcagtaaggccccgccctttgtgggtgtggcctttcacggcgtgcgggccgtccaccggcggcgagccacgtcacacgcacgcaggccatgcgccgcgcctgttctcgccgcgggcggaaaaggggcgtggccatgcgcgaggaccccgtagccgccagcgccaccgcctgagtcgcctgcaggtggctgttcgcgtctccctgccgtgcaggcagctcgaaagccactctgttgtggggtcctcgcttcccttccacgtctcccggaagcggtagcagggccccggcgggtcggggaggaggtttactcagcttgggccccctccgggccagccgccgagggggcgcggcccaggacggcggctaggccgtagtgcagcctctccggagtcctcaggtgaggcggaggcgagggcccactggacgagacgggggtgttaacggtcctaggagcgggggcgcagtcccttcagtggagaccctggtctctccgttttctttcgggtcgcgctcatcttcgccctgttaggggctgaggagggtaactggagagactccttgggcttcagccgacgtcgtttactgccctcctctgtcttcctttctcctgacccctgcctggcctggccgttcttcccgcacggaacgagatgggtggggagcagagtgggggtctctgctcgcttacctgagattccccaaactgacagaccccagggctctacggactgggcctgaccgactgacctccagcctccctccctctgtgctgacgcctggccttcgaagcaggccctgccgcagccctttgcagacccatccccatcccacgcactctctgcccctgggcagtgtctggggaattgacgggtgc

SEQ ID NO: 25334 - DNA, 843 bp, Artificial sequence
  DNA replication origin
ggaggtgggggggtcagccccccgcccggccagccgccccgtccgggaggtgaggggcgcctctgcccggccgcccctactgggaagtgaggagcccctcagcccggccagccaccccgtccgggagggagatgggggggtcagcccccccacccggccagccgccccgtccgggagggaggtgggggggtcagccccccgcccggccagccaccccgtccgggagggaggtggggggatcagccctctgcccggccagccgccccatctgggaggtgaggggcgcctctgcccggccgcccctactgggaagtgaggagcccctctgcccggccagccgccccgtccgggagggaggtgggggggtcagccccccgcccggccagccgccccgtccgggaggtgaggggcgcctctgcccggccgcccctactgggaagtgaggagcccctctgcccggccaccaccccgtctgggaggtgtgcccaacagctcattgagaacgggccaggatgacaatggcggctttgtggaatagaaaggcgggaaaggtggggaaaagattgagaaatcggatggttgccgtgtctgtgtagaaagaagtagacatgggagacttttcattttgttctgcactaagaaaaattcctctgccttgggatcccgttgatctgtgaccttacccccaaccctgtgctctctgaaacatgtgctgtgtccactcagggttaaatggattaagggcggtgcaagatgtgctttgttaaacagatgcttgaaggcagcatgctcgttaagagtcatcaccactccctaatctcaagtacccagggacacaaacac

SEQ ID NO: 25335 - DNA, 1340 bp, Artificial sequence
  DNA replication origin
tccctcccggacggggcggctggccgggcagaggggctcctcacttcccagtaggggcggccgggcagaggcgcccctcacctcccagatggggcggctggccgggcagagggctgatccccccacctccctcccggacggggtggctggccgggcggggggctgacccccccacctccctcccggacggggcggctggccgggtgggggggctgacccccccatctccctcccggacggggtggctggccgggctgaggggctcctcacttcccagtaggggcggccgggcagaggcgcccctcacctcccggacggggcggctggccgggcggggggctgacccccccacctccctcccggacggcacggctggccaggcggggggctgaccccccacctccctcccggatggggcggctggccgggcggggggctgacccccccacctccctcccggacggggtggctgccgggcggagacgctcctcacttcccagatggggtggctgccgggcggagaggctcctcacttctcagacggggcagctgccgggcggaggggctcctcacttctcagacggggtggttgccaggcagagggtctcctcacttctcagacggggcggccgggcagagacgctcctcacctcccagacggggtctcgccgggcagaggcgctcctcacatcccagatggggcggcggggcagaggcgctccccacatctcagacgatgggcggccgggcagagacgctcctcacttcctagatgtgatggcggctgggaagaggcgctcctcacttcctagatgggatggcggccgggtggagacgctcctcactttccagactgggcagccaggcagaggggctcctcacatcccagacgatgggcggccaggcagagacactcctcacttcccagacggggtggcggccgggcagaggctgcactctgggcactttgggaggccaaggcaggcggctgggatgtgtaggttgtagtgagccgagatcacgccactgcactccagcctgggcaccattgagcactgagtgaaggagactccgtctgcaatcccggcacctcgggaggccgaggttggcggatcactcgcggttaggggctggagaccggcccggccaacacagcgaaacccggtctccaccaaaaccagtcaggcgtggcggcgcgcgcctgcaatcgcaggcactcggcaggctgaggggagaatcaggcagggaggttgcagtgagccgagatggcagcagtacagtccagcttcggctccgcatgagagggagaccgtggggagagggagaggagggagaggagg

SEQ ID NO: 25336 - DNA, 1132 bp, Artificial sequence
  DNA replication origin
cgggcagaggctgcactctgggcactttgggaggccaaggcaggcggctgggatgtgtaggttgtagtgagccgagatcacgccactgcactccagcctgggcaccattgagcactgagtgaaggagactccgtctgcaatcccggcacctcgggaggccgaggttggcggatcactcgcggttaggggctggagaccggcccggccaacacagcgaaacccggtctccaccaaaaccagtcaggcgtggcggcgcgcgcctgcaatcgcaggcactcggcaggctgaggggagaatcaggcagggaggttgcagtgagccgagatggcagcagtacagtccagcttcggctccgcatgagagggagaccgtggggagagggagaggagggagaggagggagcgggagagggagcgggagcgggagagggagagggagagggagagggagcggcatttattatttattagcactcaatgcctcaggaataagatctctcactgggatctaaggatgaggtggttgcaacacctagggaggtccaggcttaagcgagggctttatctacccactggccctgaaccacttgtcctggagctgggagccaagggggctgatgggagagggaggctgtggattcttctgagccccttcatcagggatatgacagcagcaggaggcctctgagatcctccacgctgggaaggctccctggttctgaggccaactcagtagcctttgctgtcctcaaaacctcctgttcaggcacagacctactccagaatgtgtagacacctccctactgcttacatgtgggaccaagtgctttttaacacgtgacttccagcaggaaagctgggatatgggtaaggtcaccgctacatgagagaagaggaacgggtgtttttgaatgtccttctgcgatgggagtgggtctcacatgcagaagccctccccttgttactagcaattgaagtaaggccatttgtgagaaactgcctttgagcttgatgcagggaatgacctagattttcttgtttattttaaagagcttgggaggaaaggctcacagagatgtgagagacaggggcattgaatcaggagccaccacttcagcaaagaaagggatctc

SEQ ID NO: 25337 - DNA, 1179 bp, Artificial sequence
  DNA replication origin
ccatgaatgaattccaagtacacacccagcgtggtgtgtctcttgctgccagagaaacccctactagtgtctcctaaggccctttcctgggtgacctccacaactagcccctattggtgggaccgtgggtgcaggagccatgatcaagatgttttgcttgtgttcctttgggacagccagggctggagagcctgctgggtgtgggttgttactggcagagcctttcagggagaaagagcaaagcggggaggccagagccaggcaggcaaaggccatttttacaggtctgtggacaactacaactacagagaagccacccccaccagcccctggggagcctactggattcagagtgttcaagacagcctgaagccaggcacctcggcccagcaggtaagatgcaggcctcttccgctgcatgtgcagctcagaggaagctggggaagtccccacagcaggacagcagggaaagcaagcaatctttgatatcttcttttgcaagctgtccccaggctcagcagccgcagtgctggctcttggctttatgccgaacttactcctgcagctgcccaagaactggctgtgaagtgtccactggagcctcctacccctcatccccagcaccccttcttacctcggtatcccctttattcatagggctgttcacagggagcgcagtgactgggaagaagaagagagtgctggggtcactcctctgctccaagtggaggccagtcctttctgaccgggctcactggggcccgttcacccaatgccacccctcaaaactgcccccaccaaaaagagaggctagggctgattttgtttcccttccctggttgctgcccacagtggggtggtccccagaggctgcactgagaggtcctccccctccccctttggaaactcttgctctggagcgggtgtgctttggagcggggagcgccatcaaacaaggccaagagctgcacagtgggacgggtgggagacagacgaaggggagagagaccccagaggtggggggggcgggggaagagatggaggaaggggattgtgagggatgatatggagaagtagaagtcaagggcagaaaggcggggagcgtgagatgaaaggggaagaggggtggagggttgcgagcagccatgctcccacctccccgcagtgaccttggccggc

SEQ ID NO: 25338 - DNA, 1017 bp, Artificial sequence
  DNA replication origin
ggtgtgcagaagcgatggggggcgggtggctccctggcacctgctggctcagtgcttggggcttgcaatgagaggtggaccaggcctgctgggtgaggagggacccagcaggtgtgaaaaggagtgaacccactgggaagagggccccgatctccatggtgtcatgccgaggctcccgcgcctatcctcacctaggtgactttatggaaaggcaggctgcatcccaggggttagggcacaaagccagccctgtggtgctctctgatctcaaatgtccactagagacaagggggtggaggcccaaagacctggaatgatttgcccaaatcacagcacaaatcctcagcacaggcgccatcggctcgggcctccagccaggcagcctccttcccgggctccagggagcagcagtgctggcttaggggaaggagaccgctgtgcagggctaaatgggacgtgtgttggggggcccagaggacgcccagcttcctttccttccctttagtgagggagcacagcccagaccccagcgcggaactcccctgaggggtctgtggcctcctctggctgtggggagggaggggttagctgcacaccaggcagggtgggggctaacaaagccttggtggagaccagtaggaggaaaaacaaggaaggggcaggtcagggagtggggagtcaggcagaagggaagccactctcacatgcaccgatcagcctcccacagcccgacatgggcaggcttcccccaagggtcccggtccacagtggccatggagaccaacagacagggatgtgcacagacactggcatggcagccatacgcacacccctcacctcccatccagacctagtgttgcaaacacaagcgtgtgtaaactcagttaggaggtctgcacagtagagagcaggcggacggccccactccccaacggtggaccacctggtactctcttccatcccccactacccctcatttagatcatgacatcagagaatcaggttaaaaattaaaaa

SEQ ID NO: 25339 - DNA, 1521 bp, Artificial sequence
  DNA replication origin
acggccccactccccaacggtggaccacctggtactctcttccatcccccactacccctcatttagatcatgacatcagagaatcaggttaaaaattaaaaaacagaagaatcagatcactggggattcttagtagtagcatcgccgttgggagctgctggcccagcgggtgtgctctgcgccctgcgctgcccctctgggtcccggctccgtggctactgggaggaggccttggtggccagggaggccacacaatgctgctggaagctgggcgacacgccggcgttgcagccgagtctctggtgcggcagcttggcggtgccgcccgcgtcggcctcagccttccagggcgcgtcctggcccatcatgctgccgcagcagccggggctggcgctgcatgtccgctcgcccaccaggccgcccgccggctcggccagaagcttgctgtgcctcagcagggccacgtcccctgtggctgccatggctgtgctctggccctgcaggacagtggcgatgtggttcaggaggtctgtgaagaactcgctcacgccctcgtagcctgggggtgggagagagacagcacaaggggcgtgagccaggggcacgcatcatgcagggaggaggaggaggaggcagaaccgatgggctcctgggatgaggcagggtgtgctgtcagcgtcccatttacagagaaaacgtgaggctcagcagataaggggggctgaggggagtcaaaaagcttggacgcccaaccaggtgcgtgctcctcgaccttcagctgttgccagggtgtgagaagctgaagaacctgagctgaggatgaaacttgcttgtccctgttcctctcaggcacagctccactgtctcacccacccatccacttgcatggtaaaagccagtacatgtgcaggggatgttggcgtggctggaggtagcagcaccaaagccagctccacacacttggagtaataaatactcctgaggcccagctgagtctggcctcaggctgagtcccggagaccgcttccaccctgagcctcagcttccctgtctgcaaactgagaagagaaggctgccgcccaggtggaggctgctgtggcactactgagagaggctgggatgtgagtggtgtctgcttcacaaagcagctgccgccccaactgagtctgcttccttctcaccacaaaatacctgcagggaggccccctgtgtcccattctctgaggatcacagccaaggaacggaaatgctgggcatcactagcaacatccaggcctgagacaagctccagggcgcagcatcacatgctccccttaacagaggggaacagaacagaaaccatggtacctgcctggggcaagtgcttcctaacacagttgcgaacatcagcagagccctcgggagccaccaagcaggtttcggatctcaggggaggattctgctggctcccagcaaactgctccaaaagagactcacacagggcaagcgccctgcctgcctgagccaacttggaggggcggg

SEQ ID NO: 25340 - DNA, 1622 bp, Artificial sequence
  DNA replication origin
aaaccacggagcatgttttgagtggcagaatgaaaaggggacaacgtcagtggctggagggccaggggggcacagggaggcctgttagaagagaagttctggaaggagggaggagacaggagagggtgggaagctttgcacctgagcaaggccagtgcctcccaacacaaaatgtgtagatggtcgcgatctatgggtgcagataagggatggccttgtgagtcagtgtggggcactgtgagccagtgtggacagggagggttcttccagagaagccaagagaagggccacccagatggggtgggactatggctgagcctggcggagactggtgagggagcctggtactgaggagaggcccagggctctggcagggcagagctggttccccgggagatagctcagtgtgtccgccttaccatagagcacccttttggggccaagcagagcagcaggcctgttctcctgcaccccacaggaggcaccttgggccatgggtgtccagcagcacgtgggtgggagaggcctgggagagggcccctccagagaggggctggctctggagtaataaccgcaacagctgcaagcgctgatgacaccgtgagccaggcctgccccgacgcctcacttcgtcctcacgaggcgttgtgcaaagggccgctggaatctctgtgttgctgataagaatgtgaggctgggggttgagtggcttgtccaaagtcacgtggtggagctggatggggcccagactgtcagccccagcctttccacctctcagctccagccatgggttcgaatcttgcctctgcctttacagtctgtgatggcacaagccacctaacgtttaagtctcagtgttcactgcagtgggaaccagtttcccaccctgcagacagaggagatggcttttgcacagtgctggtatggagctggcaccctgccctgcaggttcatgcctcagtccgctccccgagctcctgtttatcctcaggcctccgtggaggcagccgtctctgcaccaccacagaaagcggcctccctgccctgggccactgggcgttgtctggggatgctggaggaggttgctggagaatggctccctgttccctggcgctgacctgatggtggagctcctccactgcatttctccctaggcacccaacagccatgcccgtgcccgggacacctaccctgccctccaggcctagcccagggccgacggacaccccgggtcctatggtgggggacctggcaccatgtggtattcaagacacacacaagaccaagggcgtccttcagatcccactctgcctcttaggagccaccttgagcctcagggtcctcacctgtgaaacgggctgcaggggtgcggtgggctgaggaccgtggcgctcacagcccagtggctgctacttcccgagtgctgtgaacgccatggacgtcatcactgccctccccgtggtggttaacggtcatgcctcctcatctgtaaactggggacagcattatgaagattaggcgagaggatgttgcgggacgctcgcacagtgccagctcgggaggcgccgcttgccggccagaatagccatctttatttccaccgcgggcacctgcatcccctc

SEQ ID NO: 25341 - DNA, 1032 bp, Artificial sequence
  DNA replication origin
gaagccagccttgctagctgctgaggtgcaaaaacgttcaggaaatgcctcctgccttcagagactgtgcctggcaggtggggactcggggttgtttatcgtggaggtgaggcaggaccttggccccacacactggctgggcactttctgtgtgtgtcacctccgctcgtctgagagcatgcgcaggcgcagtcagcagcaccggccacagcaaggaagccaaggctcagaggagtgtgctggctcctgtcattcagctggtgtttacccagggctgctgtcgcccagggctgctgtgtgtcccagctggtccagatgctgatgcagcttgagctccactgccatgccctgcctggggagagctcacccctgtctggaggaggcggaggacagagcgggcggtcagcgggctcctctgtgaggtggtgacactggagcacaggggcaggtcccaggagaggcaccgtggagccctgtggctacagcaggtgcagctgcggggcaggaaggctggaggacagagtcaggggagctgcgtgtggtgaactgaggacgttggagctctccctgggagtcggggagcagccaccgtgagatctgtgcttgtgaactgaaagggcagacccgtgcgacgatcgtgtttttctccattgcctctgggtgcagtggggaggaaaccatgggtttagctggagctgggatttcatggggttttgctggcaggtatgagggaaccagggcgcaagggacattcaggataatgcaagggacgttcaggataaggaagtgtgggatctaaaccacggagcatgttttgagtggcagaatgaaaaggggacaacgtcagtggctggagggccaggggggcacagggaggcctgttagaagagaagttctggaaggagggaggagacaggagagggtgggaagctttgcacctgagcaaggccagtgcctcccaacacaaaatgtgtagatggtcgcgatctatgggtgcagataagggatggccttgtgagtcagtgtggggca

SEQ ID NO: 25342 - DNA, 1400 bp, Artificial sequence
  DNA replication origin
gcggccctcagagggcaggacctggccagtggccgccccgtgctcaccacagtaggtctgtctggcttcctggcctgaagcatgccagggcctcgtggcagctggtgtggggggtctgtctgtgtggtgtggcttcgcagctcctcggcccatggcctgacttccttgtgtatgttggcagctggacaagatcgagggcgtgttcgagcggccgagcgacgaggtcatccgggagctctcccgggccctgcggcaggcactgggcgtgtcactcttcggcatcgacatcatcatcaacaaccagacagggcagcacgccgtcattgacatcaatgccttcccaggtgagtggcggccaggccacctccactgaccggcctccagagactgtcctcaggtgaccaggcaggtgaggcggggtgactgaggccagaaagccagctttctccctcaccacgaggtccggggaggtgcagccccgagaagcctcagcctcacctgcgcgatgggcttacggggtgtgcgaggagggagggagagctgcacgtccacctggggagcgccaggcacagtggccacagcacgcatgtccctcacctcctctctccacctgcgtcattggtggatcagcccctcccccaggccctcctcgatttaaggagcaggaaggaccttgaagggattacagccccctgcagtttacatgttgggaaactgaggccctagagaggaggaagctgttcaggccccacagcacattggtggcaggccagagactcccaggctcacgttgcctccaccaccctgaactgcagcgccgggcagaggcctggggaggagccctgggctatggagtctgttccctgctgccagctgggccctaggaacccactggcattgagccaggctctgccatgtgcccctcagctctcagtgaggggccctatggggaccgcaggagcagagccccagcacagggcatgaggaacgatggtgtgacatcacagctcgcggtcaccaggctgcgtgcctcgccctggggacaccaaggctcagtggcttgtttacctcccgcagcagctcagagacagagccgcgcttgatgccttggtgcctgccattccccagatgggggtcccccgttcctttctccatcctgacccttgtaaagcatctgctgtggaggtgaagccagccttgctagctgctgaggtgcaaaaacgttcaggaaatgcctcctgccttcagagactgtgcctggcaggtggggactcggggttgtttatcgtggaggtgaggcaggaccttggccccacacactggctgggcactttctgtgtgtgtcacctccgctcgtctgagagcatgcgcaggcgcagtcagcagcaccggccacagca

SEQ ID NO: 25343 - DNA, 1131 bp, Artificial sequence
  DNA replication origin
ggacctcgtggtgagggagaaagctggctttctggcctcagtcaccccgcctcacctgcctggtcacctgaggacagtctctggaggccggtcagtggaggtggcctggccgccactcacctgggaaggcattgatgtcaatgacggcgtgctgccctgtctggttgttgatgatgatgtcgatgccgaagagtgacacgcccagtgcctgccgcagggcccgggagagctcccggatgacctcgtcgctcggccgctcgaacacgccctcgatcttgtccagctgccaacatacacaaggaagtcaggccatgggccgaggagctgcgaagccacaccacacagacagaccccccacaccagctgccacgaggccctggcatgcttcaggccaggaagccagacagacctactgtggtgagcacggggcggccactggccaggtcctgccctctgagggccgccaggcacgaggtgtgtgaggctcattacctcctgtgggctcatcacagcctggaaggccagtgccagcactgcacattacacacagggaaaccggagctcagagagggttggggctggtctaaagtcacacagctcaaaagcacagggcagaatttggacccatattttttagcctctaaaaccaaagccttttaacagggaggaaggagatggagagtgtgtcagggacccgggaagacatggtgcagagcaccgaagccggaacttggaggcaggaggatgtgggcccctgggaggggtgggagaaggagagcggccccagggaggacacaggggaggcaaaggtgctgaggccagcagctgcgggacatggctaggagcagctggggcgcagagccgggcacaagtgaggagttctgatcagacccccacttgcctgccatcacagagacccccaaggaggtgagggtgagggccctgtggcccagcaggccagtcttccttcccaaaaaatgctgtttccaaatgaactcacaccctaaacaatgcgggctccccagagaggctgctctgctgctcctgcctgcctcctggggtccaagctcagctttcctcaaggtttccatgtgctggtcaggccaccctgctctgttctccctcccagcc

SEQ ID NO: 25344 - DNA, 1257 bp, Artificial sequence
  DNA replication origin
acagggcaagactctgtctcaaaaaaaagaaacactctctccagtcatgtcttactggttagaagtgcacataacatgggcacccccactgcaagggaggctgggaatgaagcatctcataacaggctcaggccaatcatcactgccacccagaggaaaagggacagtgtagacaatgagaagtgaagatctgctgagaaggaaactttgcagatattaatgatactaaagaataacagattccatttgccctttaaaagccctacaaaaccccttctgtggcttctaggtagacctggggggaaagtcagcaatacacaagaatcctgtgtggaaggcctcctgcatgcagggctctgtgctaagtaccaaggtgagtgcctgcgaggagcccacaggtaaacacagtcggctcagaggaggtgaggggacagaggggaagccaggaatgcttctgccagcaagtgacatctggctggagtaggtcggaccagcaagtgcagaggcagggagagagtgcgcaggtgttgctggtgtctgagttgggaatggcagggggtgaggctgcctggctggcaggaccaaactgggaagggcctcataaaccattctccagggcttagactttaacctaaagacaatgaaaggccaggaaaggttagatcagtggagtgactcagatattctcgatgaaagatcattctgccaggtgggggctggactgagggtgggagagcccagagctggggatgccagccagaggcttggcaataatgggtaagggggactgggagactgaccggggtcacagaacagaaggacgggggtggggggtgggtaaggaaatatccagagggaaaaatcaacagaacctggaaacagaaaagatgtggatgtggagggacagaggcaccgggctggcagctggggtgggagatggggggagaccttcatgaccatctaagaaaacacagcacaagcagatttggaagggacagagggagtcaagttacaaacacggtccctccaggcagaggcacttggcaaaggttctaggcctgccatgggggtgggcgccgacaatccctgctgctgggaagtgcaactcctgctcagcttccctttcgaggaatggccttcccggggcaaaacaaaggccagggggcagcaggccgtaggaaatactctcactgccttaaatagaagcaaaccatctggccagttggagaaagtttacacaaggaggactgggttgca

SEQ ID NO: 25345 - DNA, 3428 bp, Artificial sequence
  DNA replication origin
atgcttggtggcgctaggcaccttgatggagagaaaaaggatcatgacccacgattctggcatcaccacatgctgtctctcaaggggctacctactgacaggtgggagaaacccatcagctcggcgagagccctccccagctccctggcccgatcttcccaggcggccccatggttgtctgtctccctgagctactgacgcagaagaggtcaaagacttggtcatcttagagtccctagagggcagcaggggacctgccactggggcctgggtgagcacccagcaacagaaggaatgaagggctgagcccctgttagggccctgggcctgcaagcccatcagctcccttaaaggatcaatcataaattgatgacagaaatgagccatggggtgatggccacaggggcatctgggagggccagtctggaaggtcgaagccagagtggccatgcgggactctgggtagggacagaagaactgggtccgctctcacagaggccacgggacacattgctgctctgccttgaggtccacagggtcataaggcaggggtggagggggtgtaggtcgcaacacaggggtggagggggtgcgggtcacgaggcaggggttgagggggtgcgggtcacgaggcggggtggagggggtgcgggtcacgaggcagggtggagggggtgcgggtcacgaggcggggtggagggggtgtgagtcacgaggcggggtggaagcggtgcgggttacaaggcgggggtgggtgctggtcacgaggcagggtggagggggtgcgggtcacgaggcaggggtggagggggtgcaggtcgtgaggcaggggtggagggggtgcgggttatgaggtggggtggagggggtgcaggtcacgaggcaggggtggagggggtgcggatcatgaggcaagggtgaacggggtgcgggttacgagggagggtggagggggtgcgggtcttgaggcgggggcgggtgctggtcacaaggtggggtggagggggtacgggtcacaaggcggggtggagggggtgcaggtcgtgaggcaggggtggagggggtgcaggtcacgaggcggggtggagggggtgcgggtcacgaggcaggggtggagggggtgcggatcataaggcaggggtggagggggtgcgggtcacgaggcggggtggagggggtgcggatcatgaagcaggggtggagggggtgcgggtctcgaggcaggggcgggtgctggtcacgaggggggtggagggggtgcaggtcgtgaggcaggggtggagggggtgcaggtcacaaggcaagggtggagggggtgtgggtcacgaggcaggggtggagggggtgcagatcatgaggcaggggtggaggggggtgtgggtctcgaggcaggggtggagggtgtgtgggtctcgaggcggggatgggtgctggtcatgaggcaggggtggagggagtatgggtgacgaagcaggggtggagggggtgcgggtcctaagcaggggggagggggtgcgggtcacaaggcaggggtggaggggggtgtgggtcacgagacaggggtggaggtggtatgggtctcgaggcgggggcgggtgctgatcccgaggcagggacggagggagtgcaggtcacgaggcaggggtggagggggtgcgggtctcaaggtgggcgcaggtgctggtcacaaggcaggggtggggagggtgctggtcatgaggcaggggtggagggggtgcaggtcacaaggcaggggtggagggggtgcgggtcacgaggcaggggtggagggggtgcgggtcacgaggcaggggtggagagggtgtgggtcacggtcacgaggcaggggtggagggggtgcgggtcacgaggcaggggtggagggggtgcgggtcacgaggcaggggtggagggggtgcgggtcacgaggcaggggtggagggggtgctggtcacgaggcaggggtggagggggtgggggtcccgaggcaggggtggagggggtgagggtcccgaagcaggagtggagggggtgcaagtcacgaggcaggggtggagggggtgcaggtcatgaggcaggggtggggggtgctggtcactccctgctcacccccatccacactgcctggctctgagcctgggaggctgactgccgtagaacgcagcattcaagatccagggcttccagttgcacttggccaagaggggtcactggcaggagaccagagggcaggaggaggggggtggggtatttagtcccctctctctccctgcttcagtgacatgcctgggcagtggctgtggcttgctatgactaccatcacagagcttctgcgacactttcttcaccttacctgcggcccaagaagcagaacagctcctctctgctgccaggctctaggtgcctcaccagcccccgctgctcccttaaccctgcccacagctcaacaaacagcccctgctttcaaggctctctttgaaccactgagggtgagctctgcttcctgcaagctccctggctaatatgaagaggaacacgttctgggtcaccacacatacagggtcagaagacagggagcaaatttgagccacagagacgagcacagaaccaccaggctacgtgggccaggcatgcaccctgaccaggagagaggccaggctgagggtacacagtctggaacaggcgagtatcagcatggggacagtgaaacaagctcaggaatggaggggaccctgctctgctgcaaaaggcccatgcttgcaaggtattagggggctgattgtgtggtagccttggaaaattcaggaaggccacgggaggtttttatgaggaaccagagaggtctggttagcactggggaaggggcaggggatggaagagtcagagtagaaagagcctaggccataggcaacagcagatctgagttcaaagacccagagtgattggtgcttggagctctgtgactagaaatatcacagaagcaggtgacagatctgagcctcagtttcctcatctgcaaaatagggagaataataaatagatcccatctcacagagctattatgagaactaggaagataaaagtaaaaaagtccaaggcagagggggacacaggctccacaatgacaaggattttggttcaaggtcaggtagctggggttccctggaacagtgacccacacccacaacaaaagttccactccaaatctggactggctccataccactagggaatcactggagggatcactccaaaagacaacttaacatgcaagctggtgtttgatactcttcagaaattaactttccggactgcaattccccaaatgactcctaaccctccaccactagctgcagattcctcaacacagatctggggccaggctgtgtgataagtactttgacactgtatctcaattacccttctta

SEQ ID NO: 25346 - DNA, 1065 bp, Artificial sequence
  DNA replication origin
aaccctctcatggtcctgccctcagccggctgtcgggaaccttcggaaaggacgtgtccagcctgctggagtaacgcttgttttctttgtttttctccacaggaagcgagggatggaggttgtgcaggtgagtacagaccgcgtccccgtggttctttgggtagtggggcccttggtgcccacctctctgtctctccttctctcctccagcattgggcacggctttctctcttcttcacgtgcagcttgtttttagctcccctgtggatttgatgtggtttctgccctggcctgggcagactccgacaggggcttctcgggtttggagggttgctgtggctttgtcagtggggagagggttggtttgggagtcctgaggggggtgtgcatggcagtggtcaggttagggtgggtgtgggaagggtgagggggcagtaggcacccagctagatgtccagttgtcttgtgctctgtgtagcctcaccctgggtggacttggttcaggtgctcattaactagaaaaagaaggatggatggaagaagaaggaagaatggatggagggggaaggaaggatcttggagggaggggaaaggtggacagatggagggagaaggaaggatggagggagaaggaaggatggatggaggggaggaaggatagaaggatggatggagagaagagggaaggatggatggagggggaagaaggaaacatcaaaatactctcagactctatgtgaggggcaggctgtgttatttgcactaaaggctgtacctggcacctaatgggtacttggtaaacctgatggtggcctggccatgtcctctgttccccacgctgtccccgtggagggtgactgtggtctgtgcagctgggctggcatcccatctccttgtcttacgggcctcatctgcctgtagctgcagagaggggaactcaagctggggactagatcagggcagtggaggtgctggcccctgctagaatatctaaggggctttcaaaaagcccactggggagctcttccagcccacccctgttaacttcagctccaggccttccct

SEQ ID NO: 25347 - DNA, 922 bp, Artificial sequence
  DNA replication origin
ttgtccctggctcgtagcaatcaataccccagaacaaagggccgagacagtggtagccttaagttcttccaggttaggaggcgtcctggagaggctatgctgagccgaatcctcaaggctggggtgggaggtgggcaccagggccagggaggagaaagccctgtgtgccagagctgcacaggtgggcacttcctgggcccacagtaagaaatgtgggatgggggaggctggacgtggtggctcgcgcctgtaatcccagcactttgggaggctgaggcaggcggatcacctgaggtcaggagtttgagaccagcctggccaacatggtgaaaccccatctctactaaaaatacaaaaattagccgggcgtggtggtgggtgcctgtagtcccagctacttgggaggctgaggcaggagaatcgcttgaacccgggaggcggaggttgtagtgagctgagatcgtaacattccactccagcctaggcaacagagtgagactctgtctcaaaaaaaaagaaatgggtcaggaagagaagggtaggagtcaacagaaagcctttgtgtgttctgggcaaaccccgacccaggccatgaggctcctaaaattgggtggcaagagtcaggttacgtggtggccgtgggactgcatgtgagcggggaagatgtagaggacatgagtgcagcttggaggctgttggcgaggccagggcaggcatcagtggagcattgggaaggcagcgggcaggactgtgtgggcctcccgtgtgtggcagtggatgggttggggcatgactggctgtggcaggtcctggggcgagacctgatggggaggacatggggacctatgggggttgagctcggcagggacggcaggtggtgaggatggtggtgaacttggtggcaggggccttgggacgaccc

SEQ ID NO: 25348 - DNA, 1188 bp, Artificial sequence
  DNA replication origin
cctcctcccggccgcccgccgcgccccgccccgctccgctccgcgcggcaggactgcgcgccccagctccgatccccgttccgcgtccccgccgccgggaggaggtgcccactcgctcgcggcgcgcgccggccgccagactcggcctgtgggcgatttcctccggacccaggctccccgcccgaggaggaagatgcagacctttctgaaagggaagagagttggctactggctgagcgagaagaaaatcaagaagctgaatttccaggccttcgccgagctgtgcaggtaaggagggacgcggcgccggcgcccggggacccccggcccgagcccggtgacccccggcccgagcccggtgcagcctcattagttgttttgggagatcggagccaaacgggaagaagcggcgcgcggggagactgagtccgagcagccaggtggcggtggcggccgccggccgcgttccagggaagcggtggccggtgcgggcgaggtggcacggaccggggcgttcaggtgcactgtgacccggctggggaggcccccagcagcccagggcgcggtgggagttctactgagggttgcggagggacctgggaaatcggggcatccacgctgtggggtaagggcttgagggtacttttggaccggagtgtttttcttccttcgtccccttccctttcatgaagaaagggcacccacgtttgtggaccacctactatgtgccccgcgtgtgctcggctcttgaggctgtcattgcatatcatgaggttaagcccagttgaagcgagtagcaattcttggcatgtatgtggtgatttgctgtctcattagagcctcgcagcagccctgcaaattggccagggtggtgattctgggccacctgtctgagaacggggaccgatcggcagaggagcggggtacctagcttggggtcccgcagctagggagtggctggtgcgtagaaagtgctgggtaaatgcccgtggtgtggagtggccttctgccatctgggctgtgtgcccctgctcccaccatgctggtgctccttggcggagtctccggtgtttaacagatcacgttcttaataaattacagaactactgagtcttgggtcaggtaggccttcccttgctccacaactgtagctttgcctctgagaagcagttaagcccttttctcaat

SEQ ID NO: 25349 - DNA, 1018 bp, Artificial sequence
  DNA replication origin
tgtgtccccgggtgtggggtgcggggcgcggggcttcctgggggcggccgtggcccggcggtcttacttcgggaagggagccgcggtgtgggcgtgtgttccgcctggcctttgggggcgaccgagccgctgagtttcggaaacgtctctgtacccccagcagggttcagcacccccaaggcaatccattgcaactgcgcccggaaggagaccttccaggaattcgccccttccctcgaggaagcggaccctggcccaggatggggccccccgggggggtgggtgaacacccaggggccctcctaggcgtaggacgtgaccaccagttctcactctaggtccccttcactgaggggggaaggggcggggactggaggcgacagcgacaacagcggccgtccccggagaccccttcctcaggggtgcgggtcagcgtcggcgccggggagtcactaaaccccgcctaccctgccctgccctatggggcagccagggagctttcctgcctcaatggtctctgggtttgggaaggagaaatggacttctctccccaggcccaggcaggaaaaatggattcccgtggagggaaggctcagaaaagtttgagaggagacactgaagctggccttggaaatcaaggagattttgatggagcagggaagggggatgagcttgaattgaggctgggagacaagaaaaagccaagttgccagcgggtgaccaagacttcccttgatcacacttgagtcaggctcctccgagacctctttctgaccaggccccgaccttgggctctgtccttggccttcttagtccagttttagccagaatcctgctgtcaagaatatctccacgcttggtatgtgatcaccctggccggcctacattaagaaactccgtctcaaaaaaaaaagaaagacaaggatctctctatgctgcccaggctggagtgcaatggtgcagtcatagctcactgcagcctcgaacacccctgctaaactgatcctcccacctcagc

SEQ ID NO: 25350 - DNA, 1543 bp, Artificial sequence
  DNA replication origin
atcgcccccgcccgccgcgcagcttccccgagcgagaccaaaacaggtggaatccgggctggagccggagctccggcggcgcgggtggcggcacgtccctccaggtgggtggctctctgggtctggcgactcagcgctcctcagccttgccccctggtgcccgctcgcgactgtcatcgccccatcacttctcgttgcagacagtaccacaggcacctggagtaccggcatcggtcgctgtggcccccgagtgtccgtcagagcctaggggagcctgccctcccgcgcctcgtcggggcccggccaggcaccttggccgccggcgcacggacgcgggcacgagcactagatcacggtgagtggaagcgggcccgacgcggccctgcaggcccgacatccgccaggcaccagggctgggaggggtgaggggcgcgcgccgcagtgcggctgccctggcgtcgccgctgggggcagggcgcgcggggcttggggcctgcacgcttgccctggacgttggcacctttagctaacctgtctgctctgtcttgcaggctgctggacctcggcacgttgacaagatttctctggggtaccgcggaggattactttgaatttcggtggtcgcctgtggtctggcatatttagaacttaagtctattatttcgggcaccatgactttgaggcttttagaagactggtgcagggggatggacatgaaccctcggaaagcgctattgattgccggcatctcccagagctgcagtgtggcagaaatcgaggaggctctgcaggctggtttagctcccttgggggagtacagactgcttggaaggatgttcaggagggatgagaacaggaaagtagccttagtagggcttactgcggagactagtcacgccctggtccctaaggagataccgggaaaagggggtatctggagagtgatctttaagccccctgacccagataatacatttttaagcagattaaatgaatttttagcgggagagggcatgacagtgggtgagttgagcagagctcttggacatgaaaatggctccttagacccagagcagggcatgatcccggaaatgtgggcccctatgttggcacaggcattagaggctcttcagcctgccctgcaatgcttgaagtataaaaagctgagagtgttctcgggcagggagtctccagaaccaggagaagaagaatttggacgctggatgtttcatactactcagatgataaaggcgtggcaggtgccagatgtagagaagagaaggcgattgctagagagccttcgaggcccagcacttgatgttattcgtgtcctcaagataaacaatcctttaattactgtcgatgaatgtctgcaggctcttgaggaggtatttggggttacagataatcctagggagttgcaggtcaaatatctaaccacttaccagaaggatgaggaaaagttgtcggcttatgtactaaggctggagcctttgttacagaagctggtacagagaggagcaattgagagagatgctgtgaa

SEQ ID NO: 25351 - DNA, 1677 bp, Artificial sequence
  DNA replication origin
cctcaaagcagagggactggttcacgacattgggtagctcattattctgctgttctgtaaaatgcagcctgatcccaggtcccccgagcagagctccttcatccccccgacttcaccataccccctggggtctaataattggggtctagatgaacagcagaacaaagcaatgggctgggctgtgaccagtcacagtgttcaggtactgctgcatgcagagggagagagggctggagcccacatcctgaggaaaatgtgaggtccaccctacacagtagccattatttctaagtaaatataaaagcaacccaaaaagccagtatagtggcccatctttggcctccccacaactcctgctaccttggatgtggacttacggtcatcacccatggtaagttcagaggccagattgcagagggcagggtgtgggctgcaagaagaggccacagttggcactactgtgaggggacaaggagagggcgcggctgcagaaggccagtccagggagttgcttgttgaagttcagagacacttgggccaacgcacattcttaaggtggagccattgctgagagtggaccgcaggtgatgttggagctgttagaagatgggataggatgggacagaaggaccaccagacctggtggtgggggatgcgggtgagggtgttggaatgaggcctcaaaatcgagggagttccataggcagcctccatttccctgggaggtgggaggggaggagtgagctggagcatggctcaggtaagaggaggtggggggaaggagtgcgctggagggcggctcaggtgagaggagggggcggaaagtggccccgaggagaacacgttaaggctgacccgcaggactcaggcacaccgagccacgggaggctggggaccacaggtaccacgggggcgtggctgtcttcagtctcccaaagctgaagatggacacactgtttatgggttgagttgggcggggaggatgggtcgcagctgggcatggtgagacggctgccacctatggaagctgggccatcctggcaggggagcaaggaggccagagttccagaggaggaccagggagaggctctggacaggaggcgatccggcctgagagcgggcagtgaggttagcatttcaaagatggagatattctggggacaggggagagctgtgccatggacaggtagctggagacggtctaggcagctaccaggatgacaccagggattggagggagaggatgttaggttggagccaaagccttcaggatacgaaaggagtgactgggggtggcagctgcaaaggtgggagcgggacactgggccgtgggggctggagaggtgctggggtgttagagacgtcacccgccgcccttcctgacacagagtccgtggaaagagcgagaaggagcccacgtcctgggagagggctaagtgggcgaggaggagctaggagggcagccaggacaggaggcaggaggggaggggtaggagcacaaggacgctggcactggggggcagggaggacaccctgagcaggctggagaaacaaccgtgggtgcgatcaggggacttctgtaggaagaaggctggcgaatgactcgggagagcgggattggcaggcacagggtcacctgactgcaactctgcaaagagcccagtcccatcagccccg

SEQ ID NO: 25352 - DNA, 1181 bp, Artificial sequence
  DNA replication origin
aggaatgaaaacaggaggagaaatgctggaagcagcactaacactaaacaatgtaatcttttctaatccctcattgagttaggaactccttcctttgatcctctgtgaattaagtactattatttgtgccattttacaaaagagaaaagcccggagatactgagcaccttgtccaaggtcacacagctagaaagttggcagaacttgggctcaaacccaggtagcctggctccagaaccccagtcctcagccgttgtgttgttctgcgcatcaggaagtccggtggtccgggcggggtgggggggactctaatgtgcaacaggtggaagcaggttcaaggatggcaatcagttgttcatccagtccgtttttccgaacattgctagatgctgagacagcagagtcatgaacaaaacagtcacagtcccactcaaaaactgtttgagtttccaagaagaaaagacattgaagaactacacaggtaaggctcgatgtctaactggtcccaggggtgggaaggctttgtgtgggagtgaccttgaaggtgcaggtgaaggaagagacgagcaacagggtgaggagtggggagggagggctccatggagagaccaagcctggacagagctcaggggagtgagagggggtgtgggaccctcctagggcagggtgaggcttctgaagttggctataatggcaactcaaaagctactagggctggggtggttcaccagatttgcatgttccaaatcactctggctattgcatgggaagtggttgaaaagaagcaggagtagattgagaggtccagacgggaggctgccgtagccgtccaggggagagctgcaagcagccaacaaagagaacagattcggaatctgctgacggtgccgtgtctgcgtgactaggtgcttgctcagtgtgggaaaggagggggagccagctctggggggaagatggcgttagtgttggtcatgttgacgcgggaatgattgccaggcagccaactactaggtggcaactaggtgtcagctgggagtcagaggaaaggattctagctggaggctgtgtgggggttgtccacatatatgggtggcacttacagccttaggagtagatggtgtgattaggggaaaggtttaaaggaagatgaaagagggcctggatgatgaacttgggggact

SEQ ID NO: 25353 - DNA, 950 bp, Artificial sequence
  DNA replication origin
ggccgggggtgctggcgccggtgcggacggcggtgctggtggcggcggcggcggaggcgacggcagcggtcccagcggcagcagcagcggcgggaggagcctccggggtgagtgtcccttggtgtctctgaggctgtggagccgaggctgtgtccggtgtggcgcggggcgtccgggagaggaaggggctgttcttaggcgtgggggcgccggggctggggccaagccgccgcgggaggcgctggggcgccgggcggggaggggccagtcgtccgtctggggctgaggcgcggcggcgccggactggccggtctctgtgcgctccgaggggcgggctggagcgcgccgccgtccctggggcaggggcgcgaggtgtggcgctcggggcggggagagcggcccgagggagtcgcgacggcagcccggccggctttgggctccgggcgccgaggggcgggacccgtcgctcccaggacgctgagaaaccgctcccgagacgggggcgcgtgtttacccgggtgcggggttgcgaccgccaggggtgggcgtgagagtggccggcggggtctgggaagggagcaggcctgaggactgctactcccaggggaagttagattgtccgggtaagttactattgcgggataaacctggaattgagctttgacaggttgggagggagacaataccgagtgtttgataaagaagaggaggctgtgcttgttggactacttgaatggcaaaaagtgtgcatatttcagtaccttatttgcacagtgtttgctagctttaccccgagggtgagaactttctcaccgtttttcaagaaactctgaggagtgttgtttctcctgtgaactacaattgcacgtcttcacataccagcacagataataagtactctggagtaggcctaatttacagaagcagtcttggttatctacaccagagca

SEQ ID NO: 25354 - DNA, 990 bp, Artificial sequence
  DNA replication origin
tttacttttccctcaagagggtctgggcacagtgcctcatgcctgtaatcccagtactttgggaggctgagacaagaggatggcttgagcccaggagtttgagatcagcctgggtgacacagtgagacctgtctctacaaaaaaataagaaaattagccgtagtgacagataattacatcactgtttctactgggtccaaacactctatttgaccctgccatgaatattttttatatcatcagccgactatagaaacttgttcttggttttcagtgttaagaattaacctatagacattttatggaagatttaatttgcattagaaacagtgtgctataaactctgccaatgccagggcatgttaagaggtatataaagtataggtagagaggaagacaaaggaaaggagtaggggtgccaagtccctcaccttaccctgcagaaaagagatacttagtgtgaggtggggttggggctcaggggagggtggcaggagagtttaggagaggataggacacgtgggtggaaagtgaggtgaatgagggctgggaggttgcagggagccctgagtggaaaaggcggggcagagcagggggtactgaactgaagagagtggagcagagcaggggtgtgctgggtggaaggggtggtgcagagcaagtggtgctaagcagagggggtggggcaaagcacggactgctgagtggaaagggcagtacagagaaaggagtggtgagcggaagaggcggggcagagcaggaggtgctgggcagaaggggtggggtagggggcgagggcagagcgccccctcgtggctggggcgcctgcgcaaaccagctgcctcacgagcactggagcttgcgttacttggcctcacctcacctgtgctgtccacgcctggctttgtctcacctgacgcgatatgcctctcctgcgtgggcgctgtcctgcccgccgccactaccgccgcttggccctgctcggcctgc

SEQ ID NO: 25355 - DNA, 1351 bp, Artificial sequence
  DNA replication origin
ggtcgagcccattttcccatttcaccaggagccgcagcctgctctctcctttcggtctccccgcccacatcaacgcgggcagctccaggaggggacggacaggaagcctttggccgcctattaaatcccacccatttctccgggggcgatttcctaaccttccgggaccgaattctgcaatttgatgtgcgttttgtccgaatggtagcgacacgggcctaagggagggggaaagcgagggggtggggggtggggggtatgcactcttttcctcgcaacatcgctggcggagcgagggagctcacacgacacagattttggggcaaagcctttccaactggacagcaccatgtccaccaaagcggagcagtgtaagtagcagccggcccggcattccggcccggcctcggctgggagctattgcagctgcggcgtttgcggctgctgggagaccttggcattgtgctggtgcgggggtgggggctgaggttggggcgggtggggggtggcggagagagaaggtgggggagggtggacgttaatggcagcgcggcgctgtccccggtgctgaaaaataatacggtcttcctcgggctccagcgggggtttctcaagactcagagaccctgcgaaatgaaattaaaatggggtcattctcgggaaaaagaggcctcgtatctttcagataaacatttcagtatctcttgttggagtgggggaaggggggtagcggcaaatcaggggcggggaactgtcagttgcaaccaaagcctgcctggccttctgagcatgcccagttcttggtgctggagccataggggagtttgagtctgcagtttccacttcgggtggaagaggcaagaagggagagaagggggagggagcagggagccaggcaagaggaaaattaactcactaatgccaacaccaatgtcaaaaccaaccacaaccatgcggtgcttacaagaaagtgaaaggagctctgggaaaatgacctaattgatctaattattgttccaaagagcaggcttcctttgtagggcagcccatagcaccggaggattttggttgtcccagtaatgactgactgtgtgcgtggttggaagcaacctgctaactccttgtggatggagtaagtttctaatatggttcccatagtctgtcttattgcagtgcgcactagtaggccttcggtgtgtgcttggtaggttgatcaatgtgaagcctttttccgagtacacttgagggcttgagggattcaggagcttaaacttcagattgtaaataaaagacgtttttattaagcagtaagtttgaatttttaacaatataccagaacttattcacctag

SEQ ID NO: 25356 - DNA, 1174 bp, Artificial sequence
  DNA replication origin
ttaaccccttggtaagccacttaacctcagtttactcatctgtacaatgggggtaatcttcctgcctcctaggcttgcagggactattaaagagataaagtacatgaagccctgggaagctggccctgagtgtccctttatgtccacactgtcgtcattgtcactgtgcacattgtggggccattgccaccaccaccctacccctggagggcaggggccttgtcttgcttccctctgtatccccaggacacagcacgtgtccccagtcaacactaggatatgagtgagcagccgctgtctagggactgccaggctcaggcagtggaggataaccaactggaaacatccgccagagagggcagagagtgggagctctgcgtgcagggctgtctgtgccgcccaggagagggggcattcctctggctctgtgcatgcatggctttatgatccacgtgtgttcagcgaggaggctgcctctgaaggggacctggatagcagatgagtggtggccaggcagaaactggagggagaggtgagctgggcaaggacagcgaagcccagccaaggggtgggcgtgggaactcgaggctggcagtgagtgtggtttgctggatgatggggcgtggggtggggtgagcagtgaggagtggggctggggaagcctcggggcccagggcagctagactaaagatgggtccacagcagccagcagggtgggcttgagtgctcagctgggcaggcaggggttgcgtggagtgaggagaagcctgaggcaggtagagagagggagtggaagtaggggatggtatggggaggagctgggtaagtggaggtgggttggagagcagatgggagggcccaagtaggactcaccaggttgaaggagctggggacctctgaggtttccagctggggcctctggtttgggaagctgaactctgtgttcagtgtggtacctggctggtagcagagccacttaaggatctggggactgactgactggatgaacatatgatggagagcagaaggagccccagaggagagcccggagaggagaggaggacaggctgggaatgcggctccacctgcccccacaagcaggccctcacagagctggatctcccagacaaaggcagccataggtgtctggagcacaggctgtggacaccacttg

SEQ ID NO: 25357 - DNA, 2040 bp, Artificial sequence
  DNA replication origin
ctctggcttcgccagtgcgcatgctttagacagcagctgggggcagtcgacagaccagacaccagacagggaggaggatgtggagggcctggggtggggacactgcccaggtgctgcgccgggctcagcctggtgtccgagctgcctgggcccgcaggctgaccaggggcaagcctgggaagacaatggtttctccttcgggaggctcagggcctgtgaggcaatgaagtcctggacaagctcagggttagctcatgtccacctgctttcccatgtccaccagtgccaccaaggtgtccctctggccagcgggtccagggcctgcagactcacaccactgcgttgttcacgtctactcctttgttgctctgcgaagcactcatgggatactcagcaacgctggtgccattttcgtcttttctcagtggtttcctggaagtggggggaggggacaggaaaggcaaaggagggggaggcagggacaccattagttatcactgatggtggggtgtaacctccagctagcatccctgctccgtgagagtgtcagaaggaagccaatggctctgtcctcggttagcatccttgggctgctagtccttgtggggttaatcagaagctggacgtggtcttaactcgggtgtcatgaaaaccggggcacagttgagagggaaagaggggagctattaatgatgaagcagggacaacaggtatgagtccaggctgttttggacaaacaagaaagtatgttcagtctagcacgatcaggccttgactgatctcttcgatcagggcagagacagttaacagaagagaagtgctaggggttgagttctgcagtcttcctcagtgtgggcaaaggcaaattcaaaatgtgatgaagcagatggtgctagtggtgatgctggtggtaatggggtggtggtggtagtggtgatgctggtggtaatggggtgatggtggtagtggtgatgctggtggtaatggggtggtggtggtagtggtgatgctggtggtaatggggtgatggtggtagtggtgatgctggtggtaatggggtggtggtggtagtggtgatgctggtggtaatggggtggtggtggtagtggtgatgctggtggtaatggggtggtggtggtagtggtgatgctggtggtaatggggtggtggtggtagtggtgatgctggtggtaatggggtggtggtggtagtggtgatgctggtggtaatggggtgatggtggtagtggtgatgctggtggtaatggggtgatggtggtagtggtgatgctggtggtaatggggtgatggaggtagcaatggtgatggtggcagcagtgatgatgctaatgatggtggtgatgatagtgatggttagggtaatggtggtggtgatggttcggttgacaatggtggtgatggtgatactcgtgatggaggtgatggtggtgttgaaggttaaaatgctggtggtgatagtgatggtggttatatggtggtggaggtggtattggtggtggtgatggcagtggtggtggcgatggtgatagcggtaatgatgatggggtgatgatggtaatgatgatgatagtggtggttagcgtaatggttgtgatggttgggttaacagtggtggtgatggaggtgatgatggcggtgatgatggtgacagtggtaatgaagatggggtggcgatgatagtgatggtaatggcagcggtggtagcaatgatggtggtgaatatctacactaagttagtacacatcagtggttcctgaacactttaaactgagccatttgaagctcattccagagggcccctaaccccaaaagtggtttttcctacgcatataagggatcaggaaggctgggagggaggctctgagaaggctgttgctcacttgctggggttctgaaattacagtgtacttttgggcctggctcaagtctcacttcctccctccctcaagttgttcaggagggctctggcccccagcctgagtgtctgtatcctcctggtctaagccacatgctctctgta

SEQ ID NO: 25358 - DNA, 1460 bp, Artificial sequence
  DNA replication origin
gtttggggctgtgcttgtgggaggaggaagctgtcaccaactgatggggaagattactgggtccgtgcagctttgggacgggtgtggaggtcaggtgtgaagtctgaaattgtcacacaccacgggagacagtgagaaagcagctggggccggactctgcgttgagaatcgagaactggaggcaggcatttggcagtggccagcacctagccctgagactggagggggttgtcaagtgggagagggtaggcagaggggagaagagggccaaggcctggccctggggcacctcaacatgaggaggtgcagaggagggtgacaggggaggcttgtgaggaaggcggcccaagccatccggtcctgcagccacgtcaggaagggacgtccaggaggaggggaggtcaagtgtgtccaccgcagctgatggtcaagtacagcgaggctgggagccagccatgggatggtgccacgtggcagttgctgctggccgctgaaaagtggtttggcgggagtggagggaggaagccggattcggggagtcaaagagagaatgagaggaaatggaaatggtggggatgcacaactcgcggttcaagttttgctgcaaaagggagcggcatcgtggagccatatctggggggagaagtcatgggaaggatttcaaggcaggaggtggagtgtgtgagtgtgtgagagtgtgagtgtgggggagtgtgtgagtgcatgggagtattgtgtatgagtgtgtgagagtgtgtgggggagtgtgtgagtgcatgggagtattgtgtatgagtgtgtgagagtgagtgtgtgacagagtacatgggagtgcatatgagtgtgtgagtgtatgagtgtgtatatgagtgtgcgagtgggaagtgtgtggagtgcaagtgtgtgggagagtgtgtgtatgagtatgtgagagtgtaaggggactgagtgtgtgggagtgtgattgtgtgtgagagtgtatgagtgtgtgtatgagtgtgtgtgagtggggactgagtgggagagtgtgtgtatgagtgtgtaagagtgggggactgtgtggagtgtgattatgtgagtgtgtgtgtatgagtgtgtgtgtataagtgtgtgagtatgagttgggactgagtgggagagtgtatatgagtgtgtgagagtgggggactgtgtgtgggagtgtgtgagtgtgtgtatgtgagtgtgaatgtgtatgtgtgtgagtgcgtatgagtgtgtgaatgtgtatgtgtgtgaatgagtgtgcatgagtgtgagagactgtgtgagtgctgatggctgtggcccaggcgagggggaagagctgagcccaagggggcctgtgcccggtgtgtgtgataaagtgagagcagggagagaggggtgaggggcccacagggagcaaggacaatgcttggccagatgacgaaactgagattgaacccagacagtctggcccc

SEQ ID NO: 25359 - DNA, 2561 bp, Artificial sequence
  DNA replication origin
gtggctggaaggcaccagcagcatctgctacgggcagtacctttttccgctgtgactgccatgggtgacctgacacctgctcacactggatgcctctctcccctctgcggctctagctaggagtccacacctctctctcccactcaaaaaagtgcatcagcatttcagcaagtgttctcctatcatggggagacctaaataacatatttaaggagcagtaaatcactcacaaacatttattcattcaacaaatatttatagagcaccgagtgtgccaagcactacattgtggtcacagactgaggatgacgcagtggagaagacatggtgaacccgcagggagagttcacgggggaagattagggttctgttttttctcatgtggagtttgagatgcctgtggacagctttgggggcgggggggcagaacatgcaggaattgcaggctaaacaatccccagggaggggctggctgagaggagaggtgtccgaccagggcaggtgtcctggaggaggtgctggctgggctgggatgggagacgattcttcagctgaaggcgggggtgggggaggggaagaagggctgtgcttccacagagggacctgcaggttggaggccagagagcttggtctgtcctctgagagatgagccagaggggtgagggcgggccaagcccggcagcctgcagattctggacttagtctccaagcagggaacggcagcttgggccaggcagtgctggggggttagaagggtgggagtttgagaaccttcaggactcagtgaccgaccagacatggtatgagggaggaggactgctgggtgccagtgtctgatcagatgcttctctcggaggaagaatgtgacacacggagatcccgagtcccaggctttgacacaaggtgttggaggtgccatgagacagcagaggaggcattggctggtgcctctggagttgaggacagaggcccgggctagccccaaggatgtggggtggaggcaccagtgctatggctccaaagccatcagagatcactggggagagcgtggggcgggagaagagacggtggggactgagccagcagaggaccagagggaaggagaagagccaaaaactgtgctgggaccttgtgagccaagggaaggagctgaggaccggaagtgctcaccgattagcagacggggcacgcatccaccccacatccacccccactgccccttacccgctcctccctcaaccctcctctaggcctggcacctgcaagctgcagagtggagtggaaggaaggaggagggagcagccagctctgaaacaaatggctgcttcggctgggggccatggaagacaatcggtggtgtgagcttcaatagtccagggaggcttcagggaggaggcagagctcactgcaggcctggaaggtggggagagatgagctcagcctcagaagggtgagctggcctcccagggtaggcaatggcatgagcaaaggtcagggagcagcatgggtgtggccagagatgaccagggacccccagtgctgtcacaggtgtgtgcactgatcgggggtttagaggcagagtccccgggatgccggaagctgaggctcgggaggcaggggcaatgctgggggggcagacttttattcgatcaaacatttcttgagcatttctgtatactaggagcctgcaacacactatggaacaaaatagatcctgagttcatatgctggcagggggcagagggaccagaaagccatggatatgctcgccctgtgagctatccagtgtgctggaggcagcaagtgctatgggaaaaaggaagcatgcagcagaacaagctggggtcgggtcaggtggcaatctgaagagaaggtggcatttgagtggaggctggcagaggtgaggaccaatgcaggctggcacctggggagactgtcccagcagagagaacagccagggctgaggcctggggtggaggagcagcaagaggcctatgtgcctggagtgaagttgggtgcagggacaggagacaaggatggaagaagcagatggagtggggcctacaggcccacagagggtgtttcttgacttggtgtgaagtggggagcccgtgtaaggtagggctgaggacaggaacgatctgactcactccctattggacagtctggctgctgtgctgagatgagactgtgggggtcagggcaggagcagggagaccaattacaagcctgccacagtgacttgggggacaggtgacagccaccgggaccaggtggcaccaggggggatgtgagaatggttgggttccggatgggagcctactgtacttctgagtcagcctggttctgatgggtggtgtcccaggggaacaggacagggcacagagaagatagctggacccttttccctggagtgggcctgggattggggggtggggggctgtgctggagccaggacgaggccatctgatttcatctcccagccaacccaccgagcaacagctccaatcccagcagggatttgatgaggccgccagtaaatgactggctactggtgcaat

SEQ ID NO: 25360 - DNA, 1073 bp, Artificial sequence
  DNA replication origin
ggcgccaccaggaaaggcggggagccaacgcgggcccggggagggctcgcgcggccggctccaggcggcgtggaggagactttccccgccctctgcctccgcctcggcggccagccctggccctgggagcggggtgccgcccctcccgccccgcgcgcggctaggcgcagtccggagccaccgcgccctgcgccccgtgcgaggacgccgctcctggtcctctgctcagcggcccgggaggcccaaccggcgcgcaaacttttgctccagcgccgggcgctcctccccggcatgtgaagcccccgggcgcccgcgcagccgccaaggtgaggacggaggccccgcctagagggcgggggactggggaggcggctggctttaaatgggggctgtccggctgctgggaaacagagctgccgcggggggaacgcggacctcttttccccgagcccagggtcggctggggccgccgccaggcaaggtagcgtgaggcgttggaagggtgcgggcggagatggaggcgtgggggaacccacgcccgggagcgggagatcggggctgggcggaggcgtgcaaaggggcagcgcacggaggtgcctatgttgcagtgtgcgcaatgaggccggctgggcagtgtgggtgcaggcagcgtgagatttcttggggccgtgcatgcagggtcagcgagggtgcaggcaggagtcggtgggtgtgcacggggatcagtgtgtgtgcacggctgtttctgtggttgtgcgcgcaggtgagtagtgcccgccgggtttgaagtgtgctcacagtgagagtgagttgtatgggggttaatggggcgcagtaagtgtgcttggctgtttctggaggtgtccatggggccaaggtatgcacgcagtattctggagctgtgcgcggagctaaagtgtacacgcggggctctggggatgtgcgtaagaagagtgtgaattctgggactgacgaagagtcagtgaaggtgtaagctggagtgtaagtgcaggcttggtttactagggtgcccctgggtgcggggcgtgcccgtccgacccgggctgggaggt

SEQ ID NO: 25361 - DNA, 1440 bp, Artificial sequence
  DNA replication origin
cccccgcggcagctctgtttcccagcagccggacagcccccatttaaagccagccgcctccccagtcccccgccctctaggcggggcctccgtcctcaccttggcggctgcgcgggcgcccgggggcttcacatgccggggaggagcgcccggcgctggagcaaaagtttgcgcgccggttgggcctcccgggccgctgagcagaggaccaggagcggcgtcctcgcacggggcgcagggcgcggtggctccggactgcgcctagccgcgcgcggggcgggaggggcggcaccccgctcccagggccagggctggccgccgaggcggaggcagagggcggggaaagtctcctccacgccgcctggagccggccgcgcgagccctccccgggcccgcgttggctccccgcctttcctggtggcgccgcgcggctgcccggggcactggggtgcccgagctctctactaccctcacgctggcccgcgagaggcagcggcgggaggcgccggcagggagctcccgctggggcagcaaagccgtgggtggaggcgaaataaataatccacgaaaaaggaaaacagacgtgagccgagccagagcctctcccgcctcccgcccggggttgcgctccccccgccgccgccgccagcgccgctgcagtgattcctcgtctccatctagcgaggctattgtgtattgggcgcttaattatttattcaccctggaggccgaggattcccacttccatggggttttggcccttgcctgcgcttcccccaagcctctcccgaggctgcggaaaggtggcgaggactgacttgagacccttttttgcgctccatccttgaggactctccccgccgcactccccgcaggctctcccgggcgccggggctgaaaggtgcaggccgcccctctcccggccatgggccttgtcctctcctttgtagtcccagcagcagaaactctcttgcaacactaggctgcggctgggaaggagttgtgacggccctggggagaacatttctaccactgctcttcctcaaccatctgcaaactcctctgtttgaggcaagattatcaacaagtcggttcttcgggaggtagcctggttgcatctctttcagacaagctgtgcctagcagcatcacaggcatggcgcggcctctctgctcttgtggtggaagcactttgcaagcgctttgactgatgggggcgccttccagaaggccctcaaggcctggacaatcctatttttaggttggatgagagaaccaggggcttaagacacagagctgagggtcagatactacagtgcatgcatggaagaaacatttactgagcaccttttcccggtatttggacacccttaagccactcatgtaaacacacactataaacgctggtttgcagagtataaactaccttgcaagccagctt

SEQ ID NO: 25362 - DNA, 1387 bp, Artificial sequence
  DNA replication origin
gagtctcaccttggtccccagcacctggctcagcatctggcctagcaaactgtggatgctcagaattggtgaaaaccaacaacaagaacgcagttgccttaaccacagcctcgcatcttgctgctgtcatcagggagttcacaggaccttgcttgtgttcggcaggccttctcaaatatttttgaatccctagctctcatacttgtacaacttagaacaaatttataactcccatcttatcgtctggacaacaggtaaggcagggaggagggggttctctcaatgctgcagacaaggacatgagtctagaaaggaaagtcccttgtctgagaacaggcctgcaggactctcggggaggcagccagggtcctctgccctgaagccacggtcagtgctagggcccaggcaggtgaggtcaggatcccgttgagtggggtaggggtagggagaaagctgtgtcactggttgagtggccagtgcattgggtttttccataaacaatttacttgtaacaaaacctcagccaggggtaggaggggaaatgcacagggcaagaaggatgggacaggagctcaacagaaaaatgcaggaagcccagactctggaggaagcagtgtggatgccctggggcatgcagaactgttggggcataagaggtttgggcataggaggtttgcagagctgtgaaggacacaggagaggtgtacagagctgaggggggcacaggaggggagttcagagctgtggggggtacaggagaggagtacagagctgaggggaacacaggagtgcagagctgggggggcccaggaggggtgcatagccctgaggggggcataggaggggtatacagagctcaggggggcacaggaggagtgtgtagagctgaggggggcacaggaggagtgtacagagctgaggggtacaggagggtacagatctatggggggtacagggaggtgcagagctgagagggtttcaagagaggtgcagagccaagggggcacaggggtggatgaacagggcagtgttaaaatgcacagcagacaagcctcctgcaattggactgtggtgaggaggaggctagggaggcagtggggatgaccctgaggtctgtgtagggtgtagggttttattgactgcctgggggcctgctggcggcgagatctggagggtgagtagagggtttcattctggacatgtcacatttgagagcctgacatttcacttggaattcttctctgctaacactcctttactatctgccaccctccttctgtaacccacagacaaagtgcagactcctgggggtacccgaaaagatttccacacagagccgggctacatgcactctaggacagctcggggttgaaatgtactcagcaag

SEQ ID NO: 25363 - DNA, 1136 bp, Artificial sequence
  DNA replication origin
ggatgctttgtatctggagaggcgctcctgattggcctgaggggccccccagctccggggagttgtcctccattcagcccactcaagggttgcacaactgcttccagccggacggagctcggccggctgcgccggggcctgtcccaggtctgcagtggggaacctgccgggccacgttggtggggcctgggccgcaccttcggtcagtgtggaggcccggtggctctggcccgactgggtggcgggtgtgggggcaggctggggcctgggggaggggcgaggtgccgtgggtggcggccgaggaggcatgaaattgctgcagatgcttcttcgggggaatccctgctgcccgcagcctgagatcagcccgcaaggcaggtctcgattaagtgccagacaggggtcctgcctggtcctgcgtgagagctgggggtggagcgtggggactgaggaggggggctggtgctcctcgtgctgggggcaggagtggtgggagggggaggctaccaccagggaggaagggggcttggccttgctttaaagaggaacagttgcctcagctcagagaataaacacctcgctggcaagttgcacacgttggcagcgtggtgtgtgggagatggggcaggctgggagtgtgtgccagccccagcaatgccacctgtagctgggtcaccttgggcgacttgcttgacctttctgagccttggctgcaagaaggggcaccagacccaagcaggctgggcgaggctctgctggtgcctgccgcatcccaggtgtgcaggaagtgctcagccacttgcacccacatccctctacccaggactctgtttagggctgagaggtgctggggtggggagactgtttgtagacaggtgctgtggtcttttgggagggctgggtgtggttgcttggagagactccgatggcctgttttgtcccccaggtcagctcggtgcccttccttggagctgccggccaccagcagagcctaccctcttcatggaaagcctcgtgcagtggccccctggtgatggcatccgacagtgatgtgaagatgctgctgaacttcgtgaacctggcgtccagcgacatcaaggcagccctggataagtccgcaccctgccgccgctccg

SEQ ID NO: 25364 - DNA, 1047 bp, Artificial sequence
  DNA replication origin
ctggcccccgagcgcgcgcgcctctacgaagaccggcgcagctccgcgctgtacttcgcggtggtcaacaacaacgtgtacgccaccgagctgctgctgcaacacggcgccgaccccaaccgcgacgtcatcagccccttgctcgtggccatccgccacggctgcctgcgcacaatgcagctgctgctggaccacggcgcgaacatcgacgcctatatcgccacgcaccccaccgccttccccgccaccatcatgttcgccatgaagtgcctgtcgctgctcaagttcctcatggacctgggctgcgacggcgagccctgcttctcatgcctctacggcaacggcccgcacccgccggccccgcagccctccagcaggttcaacgacgcgcccgcggccgacaaggagcccagcgtggtgcaggtgggcagcgcacgctggcggtggggagcacgccttttgggtgtggcccagggacgcgcgcgcgcatgggaggcgggcggggccgggtggttcgcgctccttgggagcagcgtggactagtgattaacacccttcgggggaagtggggccagctttggaggcagcagagcacggtggttaacctgcgtcctgggtagcgtgggttagcgcttagggcgctttggagggagctttggagggaactaggggttagctcactttggaggcagcggaaccggtggttagcacacttaagaggccgcagaacttagtggtgcattggaacggtgaaatccttcttgtggtccactgcgttggggaatttaaggaaccaatgatggagcggagaactctgccaaactaagaggctcgtcacctccagcaaacctacacctggaatgcgatgtgaaacaagcacgatccggaaaggcatgtcaagagcaggctggtgtagggtcaggtcagaagcagaaagccagcgacccagaggcaggacacgtccatgttgttactttaaaagtcagaacttggccgggcgcggtggctcacgcctgtaatcccaacactttgggaggccgaggccgg

SEQ ID NO: 25365 - DNA, 1850 bp, Artificial sequence
  DNA replication origin
tcccgttcttgggcacgttacagctgttagcagagcatttgttggccgtggccgccatccagggtgaggcccaggcctgcctttgaccagcacctctgcagagcaaagtcaggcctcctgtgcctacacaaatagaaattaggaggcaattagccccccgggtgtgtgaatttccttttgaggttttagagtcagattttagccaaacacagcatcactaacaatcataatactttccactgagatcccagcaggaggtcgctggcatcagatttccaggaagcctgtgtgccaggaggccagaggcgtgggaatgggcctggtggcacctgcttctctccccttcccccaccgccccaccccctgtaatggccacctccttggagtcccacaggaggctgtgaggtcacctgtcagcagggattggatggattagggtctggaatcatattggtgcaggagcttgttcttgcaggtggcagggctgtaggagaagagagccaagagaaggggtaaagagtcctggggttgagcccccagaattgtcttatgacccctgattagtcacttcggctctctgagccacatctgttaaaaagaaggccacaggcctgctccggccactcccacccagggctgaagtgaaggtaaaatgggcaggcaagttaacacattatgaagactgcaaaaccccgggatatattaactgtcaccctgactgctacacaagaggtaggggcattgttaagagtgtagctttggggtcagactgcctgggttcaaatcctggctccatcacttactggctgtgtatccttggaggagtcacataccttctctgggcttatgtctcctcatctctgaaatgaggatattacagtactcacttcagagggctactgggaggatttcacagatgaatagaggtaaagtgctgagatcagtgctcgtgttttagggaagagaggaactggtggttgcagggagctcaggcttccgcagtggctgaccaagttctccacacccagaaggtgaggcagagagactgggagaagctagcgtcagccttcggggaggaggcgttgagactgacaggagaggagtgtaagtgacctcatggtcacaatgggctggttggggcctggggcagtagtagttggggccaaattagttggggccaaacacatttgtccccttttgtcctcaggatctcgtggctccactggggtcccaggacagcaagatagggacagctcagccctggagtcagaggagggcacacaccctggttcccctattctgactgtatgactgggcaagccccttaatctctcagagtcttgactcttctcatctgcaaaatgggaatgatgagccttgctttaggggttattgtaaagattaaacccaatcgcacttgtaaagcctttaggagcctcctggcacacggtgggctctgggatctggctgtccctgtccgtcctcccccagagagagcagggtctggctccaaacttcgccactaggctctactgcctcctgcagggaggaggttggacattcattgggtttgggggccttccaggcaattcctccaaataactgagctggcaatgggcaacagcgcttagcctgaaataaattagtgggagcttcttgaaaccctagtgcagtctggctgaggtttttaagaactcagacttcggaggccaagggttctgggtctgaagcccagctctgccccttactggctatgtgactttgggagggtggctgaagctctctgagcttcagtttccttatctgtaaagcggagacggcagccgacccaccctgcccagtggggtgag

SEQ ID NO: 25366 - DNA, 1944 bp, Artificial sequence
  DNA replication origin
tgcgcagcctcctcttcctcgtggctctgcctctgccccaccgtctgtccatctgtgtctggcctgttgaacccttttgggcttggaatgccctctcccttgggccgtctgggccctgggagtggctggcgtggggttggtgtgggcactgggccagcagcctggctcccttcctcttccctccactctctggaggcgggcagccccaggtcctcacctgtgacgcaggagtcaggactgcagcagcttcctaacgggcgggagtgaggcttcaaagaggtaacactccagcaagtccgtgacaggggctgcaggagacgagtgcccagaaagtggaactattattatttttatcctcaaggcacaaattaaatgccatgagccctgctaagtgccagaagcagtgtcagctcctggaatatagacttcctacccacaggaggtacagcctcagggaggacagcgcgggagggaggtgggaaggagggagtgggggaggggaggggccagggagaaacagtagggaggtggggcatctggaaggaggagtgagaggaggggtgaggccagagaggagaagaggggtggggccggagaggagaggaggggatgaaaggaggggatgggaggaagggggtggaaggaggggtgaaggtcagggaggaaaagtgagtggtaggggagtctagaaggaggagttggaggaggggtggggccagagaggagggaatgggaggagggtatgggagaggggatgagagaggggataagagaggggatgagagaggggatggaaggaggggatgggaggaaaggatggaggaggggatgggaggaggaaatgggaggaaggatggaaggaggggaagggaggagcagatgggaggagggagaggagggcatgggagagaggacaagagaggggatgagagaggggatgggaagagtagatgggaggagcagatgggaggagaggatgggaggaggagatgggaggaggggatgggagacaagatgggaggaggggattggataggggatgggaggaggggatgggagacggggtgggagaggagatgggagaggggatgggaggaggggatgggagagggggtgggaggaggggataggagaggatgggagagggaatcggaggaggggttgagagaggggatgggaggaggggatgggtggaggggataggacgaggggataggaggaggggttgggagaggggcggaaggaggggatgggagaggggataggagaggggttgggagaggggtggaaggaggggttgggagagggaatgggagaaggggatgggaggagagcatgggagaagggatgggaggaagggatgggagagggcatgggaggaggggatgggaggaggggatggaaggaggagatgggacgaggggatgggagacgggatgggagcagggattggaggagggaatgggaggaggggatgggagagaggatgggagacagcaacagcagagccttaaaccaagcacttctgagtgcgggacgctgtgtgcctgcagatccatgagatcctgatacaaagagattgtgtaaactgcaatgtttggggtccatgcgagagatggtgagagagggcaggggagtctcaatgaacacatgggtaaatagcacccaccttatgtaaagtcaggcctcatcctccagccagagttactgagatgcttgacagctgccgcagaccctagggagttagattggctatcctcaaaatggccagccatccctttaacgctgtcccagacacctggctcccaggtcagaggcattgcagcccaggacccaggataagaagcacagactgtatgaaaatttcgggctgctctgtgatgcagtgacatccagcactgggttggatgtcagaacacaccacttgcctcagttgtccagtcc

SEQ ID NO: 25367 - DNA, 1424 bp, Artificial sequence
  DNA replication origin
caaccccatgtgagacttgggctatttttgtcctttctgtcaaggctggtctgctttatgtgctgcccagttccaattgacctgtcccgggactctcccttgaccccatcccacctgattttggtggctgcagctcaggcatttctccatcagcccccccaaggctcagccccacccatggctcaggaccaggcctggttccgtgcagggggtgggagcaagctgaaggacccatgtctgggaactgcccctgcctacagcttggcggtgaacctcctgttggagccactggacctgtgccaccggggaaggtggggtggggagggctgggcctcttgcccaccctgacaccccacccccaccacacgcaccaccctgccggctggcctggccttccccctcaaaggcttccattggctcagagctgggcaacctcagatggctcctgggaagccacagctcagtgtgggctccactgggaggaacgttgtgggtggggaaggtccccagagagggtgaaggaggcaggagccagggcagggcctgagccagagtgggggccaggaatgagggagggcgggggtctctgcaggggcagagcaagggctgggggttcaggtctgtggctggagttggggcacggctggagcaagatctggatcaaaggctcgggctggggccagggtcggggctgggctcaggggcaggggcaggggtttggactcatccccctcacaaccccttaccagcaggcagtgagatcagccccagccagcccaggagtccctgacaggtgcccagggctgcctctccatggtcctagagcccctcgcttatgtgctgagcaccgactgagaatgaaggtgaagggtccttgctctggccttgggttcagactcaggagggaggtggatgcaggtgtgggggacgtggatgcagagggagaggagctcaggggctggggttgcccagagaaggagtcagcccagttcaaggaggggtgggggagtcccccagagtcagcagtgtccgaggtgtttcacgaggataagaatgaaaggagaaggtgggaagggcattctggcagaaggaatggcagggacaaaggttcggaggcacggaacagcttgcacatcctgcgcaaaccgtaggcagcgccttcaaagcagaagggggcgatcagggtgggagtggtttggaccgtggctggtgaagctgttggcaggagtcaaagggtatcagccagcagcagagactgtccgggctactctgggcaaggagagatgcatgggaggctgtagggaggtgcagaatcagaagaaaagctgaaaatccagagaggacaggggctcagggcagccctggagatccatgcggcaggaactcagggaggcgcccccagaatgaatccttcccaacccctt

SEQ ID NO: 25368 - DNA, 881 bp, Artificial sequence
  DNA replication origin
cgcgggtgcacccgctccggcagcgaccccgcccaccgcgccccctgcccgctcccccttcgcgatcccccacgatcactgaccatagtgaccagagccgccaggccaggtcccgccccagcgaggagcgatccggtgcgggaatgccgcgggaggcgcgggcgggctccgccgctggttcggtggcggggacctcgagggcgtgggggcggcggagaatacacccgaccgctccgcaaaccaaaggttagacctccactgtgtcccagcaagacacacgccctgcgattgacgtctcaggcgggcaatcagaagccgggacgcgggacgtcatagaaagtgggtgggacttcacgtgccttcagcctatgcgttagggtccatttgataggatgcctcccccttttaaagacacaggaaagcttttaactagcagaggagttagctcaacccagaaagacaggtcctcgtttgtaaaggctgaagggcttttgcgcaaacctaaaattggagtcttctgaaggattagctggccgtcattaattcataaacaaggtcacataagtatagtttgcacaagatcagaggataggcgcttagggaacacgtgtccaataacattaagtatggcttctatataatattttatcctcttccaactcatgaatcagtaggttgccacgcacccagttaatgtttgttgaatgaatgaatgtccaggatcgttgactctgtggctctggaattgtagggatatccgtgaaccaggtctagatgactcatcttgcctacaagctcattattaatggacatcaaaataggaatatttatcattcaaagattcattcaccagcccttgagtcctggaggagctgcttggg

SEQ ID NO: 25369 - DNA, 1525 bp, Artificial sequence
  DNA replication origin
tctgaaggcgctagggaaggttctgttccaggcctccctccaagcttctggtagctccttggcttgtggttgcagaactttgatcttcacgtggtgttcttcctgtatgccggtctgtgtcctaatttcctctttttataaggacaccagtcgtattgaattagaggcccaccctactccagtatgacctcatctcagctaattacatctgcaatgaccctatttccaaataagatcccattctaaggtaccaaggattaggtattcaacatatgaattttggtggggggacacagttcaacccataacactccgtatacatttctggagcatggctgtgtgccaggcactgaggagccagcactgacaggcagacaaagtccctgcccccatggaattggcattccagtggagggagccgggcagcatgcgggtaaacaggcgagcctatgagatcatgccatgaagaaataaaggtgagagggatggggtggggcatgggaaggcctctctgaggaggtgatgccacctgcatcttgggaaaggcagaggaagaatccaggtcaaaggagcagccgtgcaaaggccctggggtgagagtgtgtcttgtgaaggaacacagagagggccacatggggtcagacatgggaggtcgttgtcaaaagattgagtcttggcctaagtgagggagtccactggagggcatgggggaagggcgtgcccttgctggttaagcagcttgtattggctgcttgtggagaatgggctgggatgggggcaggagtggaaaccaggaggtccttgggcagatgttggtgcagcctccctggggggagatgatggcagcttggaccaatggggaggtcggggagagaggagtggagaagcacttctgggtcttggcatcagctctgcttggatggggagctggagaagcctgtcgggggtggggggcgaggtgggcaggagagcagtcagggacacgctaattcagtaatgttctcagacttctgagcaggagtggctgtggagtcagagctctagggagaggtcaggcccggagaggaagatctgagggcctgttgggaggatgctgtatgagtctaggcataagataagagggaaggcccgggcccaggtcagggtctctgcaaagccagctaataactgacccgggggggaagcctcagtgcagggtcttgtcacttttcttagtggagcagcagagaagggacatgtagcaggctgaacaatggccccaatgatgtccacgtcctaatccccacaacctgtgactatgttaccgtggcgagagggacttggcaggtgggattccgttaaggatactgagttatccaggtaggcgcgatgacgtaatcacaagtgtccttatgagagcaaggcagagtgatggggagggtgggggccggtgtgtaagccgggaaacccgggagcctctagaaacggaagacaagaaaatagattctcctctagagcccacagaaggaacaccactctgtcgcca

SEQ ID NO: 25370 - DNA, 1346 bp, Artificial sequence
  DNA replication origin
cgccgcccgggccggagcggccccgggatgccggacgccctcagccccgcggccgcccaccagcaggactttctccggctcttggccgctggagccgagcgtgaggctgccaggcggcgggagcaagagcacggcccggcgagggggcggggcgggcccggcgaggaggcggggcgaggctcgcgggcgggctgcgggggcggggccaggggcgggggcccgccaccttgcccgcctcggccccgccccttcccgggcgccgcgcgcaagaggccggacgcaactgccgcgcaacgacccggcggccccgccacccttctgcgcccgctcctcgccgttctcctaaacccccgtccgcccccaaccaagtgtgccccaccccacagcgcgtgcgcagagccttttgcctcccgcagccggctgagggcgggcgctgggggcgggcgctggggaggggggctggggggcgggggctggggggcggggaggctgagccaatgagagcggaagcagaggagagggagctggctgggctgcggctgtacctgctgacttaactgtccagttattcccaggaccgcccaccccagctggcgggccgtgaacccagagaccccccccagcacaactccagccctgaggggagcgctgagtgcccaaaataagcagttaggacgcggggtgcccggctgacgggggagggggctgtgggaatacagccctggaggggctggcttttggtcaagggcagcattcggaaaaggcctcccagagaagagtcacttaaactgaatcttagcgaccgataaggctttcccaagagaaataataaaagcaagccggtccggggttgaagcctgggtgtgtttggttgtgtttgaaaagtgccgtcgaagtacagctcggggctcgggcaccgagggcgtggcgaggtgggtggaaggaagaggacctaggtccttgatgaagaaaagccctgctctggacagccacgctgagtcccttgcacttggttctgttaagaatgggacgagatggaagggggattggggcgatttttttggaccttggggacaagttcgtactgttcagctcgtcagtcagcaaggcccttttcttttttgtttttattttttactcgttccttctccacacccattcttctacccgccatatgcaccctctcctctattaaggtatgtcccagttcatgcaccgtatacagcctcaaaagatacatggtttgtgtctgtttttaacatatatgaacggcattgtgatgagaactcattctgttccttgtttttctctcagtgtcttagagatctatccatgtgacactatac

SEQ ID NO: 25371 - DNA, 1705 bp, Artificial sequence
  DNA replication origin
aaatcttgtaaatatttgcaataaccatttgccttaagcaattctgtagagcctgtgagatggtttgaaattgaaatgacagtaggctcgaccaaatttctaaaacccctcagacaaaatcataaagcttgcacggcaaaagtaatacaaacaggatatcctgaacagcaaaatgaactaccatatttgtggatttttttccgtatagtagatcccgtataatgttcctactctacaatgaacttaaaactaatcactgtatactcaagtctcatgtaaacttactgaatcttacgcgagaaaaaccaaagccagaaaagaaaaaaaggatgaggttcaactccaaccatctgctcttgctcctccaagcaacattctataaattaggtattttatttaaattctcaaagtcataagtccatagccaaatctaatttataatatagttaagtactatgcacacaaaagtactctgttcaagtggctaagtaaatctgaacataacgcgaacatacattttagaaagcattcatctctgctgcacagggaaaaaagaagagcaatttcacagaaagactaggaaatacctgagcagataaacagccctttcaatatcactgaggtcttcatcgactgtcaatctttctatttcttccggtgtctgtcaagggtaaaatacacatttatgcaccacaaatattggttcagtcttgccccccaacctcccagtgaccctctatgaggataaacgaatgaaaaagtttcacaattaagcattaacaatgaaaactaatcaaggagctgaggataccaggcgacatcaatcacggaggtctctaattgggtggtttggggagtttggggagggggctgtatttttctgtttttatccttctagctcctggactgcagcttgaaaatcacatcgtggcttcagaaccttggctgaaatccatttcatacgcatgttataaaacgaatacacacactttttatctctaatacttcaaggctatttctccagcattttccaccccaagaaatgctaaaagggagatggatgaagactgcagccgagtaggcatgaaaaggacaagatctggagtgggggagggaaggaaataaactccggggctggaaaaaaaccagagatttgagatattgcggcaggtgggagtgagaggcgctaaggcagctaattaagcaatggccaggggaaaggggtccggtccgtaaactaggtttgctggcgctaaaggttggagccgccgggaggaagatgactctgcggggtgggagagccagtaggggtggggggagcaagctgaagcttgaccccctcaaggggattggggagctgggtcccagctacagtcctggaggggatgggaggaaaggatgagcggtgactcaggatggcggcaaagggtcgcgagggcttgtagacagggaccaggacgacactgagaaagagtgctggctgggaagcgaggggaggccgggctacctcgagggcagaaggacccgagcttgatctgacttgggctgggggtgaggggacgggacgcggggtggtgtctccgggagaggtggggggaggagttgggaatgtgtggaccgatgggtgggcctggggccagaacccgggcggcgtcagcggaccagaggttggggagcccaggagaggaccggggagaagtgggct

SEQ ID NO: 25372 - DNA, 1841 bp, Artificial sequence
  DNA replication origin
gacattctaggtttatagtgagggttaatgagattatttaaacagatttttgtggttttgttcttaactatatcccttgaaccttgaaccttgcacataaaaggcactcaataaatacctgttgaataaattaacaaataaacatatgaatgaagaggtgttatttccctctctaaactcctttgcctgtgacagaaaattcaagtttgttaaatagcaacagtgaaaaaatgttgggattgtaatggaacgtctaccactcacctgttcagcctctcttacctttgcattagggaagggctcattcttagccttttccaccccaaacaagcccttcttgtctttacacactgtggaccttgggtttgtaatacctgcttcttgtccatctgggaaattctgacccagcttcaaagtttagtttacaagtcactttctccatgaggagagggtgatggtgccagcagtggtggtaatattagttctggtggtgaaggtggtggtggtggtgagagtggtggtggttgtaatggtgatattagttctggtggtgatggtggtggtggtagtggtgagagtggtgatagttgcaatgatgataatagttctggtggtgatggtggtgctggtgttggtggtggtaatgaaggtggtggtgatggtgctgctcgtggtggtgatggtggaaataatagttgtgatggtgatggtggtggtgagagtggtggtggaggtggtgatgatggtgatgatggcactgtggtggtgatgaaggtggtggtggtgatggaagtagtagttgtggtgatggtgatgttggtggaggtggtggtggtggtgatggtgttggcgggggtggtggtgctggtaataatggaggtggtggtggttatggtgatgatggagctggaggtggtgatgcaggtgatgatagttgaggctggtggtgatagttgccatagtgatggtggtgttgatggaggtggtggtgatggtagtggtggtggtaacggtggtgataataattggggaggtgatggtggtggtagtagtggtgacggtggtgattatagttatggtggttacagtgggtgatggagaggatggtggtggtggtgatggaggtagtggtggtgacagtggtgataatatttgtggtggtgatggaggtggtggtgatggtggtggtgctggtgatggtgttgatggagctggaggtggggatgatggagatgatggtggtgatggagatggtggtggtgatggtgatgataatagttgtgatggtggtggtgatggtagtgatggaggtggtggtggtgatggtgatgataatagttgtggtgatggaggtggtgatggaggtggtggtgatggtggtgatggagatggtggtggtgatggtgatgataatagttgtggtgatggaggtggtgatggtggtgacggaggtggtggtgatggtggtggtggtgatggtattgataataactggggcggtggtagtcatggtggtgattatagttatggtgatgacagtggtggcgatggagaggctggtgatggtggtgctggtgatggtgatgacagagctggtggtggtgacagtggtgataatagttgtggtggtgatggaggtagtggttatggaggtggtggtgatggtggtggtggtgatggtgttaataataactggggcagtggtagtgatggtggtaattatagttatggtgatgacagtggtggtgatggagaggctggtgatggtggtgctggtgatggtgatgatggaggcagtggtggtgacagtggtgataatagttgtggtggtgatggagttg

SEQ ID NO: 25373 - DNA, 1209 bp, Artificial sequence
  DNA replication origin
ctgaaagtcaatgctttccgtgagcttttggaggaggtggggagattcggcaggtttaatggcccttgaaaaagtgcgtccctgcagggagggttgtgacgggctggatttctgggagtaacacagactgaataaggctgcccttggctcaatgtccacccttggcaaaaaccaacagaggaaagcgatctgccctccattagggtgatgtggaaatccttgagtggagaagaaggagctgtggaaagtgggcggtaccctggaattgcggtgggtgtcctggaattgtggtgggtgtcctggaatcagactgaataaggctgcccttggctcaatgtccacccttggcaaaagccaacagaggaaagcaatctgccctccatttgggtgatgtggaaatccgtgtgtggagaagaaggagctgcggaaagtgggcggtaccctggaattgcggtgggtgtcctggaattggggtgggtgccctggaattgcggtgggtgtcctggaattgcaatgggtgtcctggaattagggtgggtgtcctggaattagggtgggtgtcttggaattggggtgggtgccctggaattgcggtgggtgtcctggaattgcagtgggtgtcctggaattagggtgggtgtcctggaattagggtgggtgtcttggaattggggtgggtgccctggaattgcggtgggtgtcctggaattgcagtgggtgtcctggaattagggtgggtgtcctggaattagggtgggtgtcttggaattggggtgggtgccctggaattgcggtgggtgtcctggaattgcggtgggtgtcctggaattggggtgggtgccctggagttggggtgggtgccctggagttggggtgggtgtcctggaattggggtgggtgtcctggaattggggtgtgtgtcctggagttggggtgggtgccctggagttggggtgggtgtcctggaattgcggtgggtgtcctggaattgcggcggatgtcctgggggcaggtcccagttccaccacttttgttctgcctgacactcccaggcctcagtttcttccctcgccctccttactgctcaaggttgacaggaaagttaagcctagtgatatacatagaggttctagcaaaaggctaagcaaattggagcaatgctctgccctcttctggtcacattcttttgcccaacacacattatggaca

SEQ ID NO: 25374 - DNA, 1066 bp, Artificial sequence
  DNA replication origin
cacaaggcagaagaatttttcttagtacagaacaaaatgaaaagtctcccatgtctacctctttctacacagacacggcaaccatccgatttctcaatcttttccccacctttcccccctttctattccacaaaaccgccattgtcatcatggcccgttctcaatgagctgttgggtacacctcccagacggggtggtggccgggcagaggggctcctcacttcccagtaggggcggccgggcagaggcgcccctcacctcccggacggggcggctggccgggcggggggctgaccccccccacctccctcccggacggggcggctggactggcgggggctgacccccacctccctcccggacggggtggctgccgggcggagacgctcctcacttcccagacggggtggctgccgggcggagaggctcctcacttctcagacggggcggccaggcagagatgctcctcacctcccagacggggtcgcggccgggcagaggcgctcctcacatcccagacggggcggcggggcaaaggcgctccccacatctcagatgatgggcggccaggcagagacgctcctcacttcctagatgggatggcggcggggcagagacgctcctcactttccagactgggcagccaggcagaggggctcctcacgtcccagacaatgggcggccaggcagagacgctcctcacttcccagatggggtggcggccgggcggaggctgcaatctcggcactttgggaggccaaggcaggcgggtgggaggtggaggttgtagccagccgagatcacgccactgcgctccagcctgggcaccattgagcactgagtgaaccagactccgtctgcaatcccggcacctcgggaggccgaggctggcggatcactcgctcttaggagctggagaccagcccggccaacacagcgaaaccccgtctccaccaaaaaaatacgaaaaccagtcaggcgtggcggcgcgcgcctgcaatcgcaggcactcggcaggctgaggcaggagaatcaggcagggaggttgcagtgagccgagatggca

SEQ ID NO: 25375 - DNA, 947 bp, Artificial sequence
  DNA replication origin
ctgcctggctgcccagtctggaaagtgaggagcgtctctgccccgccgccatcccatctaggaagtgaggagcgtctctgcctggccgcccatcatctgagatgtggggagcgcctttgccccgccgccccgtctgggatgtgaggagcgcctctgcccggccgcgaccccgtctgggaggtgaggagcatctctgcctggccgccccgtctgagaagtgaggagcctctccgcccggcagccaccccgtctgggaagtgaggagcgtctccgcccggcagccaccccgtccgggagggaggtgggggtcagcccccgccagtccagccgccccgtccgggagggaggtggggggggtcagccccccgcccggccagccgccccgtccgggaggtgaggggcgcctctgcccggccgcccctactgggaagtgaggagcccctctgcccggccaccaccccgtctgggaggtgtacccaacagctcattgagaacgggccatgatgacaatggcggttttgtggaatagaaaggggggaaaggtggggaaaagattgagaaatcggatggttgccgtgtctgtgtagaaagaggtagacatgggagacttttcattttgttctgtactaagaaaaattcttctgccttgtgatcctgttgatctgtgaccttacctccaaccctgtgccctctgaaacatgtgctgtgtccactcagggttaaatggattaagggcggtgcaagatgtgctttgttaaacagatgcttgaaggcagcatgctccttaagagtcatcaccaatccctaatctcaagtacccagggacacaaacactgcggaaggccgcagggtcctctgcctaggaaaaccagagacctttgttcacttgtttatctgctgaccttccctccactattgtcctatgaccctgccaaatacccctctgc

SEQ ID NO: 25376 - DNA, 1863 bp, Artificial sequence
  DNA replication origin
ctgtcactgtgttttcaggaccatcatcacactcaggtcttaaaacccaccaactacaaagcaaggctcagcaaagggtagcaagggtgtgtgtgttggggggtatatatgtgcagatgtgggtgtgatgtgtgtggtgtgtgtttgtagtgtatgtgggtggcatagatgtggttttttttaatttaatttttttttttttgagatggaattttgctcctgttgcccagcctggaatgcaatggcacaatctcgggtcactgcaacctccgcctttcgggttcaagtgattctcctgcctcagcctccctagtagctgggactacaggcgcccaccactacgctcggctaatttttttttttttgtattttttagtagagatggggtttcgccatgttggccaggctggtcttgaactcctgatctcaggtgatctgcccacttgggcctcccaggtgtggtgtttgtaagttgtgcatgtgtgtggtttgtgggtatggtgtgtgtgatgtttgtgatttgtgtggcatgtgggtgtctacgtgtgtgtgacatgtacatgtatgtgtgtgtgatgtgtgtatggtgtgcgtgttatgtggtgtgtgtggtgtgtatgtgtgtgtgatgtgtgtgggtacgtatgtgtgtggtgtgtataggtgtgtacatgggtgtgtgggactgtgtatgtgtgtgatgtttgtagtgtgtggtttgtgtgggtgtgtacatgtgtgtggtgtgtgtagtgtgtgcatgtgtgtgtatgagggtgcatgtgtgcatgtatgtgtgtacacgtgtgtggtgtgtgtgtagtgtgtgcatgggggtggaggtggggggcgtacgtgtgtggtatgtggggaggtgcatgtgtgtggtgtgtatgtgtgtttgtgtggtgtgtgtgggtgatgtgtgtggtgtgtggtgtggtgtgtgtgtggtgtgtacatgtgtgtgatgtatgtgggtatgtatgtatgtgcatgtggtgtgtgggtgtatacatgtgtggagtgtgggtgtgtactgtgtatgtggtgtgtgtaggagtggatgtgtgtgggggtgtgtgcatgtgtgtggtgtgagtgtgtgtgtggtgtgcagggtgtgtatgtgtatgtggtgtgtaggggtatgtgtgtatacatgtgtgaagtatgtgtgtagtgtatacatgtgtgtatgtgtgggcgtgtggtatgtgtaggtatgtgtgtagtgtgtgtgggtgtgtatgtgtatgtgtggtgtgtgggtatctgtgtggtgtgggtgtgtacatgtgtatgtgctgtgtatgggtgtgtatgtgtgtggtgtgtgtgggtggtgtgcatgtgtgtggtgtgtgggtgtgtaaatgtgtgtgggggtgtgcacatatgtgtgtggtgtgtggtgcctgtgtgtagtgtgtggtatgtgggtgtgtatatgtgtttgtggtatgtgtggctatgtgtgtgtttgtggtatgtggcgtgtgtggtgcgtgtgggtgtgtacgtgtgtgtggtgtggagggttgtgcacgtgtgtgtggtgcctgcgtgtagtttgttggtatgtgggtgtgtacgtgtgtggtgtgtgtgagatgtgtggtgtgtacatgtatgtgatatgtatgctatgtggtgtgtgtgggtgtgtatacgtgtttgtggtgtgtgggggtttgtgtgtgtggtgtgcttgtggtatgtgatgtgtgtggtgtgtgtgggtgtgtatggtgtgtgagggtatgtatatgtgtgtgtggcgtgtgtttgtggtatgtggtgtgtgggtgtatgtggtgtgtgtgtggtgtgtgtgacttatatgtgtgtggtgtgtgtgtg

SEQ ID NO: 25377 - DNA, 2194 bp, Artificial sequence
  DNA replication origin
gggaatattgtccccattttccaggtggggaaatggaccaatgtcccgacccttgctctctagtctggtagctgccttagctgtgccatctcgacagtgccaggtggggccaatgcagatgcatgacaagcctggcgtgaccctggggcgggtgccctggagatgcagggggttggttggataaacgttcttgtagcaaccgccggacgggcccttgaaggactggcagaggccatgtggggtgtggggcgcatccaaaaggggagagtcctggaaggagtgagaattaaaaaaagcagggatggaacaagtgcaggctgcctgggacccttggagataaggccctgagaagagcggtggtggtgcttccacccagctcacccgcccccactcccatgttatctccgactgaccctccctctctgggcttggtctctcccactgtggcctagagtgtccccaagggcctctaccttcctgcagggtcctcacgcccactcagctcctgtttacacctctgatcatgtggtatgtatagtgtgtgtgtgtctgtgtgatgtgtatggtgtatgtgtgtatgtctgtgcagtacatgtgtgtgtctgtctttgtgtgagtctgtgtccatgaatatctatggggtgtgtgtgtctgtgtgatgtgtatggtgtatcgtgtatgtgcatactgtgtggtatgtatggtgtgtgtgtctacgttgcatgtatggtgtatgcatctatatctgtttggggtgtgtatgtgtgagtctgtgtgtggtgacaactggcatcttttactcccaagagtactgggttagaccagaactcatatggccaccttcctcttgcctcgatgctttcagcctgcctgaagctgaagcctagaagagctgacatttccggaaggcccaactcctgctttcagtctctccccatcaaccacacacacacacacacacacacacacacacacacacacacaaccacacacatacacctgcagacatacatggacacacagagacaaacacagcatacataccacacagatatgcacacatacaccatacacatcacacagacacacacaccccatagacatgcatgcacacagacagacccacatacggacagacacacacatacataccacacagacacacacacacacatacacaaccacacacatacacctgcagacatacatgggcacacagagacaaacacagcatacataccacacagacacgcacacatacaccatacacatcacacagacacacacaccccatagacatgcatgcacacagacagacccacatacggacagacacacacatacataccacacagacacacacacatataccatacacatcacacagacacacacacacaatagatatgcatgcacacagactcagacacagacacacacacagatacatgccacatagacacacacacacgatatataccacatggacacacacaccacacaaagacacatgcatacaatgaacacacacacacaccacagacatgcatggactcatacacagactcatacagaccatgcaccacacagacacatgtgcatacagacacacacacagactcacacacacaacccatagacatgcatgggcacaacacacactcacacaccacacggatacacacacacaccatatacaccacacagacacacacatatagacacatacacataccacatgaacacacacatatgtcatatacatcacacacacacacagacacaccccagacatacacacatataccatacatgccacatagacacacacacaccatacctaccacacagacacacacacacatacaccatacatagcatacagacacacacacactatacataccacatggacacacaagccacacacagacacactcagacacacacaccatagacattcatgaatacacaggcccacacacaccccacacagatatacacacacagagacacaccatacaccacacagatacatatacacagacacacacacacagactcacacaatctgtaggtgtgcagggacacacacagactcacgcaccacacagatacacacacacaccatatacaccacacagacacgcacatacagacatgcacaccacacagacacagccgttctctctct

SEQ ID NO: 25378 - DNA, 1003 bp, Artificial sequence
  DNA replication origin
tcctcaacattaacatctcagctaaattcagactctgatcctggaccctcccagagtgctgcatcttacaactctaattgagagccgaaagtcaatccatggccagggtgtaactgaggaattgagggagagggagagaggcagagaggcagagagggagagagggagagggagaaggtcgggggagggagaggggaaaggtgggggaaggggaggaggaggggagaggaagagagggagaaggggagaggaggagggggaggagggggaggaggagaggaggcagagatggggggaggagggaggggacagggagggggaggagggaggggagagggaggaggaggggaggaagagggggaggggaggaagacagggaggggaggagggggaggggagggggagggaggggaggtacagaaagaggagaggagagaaagagagagagagaggaaaaaaagacaggaaagaaaagaaagaaaaggaaagaggaaaggaaagggaagggaaaaggaaaggaagaaagaatgcaaagattgagaaaaatgtgggcactgctgctcgagaagaaaaaaatcatcaggagagaaactaagacccacatttaatacagtgttaacattcacaaatggttgcaaagttctagggcagtggttctcgagctttaatgaatcagattactggagggcttatcgaaattcaaaactgaagactgcaaacagtaaaattcagtcctgaggaccccacccagatgctgctgatgatgatgtggggcccacaatggaaggatcactgtcctaagggatctcttctcaaagcagtaccactgagagacaataggctcatatccagttacacacactaggaaactgcggaagaatttgtttaattcaagggtttgaacaggaactaactcttctgaccaaaaagaaacaaaaattggactcactccttatacttaaataaccatgacatgaatcctagctcagctccttaaataggg

SEQ ID NO: 25379 - DNA, 987 bp, Artificial sequence
  DNA replication origin
agaaccatcggaccccgctccggcgcgcgcgtcacagcccaggcctcccggagccgcccggcgccgccgcccccgccgccatttcctcgcgctcgccgtcgcctcgtccccgctgtcaggttactccattcacctgggcctgcagcagcctgcgccgcgcctccgcctcgacccctcccgccggcgcctgcggagactgcgcagcgcccggctggccggcagccagcgcacggcccgcggcaacggcgcacagccgcttggagaatcccactggctcccgcaccgcccctccgcgcccccacgctccgctcgccccgtggcggcatgagagcgagcctgtgattggacagggcctggcggtgaaaggttaatcccggccccccagccactcaggagcagggagacagcgggcgcgcgcgcggaggccggagaggcgtttgcggcccagcgcctggactggaccttggcgttgggccgcagttgcccggagtttttggggcccccgggaacccgcgcgccgaggccggctaagtttggcagactctctgagctctcggaattcgactgcctccattgttgctccttctggcacccacagaccgtaacgtggccgtaattgtttcccggagagcttagcttccctctgagcacctccctcccctttttaaagtaccttcccactcgcctgcgtttcctcgcgttagtggtgcaggggcctccgcatttggggaaataacaaacacccacttccgccccccaccccaaccgggatccccagataatgagaaatagatggtggccctctgtttgtaagctgttcatttgcataggtcggaaccgcgcaccacagcttgaagctaggaattaaaatatcggtgggaattaaataagtggctggcttaaagaacatcttcttaatttatccccaaatgtagacatctcttcagtggaccccctgataggccggtttgctccaggtgaggtgtg

SEQ ID NO: 25380 - DNA, 890 bp, Artificial sequence
  DNA replication origin
cttagaaagcacaaaaatatttgaaggaaaaaagtcacccataatttcccctccacaacctatccacccaacagacaggtgttcttcatggaactgtatctccagcttcttttttttcatatatgggctttgcagaactagacagaacaccacttccggcccttcttcacccacattgacctgtgcaggtgaagtttctgtagctgcttcccctgctggcttgggtttctagagggttcaaggttaggagtggctaggagcgagctgggaggcctgggcagagaggcgatggggctgtgggtgccctcccccagccagggcagcgactttactgttatagggtagggagccccagcgctgggggatggccgagcagtcaagtttaaacattacacctgattgaatgtttcctgggagcccagggtctgccccacccctaggttgggcaaggacagtgccggcagaggtgacctcaaaaggactggggagcctcctggggtggacactggaaactgagtttgctctgggccgctctgatctcttctggctgtgatttgtgttaaaggaggaggcttgggctgggatgttgaaagtgatctcttttgataataagccaagtgcctggatcctgttgcctgagaagaactgacatcctgtttgggggtgggcattagtgtcttctgctggactgtgagggtgtgagtgtgtgtacctgtctgtcttaggcaaccattgagtgtttaataagcacatactaaccaatgcttcgtgcaacaagttcctgcattcctctaggattagctcctggtttagagaagattgattgttgtgaagagatgccccgcaatatgaacattaggttacaaccagaacggtgggagaaggcttta

SEQ ID NO: 25381 - DNA, 803 bp, Artificial sequence
  DNA replication origin
cacacgtgtgtgtgttgtggggcgagggctcgcattttcattagggggacgtcaccaccccctccagtcaccgctgcgagtttggagaagtttgtacgtgggctcttgggggcggtggcccaggttagggaggggaggagacagtgcgactctgtgtgtgtgtgtgtgtgtgtgtgtgtgtgtgtgtgtgagttcgcgcacttcctaagtaccttcgaggcaaggggaattgaatggtgggcggcgcttcagggggtgagttggggaaagcggggccaggggtgcggatcggatcggtggggtcaggcaagcacccaactccagcggccactttgcttagggagctgcccctcccctgcaggatcaggactctaactggggagagggcgagagccccacccttcccccacgctggcccccaactccgaccctgcctgggcacaggacactgggaccaaggcttctacctgggaggtagctgagaagaggtgaaagagaaactccagtggtggagagcggctgggtatggcggtgccacacatgaagtgtgtttctctttcaaaagaatttattcaatgtggaaacttagaaagcacaaaaatatttgaaggaaaaaagtcacccataatttcccctccacaacctatccacccaacagacaggtgttcttcatggaactgtatctccagcttcttttttttcatatatgggctttgcagaactagacagaacaccacttccggcccttcttcacccacattgacctgtgcaggtgaagtttctgtagctgcttcccctgctgg

SEQ ID NO: 25382 - DNA, 955 bp, Artificial sequence
  DNA replication origin
cgccccgcgctcgctcgcgccagcccgcggcgggggcggccccgaccgcgccgcccgcccctccccgccccgccccgccccgcccgcgcccgcgccccgcccgcgcccgccgcgactccagctccgcggcgccctcgccgggtgcgtgccgctcgcgcgcccgccagccaggctctccgcgcccgccgcccgcgccgcgctggcccgggctctcccgcccgcgcttcatggctgcacacgagtgggactggttccaacgcgaggagctcatcgggcagattagcgacatccgagtgcagaacctgcaaggtaacgcagcccaggctcgccccgggatggctgggcgctcggggggcccggggcgccgctccgacacttggcaactcccccgcgccgcccccgctcgccggccgctcgttgttcctgtcacttgcctcgaggtgggaggctggggttggatacccgcccccaagccccagggcggccagccgcggccaggtttacagttgcccagggggtggggcgccacacgtgtgtgtgttgtggggcgagggctcgcattttcattagggggacgtcaccaccccctccagtcaccgctgcgagtttggagaagtttgtacgtgggctcttgggggcggtggcccaggttagggaggggaggagacagtgcgactctgtgtgtgtgtgtgtgtgtgtgtgtgtgtgtgtgtgtgagttcgcgcacttcctaagtaccttcgaggcaaggggaattgaatggtgggcggcgcttcagggggtgagttggggaaagcggggccaggggtgcggatcggatcggtggggtcaggcaagcacccaactccagcggccactttgcttagggagctgcccctcccctgcaggatcaggactctaactggggagagggcgagagccccacccttcccccacgctggcccccaactccgac

SEQ ID NO: 25383 - DNA, 1884 bp, Artificial sequence
  DNA replication origin
ggccccccgagcgcccagccatcccggggcgagcctgggctgcgttaccttgcaggttctgcactcggatgtcgctaatctgcccgatgagctcctcgcgttggaaccagtcccactcgtgtgcagccatgaagcgcgggcgggagagcccgggccagcgcggcgcgggcggcgggcgcggagagcctggctggcgggcgcgcgagcggcacgcacccggcgagggcgccgcggagctggagtcgcggcgggcgcgggcggggcgcgggcgcgggcggggcggggcggggcggggaggggcgggcggcgcggtcggggccgcccccgccgcgggctggcgcgagcgagcgcggggcggcgggtgcggggcggcgggctcgctctcactcccccgtgcgggggcgggggccctgaggagcgaggggcgaggggcgaggggcggggcggggcggggcaggggcgggaggctgggtcaggccagcttgtgttttttttctttccggggtgtttgtaggttggattgtttggttacaaaccggctgtgatgaggcgcgggtcccggcccccagattgtgatgtctcagggggcggtgggccgggtgacgcaactgggggtgggcccgtgggtcccagtacctggtccaggaggcagcgtctccctcccgtccgggataagacaccccctccgcgggtcccctgtccactctggagaggcagcccccacttggagggaccaggacccgagccctgcccatccccgaatcctgggagccctgcgtggggagtgtcgagggcctgggtcggggggcaaactagtgtggaggtaaagttgtgggagtctccaaagtgcgggggggctgtgaaagaagggccttcttcgttggtttagatactaggagccttttccggtccagtaatgtgactccagcttctaggaaggaacaagaagcaggccaactcctaggagctggggtacgctgtggggtctctggccactgagtctccaagtgaccctctgtggggtcactggaaattagtgaaaatgccaggacagaacttcctgtggagactactgaaaatgccaggacaggccttccggtcccctccctccccacctccactgttgaactctagagaattccaggatcttatcctgtttggtgcccaccatgtggtttacactccttaaaagtgagaccctacagttaccgaatttgcccaaggttgaggaatgacttaggagcaggaagtcccagccccctgctcccagctcagtgcttgggccctttctgtgacaactaaggccacaaagaaaatggctttaaatattcagtgttccaagagggggaaaaaaatggacagggctcactgggcatttaaacacatgggcctgtgtgcatcgctgctctgttcacagcaatgaatcccggaaacccggctgctcactaattacccagtaactatggaggtcccccgaaggacagacctgtgcccttgaggcagggccctgaaggagggtgagtctaccctccagtcatccattggggcaggggctatcgtgtggcccttaaacaaggaaaggagatttctaaagtggactccagaaaggagaaagtcaatttgggttaaggaactgtgaatgcgggtggagggcagcagaggtctctaaagactgaccttggagctgagcccagaaggaggagaggaacccccacagggacagcagtttgggcggggaaaggtgggatcagtggagacagaagtggaggccccattaggggctccttggtgcttgggcttgaggcaggagcttccttgctgctgccttgattcttaatcttgtggtcatttcacactccaaggagcaggatctctttctgcgtc

SEQ ID NO: 25384 - DNA, 1277 bp, Artificial sequence
  DNA replication origin
agcacactgattggtacaaaacagatggtacacagtacatactgcacagtaagtaaaggagggagggagggagagaggaaagaaggaagaggggaaggagggagggagggaggaaagaaggaagaggggaaggagggaggaaaggaagaggggaaggagagagggaggaaagaaggaagaggggaaggagggagggagagaggaaagaaggaagaggggaaggagggagggaggaaagaaggaaaagggaggaaagaaggaagagaggaaggagggagggaggaaagaaggaagagggaaaggagaagggagagaggaaagaaggaagaggggaaggagggagggagggagagaggaaagaaggaagggggaaggagggagggaggaaagaaggaagaggggaaggagaagggagagaggaaagaaggaagaggggaaggagggagggagggagagaggaaagaaggaagggggaaggagggagggaggaaagaaggaagaggggaaggagggagagagagaggaaagaaggaagaaaggaaagagggagggagggaaaaaagagaagaaaggaaagagggagggagagaagaagaaagaaaagaaggagggagggaggaaaacaggaaggagggaaaaggagagggaaaaagtcttatccctatgaaggggcaggtcctgggacaacttcacagtatcaaggaagatacaggggtcacactgagctggtgagggatggggatggggagtgtccagaagtgggaaggtctctagtgagagaggactcctgttccagggggagagcacaggattcaggctggagaaacagcatgtcaacagacccaagggttaagtgtgtgcaatgctgtgatttaagaaatacatatttggtccctgccccaggcccctgacacacagctcctgatgcccttggactctctggagtgatgagtgtcttttttatgctaatgagatgactggtggctggcagcatagaccaaggcaggattagagggttgggactttaagccccacctccaaacctctgcggaggggacaggggctgagggttgagttgatcaccaatggccagtggtttaatccatcatgcctacctaatgaagtctccataaaacctcaaagggacagagctggggtgggtctccagatagctgaacacgtggaggttcttagagagtggtacagctggacagggtgggagctctgtgcccctttccccatgccttgccctgtgctgctcttccacctggctgctt

SEQ ID NO: 25385 - DNA, 1103 bp, Artificial sequence
  DNA replication origin
tttataacctctgcattaccgaccccctacctggccccaaaaaggaaggcttgctgcttgcacagacgcctccctcatggctccgaaccatacccctgaagacctcgcccagcaatacacgttagcccacacaaccatgttttcctttccaaaccctaaaaaaagaaaagagccctttctcttttctttacccagagtaatcctgaaattatgcaccatatccggaagacagacatggccccaaatttaattttctggtttctgcagagctgacttaatcagaccagagtcgaggagggatcccccagggatgtacccccagagctctgctacggctcccaacctgacaagccgtgagacacggtcacaacactttgcccagagcaccatgtgcctgtgtctatgtaggtctctgtgtgtgtggtgtgggtgcgcacctgtgtatatggcttgcatgtctggcaattgtgtatgttgactgtctctatctgtatccatatgtgcctctgtggtgtctgtgtgtggtatgtagtgtatctgtatgtgtagtgtatgtgtgcatctgtgtgtgtttggtgtgtgggggggtgtgtacacacatgtatgcaggtggggggtatgtgcaagcatgtgcatgtgtctatgatgtgtatgtgtgtgtctgtatgtggtgcatccatgtgtgtatgcctgtatgtggtgtggtgggtgtgtttggcatgtgtgcatatatctgtgtgtggtgtgtgttttgtctgtgtggcatgtgtgtgtatgcatggtgtgtgtgattgtatgtgtgcaagtgtgtgtatgtatggagtgtgtctaggtctatatgtgcctctgtgtggtgcatggttgtgtgtggtgcatggttgtttgtggtgcatgtacttgcacacaggtgtgtagtgtatgtgtacgtgtgtgtgtgtgtgtgtatggagtgtgtccgtgtccgtgtgtgcctctgtgtgtggtgcatggttgtgtgtggtgcgtgtacttgcacacagttatgtggtgtatgtgtaggtgtgtgtgtgtggagtgtgtctgtgtctatgtgtgcctctgtgtgtgtggtgcatgaataaggg

SEQ ID NO: 25386 - DNA, 1925 bp, Artificial sequence
  DNA replication origin
tggctgggcagggggctgggttcgtcttgcctcctcactggggtggctctgcgtggatgtcaggacacagagatgtattttttcagttgattttggagagggagagggatgggacgatctgagctggcctgtggtttagctaataggtgagaagtgcccatggatgtaatgatggagtgatattgtcattactcaagcaaggacggagcctcatccaggagcggatgtatgaccataggcttcctctcctcccgccacttcccttctgcacctttccttatctgccatccccctgtgagcaggctctgctcctaggatggagaccaaggtcagtgagggtctaggttgactcacaggcacctagtttgggaaactgggtgatcatgatgctttttgctgataggggcacggggatttgatgggcatagggatttgatggggatggggatttgatggggatggggatttgatgggcatggggatttgatggggatgaggatttggtaggcatggggatttgatggggatggggatttgatggggatggggatttgatggggatggggttttgatggggatggggatttgatggggatggggatttgatggggatgaggatttgatggggatggggatttgatggggatggggatttgatggggatggggatttgatggggatggggttttgatggggatggggatttgatggggatggggatttgatggggatgaggatttggtaggcatggggatttgatggggatgaggatttgatggggatggggatttgatggggatggggttttgatggggatggggatttgatggggatgaggatttgatggggatggggatttgatggggatggggatttgatggggatggggatttgatggggatggggatttgatgggcatgggaggtcagctttagatgtgatgagtgggaggtgcctgtgggacccccaaggaaacatctaatgggcagttgaggttttaggactgaggctagaaggagagacctgcattacagatgaagcaagagctcacgcagtctgaagacagtgcataaccacaggcgtggaaggaggtgacagggagagtcacctatgagacggtgcagaaagccacaggtgtgagaggagatgccaaggagaaaatgacccaagagacagtgcataaaccagaggcctggaaggagatgccagggagagccacccaccagatggtgcatgaaccacaggcatgggaggagatgccagggagagttacccatgagatagtgtgcaaaccacaggcttggaaggaggtgccagggagagtgacccaggagagggacaggtcctggagaacctgaggatgccacccatgaagaaagaggcattgtatttctagtgcctctacccagcccctacaggtcacttatccattacaaaagcaatggtagcaacttcacagggagaagcctctctaagggcggccattcttaactgatggtcagagtgagcacagcccatgtgcgacatgctgacgacatgtgtctcctgataagaggcacaagtaaaccacagcaccgctctgtgacattcctgccaggaacctgccaccaaatccaatcacaaggaaacagcagggaaacccaaaccaagggatattccacaaactgtccggcctgtactcaaaaaggtcaaggtcaagaagaattaagaaaaacctaggaactgggacagactggaggaaaacagagatgtggcaataaatgcaatgtgtgatcttggattggatcctggactgagaaaaaaaatctaccagtaagactgtaagtggtacatctccagacaatggaatataattcagtggtcaaaagaaatgagctattggcctggcacagtggctcatgcctgtaatcccagcactttgaaag

SEQ ID NO: 25387 - DNA, 1398 bp, Artificial sequence
  DNA replication origin
agaatatccgcctgatctgggaacccccaagccaattcactgacatgaaaataggagtcgtgaagataaacctcaggaggagcccagctgaagccaacagaaagccactctcaggtggtgtcccagctgcaggcttctgcagatgcatcctgcttaggctgagcttagagctcaaaaggacaacaccccccaaggaaacaatctaccatgtcaggggacacataggtgcctgacgtggaacttcagccttagacctggaacctcagccactagaaaaatctgatggggactgtaaaatacatatgtttagaatgattgcaaatataagctatatctgggaggaatgcaaaatctcagggggaaaatgacataatttgttaaaaagaacagggagacataatacagaaccaaataaaatttctaacaaatgtaattgaacttgataactcaatgaactgtttccaaataaggcaagaatggggtgaggaaatgcagacagagaatggacagagggactggggcaagggcaagagagagcaaggaggaaacactgaaggagaaggattaaagggcaggaggaggaagggaggggaggagggagagaggaagagagagaaaggaggagaagggggaagctgtttggatcaaagtgaacatcacagtccatcagtcagtcggtcaacacacctatatgtatattaagcactgcgaaacactgggtatctggacggtagataatggtgagtgggtggtggaagagttggtaggtgaggattgggggatgggtagctaggtgggtggatggctggataaacgagtgggtgatggtcaatagtgggtagataggtggtgaaggggtaggcagtggagagatggatgagtgaatgggtgagtgaggaagaggtggctgggttgatgggtaggtgaatgagtagatagatgaatgcgtgggcgattaagtggttgaagagatgaatagcagattgatcaggctggtggggaagtagatggatgagtgagtcaacagatgggtgggagaatacatggatgaacaaatggtggggtagataggtgaatggggtggtgtgtgggtggatagtgaaggggagatttggtgatttagtggggaggtagatgggtgagtaggtagacagatggatgggagggtggttggatagtgaacaggtgagtagatggattgatagtagaaagatagattgatagtaggtaaatagcttgatagtaggcaaacagtggctggaatgggtagataagggtggatacatggatgggtgggtgaggatgtagcccactcagcctcaccctcacctgggccttggccttcactgcatcgtactcagccttcattctcttctgggcatcttcgtccacgctggg

SEQ ID NO: 25388 - DNA, 1214 bp, Artificial sequence
  DNA replication origin
acactggcagaacgctcaggccatgactcccctctgcctggactcccaccccctcggggctcacagaagtgctgcctctggcttccagggcccatccaccctggtcctgccaatgtgtcttcctaaggaccacccttgactttgcttaaaccagaaccaccacctggagggaaagacccaccagcaaagggtagaaagtttaaaatgctaagcaccctaacacagtgggcacacaggcagggctgtgatgctcacagacaggtaaggtcaggagctggggctgagaaaggcggaaactggtcaggagagatgcacggacaggagggtttcatttcttgtgcacacccagacccacacaaaaaagcattccaagcagaggcaacacatggacaaaggcttggcggtggaaggtctacgaggtcttctgccaatcaaaggagggcgtgagcttgcaaggtgtgacagtggctggagctaaggccggtgtaagcttgggaggtgtgacagtggctggagctaaggctggtgtgagcttgcgaggtgtgacagtggctggagctaaggctgttgtgagcttgcgaggtgtgacagtggctggagctcaggccagtgtgagcttgggaggtatgacagtggctggaactaaggctggtgtgagcttgcgaggtgtgacagtggctggagctaaggctggtgtgagcttgtgaggtgtgacagtggctggaactaaggctggtgtgagtttgtgaggtgtgacagtggctggagctaaggccagtgtgagcttgcgaggtgtgacagtggctggagctaaggccagtgtgagcttgggaggtatgacagtggctggaactaaggctggtgtgagcttgcgaggtgtgacagtggctggagctaaggctggtgtgagcttgtgaggtgtgacagtggctggaactaaggctggtatgagcttgcgaggtatgacagtggctggagctaaggctggtgtgatcttgggaggtgtgacagcatggagagctaaggctggaaaagagagtggtgcagatagtgggggacttttgaagccaggtgaagtttgcttttcctttggtggacagtgagagccacggaaggttttagaggaagagaataacatcatgggacccacgttaggggtgtgcctcatacatgcttgtgcagttgccctgattgtttgcatacgtgtctccatg

SEQ ID NO: 25389 - DNA, 1689 bp, Artificial sequence
  DNA replication origin
tgcagtggctgtgagctgaaagagacagggaagagtcagctagaagcaggtgcggaggggcgggtggggcagagtgggggaaggactctccaggcagaactaactggagctgtggcacccagactctaatattctggaaacacaggcagtgtggtgcagctggcatgcagcgcagggagcaccctggccagttaggactgtagggctggcaggaggcaccgtccttgagggtccaaggaacactgactttatccttcaggctggggtccctcaccttggggtgtcaggaggatttctttggagaccatgagttttatgtgaagtttaaaaacttgcgtgtaataaaaacaaaaaagtgtaaaccctatattttggcacagtccttttcaatggaaagacatgttcatctagtagaaggctgtcatttctcaagtccttgttgaaaagagtacattctgaggatgtgttcttgtgcagccataattttgctttaaaagcgtctgtccatgggccgctggggtttagggctgaggaggactgtggtgacgtgtgtgtggtcattgaaccattcttgctcccttgggctgcagtacagatggcccaggaagagggagatgtcagggaaggcagggccagccagccaggcaggtctggggggttcagggagggtccctctgtggggaagacccctgcctgagaaggcatgaggcgctggcggggagggtaaggcctggcacctctgactcccagggccaataagacattgggagaggggtggggggtggcctgggggacaggtgtcagtgccatgttgtcaagggtgctgggtgggtcactgaggaaggtgcaggcagatgcagggaccaggggtcagacatcctgggtggcactgccccactgggccagatcttcttgggggtgatgggggcctgggggctggctcagtacctgggattagccttgccccagagcagatgggagctctcctcaggggccagggccctggagatttcatctatgggcactggggagtgtgtttccactgaaatgtgtggggtcggggaagggccgctttcccagggcttccagaggacacagcccttctcccttctgcctggcatcatgcggatggagctgataaggggtggtgggggtgcagtgtaccccttgagtgcaggctgctgtctgcacctctgtccctcccctgacccttgtcccaaatcagactctgctggtcctcaggggtgaggtgggagaagttgcattcattaatattgactcagagcaggtgctgagctccacgaaggaggtgaagtgaggagcaggagagatgaggggacagatatttatagtccagtgggatccaggctgagatggatgtctgcataggagtggccatggctgtgtcagtcattcagggaaggctttctggaagaggagccatctgagctgagcctgtggggatgctgggtatcctagagggagtggtgtaaggggagagggagaggagacagcctggtgagggcagagggaaaaaaacgctgagcatttcggcattcctgggaggtctaggggctgtggggcaggggtggccatcagaaggtggggttgcagagctcctagcacctgtaggttagggcgtcctgtctttggtcggggagcagccgactctctcagtttaccttcagg

SEQ ID NO: 25390 - DNA, 1309 bp, Artificial sequence
  DNA replication origin
cggagccgcccgggacgcagggaggagggaaggaggctcggccccagctacccgcggcgccgcgctcctccacgctccgggagggtaagtggcacggggccgggaggccaggcctggggccgggggccgggggccgggggccgggcgggtggggtcctcagcccctggcccagctctgacacagccccgggaatcgggggcgccgaaagtctgggggacctggggaggcgcgcccggcgcgggggcgggggccccggcgtgacagctgcgggcgggcgggtatttttagtttaaatccaaccgttctgtgctggctgcgaaattcccgagcctttcctttcaaccccggggagcttcggccggcccacaagaaaaagccctaaagccccgggcagcgcgccccagcgggccgggtgcctcctcggggcttccctctgcctcccctaggggcgggctgacctgtcaccaaggcttgcgcgcggcgggggcccaatccgctcctggcgaccgcgagcgcgctcagtagtgcctgggagagcagagcaggcggcgaagaggggaagtccaaccccgaatgctcagtttcgttcagacgccttttggctatgcaaacttggcaagcagctcaacctctctgagcctcattcccacatttctaaaggggagggcagtgaggccagagatggcttgcagggcctgagagagcctcagatggatgttgacttcccctggggtcttgggatcttgaccccaaacagcagacccattgatgtggcccattggtcaacccgggagcagtgtcctacaccgcccagctgacctctgcttcaaaactggaagccaggggcctccagcctgggcggggtgataatgaatattttcagttaaccactttggccctgaagctccaaccctgggctttcctgggactctcccaggttcctggtcacccctttcaactctgaagggtcacccttatccctgcactgggtgggggggctttctacagccaagggctgctagtgggatagcttgatgtgtcttgggggcatgccccatcccacatgaatgagggcatgaggagaatggaccgtcctcccagaaaggagagcatgtcataaaatcactgccattctgagcttggcaggacagcgtccttcatccaccaagagaagcagaaacaggcccagagagggggagtgatttgcccagagccacactgcctggctctcttgaagggcctgggcttgccgcctgcacttccagggcagccaacagcccataggagtcaggagctgggaggtgggag

SEQ ID NO: 25391 - DNA, 965 bp, Artificial sequence
  DNA replication origin
cccccggcccccggccccaggcctggcctcccggccccgtgccacttaccctcccggagcgtggaggagcgcggcgccgcgggtagctggggccgagcctccttccctcctccctgcgtcccgggcggctccggggcggggcagggctggggcgggcccggacaccgcgagtacccccgcccccgccgggacccgcccggtggccccgcgggagaggccgcgcccctctccgcacgcgctcagcggaggccccgggtgcgcaaccccagcccggcggacatcctgcgtggccccggggaccagggccgaagaaaagcctcaccgctccctgtcgcggacccggggcgggggttaaggggggggtcctgtccacgcttgcctggaaagcagcccggagccctggcccctgtctgtctccccgacacacacacagccacccaccctcttctcatcctaggggatggcgcggagctgcctctccgggaaagttggatctgtgcgcccagacatggaaaagggattaggacaccggcagatcttgccctcacagagcggaggtgggggccttggaaggggcacaccgcccgtaggcgcgaaatccaagaagaaaatgacactcatcagccagcctcgcgcggggagaaagggcggggtggggggtagtggcaccctgcccgtcctctcccacccccacagtccgggcccacagtccaggagtcacaagggatgtgaatccccaggcataatgtgaacccccaacaaacccaaggcctcagaatgcgcctcacctctccctccccaccagcagaaacatcctcccactctcccaacccctgctccagccacgccaaccctttaaccttgtcccagaatgtctaaactgtatctgcctctgtgcctgtgcacatgaagttgccttggcccggcgtttgctccacagccttctgccaaactcctactgcttg

SEQ ID NO: 25392 - DNA, 1516 bp, Artificial sequence
  DNA replication origin
cagatgcaagaatgcccccgagaactggagaagggaatggagctctcggaaaaagctcagtcagcgcctaagggataggaaaagcttagtagggggtgacacttgaactgagttttgagagaagggtaaagtgcttctatataaaaaggagggacattccaggaagagggagcaaccagggcaaaggcacagaggcccctgggtccactgggagaatgccaggccgtttcttgagaaatgcaggactggacatagctgaggggaggacagatggtaagggactgggctctcctcctctggatgagggagagtcccaggaggagtgtaagctgcagagtgcttgagagatcacccttgcgggagtgttgatggattggaggtggccgagctaacggggccacttaggagagggtcatcagatttaacctttgcaggtattggggtgggggcatgggggaagggcactgctgcaagctgagttctttgaaggtagggatgacagcatttggtgactggctgactgtggggagggggctgggaggaagaggggaagattcaggcttattcctagggttttgcttagccactgactgcacttgatgatgcagggaatacagcgggagggggaaggaggattggaaaggtaagttcaggaattacttttggacatttctgtttccaggtgcctgaggaacatctaaatcatcaggttatgtctgaaataaagggagagagtatgcagattattgcctctacgggtctggatctattgataaaggagatttgggcgggtgggggggcaagaaggagtgcagagaagaaaacctggggaacgcatatcgctggggagggacaggccatgaggagaactaggagcaagtgctttagggaagaggaatttaccagaagccacagagggcctgagcatgagggctcacacctgtagtcccagagctttgggaggccgaggcaggaggattgcttgaggccacatgctctagactagtctgggcaacatagtgaggccccatctctagaaaaagttttaagttagttgggagcagtggtgtgtgcctatagtcctagctacttgggaggctgaggtggaaagataactttagccaaggagttctagcctgcagtgaactatgatagtaccactgcactccagcctgggcaacagagcaaggctgtctcttaaaaaaaaaaaggaagccacagagagaggccaggtaaggacccagggtctcgtggattttgcaatggaggtaaacacagtgtgggctgatgcaatcagtgtttgctgcccttgggcgcttcgcttcacctctaaggggctctgcaacgtgatagagttgggccagtgaatttgtcaggtgtcttctggctgttacttttgtctgtgtgtgaacctttgttttaggccatttctgtagttagtgaacagagcagatagagtccagtcattttgcagaaatgtttccatttggatgatgaaacaagcttgattgctgaa

SEQ ID NO: 25393 - DNA, 1558 bp, Artificial sequence
  DNA replication origin
ggcctccagggggcgggtcggactgccgcgggccggggagcgctctgggtggccagctgtgggcccgggccgtcgtgggctccggcttgcgtgcggagatgagcgggtccctcggccgagctgcggcggctctgctccgctgggggcgcggcgcgggcggcggtggcctttggggtccgggcgtgcgggcggcgggctcgggcgcgggcggcggcggctcggcggagcagttggacgcgctggtgaagaaggacaaggtggtggtcttcctcaaggggacgccggagcagccccagtgcggcttcagcaacgccgtggtgcagatcctgcggctgcacggcgtccgcgattacgcggcctacaacgtgctggacgacccggagctccgacaaggtcaggccagtgtgccgggcaggcgccctccgccccgggcccaggagcatcgctgcacgaggccgaggggttccgccgcgccgggctggggagcggggctccatccgccggggtctgtctgaaggttcgagccgggttagggcgaggagtactgccctggagtagagtctgggctgagggtgtagttgatttcactgggtcttgaggatctggggctctgtactgttgccaacttgagcagtaggtaaagtcctaaaggttcacttatcctcacttcgagctaatataggcgtttcggggcgatttgtcaatgactgactcggaggagggtggcccgctgcctgactgctctgcacggttaggaaactcatagtaaggacccactgtgagataggtactttcgcggacactttggggaggttggaagccattggcctactcgtgggtaaggtctagggctgtcgatggtggggagagggctgaggttgcccttgaggctagtgaggtcggaggctgatctcgcttggctcacggctcagggtgtcaagcatcatcctctgtggttgctacaagcaaagggttgggacagctgtcggctgaccttagtcgggatctatgttgtcggggaagagtcatgacatttggctttagatactcaagcacagggctgaatttatgtgggccagggcttggagaggtttgtggggaaaagaagcagccctggctcctgggccctgggctaactcactggctcagccttggagcccagggggccagggcaccagggaccagatggattaggccgggagagggaaggctgcagctaataagcatcttttccaagtactccacgtgcattcgccagtcttatctgagtaggggaggaggaagaggccaggcacaagggcctgctccttggccaggatggtcagggttggtggaaaactgggaaggctgtaccttttccttctagagagtgacttaggatacctgcatcccagttagagactttcagtgactgagtccctgcatgtccctagctaaaaagaggtgccagttgtgtgctaaaaataggtgccaggttctctgttactctaaattcgaaattactaatcatagtcattgcttacaatgatgagacaggctggtgtttggaaaagctttg

SEQ ID NO: 25394 - DNA, 1252 bp, Artificial sequence
  DNA replication origin
gatttgatgagcacctaatagccgccaggcactgtgtaaggcatgaggatcccgtatgaacatgacaaagtccctggcctgccagaactaatggtctaggggaaggtgcagagaaaaaaagtgggcaattatgatatatagtcctgtgggtgctgctcaggtcaggtgatatggaaacatggagaaagggctcctaacccggattgacggatcacagaaggctgcctggaggagatggcaggagtggaagccataaaggataggcaagagatggccaggagactggaggcaagaggtggtgagtggagggaagagcctctgaaaggtggaatgagcgagcagagtgtaaaggctacgggtggtgagggcgggagtggggagggacggagccagggtgtgagagaagggaatgaaggagctccctggctgcagtgctgaacacccgtgatagggggtgggatgacctcgcagggtgccctggaggtccaggcctgggtgcagtgagtggctgaggcacggagggcaggtcaaggagaaaaaggtatagctggggaggggatgaggatgaagacgggggaaggatgaggggagaccaggatgaggagggggtgtgaggatgagaggggacagggtggggtgagggtgagatttctggctgagcctcagggcacctggcgcccttcctgggggctggaggaggatggggaggggcggtgagctccaggtggtgagctccgtctgggacacacctgcagggcctgcagggcactgaactggaactgcgtggcgcggaggtgggcatcagaaagcccgggaagggggaatctggctggcatcatcacacaaaggacgaccgagtcaccgagtgaggagagctgtgggtcataacaggagaagcagccggcggcagaacacagagggccctgaacattcaggagtcaggcaaggagcacaaggtcctcgcttcccggagtttctggacgtgaacagaaagcaacactttgatgatcatgtgggcaggagagggatgaactttggtggggtgaggggcagggaaaccggacttttaggctctctgagcatcccaccaagtggctgtcggttcagaagacctgtccccagggcgactaatgtctgcacaagaattgactcaggtacagtcagaccctcgaggcctccctggctgtagtgctgagcacccatgatgggggtgggatgatctgaattatgggagggtgctggtaacaaaccc

SEQ ID NO: 25395 - DNA, 1447 bp, Artificial sequence
  DNA replication origin
ttttcctgtgtcctcacatggcagaaagggcaaggggtctcttttgggcctcttttataaaggcactaatctcattgatgtgggcctcaccctcatggcctaatcaccttctaaagaccccaactcctaataccatcatgttggggattaggatttcaacatacaaatatggcatagacacagacattgagaccatagccggagggaaaggagagggaagtcaggagagtgggaaggaaggaaggaaggaaggaaggaaggaaggaaggaaggaaggagataaagaatgggaaggcagggggagaactcaggaaggaaggaaggagggaggtagggagggcaggaaggagggaaggaaggaaggaaggggagaaagaatgggaaggcagggggagaactcaggaaggaagggagggagggagggagggaaaggctgggggagaactcaggaaggaagggagggaggaagggagggagggagggaaaggctcggggagaactctaagcagaaagacaggtgatgaaatgcaggaccattgggcatccaggaagttctggggtgggatcacggagacctgtgccttagctaggctgaaacttaggccagaccaggcctgtcctgctgcgctcagcagggctcatcttgcctcagtgtggctggatgcttgggcaaggctgttggtgcattgaggacatggtacagcctggacagagcaggcaggactgctcattagataagaggctgggttctgagttgttctaggctaagtttggtcagacaagaagttctagagaaaggccagtggttggtctccttctggtggttttgagggaagaggcctcatggtcaggaggcagtaggatatgctagcatcaccccagagcaaaacctgctgagtcttaaagagcccagtctgttataccaggactggctccccagagacagggtggtgttcttttggggctaaaagttcatttgcctcgttcatttgttgaacatttattgagtgtctactatttgctgtgctgagtgctgagacaaaacattgtcccatacttgaaggagcttccaggctattggaggtcatgggtatcaataagtgaacagtttgttccaattcagaacaataagtactgttctggaactgagtgaggtgcagatgagcaggatgtgtgtgtcagggggcacagagaggaccctcaacctaggcttggaggtgaagcaaggcttctgagtattttgcttggccaaaagggtgggaaagatgtttcatttggaaatgcaatatttgggggctcaagagagagcatggtgcctgcagctgggatatgctctggttatgatcctgggggaggctgagggtgaaggatgcatggataccaggctaaggccttggcattttatcttcaaggcacagaggagccagtgataggtgaattttgacca

SEQ ID NO: 25396 - DNA, 1117 bp, Artificial sequence
  DNA replication origin
ggggtcagtgcgcagccctccccacagcctcccctcgtgcccaggactcactctgctgccctgggaggccctggcccattccctacgcgagggattgaaccgcacgaccacagtcacccaggttctcccctcctcatcttcgtagatgccaggcctctggatccacagacggccagggggcacccctagacgcacagaagcttcggaggccatggcaagtctgcaaccgggacccgcctctaggctcacacgtgtagctttccagctgcgcaatctccttaaatggagcagctccggcgtgggtggggcccgggccggcagtgggggcggggccggcagtgggggcggggccagtcgggggaggagggggaggaggaggaagggggaggagggaggagggaggagggaggaggaggaggggggaaaaaagcaacctgcagcaggggctaggcagggacgaggccaaagagcagcggagttaggaacccggcctgggtctcctggaggggctgtggctggaccggcagctgctggaggcaaaagggcggctcccggggatagagctgcccaggcttcaccccaggcctctgcaaggaatttggctcctaagacctattccacctcccttccactggtcccagtccctccgcagcctcctccctgagcacccctgcccaattttctgtcaggtgattcccctcctttgctccccacgaccccctgccaaccatcctgccccagatcctgagctggcatgcacgaccctggtctctcctatccctgtggccattcctttaacaggactctgtgtcagggacccttctctgagcttagagcttagaggcatggggggcggggggcgctgtaacctcagtggactcttgcccctggaggtatctggtgaaggcgcatcctgcacaaatcaagctccctctccttagaaaataagccagtgcactatcagcatctgagctcaggatcagataaagcccacagaaacaaggccaccggaggccacgtggccacctggccagcccatccttggccatggggcccagagtgcccacttggcctggtcgtcttacttgctcgactttgtcaagaggcctcagaagct

SEQ ID NO: 25397 - DNA, 1858 bp, Artificial sequence
  DNA replication origin
gccccccactgcttcctgccccaagccccagagcgcagcttaccagcggcgaccgcgaccgcagcggcggggcgcccacccggccgcaagcacagcagtgcgcacctgcgggaaaggaggaaggggctggcggcgtcggggtccctacaggggaggggcacctcggcggcagcaatcggcgcaggttaaggcattctgggccggggctgcgcgcgagccaggtggtggcaggccgggattggggagggtctctgcgccccccgccccgcggcgccgctgctgatgacgcgcgcgggcttccccggccccgcgtctgcggagccagccccgttacctagcgactcgctccggggagcccccgctgacgcgcgctgcgagccgggctgcggcagccgaggggcggggagggaggggagggggagctccagtgcggggagggccggcggctgcgggccaagctcctccctccgcttccctctccgcgttggggagggggcccgggaaagacgtggcctccgcctggccctggaggatgggaggccttcgcggggcgggggggacggagggaggcactgagtgcccctgtccccgcagtggggatgcagcagcaggtggcggctatgtggcctgtggaggctcggcacccagaggcgcgcggtgagcccgccccggcgggagcgtggcgaatgtggctttgggcgcgcgggtgtgtgggacacgctcccacccacgtggcgtacatggggacctggggacgcgggtgaaagaggcgcctcctccttcctctggtctctctccctccttcctggacattttgctcctgcgctgtctctttcttcatcatggaagcccaggttgctccgttccccactcccagctccttatatcttccagggaacaggcggatggcctggcagctgaaggtagttaagtcgtggtcaaaccactatacccccaatccctgccgccctttggcgcctccccagcccatccccatgtccagttgcccgccttgtaggccctctaacctgcctcggggcgccttccactttcttggaagacttgggacctctgacacagactggggttcaaatccaggcccctccaattgctttcagtacacaggacattttaacgtcttcaggaagatggagtccttgtctccaaaggtcatagctaagtactagtacctaaggccttccatgaatgtgaacatgattttctagaagataagcagcctgtctcctggttctctgggacctcaccaaaatccaccccaacgtccagggaagtaaggcaagtgccgggaaacatggtcagagcaagcagcgaccatggtctctatcgacgaggaggcaaattgcccaggtctgctgggtgcctcagaagcagagctgggggaagaacccagacatcctggttagcaggttcccagggcccaccgctgtgccccttccccagttggatggtgcaaggaaccttctgcccctacttctcagaagatcctcctgcctaccaaaaggctgcttccctcccatccctgctacagaataggaatcacctaccacctcgtccacaacaccaacccataccctccctagctggcctttctgtcttcctcatggtatggatgtggggagaaagatgcagaggagagactcagcagagatttaggggaatcaggcctgcccaggaacacccacaccccagccctgcagctctacaggacagagtccctccatgaggggctttgggaaacagcagagtctgagtggtttttgttggcttagtgacaagacatttcctccaattattattattattgagatgccagtaactcctattgaaaaaccctgca

SEQ ID NO: 25398 - DNA, 1023 bp, Artificial sequence
  DNA replication origin
agaagcagggaggggggtggcagagaggggcagagggagagggagagagggatggagggagagggagagagggatggagggaaagggagagagagagggagaggcagagagggagggagaaggagagagggatggagggagagggagagaggaatggagggagagggagagagagagggagaggcagagagggagggagaaggagagagggatggagggagagggagagagggagggagagggagagagggatggagggagagggagagggagagagggatggagggagagggagagggatggagggagagggatggagggagagggagagagggatggagggagaaggagagggatggagggagagggagagggatggagggagagggatggagggagagggagagagggacggagggagagggagagggagagagggacagagggagagggagagggagagagggacggagggagagggagagggagagagggatggagggagagggagagagggatggagggagagggagagggagagagggacggagggaaagggggagggagagagggacggagggagagggatggagggagagggagaggcagagagggagggaaagagggatatgtccttgaagcttgctgtaaagcacactacctgagaccactctaggggatcatgggggagagatggacaatgcttgggatgctttaaagagcaaggctgcatggttcgtagcaaaacactgacaatgaccttaagggtcagcagtaagagaacagggtaatttgtgatggtacatctaaaccacagaacactgaacaaccatcacgagggcttgcccatatagatccattgatgtggaagcgtattcataattgccaatgacaaaattatttggaggcactgctcatagcatgaggccattttttataaattacaatatccaatctattgtttataggtcaatgtctggatgggcattcaaggatatcgtctagaacatcttacgacccaag

SEQ ID NO: 25399 - DNA, 963 bp, Artificial sequence
  DNA replication origin
ttctggaaaagtttccccattactccctaatggaattggagaaagtaaacaaatacggctcttaacaaagagtcttttaagagaaaatttacagccatgtaatcttgcttctcctggcaacatgtagcccatcttctgggaaaagtatccacagttttatgtaacatgtttatgaacaacacaaaatattgacagtctgttcatcccatctgcttcccatgacagggaggaatcattgcatagtggtgccagagggtctccgggtccacaaggggatctttctggaggtgtcctgttataggggtcctgccttcagggagatggaggccacagaagtctcctaggtgagctcttttggaagaggaatcaggaatttggcctctggaactttctcttcttaatgcgtggcatgctcctagccagtctgggctcatgaagtcactggtaggaaagtgcctaaatggccaatggggttgttggtgtggagaacagtgagacagggaagggggtgggctttctcatgctctgcaggcagctggtgggaaggggccctgagttaagcatgggggtggcaacatgtaaaggagaggaaagtgagcgaggccctggtgtttagaggaggaggaaggggaaagagaaagaaggaataataaagaaagggacagagggagaggcagaggcagagagggagggaggaagaaggggaggcagacaggaacagaaggagaaggagatagggagggagggagagggagagggagggacagagagaggcagagagagggaggcagagagagggagaagcagggagagagggagggagagggagaagcagggaggggggtggcagagaggggcagagggagagggagagagggatggagggagagggagagagggatggagggaaagggagagagagagggagaggcagagagggagggagaaggagagagggatgga

SEQ ID NO: 25400 - DNA, 1165 bp, Artificial sequence
  DNA replication origin
ccaagtgggggtgtccggctcgggacaaaggaccgggacgcggatcgcgggcgggcgccactgcccagccccagcgtggagggcgagaccgtggccccgaacctccccaaacttggcggcccggggcgcgtgggggggacgccccgttacctgcgcggccataaaggagagatccatggtgtcgctgcagccagcgctcgagtcctcgctgctgccgctgccgctgcgggtcagccgcctgcacagttggcggggatcgggctgagcagcgagcgtccggagaccgcacggcgcactcggctgtctctgggcttctggctccagatctctactaggcggagggccccgagcgcgggggcgggcggggcggggtggggcggggctcggcggacggggcgcccctccacgtgaccactccccgccccacccccggggcggggtccgtcagaaaccccaagcgctcgcaatcgcctcccttcgtgggcgggatggggaaactgaggcccgaggccgccccgctggttggtgcaagaaccagcctgcaacccaagtcctgagctgttggcgccccgccccgtgcagttgaacccaacccacccggggctgtgggcagcgctctcttggggctgacacgttatcccgagcctgaggaccaagatcggagtgacctggctttccacgccaacgctcctcccagagtccggtgtactcccggctcggcatctgggcagaacgaggtttaatcctagccctgctttgttgtgcagcttgagcaagatagtgtctttgagcctagatttcctcatctgtgaaaagagaatacagaaccgaataattaaatgagatagggaatatagcacgcggtgtcctcaataaatgagagccctaacatggctaatcatccaatagagacgaggctgtgagtggtgtcttcgaggaccgcacggtgctcaggttgcacagcgggtactccatggctctcagctcaaaccagtatcgaaaatcatgcaggtgccacagttcaagtaaggggaacagaagagacgcccacaggggcccattgctctgtatgtgtgtgtgtgtgtgtgtgtgtgtgtggtggacaccacagacttggtgacacgtggaggctttgccctccgggggctcactgggagggaaccag

SEQ ID NO: 25401 - DNA, 808 bp, Artificial sequence
  DNA replication origin
gctgggggtgttcatcttgacagggagaaagcgggaccagcttcccagctcagggagtcctaggctggcacatggggacagaggtggcttccatggccatttgaagggcagatgagtgagaattctgggggatccatgaaatggaataggaagggtatagactgaggagtcagccagaaactgggttcacagctggctgcagcctctctttctctggccaaggggtgtttatcaagcacctggcatgtgcctgcctgcggatcagtggatggcacagacacagcccttgccctctgcacgttcatggtgacacgggagaacagcaaatcaacaagctcaccactccatagaggaggtatgctgcatgcagggagggcagaaggcacctccctaagctgctgcatagggagggcagaaggcaccgtcttcgtcaggatggcaggggaggcccctgaggaggagccactgagcttgtgccttggggaggagaggcgctggacatggggggcaaggggagagctttcctgacatagccagtggcctgcggcagcacggggcaggtgaggaggcctgcagagggtggtgatgggggctggggattgctgagagacggtcggaggtgtggggcactggtgagagacggtcggagatgtggggtcctggggctcacacccggcaaggtgagagggtgtttgggttttattgtgggtgcagtggaaaccagaggatggcataccttcttaaaaatttctctggacagtggttgccaaggggttgggggttgggaggactttgaccacaaatggga

SEQ ID NO: 25402 - DNA, 1630 bp, Artificial sequence
  DNA replication origin
gctgaggcagccaccgccactgccgccgcgcgacgaatttgttgtcatccgcgaggcgcgttcccggctgtagggacgctcctggcgcgttcacgagacccagactcccggcgcgccgccgggcgctggcggaagtgacgccacactggggccgcggaaggcgggcagaagggcgggggctggagcagttccggctccgagggggcggggcggaagaaggcggggagggagggggcggcaccgccggtcggctccagtcgcctccggaggaaggaagaagaggacgccgggcgcgcaggtgagcggcagccggggtggctgcgggcgaggggcggcccccgagaagggctaggggctcggggcgccggcgggccgtcaggccttccggatggggacgcgacgccatgcagctggctgggccgagaggggcggcaggctgcaggggccccgcgcccgtgttaagaggggtctgggggccggtctggccggcctggctctcccggctcccctcagacctcggcgccccggaaacgcacacttggggctccgccgtctccgctgggaggactggagcccttctcgagcatccccgcccgcacccgagcattgaccggtgcccattgtcagcaagttcttcggcccccgcctcattcaggtattgtttctgaggcagcttcttcgttgccgtttgcctggcggtttgcagagcgcttctcgcatacgctcgcttaatcctgggtgtgtcatagcaacgatcaggaaacttgggttttcgaagcatctgtgggcaaaactgcattccttgagaaatgctaaaggctcctgaccccgccggaacctgggtgaagaacttgggctgttctggcagtctgcgcaatcgtatttctgccttttgggaggtaactcctgcagaggcggagccggctgttaagttaagtcaacctcgaaaggcctgggtgcgggtgttctatggcccagaagccagatgtccttcgttagaatcccggcactgacacctattagccgcccagccactttgagcggccactgccctccccgagcccacgttgcctcctttgccgagtgtgagcggattaaaatcttatgtgcatggatttgttgggaagattaaatgatatgagtagggcacgaacctgaacagagtcctgaaacatacagctgtttaatcacagtgaattaagacgaccagtttaaggagtgaaatgtttactgtctcggcaactttcatgaatgccttggaaatacagcccaaaatattggtagatggagaaacatctggttcccctttccacaaccaccttttcgttttagaaccagggtactttgtatgcagttgcttggattgttgatttccctcattctttgtagactcatctcaagtattctcagtaacttagattcccttgctcttcattcagaaatatttgttaaggtccattaaatgaaagtcaccacagttgatcatgtgaacagtgtcaagaatcaggccgaaccttcaaggagtttatgttctaaaacggaagcatggtggtacctgcttgtggaggctgaggcggaaggatcgcttgagcccaggactttgaggctgcataattgcattgacgctatc

SEQ ID NO: 25403 - DNA, 1876 bp, Artificial sequence
  DNA replication origin
accatcctaaagcagtccattgtaacaatgcactattttatcaggccttcaactctgtctcacaagcatggcacaggtttatttaaaatagttcccccccccagttaattgttatgacctggtatttcaagggtgctttaaagtgaatttctttgcttaatagctagaaatagtatttttgcttgggtttactctttgtacagtttcttcaaagagtacacaaaagtgtacaatttgtacacttactattgtacagtgtgattttatacctgttcttcgttcttcctcaattggcaatagcagcagtgatcacagtagaggtaataataacagtagtagcaggagtggtggtagcagcagcgagcagtggaagcggtctcagcagtggtggcaatgccggtggcactagcagtagtagcagtggtggcagtagcagcagcagctgtattgatagcagcagtactggcagcagtagcaatcgtaatggtagtagcagcgattgtggtagcagtggtagcatcagcgcagtgctaacagtagcagcaacagcagtactagtgacggtggtattagtgatagtggtagtgttgttttgataatagtggtgctggcagtggcagtaatggtggtcatggtggtgggagcagcagcagtgttggtcattgtgggagtagcaacagttgtggtcatggcagtaataccactggtagcaatggtggtagtggtgacagtagcaacagcggtggtaatggtggcaatagcagtagtagcagtggtggcagtggtggtgggattagcgcagcagtggtggcagtggtggtgggattagcggcagtggtagtggtggtgggattagcggcagtggtagtggtggtgggattagcgcagcagtggtggcggtggtggtggcaggattagcagcagtgatggttgtggtggtgggattagcagcagtggtggcggtggtggtggcaggattagcagcagtgatggttgtggtggtgggattagcagcagtggtggcggtggtggtggcaggattagcagcagtgatggttgtggtggtgggattagcgcagcagtggtggcggtggtggtggcaggattagcagcagtgatggttgtggtggtgggattagcagcagtggtggcggtggtggtggcaggattagcagcagtgatggttgtggtggtgggattagcggcagtggtagtggtggtgggattagcgcagcagtggtggcggtggtggtggcaggattagcagcagtgatggttgtggtggtgggattagcggcagtggtagtggtggtgggattagcgcagcagtggtggcggtggtggtggcaggattagcagcactggtggtcgtggtggtgggagcagcagtggtggcatccgtggtggcagtagtaaaagctgctgtgtcttgagcgttgccaagtgccacgcattcagtccacccaacaactctgtgatggtttttgcctactcccctttcacaggtgaggagagacaagtggacaggagagtgggggtctatttgccaggcattccaggggtgagttcctgctgggcctggacggtgggtggaggggagtgagggtgggtgtgagtgagggactgattctgaaatttggcgctcattctggaagcaacaggaggccattatcgcttcgttctgctagcaccataattaagcacaggccttctttccccagatttgggttttgtccatctcatatttctccatagaatctagcatcaagctatgcagcagtagcactgaatgagtactgagtgaattcatgatgtagccccagtgatgtttcaaatgcagtcctgaccctgccaacacctgctcagaaccctccct

SEQ ID NO: 25404 - DNA, 771 bp, Artificial sequence
  DNA replication origin
ctgggtggaggggaccagtgtggacacagcccaagcccctgggtggaggggaccagtgtggacacagcctgagtccctgaggggaaggggactagtgtagacagagcctgagtccctgaggggaggggtccagtgtggacacagcctgagcccctgaggggaggagacaagtgtggacacagccttagcccctgagggaaggggactagtgtagacagagcctgagcctctgaggggaggggaccagtgtggacagagcctgagcctctgaggggaggggaccagtgtggacagagtctgagcccctgagggaaagggaccagtgtggacgcagcctgagcccctgggggaggagaccagtgtggacacagcctgaggccctggggggaggggaccagtgtagacacagcctgagcctctggggggaggggaccagtgtagacacagcctgagcctctggggggaggggaccagtgtggacacagcctgagcccctggggggaggggaccagtgtggacacagcctgagcctcttgggggaagtgactgagggcagaaggtaaggaggagaaaggcttgggtgcagggagggtaggtagttactcaggcaaagggaggagtgtgttttacatgggccacagaggaaaatgagctggccatgttaccactaaggaacgtatccaagtcacacagcaccaaattacgttagtggcagcaaatccatacgggtttgcagccacctcagttcttaactcctcaaaagaaagaatt

SEQ ID NO: 25405 - DNA, 1188 bp, Artificial sequence
  DNA replication origin
caggtgagatataccatcacgaaaaattaactcaaggccacaaaataggaagcattcagaaaggaagttagaatcaccaattttttgtcttgctatgctttgttttgtttcattttgttgtctttaatttcctgtatgggacctctggaattgttgcttgtcccagtgaacaaaaatatttttatacccaagtcacatggatgcataatggagtgctgttggattttattggatagatggatagctggatggatgaatggatggataggtagatggataggggaatggatagctggatagatgggtgaatggataggtagatggatggggaatagataggtagatgaatgaagggatggttaggtagatggatgggggatggataggtcgatggatgggggaatgatagaagaataggtgaagggatagttggatggatgggtgaatggataggtggatggaaagggggatggatagggggatggatggatggatggatggatggatggatggatggatggatacacggatggatggatggatacacggatggatggatggatacatggatggatgaatacatggatgggaggatgggtagatggatggataggtggagggatagttggttggataggtggatggatagttggagggatagttagatggttaggtggatggttaggggaatggatggatggatggatggatggaaggatggatggatggctatgtagatggataggggatgtttgggtagacagattgggggatgaatagatggatgtataggtggagaaatggatggatgggtggatggatagggggacatatgggggaattggatggatggatacctaaatggatggaaggatagatgagctcagaggtgagtcaaaaagtgatgattcgcaggtaaggctggagccggccctttggggtatcaaatatcttgctaagagtttagattatgttcaaggtggagggtttgaagttgggaacgacatggccaggtctgcatggtagaaagattgctctggcttcagtgtgtgcaagcaaagtgggcagtgataatggaagcaaggtgatgagagaggagtctgctgcaaactcccacctatgaaataatacagcccaagagaaagtgctgaaagagatcaggagaactgaacaggttggggatgttag

SEQ ID NO: 25406 - DNA, 1515 bp, Artificial sequence
  DNA replication origin
tgtgtgtgaagtgagtgcggtgtgtgtgtgtgtgtgtgtgtgattggcagagtgatggcctctcaaagacatccacgtcccaatccctagaaccgagggctctgtcacacgctgcaaggcaaaggggaatgaagactgcgggtgggatgaaggtttcccaagggctgaccttaaaatggagactatcctgggtgatcctggtgggcccaatgtcatcacaagggtccttaagactgagagcaggaggtgggggaggaggccacagtgctgcccccggaggcaggcctgccctacctctgctggctgcgaagatggaggaaggggcccagagttgagggacgtgggccacctccagaagcctggaaaggtgagaaagggcttctctactggatcccccagagggagggcggctttgctagcacttgatgttagcccagagggacacatgttggatttgaatgcccagaagagaaaggcaatatatttgtattaagtcactaaatctgtggtaatttgttatagcagggataggaaattcatatagtgtttgtgtgtgagtgtgaatggaatgtgtatgtgaggtgtgtgcatgtgtgtgaatgactgagttgtggcctgtgtgtgtcttgggggggtgagtgtgagtgaacaggtgtgaatgtgtgtgggtgactgtgagtgagcagaggtgtgggtgagtgtgaattagtgagtgtatgtgagcgtgagtgagcaggtataagtgtgtgtgggtgaatgtgagtgtgactgtgtgggtgagaacaaacgagtgtgggtgagtgtaagtgagcaggtatgagtgtaagtatgtgggtgagtgtgagtgagcaggtgtgtgagtgtgtggggggtgtgagtgagcaggtgtgtgttagtgagcaggtgtgagcatgagtgtgtaggggtgaatgtgagtgtgtgggtgagtgcaagtgagcaagtgagtgtgtgggtgagtgtgaacgagtgggtgtatgtgtggataaatgtgtgtatgactgagtgtgactgggtgtgagtgtgtgagcatgtgtgtgagtgagcgggtgtgagcatgagtgtgtgtgtgagtgggagtgtgtgtgggtttgagtgagttggcgtgtgtgagtgagcaggtgtgaccgtatgtgtatgcaagtgagcaggaatgagcatgtgtgggtgtgaatgaacgtgagtgtgagtgagtgggtgtgagcataactgtgtgtgagtgcacgtgagcaggtgtgagtgtgtgagtgagccggtgtgagtgagccagtgtgtgtgtgaatgcgactgagcaagtgtgagcatgagtgcatgtgtgagtgagcatgtgtgagtctgtgtgagctggtctgtgcgtgtgagtgagcgggtgttagcatgagtttatgtgggtgtgagtgagctggtttgtgtgagtgcgagtgagcacgtgtgactgtgagtaagcgtgtgtgtgtgagtgtgagtgagcatgtgtgagcctgtgtgtgggtgtgt

SEQ ID NO: 25407 - DNA, 999 bp, Artificial sequence
  DNA replication origin
ctgttttgctacaggaagtgtattggtcaggccctggcaggaaataggacaccctcaaattgggtcatttgaggagaatttagcagatgtgccatctgcaaaggggtgaggagggagaagggtcatgataagagacagtgcagtgccctggactcagcacctgcagtagaggcaggaggaagagctccctgggatggggatgcagagagagctggggatggggagatgtagcccacctgcctgtggtgagcctgggagagagtgctggggaggaaatacccgcccacctcactctccttcccacagagctgagcagcagcagcagcagcaacagcaggtctcctgtggctcagcaagttgcacagcatagcaggtgctcacaagtgaccaaggggcagcacgtctgtagagcgcgtggcctttgagatggcctgggtggggtggccgtggaatttgggctggtggagcagcaggctggggtccaagagttgggggatgacgcttgatctgggtggagggagttttcaagttcagagtcggggtgggtaaggccaggagctggggtctggattggacaggggcccaggctggaccagataggagggtagggagggctgattcctgtccctcacgtgaagggtctttgattccacaggacatgagcatccactgatggggtgaagagaggagagccttgttctgggaagaggactgcagtgatatggattggactggggagacgctggagatggggacctgttggggttactgtgttgtccaggtgggaagttaagagggtctgggtcccagtggagaggagaatggaggcagaagtcctgaggctcttgcagaggaaggacaggactggataacagggatcacgggggaggagagggagagacgccttggccccgagccaggtgatacccgcagagggaggctcatccttcccatatccaaggaaagtcctggtggattttcctcttactggcatggaaa

SEQ ID NO: 25408 - DNA, 2379 bp, Artificial sequence
  DNA replication origin
gatctcagctcactgcaatctctgcctcctgggttcaagtgattctcttgccttggcctcctgagtagctgggattacaggctcccgccaccatgcctggctaatttttgtatttttagtagagatggggtttcaccatgttggccaggctggtctcaaactcctgacctcaggtgatctgtccgccttggcctcccgaagtgctgggattataggcatgagccactgcacccgggcagttctcgtatacttccatagcatggagcttttactctcgttctgtagatgaagaaactgaggctcagagagcttaaccaacttgtgtaagtccccagccaataagtggcagatgggaccttgaaccatgaggaggaggaaagtggtcagtagtaatattaatagaaaaccttcactgaatgtttgtcatgtgtcagggacactccctcatataattctcacaacagaattacttacaaggtgggcatgatactctgcccaaaataaagatgacacagcagaggctcagagaggttaaggaactcaccctaggtcacacagctagagagtggtaaagctgtaacttgagcccaggtctttctgcttctaacactcagattgccacaccacccttgtactgcagtgatcacattatgtcttctacagtctgctattggtaaagatctctattcttagtccccagacttatataaaatatcacttacattgtggatgcccctccaagtgcacatgggtatgaagaaatgcctgacacagatggtgcaggagaacaaggggctgccttgggctgggccactgtcagtgtccatggccttgggcaagtctcagcctgtccttgcatctgtggacacagaggctgggcctctaggagaggctggtggtgagcctccagttctattgtcccccatcagcctggggcagtcactgacatcagcgatacctgcagggagagccactgagtgagcgtccgtcccctgggagtcgttgctggtggctggtgaagagagaggattcggccttggagaggctggatttgggagcctttccttcaccatctcaggagaagagaaagtatcacagggcacctggcaggtgaatggccaatgaaaaaagagttttgtagaaagtttcccatgctctgcaagactctggctgaaggagggtaaaacagtggggctgggctggggctggactgggctgggctgggctgaactgagctgagctgggctggggttagggctgggctaagtagggttggggctgggctggggtgagctgggactggactggactggactgggctgggctgggctagggctgggctatggctggactgggctgggttgggttgaggttgggctggggctgggctgggctggggctggtctcatctggcctgggctgggccaagctgggctgggttgagctgggctaggtctggtctgatctggcctggtctggtctggggctgaggctgggttggggctgaggtgatctgaaccgagctgagctgagctggggttagggctaggctgggctgggttgggttgggttggggctgggctgggttgggttgggttgggttggggctgggctggggtgagctcgggctgggctagactggactgggctgggctggactgggctaagtctggtctgatctggtctggtctggggctgaggctgggttggggctgagctgatctggtctggtctgggctgaggctgaagctgggacttggctgggctgggctgggttgggttgggtctgggctggggctggggctgagctgggctgggtctgagctggtctggtctggtctgggctgagctgggctgagctggtctgggctggactggtctggtctggactaggctggtctgggctggcctggtctggtctggactaggctggtctgggctggcctggtctggtctggagtggggtgggctgggctgggctggggtactgctgggatccaaactgtgtctgctctggcagaggtgagaggtgggtggttgtttagggaggtgggggctgggagtggggctccaagggtcttgggaaggggaatgaacactggccttgaaggcagagacttggggtcttggcaactgtgatcaagttactttactgctcagagcctcagcctgcccgtcggtagagtagttgtgatagcacagcccccagagtggaggctgaggtaaggaatagacacagaacctggtatacaggaagcactcagtggacagctattgtctacctctccattaaggtccttgtcacatctctctttgcaaatggtcatggactaaggctgttatttgacattccctgtgctcctttagccccaagcctag

SEQ ID NO: 25409 - DNA, 1238 bp, Artificial sequence
  DNA replication origin
agagagcaccttatgcatgctccaagggtgctgggctaacttcattatgcacaagaggctcctcctccctctgtgcctggacggggctgaaatgaggctattcacggaagaactacatttcccagaaccctctatgttcggtgtagccacatgactagctcttaccaatgggatgttaaggagaaggcagggactcttaagaaccaaatcttcattactcttttctcttccactatctgcaagcagagaagtctgaggtcccagggactggcaaagccacaggatgaaaggaacttgaggctctccttcactacctgcaggaaaagcacctgtcgcaacaaggagcccttgcactgaatggttgcataagtgagaaacgaagttctattgtgttaaacctctgaaattgtggtttttatttgtaacagcagctggcactgccctggggtggcaggtcgggtgggggagaagtgggtaaattaggggcaggaaaatcatttgaggagttgttggggtgggagaaatgagagagcccaaagagataggtatgatgtaggaagtgctcagaaaggggggcccagatggcccacacggaggtggcttctggctgactggaaggtggagcaatttcctgagacagcagaaggggatagtttgggatgggtggggctgcggtgacaagtttgatcctggccatgatgagttggagcatctgtggaccacctagtggagaagcctgagaagcagtagattgtctgaagctccaacgagaggcagcaggaactggggctggaaccacagatttgagagctggtgggtggctgctgaagtagcaagttcagccttgggcaaaatgcctcggacttgatcttgaaggcgttaaggaggcattggtgggttttgagccaggagtgctgcgactggatttgcatttggggaagttcattctggtagccaggaggaggaggctgtagcagacggggtgagcatagaggcagagaggcctgaggaccctgctgctgtagcccaggaggaaagacggtgatgtggctgtgggctgggaagaaggggtggaggtggagaaatgaaggaggggaaatttgctcctgagacctggctttgttggctgggggagggccggaaagggcgggaaggagtcaggatagagagggggctttgctgcacacagaccgctgggtttaatccctgggagaaggcctttctgcacagagcccatt

SEQ ID NO: 25410 - DNA, 1280 bp, Artificial sequence
  DNA replication origin
cgtcatgcgcagcaggttgaaggggttgctgtcgcccaggaaattcatgagcggggactgcgccacggcctccggcccgagcggcggcgggatggtgagccgcggcgtgagcgagctgctggccggcccgggctccaggtagatgcggaagccgtgcgtgttctgcgcgtgctgcagcaggaaccacgcgctgttgaagggctgcttgcatgttgtgcaaatgtagctggaaggctcatctttacctggggaaacacacggacagaaaggcagagacagcgtgagaagcggcagcggggcgcgggcaccgcagggccactggcctgggggacgcggcccgggctgatccgggatcccagtgccctgcctgacaggggctgcagggccgcttgcaagcaggcccggccttgtctcctcctggctggggggccgaagacgcaggtctgtgggcgggccgccctggccacccgggcgccagcgacttacttcaattgtgtaagacccgccttgctcccccaaagaaaagggattctgatctccattacctccgaggccacgggagatcgtgtttgtgagaatacggtccagtagtaggaattctgtcaaggctggactgtgtaacagccctggcaaatcccagccctcgaggatgctccacacccgaaaccatctaggccagggcttctcagtcaaggcactactgacatttacatcctaattctttgggcggtgggggctgtcctgcgcattgcaggatgtttagcaacatcctctgcctgcacccactagatagatgccaggagcatccacctcccccggttgcgaggaccaaaaatgtctccaggccttgccgaatcttcccagggaggggggcaagatcaccgacccctttgagaacaaccaattctgataatatttgattccagggagttgtacagaaacacaaatcaaactgtactatcctgcaaacttttttttttttaagagaaatagctgcaatacctctgcaacatttgggatttttagctataggaaattctcgtgtttcctacaccaccgtctgtgcagaaagcactgtacacctgaatatggattcctaggaacagaaaaaatttaacatgctgtgaagaccggctactactgtgacagctgcccccaccccgtgtcctcacacacacgcccaaacaccgcttggaattccacctccagaccccagggaaggcgggggcacactggcctacatgagtctttcaaagtcctctgccagaatactaagcaat

SEQ ID NO: 25411 - DNA, 1432 bp, Artificial sequence
  DNA replication origin
cccgccttcctcggacccaggccgagtgggggaggggagtgtcaggggaggaagaaaggagcgcgccttcccagcgaggccagacgcgggctgggtcagctgcgcctccgcccgcccctcgccgcccggctcaggcagctgctccattaagcccccgaattatgcatggaccttgagccctctcggccctcccgccccaccaaggcacaatcaacgtgcgcagcgggcgcgggtcaaagagagagggaaggaggtggacgatgggcgcaaggccgtgggcgaatcagaggccggcggccaggcgggggccaggcgcgcccgcaggcctgggaacagtgccgaggagcctcccgacccggccagggccagccgggaaaggggcaccgctcgcaggggaggcccccgcgcagttttgaagttgccaaagtgtccgcgccgtgccgggtgcggggtccgggagatgcagccgcccccgcggagctctgcgcccctggcctcggggaaggccattgtgttctcctgtgtggcaatgaagggggctatggaccccaaccattgagcccttggagggaggggcctgaagacccctcgggcagggcgggggaggctgtcttgcgggcggcggagaggatgggtatgatttgctcgggataggcaccgtcgcggggaggggaggaggccaagcttgaggaggggctgctggagatggaaggaagtgagaggagacttgcaagttgcaaacgtcggggaaaccggaaaattgcagtagcggggaggcaggtggcgcccagaggttcgaaagcagaattgggaggacttcgatgtccacctcgcagacagtgacccaggccccagagggctccgcagcctggagcctcgcgtcccgcctccccgcaacacgctgttttcagcgttccagaccacagcgctgcagtctacgctgccctgacgctggagtgtggaccttgttttgctcctcggggcccgtctgtttctggaaatgacttctttctctctttccccttctccccaaagcaaaggccaggtcaggaaaattatatacttcgttttcccaacaaataaagtcgcctagtttgcagggaaagttttacaagccaatgatgcagagagaagaccacactgtttagctttcttaattggctggctttgaacttgaggtgggaggagaaaagaacccgctccagccccaggaaaacttagttttgctgggtttaccaactccaacagtttttagccagctgctgaaggtggcagggagtcactgaaggtttgtcccattttctcccgaacagagaagaattcagacagttgttgtctctctgagcccaggacagccagtctctgccctcaaaccccaagggaggagcctggaatccctggttggctggctacactctccaggaggtgtgct

SEQ ID NO: 25412 - DNA, 1043 bp, Artificial sequence
  DNA replication origin
gccagctgacactggagcagtggcagggagggaaaaagagagaggcaaaggagaagagaggtggagagaaaaaggggaaggagaccagagggcaaaggaaagccggcctgcctttgaggggcacacggagcccaggctatgtgtacaggtttaagctaggagagtggtccaaccagttttcagacaaggctatttattatccaaaagcagctggcttttcgtctgtcctgtgtcacctgggagggaggtgggagagcaagcaggggaaaggcaggaatggggtgcactttagcctctctggcctctggaagtgcctctccacaaatgatgcaggagccgtggactcagggtgctttggagccctggctggcaaagcgggtgctgtcgcatcctctacttggagttcacattttagattttaaattccaaagataccccttaaaacatggtacatctttatcagttgggtggcagctcctgggcctgtggggcagcaacctcaggtccttcagggatgatgcaactgcaaataactgatggcctgggaaacaagagggcacacaaatagcacgcatggtctttgtgggtgggtggcggtggggaggggagaggggggagggagcgtctgagaagggctccataatgagctagttaaatttacagacagggccagggacaagaggagtgaggtaaaaaagagtgagagacagctggtgatggaaacctgggcttctggtttgcttcaaaatgtttgacccagatggatatggcttttaaaagcagaggacagacacagctattaataaaaaaacaaacacaaaacaacacagtggcaatcgtgccgaggggaggttaagggggatcggctgaccacgcagaggaaagggccagagcccgctgtgccagacagggccagggtgaagggaagagtacttaaatccaagaaggagcttgatgctttctgaagagaccaaggaaaataagatgtccacggtaaactgcgtaaccccagtcaaggtgattttctcaacaacccaccaaca

SEQ ID NO: 25413 - DNA, 1200 bp, Artificial sequence
  DNA replication origin
cctgaaaacccagcataggagccatctgctcggagcaattgctgttgccatctctcctttgttacagcagatacattagtaagaatttgtggatttattatgattttttttgggggggggggaatagaaattaaagtgggattcgccttgggagagggatgcctctttggaggaagggaagaggacttctcttttatttttcgccgttgtaacaccaaagaagactcgccggctgcgtttaaaacaaaatgttttgcagctagatttgagcttggtttgatcaaggtcttttttgccagttgacatttcgatcctttaccaagccacagcaatcgcttattctacacccttccccctttagatggggtggttgttaaaacgtctatacttgcagaggcttaatttctccaggaggcaatttgccccacgtagcctctgtataattgcaagggttgtttttgaggagggggaattgggggggtcggggaagggggagtggatgggggtgcactgccaagctggcagcagcggcgagccaggagtggttgcagttgtgtgtaaggggaagaagcaggtaggttcgctttgctttggctctccttctcctggcattcctgggacatcaggcgagagccctggccagaggactggtggcagctgggcatgggggtgaggggtgcctggtgcagcactttcccatccttcatttgttccctgtctcgctcagccctgctcagagccacgctggggaaagccagctgacactggagcagtggcagggagggaaaaagagagaggcaaaggagaagagaggtggagagaaaaaggggaaggagaccagagggcaaaggaaagccggcctgcctttgaggggcacacggagcccaggctatgtgtacaggtttaagctaggagagtggtccaaccagttttcagacaaggctatttattatccaaaagcagctggcttttcgtctgtcctgtgtcacctgggagggaggtgggagagcaagcaggggaaaggcaggaatggggtgcactttagcctctctggcctctggaagtgcctctccacaaatgatgcaggagccgtggactcagggtgctttggagccctggctggcaaagcgggtgctgtcgcatcctctacttggagttcacattttagattttaaattccaaagataccccttaaaacat

SEQ ID NO: 25414 - DNA, 1019 bp, Artificial sequence
  DNA replication origin
actgtgtgtgtgtgtgtgtgagtgtgcgcgcgcgcgcgagtgtgtctctgtgtgtgctttcttgttctcttacagggtacaatgttaaaaagccaccgctagtcgcccccagtgctccgactctctgggtctttttgtctctagtgcagattaaacgtcacgtccgcacttgaacttgaattttatcccattgtacagaggcagccccagccatagagagaccgagagctcccagagaacccggactccgccatcttcacgttgcaatctatagctcccagtctgcgcccgcaccgacccaggcgcactgggcgagccgcccctccgccccgctccccccgggcccgcggcgccaggggagcgctggggagcgctcgcggggactcggcagcccctccggccggcgccagcctgccaggtgaactgggaaggagcctctcctggtgtccccccagagcctcggaagggtcagtctccgagaaaaaacaaaaacaaaaacaaaaacaggcagcccgcagaaaacccagaaacaaccgaaccggggcagttttacattgctttgggttttttgagggggcggggtgagggggtacgagacaagtccccaagttttctttgcttttttttttcctttgctttttcttcttttatttttttatttgtttgcattttttttcccctcctggtagaagtgcgctttccacctaccagaccctgaaagaaagtgtcaggagccggtgcaaaacccagtttaagttcaagaagacatttgcaagtgcaagaggccaagcagtttgaagaagtgtaagagattttttttccttcgaaagaatatatttttaaagaaaccagccagtccgcggaaagcaacagcagttttttttttttttgcctctttttcttattttagatcgagaggtttttcttgcttttcttcccttttttttctttttgcaaacaaaacaaaaaacagcatagaagaaagagcaaaataaagaagaagaagaggaggaagagag

SEQ ID NO: 25415 - DNA, 870 bp, Artificial sequence
  DNA replication origin
aggttaataaaaatgcactctgatttgatgaaatgatttctgatttctgaactattcctctataaagaaatttaaagtgactgagaatatggaggattatctgctggaatgcactgtgaagctagaaaaagaatagcagggaaatatttgtgagttcaaaaagctttttgacatctgctctgtgtgtgtgtgtgtgtgtgtgtgtgtgtgtgtgtaaagatagtgcagaaaaggtggcatttatttccatgtgattccagcatgcacaaagccccagctttgggcccagcacacagtaggtctgcagcaggtgctagagaaatgaacctggttttaagatattagttcaggaccacatttggacccacactttttccttttacattttcatatgtgagccacctgcaccctcttttttgggggtggggagggggcaggagtgacttgtattttaaacaaaggtttggtgaagaagaggtggggtggggtgcggtggggcggtgcagtgaccttctcaggagagtcctgaagccccctctcgcctgcctggggtgctgaggcaggggtgggtacatggctgtgggccgaggtcgaccacccccctcccgccccgcctgctgtctgggcatctagagagtggggaaacattagtacggggccagctgcggaagcctggcagggtcgagggagaggtcaaggtcggccgagaggcggctattgatccggcttggaacgtgagacatggagcgcagcaagactaaagggggagctgtgagaccagacattaacagctttgcgcgctgatgaggcccgtgccagacgggcagagggaaaaagaggagactggagtggcagctgggatcgctccct

SEQ ID NO: 25416 - DNA, 767 bp, Artificial sequence
  DNA replication origin
gcttccaggaggaggtggcagttgaaataaagtgcaattaggtcagagtagaagaggcgacagaggtgtgttttcctctatgtatttggaatgaaattgaagctcagaaatgttagatgggttttgcccaagatcttacagttagtaacagacaggtgaggacaggatgtgagcccaggccatcagcctgcagtcaggttctctgtccaggagcacagagccactttgattcctgaagaggcttcagtaaccaggccagggtgaccaaagtgtttgctggggaaggagtgtgatttgctcatcctggggcctgaactggggagggtgtcttggcacagagaggaagggaatgtccttgctctcaagggctggaccagagagtggggaagacagagaatggggctgcagacacatcctgcaacagggcctgaaacctctcagactcttctcccccagggctcttggtgtgcctgtgggtgaggggtgtgtgtgtgcatgagtgtgagtacgtgtgtgtatgacagtacatgtgtgagcgtgcgtgtgttagtgtgagtacatgtgcatgggtgtgtgggagtgttagtacatgtataagtatgcttgaattgtgagtatgggtgtgtgtgagcgcatgtgtataggtgtgtgtgggtgtgtgtgtgcatgggtgcgtgggtgtctgggtgtgagtgcatgtgtgtgggtgcgagtgtgagtgcatgtgcgtgggtgtgaatgcatgtgcgtgagtgtgaatgcatgtg

SEQ ID NO: 25417 - DNA, 1370 bp, Artificial sequence
  DNA replication origin
agctcaatcaatatttgtccaatgaacaaatgccactccctggagctcgttgttctgggtgaaccagaggccaagccttcatgtccttcccatcgccagctggtagcccgaagaaaaggccacctgtgtccaggtcgcaggggtaaggacagcaggctactgcttcactgggcctggatttcctcatctgcagaatggtggggatgggtgaccccaagggtatctctcaggaccaactctgtgtgcccaaatgtgaagccacctgaactgtcctttctcctcgcaggtgttgtcatggaaagcctcaccctggccctctggtctcctcttagatttgacttttcctaattttccagccttgactttggctgttcctctatgtccatgaccctctgctccttccagatgtcagaaggggccttgcaagtgaggagcccccgagctcaagttcttctggcctcgcagaaaactcactggtgagcagcgtccatgcatgtgtctctgtgtgctggcatgtgcaggcatgtgtgtatgcttgtgtgtgtctgtgtgctggcatgtgcaggcatgtgtgtgcgcttgtgtgtgtgtgctggcatgtgtgggcatgtgtgtgtgtctgtgtgctggcacgtgtgggcatgtatgtgtgcttgtgtgtgtgtgctggcatgtgcaggcatgtgtgtgtgcttgtgtgtgtctgtgtgctggcatgtgcgggcatgtgtgtgtgcttgtgtgtgtgtgtgtgctggcatgtgcgggcatgtgtgtgtgctttgtgtgtgtgtgctggcatgtgcgggcatgtgtgtgtgcttgtgtgtgtctgtgtgctggcatgtgcgggcatgtgtgtgtgcttgtgtgtgtgtgtgctggcatgtgcgggcatgtgtgtgtgcttgtgtgtgtgtgtgtgctggcatgtgcgggcatgtgtgtgtgcttgtgtgtgtgtgtgctggcatgtgcgggcatgtgtgtgtgcttgtgtgtgtgtgctggcatgtgcgggcatgtgtgtgtgcttgtgtgtgtgtgtgctggcatgtgcgggcatgtgtgtgtgcttgtgtgtgtctgtgtgctggcatgtgcgggcatgtgtgtgtgcttgtgtgtgtctgtgtgctggcatgtgcgggcatgtgtgtgtgcttgtgtgtgtgtgtgctggcatgtgcaggcatgtgtgtgtctgtgtgctggcatgtgcgggcatgtgtgtgtgcttgtgtgtgtctgtgtgctggcacgtgtgggcatgtgtgtgtgcttgtgtgtgtctgtgtgctggcatgtgcgggcatgtgtgtgtgcttgtgtgtgtgtgtgtgctggcatgtgcgggcatgtgtgtgtgc

SEQ ID NO: 25418 - DNA, 1482 bp, Artificial sequence
  DNA replication origin
tgggtccctggggagccgctgcgcgggtggcagtgcagctggtcacccagagcaggagcactcagagcgcaaggagggagtccagagctccactctgatagctctgggtgctgagcagagggtcctttgtggatggaaaggagtgtctgcaggtggagccggagacacagatgtgagagccgaagggtcctagggctggtggctcctgggatgcccaggcaggcacgctcgtcctggctctggtgggcacccaggtcagccttcctgcagaggcctccagcctaggctggcttgcagggaaggggcttgggagcttccggaaggtgcactggggaccctcagtcacccagagagtctcatctgcagtggtgcagcctccaggtgggcccccacactgggttgtttctgtatcccgcgtgcacgcagcagcactggaaggggtcaaggctgggtctggtctgtccctccgccaagcccatgaccgacacgtgtcaggaccgcagcagtgcacagaggcgcagaaggtgtgtttgggatgcccctggtgcaggggtgaatggagaagagggttcaggattctggggtctgacacttagtgccaatcatgagagaggcatctggcagacaggtgggaggaaccaggagggtggggcccgggggcgagaggagagagggcgtctagaaaagcaggcagccgcaggggacactgatgactgttcccctgcagaagtgaccaccaagctggcctgctgcagttgcctgggagggcggggtgtgggcacagcttggggggacgaggggataattgagaggtgaggaatggtggctctgctgtggagagagccagcatcccggggaggggctctgggtgtgcaagggtggcctcgaagttaaaggaaaatcccttcgtgcaagaacagcttgtctgggctgctgtctgcggctcaggtgctggcatggagagtgcagttcagctcgcttggccaaaccccagctactggttggtgattgaagaaaaagggggaaggggcatggggaatctgagggctcctggctgggcgagtggcaggtgagggccccagaggtgtgatgagaactgacccagaaacagggtctctgtctgggggagtggtcagggaggggcaggctggagttgctgtttggtggggtggtgacaagatcagggtgtagccatgcccaggggaccagagcacaggaagtgagggggtggtgttgccattgccgagaagctgctgtgctgggtggacttacccagaggtggctgcagggagctgctgagtggcaggagtgctgcgatccaagcaaagtattctttcaaatggggccttagggctcagatttaccaaggacatcactgttggcctggccgggtgaaaccagtagggaacagtccctggtgaggagtccccgtggaatgaagaccctcctcttactgggaggccgaaagctgcaaacagagct

SEQ ID NO: 25419 - DNA, 1959 bp, Artificial sequence
  DNA replication origin
gccccttcaagccccggggccacagcggccggcggggaccctggcgggggcgcgggccggacttcggccgaggggcgctggccagggcgagggacggcctcgcagagctcggagacgcggcgcgagtttcccccgcgggccgcgcgggcgcagagaccgccgccagcactcacctgcccgcttcccctagcgcagcgggaacgacgtactccggcccggaccccgccgtccgcctcaaccaacccccaggcggtggcggcggtggcggcggcggcggccggacgggaggggcgggacggcagcctgagacggccccgcgaccgcggcccaacgcttctcctcccgccccggaccccgcccccgggccgcagccgccgccgttcattggcccacgcttcggacgcatgggcgcggccccgccccgccacccagccggcgttccgttcggggtcctccccagccagtgggctggcagctcccgggggcaagagcggccggctcagccgccgccaaccacgatgtcgcaactggctgcgttcgcccccgccagagctttgattggacgaatctcgacccgggccccgcctacgcgcccaagttccgttagcaggttcggttgctccagaatgccttttcgccccgaggggcgggaccgacgggatgggccctgtggctggctcctccctctgtaagcagcagccactgacccgcggggcgggcggggaggagagcggcggctcgttcctcttttgagagctctgctttcttcccattggttgacaggcatcctactctctccgcccctccggtcgcttggtggcgtctcaggacgcagcgtgatgacgtaggtccccgacattccatatacaagatggccgcagtcggcaaggagagacgtcgctgaggggcttgcctgaagcgaggggtgagtgacccaccgactgagggcagcgccgcccacctcccgcgtatctggaggtcggagtaggttatggccaaccgccgctatccactggcggagtctctctttccggattctgcctccctccgctaacctccggtacacattgaactttgcgggcgacgcggggttgtggggcgggcgtgtagagagggtctgaggcgccggggcggggcagggaggccggactcaccctagaactggtagcggccctcgcactggggggcagtcagagttggggaactttctaggggttgggcaaaaggggcagcggtgttaaccgcgcacagtctcacagccacagacttctcatatctccccgattatttcgcggcgtattagtcccaaccttggctaggcctgaaactttttggaggttgttccatgtctagggtactccgactttggagttttggagagccacgtaacgagggtgcggctaagatgaggaaaaggcacttccgggattagatttcgttcttgcccagacatcgtctttacggacccgctcctggtggttgatttggtttgttatgagagaaattgttctttagaaaattggagcgtaagtctagaggttatgtgacagctcctaaacgattgtctgcccaagataggctcggtaatgctccctaaatttagactgccagttaaacggagctttcgctaagtcatctgaggttaggaactatttctaagagcatttcttaagggtggtcttctgtgtttttaagagaaacttggtgatgtttgtgtatctcgatctaaatcgctgtttacagatacctagcacaatgccttgcagttgtaggtgcccgctaaaggtttgtatgaatgatgttgctagaatgaaagcgaggagctttcagcgcctagaacactgcctgacgtttaataagccctctgtattgctgaatgaaagaatggatggatgatggtagtggtagtagtattgatagacatttggattaaagtgcccttaggatgcttacctgtta

SEQ ID NO: 25420 - DNA, 972 bp, Artificial sequence
  DNA replication origin
aactggaggcatgccgggtgggggaatgggcgggggcacaggaggctgtcctccaggggggacggcaggaggtgggtagctggctggcggcaggcccaaccctggaggaggatgaggggggactgcgtgggtaggcgggaggcgtgggggtgggggtgggaagttggggttgtaggtgggtgggggtggggggtagccaggagtagggggtgggatggcaggtggggggaaggaggctgggggaggaggcacaggtggcgggggcgggttgggcgggtagacatgggggtggtagggcaggtgtgcaggtgggccgtaggcggggggcagggcaccgtaggagggtccctcggtcttcatcatggactgcaggctctggtagccctctccagacatgtaggagctggtggtggacatcccggtcatgtagctggaggggggtgggggcgggggccggtgtggcagcggcggtggctggtgcacaggggccgggtgggccggagggggaatctggactttggggaggtcagtggcatccacagggcccggcggctcagcctcacctaaggcagcagcgaggggaggcttccggtctgcaggagagagacgcatcagtgcccggcctccgccagcaatggttgctttttcagtgcctcctggcccttcagggccatctttacagaggagcagggagcagctgcccgcctcctctgtggcccaacgcatgggcccatgccccatgtcctgatgccaccagatgtctccccaccatctgtcaagaaggccctccaccctgtctgcgacgacctggggttttccctccctcagccctgaccacaccacctacaggcagtctcggcagcacccgaagcccccttgtgccctggccccagccccctcttcctagtgcaaaacgtgtgggggctcctctgtttttctgccttcagaaactgaccccaggggtcagggcca

SEQ ID NO: 25421 - DNA, 1038 bp, Artificial sequence
  DNA replication origin
caaaaactgccctgttccccgactgctcacactctaactgtccgaccttgatggaaaggaagggccagctgaggcctgcacgctgccctctgagccgagataccagcaccagctgaccatggggacagcggtaccataacaggcctggggtgcccaggccacactcctccaatatacgactgctcacctgggtccagctcgaccaagctgctggcaccagcctccatcaccaatccagcaaaggctaccacatcactgccaacattacccagtgcaggcatgcacactgcaaggtgatccaaagccaatgtggtatcacccatacagcgcatagcctcttctctattctaaagttgaggttttgtagagcatgaagtactggaaccactagctgcttgtgacataatgacaaaccaatgctaattccatatgcggcagaggagatgccctcccagccctaacggagtcctggggtggggtgagggtcacagcgtacacggagcactggggctggacagacactagagattggccaccaagttcacaccaccagtatgcgcatcctgccagaggccacacgggattggaggcagtggggggaaggtcacatgaacaagcaagcaggtgaacaggtgaatgagtgagcaggtaggtgtgcaggtgagcaggtgaatgcgtgagcaagtgagtatgcagatgagcaggtgaatgagcaggtgggtgtgcaggtgagcaggtgaatgagtgagcaggtaagtgagcaagtgggtgtagaaggcagtgtgcaggtgggtgtgcaggtgagtacgtgagtgtgcaggtgggtgggcaggtgagtgtgcaggtgggtgtgcaggtgagtgagcaggtgggtgagaggtgagtgtgcaggtgggtgagcagttgagtgtgcaggtgggtgagaggtgagtgtgcaggtgggtgagaggtgggtgtgcaggtgggtgagaggtgagtgtgcaggtgggtgagcaggtgggtgggcagatgggtgagcaggtgagtgagcaagtgagt

SEQ ID NO: 25422 - DNA, 2035 bp, Artificial sequence
  DNA replication origin
aggacgacaaccaggagctgcgcgagctctgctgcttcctcgacgacgaccggcagaaggggcgcaagctggcgcgcgagtggcagcgcttcgggcgccacgcggccggcgccgtgtggcacgaggtggcccgctcgcagcagaagctgcgcgagctcgaggcgcgccaggaggccctgctgcgcgagaacctggagctcaaggagctggtgctgctgctggacgaggagcgcgcggcactggcggcgacgggggccgcaagcggtggcggcggcggcgggggcggcgccggctcccgcagctccatcgacagccaggccagcctgagcgggccgctgtcgggtggcgcgcccggcgcgggggcccgcgacgtgggcgacggcagcagtacgtccagcgcgggcagcggcggcagccccgaccaccaccaccacgtcccacccccgctgctgccccccgggccgcacaaggcccccgacggcaaggcaggagccacacgtcggtccctggacgacttgtcggcgccgccgcaccaccgcagcatccccaacggcctgcacggtaaggactacacgggccgggcagcgcgggtctccctggctgcagcccttttcccaggctgcggcgagaggaggtggtccctggctgtcccactcatgcggccgccactccagactcctccagctgtcatggatcctgggccaggggatcccgcactcacccaaagtggggctttgggcggtggtgggccggttcagtggtggagcgtctttttgtccagctcagaacctgctgccggtccggtcccagaaaagtttctagcgggtgtagttgccaaaattagggtctgtcactgctgggctggcggtgggcgcctcatcccagccttggaaatccttgcctagtagcgggaagttctaaacagcaaaggatacaaggccccttgagcgcaagtgaatttcccctcttgcagcaacaggtgtcctccaaaccaagcagcgtccacgtgtgtgcggtggctggagttctgcagtggggtgtggggattgggaaggtgcacaggcagccgcttgagacccagaggcagttggggagaggcctggggctcagagcctttcttgtttgccataaattccgcccttctagtcctgggacctttctcagccgagactctaagactttcccgagggagatgtatttggaacggattctagcttttctcctctgtgtgcctcagtttctttgtctgtgaaatggagatgatgacctctgcctcgtgggtttgaggtggagataaaccttctgaagggatttataaactgttgatcgccttacaggaagtgccgtggtcatccgtgaccagggtgtgggtgggaggaactttggcctctgtcagcttctgtcttctacgcccatgttactgctgcgcccagtgcagagggtggccccagcttggggctgtgggagcttgcagcctgctccctctcccagccccctgctcagcccttctgctccctgccagctttctcctcctcgctggtggatccggggcctccctgttcttccacgttttttggtagcttggcttccagttctgctggtagttgcaactgcctgaactttttgcctgaaggtggagaatgaacagctctttctggttccctttaaagcctttcctaattcagagaaagtgtgtctaagcctgcaataactgccctccccagaacccctcagcctgagctggggagggacgttttctccttagtttggtggccaagtggcctctgcagacgtgttggggtgggggctggggtgggagacatacccatggaggtggggcaggggcagtgcagcatgtttttcctttatttaccatcctgagcctgtgggttcaaggcaggactgggtttagagggatattttgttactgattagcaatctatggctacaactcaggtttctctttgtaacactgtatccacccccacctcccaccacaggctgcttcagggcagtgggagtagcgcaaagttag

SEQ ID NO: 25423 - DNA, 868 bp, Artificial sequence
  DNA replication origin
atctcgttgcaggttccgggggagggacccccccccgccccgccccgccccgcctgctggcggtagacgcgccgtaaatgcgctttggggaccggaggataacgagacagacttacaggcagtgggaagcccgggggtcccgcgaggccgccggtggggagttctgtggccggctcggcgcccccggaccccggcgttcaggccccagtgggagaccttcccacccttcccagtggtttccaccccgcgaattgcagattatctcccgaatcccagggatttagcggtcgagtgagcggaggtggagcggggctccgagcgccgctccgggcagggggcaggttcccggagctctcgccccatcggggcagagagtactgaccgcgctgcgggacgcggctggcaaggccctggccctgcaggggcgcggacgccagcgtttagctcagccctgggctaggagtggagacgcagccccgccgcgtgctccggcaggggacccgggtggggacgggggcggaggagcctgggggcagggaaggggacaaagagccgccctgctgcggggaagagcgacccccatgtcacagtcctattgttcgctgtgtctccgactgccctgaactctggtgcccccgggagggagaaggggcgccgtcgcccggatcgtgggtatttgtttatctggggagagggaagaggaccggggacgcgggccggggagggggctcgactgctattttcgcgcgtcgcctttaagggaagcccggccctacctttcccaccgtccccctccccgcagccgtacctgcattttaaaagcgccctgtagccctgggattggctaaggccgcgtcctccgggcgca

SEQ ID NO: 25424 - DNA, 1955 bp, Artificial sequence
  DNA replication origin
ggtcagtactctctgccccgatggggcgagagctccgggaacctgccccctgcccggagcggcgctcggagccccgctccacctccgctcactcgaccgctaaatccctgggattcgggagataatctgcaattcgcggggtggaaaccactgggaagggtgggaaggtctcccactggggcctgaacgccggggtccgggggcgccgagccggccacagaactccccaccggcggcctcgcgggacccccgggcttcccactgcctgtaagtctgtctcgttatcctccggtccccaaagcgcatttacggcgcgtctaccgccagcaggcggggcggggcggggcgggggggggtccctcccccggaacctgcaacgagatcaaatccgcgcacgcgacagtgagcggcccacggcctggagcgcgcgcccgcgcagcagctgatgccccatttacagttgctaagccgttcattcagctgtgtactcagcgcctactcgccgcggggcctgctccagccccgggggattctgcagggcaccgaactgccctctgcgggggacttggcgtcctgggagcaggatggggagaagatagacgagctagatcaggatgagacttgtcttaagtgctgtgcggggcattaagtcgagctgctgtcatagaaagcataatcagttgctttagatccagcggtcagggaggtggggaggcacatctaagctgaagtctgattggcaaggtacaaagataaggggaagggcattccaggcagcaggaacagccagtgccaaggccctagggctggcctgttacagacctgttccaagaaggccagtggggctgggggtgggccagggaagaggcgtgagagctgaggtcagaggtcagaggggccagatcatgtatgattccaagacagctggggaggcagtggggttttagcagggaagcaacatgacctggtttacctttttaagaggctcaccctggcccacatgttgagaagagatggaggggagtacacagagaggtccagattcaatatctcatctcccacccgttcgccactctctccagacagatggtcaggggagggtggtggggagaggatgggctgagcacagcttccaaggttaaaccccagggatgctgagggtctcccaggccctgcccaagagaaccagctcctgaggggaggggacatcctcccctctgaggcactgctctgctggtccagcacagctcagtttgggtttagagagggaggggctttcagcttctgcctgggggagctgcaggtctgtctcaacccccaggaagccatattaacttcaaggagctccttgcaggctccctgcagaatgaagcctgtgcacagagttgctccctggagatcgaagcgtaaacgttggatacaccataggaaaaacccaccagctcaccagggaagttgctgagacagcactgtgctttgtgagaaccccctccccgttcgtgcatggctcctggtggttcctggggcctgttatctctgccccctgatcctccagagctggcagcttccgctgaacttccaagaagaaagtgaagcctctatctaggtggggtttgtttgcgtcatctacaggctgtgtggaccaaggaccaagagttcctctgtggagtcttgatagctttgctcacatcctcagggtagaacaaagacaaggtgctagtggtggtggtactgggtggtttgagggagggtctctctgctccccacaccagggctgggaatgcttgggcagaacaggacaggaccagaggaggtgagagggcccagggctgaaacagcgtcctgaaggaaaagggactccccaggccagagccccctcccggagggcccatatcgcagggtccagcagtaggtgccatgccccctggagtactcacagcccaacagaaccagga

SEQ ID NO: 25425 - DNA, 1804 bp, Artificial sequence
  DNA replication origin
ctgacctcgggtgatccgcccgcctcagcctcccaaagttctgggattacaggcgtgagccactgtgcccggctcctgactgtgacttttcttatctttttttcatgccttgttgtttttctggaaagccaatcaggatgtactagataacagaaaccgaggtaaataggtattagggtgaggatttatgttactctggctggggctgggctgtgtttgacattttctgtggctgtaggagcccaaacctcatggctgtggcccaggctctgtgtcacttccacctctgtacactcatctggagccctgtgttgatgtgtgactatcacccagttctgagtcccagctgggaagtaggcgccatcgtgccctccgattccatcctggctctgcctattcccagctgtctgtgcaggaagccgttgcaggccgcatttcccaccctagcagccctctgctaggttcagccaatgaaagccacaggtgggagttggaggggaagtggcagggagaagccggggtatttctcctcctctgtctgtgcagaatctctgacagtggctatctccagctgtggccagacaggccttgtgagggtccagctttgacaaggtgaccatagctccttggctccagtaacatctgctcttcctgcatcaaggacctggggactgttcctactgttgctgatctcaaggttacttcactgagccctgtatggcttcttagcctctttggcttcaagtccctgcgttaaattccccgtgtttcaaatactcagagatgtttggctgtgcggagaccctgactcttacactgcacctgttcaggccagagccacagacctctgagtgctccagccctgccgcatctcatccacccccagctctgccaggagcatgggcccaaagacagaaacatgatcccccaggacagtccaaagagacctgcagaggacggatgtgtgcgttggggccatgaagatggagtaggagctcactggacagagaagatggggaaggacactccagggagaagcaaacgctgaggtccacttgagaaaaatgcctgggtggttttggtgctgtgagattctagggtaggtgagacagtgtgtgtgtgtttgtctgtgtgggtggttttggtgccatgagattctggggtaggtaagacagcgtgtgtgcgtctgtatgtgtgtgggggggtggggcggggttgggtctgaatctccagcgggggcagcggaacaaagggctggatgcccatcccaggaggtagattcatcagtgctccctatgcgagagtggaagtggggagccccagtgggtcctgggctgcaggagaatccgctgccccaggagcagagactgggaagaagcccacagtaagggcaaagggtggactgcggagactgctccgtcctccctccccacccctacgccaggtttcacttctccctgagagtcctggggcaacaccccctgttctttccctcgcacccccatttttaaaatgttacgtgggagctttcggggacgggctgcgggcatccgtttccctagcccagtgggaggtggaaccgaagcccaggagtccaggcctctggccctgcgcctccctggctaaagagcgccctgtggggaggaagcagggccccaggcggaaccgggaaaacacaccggggctttaaacagaccgggccactcccatcgaatttggaaagcggttaaaagaggtcgtgccgcattctgcgccgcgtccctcttccttcagtcccgccgagtgtccccgaccagaggtgacc

SEQ ID NO: 25426 - DNA, 1485 bp, Artificial sequence
  DNA replication origin
tgccgcattctgcgccgcgtccctcttccttcagtcccgccgagtgtccccgaccagaggtgacctcctagaaggggaggtccccaaactcgaggccctgcgtgtagggaaggggagcgcccgccccttccctgccgccgcgagcgccccgggaggggaccggggctgccgtccctccgcctcttcccccgcggggcgtagcgatggcccgggccagggccggggcgctgctggcgctttgggtgctcggggccgccgcgcatccgcagtgcctggacttcaggccgcccttccggccgacgcagccgctgcgcctctgcgcgcagtactcggacttcggctgctgcgatgaggggcgcgacgccgagctgacccgccgcttctgggccctggcgagccgcgtggacgccgccgagtgggccgcgtgcgccggctacgcgagggacctgctgtgccaggtgagcgggcgcgcggccaccgggcggggcggggcgcgggaggccgagtcctggagcagagatcggaaccccgcgggggcgagggccaagagtgggcggcggactcgggaactctaagccccaacagggagtcatttggcacggggcggggagaccgcgcatcccaggacgactcttggctttgccattcattagttttgtgacttgggccttctcggggcctcagtttcccctcctgaagcaggaaggacggacggacggacagatgatgtcatcatttcctcagaggttgggggctcttctgccccagtcccctggagtcgacccctcagcgtcccaccccgagcagctgcacccttgtcggggtaccaaggtggagaggcatctgtcccggtcagtgctcctttgtgttgtccccggggcagtgaaagcagggggccctggcgtgggcgtggtcaacgtgtggcccgggtttgttgagggggttggggccactgtcccccacgagcgtctcacccccatcctgatgcccttgccacttccgccaccacctctgtgggtgctgtgccctctcctggggatggcgccctggcctgcagaagctctctcaagactgagcgacagctctttgttgaagcccctgggccccccatcttccctctgagggtggagcccctgcttctgtgcacacctggtggtgccaccgctatttgttttcctcttgtgggagtctgaggccccagggcctgaccacacccaagtgggcaaatgttgcctggctgaatgcagaaatggagcaggacgggcagccccaaggcattcctgcctcagcatctgggcagtgagaggcctggggtggagaggccccaggggccagggccgtgtcccagccttcggccagcaggggcaggtggtgtggggaagggcaagaaggctgacttggagttggagtttgatcctggctctgtcacttccccagcttcgtgacctgggcaggtcactgctgcacctcacaatatctttaaaa

SEQ ID NO: 25427 - DNA, 1039 bp, Artificial sequence
  DNA replication origin
tgaccgctgagccaggtgcagggtgagcctaggctgtggggccagagaccctgggatgctgtccgccttaactacttacagccgggtaaccattcattcactcaacatgcatcccccaccttcctgtgcgccaggcctgtcccatgcgttggacacaacacatcatctatttcgtcttgtcctcacaacagtcgtttaggtaggtgtgtcctagtatgatccccactttacagatgtggcagcggagctcagaaagctcaaataacatcgcccagttgccgcaccgctgggatccagcccagacagcctgggcccagaaactcaagctctttaccacacactctgtggaatcttggtgtcctcaactgtaatagtagagtggtcccgctcagaccattcagtcctcccggactgtggtatagggtgaaaattccactagaaaaaatgacttgtatttacagttttcttccagtactcggcactgtgaccagcacatagtaggtgaccattaagtgcagagtcagtgaatgaaggattgcaatcaaagccaaatgcaccagcgtgcgggttggtggggagagggggagagagcagaggggtgcagccctaagctccaagcagctaaggaggatagctcatgacaaaagtgacgcgtgatgggaaaaatctgtaatgtgcttaaagacagtgcggagaacatgcccttctcagcggtgatttctgatgcaccgactgaatgcatcagtttcccttgctgttagcattttggtgtcctccctctgggttgcttttcaaggcagggtttgtgaagctgtattccatcatcctcacatagcgttagcacccacacctttcccttatcagtagggacagcaaacaagtatcctctttcacggtgatgaaacgctcccacccgatatatgccttgtgatcaagcccctgttgctggccttctactttcccccgtaaattcctctcatacactccagcctgctgaacaccatccagatcacacccctgaacccacgcgtcacatgcc

SEQ ID NO: 25428 - DNA, 986 bp, Artificial sequence
  DNA replication origin
ctccgggggggggggggtgcggtctccgagggaggccctgcggcacagcaggtggggtggggtgggggcggattcggggccggggtccccggggcgcgggcactcactgagagaggtgttggcgcacaggctgcggtcgtagcactcgaacccttcgcgcgcgcgccagccatagttgccgccgcgctccaccacgtccacctcctcgaacttgttctggcccacgtcgccgcagaagaggcgcccgcggccagtgcccgaggaggggtcgccacggtcgaaggagcagcgccacatgttgcgcacgcccagggcgtagacctcgggctgcgccgcggggtcgcccacgaacgggttgtcgggcgggatgccgtagggcaggccgcgctccttacggtccacgtcgatgcgcagcaccttgcccagcagcgccgacctgcgggcggggtgggagagggcgcggctcggggtcgccctgagccagggctcacgggctccgcggggcaggtgctggggcgccggctgaccgctgagccaggtgcagggtgagcctaggctgtggggccagagaccctgggatgctgtccgccttaactacttacagccgggtaaccattcattcactcaacatgcatcccccaccttcctgtgcgccaggcctgtcccatgcgttggacacaacacatcatctatttcgtcttgtcctcacaacagtcgtttaggtaggtgtgtcctagtatgatccccactttacagatgtggcagcggagctcagaaagctcaaataacatcgcccagttgccgcaccgctgggatccagcccagacagcctgggcccagaaactcaagctctttaccacacactctgtggaatcttggtgtcctcaactgtaatagtagagtggtcccgctcagaccattcagtcctcccggactgtggtatagggtgaaaattccactagaaaaaatgacttgtatttacagtt

SEQ ID NO: 25429 - DNA, 1526 bp, Artificial sequence
  DNA replication origin
aaaaaatcaccatatattaagcatgtactccttccttccttccttccttccttccttcttttctctctctctctctttctttctctctctttctttctttccacactagattctaagtgatatttatgtattaactgattcagtccttaaaaccaccctaggggcaagtactatgatcatctccattttgcagatgaggtagctgaagataaggaaaggtgaagtaactggctcaaggtcacctggccagtaactgagccagagttcagaccaagccgtctcagcctgcccttgggcctctttagtcctcagctttctcctctgtaaatgggacaaggtggtcacgaggctccataagcacccttggggacagagcctgactcgaaggagggttgtgatgtaggtttccctcccccatcaaacctatttgggatgtgattcatcctcctcccacagcagggtctcagtgggtggtactgctgccctagagcacgggggcagggcagcaaggctccaaggccacaagagccccacctcctcctctccccattaggaggcccatgggcagccactgttctctcgggtcttagtttctcaacctttgcaagctccctgcagtcctggctggggtggggtggggcagggctccaggcccccatcagctgttgcagtgacaagctgtggcttccccaggagcagggtggccctgagtgtccaggaaattgttcatattctgccctcctgcccatcagaactgctgtcaggcccagagcccatggttctcaggagggagaggaagaccacgggacccgcacttaagcaagcctccagtctttaatgccatgagttgtgtgtctatcatagaggtactgaggcctgcagcaaaggctcaccatacatctcaggagaaaagcgggtggatgcgggtgtccggcccacacctaggggcccctgtcagagcagcgaggcacatgtgcaggaacgggcgcacacatacactcccctttaccaaggagccagtcccaaggagccagtggcagcagccaggggcgcgagggcactaggtcacttacccgctcatgaaatccccaaaaatgtagaggccgttcaggttggggtactcgcagccccggtacacgtagccccctgtgaccgacttgccaaccgtgtgcgggtaggcgaaaatcggcagcaagtcatctgcggggtgggagggagagaagcttcggtgagccagcggcgggaaggttcatcagccaggagaattccggagggattccgcgggggtggggcggccacggagggaggggcgtgcccacagcagggctggcgtgcccacagcagggctggcgtggtggaaagcgtgtctgcaggggtgccaggtggggatggagcgaggaagaactcaagagcgctgctgggaggcctccaaggcgcagggaggctccgggtggaggcgggggcagtcaccgaaggaggctttggctcacagcccgtggagttggggtgggggcagatccagggtc

SEQ ID NO: 25430 - DNA, 1670 bp, Artificial sequence
  DNA replication origin
actgtccaaggccttgtgatcgaagtgtgtgccaggtaccgtgaggacccacccagaacagtggagactggggttgggggtaggggttcctggagtctgaaaagaagaggaagggtgcaccaatagggggttgcactgaggggggtggcagctagggggatggcactgagtgggtatggcactgaggggggtacacctggagggggtgcactgagggggatggcatggagggggggtgcactgaggggggtggcacagagggggtggtgcactgaggggggtgcacctggaggggttgcactgaggggggtggaatggaggggggtgcactgagggggtggcacggagggggtggtgcattaaggggggtggcatggagggggggtgcactgaggggggcggcatggagggggggtgcacagagttgggggatgcacccaggcaggttgcacgggggggtgcacctgggggagtgcactgaggggggctggcaccaagagggaggttcactcaggagggtgcaccgaggggggtggcagtgcaggcagagggaacagcaagagccacagtgggagaggtgaggcagcctgaggagcaggaggtgggggccaggggccagggtgcagggacagggagcgccttgcccatgtcatggtgctctgggccctggcctgtgcttggccttgtgctgagaggccctttctcagctctctctcagtggttttcaaagtgggactggctgaagtggggcgggattaaagaggtttggcctggtggccccaggatcctccccatagtaattgaacagtcttgggctgtgacgcatggcagtgcccagtgcctggcactgcacctgtgtggagtagagctgggcacagcaaagtgtagattgaggtctatccctgtggctgacctgggccaagcgtgtccccacattctgcagagacaaaggaaatcacctgcctcagctccctagcaccgactgcacccaggctctgtggtggggtataggggctctgccttgttccccagacacaaccagagttcccccatcgtacccgctgtgacaacccgctggtgccaaccttgggaaccaggaggaaagagattcaccctgaccccagggatccctgtgtgtatcccgttcccaacctgctggccactggccaccacagacccgcagcagtttttacccatctgtgggcctcagcttcctcaccctcacaaccaaggcctggaagatgaaacggtgactttctcttagaagccttcccagacactccttcctttcattgccttccagagttatgaagtgccaggagctggctcccccaccaacctagggactcctgggaaggtggggcttggggtagggagacgcagcaacagcagactggcacaaagcagttgatagtgtttgctgtatgactgaaaaagcccctggcccctgagtccaggccggcatcttgctgggtccgggtgacctgggaagcacgactgggagcgcaggcggcatcccgtcttctgggtgtgagtgcaggacagacccaggacatccttccccgagtctgcgctctccgcacaggttgcagggcagcacagggtgggcagcagggctggacaggggcgcctgggtccctctgacggcatactcttcctctgcgcagagt

SEQ ID NO: 25431 - DNA, 2671 bp, Artificial sequence
  DNA replication origin
acccagcagccagggagccggaggggcggcgggcggcggcgggggcggctgaactcggcgagccgggcgttccgggatggcgaggtgcgcctggtgcggcccgcgggcctgagctctggcagcgggcgcgtggaggtgttcgtgggcggacgctggggcaccgtgtgcgacgactcctggaacatcagcggcgccgccgtcgtgtgtcgccagctggggtttgcctacgccgtgcgcgccgtcaagagagccgagttcggccagggcggctcgctgcccattctgctggacgatgtgcgctgcgcgggctgggagcggaacctgctggagtgccagcacaacggcgtgggcacccacaactgcgagcacgacgaggatgcgggcgtcgtgtgcagccaccagaaccccgacctgtaggcaacacgccgctgccccaggccatcccgccggcgggggagcctggcaggggccgctccgccctgtgtgcgcccagcgggtgcacacgtgttctagagtgaagggggtgcgggtgtgtgctgtcctggggacatgtgtgaggcgctgcagtgcatgtgtgtcctctgcagacccaaggcaggagtgtgtgttgggggcggtgtgggctctggaagtgcatggtccatcatgggcgggaggagttcctttcttacctccaagcgtttcagacaccagcaggaacagcagccgggctgtgggaccctgaggagggagggcagccaggcttcgaggacggacatggcccctggctgtgctaacagaggcacagcttgcagactgagggcggtggggagaaccaggcttgtcctgcccacagctggaatggaaggtgcaagaacagccggagggtggcctgaggaatgtggcccggacagcatggcctggtgcccgcatcccccccaccccctggcagtcagaggcgctggagagaaccggaaggcatccagtggggaagggaaagccttctggaaggtgggagcagggtgagctgcaggcctggggccccactggaggggcaggctgcgtggaggagccagcacctgctcagggaggatggctgtgaggactggatgacctccaaggccgtatgctggagaagccactcagcagcatactcagtccttgtgggtgctcctgggatgggaccagcctcctccaaccctgaggcctgattctctcttgctcttggggcagaagccacccacactagctgggcagagctttcaccctggccctccagtgagtcggtgggcctccactactttcaaagctgtgtttgggccctggggccacctctgtcctttccatccccatccctgctcagtgtaaacccaggagacctgattcctccagccctacctcggggctgaccaggctgggggtccagtgaaactactgacactttttcacccagggctatgccaataatgtggctgtttacacaccactttcctgcctcctctctgacctgcacctgtgtgggagccggggtgggaaccaggagaaaggggtgaggcctcccgcttcccacctgcatcacaggtggaagctccttcactccagggatgctcggccctggctctgtgccaggccgcagaggggcacttagtatgactgcgctcagcctcggatgggagcacgggtggggggtgggtaagcagatgagtcaccaggcagtgaagacaggatgtggcccatgtcgggggttggaagaggtctgggtggggcacccaaacccaacctatgggggggctttgggagggggtgatgctgtgccaagttctgggagctggcaccaggggtggctgggcaggccttggggcaggcatgagtctggcagggtctcctagctgctagtatagggtctcctagccactagtataggatcctgggctgcagcagaaagctttaggtcactgtcttggactcctcatactctgtgctttacagaatgggaaactgaggcacacagaggttagatatcttagggcaccaagccagggaagggagaagtcaagtttgaatacagcagcttagtttagagtccccgcaccctaaccactgccctccccagctacactatgcctgcagagagcggtgtgctggggctcctgcctggtgtgggagtgccagcctggctgggaagcagctgatggagatccctgggggctcctcttgcctggcaggtgcccccgctgctggcctcatgctcctctcgggcctccagtggcccaggggaggttgagtgggcatcttcctgggatgcaggggagttctgagctctgacgccgggcgtgttaggagatagcaggccgttaatgaccatcccagccgaattcctcactgtgcagatgaggaagtgagctcagggaggctgagtgtcccaggcctgttgccagatgaggccacgctgagactggagccagggaaggtgcagcaagccttgaggccctcaagaatgcagccgagccagggccctgcttgcctggccccagaagctgttttgctcagagctggattaggagggttggcaaagggagctctgggtgcggcctcaggccctccagtacttctctgggcagttcgggctttggccttcagtcttccaggccaggcgctcttcctccccagcctccaactcatcacctctcag

SEQ ID NO: 25432 - DNA, 818 bp, Artificial sequence
  DNA replication origin
cctatcccgagggaccacccagcgtgaaagtcgtggcaggggaaggccaggtgtgcccactcctagcccaggtaaaggtcccccgggctggaggtagaggcccagggagtgtagatgctgctgggtttctgagaagaggcaatgcccctgccccacgcttgagccagtcctggagaggttgggggttggaaaacgaaggggaccttggtaccgccttcccaggtatagttagggacatgggacatggctgttaggggtgtgggctgaggggcgacggagacggccaagtcttaagagccgtgcccagcacggaggaggcgggacttctgccctcggggccaccgcagcctggacaggtgggcagcagagcatccatccccccggcgcctggcccggccgcccagttggactcggggatgttggcttgctatggcgcccccgtgtggcggcggtgacaggcagccgcaggcccacagggtaactcaggctggccctgctggggtgaggtgtggaacggagccaccaggtcccctgtgggctgtgaaagctccggggcttgagggcaatttggagggaggatgaggctgcaagaaggagggtgtggattcctgcgcactggaaggtgggttggggtggttagctagaaaagaaatgtgacggcatcacatttagtatccagtttgtggaacggctccctgagattacacagtgcatcgcactgtctgaagaggactttctcttgccttgtctctccagacccctggaacaatggtactgttagcaacagcaaatccatatgggtctgcagcagcctcagt

SEQ ID NO: 25433 - DNA, 1086 bp, Artificial sequence
  DNA replication origin
tcacaactccgcttctggctcagccccccaggctccgcccccacctcttcagactcaggtccgccccagcagcagctccgcccagaacgcgttgtccctggcaacgccgatcctcagcgctctggcccggcggcggcgcgaagtcctgctggctggctccgcccgcttcggcgcctccaaataacggcatctttccgcgcgcggtcttaggccccttcctttttcccccaaacctgcccggaaaccccatcccagcctgcaaaagtccgcataacgccgactgttcccaaacttctccttggaaccccagacccccaaagttgttctccagttgccccggggcgcctcctccgcccggacagtccacgcctagcgcccgtggtccgccagcggggcccgcgggctggtggcaggatcctgcgggacccagggacgcctgtgtctgcgaccgagagcgcacggcgtggccggaggctgttctcccagagactcgggggcctgcggaccctcctagaccaggcgaagccccatctgaggcgctggctcaggcccgaaggagttggagttggagggatgaaaatctgggtccgccctccagggaaagcgggaaatgtgccggggaggcgggggtagcggaggagaaggtattttcgaaataatgaccagggcttccccctctgtcgtaacccgcgtctccttgcccatcccgtatgaagatgaggccaattctgggcgttttagttcccaattcctatcccgagggaccacccagcgtgaaagtcgtggcaggggaaggccaggtgtgcccactcctagcccaggtaaaggtcccccgggctggaggtagaggcccagggagtgtagatgctgctgggtttctgagaagaggcaatgcccctgccccacgcttgagccagtcctggagaggttgggggttggaaaacgaaggggaccttggtaccgccttcccaggtatagttagggacatgggacatggctgttaggggtgtgggctgaggggcgacggagacggccaagtcttaagagccgtgcccagcacggaggaggcgggacttctgccctcgg

SEQ ID NO: 25434 - DNA, 802 bp, Artificial sequence
  DNA replication origin
cagagtgtccctgtcctcccggggctcacattctagagggggagacagtcaacaggtgaacagacagtcaacaggtggaaagaaggtaacctcagaggtgatggcccctgagaagtctggggctgggtggtctttacacaaggtgctgggcaaggcctgtttgagacaagcagaggaagaagcccgccaggcccaggcttgagaaaaggacccggggggagggaagctgcggggggggcggggggagggggaggctgggagaagaaaggctgggggcagtagtgagaaagcaagaggaaagagcaagctgcagagtgggttctgagtgctcggcaggggcctcgcgggccatgcagccgacttaatttagaactgcatttagttgtcaagtgatgggaagcccttggagcagggaaatgacacatttaatttaagcttcacaaagctaagctgggggtgggggggggttggcaagttgaggggggtgtaagttgcgtgggggtggggaccaagaatgcaattgtaagtactaaggagaagacaaatggggtgtcccagaacagaaatacaagcaaaaggaaacatgactgaagtacagcgtgctccaatccaggctgaccctgtccaagtcccaaagttaacagcgcccactttggaggcaggctgacctgggcttaaatctaggcttaccaaccgtgtgaccttgggcaggtgacttcgcctctgagcgcctcagtctcctcgtctgaacgatgggttaacaatagcgcctacctgaaagggctgtggctgccatcacgtt

SEQ ID NO: 25435 - DNA, 1055 bp, Artificial sequence
  DNA replication origin
ctcctaaactacttacacttcatttcttatctcaggatcagctttggggggaccaatctcagacaagcagatgaaattaggagcttggcttgggaccggtaaggtttgtggtggactattgagcaggaagttagacactcagatctggagcccagggaagggctgtaggctagagacataaatttgagagcccacagcagagaagtggtatttccagcccagtgattggatgaggccacaagggaatggatacagacagagaagaggaccaagaactaagccatcactgagaagttgggagcatagggacagccagccaagtggactgagcgggagcactggggaggagggaagagagccaggagagttgggtgagaagccagaggaggatgcgggacaaggcggagggggcatcggctctgcccaggctgctgggggccaggtcagacgaggatccagggctgacggctgggtgcgacaacatggagatcaccgggaaccgagcccccagcaagtttggtggagaggtatggggcagagagaaccagaggggagaaaagggaggcccaaaggcaggcagtcagccaggtgggttaccatagggggcggcagctacagggaacgagagggtgaagggaaaggttttgttccaagctttgaattcttacatattatataaaaatggggatgatgcagaagaggaggaaaagtgctgatttggaggtgggggtgctcctaggacagggttgctgagcagagggggcaggttggcctgggctaccctcccggaacagctggaaggtgtgcgtgggcctggggcaggaggtgggcagctgctcagtggagcccaggaaggaaactctcaccggctgctccctttgctcagggaagtaggaggcaagaataaaagctgagagtgcggatggagggggaggtgatggggactgaagcaggaagggagagtaggcgaataaacgccctggggaaggaagtacggggtggccgcctgcccgcagtggaggcccacgccaggtgagtggccttgaacttgcagg

SEQ ID NO: 25436 - DNA, 1452 bp, Artificial sequence
  DNA replication origin
gcttaggaggagattttgtcccagtgtttggaggccaaggacacagagtgagcgtcagccccactcaggaggcaccacacgtgcacgtggaaggctggtggggtctgcagttcctccactcccacccctgctgaagtaggccttgagttgaagagaaactgaatataacagttctcgggatctagaggaagttggcctcacagagtcagatctgagtttgaatcccggtttggccatttatttgcctggtgacttcaggtgagtcactgagcctctctctgggtctcagtttcctcatctgtaaaatggggacaatgacggctcccctacagggctgagcccagcacaggatgacgcagtacgcccagctggcacagtcaactgtccccgctcttcctcttaagggattttctagggggccagtgcaatggacaccaacctagatgaggggtgaagacatggggggaggagagtgggacccactctgctctgagtagccctgttgggtggcctcagtggctcaagaggtgccaggggaacaacctgggaaccagagatgagcggaccctttgcccgcagttcagcacctatgtcatggggcggatggacacatactttgaggacccgctgactttcaaccccgatcgcttcggccctggagcacccaagtaagtccctcctggagctgcccatgagtggggctggcgggagaaggacagacacagcggcctctggtctgagccagaggcacccactcagcccacatagccttccagatccctgtgaggtggttgtggaggaaatcacagctcagagaggttaagtaacttgcccaagtggcagagcaggggtctggccccagctcagtctggttctaaagctcatgctcataagcagcaccaaatactgggaagctgggtgacttcacctccccaagccttgaggttcctgtctgagaaatgggaccatccgtggctgcatctgcaagttgctgtgggggtcaacgcgttaaggtaccgaagccatggtgggaagagctggactccacagcctgcctgagtgttcagatccaggctctgcccagagctggatgtaaatttatgacctggagtgagttgttttgcccctctgagcctcagtttctccatctgtgaaatggggacaacagcagttccttccaggagggtaaaaggaggagaaaaagaatgcagatccagccctcggcagagtcagcggttcatgctttgcatgcaaagtgcccagcccctggctcaaagtctgtgttcatccagacctgggttaactactgtcttccttatgttgttcctgtggggacgcctggggctgctggcctcgtgattcctctctttccctgcaggccacggttcacctacttccccttctccctgggccaccgctcctgcatcgggcagcagtttgctcaggtaggag

SEQ ID NO: 25437 - DNA, 839 bp, Artificial sequence
  DNA replication origin
gccaggtcaggagggcagcaggtgcccacaggcacggggctcagctccaccaagctgctcccaagagaggcccaggggcctctctgacctctcaaatccagctctcagagccagtcacccacccaggcccaacctcacacaacacccaggggcatggccgtgaatacagcacagggaacaggctggtaacctggggcagtctctcccaaggcagcgttgtcagggcatctgcggggcatctgcgggctggtggcttccaaagctgtgccagcctccgcatctcccccttttcacagacgagcaagctgaggcgagagcgcatggcctggttccaggtcattcatgcagtcaacacacatttattgagcatcgactctgtgccgggccctgggtgggcacagggggctcagagacaaatcacacgcagaccctacccttgaggcgctgacagcctggcagggcaattggtcacgtcaacggacactcacgatacagtgtggtcagtgtggtgttagaggtagcacaggtgaccgagggagcacagaggaggggcccctgccggcggggggtggcaaggagggcttcttggaggaggtgacccctgaagagggctttagggagtgagcaagagttagggtgtctcgtctgagcaagtggcctgtgcaagggctcagtggtagggacagtggtggtggctgggagttgggcaagggccagtccaggaagggccatggagtccgcaggcgacagggagcgctgaggggtgtgaagcaggcggtcggcagagggcccgctggaagccagcgtgaagggtggcccaggggacggggcaggggaga

SEQ ID NO: 25438 - DNA, 1645 bp, Artificial sequence
  DNA replication origin
cccccctgctgagggggcctccaggcaggacgagactcctcgggcaagggccgtgcccgcccacctctgctgcccacggccacccacccttctcccctgccccgtcccctgggccacccttcacgctggcttccagcgggccctctgccgaccgcctgcttcacacccctcagcgctccctgtcgcctgcggactccatggcccttcctggactggcccttgcccaactcccagccaccaccactgtccctaccactgagcccttgcacaggccacttgctcagacgagacaccctaactcttgctcactccctaaagccctcttcaggggtcacctcctccaagaagccctccttgccaccccccgccggcaggggcccctcctctgtgctccctcggtcacctgtgctacctctaacaccacactgaccacactgtatcgtgagtgtccgttgacgtgaccaattgccctgccaggctgtcagcgcctcaagggtagggtctgcgtgtgatttgtctctgagccccctgtgcccacccagggcccggcacagagtcgatgctcaataaatgtgtgttgactgcatgaatgacctggaaccaggccatgcgctctcgcctcagcttgctcgtctgtgaaaagggggagatgcggaggctggcacagctttggaagccaccagcccgcagatgccccgcagatgccctgacaacgctgccttgggagagactgccccaggttaccagcctgttccctgtgctgtattcacggccatgcccctgggtgttgtgtgaggttgggcctgggtgggtgactggctctgagagctggatttgagaggtcagagaggcccctgggcctctcttgggagcagcttggtggagctgagccccgtgcctgtgggcacctgctgccctcctgacctggcaggggggcagggcaggtgagactgcatccctcgtggtggtgatgggagaagccgtcccttcctctccagggccgtgtcctctgagctcatccaaggaagaggtcctgccctgagtttctccttcggccattgggagcttgtctttgtgcagagagaaaaagcgccctcatggcccggtgcggtggctcacgcctgtaattccatcactttgggaggccaaggtgggaggatcacccgaggtcaggagttcaagaccagcctggccaacatggcgaaaccctgtccctacttaaaaatacaaaaattagccgggcatgatggttgggtgcctgtaattccagttacttggagtctgaagcaggagaatcgcttgaaccggggaggcagaggttgcagtgagcccagatcgcaccactgcactccagcctgggcgacagtgagactccgtctaaaaaaaaaaaaagaaaaagctgccctctcccctgcctgggccatgtgccccctgggaagaccccctccccaaacagggaaggcacagatgtgtgccggcccgtgatgtgcattgttggcctccttcggtccttgccgcagtcttgaatgatagctccaagggatggtcccatcaagcagataaggaaactgagactcaggggcgggagtgacatgctcagtacaggtggggcctggtgtggctctgagaatggaggagacaagtg

SEQ ID NO: 25439 - DNA, 1211 bp, Artificial sequence
  DNA replication origin
aaaaattagctgggcgtcatggcacatgcctgtaatcccagctactccagaggctgaggaacccaggaggcggaggttgcagtgagcagagattgtgccactgcactccagcctgggcaacaagagtaaaactacatctcaaaaaagaaaaaagaaaaagaagagtttctgggccccaccccagaggctgattcacctggcccaggtggcttccccatgcagcatggactgagagccacctgcccctcacagaaagcccagtctatggaagaggaagtggctcagaaaggaagggcaggatggccccaccggcagtgacagtggggctggggggttctggctctgcacttcccagccatctgggattcctggggcgtgcagaagacaagcccaggcctgcagggatagggcatgctgagcctgtggaaggccactggatgcaaagggccatgggttcaagtgctgactccactatggcccagctgtggctctggcctggacttccccatctgtgaaatggggcatagttggctcctgtttcctggcaggatttgaagaaatcatggtgtgaaggctcaggctcagcaacagacagatatttgccaaatcaggggatggtcaagccgggaacttgaagtctctggagggagccgatccctccaggcccctccagacaatgctgggttgcattgctgcagtactgaggcttggtggcctgtggcccttttagatggactgtgaaggaggtgctgtactgtggggactaggcccagccacagcaggaggcagagggcatggactgtgggaagcgtgggcaggtgtgtgggtactggtgaacctcagagactcagagaagggctgcagagggcggagtggggggcacagcagagcaggtcggggaacagtgcccagctgggggcttgggaacaggacgctgggagacagcagcatttggggtggctgtgggaaggggctgcttctggccagggatgagtttgaccaggtggctggaggctgagcccgggcataccattctcaaagtgagtggtgagtttgggggcccctcagacagcgagctggaaatggagagggtggagggtgcagcttgatgatgggctggccaggtgcccacgtggtcaggcgaggtgctaggggagcaggaggaccctcgctctgcaagaacgctgcagttctcgaggcatcccggggcc

SEQ ID NO: 25440 - DNA, 1235 bp, Artificial sequence
  DNA replication origin
tcacctgcagggaagggagggcttttctgcaggcaaggcggcgcagtccccggaagacccgcacggtggcgcgctggcgcagagctcgggctcgccctcccgcccaggccgagcgggcggcgccggccccaggcgcggagggtcccgaggcgcggagtgggtgggccgaggggacgccagccccgctcccggaagcggggtcagcggggaggccgggggtcggcagtggcaagctctggccacggcgtaggggtgggatagccacccccatttcacagatggggctcccgaggcgcggtgaggtctggcagctgctgggggcgcaggcacggccccccgggcgggtgtagcggtcgcttggcgggtgggtccgcaggcctcgccgggagccgggcctgggtctggggcgctggcaggccggccgggaggcgcgccgggcgggaacgcgcagctctggcgggaagtgcgtggggtcggggggctcgggcggggtgcaggctgctgctgccaccggggaggcccgggggatgccctcactaagcggctccagagactgcgggccccgccctgccctgccactccctctcttgtgacctcggccagtggcagccttttctgagcctgtccccttctctgtaaacctggacgtgtttgatctacgctcgcgtcccggcaggaggcttccagcctgcacattcctgggggcccgccttccccaggcactagcttacccagggctgagctgctgaactctgaaaacctttggaaacctccctgccctctgccctagcgacctgcggctggagaccctgagctggcccagccctctagggtgcctaggagcctaggctgggttgggggtggcttcaggaaccttgggctgccgggtgtggggtgagagccttggcccagctatggccaggtgggaggttttcttcctctgtgctctgggtgctggggctggaggcggtggctctgctgggcttcagtgacagccaatgtgggtagacagaggaccatgccctgtgtcccagcaattagctgcccacctgggaaggttctggatgggacttggcagaagcctgagccggcccctcctggcagtcctggctgagcgggcaccgagcgccttatgctggtccagtcagttggagtgactaaattcacatctgcccagacctcaccctgggctccggacctcaccccgggctccagcctcaccccgggctccagcc

SEQ ID NO: 25441 - DNA, 762 bp, Artificial sequence
  DNA replication origin
cactgggacacgtacacaggtgcagtgggcacgtgtgggagagtgtgtgcatgcaaggatgtgtaagtgaacgtgtgtgatgatgcacgtgtgtgcacgggtgcatggcagcgggcacatgtgtgggggagtgcgtgtgcatgtgagaatgtgtgggtgtgtgtgcccatgggagcttgtgatgtccacgtgcgggagtgtgtctgcgtgtcgggtgtgtgtgtgcatgatgcgcctcctgcagctcaccctgaagctgcaacagtttgtgtgcccgctggcccccgagggctcacctatgtgtgatttggctggtctcaatagctactccacggtcaccatgatggggcaggtgctgcaggggcctgaacaagctctgggggcagcctctcagggcccacaggcttgtgggtggagggcgctggtgaaggaactgaggtcaggaaggaagggcaggtggtcagcgaggacctctgagagtcatccacacagagacctgggaagtgaggaatggggatggggatggataggataagatgggcctagcggtgggaaagagctcgggcacccaggaatggttcgagatggccagacagtggtgtgaaatctggtcgggcaggagttggggtcattggaagggcatggggcaaagggaggggcacacatatactgatgcctgtggggcccagcccagagccagtgcccttcctgggttccctgagacaccacagcatcatgccacttcccaggggaggctctgca

SEQ ID NO: 25442 - DNA, 1397 bp, Artificial sequence
  DNA replication origin
aagcacctactgctagccaggccactgctgggtcctggggtacagaggacagtctgcccctcacctgcctccaggagctcacagcagatggacaagcagacggacaatgagagccccgtgtgccatgtactgtgacctgagaaccacaggggggtgggcagggcagccttcctggaggagtagccctgagtcaggtcttgaggcacaagtgggaggtaacaaggggccactgcatggagggtcctgggtgacccagcacggaagcagaggcagcagcagctgctgaatggtcaatcagccattcgactaacatttactgatcagctgcagacaaagatgacagtatgattcccgtccttgggggcagactcttggagcaggggaggtgtcatgcagaaaacggacaagataaatacaaagcccatagtgtgtgtgatggtaaggagggtgctaaggatggggtatcgtgaatcagggacggggtgtcagaacagggctatggagagaggcctggatactcgagaaggacctcagggatgtgaaagaccgggccatggagcttctgagaaaagggtgttcctggcagaagaggcagctggtgcaaaggccctgagttgagagtgtctggtcttttcaaggaagagcagcaaggtcagtttgggcagagtgaaccccagaaccggggcggaagacgagcttagacaggaggggttgggaagacccacaggggtctatctgcagtctgaaaaggatattggtattgaccctgggtgagaagggagccagggagggttttgggcagaggagtgacaggacctcacatccgttttacgggcacgtggcagcaggagggaatgttcattctcagcgagtctgagcatcagaagataagaggaggcaaacccaaggccgttttgccagcccttgctggaggcatccatcacagcgccccagatgccgttactccagagacaccgttaatcgccccaccgcgcagggctgatgtttaatatgccatcagctggctttcttggttcaaacacactgagagctcccagttctttgcctcgagacagcaccagcagcatagcccccagagaagcatttcccttcttatgtacccaggaggacactcgaaattccaagtccttgtccctagattcccccaaggcaaggtctggaaatgatgacacacacccacagtcctacacacataaacacactctcagacacactcatcaccaacgccagggtcgccgggcggaatgcaggacgtccagctgaatttgaatttcagataaacaacaactgttttgtggaagtggaagcatgtcccaaatattgctccttcttggcagctaaggaatctcccctgaattgcccctacaccccagcac

SEQ ID NO: 25443 - DNA, 1770 bp, Artificial sequence
  DNA replication origin
aactcaataagaagttgctcccctatctccctcacaggcttggtcaccggttcttcatcacagacaattgctgagaactgaccctgggctcacacatttcgccacactgagtgccctgttgtgccaggaacaggagacacaatggggaacaatgcaccatcccacacccgagggtctcacagctcagaggggagcaaacacgccgcaggtcacactcacacaggcccccagtcaccatcaggcgctggctccagtctctgctgcaagcctagctggtactgcctgcaccttgcatgtaaggaaactccctaggaccagaggctcaggggcctggcctgaggtcacaacgttggtaaatggtagagctgggatttaaacccagtcctgtcaggcccaaaccctcacttttctactttgagcagccacctcttcaatggaagatggaataagagagaggtggtgggggtggaggggttggggaaggaaggagaggggaaagggcagattctacccaagcatgcaagctgacaccctggctggggacaggtaggataacagtgccctacgatagggtggggctgcgggcctcctgctgtaggtgcagacccgggtttagccgtgcttgccctgcaaggcatatttggaaagtatttgttgcttgggtttgggaccgacagacacatggggattagtgaaaccccagggtctgaggcggactgaggagtccagaagtcaaaagcgggggagcatacctccagcctcaaggagtctgggagatgagaggtatggagaggaggcgggaaagaggctagaaatgcatactcagtatgtctggaaactgatgagacatccagctctgttaatgtcaaagaggggacagggagctcagactgaaggcatctggccccattgcagtgaacctgggaccccatactaacaggctgggcttagtctatgggcaatgggagccccttggaagccacagaattaggactgtgcttcaggaagactgatgggaagtgcacatacctgggccaggggacacgaagcatgaagacaaactagtgggacctgttccaggtgaggtggtgtgagcctgggttgggctggcagccatcctcccagctgtggggtggggaactggcccgccagaccacactgcggatgcagaagaagccaagagaggatctggggtctagagggcaggagtggtggggtgtaggaatcaggaagtgagtgcagggggagggcatggccttggcagtgaggatgccatacagcatgggaggcacaccccatgagcaagggcagggccttagggctagagctggccaggaaacaggtggtgggggaggagaaaggcaccgggaaacccacctgagggggcggtgtcaggaggggaagagccaagcacacttgatgggaggaggaaagaattagaggaaagaattagaagctggggacgagtcaaggagaagggaggcggccagtggaacaggggtccagaggactgagctggacccaaccagtattctgggggcaggggcgcgtgtccttggaaagaaggagagatgcttcatcacccgggagaggaaggttaaaggatgaggtggatgaaatgccataggaaatgtgaggcttcaaccattgattcaacaaacacaggtgttgcttaacgatgggatacgttctaagaactatgctgttaggcaatttcatcattgtgcgagcatcgtagagtgcacttacataagcccagatggtacagcc

SEQ ID NO: 25444 - DNA, 1010 bp, Artificial sequence
  DNA replication origin
tagtaaggactggtgctatatgctgtgggcagagggagaagtttaagagcttattcctgtcctagcaggattgttaattgggaagatacattgtgagtgaaggctgaagggccacaggtgctgcgggtttgactgtgacttggtggatggaggacagtgggcaggacactgctagtgaggaaagaaggaacggtgcctgcagacattgtgcagacaagtgggaaataagactggactgagggcaaggggccaggtaagagaggccccaagagctgcagaggagcctgaaccagacttggggggagatggaggaacgcttggagggttcacgcaggcaggccactgttgagagctgtgttagggagctgggtctgcctgccgactgggctgcaggggccgcggcctgttgctggaacagcccaggatgtctgcagtgctccagaaatgaggcaccaagggccggccagagggaagttgctataggaccatacagctggaaagacaggaaggtcaagcggggacagcacaacctccaattagaagtgccctgtagcaactggagagaaagaattgagatttgggagttgtcagcaaaggggttgtagatgaagtctctaaagaagagaatagaaaatcggacaggggctggggtacagccttgacaaaggagagagaaggacattccgaaggaatggtcagagaggcaggagaatcagcagaggacattgtctctctaagctaagagcacagaaagcttccagtgggcatttgcgtagagttctctgcaggaagagtcaaggaggatgaggctggggtgaggctcttctgtctggtggcagagggctcccaggtgacctggagcaccctggtgatgcaataggttgctggatatcaaagggagagggcaggtacatgcacgttagaacactttggcagggaggccgagggcggggcttatgcctgtaattctagcattttgggaggccgaggtgggcagattgcctgaattc

SEQ ID NO: 25445 - DNA, 954 bp, Artificial sequence
  DNA replication origin
atcgctttgtggtttctctatgatcagcccctgggatacagatctgtcacgttacaggcttgttaacttgctacaggactaaggaaatcagtatttattctacatcagaaagacaccaagagttaggagaaaatagcgcagtcggagaaacacatagatctatgagtttgtaacttttccaggccatacacgtataaatgctgttaatggttcgcattttatacccatggagtaaagtaagtaaagatgcgccaaataacgagtgggaagcaataaattagaatatataaaatggatcatctaacccaagaatgagcttggtcccaaagagactgcagaacgtttacacttcctgttgcatcagtcataattcagttccatgccaaaatctgaaatggtaggtactaacttgtgcaggttgaatagagtaggtgaaataagaactgagtaagttaaaattaggaaaactcgtaggtctcgcttgggctcagaggcctgtccttccagaagcccagcttggacatcagtagatggcaggtgagggacagggctctgtcactctgcgtgcggcacggttagtgcatgggttagtaaggactggtgctatatgctgtgggcagagggagaagtttaagagcttattcctgtcctagcaggattgttaattgggaagatacattgtgagtgaaggctgaagggccacaggtgctgcgggtttgactgtgacttggtggatggaggacagtgggcaggacactgctagtgaggaaagaaggaacggtgcctgcagacattgtgcagacaagtgggaaataagactggactgagggcaaggggccaggtaagagaggccccaagagctgcagaggagcctgaaccagacttggggggagatggaggaacgcttggagggttcacgcaggcaggccactgttgagagctgtgttagggagc

SEQ ID NO: 25446 - DNA, 911 bp, Artificial sequence
  DNA replication origin
tccatgctgaggccgccgggccgcgcccgctccccggcccggccgcgccgccgccgctcaccacacactgagctgagcccgaccgcgaccggcgctggcgctggggccggccctgctgtggcggctgctgctgccggttaccatggcaaccccgggcccgccgccgccgccgcagccgcgcgagcccagcgcccgctccgcccgcgagggggcggcctcggcggccgcggggcccgggccgggagggggacgtggcggggcggggccgagcctccccgcgcctgcggcctctttccccgcggggagcgcggcccgggcggcctgggagccgcaggggcgcgtctgccgcccgctgtccccttggccaggccccgcctccgcgcacgggggctcaggggctgcggggcgcggcgggcggcccttgcgggggcgcggggacaaagaccaaggccgggagagagcgggcgcgtggggcccggggtaacctccgccacggacacccaagcccacccgcccccgacgcgctgttcccgcgcccgcgggcagctccacgaccaaacatggacaacgcgcccgcacatttcggccgtttccacgccgcggctcactgtggcccacatccgaccggcgcgttcctctgtccacacgtttttccgcggcagcaaggccctgcctcagtgagacttagcacgggactggcaagtcagctcgaaccttcgctcacactgggccagagaggctatcctggtaccaggctggaagtcccccgtgttgaggactcgacgcagctaaaacatcgctttgtggtttctctatgatcagcccctgggatacagatctgtcacgttacaggcttgttaacttgctacaggactaaggaaatcagtatttattctacatcagaaagacac

SEQ ID NO: 25447 - DNA, 1485 bp, Artificial sequence
  DNA replication origin
ttgctgaatgcatctttgtggtgttgtcttcacgtgttcctctgtcccctgtatttcccataaagtgattgctggatatcgaggcttggtcatattcaagctgtatatgtgttgctgtatttttcctttaggaggcacataatgggtttttctcactttttgtgacattagtagctgttgttacccagtgcctagatccataaaggttgccaactattgatttccaatgttagcttttcttcttcatttattagatatagtacttctatgaagaaaaactttccttcatctacaattttggtacccagtggtagagttcatataggaaagtcagaattaatgcttgatttcattcactttattttccagtttctgagataatacatttgctttctgctcctctaacagtcaccgatcagtggtggtgatagtagtggtggtggtagtggtggtggtattggtggtggggggggtgggggggtggtggtggtggtggtattggtggtggtgatggtggtggtggtagtggtagtagtggtggcggtggtggtggtggtggtggtggtggtggtggtggtattggtggtggtggtgatggtggtgatggtggtggtggtggaggtggtggtggtggtgatggtggtggtggtggtgatggtggtggtggtggaggtggtggtggtggtggtggtggtggtggtggtggtgatggtgatggtggtggtggtggtggtggtggtggtggtgatggtgatggtggtggtggtggaggtggtggtggtggtggaggtggtggtggtggtggtggtggtggtggtggtgatggtggtggtggtggaggtggtggtggtggtggtggtggtggtggtggtgatggtgatggtggtggtggtggtggtggtggtggtggtgggtagtggtgtagttttggtgccattatggattgaagtttatttgctgtgttcctgtctgttatattaggtggaagttactctagttggctcctgggtccttttgacgtgacctcaggagcctttagtacttgttctctggcataacaagttgttccaggatccttgtatacatttcttacctatagccctttctctcaggaggccctccttcctttttcatctgaagggaggagatcacaatatgggtgttaggagtgcttgttgccacagggtaggggattgtcttgccttttcattatatgattatgttgtgggaaatactgtttctttcatgcacaggccatttggctatgctgacactcttggaaactggagttttggttctgggaaatacgtggctgactctgagctgctggtctctgtagggatcttctattttataaccttattgacagcgtcaactctgcctcacagtgggacgtgtcctcgagctttagaagatctgatagagcatctcttttggatgttttttcgttgtctctgaaccacgttcataacttctcaccctaaa

SEQ ID NO: 25448 - DNA, 1317 bp, Artificial sequence
  DNA replication origin
taaggcctggaacaggtgaagcgagttgacatccaactgcaagggcaaagtaggcattcggctttgcaggcccagcacagacatcctgtgggaggtggacacgggaggctctccccggaggctggttttgggagccaaggtgtgcttgagattgtaggttgctcaacccaggccaaaagaggctcccaagccagcttgggggactccagaatccaagggcaggtaagtgggctgccggagaggagcgagagccaggagggccatggtggagcaggagacagtcccacacgtggaggatcttgcgtctgcagcagcagggcagctcgatgcagtgcttgccaggagccagtgtggactctgcactggcttagcaaccggcattccagcatctccatgcgcaggcagtgccaggcaggagatccaggcaaggtggggacagcctcagccacgtagggaagagagaacatgaggccacgggtcgcactgggctgtcagcccagtgggggcggggggtgtggaggtggaggaagcttccaggccggttggaactggggagaggcaaagttcagtggattcttggcattggtagatcttaggtcctggccgccggggtgagagggactccctggcaggggctgtctttgcttcactggaaagcccattctggcatctccccagccccccacatttttttgaatgattactcccacgcccaaaggttggctattccattcattagccatctcttctgtggtttgggaacaggctgctgtcatcctatcttacaggcacaggagcgcataggaaagggtagatggggatggtccaatccacaactagggggacaggttttggtgaaaaggagctagggaacatgcgcttgatgcaaggtgaaaactgactccagacctgttcttcctgcagattctcttttttaaaaaaaactttggccaggcgtggtggctcacgcctgtaatcctagcactttgggaggccgaggcagcagatcacctgaggtcaggagttttgagaccagcctggccaacatggtgaaacccagtctctactaaaaatacaaattagccgggtgtggtggcacatgcctgtaatcccaactacttgggaggctgaggcaggagaatcgcttgaacccaggaagcggatgttgcagtgagccgacaccacaacactgcactccagcctggacaacaagagcgaaactcagtctgaaaaaaaaaaaaaaaaaactttacagaaaatttcaaacatacacaaaagtagagagagcctctcacccagactaaaaatgatcagcgt

SEQ ID NO: 25449 - DNA, 948 bp, Artificial sequence
  DNA replication origin
gctcttttgcccactccctctttttaaaggcagaatcaaagccctttggagaacagggatttacccaaggttgctgtgaccttagctcgggcagcccccagctgcccacctttgcttctttttagaaaatgaaggttaatgtgctttaaatcataaaactcatccagactcattatagcaaattcagaaagaagcccagccatatcactaccaccctgaaatagcactattacttctgagcacatttccttcctgtatttctttttcgagtagttttggatgtgtttccatagttaacatattgcatatacaatgctttctattgcttttttcatgtagctttataggcattttcccatgtcattataactttgttataaataactcctatcagctgcataacatgatgccataatctatatcactgctccttgacagtcttctcatattgaagattgtgatggtgatgatgatggtggtggtggtggtgctgatgatggcagtgatggtaatggtgataatgttgatgccaatgatgtggtgatgctggtgatcatggtggtgataatggtggagatggttacggcgtgatagtgatgatgatggttgtgatgtttcatggtggtggtgatggtggtgatgctgctgctagtggtgatggtgatgatgaaggtgatggtgatgttgatgatcatggtgatgatgatgatggtgattgtggtggtgacgatgattgtgatgctgaggtgatggtgatggtggtgatgctgatgatggtggtgatgatgatgattgtgatgctgaggtgatgatggtgatagtgatggtgatgatgatgaggatgattgtgatgctgacatgatggtgatggtggtgatagtgatggtgatgatgatgatgattgtgatgctgaggtgatggtgatggtgatggcggtgttagtggtgg

SEQ ID NO: 25450 - DNA, 1003 bp, Artificial sequence
  DNA replication origin
ggggtccgggcggcgggaacgcgtgcgcgtccgcctgagactcggggcggcggcccctggcgagtgcgcgggcggctccgagtcctcgagggagaggcgcgcgggcgcgcgggctagtctcagcacagcagccaagagctagggtacgcgcgttgctgttcgccccaccgccctccgaggggactgcgcgcgcgtgcgcccctccgcccgcggccgctgaggtgaatgagcgcgcgcggcggtcaaagcccgacacaaaaggcgcggggccccaccgtccgcgcctccgggagcgctgagcttgaggctgcgaggggcggggcggacgagagtggcggggctgaggggcggggctttgagggaagcgcgaggggcgtggccggggtgggggcggggcgccgggcgggcacgtggcgcggtgcgctccctcccggcgcggacgctcctccagtccccgcctgaccccagagctcacagaggccaccgggggagccagggtccgtgctcgatggccccatgattcccatcacctggccctgctgagcaccctgcccgctcggactcggggcatccctgatccgagggccgtcgaggtcaccggcgactgattccctctctttgtacataaggagccgtggcggggccggagagttgcagctttggggcgatatcagtattcgaagtatctcccccagctcaacaagagcccacacgggtccccagaaccacagcctgtgaaaaatcacatttaccgtacacagcgtcaagtagttcgtccaggttgtctctggtttttaaatccccatctttcctaaaggttagtgaatctcactggtggctggaaaccccagatcctccagggtctcactccccgtgtgtaagaagacacagttccggcccggcgtagtgcctcacgcctgtaatcccagcactttgggaggctgaggcgggtggatcacctgaggtcagaagttcgagaccagcctgaccaacatggtgaaac

SEQ ID NO: 25451 - DNA, 1053 bp, Artificial sequence
  DNA replication origin
ccaggggccgccgccccgagtctcaggcggacgcgcacgcgttcccgccgcccggaccccagccggctcgccccccgcccccccatcccccggcggcggcccccaggcacgcgcccgcgcacacgccggcccgggcacgcgcccgccaagatggcaggggccggggcccagctgtcagtcgccgccgccgcggcccttccccgcagctagcggccccgacgcccacccggagaagatgagcccccgctgccccccgcagcccagtcagacgcggagccgccgcgcccggggccggctcccccgctagcgcccgcgtcccgcgccccgccgccgccgccgccgccgccgggtcgcccctggcccggcgcgcccgtccccggcagcgacaatgaggtgagtcggggccggcgcctcgtgggaggtggcagcggccagcgtcggaggggctgggctgggggcccgcggtgcccccgagggcgggaggggggctccacgggcgcgggggcttccagagaaccgcgggggctctgcagagattcgggggcattcagagcgcgggaatggcttcgcgagagccgtgggggcgtctggagagccgggagggtctgcagggcttgtggggggcagtgttctgcaaggggcaggcggcgctggctttggctgcttgtggggtcctcttaggctccggggggcctgcggcggcctgggaggcagacccccgcgggcaggtgtggccgtgtcccgaccgcgcgaggaccgaagttggcggaagcccctgtgcggtgccttccagcccggaggaggctggcctgaagcccccaggcgttgccgaagcctccccctgccagcgcccagagccgcgtttgggcttttacaggtgtagtttcccctcgacttggagcccgtcaaccccttcgtctcctaattctcaaccccccttttttttcttcttgcacgccagtaaagtgcaaggcccccaaatgtaccgctcgttgatgtatcacccagctcgggagcctgctgattatcaggccaagaaataaaaccttgctt

SEQ ID NO: 25452 - DNA, 837 bp, Artificial sequence
  DNA replication origin
taatcccagctactcaaggggctgaggcagaagaatctcttgaacccaggaagtggaggttgcagttagccaagattgcgtcactacactccagcccgggtgacagagcaagactccatctcaaaaaaaaaaaaaaattacggaaaagccccttttagcattaaggtctgaaaagctcccagcagcatctacattagtgtctctgctcaaactgctgaaacctccccagcaggagccacacacctagaacaccatggtaaaatgaggatgtgtgaaaaatactcaagtcaggtctgaacctatggtactgtttggatgcttggagtctctgcgtcactgagtaagtcttgcccctgcccacctccagtaaagttgcgtgggacaagcgagagtctccctgccgtgtgtgtgtgtgtgtgtgtgtgtgtgtgtgtgtgtgtgtattcctgccttggggcaggtgtgtgtgtgtctgtgtgtgtgatcccgtcttggggcaggtgtgtgtgtgtgtgtgtgtgtgtgtattcctgccttggggcaggtgtgtgtgtgtgtgtgtgtgtgtgtgtggtcccgccttggggcaggtgtgtgtgtctgtgtctgtgtgtggtcccaccgtggagcaggtgtgtgtgtgtgtgtctatccacatgtggtctcatcttggggcaggtgtgtgtgtgtgcgcatgtgtgtggtctcgtcttgcagcaggtgtgtgtgtccgtccgtacgtggtctcgtctgggggcagctatgtgtgtggtcctgccttgggacaagtgtatgtgcttgtgtgtgtgtcccctgctgttcacaccccgaccgcca

SEQ ID NO: 25453 - DNA, 895 bp, Artificial sequence
  DNA replication origin
gtgtggttatgtatttacctggttgtgcaggtgtttgtgcacacgtccctgtatgcgtgtgcactgtggcccgtgtgactctggaatcagaccaaattccaagcctgggccgtggcctgtgccctccattccggctggcagtaccaaggcggtgctctgcaccagggaccatctcacttgaacttcaccacagcccaggaggcagctgcctcctcatccattatccctgttgtatagataaggcagaggcacgggggagaggtgcccgcctcaggaggtgacggggcggaggggagaggtgcccgcctcaggagatggcagagcaagttggcaagagtgcctgccgtgagccatgagcctttacctttcctgagcaaagtgagaggctctgggtgcctggtgctggccccgctgtcctggttttgcggccaggctccctgcgtcctgagagcatccttaggaggtgacagggcaaagagggggcaggaaaggcatcctggggggggggggcagggagggcatccctgtgatgggagctgggccaaggctgcatgccgttgagcagtggggcggcgtggtggtggcgcagttgcgggcgctgaagctgggagcacttcctggaggaagttggtgggggtgtctgtgtagagcaaaggctggaggggacagcaggtgctcaagaggcccttggaacatgacaagcagtgaggctggctgaggccaaggttggcggatcacagggctgagatgcatgggtgtgacactgtggcctggtaggactcaggcgggcactcagcactgcgcaggcgctgcgggagaactcccccgagcagtggggtctgccgggtcagaaggcggggccgagtggagtggtgcaatgaattctgcaactacc

SEQ ID NO: 25454 - DNA, 2674 bp, Artificial sequence
  DNA replication origin
caggtttctcctctctccagtggtccacagtggggcccctgagggaaggctggggcttggaggggcagctgagtcctaggaggtgctgaggaaagcgggaagggcacggggctccctgaaaggcggctgcacagggcacagggagggaccctgagggcgcaccatgtaggcagaacttagcatctttgttcagcagatggggaaagtgaggcccattctccaaggtcagggctgccaggctctgtcatggctctcacctctgaggggtgcagaagtggctgatgcttgcctgcacccaaaagctggaggcctgggctggccctccccagagctgcctgcttgtggctcacctggcacaggtgtggcctgcccctccctcttgccccaaggtttggtctctttccaaggggaagcagcggctggttgcctgtggaatgggggcggggcgggggggggtgttggggtgggagtggggctggagctggccggcccccaggcggattggctactgccctgggggcaggggcgtccctgggtaagagggaggcagtgggcagtggtgccttcggacctgcggtctcagcctacatacagacacacaaaggggactttgcatgcgacttccttggccctgcgcctgggccagagccttcctgagtgggagctgccagcaggtcctccttgccctgcctgacaggagacattgcttccctgcctgggaccactttgctgcgggcgctgggtccccacctcctggctgaggctccccgtgtgcttgagtacacagacggcatcaaggcacagcctctgaatcgtcttcgctggcccagacctgctgggtgggaacaagctgggatgaggcctggctcggggagcagcagggcccatctgccagcgtgggccacatgtgcccctgctggagtcctgccctctgagtctggtgggatgaggctcggccagggtgggggccagcgggccctcgagggacagggcctgtgtgcaggggcaaagggaccagcgaggtttgctggccactcccaccttctcacccctcggccactgcagtgggagcggaggagggcggggtgcagccccaccgagcggggcctcatacctccctgtcttccttgcagccaagtacccggccatcaaggccctgatgcggccagacccgcgcctcaagtgggcggtgctggtgctggtgctggtgcagatgctggcctgctggctggtgcgcgggctggcctggcgctggctgctgttctgggcctacgcctttggtggctgcgtgaaccactcgctgacgctggccatccacgacatctcgcacaacgcggccttcggcacgggccgtgcggcacgcaaccgctggctggccgtgttcgccaacctgcccgtgggtgtgccctacgccgcctccttcaagaagtaccacgtggaccaccaccgctacctgggcggcgacgggctggacgtggacgtgcccacgcgtctggagggctggttcttctgcacacccgcccgcaagctgctctggctggtgctgcagcccttcttctactcactacggccgctctgcgtccaccccaaggccgtgacccgcatggaggtgctcaacacgctggtgcagctggcggccgacctggccatctttgccctttgggggctcaagcccgtggtctacctgctggccagctccttcctgggcctgggcctgcaccccatctcgggccacttcgtggccgagcactacatgttcctcaagggccacgagacctactcctactatgggcctctcaactggatcaccttcaatgtgggctaccacgtggagcaccacgacttccccagcatcccgggctacaacctgccgctggtatgtggctgggctggcagggctgcggcggggcagggctgcacagccatcggaggaggtgggggccctggaagggccttgggccatgcccagcagcctctccctttttgtgctagtcatggcatggccacttgcacttgtccccagggcaggaggaaaggccacacaacacaggcgagtcctctgctggaggctgaagcaaattcagggaggtggggtctgagaggcatttcacagtccaggctgcttgatgccgccatgatactgacagggtgtcttccttgaagaggggcagcattagcaacactgcacgggaagcaccatccttcccgtctgcaggctctttccctgctcattccttgtcattgccctgtgaccctccaggggccagagaggacagggtgggccttgcccttcgcagcccaaggggcttgggcagagctgatggggagtggaagccccgggtatgggcatctttgccttaggagactgggagctggagaatttctgaatgagaaaggaggaaggggaagggggaggaggagccgtccctcagccattgccagcctgtgccttggtagcctctggctgcctggaaagagctggagttacctgtggcaaagggggcgggaggaggtggcactggggaggtgttcgagcgcctgagcgcacgcctctgtgtgcaccggggtgtgcacgtgtctgtgtgtgagcatgtttgccctgtgattatgtgtgggtgcctgcccacgtgcgcaggcatttgcatgtgtgcctgggcgtgcgcacacgcatctg

SEQ ID NO: 25455 - DNA, 952 bp, Artificial sequence
  DNA replication origin
tccctccttgagtcgcgccctgtgctgcccatgctcagctgcctcgtgcactgctcagtttttagttacttccagttggtggctcccaagcctgcaagctttgggcctgctcttgttgaaacaagccagggccaggccatcgccccaagaccagcttttcctcttagatcagagcacttcctttaatgacaatagtaccagcttgtgcctactgagtgctggcacccccagggctcagactaatgtgctggccactccacagcctgacgggcatagaggaatggcgtccccatttcccagatgggaagacgcaggctggtgggcccctgctattggccaggtgatggctggggttgggcccctgaggcttgttgggacccgcctgcactaggcctcttgccagatgtgccacactggaaacagcccagagtccactcagaggggacttaggggcatgcctgttggatgggccagcccagtgcctgtttctggggtcccagtggctccggaggccccagcacacccatgggagataggaccagcccatagctggggccgggtgaggggctggtagggtgggcgctgctgtccttctgtgtgcaggtttctcctctctccagtggtccacagtggggcccctgagggaaggctggggcttggaggggcagctgagtcctaggaggtgctgaggaaagcgggaagggcacggggctccctgaaaggcggctgcacagggcacagggagggaccctgagggcgcaccatgtaggcagaacttagcatctttgttcagcagatggggaaagtgaggcccattctccaaggtcagggctgccaggctctgtcatggctctcacctctgaggggtgcagaagtggctgatgcttgcctgcacccaaaagctggaggcctgggctggccctccccagagctgcctgcttgtggctcacct

SEQ ID NO: 25456 - DNA, 1077 bp, Artificial sequence
  DNA replication origin
gcagctgctggagctttgcacccaaggagttccagaggtggcacaggctgggagtcccaacccactgggcagaaaggcctcactgaacaccccagcctccagtgggccccccggaagccctgtcttaggagtgggtctactctgcacccacccaaggtcagttgactgactccttgacaggagaaaacaacccacgctttttgcaaagattgcaaagatctaccatcttcagctccagagcgcccaggtccctgggggagtgggagtggggacgtgccaggaacactcgggaccacgccatgcagactggatgtgcaggagagggtcgtggctgaggtcaccctgggtacggtcaggatggagtagtaactgaagccagggcttggaggtggtcagctgccaggggtcacagaggttcagggacaagaagagagagcaggtgtccctcgacttagccaggtcatggtgtctcagcaggagccattccggcacagcccgaggcaaggcgagggtgagatgaggtagcgagggtgggtctgcctagggcatggggcagggagggcaacagggaggcaccagaggacggcaggatgggaaggagatgccagggtgggcgtcatggagatgccagggtgggcgtcatggagatgccagggtgggcatcatggagaaggcaagggtcactggagctgggtgccaaggggactcaggaactcctcgagagctatggagcattatttctgggtgtctgtcaaggtgtttccagactggcagagggtaagtggactgagtgaggaaggcccgcccacaatgtgggccagcaccatccaatcagctagggccccgatagaacaaaaaggcagagacaagggtctccctcctgtctttccctccctctctcctcccatccttctctacttctcccaccacttccctctcttggagctgcaacacacacttctctagtccttggatatcaaaactccagcctttggactccaggaactacaccagcaccctccaccctccgcctgctttcaggccttcaatatcatactgagggttccaccgtcgagt

SEQ ID NO: 25457 - DNA, 1341 bp, Artificial sequence
  DNA replication origin
cgcacacgcagcggcgcaaggagatactgggtgagcgccgcgcggggcccaccccggtggggaccgccccgttggcccgtctggagtcgcgtcgtggggtcgagcccagacgggccgctccagctctggcccaaattccagtgggcgttccgccattgccgctcccctccctggggtccccggccggctccccgagggtcccccaccctggccgggtctgaaactccctgggacctgaggattccgaggaccccagtacgggtccgagcgccagggagcgcgtcccagctgttcctcgcgagccactcccggggccagggccggggctctgggatgctgggacgcgagggcgcaggggcggccccgggacgcgctacgaggcgcacgcgctccctggcgcggaggcagcttgcgcgacgcggggcctccacccgcagtcactgggcgcctgctgcgctcagagcccctgggtctcgcggccacgggcgccccaggctggagttcagggcggatgagcgccgggaagggagcaaacgcgaatgagaggcgcgcgtgttttctttgaaaaaagcaaagattgtactaaagaatccttctattctggcatgtcgcttattacgtggtggctgttttccttgttgcttcgtgtcctctgcgaggagggcatctttacccactcggagtcactctcgttcatgccagaggccccatcccacccacaagcaaggtggccccggtgagtcgtccttggcccgggcttacggggttaaagggcctgcgtctggagagtggcttttgccagatgccaccaaatcgccacaggctgagacaggcccgcccctcccgccctgcctaagtcagcaccgcgcgttgccacactttgtaatcttcagtcagattggggaaacaataccatttcactgtggctttaatttgcacttatttgatggaggtttcacattttaatcgggcgttttatttaatttaattaatttatttatttagagacagagtctcgcgatctcggctcactgcgacccccgcctcccaggttcaagcgattctcctgcctcagccttctgagtagctgggattacaggcacctgccaccacacccggctaatttttgtatttgtagtgagatggagtttcaccatgttggctaggcgcgatcttagctcactgcaacctctccccactgggctcaactgatcctcctacctcagcctcctgagtagttgagactgcaggtgtgtaccactatgcccggctattttttttgtatttttactagaaacagggtcttgccatgttgcccaggctggtctcaaacttccgagc

SEQ ID NO: 25458 - DNA, 1719 bp, Artificial sequence
  DNA replication origin
ggtgtagacccactcgaagtcgctgcggctcgcgctgttgcccatggtggggcgggaggcgccgttcggagcgcggccggctcggctctgctgcacctgtcgcggcggccgcggcgcggaaccagctctgattagggcgggggcggggtcccggcggggcggggccaggtgcgccaggcttggggcggggcacctctggctgggcggggcggccgggccccggcgctctccagaccccggcgggtagctggcgctttgggaacctcagttgcctcggttggaaatggggctccccggcaggaccgaggtggccgcgtgccatctgcgcgagtccctgggtccctcgatgcgcgggggcgactgctgccaccgcggcctcccaccggctctgcgcgccccgcccacccgcgggcagccgtcgggtttttaccccggcccgttctctccgcagccccgacccgctcgcgggcacgcccctgtggctcgcgccgcccctgccccaaggaggagcggctggcaggatagggggactgcggaggatcggcgtggaatggatgcgacggtgccagtaaacaggcgccgaggaaaggttggtgcagcaatcctcccttcctccacccggccctttcaccaataatgcaaaggggagataatgcgtctgcagcaacctcacagggatgagtcagacccactcctgccttcagggaacttgagttctggatggggacacaggtacagaagtggctgttatgattcagggtgatacgtgccatgacacaggtaggccctgaagcagctaggatccaatagaaggaacttttgcattgggccttgaggggtgggtaggagttcaacagctagaaaagggaaaggcattggtgctagggggaacagcagatgcaaacgcttggaaacaaggcagaacctgaatgttctcaaatggaaagtctagttttggggaggtaagggcacagggcccctcatcttcaccctctcagtgatgcctctgttccttctcccactcccttggagttttggagggtggacctgctgtgcctgtgggccagagcctggcctcggctggcagttgcctgggagctgactgacacatcagccagcgctgccacaggctcgcacatagtgagggcgtgcttctgtgcgtcccatggaagtccatggcccggggtttggtacacttggcaggccttccttagctcagggccaaaggcagtcctgagtgagccaggaaggaaggcatgggtgtcctgcagccgccagccaccatcccctgaattagccatgggaaaggtggacacagaggccagattttccatcagcagggggacccacatgccaccatggccatcaccccttgccacacccaggaggcctcccggcccagcttgcacccttgggagaagactcattgctcccagggcagcctgctctgttcccagccagaagggtcctcagaagtcatcccaccagccatcactttacagatcaggagactgaggcccagagatgaggagcgccttgcctgaggcacagaggaattaacagcaaggctggggcatgactttggcccctgacctttgaattaaaaagcttccaaaatcagagccttcgcccctgtgttgaactccgtgagatctgccgccctgagccccagctccaccctcaggacaacaccaagcctgccagttccctctgccccag

SEQ ID NO: 25459 - DNA, 1070 bp, Artificial sequence
  DNA replication origin
cggggcgaaggaggccccctgaagtggggtggggggagcctgcccggagagtcaggggagcctgcctgggagagtggggggagcctgtctgggggagtagggggagcctgcccgggagagtggggggagcctgtctgggggagtggggggagcctgcccgggagagtggggggagcctgtctgggggagttgggggagcctgcccgggagagtgggggtagcctgcccgggagggtcgggggagcctgtctcggggagtggggggagcctgtctgggggagtggggggagcctgtctggggcagtcggggtaacctctctgggggagtgggggaagcccatccaggagagtggggggagcctgtccgggggagtggggggagcctgtctgggggagtggggggagcctgcccggggctgtgggggagcctgcccggggctgtgggggagcctgcccggggctgtggggggagcctgcccggggctgtgggggaggctgctcttcactctcaggagctcagtgtgaggacccccgcccccacagggacctagtgggcaggaggcgccctaccctcaggaccaggggcacaatgtttcatagaagaacagagcactctatccctgcccttcctgagaccccggaggaggtcgccagtggattcgggagcatgaaatgctccggtgatgccgcgtgggtctccctgagcacgagcttaccagggggccgcgctcaaagcagcctcaaaaataccgacagggtcattctcccgcagcggctgcagagccctcggaggtcgggtaagacgccacctaaagacagggccatgaggggtcagcaggactttatctgataaacaccggaaagacagaatggggaacagaaatcaaaaggaaaaatgttacccacctcgagatccaagccattctaacaggctttgcttaaaaaagaaggaagtccgggcgccgtggctcacgcctgtaatcccagcactttgagatgccgaggcgggagggcggatcacgaggtcaggagatcaagaccatcctggctaacacggtgaaaaccccgtc

SEQ ID NO: 25460 - DNA, 2008 bp, Artificial sequence
  DNA replication origin
agtatagattaagtccatgaagatttgttaatcggtgcattttagcaaatgctaaagttaacttacagcctattttgtttagaggcacaaaagccagtcagtgcccttttaatccttttatgtgaatccttttggtatatgcattttgtcatatatttgttatatatatcatttgtcatatacatttttacatacacattttggatttctaattgggttgaattatggacacttgttttaatttatataatacataatctatttattgtatattttataagtatatttatatatataatttattggctcctcttttctccctctcctatatctagggtgtttttgtccttcttctccacccccttttgttcccttttaggcttttggccacctcaagtttttgggttttgtctcaggctgataagaggaagtggtggcggcaggggtatgtgttgggggtgggtgtgggtgtgtgttgggggcaggggtgtgtgtgtgttgagggcaggggtgtgtgtgtgttgggggcaggggtgtgtgtgtgttgggggcaagggtgtgtgtgtgttgagggcaggggtgtgtgtgttagtgcaggggtgtgtgggtgtgggcatgtgttgggtgtgtgtgttgagggttgggggtgtgcgtgtgttggggtgtgtgtgttgggggcaggggtgcatgtgtgttggggtgggtgtgggtgtgtgttgggtgtgtgtgttgagggttggggggtgtgtgtgttggggtgcgtgtgttgggggcagtggtatgtgttggggtgtgtgtgttggggcggggctgtgtgtgttggggttgtgtgtgttgggatgtgtgtgttggggtgtgtgtgttggggcggggctgtgtgtgttggggttgtgtgtgttgggatgtgtgtgtattgggatgtgtgtgtgttgggggcaggggtgtgtgggtgtgttggggtgggggtgtgtgtgttgggggagcggtgtgtgtgttgggggtgggggtatgtgtgtgttgggggtgcgtgtgtgttgggggcgggggtgtgtgttaggggcgagggagtgtgtgtgttggggggtgtgtgtgttgagcgtgtgtgtgttgggggcagggttgtctgtgttggggtgggggtgtgtgtgttggggcgggtgtgtgtgagtgttggggtgggtgtgtatgttggggcgggtgtgtgtgtgttggggcaggtgtgtgtgtgttggggtgagtgtgtgtgtgtgttgggggtgtatgtgttggggcaggtgtgtgtgtgttggggtgtgtgtgtgttggtgtgtgtgtgtgttggggcatgtgtgtctgtggttggggtggggtgtgtgtgtgtgttggggcatgtgtgtgtgtgttggggcgggtgtgtgttggggtgtgtgttggggcgggtgtgtgtgtgttgggacggttgtgtgtgtgttgggatgggtgtgtgtgtgttggggcaggtgtgtgtgttggggtgggtgtgtgtgttggggcatgtgtgtgtgggttggggcatgtgtgtgtgtgtgtgtgggggtgggggtgttgtgtgttgggtgtgtgtgtgttggggcatgtgtgtgttggggcgggggtgtgtgtgttgggggcatgtgtgtgtgtgttggggtgggggtgtgtttgggtgggggtgtgtgtgttgggcaggtgtgtgttggggcgggtgtgtgtgtgtgggggcgtgtgtgtgtgtgttgggggcctgtgggggggcggggtgtgtgttggggatgtgtgtgtgttgggggtgtgtgtgtgttggggtgtgtgtgtgtgtgtgtgttgggggcctgtagggggtggggtgtgtgttgggggtgtgtgtatgtgttgggggtgtgtgtgtgttggggcgggtgtgtgtgttggagcgggtgggtgtgtgggagcgggtgtgtgtgtgggggagactgccctgtctgcagccagtgtttgcctccccctttcctttttctttttgttctttttt

SEQ ID NO: 25461 - DNA, 924 bp, Artificial sequence
  DNA replication origin
ttaaggataaaataaaaactggtgggtggggctgagggggtgcggaatcccaattgcagaccacacacaaacacacccaagcaggtgcaggcattcggagcaggggacgtggtgccagccccacaggcaagagccaacaccaaggcagaaccgggctctactctgaattgtgccaccttcatccctgggccgacaaatacagtgcttcccgtgccgtcagctgggagcccaggccaccacatttcagcgctttacagtggagggcaaagggactcctcaggagtggaggtgcgctctggccctggcacatctggctcgggcgctccatgggatatccacgtcccaaaccacagctctgaaatactcttggtttccccagccaggtccccagcccaggcccaagaaagactgagcatggcagccaggcacagaggcagccgggcttctggccccaccagcatacagagacgcattctgaagctcggatagtgcgtgaggtgtgaggctgcctctgctgccggtgccacccagtgggaaccccctccatgccggtgcagcccatggacacaggatgctggggatgaaatgctgacagacaggcaggagcccactcagctccccccactgacctaaggatcctccaaggggctatttccggttgaatgtgattgcattttcagtggataatcaatgtttgttgtggacacaaatctggagagccccaaagacctcaaacatgtccctcaagaatgtcaaggacgcaaaagataaatgcttgaactggctgggcgcgatggctcacgtctgtaatcccagcactctgggaggctgaggcaggtggatcactctgaggtcagaaactcgagaccagtctggccaacacggtgaaaacgtttctctactaaaaatacaaaaatgagctgg

SEQ ID NO: 25462 - DNA, 1009 bp, Artificial sequence
  DNA replication origin
accgtaaatatatacacctagtatgtacccacaaaaattaaatttttaaaaaatggcaaggagggccaggtagggtggctcaggcctgtaatcctagcaatttgggaggctatcgcttgagctcaggggttcaaggccagcctagcagcctgagcaacacagcaagacccagtctctgcaaaacacaaaacaagaagaagaaagtcaagtctgtccccagttcagcggctcacgtctgacttctctccttggcctcatgcccagggcaccttcctgaatcccagaggtgagcaaaactccacctccacaaccccagggcaccccattgccaccacccctcagccttggaaatggagtcaccaggcatgaagtttagatgtgcacaacctggcaccgagtccctacggtgggaccatgcccgcagcggcagtgtggaagatgggacagacacagcgaaatgcctccagggcgtggtgggaggggccggaacagggagatggcgcgtgagtagcatctgttcttacagcaaaacctgtaaaagtaaaatatacgtaggtttgtcactaaagacgtgtctgcataaatacacccacgccgaagactgttctgatcacctttttatataattaccgtgtgtccttgtggctgtgtgggtggctgtgtgtgtctgtgcaaaggtgtgcctgtgtgcatctgtctgtctgcagaggtatctgtgtgtgtttgtgtgtgagtggaggttctggagaaggcctggaaggatcctgtcaaactggaggggggctgcgggatgaggatttttcttttaatgcatctgcccagtttgagttttacgaatgttaatcatttaaaggcagaaaagatatctttgggggttttgggtttttgttttttgtttgggtacagggtcttgctctgttgcccaggctggattgcagtggtgtgatcatagctcactatagccttctaagccctgggttcaagtaatcctccctcctcagcattccca

SEQ ID NO: 25463 - DNA, 1318 bp, Artificial sequence
  DNA replication origin
gaattagtggactcctcccaggctcgtcctccttcgccacccattcccagcgcattgccccccgccagccaggtccccaggcctcccaatcctgcactgtccgcggcggcgggggtggggagaggagggtgctttgcactcgcggttccccccccgggagcattgatacccccgcccctgggagcattgatcctcctgcccctgcagcccggagcccggagcagcccacgttgctcccgctgcggcccagcccagcccagcccagcccagcccagcccagtgccgcgcctgtcctcgaacctggcccaacgctcgccgggagcagggacctgcgtgcagctatggaaccgaggcgcgggctgcgggatcccgccctacctcccataaaccagggcccgagataagggagtcccagagggccaggggagtcgcgggcccagcgtctcagtgggcacgaatttcttactttaacctcttttctgtcgaccccatctgtccccacctgggaggagggggagcaacaggccccttcccggtcgagttcagggctcggtacaaaggctgcatgatgccacagagggtgaatggcctggtgccaaggctgggagtgcccagacagaagggccacagggcatccaagaagtgtgagttcaggccttgagggccttgaaggacggagagagttcctgaccagggagaggagagattctcagctgcaggcacggctgggacacaggcctggtggtgggaaggagcaagggccactgtggctggggaaggggagtggagcagggctcagaggcttagtgccctggggagcctgggagtgttgaggtctgggagggcctcagggagttgggacgtggggtggggaggatgtggatgaggtgtccgcacaagggagagccttttaagcggaatcctccttgggtcactggcctggtcccagctctgaagaggctggggcaggacaaagagcaagggtgtgtgggggtgaggccttgaaagagacaagtgaacaaatccatcactggctgagccaagcctctcgaaggtcccaccagggaaactgaggttgggcccctggagagtggggtgcaggaatggtctgctccaggaggtgagaacagagcgcatgactaatgccaccaggactactcacggcactgacttcatcgcccagcttgcggacataggggcctggctcaattcgcccaacctgcctttctggccctgacccatagccttcaaaccccactcctgactcactgtaccccacctccctcccacagggaaaaacatactgagtgcctaggcc

SEQ ID NO: 25464 - DNA, 1156 bp, Artificial sequence
  DNA replication origin
gacggggtggtggccgggcagaggggctcctcacttcctagtaggggaggccgggcagaggcgcccctcacctcccggatggggcggctggctgggcggggggctgaccccccccgcctccctcccggacggggcggctggccgggcagaggggctcctcacttcccagtaggggcggctgggcagaggcgcccctcacctcccggatggggcggctggccgggcggggggctgacccccccacctccctcccggacggggcggctggccgggcggggggctgaccccccccacctccctcccggacggggcggctggccaggcagaggggctcctcacttcccagtaggggcggccaggcagaggcgcccctcacctcccggacggggcggctggccgggcggggggctgacccccccacctccctcccggacgggcggctggccaggcggaggggctcctcacttctcagacggtgtggctgccgggcggaggggcttctcacttctcagacgggcggttgccaggcagagggtctcctcacatcccagacggggcggccgggcagagacgctcctcacttcctagatgggatggcggccgggcagagacgctcctcactttccagactgggcagccagacagaggggctcctcacatcccagacgatgggcggccaggcagagacgctcctcacttcccagacggggtggcggccgggcagaagctgcaatctcggcactttggggggccaaggcaggcagctaggaggtggaggttgtagtgagccgagatcatgccactgcactccagcctgggcaccattgagcactgagtgaacgcaactccgtctgccatcccggcacctcgggaggccgaggctggcggatcactcgcggttaggagctggagaccagcccggccaacacagcgaaaccccgtctccaccaaaaaaatacgaaaaccagtcaggcgtggcggcgcgcgcctgcaatcgcaggcactccgcaggctgaggcaggagaatgaggcagggaggttgcagtgagccgagatggcagcagtacagtccagctttggctccgcatcagagggagaccgtggcaagagagggagagggagactgtggggagacagagagggagagggagaggga

SEQ ID NO: 25465 - DNA, 1601 bp, Artificial sequence
  DNA replication origin
caccgtctgagaagtgaggagcccctccgcctggccagccgcccgtccgggagggaggtgggggggtcagccccccgcccggccagccgccccgtccgggaggtgaggggcgcctctgcctggccgcccctactgggaagtgaggagcccctctgcctggccagccgccccgtccgggagggaggtggggggggtcagccccccgcccggccagccgccccgtccgggagggaggtgggggggtcagccccccgcccggccagccgccccatccgggaggtgaggggcgcctctgcccagccgcccctactgggaagtgaggagcccctctgcccggccagccgccccgtccgggagggaggcggggggggtcagccccccgcccagccagccgccccatccgggaggtgaggggcgcctctgcccggcctcccctactaggaagtgaggagcccctctgcccggccaccaccccgtctgggaggtgtacccaacagctcattgagaacgggccaggatgacaatggcggctttgtggaatagaaaggcgggaaaggtggggaaaagattgagaaatcggatggttgccgtgtctgtgtagaaagaggtagacatgggagacttctcattttgttctgtactaagaaaaattcttctgccttgggatcctgttgatctgtgaccttacccccaaccctgtgctctctgaaacatgtgctgtgtccactcagggttgaatggattaagggtggtgcaagatgtgctttgttaaacagatgcttgaaggcagcatgctcgttaagagtcatcgccactccctaatctcaagtacccagggacacaaacactgcggaaggccgcagggtcctctgcctaggaaaaccagagacctttgttcacttgtttatctgctgaccttccctccactattgtcctgtgaccctgccaaatccccctctgcgagaaacacccaagaatgatcaattaaaaaaaagaaaagaaaacaaaaaacaaaacaaacaaacaaaaactggacagtggatggtatcccaggttgaagaaacagcagaaacaaagactgggagggagtactgtacaagttgtggtctggatagttgggctggagcagaggatgctggaggaggctcagcagggcaggtatgaccgtcacagccactggctggcactagccaatgcagggttcttctgggaactctggggtcctgaaactaaggcagctgaggaacttccagaatgctttaataaattaatatcaaacatgatttgcttttgagctaacgtcagccgtgccaagattcacaaaagaggctggagaaaggagattctggcagggcagatctgatgtcatccactaagcatggagccttgtgctatctggaatctgggatgacacagcctgagcctccccacccaggtggctcccactgagatacccacactgtgatcattgccaaggacaccagacacttcaagcaacccaagggaaggagggcagaactctgctgggtggccagggcagtccaggcaggcacatagggtccagagggaagaaaatcaagatgtcctccaattccatccta

SEQ ID NO: 25466 - DNA, 876 bp, Artificial sequence
  DNA replication origin
gggacccctgtcccagaacgcagagcctgggcagagccccctccccagccatggccccaggttcgttgggggtcctgaggctggtaaaggccgcctttcgtcaggctgagaccgtgaacttggcacgggccatcaccaccgacagctgactagtaggagatgcaaagggagaggaccctgccgaggcctgaggtccccgtgaggcgcgggggctggggagccgagaagccgaccttgatggaaggccgaccttgattaattaaggtatctggcagaagaaatttatttctttatcttttttttcttttctttttttttttcccctgacttctcccaccccgccctgagcccatccgcatctggacttaagccctagaccacttcggaagtgggtgggtggtggggggaggggggtggtgatcatttgccaagacatgtacaaaacaaagtttctggaaacaggctcttccagaattcagcagagcctgctgggaaggccactcaccccctcgggaacaagggttttgccaaaaacactggacatggaattaagccttaccgatttatcttggtgatagcctctcccagagaaggtcagctctaaaagggaagaaaagtctgtccccagttataattcttttttttcctttgagacagagtctcactatgttgcccaggctctagtgcagtggcgcagtcttggctcactgcaagctccgccttccgggttcaagcgattctcctgcctcagccttccgagtagctggcattacaggcacctgccaccacgtccagctaatttttttgtatttttagtacacacggggtttcaccatgttggccaggctggtctcaaactcctgacctcaggtgacc

SEQ ID NO: 25467 - DNA, 1312 bp, Artificial sequence
  DNA replication origin
caccatgttttctaagcatcttgcagtcagcagccgcctgactcatctttgggcaccctcccctggcaacagcaaaggctgtgtcaccagcccttccgaccaggctcctgaggggggtcttgcataccttctcacaggtcgtgtcctaagatcccatttcaccagtggggaacctggccctgggaaaggtcaaggctggctcccttggtctgggagctggcaagtggtgcatgagggattccatccagcctgccctggccacactgctatccggtacatcagctcaaagggcctctgcagaggccaaggtgatgggagagttggccacatgtgagaataagcccatgccctctggagggaactctactttgagtgataacacttcttaaaatggttaagtcatcattaagacaaaaaccaaatacacttctgatttcattcaccctgtgcacccgtggtcaccccagccaagggagacttggtgatgcaggggattgagaagcagccactgtctcgatgctcccagcatggtgggggcaccaggagtgtgagttggaggggggaaggagagggcaggaccactggggcaggctgggagggcttcacggaggaggtgctgcttgggtgaggcctaaaggtcagtaggaattacctgtatgcaggagaggatggaagggagtaggaggacactgtagtccaaaggcccgaggggtgaacctgcaagtcccatttggacaactgagctcagcttggggagctcggcccttaggagcctccggtacagcacacgaaaccagtcagccacaaaaccaggaggtggttgttaagtttcttctacccatgcaggtaaagttgagagaaccgtgaactggtttcctgcggagaggatcctggagcacagtccatggctgggagcctccagacctcgggtgcgaaaggtagtgatgggagaagggaggacaccccaggcagaggacacgacctggacacagaagtggagactggattgggagtagaggagtgaggctgcctggtgcctcagagctggaggaagaatgacaactgagcctggacacctgggctggggcaggacacctgggacactgggaagagcctggggcactgggaagagcctgaggcaccaggctgaggcacctggggctggcgggcaggagggcgcgtacggggggagccacggaggcctttggatactctagcactgtgtggaggatggcggagaaaggctcgcacaggccccctgagcccggcatggggatcctgggtaataaccacacctacccacctacccaat

SEQ ID NO: 25468 - DNA, 946 bp, Artificial sequence
  DNA replication origin
cccgggcgcctgagacgcccggcaatggccccgctactctcgccgcgcacacgcaaagccgcttcccaggcagttgcggcgttcggggcccgcttcctctcgggccgggccttcgccggccgcctgcccgtacaggtgtcccccggctccgtgactgcgactctcccagcggagagggtctcccaggaagcaggggcgaggagccctcgaaggtctcgggcggcagcggctctcggcgcagagggcggagggtacgaccgcgacacaggcggggcggcagctagctcgcgaggtgcacccggcacaggccccgccccgcgcttccggctctcagggccctcgtgccccgccccgccctcctccccggggcccctcgtcccccgcgcccgcctagccccgccccggctgtgctggatcctcgacgcccatcgccaggggtggaatcccagccccgcctaacacaggtggaaagaggcgcagagaggcctagtgacgagctgggatcacagggagttgatggcagcgccgggagagcccaggctccgaactcccgggctgggttctgcccctacagcccgaaaagaaagcaagggagccggtgagggtgacacccagataggggcgagatgcacatttcgtgttcccaaggtggtgtctgtagtaagataagtgaaactcgaggcccaaacgaggacagagctcaacacacattctattttttcaagaaggcagggaggctccgagtcaacctgctgagtcaaaatccagaccccaagcattcctaagccgggccagcttcagcctcagtgccccacgcctcggtttccttatccgtaaattagcgtagtgtgtagcttgtacttactcaggtagataattatacgcctttttaaagcggagaagagaagaaatgctctcatccattagcagtgggattctgggtgat

SEQ ID NO: 25469 - DNA, 1104 bp, Artificial sequence
  DNA replication origin
gcgcggctgccgcccttcgcggtgcaacagccacaaaacccgccgcctcgggccggggccgcactcgggaacggggcgtcgccgctacagccgctgccttgggagccggtgagcggtccgcgcggccccgggcaccacgggggcgggagcctgaggagaagggagggaggggccggccgggagcggggttgaggcgggtgggcggcccgggggccgcgcggggagcggctggcgcgtgcggggcggccctgtcgccccaataaagtctgctttgacgagaatcgcctgtgcttcctttttcgcgtcgggaggtgtttgttcttgtcgcctggcttcgggcgagcgatggccgcggggtgagtgtggaggaccgaacggacaaaatcgggcgacgcgggcagcgtccggtatctcgccgcgagcgcccggcggggtgcggggccgagcgcggggtcggcgcgagctcggcggaagcgcccgcggagccccagggccaccgttgggaggatgtccgttattctttagtgacccgcggaaacctgagacgcagccgttgggtgcctgtttccccgtagatcttagaactacagggtcctggcggctttctaaaattttctcctgagcttccccttctttgctctccagtcagccattgtttcccttgcccaccctttccccctatttgtcactttcataggtgctcctttttacgcccaccaggttttgcatttgtctcatttaaaattccaaattttttcagccgtgtcctccattgtacctgcaacagagcctagatttttttttgtggcacggattagcggcaagttaaaccttcctgaatgagttacattgcagcgaagtgtttctgctcttatctgtccttttggtcgacctgacaatttgccttaaagcaaaacaaagatttcctgatttttaaggaaactatgacaaattgaagagttggaaaggtgtgtctttgttgtactcgtttggccgatttaacgcctctgtgaatttgttcaacttaaatattatcaacatttactgttttgtaatagtgttcatgcagttgaggcccatgattttctgaactgtacgcaatac

SEQ ID NO: 25470 - DNA, 1550 bp, Artificial sequence
  DNA replication origin
ggggaggggccggcgccgcccggctaggccgcaatggcgtagtttctccgagagggggaagcgccgcgcggggcggagacggccgggggaggggccggcgcgctcgctccccgacgccctcgctccccgcgcccgcatcaacgggcgcgcccgccggcccgttgtggcggcagctgcgcgcccccggcccgggcgggacgcgggaggtcgttggcggggctgcgccgcggcctcgcgggccagggattgctgcctccgggacgcgcgcccccgcccccgcccggcgctgccgttaccccatcggccgctggagggcgccgcgggcgcttgccccgcccgcccccaacttccccggactcccaactgctccccggtggcaccttccagaaggagggggcttggcactcgtgggcgccctccggcctccttgctccccgcccacccagcgccgggctggaccctgccccggcggtcacgctcgcccaagtcgtcgtttgctgcggggcgggacttggggctgcacgtagggctcgcgtgtgcgggctccgagcgtcagtcggagcctgtcaccgccgttgccagcgaattcctggccttttcgccttcctgcggtacctagtggaaagggcctgtgaatgttagcgaataattcttagtcacttacgttttgggaaagctttttttttttccctcaagtatttagctcttctgaataggttgggttagtttactcaactgtggacatttgccagtaaataaaatcgggtagtttaattttaagcctttatggtttttactttgtagaaaggtatctattttccccatgaaaagaacgataatagaaagcgggtttttttgagttttgttttactgttttaatactacttttaacgaaggcctgaaaaccatctagagcaaaaggatcttatctgcctgtgtaaaatctgtttttacttcaaaggcaattattaattcaatgctggttttttaggtcagtatcctattagtatattcatatgctacctagctaaattgctgagatactaaatagactgagaataatcctgccatcgtagttaatctaatgcctgtgatgattacgtttagtactccatataagcggtggaacctcttccctataagtactttaaagcttcataaattctcagaactgaatggagactcaaaatatggtgacctttgagtattaaaagatcgttaaaattcggaggaatgaatgaaacagaaatgaaaaggctggactgaaaaagctagtttgtatctggtgaaagcctcaagatgagacaactacagctgggtggatctgtgattgaaagaggcctgagcaaagggatctaggagctgtcaaaatctaataggaaggtgctaacaggcgctgtcctgcatccagggtgccttgtagaattcatagcagtttgagtttagcagaaactatgtttaaatgaaacatgaatactttagtacttaatggttatcaaaagataatttccatgtattttggtagctcaagagattacatactgatcatg

SEQ ID NO: 25471 - DNA, 1900 bp, Artificial sequence
  DNA replication origin
ctggtatgtggcccctccctcctcgggcgtcgccgccgcaccgccctgccccgtgtccctgtggccctggcggcgggagtctcctccgcccgaggcctcgggcaggtggggtgcacgcagcctccttccgcgtttctcgggctctgaatctccgcgcccccgtggccctgggctcactccgcgcgggggacgctcgtaagcggcggcggctcgcggggaccccacactcagggattctggacagcccccaccgcgcctcgggtccccgcgaggtccgggccgctccgcgctgcgcacgcgcagcccctccccacagcggacgcggcccagccccggggcccgctggcacagtgccctcctgcggccggcggcggcggcgcaccctgcgggtgggggcccaggcgcaggtctagaagcccccggggccgcccgccagagcagcgtgggggacaggccctggagcactgcagggtggcagggaagggctgggacaaaggcgcggcccaagtccccagaagggtctgggggcgggcagggctgcccgcgctaagtgctggccaaaggccaggcgggcaggggctagggctggccaccagctcccgggatattcctagggtccggtacagacgcacgtggcaggccaagaagaagccatgcaaacacctgaggggcgtgctcagaccccgtcctgcctccttgcctcctctccctccctagctaccccgcccccccccgcttttttagacggagtctcgctctgtcgccaggctagagtgcagtggcgcgatcttggctcacagcaacctccacctcccaggtccaagcgattctcctgcctcagcctcccgagtaggtgggattagaggcatgcgccaccacgcccggctaattttgtatttttagtagggaggaggtttctccattttggtcaggctcgtctcaaactcccgacctcaggtgatctgcccgcctcggcctccagaagtgctgggattacaggcatgagccaccgcgtccggcccctagcccctatttatcacagccttatcctccttcctccagatgtcatgccagtgccagtagggcaatgccattcctgcctaaaacagggcctggcacataattgcattgatcgaatcagggcccctggaggtggagaggtaagctttggaaacgaaaactccaagagggaggggagggacaggacaagaggtgatccattaggaaaggctgaaaaatgagataaagccaggactgggctctgagggtcggcgggactggatttttcggtaggaagtagggaaccgctgcagttcaaatcacgtgctgagaccctgttagcagaaaggccgtgtggggaggtcagcaaggaccgaggggaacggtcacaatggcgggcagtcggggagccctgaggacccttccaaggccaggaggcaccactgcgccagaacagaaagggccgcacaccagggaggccgatgcactgctccataaacaagggccagggcttttttgaaaggggactggaggagaattcaagctaaggagccagtggcaagcagagtaccttggaagccaggcaggcttgggctttgaattctggctgcctggactttgcaaataaatctgagcctgttcctctcttacagcatggtgatattgctagctaattcatcaaagggtggtttggaggaggccactgggtacatatgtgttctcaacaaatgttatgggctgcgcatggtggctcacggtaatcgtagctactcgggaggccaaggcaggaggaccactggagtccaggaattcaaggcagcagtgagctatggtcgtgccactgcactccggcctaggtgatagcaagaccctgtctcttaccaaaaaataaataaataaa

SEQ ID NO: 25472 - DNA, 1447 bp, Artificial sequence
  DNA replication origin
ttggggagtccaaatctgataaactgtttttccaatctcagagcccacactggcttcacacacagacttccccttcccttttcttttgatccctttggacatcaggtgcatggagtgaatggagcataagcctccttgtgcccttctcatcattggcctgggcctttagtgagtcatttcttataaaaagcacccgtgaggccacactgacctgggaccttcaccagccctccttgtgctgggtgggttcttgtgactgtagggatggctcagccctatgcacacccatcccttcattctcccaacagccatacaaggtcggtgctggcacccccattttgcagtgcagggtaccagttggggagggtccctgtccaaggccacacagctagttggtgctgaagccagcgccaggagccagtcagcccatcctttgcccttcagcaggatcagctggggccaggcaaccctggagcggcaatgcaagaaccagagggggcctggccagggcaagggtccaggtcccatgctcctgggtctcagcttccttgctgcttcttacacacccctgacctcatggtacccacctacccacggagaggcagatgcattgctgggtccagaggccacttcccagggaactgggaaaggcggtggggccagtgtccaccttgatcagggcacagcagagatagggcagaggctgaggggaatgggcctgtgccccaggggctccttgctcagccttgctctcctccgacttgacctcccccaggatcgtggggaatgccagacgcccccaccagcgcccctctgcaagcaacacccccccccccagccatgctctgccaggccagccaacaccacgccagctgtaatgatgtcccacaaagtttgggtgaatgagtaagttcaaatctggcttgaatatccttggggatggtgaggacacaggacaaagagcagacacaggggaacatggtgggctctgtttggtgttgtgacagtactggccggtttcttgtttatctccccaacctctaccttagctccatgagggccaggggtgcaaagtcagcatgctgaatgaatgagtgaatgaatgggtgagagcagaggctgctgagtacagggccaggttgggttttgccaggcaatacagagacgggccagggaagacggaatgtacactgtgaggccagaacacgcttgggggcagagggtgaagcggtgatgggctggagaggggctggggcggccggagtggctccagaacctacaggcagggtgatggtaggagcccccgccacgcccgtggtggagctctccgtggggagaggaaaagcatccccagcttggagggctccaggacgtccctttgggccggcaccccaaggccctgtctccccgcttcccgggcccgccccctaatcccaggaccgcagcc

SEQ ID NO: 25473 - DNA, 1065 bp, Artificial sequence
  DNA replication origin
ttctgagaaagctgtgaaacaggtaaaacacactgtggcacaccccttgacctctggtctctgacctagctctctgcttcccactgaaaagggaataggatgcctggaggtgcagtgggagagaccacggccgtgagccactgagccagcctggccttggaaggctggtcacactcctctcattcagcacactattcctgtcatttgcagccaaatgcaccaccagccgccatgcagagctgactttatttcgttgcatcagcagctgtgagcaggttttacccaggggagtgacaggatccaatttatgttttgaagaccccacaggaggttaggaggcaataagaggcaggccagggtggggggcagaggccatgagggagtccaagccagaggacctcttgaggccaggaattcggagggggggggtggtgctccagtggcaggtgggcgagaccactggggaataaacggcagaagaagcccttggaggtgttgagggtgcagtcaagggaggcgaaactatgtggcaggagctagagtctgaactccgcagggatctggagtttatggctccttccttgaccccttaagggaaagggctatgaaacggcactgccaaggcatttgtctctggggtgggaaagggggagggaggcttaaagcgtggaagggcagagagaagggggcaggccccgtgagggctggtgctcaggtccttggtgcagagttcaggcaaagcagtggcagtttggggagtccaaatctgataaactgtttttccaatctcagagcccacactggcttcacacacagacttccccttcccttttcttttgatccctttggacatcaggtgcatggagtgaatggagcataagcctccttgtgcccttctcatcattggcctgggcctttagtgagtcatttcttataaaaagcacccgtgaggccacactgacctgggaccttcaccagccctccttgtgctgggtgggttcttgtgactgtagggatggctcagccctatgcacacccatcccttcattctcccaacagccatac

SEQ ID NO: 25474 - DNA, 1513 bp, Artificial sequence
  DNA replication origin
aggtctggacagttcaagtgtgatgcagctgtggcaaggagaaatccttccgcctctgggcctcaggctgcctgtccataaaatggggacatggccagctgacggacaactgagtctccggcccacctaccaccgccagccaggatcccccaaagtgtgcagagggctcagcagagaacagtatgggaccccctcaccaggcctggaacacctccagccacaaagaagccaaaggtcagtccctctgctccccagcaaacggtgcctcccaggcattctcagtgccagggcttcatccctgtgaaggcacagggcctgctagtgggcacaggggtggctagttggggcctggggcagaggagggctgcaccaggcgtcctggggaatgtgctcagtgaagacgacactgggctttgcacagcctggtgtcgctgtacagaaactgtcaagggaataaagtgttctttgttttttaagtggcgaggctgcctttgcatatggtggaggaaagggcttcattcagcacccttgccctggagtcgaaggggccagctcaggggtgcgtgtgcccttggaccctgacagcagccttggccatgtgacctgggcagttgcggatacatctgagagcctgttttctcatctgcaaggcaagctaatgaagggcgtgaacacgctggtgcagcctggccattcagcagatgcccctctgctatcatcatcccagcaatgagagagagaggcctgtggtgaggggcactggcgggcggggcagcaggggcagggtgtgtcccaaaaacagcttcctggaagaggggaggtctgagtggagctgaccatttcagccacccgggcaacttgggcacaactgtacttaacccaaactaggaggtcagagagggcttcctggaagagggcatcctggagctttgccaaaggtgtggtgtgggggtctcactgcccacctcacctgcagttctgttcagcctcctggagtcagcccttggcatcctgagcctctgcagccaccagccctggaggctttccctcccaagtgctgagccaagaagctctgcccactgacaagggggagtcggggaggggccccagttcctgtgcctgtttaaccctagtgctagcctgggaagttgggctttacagggaggcaggaggcggggaggaagctggctgttgacccctggggtctcctggcctctctcgcttctctttactctgaaataaaccaggggaagctcccagggatgggggaaacaccctggccatgggcacagagaggggccccttccctagctcctccatgtccagctttggcagcccctttgcctctctaggcctgggtggctgaatctctcagggcagcttgagtgtggcctgtggctgtggtccccatcaccctggatctctccacacatctgcactctctagaaaggccccaacgtgacccttgtcaggaactaatttgagccctgctcaccctggggcttctccacga

SEQ ID NO: 25475 - DNA, 1504 bp, Artificial sequence
  DNA replication origin
gctgtttttgggacacaccctgcccctgctgccccgcccgccagtgcccctcaccacaggcctctctctctcattgctgggatgatgatagcagaggggcatctgctgaatggccaggctgcaccagcgtgttcacgcccttcattagcttgccttgcagatgagaaaacaggctctcagatgtatccgcaactgcccaggtcacatggccaaggctgctgtcagggtccaagggcacacgcacccctgagctggccccttcgactccagggcaagggtgctgaatgaagccctttcctccaccatatgcaaaggcagcctcgccacttaaaaaacaaagaacactttattcccttgacagtttctgtacagcgacaccaggctgtgcaaagcccagtgtcgtcttcactgagcacattccccaggacgcctggtgcagccctcctctgccccaggccccaactagccacccctgtgcccactagcaggccctgtgccttcacagggatgaagccctggcactgagaatgcctgggaggcaccgtttgctggggagcagagggactgacctttggcttctttgtggctggaggtgttccaggcctggtgagggggtcccatactgttctctgctgagccctctgcacactttgggggatcctggctggcggtggtaggtgggccggagactcagttgtccgtcagctggccatgtccccattttatggacaggcagcctgaggcccagaggcggaaggatttctccttgccacagctgcatcacacttgaactgtccagacctccaccgctggcctgtttgctccccaccctagtcccgcaggctgatatggtgcctccagcagactccatggcttcccggagggtgcagggtccccagttcaccctccagcaggagtggcagcagctggggtacccctagcagtggcatgtggagaagctggggtatgcagaggatccagttctgtgacaccaggaggcacaccaagttttcctctgtccctaacacagaccagaggggtggcccaccacccccccgggtggaggatgtgtggagttagaggtccctgggtggccccttggttggccatcagagacccccgggagccagcctgcagggcaggagcacaatgacgtggccaggatcccagaaaggggctggagtgtctgcctcagtttccaggataacggtgcaatggcctcagccaggccaggtgctggctgctgctgggaataatctctgagcttcgtgactctacagtgtgggcatgagggtccttatttcatagatgagaacactgaggcaagtgcagttctcggccaaaactacccagctgatcagcaaaattcagcccacgtctgatagactccacagctcgcagcatcccagcaggaagcagggcaatcgactcaggggccaatttatgtcccaggtttctgagaaggagccctggggaaggagggcggggtgagcgtcacaggctg

SEQ ID NO: 25476 - DNA, 1785 bp, Artificial sequence
  DNA replication origin
ggtggcagcgttgacggggaaggcgcgcagcagcgtggacgccagcccccgtgtgaagacgcgccagccctcggcgcggtagctctggtgcacgcagtccaggatgccgcggtagcgcggggcgccccgcagtccgtccgcctgcagccgcgacttgaccacgtccacaggataggtagagagccaggacacgatgcctgacgtaccgcccgccaacagcagcttgggcaccagcaggcggtcgcccggctcgcagcccagcgcccgcgtgagagcgtcataggtgaggaagtagacgccgaagctgggcgtctcacgcagcaacgtggacaccatgccccggttgacgccacgcagaccctcgtgcccgtagatctgcgcgaggcagtccagcgagcccttgtaggtgcgcgctgggcccgcgtcctgcagctgcagccgcgtcttggccagctccatggggcagcagatgacgcactggatggcgcccgccgccgcacctgccaggaactggttgaggggcgagtcgtggcccagggcccggagggtgttgccctgcaccccgaacaccagcgcgttgatgaaggtgagccccatgagcggcgagcccaggcccttgtacaggcccagcacctgcggggacagagacgccatcagagccggcaacgcgcacctcccgggccctccacgcggaagggggtcgggggatggcagccccagcccaccccaggggctcctgaggaccaagcagaatttcgttagaacctaggtcctgactggcctcctggtcgtcctgacaccttccttcctggctctctggtctggggtggtggcagcccggaagctagttccccatcctgtgcctcccgagccccaccagcccaggccactcacgctctcttgcttgatgatggacttgaagcagtgcaacgtcccgcggtactgaggcttctccacgctctggacctgaagccgtacctggaaggagagggtccagtgagaggcaggcaggcaggaccagagcacccagctcccgggtctggtgcttaggctgcctaggagggtctcccaaggaggccgggcactcaggcacagtctaagacttttgtaattccagggcagggtgggccgggtatctatgccttctcaggatggggtgccagtaggcaaacagctaaagggacaggctgctggagacagggtagggggtccccaagatctcagaccaattcaggttaagcctcttgtttacactatggctgcacagtgcactgccagtggggcatgaacgacctcctgagactggcccgttctccaggtgatgcttgtcatactgctgagtgagcggcccatgtcccagactaggctgaagggcccctgccctaatgtcccatcagagactggcttcgaggcaataggcgcaaaaagtgatgagcctggccaggtgcagtggctcacgcctgtaatcccaacactttgggaggctgaggtgggtggatcacttgaggtcaggagttcaagaccagcctggccaacgtggcgaaatcgtgtctgtaaaaaaaattagcctagtgtggtggcatacgcctgtaatccctgctactcaggaggctgaggtgggagaattgcttgaacccgtgaggcagaggatgcagtgaggtcatgccactgcactccagcctgggcgagaaaggaacattccatctcaataaataaataaataaaaataaaagcaatgaccttggctccaggagctcctgcctggtctctgccagtagcctctcg

SEQ ID NO: 25477 - DNA, 1759 bp, Artificial sequence
  DNA replication origin
aggcccgggctgtccgcgagggcaggtgtctttattctctctgggcacgctcggacgggaggtctggggcgccggggcagcaccgtggctgagcggaggccaggactgccgggaggatgccccactgccccccgcgccgaggtcccgggctcatctccttcccctcccccatccccatccgttgcgcactgggagcagggtcccctcccccggccgtatatttcgggactgactccaccccgtcccgcgcagccatccagcggggttggggctacggagccgaccccctactcggctggccttggagggcactgaaccactctggcgccgagtcacgccttggaacgccgccccttcctacgcggttttgtgagctgttgggggcggaaggggggtggtgggtgggtcgggcgagccggtgtggggcaccttctccgaggcgcggtcgcggctctggggttcctcccatgcagttgtccccgggagggcccgggcgggcgtgcagtccaggctctcccatgccccgaccgtgggcgtcgggcacggcacttccctgttgggcctctggcttctctgcttttaccttgagggttaatttattcaccaggatttagatgtcgggggcgggggagggtggttggcggcgggagttgctgagagggccggccgcttatccctgtttggtcccacttttctcccagcacctgcccttgttcaccgcctcttcatctacttggatttggctcgaataaaccctcagctcccggccagcgctgagagccctggcggaagagtgggtagcggtggccttaagtattaaatctgtggcgtcggagcctgcttcttgggggagagactcgttgaaaagggagtgtgttggggaggtgttgtgcgctgaggggagttagaacttcccggtcggttacccagtgggaagctgcggggcacaaagcccagaatttgctgctaatcgctgggtgccctggagacagagggggcgtgtcctctgcggattccattctcaccttcccctcccgcttctgatctcgctgtttgctccacccttgctccccacccactatcagctccagcgggtgggggtgaagggctgtccccaggccaacacctccttccaggctttggggagtggggattctttccccggatgggcagagttccttctgcagtggcgctaccgtccgtgctgccctcctggaaacaccggggtttggggcaggaacacttcacctgaaagcaggcctgcttggcgcctcccggcacatctgtggtctcctctgcacgtcgctcgcgcagcctccttgcctggaatgtccttcgctgcccatcctcataggcccacctgggagagatcatatccatgccccctgccccaggtttgtgggtcaaggactggcactgtctggtgctgtagcactggggcacaggccacccccctgcccccaggccctgcttttcgtgcaacccccaggcacataatggccacccagctaaggctctacaagcgtaagcctgagcctcccaggtggacaaggacagaagtcacctgggggctcactcctggtctcatcggagaaacctaggcccagagaggtgggggtactaaagcaaagtcacaccacatgctcctctgatggccagggtgagcctgcagtcctctcctctcccccttactccagggtgctggggtggcccctcaggacagtgaactgactgtgtcccaggctccaggtccctggca

SEQ ID NO: 25478 - DNA, 1066 bp, Artificial sequence
  DNA replication origin
tggccgggcgtgcgcgggaggcggggcgcgggggacgtggtgggcgcgcgggcggggcgcggggacgcctcagacaaagagcgcgctgggtgcgcaggtccggcgggaggggacgcgcggggtggcggggttgagccgaggactcccccacccggagtacgcggggtggctctggtctggaccgggtcgggaaccggaccctgggttcggagtccggcgccgccgcagaacctcagcgccctagtctgtgccgtgcggaccctgccgcgaaaacggccgtggagcgccgggacgttccgaggcccgcagactgggacgccgctagttgcgaaactccgcgagcgggaatcgcccgtggggagcctctgcccgtcccgcctgcgcgcccgcggcggcggtggcctccggggcttccggactcctggccgaacccgccgggttctgggggtcggacgcgcacgggcgcttcctgcggagcctgaggctgggatttgggcggagagcagggaaccttaaaagggaaaggggccatgggcaaagggcgcagcaggccttcgggccacagctccttcccgaggactgcgggtcgcgggagccgcggaaggttgtggagagagggaggttcctggactgggctgcagagtggagtcgggccagatcgcagcgcctccgtcagcggcggccggacggggcgagaccggaggggctcggtaggggccgcgctcaggcgctgaagtcggagggtgcttggctctgggtcaccagggtatccatgggctgcggggatgaatgagagccgagtctgactcggccccccaggagtccctgacattcgcagtggcaagggactgccctggtccctgtggagcgtcccattcggtgacttcccaccagcccttccccagcgcctctggaggtccagactgtcaggttggagcctgggagcagggacgggccaggcgctttctcttcgctgtaggagtcagatcagccttaggccgggcccagcttccttctttagggcctgcaggcaggcaaggccacaccgtgtgccacgtttccaggt

SEQ ID NO: 25479 - DNA, 1045 bp, Artificial sequence
  DNA replication origin
gggggacattggggagggggtgaggacaggcactggaaagggatgcgtccacacgggtgtgctgctgggttactaaactttgcaaaaccacatcttcctgagcaccctgtttccctgctgcctgggaatcatgcactcagtcggcgcactgccctgtgccctgtgttggggacaagacagacacaaatccctgacctccatgtcagggctgaggagagaccagaaaggaggagtgaaaaagttggtgccaagtaaatgaatccgtatgcctacatcttggacacttgggttcagtgtctattgttttatttcatttcctgaggataaggttacagcacagaatgtgctttctcaaactcccatgttccacagagccctggacctcccatcccagaggaggcagggctctgtgcagccctgaggaccccagccttttaaggggcagggcagacccaaggccagcacaggacagcaaggccggagggactgtcacggggcaccgagggtcaagccagctcactggaaagggtgtgttggagttttccctgtgtacagcttttattctcacacaagacaggttcagtgtggagaaatcagaaacgccagaaagtaaaaaggaaacgcaagtctctgtccccaccctggaatcttggagctgaatgaccccctgcaggagctgtttgggccaggacttggggggggtggctgcaactcaggctgccagagggcaagttgagggggagaggatgaggcaccagctgtgtagaccttcccaggagttaggctgtgcaggggagagtgcacagaagggctctggcagcaagcacaggtgtagactcgggatgggagccacctgagcaggttgcaaactcctggccaaagattggtggggccggcgcgctgtcagtcgcctcctgtctcatattggaatactcgagctcagtgccatggtgtgaggcccagggtaaccagactacaacctcacctcccacctttcatgccctctggccctcttattggagcccaccctctaagcttgtgcccc

SEQ ID NO: 25480 - DNA, 1136 bp, Artificial sequence
  DNA replication origin
tgtgcggcctctacaagggcagctcggccctggtcttacgggacggccactcctttgccacctacttcctttcctacgcggtcctctgcgagtggctcagccccgctggccacagccggccaggtgagcaggggctggaacctggcagggcggggagcccagaaggatgaggaggtcaaggtgaggtcgtgctgcccgccagtacccgagtgggggcttgaacttggcctcctgcctcccagagtgggctcctcagttctcccaacaccaagagtcaggacagacttgctgtgtcacagagtcagtgtgtggttgtggacaagtcccattcccctctcccaagcctgttgcaaatgaggacgggccggaagcgtgagtccagggtgcgctgccctgggcgccccgatcaggctcccagtcaaggcactgtggtctctctgcagatgtcccgggcgtgctggtggccgggggctgtgcaggagtcctggcctgggctgtggccacccccatggacgtgatcaagtcgagactgcaggcagacgggcagggccagaggcgctaccggggtctcctgcactgtatggtgaccagcgttcgagaggagggaccccgggtccttttcaaggggctggtactcaattgctgccgcgccttccctgtcaacatggtggtcttcgtcgcctatgaggcagtgctgaggctcgcccggggtctgctcacatagccggtccccacgcccagcggcccacccaccagcagctgctggaggtcgtagtggctggaggaggcaaggggtagtgtggctgggttcgggaccccacagggccattgcccaggagaatgaggagcctccctgcagtgttgtcggccgaggcctgagctcgccctgcccagctactgacctcaggtcgaggggcccgccagccatcagccagggttggcctagggtggcaggagccagggaggagtgggcctctttgatgagagcgttgagttgcatggagtcggttgttcatcccagcctccccatggccctcgcctcccatgtctttgaagcacccctccagggagtcaggtgtgtgctcagccaccctctgccccattcctagaccctcacccccaccactgttcctgtg

SEQ ID NO: 25481 - DNA, 1419 bp, Artificial sequence
  DNA replication origin
gatcaacaggataagaatttttcttagtacagagcaaaatgaaaagtctcccatgtctacctctttctacacagacacggcaaccatccgatttctcaatcttttccccacctttcccgcctttctattccacaaaactgccattgtcatcatggcccgttctcaatgagctgttgggtacacctcccagacggggtggtggccgggcagaggggctcctcacttcccagtaggggcggccgggcagaggcgcccctcacctcccggacggggcggctggccgggcggggggctgaccccgccacctccctcccggacggggcggctggccgggcggggggctgacccccccacttccctcccggacggggcggctggccgggcggggggctgaccccccacctccctccaggacggggtggctgctgggcggagacgctcctcacttcccagacggggtggctgccgggtggaggggctcctcacttctcaggcgggcggttgccgggcggagggtctcctcacttctcagacagggcggccgggcagagacgctcctcacctcccggatggggtcgcggccgggtagaggcgctcctcacatcccagacggggcggcggggcagaggcgctccccacatctcagacgatgggcggccgggcagagacactcctcacttcctagatgggatggcggccgggaagaggcgctcctcacttcctagatgggatggcggccgggcagagacgctcctcactttccagactgggcagccaggcagaggggctccttacgtcccagacgatgggcggccaggcagagacgctcctcacttcccagacggggtggcggccatgcagaggctgcaatctcggcactttgggaggccaaggcaggcggctgggaggtggaggttgtagcgagccgagatcacaccactgcactccagcctgggcaccattgagcactaagtgaaccagactccgtctgcaatcccggcacctcaggaggccgaggctggctgatcactcgcggttaggagctggagaccagcccggccaacacagcgaaaccccgtctccaccaaaaaaatccgaaaaccagtcaggcgtggcggcgcgcgcctgcaattgcaggcactcggcaggctgaggcaggagaatgaggcagggaggttgcagtgagccgagatggcagcagtacagtccagctttggctccgcatcagagggagaccgtggaaagagagggagagggagaccgtggggagagggaagagggaagagggaagccatcataacttctgataattaaaggtggaaggtggctagagaatggttaaatgatatgatacattgacaggatagaatatacttagtaacaacatggatagtcattacaatgaaaaaggcaaggaag

SEQ ID NO: 25482 - DNA, 872 bp, Artificial sequence
  DNA replication origin
cggccgcccatcgtctgagatgtggggagcgcctctgccccgccgccccgtctgggatgtgaggagcgcctctacccggccgcgaccccatccgggaggtgaggagcgtctctgcccggccgccctgtctgagaagtgaggagaccctccgcccggcaaccgcccgcctgagaagtgaggagcccctccacccggcagccaccccgtctgggaagtgaggagcgtctccgcccagcagccaccccgtcctggagggaggtggggggtcagccccccgcccggccagccgccccgtccgggagggaagtgggggggtcagccccccgcccggccagccgccccgtccgggagggaggtggcggggtcagccccccgcccggccagccgccccgtccgggaggtgaggggcgcctctgcccggccgcccctactgggaagtgaggagcccctctgcccggccaccaccccgtctgggaggtgtacccaacagctcattgagaacgggccatgatgacaatggcagttttgtggaatagaaaggcgggaaaggtggggaaaagattgagaaatcggatggttgccgtgtctgtgtagaaagaggtagacatgggagacttttcattttgctctgtactaagaaaaattcttatcctgttgatctgtgaccttacccccaaccctgtgctctctgaaacatgtgctgagtctactcagggttaaatggattaagggcggtgcaagatgtgctttgttaaacagatgcttgaaggcagcatgctcgttaagagtcatcaccactccctaatctcaagtacccagggacacaaacactgcggaaggccgcagggtcctctgcctaggaaaaccagaga

SEQ ID NO: 25483 - DNA, 1121 bp, Artificial sequence
  DNA replication origin
tttctgaaggaacaggaagtgaaaggaaggcgagcggctatgagagaccgcgttaagcggcacggggcgctttaggcgctgcccagtcccggcccctccagcccggggcccgccgctcaccacacgcaccggaagcgctcggttctcccggaggcagaccggccagcacactaccatccagtcacgttccgacgcgacgccgcggccgccagccaatcagtggcggcctctgccccgcccccgcgcgaacagccaatgacggcgccgtcgggccggaagttgttccgtccggacggcgtttccacggacgcccaggagacagccggttgctgagccgggagcgctgactggcccggctgggcagggtaagcgaggggagtaaggccggggcggagtgaggaaacaagggagggagtgatggagggacgctggcgcggcgcccagtggcctggccctcccgggagtatccttagagcccggcttgctgcccgccgcgttctggcactgtgaggcgcggagcctgccaccgacccctcgcccctttcctctgagcgccgccgacccaccccgtctccctttcccactggcacccttcatcgtctccgcctgttcgcttttcccgaggagagaggcccccatttttatttagcgcctgccatgtgccagaggctttgcgtagtgttgcacttagtcccctcaacggtaatgttagcaggcttctccatgcccattccacagatgaggaaaccgaaggggaagcagaaaagtaatgcgacccttgcccaaggtttcgaataagtccaagctgggattgaaacccaggcgtctgtgaccccagaactcctgatctttccactgcactgtgccgcctcggtgaacagatgcggggaatttacagtttctctttccaccgcccacgactacacaaaatcagtcacactgacgctgagggtggggaacgggaagagggtggggaggttatttggaggccagcggggggtgaggggtggctgatgcaatgaccagctaatggctcgattctcaagagggtttcattggtctcaacctggccccccaggcaacccacccctgattggacagtctcatcaagaaggttggtc

SEQ ID NO: 25484 - DNA, 985 bp, Artificial sequence
  DNA replication origin
tgtcaaatgctgatgggtgggtccgctgagaatgagaacagacacacctggggatttgacaatctcagtgacaggtgtataggtatctgttaccttctataattttgagtatgtttaaaacatttcatatttaaaataaaaagttaaattaaccaagacggagaggaggaggagcagaagaaaaaaggaagggagagaaggagtgatggaggaattggggagaggagagaaaaaagaaacacaggatgggaaacggaaagggaggaaaagagaagggaaaaaggaaggaaggagcagggggagaggaaggggtgaaagaagaagagaagggaaaaaggaaggagcaagggggagaggaagggggagagaagagaaggggagaagggaaaaaggaaggagcaagggggagaggaagggggagagaagagaaggggagaagggaaaaaggaaggagcgggggagaggaagcggggagagggaaagagaagggaaaaaggaaggggggtgcagagaggaagggggaagaagagaagagaagggaggggaagagaggatggagaggaggagaggacggagggaggaggaagaaccagcttgggcaacatagtggtctcatgcaagaaagaagaaattacaaaaaacttgaactctatgaagtccaaggccaaaagcagcaaactggaatgtttgaattcttgtccaggggaactcccaaatcagccacggaaacatgtaaggagatccatcaatctgtaaatcgtctgacaagctccccctgaagtgaaaaacgcacacttggctctcctagtagatgcacagacaacgacagcatctgaatcaatgcagaccagtcagctacctctcaaagctatccagggtgaaggagggaagaatctttgccaattggtctccttaattgaatttaatgttcactgtcaggttttaaagattaattccccaacattgcagcagactgaagtgcgtg

SEQ ID NO: 25485 - DNA, 2022 bp, Artificial sequence
  DNA replication origin
cacttatatgaggtacccagagtagtcaaaatcatagagatagatagaaagtagaatggtggtggccagggctgggggagggggaatggggagttgtttaatggggacagagtttcagttttccaagataaagagttctgcagacagatggggtgcagactgcacaacactgtgaatgtgcttaatgccactgacctgtatgcttaatagcggtgaagatggtcaattttatgctgtgtattattctgccacagtttttaaaaatacacacacacacacaaagaaaaaaaaaagcagatctcatttatacgtgaatttgtagccaggctataaaaacatgcatgaggagggccatcactcctaggaagggagggaaaggggcagggctagagggaaaagctatgaacactaagcagcagctcttccaaagagagggtggaacatgtaggggagagtagataaggcaggggagatgagatggggtaggggagaggagatggagtaggggacttgagatggggtagaggagagcagatcgggtagaggagatgaaatgaggtaaaggagatgagatggggtaggggagagtagatggggtaggaaagagtagatggcataggggagagcagatggggtaaaagaagatgagatgagatgagatgagatgagatgagatgagatgagatgagatgagatgagatgagatgagatggagtaggggagatgagatggggtaggggaggatgagatggggaggggagatgaggtaggggagatgagatggggtgggggagatgaaatgcactgggttgatgcgatggggtgtgggagatgaggagagggagagatggaaaatgctctccgaagaaaacatgcccaaatgtttcctctgaaactcattcatttattcattcattcaacaaagatttcctgaggacctgctattagccaggcattgtgtaacaggaaacaaataagacaaaaatctctgccttcaaagagtttatattctagtgagggagacagacactgaacaaataaaaatccacagtccttaaggcagtggtgaagactgaagtattaaaaagtaaccaggaaagggctctataaggtcaagggaaggggctgaaatggtggccagggaggacctctctgaggaggtgactttggaggaagtcctgaaggggtgagaaagccagctatgtagaaattgagggaagaagcttccaggcagtgacaggagtatgcctggcatggtcaagcaacagcaagaagggccactgcagctagagaagtgagcaaggctgggggttggcagggaggtggtaagaaagggatgaagtcggaaaaccacaagccgttggggcatcccagggttctgcaggtggaacggaggggaatgagggctggttccactgcagtaggaccactccagctgccatgcagggaggagaatgaagggcaagagagatgaaggaagacaatcaggaggcttctgcaagaatccagggagagaggaaatggcttggaacagtgggaggcagtagagaagtggcctgccttggagggtagaaccaacaggacttccctggactggaggtaggatatgagggcaagggaaaagcccaggacacattcgcagttcctggcccaagcactgaaaggggtggagttgcagggatgggtcagcctgcagaaggggtaagtttgagggaaggaggacctggagctcagttttgaatgacagacagcagacagtataaagactcattcccgtaccagtgtgatgttcaaaagagaggcccagggtagaggctgagctgtggatgccattgtggaaattgtgccgcagccttgagctggatgagctctcctagggagcaagtgcagacaggacagagaggagtcccacatctcagccccaggcctccaagtttcacaggctgggaaccaggggaggagagagagaaaccagaaaggagtctaagaagaggccagtgaagtgtgggaaaaaaacagaag

SEQ ID NO: 25486 - DNA, 1167 bp, Artificial sequence
  DNA replication origin
aagctcccagtgtgatggtgccaggctgagcacctgctccctccacacagacagtgtggagtgtaactatagttcaggcgcaaggcaccttcatctgcctcacttcccctgggctcctggaggcaggacaccctcagaggccagacgtgcccctccagctccccacaagggcctgtcctgcccaatgggttgccctgggacaccctgcagtggaggtctagaagtgggtttgctcagagccacttagaacccactgagaacaaggaaaaggcagggaggaaaagaaggtgtacacaggatagatatttcatgtacacccacatatatcatatacacatgacatacagttttaaattcagagattagtcttgggttagttgaaatctcaaaagatgatgctgatgatggcggtggtagtggtgacaatgatgacggtagcagtggtggtggtggtggtgatgataacaatataatagagatggtggtggtgacaatcacggtggtgatggtggtgtgacagagatgacggtggtgatgatggtggtaatggtggtggtggtgctagacatgctggtgacagtggtggtgatagagatagtgtggtgctgatggtggggtggtactgataagagatggtagtggtgacagagatggggtggtgtaatgacggcagtgatcgtggtggtgatacagttggtggtagtgacggagatggtggtggtgatagagtggtgatggtggtggtgcagcaataaagatgctggtgacagtgaaggtgacagagatggcagtggtgatgatggtgatggtggtggtgatagagatggtgtggtggtgatgacaggagtggtagtagtgacaatgatgacagtggaggtggtgggtataaagatagtgatgctgatggtggtactggtgatggtggcggtgatgacactggtggtggtagtgatgctgatggtgctggtgctggtgatgatggtggtgatgatagtagtggtggtagtgacaatgacaacagtggttgtggtggctatagacacagtgatgctgatggtggtactgatggtgacgatgatggtggcagtgatgacactggtggtggtagtgatgttgatggtggtggtggtaatgacagttaaagcacagaagcattccccgtgcctg

SEQ ID NO: 25487 - DNA, 1094 bp, Artificial sequence
  DNA replication origin
cgctgcaggcctgggatggcacagggtgtggggaggggtgacagggaccgttgcaggcctggagtggcacagggcatggtggggggtgacagggccactgcaggcctgaggtagcacaggtctgggaaacaaacccggagggagaaaacagagagaatgggcagagaaatgtttttaaaaaaataatagttgagaatttttcagaactgatgaagtccaccaatccacagatgtgactccctgaggatcctcagaaggattcctaagaaggaactccacacccagacacacctcagggaaactgcagaaagccaaagtcaaagagaaaatcttaaagagccggggaaaagaaagcaattttttttttctaaccaatggagcggctccgggactgacagccagttcccaataccaacaggaagacagagcagagcggcagcatcccgtgtgcccgggaaaaggccacctgccgacattccatccgtggccccagtacatctcaaggagcagaagccaagtctgagacacgaggattaggggccaggaaatcggtggggcagcgcgcaggagaatgggatgaaagagctgttgtctccagtgggttgggagaagcaggagaatccacaccctagataggaacttggatggcggggtggggacggggtgttatggggatggggtgtgaagtggggttaaggggcccaactcggctgcagagagcaaggctggggagggacaccagggaccccaggttcccgagaccaaaaggcaggaggaggagaaacagcccaacccagattctttccaccggtgtcttttattaatgaatgcaaaatacagtactaactggcagggcatgcatcagagacaacaagaatgcaagctacagaaaccaggaatggagggcctcctcatgtctgaggtagagtaagacggtgtcagggggcggacccgggggcggagatgagcaccggccgcactggggcatcatcccggcccacccgggacgatgggccgtgggagggctcagggcggtgtggtggccacactgcgaagaatggatttttaaaacacttcatagccccgaatttgtt

SEQ ID NO: 25488 - DNA, 1944 bp, Artificial sequence
  DNA replication origin
aagcagggctctgccaggtggccctgggagaggtcgtccccctcggagaagctgtcggccttgtagctggcgtagagcgggctggcgcggccgtcggccttcttgcccgggctgcccccggccccgccgtagtagcgttcagagaagctgcagggtgaggcgcggccggcagcgctcacggggtaggagtaggcgccgatgtcctccacgctcaggggacgccactggcccctcatgtcctccccggggagccgggcggtccccggcttggcccgcaggctccacaggtttgggggcatcagggcctgctggggacccggagaggccgggaagcggaaggtctcggccgggtacggtgacatggtccgcccgaagcctggggccacttcggcctccagcggggccgccaccgcggccgtggccttggcaaagcgagggctgccctcgtaggtggtggcgggtggcttgcggtcgaagagctcgtcgcggctgttcaggtagatggcctgctgcgacgcggtcagcgtgctggcctgcgcgtgctccttctcctccgacgtggcgctgaagctggagtaggagctggacgtgggcagtgagcctgcgtagctggggaaggcctcatgctggaagcccgccgggaaggccgccgcctcggcctcctcctcctcctcggccgcgctgtcagtggagttctgggcccgcaggaagcccacgtcggtcacgggcgcgtccacgctaggccgccggtctcgccgccgctcctccgggcagtagagggctgtgtcactgcagtagatgtctcccttgtaggggggccgcgggcctggtttctccaccccgtcgcagaaggccaggtcgcgggcggaggcatcggacaggcgggaggacaggctggcggggtccggcttctccagcaccttggcaatgacgcaggtggggacgctgtcggcgtaggccgggtggcagagcggggatggcaggctgcagccgtgcttctccatgtgcaggctcacgcgctcctggaaatccgagggcagctggaacgggtgcgaggagggggacggcgggtacagggtcactgttagcatggcagcccagccctggccctgaagctgaggactgatgttagccatgaccgacaggcagacagacgaacgggggcctcccggcttctcaaatcacaccagggggagcctggatccaggacgctgtactgaacaagctcccaggggtgtgggtgctgtgactgcctggggatcctgggtcacctctccccaccccactctgattgggcccaggagagcccagaagctgcagtcgcctggagaagccggaacccaggtctgattcaggccccactcaaggctccaccccccgccacccccaccccacccattttgtgcccagcgaggggttgacttgctctcccaggcccgtgggttctgtgggttctactgggggcatgacccactccccagccccccagtcatgctgctggagcgctcctgaagaagacagactcagatgcaacaaagattgagggccagggctgagagcgcctggtgccatgtgggggtgtcccgctactgtttgatctattttgtgagtgtctcaggcatggcccaggaccaggggaaaggaacgcacaggcctggctgggagattgcatgtgaggggagggtcgggggacggggtgcgcagggtgcggcgaccataggcgggcaggggtgggcctctggcccatctgcccttggcatcagacaggcctggttctgggtcctggctctgctacctgcctgccacgtggcctcagccacgccctctttcctgaatgttttctttctgaaataggcactgccggtcatcgtgcccagccacaggctcctgcgaagctccacaaaggtcactctgccgtgtcagcgctcagtggaagcaaggacc

SEQ ID NO: 25489 - DNA, 1062 bp, Artificial sequence
  DNA replication origin
gccccaggggctatgggcatggcaccggcttcccagtggcagccactcctggctgtggctggtggggctcagtggcagacctgggctggctgggcagtgcctgcagccctctggtgccaggggcagccggtcgactggggtcatacaaggggtcagttctcagctctcaggcagccgtgctgttctgttcctaggaggcccagggaggcactgagaggggtttggcgactccgacgccctccaccgtgtaggccaagttgggggcaccagccttcagtgagggaggctccagggccgtggtggggggacagaaaggtgcctgtgtcagagacagccttgcctggacagcaggatgcctggtgctggctgggttgggactgtggccagcccttgccaggagcagccatggggcagctcaggtgggtcactgggcctccgggccaccccagggctagctgtcagagccctcgcagtggggaccccggaggggcgggaatgcaagccccaaacacaggcacatgcaacagagattttcagtggcgaagccacaccccttgagtcctactgtttgcatctgttttcagctcaggaggctgagccagcgcccgcctgggcctgaggtcacacacctgcccagtccctgcccagccctgcagccacactgtttccaaaccacactctgggaagagggttgtgagcagcaagtctgaagtgcggggtggaaggtgctgggggttcatcctgcctcccattcctgcctggcactcccaccccgtcatctttggaaggacgccgagagcctgagggacagggacagggagaccaggcctgctctacgagcctgggggagctcagggccattggggctccttcttctaccactgccccccaccttgtgggaggttcccatcttggcagtgctcaagggcaccagctagggcagcggcagggccctccatgctccggcagccccaggtcagaaagaggctctcattttgcaggcaagagtgtggaggccagagagggccggagccagcagtgggtccttgtcctgctgagcgc

SEQ ID NO: 25490 - DNA, 1000 bp, Artificial sequence
  DNA replication origin
tctgaaaacagaggagcaacgtgattgcacgtgcagcttcccagggctcacgtggctgccatgctggaaacaggctgtagggacgaggacaggagcaggaagatcaggaggaggccaggaccatagtccaaaagatgatggtggctcagatgacggtggaactgggcagagggctgggattctggttgtgttttgaaaatagaatcaacaggactaaccaagatttaggatgtgggttgttagaagaagagctgagtccaacccagctacaggattcagagcccaaacaaaaggagttgcctgccatttcctggctggggacagctggggagggacaggagctgggtgggagatgcacaggaccccttggagcggagatgtcaccagggcagcaggaggcccgggtctggagttgagcgtgaaggccggcatgccggcggagactgcccaggcagcatgcagatgagaagcagggaggccccaggacggagtagggaccagcaaggatgcctgggagggagtggccagtaggctgggggacaccaggcgagtatggtggcccaacaaccacttgagaagggggctgcagtcaatgccctggccggctggcttgccagctgctgagagaccaggtcagagggccaaggagaggcattgggatttggggaactggaggtcggtggtggagtggagcggtggttccagacacaggccacccttctaaggagtgtggctctaacaggaggacaggaggacatgggctcgggacaggaggtgcttcttaacgtgacaaggccaggccccttacctaagtggacactagtcctggggccctctctgcagggttggtgcacatgaggaaactaaggcatggccagcttgagtggtttcccaggtgacccaggtggtgtctcgcagacggagccagaactcaacctcgggactccgactccagcagccccgggccctgggtggccagagtgcttgcctccacctgttc

SEQ ID NO: 25491 - DNA, 994 bp, Artificial sequence
  DNA replication origin
ggactcctgcccttggccagtcccagtgttgcatcacagccgtgtggctgcccatggggcctaatttcagggaccctgtgagatgggcccagttgccctccacagaccctggacagctgcctctgcattcacgaattagcttctaccttgccagaccctactaggctccaagatgatggtgtgaacaacacaggcaaaaaaaaaaacaaaaaaaaaaacacctctggccacgtggagttcacatctgagtggggcaaactctggggtatgttagaagtgtgaaatgctatagagaaacagaaagcgaagaacggtaccagggagtcgccagctgcagggcctgcagatttcaagagggtgcttctggaaggggctgctgtgccaggacctgagggagtgaaggagccagccatgcagacatccgtgggagaagcattgcttccaggcagaagcaaccgtggtgtgcagctgtacctggttaactcggaggatcccaaaggggccaaggagcgcccagcgggagggggagccagggtctgaggtcagaaagaccataggaggcaatgttgtagaggctcctcccagaaacctgggctttattctgagtgcagtggggagccatggagggttctgaaaacagaggagcaacgtgattgcacgtgcagcttcccagggctcacgtggctgccatgctggaaacaggctgtagggacgaggacaggagcaggaagatcaggaggaggccaggaccatagtccaaaagatgatggtggctcagatgacggtggaactgggcagagggctgggattctggttgtgttttgaaaatagaatcaacaggactaaccaagatttaggatgtgggttgttagaagaagagctgagtccaacccagctacaggattcagagcccaaacaaaaggagttgcctgccatttcctggctggggacagctggggagggacaggagctgggtgggagatgcacaggaccc

SEQ ID NO: 25492 - DNA, 1445 bp, Artificial sequence
  DNA replication origin
acctgcgcagcttctccgtgaccttctccagttcctcctgcgcgcgccgcagctcgatctccaggtagtggcgcgtggagtcgaactcggtctcgagcttctcgagcttgtgtgtggtgtaggacagccgcttgcgcagctcgcccttctgctcctgcagcgcgctgcaacgacatggcggcggcgggccgggccgcggcgctgagcgggggaaactaaggcccgcaggccagccggggcgtgccgcactaacacgcgagtaccggcgcgcgcgcgcgcgcgcacacacacacacacacacacacacacacacactcacacacacccagcctcccgggcgtcactgaagaccatggcgccccagagtcagggactctgaccctgagccagtctggcctgggcggttcctcagactccaccagtgtccctcacacaggtaaatcccaggtggtggctggaggagtctttgaccccagaacctggccagtgtgttgggggcggtttaaaggacccaggtacaaagagcacccatcagcacccaggctatcacagagctggccctgggtggcacaggtgactggggccctcactcctgctcctccacagtgctaggttgggatggctgaggcccagagtcagcagtgccatgcccaagaccagacctgctttccccaaaatggctgtgtggccctgggaccctgggtcacttctctgggccagagagatgtttggtggcaatgtcccatgcccgggcagtgtctgccaccatggccaatgaggctgcatgcagcacgggaaacctggcaaggtcctggcctgctcaagttccccttcctccaggaagccttccagaaacccagacaattcttgaggctctattttcttcccccagaatggggtctcctggagggtaggaccccaggatgcagagccccacatgctcaggaaacagagacccactatgacccactcttccgagccacctgccaacaattcacctgaactaaagctgtgcaaaggcaggagggtagtgtgggggcctccaacagggatggctcggagctccccaaggcaggggctgcacttccggttgtctgggtcagagtggggtcagcagccagcagttctttccttgcaatgggtgcacagcccaggggctatctgggaccaacatcttttggattgtgttgctgtgagatggggacgggacaggcagaagtcccgggtgtcatgaaggaaacttgaggtgtgggagagggcctggaaccctgactctgcccagatgtgctgtgggaccttgggcaaaagcccgcgttcttgtgatattcccgacccaaacccaagcgaggggagtagagggcaggcaggaggctcccagtccccctggggccaccactgtcccccagccccgagcagaggcatcttctgtctgggccccgtgagta

SEQ ID NO: 25493 - DNA, 792 bp, Artificial sequence
  DNA replication origin
tggtgtgatcgccggaccagcagaggtggggaaagacgtggcaggaaccctggggcggccaagtgcggggcatcagctatgcctggggacggggtgcgtgtccatggcccgatgcctgcagcaagcggacactgaggcagagaggggtgtgagagtcaggggctgggggcactgctagcccaaagattggttgggtgtagcaggtggttgggtgtgaaggacttggggagggggagcagtatttaagggctggtggaacagggagttgactgctgtatctggaaggccatccaaaggccaggggtaaactgaggctctgtgaagctgcctgacttgtgagatgtctgccccgagcccaccccatagccccttcgtcctcccctcccacacctgccccgtggagaatccctgcctagctcattgtctgcctcccctctggaccgcaggctcccggggcaggggcagggtttgtcttactcctggctgtgaggtctcagacaggttgcttgctctgagaggtgagggtagggacctcagggtgcccagaaggggcagggctgggtgagggggcacagtgagctaggggtgcaggtctcagaatagcaaggacctaaggctgctcagtgaggcctggggtgtggctggagaaggggtgaggactcggggctgaggtggccacgtgggtggatggatgacgccctcacctcttcccgagggctgtgggtacaccaggagcccctgcagggaacagtcgacttcaggggctgctgtgcagcccattgtgcctgccct

SEQ ID NO: 25494 - DNA, 1294 bp, Artificial sequence
  DNA replication origin
tggtgtaactcaccaggcagcaagcccagcagggccccccaggcccccaggcctggaagggtggccccagcctggagggcgtggccctggcgctcggagcaccacagccctccctgtatgtctgctaaggagctgtttccagacgctggggactccctgacccatctcggcccttgccaggacaccttttcacccagggcaggggacagaggcctctgagccacaggcctccagcagtttcccccagattcccagtggcctggtggccccaccccacacagtgccacctcttgacattgtccactgtgtggagggtgctactatgtagaatgtggaccagcaacagccctgcccccgtgtctgggtgcaccatccagttctgcagatgtggagacaggctgccgtggcagggctcgggttattgcccggtgtggggaacactggacagggaaggaggtactacccgggtgaccgcagaccctaggtacacagcctggactgggcagaggggacacgttcagaggtgtgagaagctgaacccccaggacttagtgacagggctgtgaggggtaaagaggggtcaccatgcccaccccccgggtggggaacgtggagggcagtgaaggtgtggtggatgtggctgcattggacgggttgggtgtggagatgcctgagggccataggtgggtggctggacgtggtgagggtatggagcctgacagacaccccgctggagtcagatggaaacctgggaggggtccctgtgcagctggcttggaggggatttggtctgagcatgcagggcaggggtgcaggtgcaaaccggggccccagggaacagcccgggcgaggtcgggaggggcctgtggtgtgatcgccggaccagcagaggtggggaaagacgtggcaggaaccctggggcggccaagtgcggggcatcagctatgcctggggacggggtgcgtgtccatggcccgatgcctgcagcaagcggacactgaggcagagaggggtgtgagagtcaggggctgggggcactgctagcccaaagattggttgggtgtagcaggtggttgggtgtgaaggacttggggagggggagcagtatttaagggctggtggaacagggagttgactgctgtatctggaaggccatccaaaggccaggggtaaactgaggctctgtgaagctgcctgacttgtgagatgtctgccccgagcccaccccatagccccttcgtcctcccctcccacacctgccccgtggagaatccctgcctagctcattgtctgc

SEQ ID NO: 25495 - DNA, 917 bp, Artificial sequence
  DNA replication origin
ccaggcgaggcgattctgcccacccagcccgggtttccacagggcttgttgctgctcctttgatggaaggcttggggcacaaggccttctgcagggagaccccagacggccctggcggggggcagaagcagctctgcgaggactcggccctgggcccgtcagaggcatcccaagggtctgatgtgggcttcctccaggggccaactgtaggttctgctgggaaagaccaggcgaggtccgagcagctttggggacaaagaccttctcccagggctgatatcaattcactggaggctgagagggtgagcgtgtgacccccctgctcagcctggtcctgctctaggcactgaggggtgcaaaggcaggctctcaggggcatgtgcacagcccgaaggccagcgtgcctggcgggaaggtggggggggccaggaatggcgaggctggggctgtggcgggtccctggggacaggaatttggggtgaggaactggccttttagtcttggtacagagaggagttggggcagctctgagccagggtagaacatagtctgggtctagaaatgagccatctggggggaactacagttttgggggccagggtgagaacaggagacctggcactgcaacactcaaggacagggctggtggggagtgggctggtggggagtgaggggcagcaattgacctcatccagggcagggtggggtgagctggggtttcaggccccctcaggtgctacgtggagaggagttaacctggagcagcagggaggagtgagatcctggcagaggggacacggggacaaagtcacagagatgagagcctggctgcctacagcctggaagggaggaggagcaatttagtgttgccggagcatgacactgtggggccaggctgagagccacgaccgaagagg

SEQ ID NO: 25496 - DNA, 909 bp, Artificial sequence
  DNA replication origin
gaccctctcgtttggtttctcgcaggcctctgccgcagacatggagaaactcaggtgagtggagcgtctcccgtgccgcggctcgcgggggccgggtcgggggtgagggcgctggggaaggcgggggaagggggctccacccgagcgcatcccccagggcccgcgggcggcctcggcggggctgcgggccaggtgcgtgtgtgtggtgcgtgtgtgcgcgccgcgaggcgctggggagcctcgcgcggggctcctccgccggcccgggccgctgcggcgggggctggggctagcgccactgagggccgggctgccccctacccggggccgcctggtcctgtgcggtcctcagcgcccctctggctccctgccctggactctcgctggtccccggggaccctccgggttccgttcgtgccgttccgcactgccccggcgctctctcccccgaccccaccccacccccaaccaccacccgccccagcccccgggctgccagttgcctggctctgagcttttaagtgtccgcctctggggggcgggggtgggggatggagtcctcgcggctggaccaggcagccgcgtcttggagccattttgggggaatcccgcgacagcttctggggagtgtcccccgcggcctccctcccggtgccaaactttaagccttggtagacttcacgggaccacctgcgcggcaggcctgggatcagccagtttgaatatttgccacttcctccacgacttcccctggcaccctgacccctactttgggaacacccctcccgtgttttccttccggagcctgagccgaggcgttgtgtgggcggcaggcccagctctggctgctgggtttcagcactgtctcccctggcccacagggtctccgtcctcgccactccctcccga

SEQ ID NO: 25497 - DNA, 1255 bp, Artificial sequence
  DNA replication origin
tgccccgaaggcaatgggtcagaggaggatttgagctacagcagcatcaaagccaggcttcaggctctagaataggcttgaagggcaggggctgcctgttccctgcctgtctcttgccctgcccagcccccactgctccaccagggcagctcagcaacctcccctgcctttccccccagttcccttctgggggtggggggaattcccatccaggccttttagaagggctgaaacattcaatgtaaataattaatgctagatttttaaaattaaattttaatacattcttattaattttagacaaactccctggcaggtcattcgccgtgagtgattgaggttggcaaccagagacagcctttgggtgggaaaggctcctgagcagtggggtccaggcgcagctgggccccttcagctgcgggatctccagcaagcctcttctctgttggagctttgctcccgcatagggggtccggggcttccatggcagagctgtggtgaggagccgtgggaagcgctatgatgtgtaaggggcggtggacgttattgttatgactaccgtggccattctgctgagggtggcctcccaggaccggaggggggcggagggggttttcctcattagcccctggagagcagagcttgcttcctctgctgtcccctctctgctttgtctgctgtcccctctctgctggagaacttagcccagagctagtgaacgagtgggtgtccgtggatggaggaacacttggatttcttgggtttggtttgatcctggttcaggtctgaccctctgagtggacggctcctcccaccctgcgctggctcagcgcaggccaagcctgctgggtgctgggggtgtcctggtgagaacacagggctcctgcccgggagctcacagccaggaggggaaagggccaggaaagacaggctccagtgccgtaggatccaggcatgcactgtccgtgtttattgagcgcctgctgtatgctgggacctagcatgagaagcgctgtcatggggacccggaaaggtgggcctggggaagagagcggtgtgggggtcgcgctggccggcggcaaagtcttcccggcaaactccttgtcttgcaggaggagggtttatggaggggtccaggcttgtggtcttggacaacttttagagcgtctggggaggggaaccgccatccgggcgccttagggatcccttcccctgaaattccttcccccaccccagccgatccgcagcccgcggg

SEQ ID NO: 25498 - DNA, 1343 bp, Artificial sequence
  DNA replication origin
gacagctttctaagatgttttacatggtaccctgccttgtgacattcatttggcaaacactgactgtgtgcagagccctgttctgggggattcagcactggtcagactggatgaaattctctgctctcactgtgctgatattctcatgcaggaagacagaccccaagagatgaatcagtacaccacccctcccaccctgtatgtccgacggggatatgtgtacagagaaggatgggaggcagggtggggcaggaaaggggtgcagtgatgaacacagaggcccggatgaagtgagctgagcccagtagcagatgaatcccaaggggccactggaggagggagcaggtgagtctggggggaggggcttccggaggagggggctggtgagtctggggggaggggcttccggaggagggggctggtgagtctggggggaggggcttccggaggacggggcgggtgagtcccgaaggggccgccagaggaggggcgggtgagtcctgggaggtcgctagaggagcagccctgcggctgtgcctggtgagttgggaagcatcccggtcaccagtgggaaggagcagctggggtgcggggcctcgtgcaccctcatcaggaccttggcttctgccatgaggtggatgggagcccctggagggatgaatgggggcgtctctggcacaccactgtgtggagaggggcaagtgcaggaccccagggcatccagccaggcccacggggcctggggtggaggtgggagggattctcagattcccaggcagtctagaagcagacatggaaggaagagaacccctgaggtgacagaagcattgtgacctcatgttgagcaggggaacatggggaattcagggctggtggtgccccttggccatcccaggggagacaccaagggctgggaaatgggcttggagttcaggggaggctccaggagatgtgaacctggaaatggccagatcagaggtgacacagccgcagcactggggaggccgccagggcagccacggtgggaggcgacaggggctgggacagagcccgggactctgccactgttggggatcaggaggtgagcaggaccggccaaggagactgggaaagggtgggtgggaggtgggaggagagtctgcattaagggtggaggtggtccttcgggggctgtctcaaggaggagagcgggatcatcggtgtcatgcgctgacccacaggtaggacaaggacggagagccgcctgggcctcgtgaaccccaggcatccccaagggcctcgctggtgctgggcacgtggtggggttccccagagcctccgctgcagtcccaaatgagccgcgg

SEQ ID NO: 25499 - DNA, 1493 bp, Artificial sequence
  DNA replication origin
gaacctcagcctggaggatgagttttccatgcgctggggtggagtagggggacacctgtcagagcccaggcctggagagaggaaatgagccctaagcaatctggaagatcttccatccactctcccaagacttgggcgcagggtctggcccacatagctgccatttatggaacgcctgctatgtactgggccctggatcagcatttccacgcatcatctccacggcaacactttgaaggagcttccctactcctgcaggcactcctgatgctgaagagtggatggatggatgaatggatggatggatggatggatggatggatggatggatggatgggagggagggagggatggatgggagggatggatggatgggagggagggagggagggatggatggatgggagggagggagggagggatggatgggagggagggaaggagggatggatgggagggatgggagggatggatggatgggatggatggatggatggatgggagggagggagggagggagggatggatggatggatggatggatggatggatggatgggagggattgactgaagcccatgagtccatggctattggacacagtccacaaatcattacccagggtcccaggaggtggggtccaagggctgagtagttgctgaacagatgaaggggtcaaggtgtgttacaggagcctggcccaaggcctgaaggtgatggggagagtgtagagtgttcaagtctcaagacttagagaggctgtgtcctgctggagtgtggaagccatggcggtggggaggtgtggctcctccccctaagggaggtaaggatccctgggacagatgggtgggtgaccctaggactcgccgtgttggtctagaatcaccccgcatggttctcttctgactccccttcctgccgcagagctggtcgctagccttagtggagaggcctggacggaggtctgcagccctgggttctggttcctcctctgccgctgactcactgtctcctctctagggctccgtatcagaagcttaacacccattacagtcaggggagtgacttctgtggcctgagagcaggcatcagattgtagcctgtggtgggagaagctggccagaggtgtctctattgctttaatcattataggaatgaatgaatgaatgaatgatgaatgactaagtgtgtgaattctacactcacctaacatgctgtacctaagcacccactctgcactgctcattggggtcacttaggtgagtctgacacagaccttgccctccacgagtccacagtttgctgggagacatggaccttggccagtacggcaggagtcaggagctgctggggctcttctctcccctctagccaggaagggaactcaaaagtggcccttgcctcagcaggccttgagtctggaggacagtacagcagcctctgtggtctgcctggggtggggatcagccagggcccagctctgagccaagcagg

SEQ ID NO: 25500 - DNA, 943 bp, Artificial sequence
  DNA replication origin
cccctccgcgctgcgcccccgccgtggaggcttcactggcccgggaggagccgggccgggtctcctgggaactgggcactctcgggtggggcggggatgcccagcctccgcgcgccgccgggagcgcccgggtcctatcgcggggtccttgcgccctgacacgcgcgcccctgcggcggaaggaaaggagggacgggtgaccaagggcgcggccggaggactggggacccgccgctgtcccgggcgggtggcgagggtgcgggcaggcctggacccgcctgcgtctgggggcagggccagcccctgcttgggaggccggagaaaggcccgggagccggaaggaggctggacccggggccgcctcattgagcgtttgcagcgcgtgggcgcgcacgaacctcggacaccaccatcccattcagtacctcgcggcaggtactatcctcctgcccctttacaggcgaggaaactgaggctcagggaggccagggcctcgcccagagcggctcagccggcgcgctcaccctccctgagccccagcacgttggatgggaatttctgccccagcgtttccgcttcctgcttggtttagaggtgtttccttcctcgtctgtgccccaccccatccccaatgtggtttcctcagggcaggaacagcgtgggcgacgcgctggagtctcctgagccggcagaatgggagcagagtgggcacccgggagcggggccggatggatagggagcactgcacgtgcaaagtccgcatggccaaggtcggccgccagtgcagactgggggtccaggccctgggggtatgggtggggcggggtctccacagccaggctccgtcggaggccccagtgctctggctctctggaggccatggacaggttcttttccttctctggaccctagttcctctgcctgccaagagcagcagagaccc

SEQ ID NO: 25501 - DNA, 1371 bp, Artificial sequence
  DNA replication origin
agttcccaggagacccggcccggctcctcccgggccagtgaagcctccacggcgggggcgcagcgcggaggggagcggggcggggggccggccacctcccgcgctgagcagggaccgccccaggcgtgggtggcgcccgccccgcctccgcgcccgcgcccgcgccctgccctcccggctcgcaggtactcaccgcccggcgcagccggcccggccggcgaccgccagtccacatggccccagggcagccgcgccgctcaccgccgccgccgctaccgccgccccctcccctccgaggccgagcgcgccgggagccggcgcggccggggctcccccaccccgcccggcttcccgcagggagcgcccgccccccgcccccagcccggctccccgccagccccggccccgcgcagccgcggctgagcccgcgcgtcctcccggcagcgcccggccggggcgcaagtggtgggcgcagggccgggcaggggcgcgggggtgcggcgtgcgcgggggccaggcgaggaatggcagaggggcagggaatgaatgaacccgcgccagcttgaatggctgagcgcgtgaatgaatgagtgcggtagagcatgcggggctgggggggcggggggaatgaataaatgagagaactaatgcacgggcgcgaaggtgagtgacagagtgaatgggcccttgaaacccagaggctgtcagtaatgacctgcccaaccttttcatcggtccatccattcaatccctcaacatttattagacacctagtgtgtaccaaccagccctgctgtaggccccagggggtacagtagcgagtgaaaccaagctcctgccctcgcagagtcacattttacagatgaggaaaccctggctcccaagggtgcctcctggccaagctgccccttaccctgcccttgctctgcccgagcccccagtcggtggcttccagggcttgccttctccccaaggagctctcaggaagggaaggtggcttcaggaggaccagtgttgccccctgcctatccctccagtctgaagcatcccaccgacctgcccggtagagcccaggctggccagtcctaccctggtaaaggtgcagcgtgaaccctcctctctcctcccagagcgggcaaggggcagccctgagggtgccagctacatgagggtcttccatcccagccagcccagcagcagccagcgtgggaacccggggaggagcactggcagccagggagggtcctgcgtggtggaaacagagctggcaaagcccgtgtgcttcgctcatatcctccctcgggacctatgggctcatggttcacacatgcttatatcatttccaagtacatggcagattagaagatgctg

SEQ ID NO: 25502 - DNA, 1367 bp, Artificial sequence
  DNA replication origin
cctcaccagcagtgggaccccccctttatatttgaggaaaccgaggctcagcaagatcagaaactcaggcaaggatttgaggggcccaacgcccaggatgggaagactgaccccagagccaggggacctccctcagcccggcgctcaggccctctgagaggcgggtcctccctcccatgtcctcgctggtcctgctgggtggctctgtgctgcgcagggtgggtgcaatcagaggctcattgatgcgccggctttgcgcgtcagagaatcaacgttgcttccccgagcagctggtgaaggctgaaaagtgggtcaggtcccaggaggtgcaggtccgtttttagctttcattagggcttcattcattaattccttcgtttagtatttactgagcagctactcagttccagcccctgccatggggactgagaacacgggcagggctcgatggagtcggggtgggggtcccagccctgaaggggcctgcagtctggcgtgtgggggccaattatagaaacaagcgtgaagtgggggtgtgatcaggtggagaagtagccccccagcactcacgttcagcggggcagatgagtggaagatgagaagggctcctgacatctgagtgttggcgggatggagcggcagggaaggcttgccaggcagaaggacctgcgcttgcaaaggtgtggaggggtgagggtggcggggggggcttgggccagctgacgcctatgtggtgtggggggctggggctgtgaggggtgaggaggctgcagagtgggtggacatgggggcttctgggggaagaaagcaggccccacgtgcggtagcggaaagggcccagtgacagctttgggatggggtcaggggccaggcctgccacttaggaaggtcatcttggagccacagtgtggagggggtcctggcaaggcagcagggacagaaggcacagaggggatgagggagagagaagcctgagtagagtgggtgagctggggctggggcagcagcaggccgcaggctgggaggctcctggggccccttggagtggtttgatggcctccgaacccaagcacccctgctctctgctcctgccccagggctgggggagggcacgggtggggacagaggtgttggtgctggggtcctccaaaggtgcatcgccaacagccacgcaccctcagcctccccaccaggtccctcctctgcaaggacccgctgtcccagccctgccaccttggagaggctcccctgctgtgccctgttttctgacccgaagtatccatgcattcccaagaccttgcccctggggaccgggcaggctcgtggatcccccatctgattctaaaccaaggccagacgcaggcccc

SEQ ID NO: 25503 - DNA, 1381 bp, Artificial sequence
  DNA replication origin
gaccgggcaggctcgtggatcccccatctgattctaaaccaaggccagacgcaggccccatcagaggacagactggtatggtcactgccatagccttcaccgtggcaccggctggcagaggagcatggggcgctcggggtggtcctttgggcctctggagctctgggcatcacagagcatgtccttggagcctccctagagccctgggcgtgttcgtaccttctctgctccacaattcagtccatgctgctgtccgcagtcctcatgcccttgatggtgattaatggttgatgtgtgtgttctctccggaggctgggcccttgggcgcagttagtaccctcagccctgtggaccacccctcctgtgtgcccagaagctggtaatggggttaccagatagccagggtcacatggacttgggtgacaggcattctggggtgaccagctgggcagaaaatgggcctcctggagccaggccaaggaaagcaaccaccccattggctatggggtgaacccaccccaaggcagggcccagggagccaggtgcacggatggagcaggcagggatgggtagagcagtgcagaggccacgattagtggctgaggagggggtactgaggggagcaggggcctggtggggatgggtgcggttgaactgtggtcactctctcagatgacaaacagcgccagctcctgccatgtctcaaagcccctcctcacaatcctgggtcccaggtggactttccagacccctcagactgtgcatggccccctcagaggccatgagccctggttcctgacaccgtggtgcagggtcctattgtgcagggtggtggccctcagctacctgctgcgtccgtcctcgaaccagcctccctctcccagccctctccgctgggctgtccctcctgggtgtggcccagtgccttattggtgagaaatcaccgttgttccagctgtaaacatacagttgagcctgaatcatcgctgccagctgccgtggggggtaataagggagcgtgtgtcagggtttctaagttctgctgggcgggtgcacctcaaggaggagacacaaaagccttggggaaggcccgctctcttctacctggcccgcctggggtaggcagggtccttctggcacgggaggggcagcgtggagcctccgctttcacttccagttgcagtcaaagcatctggtttgggggccaggcgcagtggctcacgcctgtaatcccagcactttgggaggccgaggtgggcagatcatgaggtcaggagatcgagaccttcttggctaacacggtgaaaccctgtctctactaaaaatacaaaaaattagccgggcgtggtggcgggcgcctgtagtcctggctactcaggag

SEQ ID NO: 25504 - DNA, 1015 bp, Artificial sequence
  DNA replication origin
ggcaagagtgaagcagaggagagcaagcgtggtggtttagcaaagtaaagcaaagtaaacctggagggagcaaatgactttgtcctgggtgtgaaagggtaaggccccattgtaggtcatttattcattcaacaaacacgggttgaactgtgtcttgggctggcctcagagaagctcaagaaaagaaagatgctgtcattgccccgaggagccactgtctggcatgcaggccaactgtgacaagctgtggtccaggtgaggtggggtctggacaagccaggaggggttcactgtggatgagccagggaatggggagaggccccagagacgggctatgaagaccagtcttggggcaagaacagtaggtggggaggggagggagaaccttccagcaggaggatgcacctgtggctaaagcttggaggtgcagggaacgcccccaagcacctggggccacagtgcagggtgtggccaggacaggagtcctggagctggacagcctgaggggccacatggtgctgggctctgttcccggtggggaggggtgggactgtccctgtggacagcagggggctactaggggccctggggagtggcagtgagggcagatacaggatgtggccaggtggcgctggctcaggcaagtgggatggggaggggagcagaggctgcagccaggagggcaaaggggaggtggctaggccatggaggggaggaggagcatggggagagcagcattgggggagctccagaaggcccctggtgtcagaacagagggcagacctgctcctcctcctccctccctctctgcagctgcagccggaagggccttgtccctgggagggctgccttgactcctcccctccagcccaggtgacttccgtgcctctctgtgtcctccagggtgctgggcccctggccagcctgtggctcctccatgcccctgagtgtgtgggcagctctgcgggatgagaggatgtcagggcagggcccaccctgagctaagtccagttgt

SEQ ID NO: 25505 - DNA, 1133 bp, Artificial sequence
  DNA replication origin
taagggcagtgttatttatttttaagtgtgttcagattggcattttactgtgcttctgagtagtgcagacaggaggggattagagccaagttgccataggcaggcaggggagctgggaggctgctggtcccgtcccagtggagaaggagtgggggattaggaactgctgagaagtggtggtactgcagcctcatgctggcctgaccgtggctggcccgggggctgttacaggagggtgacccagcggggccactgcatgagtgctggtgccattttctgagatgggaaaaaaaactggaggaggagtaagatttaggggaaagaagaggaaactcttgcctgcctgcccattttcctcctgaattctcccctttggggaggtctggtctggggcctggagggctcttgcataaggcacagcctgccatttggttagtaggggaaggggtggagggatggatgagaggttaagcagacagatactgactacggctgtgtgtgtacagggacttctggagggtcctgacatgaggggatgcagtgaggacactccacagtgcccgctgcggaaacaagggacccagcttgagatgtgcaaaggactttgaacgccagggagcaaaatgagtgtgacagcaagcaacctgtggtcctccggctgggaccctggctgggctctgagatgctccccactgggtttggggggctgcacgggcagccagaaggccagctcaggactttttctgggggcacacgacacagtcgtttcccaggccagacaggtacacaggattaataaggccaacacgctctcccgggggtgtgcagctgagctagccttgctccaactgaaccatcaatcactccccgctaatagctctgcaggcggccactctccccaccaaatttaaagcgagaatccgggctgctgggaggaagatgctgcagcccctaaccaccgtaattatgaagtcttgttggggagagatgcttatctttaatgttaagtgaacagagcaggagaccaaacgtcctgcctgcgtgtgtgcgtccatgtgcagaaacgtctgcctggaaacagggctgcctgagaccctgtcactttcaaagtggggatggagaaatgagctggg

SEQ ID NO: 25506 - DNA, 733 bp, Artificial sequence
  DNA replication origin
gccccagcagccccacgccctcctgctgccagtgagctgtctctgcactcctgctgctgagcgcaggcctttgcgtgggcctgaatgcccttcctgtcccaccattagggacacagagataactgacacttctgtatcccagagggcccccgggggacacggcatgtgattggacagtgatatcacaggctctgactgggacctgagagggagcaacacggagtccgcatctggcttctcgtccgaacgtgggccagggtagcaagggggcaccccggctgcaggaaacagcaggctccaggcagaagggtccatgatgcaaacacgtccctgagcagcccgctggggaccggaggggctgatgtggagagtgcctggagcagaagcgagggggcatgggtggggcagtgggctgaaggagtgcgtgggttgtggcagaattttcaagaaggtgggagatgggggacacacacgtggaggctgatgctttcaggagagagggacgttgggtttgtgattctggggtgggcctctgggtatgagctgggatttgggcacgtaagagccttgggcacatggggtcttcagtggtaggaggatgaggccaccagtagcatggcaggaggggagggcatggagccaggactggccctcagagtggcagctttaggaggcaagggcaagagccaggcctttggagaaagtctgggaaggggtcttcaaagaggagggg

SEQ ID NO: 25507 - DNA, 900 bp, Artificial sequence
  DNA replication origin
cagacgcccaaggccacaggtctgcttttcaccaggaagtggagggctggtgaaggtcggtgttacggtaaggggagtggacgggggcacccggggggctgtacctcctcccccacccaagtcctgcagaggcaactggaagcccatacatgcccacaggcactcatccacaaccatttgctaacctgcactgccctgactgaagctccggccacactccaattagactgggctgggggtggggggccaggaagggagagttagccccaaagtggaggagaagttccgggagggaggtagtgagggagggcttcctggaggagaggaggagtaagcggagcttcaggaggagggaggtagccaggaagcagagggtgaggtggggacgatggggccatcccagcacagggaacaggcatgccaaggccggagtgaggggccacatgcacggctgccacatgactggagggaggcaggcctggtggagaggctggaatgggggaccaaggactgtatcccgaggctggcaggccccagctgtgagcagggcagtggcatggtcagggtggaagtccagacagcttgccttggttcagagtgaacgtgagatgaggaccggagcttggtcgccgagggacctggggcacagtagggcccctgtgggtaggatgtgacctcaactgggatcgtggctgagggatggagagatgatgacgttggctgagggatggagagatgatgacggtggctgagggatggagagatgatgacggtggctgaggggtggagagatgatgacggtggctgagggatggagagatgatgacggtggctgagggatggagagatgatgacggtggctgaggacatgctgggggccaagtcgatggtgctgtgtga

SEQ ID NO: 25508 - DNA, 2010 bp, Artificial sequence
  DNA replication origin
cttagcccccatggcaggcttatctctgcaagcccactcagatgtccctggcccctccaccaaggagcagccctagtcatgctccgtcaagaaggcgcgagtgtaacgcagcactggccgcagccgctgttgctgtgtaggcatggttgctgctgccttctgaccgccgtgtgttctggtcccggggaaggccacctgcctcccacccgtgtgcctttgcccaggcagttccccctgcctgggtctccctttccttggccatcttcgcagccatctgcaaagtggacccaaggaagcccgcttccccgccccatccctccttcagagccagccgggctcgggcagccaggagctcggggctgaggcagagtgtgagaccctgagagtcgggtggggggaaggggtctctggaggagcctccagaagaggcagaggaggagaagaaagagatggggaggagggagaggaaggagagaagagaaggagagggctcagaggaagaggatgagacagaaggaggggagaaggggcagaggcagtcggctccgaggggtgggcggaagggcacctcccaagggccgcccccgctctgtgtgccctgggtaaatgtttgttaagtggatcgaactgaactgtatcaatagagaacacagggcatacagcctggaagcttccgagaggcccgaggctgtgcggctcatctttaaggggttcgtcgcatgcataagtggcacctctttactccagcatgagggctgtccgctgccctgcccagtctcaccctctcttgggggcctgctgtgccccacaagctgcagggcctagtcctcgcctcaccatccagtgcttgggaggggtgggtacgcagaaggggtggacggggcgtggagactcaggagctgcagagaagggggctgggggagaggggagcagggggtggccggggaggcaccaggaaccccaggtttccacttgggtcgtggggtagggaccgatgctggaggagccaggtaggggtggtcaagagagtgggagattttaattgtgaattgaggtttccagagggacaggcggttggaagaggaattattgaatggaatattccagaagggaaacataggggagaggctgacatgttgcagccatggagagggagggaggaagatgttccgtccatggagagggaaggaggaaggtcttttcagagatgaagtgacctcgagagatatcactgtccctgcagactcaggcaggggcaggtgggggttgagcctgtatccacaccgtccatgacaagagcagagccaggcaggggcaggctccagcttgtccactgggagaggacgccgcctccatgaaagagccgcagcggaagtctctgaagtggcagggagggtgggcagccctctcagggagagctatgtgtcattcgatcagtgattcactcgtttactcattcagcacgcacttcctgagtgctcagcatgtgcccagcaaggccctgggcactcggcaatgaccgcacagacctcagccaccccagcctcactttctgccggtggagacagacctcaaacaaggcgagcgagctagtattagaggaatgtgctcaggggaaggtgcagtttcaggcccagggagcagacccgaagaagaacgcccaggcgccagcgagcgcaagggccctggggcaagagtgtggccggcgtgtttgcagagtacatgggaagtgcgtgtggctgtggtggagtgagaggtggcgagtggtaggaaatgagctcagggaggcacagggactggagggcgccagggcttcagaggttttggcagggactcatgtttggccgggtgacccaggagcccttggcgggctgtggacagaggagggcttggtgcagctcatgcctgtgctggattcctccagccgctaggtcgagatgaatgggaaggcacagcacgcgtggaagcacggggccaggtgggagctgccccagccatccacggaggcca

SEQ ID NO: 25509 - DNA, 1003 bp, Artificial sequence
  DNA replication origin
cggcacaatctcggctcactgcaagctccgcctcccgggttcataccatcctcctgcctcagcctcctgagtagctaggactacaggcgcccaccaccacgcctggctaattttttgtatttttagtagagactgggtttcactgtgttagccaggatggtctcgatctcctgaccttgtgatccgcccgcctcggcctcccaaagtgctgggactacaggcgtgagccactgcacctggcccttcaacagttttttaaaagtagaatctctgtttctaagataatagaaatcttacaacagaaaaaagggattttgtttgttaaacataagtaatatgtatttattttagaaaacttagagacaagtataaagagaaaaacacaagttgccaataaactcatgaatatgggtatatttatgatccagatgtgagtgtataagagtcagtgtctgtgtgtgtgtgtcagtgagtgtgtatgagggtgtgtgtcagtgtgtcagtgtgtcagtgtgtgtatgagagtgtgcgtgtgtcagtgactgtgtgtatgagtgtgagtgtatgtcattgtgcgagtgtgtacatgagggtgtgagtgtgtgtgtcagtgactgtgtctgaggttatgtgtgacagtgactgactgtatgagggtgtgtgtcattgtgtgtgtgagggtgtgaatgtgtgtgtcagtgtgtgagggtgtgagagtgtaggtgtgtcagtgtgtgtgtcagtgagtgtgtgagggtgtgagagtgtaggtgtgtcggtgtgtgtgtcagtgagtgtgtgagggtgtgagagtgcgtgtgtgtgagggtgtgagtgtgtgtcagtgtgtgagggtgtgagagagtgtgtgtccgtgtgtgtatcagtgtgtgcacacacgcatctatggagacaggaaactgtctcaagcttcattcgccaacatttcttaagtgctccccgggacccagccgccctctgtgtgcccgaaagtcgaccctgc

SEQ ID NO: 25510 - DNA, 1058 bp, Artificial sequence
  DNA replication origin
ttcctcccgctggcccgccccctcagcaaggaaggccaggccaggggaggcctgggggccggcggggccccagggaggagggttgggctgggggggcgcccagggctcgcagagcccctcaattgtcctcaggcccggcaagtggaggcgggagcggtgacagggacaacggggatctctgtcccacccatcactgggatcgcaattgcgtggagagggaaggccccagagcccacggagccgctctccccgtccaggcccccgtgaggcccactgcagcctagctcctgctcctgacgtcggttcccagcaagttcagccaggtggctggctgttctcacccctcccgggagctgcacagacagctgcgttagacagaacgcaggccacagggccgggcagtgaaacttcccatcacccgaggccgagccggccaaacggctcccctggcgtcataacggccaaggccgggccaccctggctggagggcgcacgggaggggcgcaacgtgacgtttgggagtacagagccagggagagggggccaagtcaggggccgccgcacagtataggacgtgaggaaggaggagcccgctgccccgctcccctacctcagcgtcgggtctaccctgcccaccttcaccatgtcacagcaagatgcgccccctttggcccagcccccaggtgacacacggcccggaactttgacccgccttgtgcaaatgtgagcctattaccagcactgcccttgttcccaacatttggggcacagaggggtccttttctgtccccagagccatcttgagtagaatgaggagaagaggcgtttccaggccctcctggcccagttgctcgctggccctcagctgccaggaaggcggacatttgagaaggagcagggagggtgtggggcaggagaggggtggtgtcccagccaagggcagcaggagccacccagaggccttggccggtaactgacgccagccctcacctggagggccaggtgaggccaactctgcccctcccacctcctgtctatgcccagcaggtccatggccg

SEQ ID NO: 25511 - DNA, 796 bp, Artificial sequence
  DNA replication origin
ccccaggtccaagcacagctgcccagagccggacagagcccaggcaggtcccagggggcctctccttccagccgagctgcaggagtgctaaggcgaaccaggcagggcctgagagcccttggaaggcttcccagtggaggtgaccttggggatgggccttgaagggtacacatgagtttgccaaatgcaggggagggggaggccttcccggcagtaggacaagcttgagccagggaaggttagggcgccagtgtgcctggctattctgggagacgagtccaaggcccggcagagtgaggggagcagctgtccctgaggaggccgaaggtcggcagggctgcccagctggggtcctgaatgccaggccgctgggcaatgtctttggggagcctcagacaggctctgagaagacgaaagacaaggtcagagctttaaaaagctgcagtgcggtcactctggcggccacgacagaagcaagaacacaagacagtgacgaccacacagaggtcatggctaggccaagtggagcagcaaggaaggcagaaatggggggctggggacgtggaggaggggcaggaggaagaaagccatgaggagaagccaggaggagaagctccccaaagcctcactcccctaggctcttgtataaaacagggaaaattacgcttggaatatctcctacatcgtgaggttaacaaaaaggagttgcagaacagtgtgtgtaaaacgaactcatgtatgtaaagtgaaaaagaatatatacaagatcccctttcctattgatctgtttgcacat

SEQ ID NO: 25512 - DNA, 1197 bp, Artificial sequence
  DNA replication origin
gttcacagtggtgagatcacacccccctgcagcactgtgaagaaggggaggccgcgagctgggtgggcacccactccctgcatctaggatatgtatgcaaattaatatatgcaaattaagtatcctaaacgacccacccaaagattgggacgcctgggacccttcccccaggaggtgaaatatctttaatcccctcctacccctctccctccctatctttctgagcctcccccatccagactgggtgcaggggtgcagagctttcctctccagcagggctctaagcctaagccgggggcaatggggaggaggggtgtctgaggagcactccctctccctgggagctctgcagaggaagagggtctctggcaatcagcatcctctacctccacctctccagcgggcgacccctcagagaaggtctcccagtgagtctggaatacgtgccgagtgcctggagtgctattgtgtgtatgtgagagcacattggtgaggctgcccatgcatgccactgtggacaaagacagatgcgatcgtgtgtgtgtggggactgcgtatatgtttttgtcagtgtgtgtgaccacgagtcagctgggtatgtgtgcttgtgggtatcaggtgcatggctgtgcgtacatgtgtgcgtaagagtcggtgcatttgtgtttcagcgcggctaaggccctgactgagatgctgtgtgtgcgggggtgggtgtgactgaatgcgggcacgggtgtccgtctgtttatacgtgtgtttgcgtgtttgggtgtgcaggtggctctgcgtaagcgtctgtgtgcagggggtcggcacatgggggaggatgcccatggttgggtaaccgcaggtccgcttgaccctctgccacctaggactgtgtctatacggcgtctgggctacagtgtgtttgagttgccgtgtgcgtttccgttgcggggtgtgggttgccacggggcaactgcatttttctgcgtcttcatggccaggggtacagggggcgtcgggcttttcctgggggtttttctgtgtgcgtgtgtaattatgtgcttagttcacatcttcatagtgcgcctttgtgttttcctgggtatctaaccattgcacgtgtgcccgggacttcagcgataagtgtttcggtgttcctgcgtgcggatttgtgctctccggggaggtctgcggcccaggttcgat

SEQ ID NO: 25513 - DNA, 960 bp, Artificial sequence
  DNA replication origin
gggcgaagacagcctttgccttggcctggggcctggtggggtgaattgtataacctttcttgtacctcaggggctgaatgcttcccggcctgcaacccccaaaatggattctgcgaggatgacaatgtttgcaggtaatagagtggctcctcagaggcagcttgtaggggccacgcagaagcctggggagtcgtgaagtcaggcagaaaaaaatagggggcttggccactacgctgcagcaaacagcttccgggcccctgcagaaaactggtggggcgagctggggagatggggggggcggggggggggcagccacagctcctgtctgcgttctcagaggtgggggggcaggtgggaccactgcaggccactgcggcaaaacgcagcactcccccgggatctcggggcccctccaagtcggccccctcagcttggcatgttttctctttaagttttcccattcaggtggctggtgtttacttcccaggaccaccggctgccactgtgcaaagacccccaagggtccttggttccacagaaagtagcctgagctgcctctctacccctgccctcttcatatgtccccacctttctcccccacccattgcaggtgccagcctggctggcagggtcccctttgtgaccagtgcgtgacctctcccggctgccttcacggactctgtggagaacccgggcagtgcatttgcaccgacggctgggacggggagctctgtgatagaggttggcactcgcctttgttcacctcagctctgcgtccttacctgcctgccctagcccctaccacctcctcccagtctcctgttgctggtgttcctcacttcctcattcctgcacactccgtgccctgtattctaaagatctgtttataaatttcctgtgggtaccgaatgcctcctcagaggtagggactttattttgctcttctctgcgccatcagca

SEQ ID NO: 25514 - DNA, 1427 bp, Artificial sequence
  DNA replication origin
gctgggctccctggggacagctgtgtgtccacccccctccagactgccccctcgtcctgcctgccctgcagcttccgcacactgcctagtgctccgcaggtgcctggaaatgcttcctgatcagatgggttgtggacggtgaacaaatgaatggatggggagttggtcaaggatacctcgaccgtgggacgtctttttcttgttatcaggggaacatggctgttctctatagcatcaagatcgaaaacatagataatttgatcatctgaccaatcttagaattttctatttggggaaactgaggaacagaatcgttagcaggctcagtccaggtctcacgctgagagaggccaggcagggtaccagacgcccgcctgacacatgccaacaattcttttttttgtctttttaatttttttatttcttaaaacaaactcaaaatgagatgagatggtgacttatgaatgacttcgtggggaaggaagagggacttggggcggttgtcagagattggggtggaggacccaggggtttggggtgagggaagggaggagaagggtgggggtgataggaagggagggctggtggagacaggaggggaagggtggggagaacgggaggggaagggtgagggtgataggaagggagggctggggaggacaggaggggaagggtgggggatcagaggggaaggatgacggggatcggaagggaagggtggtgggatcggaggggaagggtggggagaatgggaagggaaaggtgggggtgataggaaaggaggggtgggctaacaggaggggaaggattgggggacgggaggggtagtggggacgggagctggagaaggggaaggggcttgccagtgatgatggtggtcggtggggtgacagggtttttggggtgaggctgggaggggctggggacgcgtgctgtgggactcagggctgacggtagggaggggcctggtggggacagaggcgggtaggaggggctctgcagagtgcagatgatgcggaggaggcggtgagggtggggcggggcttggaatcaggatgacaaaggaccgggagtgaggagaccaatggcttggtggggagagtggggtgttgggagtttgggcagatgctggtcgggctttgagtcaggatgagggggcttgggtagtggctggaggacgatgaggtgatgaggtcgatattgtgtcatgacgatggcgcaggtgaccaatggatgggtgactgtgagttgtgtgtgggtgactgatgtgactgactgtagatgacgaaggtgatgatgacttagaaataaacacctggagcaaggtaaacacggcaggcaatgctcaataaagctaagagtatagattcttatccaaataatctaagaagcaaaatattcctatctggtacccaagggctgtttag

SEQ ID NO: 25515 - DNA, 903 bp, Artificial sequence
  DNA replication origin
ggtgggttggggaggagagaaggccgtgtccttgggtctgggaagagggaggagagaaatgcagaaaagggggtgtgttgctggggtctggacgctgggagctggggatggggtgccgcgggggtcttcagagcgttgcgtggtggtcgctcgaaaatcctgacatgttgcagtcttggacttttggtcaaatcgccttttgccatttcctttgtcagagtcaagcccccccaggccgccccctcccaccctgggccggcgggcctggtgggggcgcaggcgggtggctacgtggcaggtttctggaaggtttcctggctggccgcgagagggcgctggcggcactgcggaattttggggggcggggtggggaggggaggtggcctttgttctcctgatggagggggtcgggcgcgggatctactggaggatcctggattcgtttacccaagagggaacagttttgagaccccccggattcactgcggagtggccgcagaggccggggtcggcctttgcgccgtggcttcgggtgttgtggaggcgcacagaggcacgttagttgatttccagtggtttttggtttcgggggtcttaggaaggtgtggctcatttgagcaggatggagagagaggctgtgacaaggtcagtgaggggccatcgtgcgggggctagaaattgttgttgtggcgaaggagggaggcacgactttggaggcgtgatgttgatgcctgggggcgaaggcggggagcggcgtggtggccccctttgcgttactttccagcgatgtcacaggttctgtctctcgttccgagaccacccacatgcgtgacagcggtgcctggaggactgggtctttctgactttagtgaacgtgtgtttaattggattgacgaaggtggg

SEQ ID NO: 25516 - DNA, 1126 bp, Artificial sequence
  DNA replication origin
ggtccccctcctgagaatttcccaaagggatccttccattcaggacatcataagggtgatgacagagtcagtcgacaaagactgacacccccttggggagggaaacactccagtttgctagcaggtgaacacaagcaaagacttataggaaagtactcatagagtcaaagtatgagcatagcaaaggtcagggcttaatgcccaatgccccctcactagggcattggtttaagtctttaggtaagagggacagctggctggtcagttccggtcctcttcatcctttgccatcctggtcctgggggtcagtgagtggctgctttgtatgttggtgggatccaggaaaccgtgctcctagtgccctctgcaattgatcaaaggttagagaacctgcttaaaagcccaagcctagatcataattacagtttaagttcattaattacaattaaagctgattagttaaaatttaaaattgtcttttaattgctagtgggtctgggggtggtgcaaggatggtggtggggttgggagattctgcccgccacgttggttatgaaatgatagcaggagggttgaagtaccgtgaggtgtagatgggcagcaggccccttggcagcagctcagcatggagaggaggtggtccttgaagacaaggaggtggacggatgatgtcatccctgaggagagaccctatggcatgggaggggggcaggttagaaaccatcttcgtgacctctaacggccagcaccggaacagcagagagcaaaagggggcaggcagagggaaaggcagggaggagtggcaaaggggaggactgaggaaggcagtagggaggggctgggagggaagagggaggggtatggagggaggaaggaggggggcagggagaggggaggagagaaggggaggggaaaagagagatgaggaaaatgaggggggaagagggaggagggaagaggaaagagggaggagggagaagaaaaataggagggggaggagggacgaggaaatgagaaagggtggagggagaggagaaatgggaggtggaggagaggagtgggagggggtaaggatgatttgactgacaggtcacaagtgttagctgtgtgcgtgtgcgcaactcaa

SEQ ID NO: 25517 - DNA, 1475 bp, Artificial sequence
  DNA replication origin
catggggcagggcgcccacccttctcaactcaggtttccctgggcagcaggtgcacctcagcacccctggggttgcagaagtggtccggggaccctggcttccttgacatgccatccccagagcctggttcaaggcctctctgtcttctcggctgtttcacgacgtgttttgtaacttggcgggattgcgtttcgctgtgtcgaggttgtctcttctctgactcgccctccgggggactgccggggtaaatctggagagttgctcgtgctgacagtcctcccccagggcctccccggttctgttgagtctcctttctctgtagtggaggaaatgtgtgtagttttgtgttgtgtgcctgtgtttgtctgtaaaagcaaggaccaaagtctcccttgttgacctctcaattcctatttgggacatataaaaacactggattcttaacaagcgcccggagcagtaggagcacagcttggatggactcaggacttgtggcagggagcacgtgggaggcaggggagtggggtggggccaggccatctggagtgggaggcgtcatgctcagagtgactctgtagacgctgggtgggatggggagtgcgggcgcaggcatggatggggctgttagctagtgtgatgcttgaggtctgagctgatggcagcaaagtggggtgctcaggaatcaaagctatggggttatagacaggatatgaaggagggagggaggcaagaagaagggggtggttcccacgcttctagctccggccgagtggatggcaacagcatttggaaggcggaggacatggaattcatgtgtcaggagccaccttccgagcctccagtaccacgtgtcagggccacatgagctgggcctcgtgggcctgatgtggtgctggggcctcaggggtctgctcttcttctctttcagaatctggggctccaggctatgccttggctggactgaggtctgggggtgcacttattatccctggggacacctgctgaagcttctccctgacaagctgtgtcactgttggatgaggatggggcgggaggggttcagggcagaagaagaccgggagggtctttcaaaagaactcatgtacggctgttaaaaaaagtcagcagaggctcaggaagacttaaagtgtgcagaaggcggggaagggagggcccattgcatgcaccaagaggaaattggaaggaacaagcgacgttggctgctaggagagcctgctcccaacatctaggggctgtcctgacgggtcacagtgggtcgaactgagccaatgagagcagctctggggagacccactggtgccctggaggctgggtgggtttgggttggatgaattctgtgtgtccttttggaaatgtggaggccatgaggggggatcagggctcttagggttttgacccttaagagttttgtatctgtaattcaaaggttctttagttctgggatgctgagatt

SEQ ID NO: 25518 - DNA, 814 bp, Artificial sequence
  DNA replication origin
ggtcaggtctcctttgccaggtcatggccatgatccccaaggcggttgtttctctcagcaaaggggccatgctcagtcctgtgcacttacggctggacttgcctgcagttctcttgaggtacctccctgtgagggagaggaggaggagaagcaggaggaggaggagaaagaaggagaagaaaaagagagagggggagggggaggagggagaaacaaatgaaaggaaggaaggaggaggacaaaaaggaagaagagggagaaagaggaggaggagggagaaggaaaggaaaaaggaaggaggaaaaggaagaggagaagaaggcaggaaaggaaggcgaagagggagaaagagggggagggagaaggaggaaggagaaagaagaagaggaaggaagaggaggaagaaggaggaggaggaagaggaagaagagaaggtgggaggaagaggaggaggaagaggaggaggaagaggagggaggaggagacggaaggaaaagagggaggaagaggaggaagaagaggaggaggaggagagcaaggagaagagggaggaggtggcagtggcagtggcggccatggttgtgatggtggtggtagtggcagtggcagtggcggccgtggtagctgtgatggccgtggtggctgtggcagcaaaagcagtcggtctctccttccccatagggagcatgtccttatgatccgctgcagcaaagccaggtgtgcagactcaggatccgtcttgacttgggtctagtgccctttggccccttgcccctcagtgcccccgctcagcccagccacaagctgctcacag

SEQ ID NO: 25519 - DNA, 929 bp, Artificial sequence
  DNA replication origin
aggaggttatgcttctgattgtgaccccctacttctcagaagacacttcggactccgcccccgcctccatacccaacaatgccgtgcggcatttcgtgtgactggaatggaaatccaacctggccctcgagggcagtgaagccagtccgaatcgcagcagatgatgccctctgcagaggccgggctcatgaacggcctgggtgggtggaggtgggttgacaggatggggtgggcagggcaggggagtgcaggacagtgaccagctggtccagagagtcctgccaaattcaatccagatattactggattaatcagcaaaggagggggagccccgcccccaccccatggagacactgatgagcaccatgggatagctgtggcttcccaggcagcccacggacctacagctgcctatcagcagccagggccttctgggcagagcgcctcggacccccaattgccctgggagggtgggtttttggtgtcagcttagttcagctcagctggcttttatagagcatgcactggctggctcactggggtgatgctgtcgtggggtagatgagcagcaaggcagattcgcagggttgggtgcaggcagcactccatgggggcatgcacggggcccttgcttttcaagcagaggtggactgaaggctgggcttgcaagggggtgggctggggtgggcgctggtagggtgttctgaaacattacctatatacctgcactttacaaagcactttatatgtttgcctggtgttggctgatggtggaaggagtgattggagatgcctgtctgtggcctgggtgctggttagtacccccatgtcagaggtactgaccctgggctcagagcgggtagaggctctcccagggattctcgagtgtctacagggggactgggattcccttcctgggaccaggaggc

SEQ ID NO: 25520 - DNA, 1010 bp, Artificial sequence
  DNA replication origin
cctgatgtcattttgggaacccctcaattcaaatcagtgtgtaaatatgcagtgcaaaggcaaacatttcccccctggattcggaacctcaggtagatgcatcacctggatgccaaggagggtggggcaccgtgggtatgacgagaactcacctggaggctgggtggagggtgcagcatctggccagagggcatggcgggcacaggcgtcgtccgggcccaaggccctgtccagagcgtgatgcagtagccgaggcctgggaggccccatctggtcctgaggttccccagccagtgccacagagcagcagaagccccatgcagtggctgggggagctgaggggctaggcacaggacccagcctgccccttgctcaacccattgtcttgggagctgccttggaagctggagactagggggtgggggtgggggggatggccagaaccccagacaagggggcaggggttaaggggtgggcaacgggggtgggttccactccaggacacaggagggagagccggtgagaggacggtgtctgcagctcatgggagcacagtacccccaaccttggcctcagcccaggtctcactccagctgctttgccaagaagaggcagggggggaggtggagaaggatggagaagaggaggggttcaagggccaagactctcactcttctgtccactgaggcagacctggacacaaagacggactgatgggcaaagccacaggggatataggcatgggtgactccgggaagcaggtctgggggcaggatgtggatgtggcatcggcacccagggtgctgtaggctcagggacagatccactgtcgcccactcccagtcgctctccaccatctgtctcccacgcatgcacatacacacaagcatagagctgcatacgcatgcactggcaggcacacgcacccacacacgtgcacaccgggcatgctcacacactcataggctcacgaaggcacacacaggctcatggaggcacacacacccaca

SEQ ID NO: 25521 - DNA, 1703 bp, Artificial sequence
  DNA replication origin
tcttttgggggtgatgaaaatgatcttaaattgattatggtgatagttgcagatatctgtgaataactaaaacacacttcgctgtgagctttaatgggcggattgtgtgtatgtggattacatctcaataaagttgtaccccaaaacaccttcctttgttctttgacatctttctcaaccaccatactgcctgcctcgtcctacactctccagccatccacaccaccaacacacatgcacagggacacgcagccaggcacgtggtaggtggtgcaaaaatatctgtgagtaaatgacctgataatataacattctctgaaagagcccatggagggaaacctttagggaaaggggttaaagattaagaagtaggggtggcaggagggtatggaggtgggaaagaggctcagagtgacacatgaatggaaaaggggctcagattgacagacacatggagggaggaggggctccctgtaacacatgggtggaggagggggctggtgtgacacacgggtgggggaagagctccatgggacacatgggtggaggagggggttggtgtgacccatgggtggaggagggggctggtgtgacacatgggtggggggggttagtgtgacacatgggtggaggagggggctggtgtgacacacgggtgggggaagagctccatgtgacgcatgggtggagagggggttggtgtgacacatcagtggagagagggttggtgtgacacatgggtgtggagaggggctccatgtcacataagtaagggaggggctcagggcaatgcatgagtggggggaaggtctctgggtgatgcatgggaaggggaggacttcaagtgacatgtgagagaagctcaggtgacacattagtagggaaaaggctcctcatgacacatgagtgaaggagaggtggaatgtgagacagaaaaggggctcagtgtgacgtgtgtgggaagagagtctctgtgtgacatatggggggaagggacttggagtaacacaagaaaggcgacttggtgtgacacgtgggtgggaagagtctctctgtgacatatgggggcagggacttggagtaacacaagaaagaggacttgatgtgacacgtgggtgggggaagatctcacgggacacaaggttgggaagagatgcccagtgagacacaagggtgcagggagggctccgcgtgtcagaaggagtccatgcaatacatcagtggaggaggagctcagtacgacacggggtgggagagcggctcagtgttatacatgcatgaggtgaggggtccattcgacaaacgggcagggggtgctgtgtgccttgtgagtagaggaggagcttcatgtgacatatgagcaggaaagaactcggtgtaacacatggacagggacaggggctccaggtgacacatgagtcagggaagggctctgagtaacacatgttgaagagaaactcaatgtgatacatggatggggagaggcattctgtatgacttatgagtgtggggagagactacatgtgtgacacatgattagaggaggaacttagagtgcagctgaatgggtggggctcctagtgacacacacgcagaggacagggtcagagtgacacctaagtggtggaaggagctcagtgtgctacaagagtgggagaggggcgtcctgtgacacattagtggggcttgctgtgacaccctta

SEQ ID NO: 25522 - DNA, 1016 bp, Artificial sequence
  DNA replication origin
agtttgctttatttgaggagtgcaaaaagattggggggtgagaaagctcggggggtggggaagggtctactccccttgcaaagcggtggtgtggccagagcctctctgtgactcggcatggtcccctgggtgtctgtgtgccttctgggactccatccctgtatgaggggcccctgcacccctgcactgtccagtgttcagtgttgggagggaaaggcgccccaaggcatgcaggggccctctttgctgtgcaagtctggtaagtggcactggtacgtccggatgccccaaagagcggctttgtccaggtaagtccagagctcagggcaagaggaaggcggggtcaaaaaagctgaagcagatgtggtgggggtgggggtgggtttgcttgcagggtgtgatgggggtgagggaggcaccacatcatcagatgtcgggaggttgggggatgggggttggggggcgggggcgggagctcaggggagcaggagcaccggcagtggaggtagaagaagtcagtggagcacccgaggtcagtgtcccagggtggccatcaccaggccgggtggggggccccgtcacctgcttgcttggctgcgcctgctgtgcctgcttcttcatctggccacgcgtcatggggtcacttcctgctcaccactgctttctccctcatggatgtcactcccgggcatgggcttgggacctggagaacggagaactcgtagcccagggctggcgctgggtctctgaggactgggtagtccgttagcacaggtggcattgctggttgatgagttgaagaagttgttgcccttcacaagtgggttcctcttgggtcaggagtggcaggaagggaagcgaagcaggctgaggcgcggggaggccaggggacgtcgggaggtgttggggtgagaaatagaggggactctttgctggagacagggaggcgtcttcagtcgaggttagcatcttcgtcctcatcaggcagctcttctagccttgcctgctccctgggc

SEQ ID NO: 25523 - DNA, 1104 bp, Artificial sequence
  DNA replication origin
catgttgttctcaaatctcatgacagtttctttaagaaatatctactgatttgaaaattcccgccttatttgaaaaaaaaaaaaaaaaaaagaagcccagaatttaatgctgctggtttggggtcacaactgcctttgaggtcttcgaatgggaccctcttccccccaacactcaagagacagacgccccagcctcaccaccttcagtgcccagagcctctgtcgggtcagctccttgcttgcctctgagccagtggcccattgggtcagggctgccaacgtgtgtctatgaagggttgggtgtggggggggccatgggggggacaaatccctcagcaaatacctctctctgtcagctcgcctgtacagtaaaggaaatctgattttaaaaatagagcttggaagaggagatgagaggatatttaggagcagagttgagcctggggcggggggccggggtgggggaattaggggagaggtgaggacaggggaggagggtgggaggctgggggctgaggaggaaggtgaagctggtgaggagtggggaggctgtgaggatggaaaggggagtaagggagaggtgggttctctggaatgctggccatgcctcctctcctggcctccagaaactagcccagtcacacctggggcccctggctctctgggctgccaggatgggtgtcaggtgaagatccctgtccatcttggcctccttgtaggtggtgctcagagctccttgggtttgagggacatagctactgggtcttaggagggaagtggcctcaaaatgaatacccccagcagctccctctgctgcctggcctgctgtggcctcctgtggatggaaggcacagcgtcacagtgagggtggacatgcagggaccctgggagggtttgttattatttatcgattattattattatttattttgttgaactcgtgtcaaggttaagatgtgtccatggcagcttgaggcttggaagccttcctggtttccctggtatgaacaagtgtcaaggatggctcacttgatgggacttggtgaggaggctggtgagattcctgggggcttcctgagggcctcataaggagtttgggttggg

SEQ ID NO: 25524 - DNA, 1581 bp, Artificial sequence
  DNA replication origin
gagcaatattcaacaggagagttccttcgcttcctccctggagggagaagggagaggtgtggacggggagaggggaggggagaggtgccccccactcagagaggccgctgagcagagttctgcatcgggtaggagttgggccaccgaagatttgtgccaactcacggtgcggtggaatcagacagtctgaattcttcagacaccagccaagagtctgtggcgcccccacgtgccacaagggggctgcctgggccacatttctgagcccgaaaagtgaggagggggacagtcaagagggaccggcgcttttgctctggcagcggcgcttttaactgcgacagatgcgtgcggtgcggcgggggagccggccgtgccggggctgggggctgctgggcgggggtggtcggggcggggggcgggggctgcaggttgcgcccctccctcacagacggctgcgctgcaatgcagcaggctgcgggagctgtcccgggagctgtcctgtccggtggccggctttccaaagtggggaacgagagatgagggagggagcacttccaggcgctgcgtggtggccaggcgcccaggaagccgaggggcccgagactctgcagcggggccagaaagagaagagtgggggaggaggccgggagtggtgcatggaccagggggtagagggaggtgggtgtggacctggggtcgggcgccagtcagcttgcagcctatgaaggacggaaaggagggctacagagataggggaagagtggggctgaggatagccagagcggcttggcacacagttttagggtaaaagcatcaactcttatctttccaaaagaaataaaaaagccaaaaaaaaaaaaaaaggcatttgaaagctagacagctgaatccttcccagcatgactgagccggtcactccagggtcttccttcaaagcgtgtctaatgggagacagcgttgtcccagtaaccaaattgggaccagagtcccagggaagggctcatcaggtggccgctctgccttgaagagtggtaccctcaggcccttttccagccaggggtcagggagagagctggagggctcggggaggcagggactgggagggagagtggggagaggagcgctgggggctgcaggagggtctctgggcagctggcgggtgtctcgttccgcaacactctgcaccctggtacatcgtcctccgtccactcaacgtggaatgattctcttccctctggatccagcccctctagttcccttttcactttgaggcatttgccccctgtgaatcagttccctgctactccagaaaatttctctcataccccaggcccctctgttcttttaaatggcacccttcacccccagcccttcatcttctgcactgtattttcacttgttgatttaaaaatccctttattatgggaaattgcaaacaacacaaaagtagagaaaatagtacgtatttttactgtttactcaattttcatcttgccattacccggacacggttgccgtcaaaccctggcccctcttgtttcatctaaaccctaaactgtccctctactcccactgcccaac

SEQ ID NO: 25525 - DNA, 1805 bp, Artificial sequence
  DNA replication origin
cctccacccagaccccgtgtctgcttacatctctctgaagcccaaccaaatggcagttcttccacgagcccgaccccacctcagccaactcaggcctttgcatccctgaccctccacagcaccctgcctgcacctctcctccagcccactcacattttccatgtggtcactcgtagaaataaacttgtgtttactgaacatctgtgaggtgctggagctagaccagtaaataagacacagtctctgccttcctgcagctgctagcgttgtggggaaaaccaacattaaagtagttattgcagagaattggtttcaaaatgtgaggaggccaaagtgttgtgaaggagcagagagcatttaacaagaggctctcgccaatcaggaaaacttctcagaagtttagattagaagataaaggatgaggggactaagccaagaagagagaggacaagagtggacactgtagggtaaaagcagaggaccagatggagcatggactggatggagcatgggtcagatgaacatggtcggggtggacagtggactggatggagtatggactggatgcagtatgaactggatggagtagtggtcgaggtggggcgtggattggatggagcgtggtctgtgtggggcatgaactggatggaacatggactggatggggtgttgacttgggggagtgtgaactacatggggtgtggtctggatggagtagtggtctggatggggtgtggactggatgcagtgtgactggatggggtgtggtctgggtgaggtgtggtctggatggggtatggtctggatggggcgtggatggtctgggtgaggtgtggtctggatggggtatggtctgtatggggcgtggactggatacagtgtggtctggatggggtgtggactggatggggtgtggactggatggggtgtggtctgggtgaggtgtggtctggatggggtgtggactggatgcaacgtggactgaatggggtgtggtctggatggagtgtagactagaaggggtgtgtactggatggggtgtgtactggatggggtgtggtctggatggggtgtggactggatggggtgtgtactggacagggtgtggactggacggggtgtggactggatggggtgtagacaggatggagtgtggactggatggagtagtgatcttgatggggtgtggactggatggagtgtggactggatggagattggtctgggtgaggtgtggactagatagatggactgaggtctggatgcagtgaggactggatggagtagtggtctggatggtgtgtggtctggatggggcatggactagatggtgtgtggtctggatggggcatggactagatggtgtgtggtctggatggggtgtggactggatggggtgtggtctggacagggaatggactggatgcagtgtggactggatggggtgtggtctggatggggcatggactgtgtgcagtgtggactggatggggtgtggtctagatggggtgtggactggatggagtgtggcctggatggggtgtggactagatggggtgtggtctagatggggtgtggtctagatggggtgtggactggatggggtgtggactggatggggcgtagactggattgagtatgaactggatggagtgtggtctggatggagcattgcaaccgaaagagtatccatgtgaattgagcgtggggagccagaaatgtgccagaagtgagtctgaggatctgggtggcaccagatcattcaggaccttaaaacaaaggtaaaattccgacttctcttcagg

SEQ ID NO: 25526 - DNA, 888 bp, Artificial sequence
  DNA replication origin
aaggtgagcatttgcagcccaggctgtcaggaatcccaggcctgccgcggcctccctgagctcctggggcaattccatgtctacagttcttcagttccacagtggtgtcaaagcccatggttcatggggacacagtcctttccactggcagagaccaactgggactgccaggtggaggtgctgcagtcagccatgggggcaggaaagggaaggtaagcagagaatgggggtgaatggcaagggaggaggagaattaaagtcaatctccctcagtcgctggtataactccttacaatggagacagagagggagaggcacagagagaaagaagggacagagggaggataactccctacaacagagacagagagggagaggcacagagagagaaggaagggagggagagaggagggaaggaagggaaggggaggggaggggagaagaggggagggggaaggaagggagggagggagggagggaaggaaggaaggaagaaaggagaggaaggagaggaaggaaaggaggggagggagggacagcaggccgtatctttggtgcagggattatttccattttataatcttgaggctcagccatgcaaccagaaactctccaatgattccagacttattgtgacccaatttaactctaggtcagatgctgggcaggagaccctggacttggagtgtcacagacagaaggcaacttggagggcaaccgggtcagcccacccactcccctcagggagactgaggccccagacagaggggaagtgacttgtccaagaccacaccagtgctgagctttctttctgcatagaccctgctccctctggagtttgtgcctcagtgtgcagttctgtgacctgactggattggtccagatgac

SEQ ID NO: 25527 - DNA, 882 bp, Artificial sequence
  DNA replication origin
tttctacttcttgccccataatgcaacatgcttagtaatgtgggtacataaggagggagggcctggggggaggcaagaggaaaaaaccgtagtttaaagaatagcatgaagttctccatggagtcttttgccaaagaacagtggagagggccttctgaggggttctcagaaaaggtgttggtttgggaggaggaagttgaatttgagaggccgctgtgaggagctgtaagagcagtgaactcatgctacagaaatccagagctgtgacataatctagggctaaggattggaagcagggaaggaaggaaggaaggaaggaaggaaggaaggaaggaaggaaggaaggtttgttgagagaagggataggagaatgcatgggtgaatgggtgagtggatggatgcatggatggataatgagagaatgggtaggaaaatgggtggatgggtggatggatgaatggatggatggatggatggatggatggatgaatggttagatggagggagggagtgagggagaagggaagggagtgatagttgagtgcatggagaaatggttggatgggtggaagaatagatgagtggatagacggatggatggatgactggaatggatgcatggatggatggagaaatggctgaatgcatggaggaatgattggatgtgtggaggaatggatgaatggatggatggatggaaagatggatggatgcatggatagatggatggatggatatatggatggagggagggatagatggatggatggatggttggatagatggctggatggatgacagaatggataagagaatggatgggtggacgggtgagtgtatggatggaaagttagatggatgaaagttttgggtcctggttgc

SEQ ID NO: 25528 - DNA, 975 bp, Artificial sequence
  DNA replication origin
aatccgctcacccctgctgactcctggcggctgcccagggtgtgagccttccccacaagggccccccgggggccgtgggaccctgttttccaggaaacagcatctcagcatctccaggctgagacgggccccaggtcgtgactgagagctgaattcctggaactggtcttccaaggagtgggggtgggggatgtcagttaggggtgggcggctgcggaggggcctctttgcctcctctggatgcctggcctggtaggccttggcaagcgacctcagagctctcctgtgtctgtatgtggacgcctccgcctctgacccccttcctgcaccttcagcacaacacacgcctgcccctggtttctggggtgccaagtgggtgctcctgatccagggctgcacagctgctgcccccgcacttcctgagcgacccccactggccctcctggggctgacgcccaggctgggcctcactttctcagttgagcgggaagacgtcacatcagccagtaacaggactctgcatgtaagggttcaaggtgccgtggcgttgccaaggggaacgtgagcttctggcagaggtggctgcttagtggagggtacagggctggccttgaagggagggggaggaaagggcacagcagcagcaggggtgagggagagagtgtggcactgcctggcctggggtggccaagacctgaggtcggcaaggtcgtggaaggagagtcctgcacgccaagttaagggggcatggattttcacgtaaaggtcacgggatccactgagaaggttgggtgggggtgacacatcagctttcagcctggaaaacctagggaggagagacacaggggggtgcagagaggccagggggaagctgcctagggggtccagggacaaacagctgggcctagcctgacccagaagcctgatgcagccagaagcatggccacccgctaggcctgtccatagtcctgggag

SEQ ID NO: 25529 - DNA, 770 bp, Artificial sequence
  DNA replication origin
agggacgagtcggagtttggctggggcagtcaggggagagccggggccgccagcagcccaactccaggggaaaaccgtctcccttctggctcccccatgggctgagagctataaataaaactcaataaaaccttaataaaactcaataaaacgttacacttattctccaagcccaggtgtgattcaattcttccagtacaccaaggcaagaaccctggatgcacaaagccctctgtccttgcctcaaggtggagggtctaattgagctggttaacaaaggcaaactaagagagtacctgtaacacacacccactggggtttcagctgtaaacattcacccctagacgcggccatggggtcggacccccatgacctgccctctgtgtgctcccctagaggtttgggcagcagggcactgatggagcgagtcacatccccatcgcacgccctgcgagagggacaagggaacctttcctgttgtacaggaaggtaataatagcttagctgggatgagaacccagacgtatccgtagtctggaggctcgtgtttagagacggacagccgtgaagatgttacacctaggggaggagcgaggggatagctacccaggagcacgcaaggaagggaggagctgcccagagggagaccagggccaaggtctctgggcaagggcaggggagggccagggagggctgccggacagtggaaagcgcttgccaggcaagtgggctttggggagcagggagcattctagacagagaagactgca

SEQ ID NO: 25530 - DNA, 885 bp, Artificial sequence
  DNA replication origin
ggggctccacccccacggacctagatgaggacaggcatttcctgcccatatgctgcatttaccaagaccaccctggactgcctcgcctccatcctgggcctatacaaaccctcaagacactagcgggccagaggaggagaagagcacatcggccgcggaaggagacaccaagcggctggtctggtcatggagaggctgcggagggggcgaggctgcggagggggcgaggctgcggagggggcgaggctgcggagggggcgaggctgcgggggggggcgaggctgcgggggggggcgaggctgcggggggggcgaggctgcggggtggggggcgaggctgcggagggggcgaggctgcggggggggcgaggctgcggggggggcgaggctgcggggggggggcgaggctgcggagggggcgaggctgcggagggggcacgtcggcgggagagcacagcgacaagccccggcacacccgcaggcccttgaaccagagggacgagtcggagtttggctggggcagtcaggggagagccggggccgccagcagcccaactccaggggaaaaccgtctcccttctggctcccccatgggctgagagctataaataaaactcaataaaaccttaataaaactcaataaaacgttacacttattctccaagcccaggtgtgattcaattcttccagtacaccaaggcaagaaccctggatgcacaaagccctctgtccttgcctcaaggtggagggtctaattgagctggttaacaaaggcaaactaagagagtacctgtaacacacacccactggggtttcagctgtaaacattcacccctagacgcggccatggggtcggacccccatgacctgccctctgtgtgctccc

SEQ ID NO: 25531 - DNA, 978 bp, Artificial sequence
  DNA replication origin
catgaggctccatctaggtggccctgaaatgaaaaatggataatgtccccaacagcatctggacagcaaatgcggtgatgagtctcataaaactgcttcttgtaactgccccccgtgaaagctgagggcacgcatccaaatggcagaggctgcaaggtgagagtgagctacaggcagacaaccttgtaaacctggctgggcactgtgcccacctgcagggtgaggcaggtactcgtgcctttcctgagcacctgctatgtgcccagtcctgataggaggtttatatacatggtcctgttcaatcctcccacactgagcacagtggctccagaggcccacttcatagatgagggcccaaatctcatccatgacccagcctcacaccaggtctctgtggccctgcagcagctctgtcctctcccttggcctggtccttggacctagtggtcacctagggtgcaatgctcaggctgtggttctggagctttccagcttgttcgagacagcagggtgaggcacctgcacaggttagggtgggcaccaccacagcccaggcctaggcatggtgccctagacagggcactgatggtcagctcagcctcagaaagggccaaggctcacacacctgcaagtccctgcatgggatgaggtcctcacaccctccctgtgcccttgtcctcgctgagcccttccttggggtgaccccatcttatccacaatcacacctctatccccatttcacagacttggaagcaggcacaaatgatacaggagtgctgggaagggaagagcgtggtccctttaaacgatacggaagcagggaagggaagtgctgggtagagaaaggcggatccctggccggggctccacccccacggacctagatgaggacaggcatttcctgcccatatgctgcatttaccaagaccaccctggactgcctcgcctccatcctgggcctatacaaaccctcaagac

SEQ ID NO: 25532 - DNA, 1683 bp, Artificial sequence
  DNA replication origin
tgtcttgtgtttgcaccctctcccgttattctggtctcgagtttttctctctatccatcttctctcatttaacataggtttccccaacaccccccgacccccgcaccaggttctgagacccaccaagatacagagtgtgatagaactcagaccccgacctcgaggagcagagggggaaattgaggcctggagagggaggagaccagtcctcatgtatctgacagccttctcctgagacagacgttaagaaacagttcctggtggggacacaggacacctggtcactgagcagaagcttcagagaaaatgtaattcaaagcagagacctggagactgcataaggactgaccaatggaagaggtggtggaatgggtagagtcccagaaaggagaggcacaggtgcaagcaaggacacacactggagggaggggcggctggggaggtgggcggaggccgagtcccccagggcatcgcgtggtgggaggtggggtctgggacttggcgctggggtggaccctcattgcaggagaggagacctggagtgcactctggctgcagtgcaaggcatgggctggaaggcagcaggccgagggtcatcagaaccagaaggtccaggacaggctgaggcctggagaggggcacagagcgatgcagggcagtaggtagagttgggggagactgtggaggactcgaagcacgcctgggatggactcaccgtccatagggcaggagcagagacatccggagggtgctgcttgggaggcagcgtccctgacatgccgttcaccatatggagctcccgggggtttgtggggtgggggcagtgcggggagatgaaattagggtgcggcggctctgagaaccctgtgttgtgtcctcttggcagctggaacttagatctggaaatctgaggccccaagaggcagattttcccatcgtccttccacagggatgattggatccacaggacgaagtggagaggaaaggccttggggtgccgggggctggggagaggggttcaccaaggagggtcctgcggaggctggaggtttgcagtgagagagctgggaggatgggaagctggggtcagagatggagtctgaggatgtgggctcagaggatgaggggcaggggcggctggatggcactcctagacacagccttgtcctctcctcaaggtgcaccaagtggacgaagagcaacttgtgaagggcctacggtgcctccaggaatggagggctacctgtgaggcagtggtgtcttcctgagacatgtgggagttgaggaggcaggctgagcgaaaagctgggggctctggggaacagatgcaggtctgtctctgagcctagagtgggaagatgcagaagatgaaggcatgaaaactacgggaggagttctacaagtggtgtggggggcattggacgccacaggcataaaacaaacctcacgtcctatctaaacctcgcatcctatctaaacctcgcatcctatctaaaccacgcatcgtttatctaaacctcgcatcctatctaaacctcgcatcctatctaaaccacacatcctacctaaacaacgcatcctatctaaacctcccatcctgtctaaacctcgcatcctatctaaacctcgcatcctatctaaaccacgcatcctaccaaaacctcgcattctatctaaacctcg

SEQ ID NO: 25533 - DNA, 2069 bp, Artificial sequence
  DNA replication origin
tcccaaagtaaaggcatcgggtgatgagaggaatctgggggtggagaagtggtcagacgagccccagggctctgtcattctggaagggagcccctgccctgtcgttctgtgtgggcataactttgaaaatcagggcacttcatttaacaagactcatttttaaaagctcatgttacctgttgaaaacccaagggagactggcctttggcggatggattaagcgccgctcattcagttccattttacggaaggacctgcctcagccccgtatgaggctgcggggattccaaagtaaagtcaaggagatggggttcctgcctgcaaggagcttcccacctagcagggccgtccggtgggcaaactgtgggcactggatgagcaaatagtgcattttgctgacgacaggagacgcaggtggcgggggggtgcccaggagcccgagaggaggggtgtggtggagggcgggaaaggaggggtggggtggagggcaggagacgaagggtggggtggagagcgggagaggaggctgagccctggagcgtggagtgggcatgggccagggacaccgagagagcagcctgcgcagagacgatggggcagcagacaggcctgtgtgtctgaggaggggagcctccaatggagaaggctgaggagtgggtgcaggcaggagactgttgagactggccgtggggaaccgcagatgggcgtcagctggggaagacagtctagccgcactggagaggcaggactgtggggtcagacgagggtggggctggccttctgggagaaccccagaggctcagcaagaggtaccacagggcttgagctgttgagacggagagaaatgctgaggatgtggcccggacagggcccagagggacccgggcctccctgcataggtgcttggcagtgccctctcagtggtggtatcaactcctgggcgaaggcgagaagatggctggtgaatacagcctgcaggcaggcagcatatttaataagattaggacttgggagaaaagtcctgggcttgtaggtgggagctgaggccaccgcagggtgggcgttcctggacagtgggtatttagagagcagaagagaccgcaggaacagcccgagatgacccagcctctagaggtgggctcaggaggtgggggaggagcagccgggagggtgggagaagcccccatggggagcggcaccaccacaagactgaggcagtggtgggaaggccacggagacctcccagaagaaagggctgaaaagtctgtggaatcctctgagtcagaaggtcctgggaaccattgcccaagcaattcctgaaggcagaaagaagcctcattgcatcgggctaaaatgaatggagctggaggagcggggatcttggaggaccgagtctgtggctgactcatttcagggtccactgtagtgcttggcacacagtgagtgcccaatccataccttctaattagaaatatttccctctatttccacagacctccattagcaatgccctttcagcagtgttagcttatttaacatttataaaagcatgtatcctcgaaacaggagacaggctcatgaacttgaccaaggaagagcaagtgatcaactgcagacccatccaattggtgtttttccatttttctcgttggttgtcatagcctcccctgccgaaggcatcttatctttgcttgcatgttaactgcctaaggcacagagttcaaaaagcaatttccatctcatgctttgaataccttccatgtgccagaaccatgagggtcacggggctgctgcccttcgggatctcacagtctagtgtttttgcttagcatggtggaaattggataaaatcaaattctctgaaaaaatcatactttaaaaggaggtacggcccaaggagcatcaacagcaccccatttgtatgtggaaccccttgaagggaccagataatcaagagaactgtgtgacaagaaaacaatggctgcaagaataagggcactgtccttaataaagctcacctctggagaattaactagccttatgccagagtagctctgacagtgaagggg

SEQ ID NO: 25534 - DNA, 877 bp, Artificial sequence
  DNA replication origin
atcctcctgggcccaggccaggcccgcgcctccctcccgggctccaggcgcgtcggggacaccgggccagggcgtcggggccagactcgggcctccccgtcggtcatcgacccgcgcggcggagaaccggtccgtgcgccctgtcgaggggtcgcctggcgcccaggctcccggccaccgctccccgcgccgcgcttaccttgttggccagcgggggctgcgctcgcctcgccccgagggtcggtgccggggcgcgctctggacgggctggggtcgcgcgaggacagcggccgcccgcgccgccggaatgctgatgccgcaggcggccgcgacgcccggtggccgcctgggaccccccgccccacggcggcagctgcagcccggagccgcgtgaccccgggcccgacctccccgcgctcggctgtttgtgcgcacacaaaagagaacactcatatttttcttttcccggcacagacttcacacccgccccgtctcccctcccccgtaaccccccgcctcacacacgctccgctgagaacctctttttctttgcgcacccactgtgcctcgcctttctctcctctttaattccatagttgtattcgaggatgtcagcatagcttagaaagtttcatagaaagtcagaaagcaattagagaggcccttttattggagtctcgttggtgccatggaatcttttaaaggagagcctgaaggaccgaacacaatcccattaagccgccaaaactcccacagtcttcaataggggtgctcaatacttcgacagactttcgctggctcattgggaaccacggggtttcagttcctagttccgcagcggactcacaacggcgcggccttgaacccctcgtttctt

SEQ ID NO: 25535 - DNA, 1628 bp, Artificial sequence
  DNA replication origin
cagggaggaaccctgagtggaagacctcgaatgtagattcttccacaaagaggaggaaggagctagtaggagctggggaggcggagagttgagggcaggttttgcttttgttttctaagtgcctggagagcatggattcaggagcagagagcagggacacagttgattcagagaagacgtgggagttggtggaactgacagcgtgatgagagggagacggatcgggtgggtctgaacccagcgaccaggccacagggagggcccaggtgggtgtggtggtttggcggcaggtgtggcagggatggtctgcatcagaggggagtttgcgcccgccggccctgccacctagctctgtgtacaggaggctcagggctttcccagggtggggtcctgccaggtgggagtggcagtgagagagctgaggactggctcagcgggacccgtccagagggacttgacatggcagggctgggtgggagggaaactcagagaaggtaaggggggacggggggctgaggtggcaagaaccaggtacagggcgtcctgagttgggggttggggtatggccaggggaatgttgggggacccaggctttcagaagcagagcacgctggtgttgatggagtgtggtgtgtcatgagagggatggggaggcacacgggagggctgtgggagccgcggggcctaggactgagaggccagagtggtgactgaggcacccacagggatgtggagacttgggggacagccaatgcagggtgagaaggaagactgaggcagggtgggggcaggctgtggctggcagaagggtggtcacgaagccccaggggagaggaaggcaggggtgtgggggctggagccacaggaaggtgacctggggaaggaggaagaggggtgggcctccccagaggggccgggaagacggtgttgacttgcaaggggggatgggggggcacatccaggctccctgggcatcctcagcccactgcacagatggggagactgaggctcacagaggcagaagacgagtgtccacccccaaggcctagacctgcagaacccagaaatgcctctctgagaccccacttcacacacaagtcccccactagattgtttctgctcttgttggtgggggagggagaggaacactggggcagggggccaaccaagggcctttggaaagccctgcctgcaggacccgggggtggggagcatggcagggggcaagcccaggcctcgtgggggcagagaggggggtgtgtctgtgtggaggacagagcatgctggctgggcaggtgattgtgaacgcaggggtgcccggtgtcttttgggaggaggttgcaattgtgtctccaggcagtgtgggcagcgggaggggagatgtgggggcacgtggggtcagctgctgtgagggctctctgcagagggcatggagggcccagggtggccaggggcgcggggtgatctggggtgcatcggcagcatgcacacacgtgagcctgcgtgtgggaggagggaggatgcgggtgggtgggaagtaattagctggagcctggtctccctgtagagcctggacgccagcccatgtctggcagcctcatctctgcctgcaccgccccccacccctc

SEQ ID NO: 25536 - DNA, 1753 bp, Artificial sequence
  DNA replication origin
gactgccccaggaggatgggcttgggatcagaaggccatccaaaggccagccctcccctggctctgccagggccctgctgcctgtcccctccccgcctctctccaagttgttcctggacaccaaatggaccccatccaacttgtccctccttttctttcccctgcccgccccctgctggagttgtaagagggcaggcagaaagggaggtgggggaggcccagccaggctgggggacaggagaagcagccccagttctaactctgcttcccccacagcagagcctgccaggcccccgagggccgggacctctgggtgatgcctggcactcccctaagtcacaggtggagctgggcctttggccagtactctccctcctgaccactgggatgggacaagacagtaggggcaacaggtaggaagggccaggtctaaggtgagctgggggtgcagccctagagagaggtaggaaggagggacaggggttgctctggaggagagagggttgctccagaggcagagggaaaagacaactggagtgggagtcagtgagccaggttctgtgttccaaaggccagcattgcctggaccttgggtctgtcctcacctgcataagaggctgcaggagccaaatgggccttccagccttgtccaatattatggagtcccgaggtgtggagtgtattctgtgggcccaagaaacagcaacagatccccagaacagatgacagccctaaagaaaggctgctttcctgagcatccctggggctagaaagagtgtggatcaggtgcttcctattgggctgggcctgcagaggggacaagaggggccagtcttacagccacccagaccatactttccacacacatgcacatgcgcacacacacttgcacacacacacacacacttgcacacatatgcatgcacatgccaccagatctcagccagcacagaaaggctctcccagccttaggtggcttatgcattttctgaaactaactgtgggaaaagggcttggggaaccatcccatgtgcctgcaccaaatgctgtgtgggtggggcaggacacaagccctacactgacacctcccagaaatcagggaatcagagcttgagagattgtccagtaaaagttggaaccctcaacaccccttgactctgcccaggaggagcaacctcagaagcccccccaaacctcctctcagagacctgccgagtaggaggcttctctctctactctcctccccgcaaaaaagaggccagaaaagaggatgattggctaactcagaggtgccctgatggaggggagcaaacaaggggacttccaaggagaattccctagcccacctgaaagacccctacccagagtggtgaggggcagcttaggagcactgacgcaagggggagagaccaggctggcttccctctacgtagtaagttcctggggtgtgcgcccctgccccagacagcagagaaatcgcctgactgggagatggagaagaggggccaccttctcatgccaccccgccgccaatcctccaggcacactcgggcgcttgacctgctgaagcctgtagcctcaggtccagtgaggagctcacgggacagagggccctaccagagccacgaaaaccggagggggggacctccgcccaaggcaggcgtctctgcgcgcccgctggggccctggtcctgcagttggcttctcccgacacgttccttcgctgccgaaagcgattcgcccgcgctctacc

SEQ ID NO: 25537 - DNA, 1837 bp, Artificial sequence
  DNA replication origin
aggagtctcagctttttctctctccctggggcgctgcgaacctcgccaatgcctctcaagctatcttcctctggtcccaaagcagacaccccaacttccctcccatttaaggtggttacctcacggaaacccagagcaccctccccctcaaggtttaggtgctgctttgaggcccctgcaattcagaactagctcgtggtcaagaccagttagagatagttcgtcatcagcagtggggctcctgtgcacccaaaacaagcgggggaaactaccctgcccacccctccccatccacgacatcacttcccctaccagggacaggaaacagacacaaaagcaacagggaaccccctctccgcgcgcgacaggtgggtgccaggcaactagctcagctgagctgagagtctcctggaacccagctgcgctcagggcgcgcgggcgtggccaaggtctctgtgcagctgcgggaagcaccgggccaaagcacttggctgagggcacgctggggagggggtgtaagaaaatgctgtagaggcaaagtcctgggggcacacggacaagggcaagccatatcccgcgctcaaaagaggatttccagtgagccaggcaggtgtgaatgagacagttacagaagcagagtcccagggaggtaggggagattgttcatgtggctgagggtgcagactcagtctgaaatggtggctcagcacatcagtgtcactggggcctcgccaagcgtgacttggtttgaggcgcttgcacgtgggcttcgaaggctcgaaggcccagcccaccaagttcagtcaattgtccgttggatgtttacaccctccggggccgagcgccgtgcagttgctcatcatagcgttccaaccaagtgcgcagctcagagacctggtagccgtcggggccacggccgccctggtacataatagtgccactctggatgacatagagacgctcgaagtaggcgccataggccgagctgctggagttggccatggtgtcgaggaccagagcgcagccgggtgcaccttgctgcagtaccctcgctgcgctgacccggtcctccaggctccggtgctgtgggatgatgtagggagagtccgtggtgacccagccgtcggaggggtgcgcttcctcgatgtagatgatgaggaagtcgacgtcgcgctggtacttagtgaccaggcgctggaaggcgctcatgcgcgccatgaacggtggtcaggtgcagctgccgaaattgagaaccagcgggcggttcccttgcgcgtagtcgaggatgtgctggctctggaagccgtcgggcagaaccacctcggagttgggcgccggaccgccctcgtgcgcctgcttgaagaaatccaacttctggccatgccacaccgccttgagcgacgccagggtgcacaggcggttgtcgtcggacacgcagatgggcgggtcatcgggaggcacctcctcgccttcactgttgagctccacttcgggctcgggctgcccccggcggcggcggcccaggaaatgcttgcggatacacaagaaatcgagaagccagagcatgaaggccgtgccgaggaagcgcgggaagagcacgaggcacgaggcggtctgggcgcagagcctcaaggagtgaagcagcagggagcggagcatggtggctgcaggccccgaagccccctgggacccctcgccctctccgaccaccaaccgcgacgtggcctggcgaggcatctgggcttcagcagtgcagggagttcaatttatagcggaggcttcaattggcgggagactccacctccggcccggcccgcccccttgcaacttgagcccg

SEQ ID NO: 25538 - DNA, 1514 bp, Artificial sequence
  DNA replication origin
agggaagttgccgtgcccagtcccctcacctggatccgtacactcccgcctcagcggctttcactgtgtcccccacctttcacttaatgttcaaggtttcgctggcacaggggctgcgggctaagctaatcccgcgtcccccgggtcgccctcactccgggcgcaacaggcgagacagtgagggcggggattgcgcgagagcgagcccctggccgtgactgcaagaggggacctgtgcctaaggccccgaatccccgccccagccctggaatccaccattcacctctccctggtctctctctcttcatcccagcggcctcccacctctgcttcccagcacggagcgggtggtggggtttgactggagcttggggaagcggaggagggacaggaggaggggggtcctgggcagggggcgcacccagcagcacgctggcccggcagtaggagccgcagctggagtgagggcgcccctctgccaaggcgcgcctccagcggacctcagctgcctggagcgggtgggcaagaggcaaggttgcaggtgccggaagggggccagggaggagtcaggtgcgcagtggtgcctgcagcggtcgggagccaggctgtaccgggtccaaagcccctctcgccctccacctcacccaaccccctccacacaccgccggatactcagttaagttggatcggcggctgcaggggcagctgcatctgttcggtctgtgtgtgcgcgcgcgggagcaagagagggcccccttgcctctcccgccgctttccaggatcccgcggcgctccgctacctcgctcttctcccgcagctaagttccccgtccaggtgggtgcgtgcggttgtaggagcgccccgggcaccgccgcagaccctcttcctcctccatcctcctccagcgcccctgccagcctaggctccttcccgtcccgcttcccaaggtcactatggggacgcgagggagggatttgtgtttaattcctgccgctattcagagggaaaagaaaataaagggaccaaaggcaaccagaaagcagtttacctcaagcctttattattgtagattgaaagaagtttatatacaggaaatatttccagcaaaacactcaccaaatggccttcgaatcaggggccctccacctcccagccccacaatcagcagctctgcctaggactcccctcacttggggacctcaggctctccccccacctctctttccccggactccatcaccccaacgtcattccccaggagtctcagctttttctctctccctggggcgctgcgaacctcgccaatgcctctcaagctatcttcctctggtcccaaagcagacaccccaacttccctcccatttaaggtggttacctcacggaaacccagagcaccctccccctcaaggtttaggtgctgctttgaggcccctgcaattcagaactagctcgtggtcaagaccagttagagatagttcgtcatcagcagtggggctcctgtgcacccaaaaca

SEQ ID NO: 25539 - DNA, 977 bp, Artificial sequence
  DNA replication origin
caggcgtctccttcctccacaggccctggactagcacgcacgggagcctccctccaggccccatccctggagtagcatgcgtgggagtctctctgccctgccctggcctctgcagtgtgcagtcaggcctccccttcctccacaggaccccataaagggaggaggggaagcacgtgtgaccctgcacacttctcccaccctctctgagcctttgttcctgaggggcctcgggggaaaccatggatgtgaaagaatgctgcggaatgcagcgcaggagtgaggctgcaatggtcactcgctcactcagtgggtgcacatgctctgccctgctcacagcaggccccttctcggcactggggttccagttgtgaacaagaaggtcagaatcctgatctcagggcgctgacaatctagagagggaggcagacagtgagcagtgcgatcatgaccgaatgcagggtgaaggtgcagtgctgcggagaaaatctgggtgacgggatggagactaacgggaaggggggtcccacaggagccaggctggagaggagatatttaaatggaatgaatacagggaccatacaatgtgcctggggatgggagggggaagagagagaagagaggacattccaggaacagcaagcgcacaggccctgaggcaggagttgcctggtgagtttgaggagtgctcaggccagcggaggggaaagtggacagtgggagatgaggccagggcagggttggggccaggccaggtgtggcagtgggtgaggactgagagtgagctggaccttcctggtgggtttggagcagagcagggtggtgattcagtgcaggatttcggggtgcttctggctgcatgagaaccaggatgtggggtgagggctggggctgcctgccgagaggcccctactgtgatccacaggagagcagggtggtggctcagaccagagctgtggctatggaggggaccggctgga

SEQ ID NO: 25540 - DNA, 882 bp, Artificial sequence
  DNA replication origin
atatgcaaaatgcatagcttgctgcctggaagataataagtacccaaatgttagctgtttttatttttcgctcaattttctacatataaacatgtcattgtgctccgtgctggggatatggcagtgacagctaaactccagaagagaaagattaaaccaacactcacagacgattaatccgctgccgtgaggaccaatgatgtattcattacagttagggatgctgtggtggggggcacgttgagagcatttatcaggggaactttgttgagagttttgatcattatcttaagagcaacaggaagcctgacattgaaggcttcaagcagagctgtgaaatcagaagttcatggtttaagaactcaccatatccacaccgtggactgagaggggccccagggaggtgccttcccaggaggctgctgtgggggtgcgaaccacggaggaagtgctgccacggcagatggggcgaagtggacagaccccagccccttcaggaggtgcagtttgcaaaatctggacacagtgatgcctcggaggggcttgtggcgggatggtcgggtgaccccagacctctagtctgatgtagtgcgccgatggttcctggatacagaggactcagtggggagcaggtctggggcgttgcggagtgtgtctaggggagtgtgtctggggacatgctggttttgggttgcctgggcgggggaggagggtgtccaaggggatgtcctggaagcagagcagtctgtggtcgctttgaactcgggatccgcgagaccccaggggttcacctccattgcatccgggagagacaccggttaggggatgcaggactccccagcgctgggagcgcgaggcctatctaaaggccagacgttctca

SEQ ID NO: 25541 - DNA, 1672 bp, Artificial sequence
  DNA replication origin
tgccgtcctcctcgccctccctggagcccggccctgggcccacgccgtgccccgagcctcctctgcggcccgcccccagttcccccggtccgccgcggccgggcatggggaggtgaaggcctccgtggggtgacagggggcgcggggccgcttgtccccagcgcaggaggagccgggacccgacgcgcaccctccggcctgctggaggctgagccgccgcagggaaagcacgtgggtgaagggcccagcgcggcggttccttgaaaaagcgggagcctggtctcagctggggcctggggcctgccccgcccatgcaggggtcgcgggagcaggggctcggcctccttcccaggccgtggcggcgccgccccggaggcagggacaggggcgagctcccgctgagccgcacttcctgggcgaggccgctgcaggcagcgccggaggcacgtgccccgagggcctcctcttctgccccagcttgacaggcagccctgggaggagtgagaagctgctggcgccggattcctgcccctaactcccttcaggaggaaattcatgaggcccaggccaagagaggaggcttcccggcaaaaagggaagggctgggcaggggcagcaggaaccacggcccgaggggtgagagcttctgggctctgagagcctgaccctgacttcccttggcccgtggacatgacctctccaggtcagattcctcctccgcagaatggaggggatggtactggcaggaggttgtaccgacctcgcaaggccatctcgagggctcgaggaaaggcctaccacgcatggcccgtggacagagctggtaaatattggctgtcactaagttcaaggccgcagggaacatggcagagtgacccaggtgtcagcacaggccttgtgcatgaggaagcgctaggggaagggaaggagacctctacacccactgcctgcacaccctgggacaggactccagaagtccccgcccaaatccccctccatctccccctctaacctaagccccaggtgctgtgccgtatccccagcacccagcacagtgcctggcacacagcatgactgcccacaggggcaggggctgcagagaacccgcagggatacagccgacctgcaggcccagtaacaactaggtttttaaaatccagaatgaggctctgcggttcacctggagacatgaagactgggtctggcgccacacacacacagcagggtctgtggtctccgtttccaaggcccccgaatccctggcagtccccagcccagctgcagcagggaccagcttccttagctggaccatgatccccctcgagcattagagacaggagctagttctgaagagcccgggacaggtgtagtgaagatgcctgtcccgtgaaatcctcccctttaatgaggaggctgcctaccgccggggccaaggaactgaaatggagcaagaaggggccgcaggcaattcaccaccagcagggcctgtgagtccttgagccccgcataaaaaagtatccagcttggcgcaatctaaggtgtaattgtaccatttggtcaccagagggcgctcaataatcatctttgcttttagtatcgcaaattacgcagcagaaaacttcctgcccattcagcacacgcaagccactgttgcatgtttcttgtgtcagct

SEQ ID NO: 25542 - DNA, 1108 bp, Artificial sequence
  DNA replication origin
gtgggtggggtgagatgacggtgggtggggtgagatgacggtgggtggggagagatgacggtgggtggggtgagatgacggtgggtggggagagatgatggtgggtggggtgagatctcggtggggtgagatctcggtggggtgagatctcggtgggtggggtgagatatcggtgggtcgggtgagatctcgctgggtggggtgagatctcgctgggtggggtgagattgcagttgggaagtgctgagttctgtcctctgtgtttcctctgaggacttgacctgtgaggggacaaggcaggagtggctgtcccttagccacagtggaagcttccagtcaacctctgttgagtgtctagacccagccccagctgctgctcccctgtggcactcctttgactgccacccctccccacactggctgccccccttctctggccgtgcagctggggcagcagctctgtgcaggggggtcctcctgccacccttctgcctgcctccctcccttcagggaatgagtgtgggtctgtggcagggggttctgcagggaacacagtgctggaaagagcctgcctggtgtctgtgttgtggtggagggtggaggcaacagggtaaaggaggaatgctgtttcctgtgtcctggagctacatgaagctgggaagggaggtgacgcctgggaggggtgaaattctcagtggagtggctgggctggcctctgggacattcaaacatagacctccttgcacttcgtcatgggtgacagcagatgaccagatggggcctccacaggcaggcaggggcccggctgtttcctcatccccagcactggatggcccggtggttgagtgaggggggtggacaggcggccccggggaacatggtctgtgggattccaagtctcttgtctttctgagccctccccagaatcacccttaatggttcattcatggcaatgtaggcgttttctggcaggtacccccaaactcttccagttccaaagctgcttccacatttttaggtacttgttacagtagcacccccacttggtaccaatttcctcttaataccatcgcctgggagttaggatttcaacacataaatgttgggg

SEQ ID NO: 25543 - DNA, 1713 bp, Artificial sequence
  DNA replication origin
ttggtgtgctggcacatgcctatagtctcagctactcgggaggctgaggtaaggggattgcttgagccttggaggttgaggctggagccaagattgtggcagagtgagaccttgtgtcaataaaaaggaaaggaaaggagaggggaggagaggggaggagaggggagaggaggagaggggaggggagggaaggggaagggaggggaggagggggagggcaggggagcagggaaggagaaggaaggggaagggaggggaggagaagggaggggaggggagggacctaaggaggcatgtcacctgaatgtcacgtggagtcctgagtagaatcgtggaacaggaagacgacattagggaaaaactaagggaatctgaataaaaggtggatttaatatgtcaaaaatggtgctataatggtgacaaatgtaccatatgctgtgaggggaggggaggggaggggaggggagtaggaaggattcttagctcaagaactgaataggccaagcatagatctgggcgcagcagtctccagggctcttcgggccccacgtctgtctgtttctacgaatgcctctcccagcggccctttcctccctgggttctgtcctggagtgactctccagctgtgtgcctgtccgctcaacaacttccatagacaggaagcactccctccagaagctcagggctgtgttgagagactcacagaggccaagcagcagcttacacaggacacagtgacaagaggacacagtgacaatgagacacaggacacaggacacagtgacgacaggacacagtgacaacagggcacaggacacagagatgatgggacacaggacacagggatgacgggacacaggacacagtggatcacaggggccagacatgaaacagggaactcagaaggaacccacagagatgacgaaggacccaggaggcccctgaaggagctctcaacggcctaggctgggacaattggagccacaaaataaaacagtactgggttatgacccaaagcagaaaacaaatgtccttgagtctgtggggatacagatcaatgactggataaacacctgaagaggggagaggaggtgaatctcccgcagaagaattccacctaatgtatgcagaaacacctccctcaaggaggagcagcagaactcccagctcgggagcgtgggctgcactgacagacgcatcccaagaggacagcacaggggcaggccagggggaggagctccgtttttattttcaggggaaaccctatgaacatgatctccgccaggtggtcaaggccagaatcaacagggataagtggcgttgatggcacggacccttgaccttgatgtgatgaaatggcctcccataaccccagtctaaccatgagaacatcagacaaatcccaactgagggacatcttacaaagcactcggccacttatcctcaaaactgtcacattcaaactgtcaccgtcgagaggagcctagggaggcatgtcacctgaatgtcacgtggggtcctgagtggaatcgtggaacaggaagaggacattagggaaaaactaagggaatgtgaataaagtgtggacttaaggtgtcaataacggtgccgtaatggtgacagctgtaccacatgctgcgagatgttcgcaatcagggaggtcatgtgagaggtacggaacgctctgtactagcttcacaatgattctgtgcc

SEQ ID NO: 25544 - DNA, 992 bp, Artificial sequence
  DNA replication origin
ggaggacaaatcaacaattggtggtggtggtggagcgctgctgaaatgggggaagccaaaacctgagtggagggtcagaatctttgcgtgttttccttcaacctcgttcagcttaacaggtgctggcactgtgttgtaattgagcaggttggaggtttttcccaggcgagtatgaggaaatgagagaaaggtgagggggctgaaggtgcacaggagagaggggtggcacaatggactatggagtccacatgggaagaaggggagtgggacatgaggtaaagaaggtacaattatattctatttaacccaaatgcatcccaaatgtcacctcaacatgtaatcaacattcagaattattagtgaagtattttacattttttcccacactacgactttgaaacctcgcatgtgatttacacagacagtgcctctcactttggaccaggctcattttgaggggtttgtggccactctgttggatggcacgtagggatctagagaaggagcgtgggagaggtggccgagcacgggtagaaggcaagatcattggaggagcaaaggtcagggaaggaggaggatcatctccgtggagatttaaatcgccaagaattaggacagggatttagcaagagtgacagtgaaccgggagtaggagtcgcgtaggaacaagacggaggggactagggtctgcagagaaccagacaggacaggcggcacagagcatagtgtgatggcaccagcttcaaggctggcgggtttggggaaggtgggggttgatctggaagtaactgcaacggaggatgctccaggggcccgggttccagtcagagcaagcaggtggagagaagctgtgggaaggaggagctgtggctcccggcgtgtctcaagctccagaggaaacagtgagggttttgggagtaaggaggcctggaggtggggttggattagcaggtgagaatggccttacaggggttagggcctggggtgaagta

SEQ ID NO: 25545 - DNA, 1184 bp, Artificial sequence
  DNA replication origin
gcggcggcggcggccgcgggggcgcgacggccggggcgggggcgctgctgctgcgggggcaggcggcggcaggggcggcggcggcggcggcggcccgctccagccatgccgaataaaaacaagaaggagaaagtgagtccgggcccggccgcgggacggagggagcagggagggactgccgggggagggcgcgacggcaccggggtcctgcgcccgggccccggctcagttccccgcctgacgccgcgggcttcgcgtccccgagggcggccgagccaggcatccccgggcttctctcggcctcatgcccggtgggggcggggagcccggggatcgcgccggagccgcggggcgcaggcccgggccgctgggaccttcgtgatgggccggggctgggcgtggagggagggcgcggcccggggagggggtcggaggggcgcccgtttccgacagcgcgccgtgggcttgggcgggcaggtgcggccgccgagggggttcgcagcctcgcaggctcccggaaaggagcttcagggatgggggctgtagacgcctggggagggacccctgtacgggggaaagggagcgagaagggaccccgctgagagctggtaaggaattctctgccgccccggagggacgctctggggctctcgaacactattattatcctgggtggcggcggcggtgagggctgcgagcaagggtgctgcgtttgcattcgggggggcgggtatgtttctgcttcaggtggagctctgtagcgtttcattatcaccccagaaatcctcactcatagggtttagggtgggagggtagaaagggatgtgatgtggatctcaaaatgccagaagcactgtataaaattggatttatctgttttctgcttgaagttttcaacctcaaatgcagataaaacgaaaagaatctgaatgggggttggggggcattgcactgttggaatcctaaacggtatgatatagaatttcctaatggtatgaattaaaaatatcagaagctgtagttgtataaatcacttttaaaactgcatttggcttatctgatgtttacctgtctaaaaagtgagaagactaattgactttgcttgatgtttaccaggaatcaccaaaagcagggaagagtggaaaaagttcaaaagaaggacaagacacagtagaatcagaggt

SEQ ID NO: 25546 - DNA, 1521 bp, Artificial sequence
  DNA replication origin
agctgtgggactcactgggcagagaatggaggggtgtggatgagagcagcctgggcaggaacccccgctcccctctcctgaactcagaggccctgagcaagttccccagcccctccatgtcccagttcccccatcagccaggtgagggtggcagtacacacacacgaccacgcaggacaaacaggcgccccacacagttcccagctcacagcagacacagatgccacttccttcgcctgtgccctcagagccagcagacgctcgtcacagtcatactgtcctgtgcaccctgtctcatggaaccctcacagccaccctccggggtgaccttacccccgcactacactcatggaaatggagtcaaccaggcccagtgactgagggctgagccatctgtgtttcaatccagagcacagggagagtggagaagtcccagggccgcccgtagggaatggagagggagcgtcaggctcacccaggctgcgtttgttttggtggagagcaagtcacccgggatgtgatgagagggtttcataagcaagccgggaaaatgggataaaggggagagagaaccgtgccagctgtctcgatgagaggacatgatcgtgagaggaaagggaaaagaatcatgaggttggaggtcgctggcaaagaatgggcggccagaggtgagggttccagtggtgagacagctcccaccaccgagcccagggtgcgacctcgcacttggctgctcacgtggagtcagaactgcagaggccatggggtgtgggccagggtatgggcgggccactgtccatcagatgcagaggggtcaggaggggaccagctgctttactgtctccactgagtgctttctggtttcagaagtcagcagccgcatcatgttgcaggtgtaggcgagtctcccactgagtgggcttcctgcgggagagggccctggggggcggcaggggagatgagtccctagccaggatgagaagcttggagttcagagcctgggcacctaacagagcgactccacgctttgcattgcagtacacagtgtatagtcaagccagcaccatgagcattccggttgcaatggagacagatgggcctttatttgaagatgtgcagatgctgagaaagacagtgaaggacgaggctcatcaggtaaaagtgcaccgagctcagctgggcacccatgactgatttgcttaagaaatgcacatttttgtaggcgatgtgatttgcatcagtgccttctgtttaagctgaaattaaaacttaaattttgctagtcttataggaaacattgtatcgatagatcttagtgatcaaattactagaaacagtttttaaggattaagtatgtgcctgagatgtgtatctccatttactaacagcagtagtaatcccaactcttaactgttctttaaatgttcactccagcaaaatcgaaagcttcacagccatatccacccctcgctgttttcttcacagccctctggcttctgcttcgacccagagaggctccct

SEQ ID NO: 25547 - DNA, 1181 bp, Artificial sequence
  DNA replication origin
gcagcagcggcaccagcttgcgcaggtgcttctgcagcaccgacacgtccgccacattctgcacggccgacacttccaatccggccgagccgtcctcgccgccgccgcccccgggctccgacatggtgtcgcgctcgggaccttccaggagcgatgagaaggcggccgcgactcagcgagacagccagcaagagacagaaacggccgccggaagccggaccgtccgctagcccaccgcagactgaggagagcgggagccggctccgccctaaaggcagccactgccaggtggccccgccccgccccgccggccgcagccgccgcagccacccgcgctcgctcgcggccttagcgtcacggcgccgcgcgtgcgcggggggcgggcccggcgatgtcgccgcgcgcccttctgggacttgtagtctcggcgctggtcggggcccgcagcctccgcactgcgagtcctaggagatggggacttggctcaacgtcctggctcggcgcccgggcttggcgaggttggtcaggggctgcgtctgtcttcttcactgctgtggacgcagcgaatagcacacagccagagaaactttatagtgaatcagtgatgttattggcgagagctaacgtttagtgagcgcttagcctgtgcccggcgttgttctaagccccttaacctctcattaaatgttctctcattgaatgaatgaatgactacgtatcaggtaccaaaatataggcacgacagatgtgttattagatatagaccgggagattgaggatacttttcagagggggaggagatgaggggcgtgctcagagagtcccattgccaggctggaaacggacagctggggagggggccttcggggcagtgtaaggttaagccaggaatgacaccttcactgtacgtaaagccaagctgtgatgggatctggttcctaatgacaaaaatcattgtccccgaggacgctgtgaggaccaagagggagacctactgagaacagctacctccagcaatggctctcctccagccccctagagctggcactgtcattctgtgggcctcagtatctgggtccgtacaaggcaggggctgggttgcctgcccaccaagtttccccctagttcggacccaccacgacctcctcccctacaccatgactacataagagccagaatcc

SEQ ID NO: 25548 - DNA, 1255 bp, Artificial sequence
  DNA replication origin
cggccgtgcagaatgtggcggacgtgtcggtgctgcagaagcacctgcgcaagctggtgccgctgctgctggaggacggcggcgaggcgccggccgcgctggaggcggcgctggaggagaagagcgccctggagcagatgcgcaagttcctttcggacccgcaggtccacacggtgctggtggagcgctccacgctcaaaggtgcggggccgcggagggcagggtcgccagagccaggcctcgcggaatgcagggcctgccaggtcctccggggtcgcagatgtccccgggatgggaggagcccggcagctgcagatgacccctggatgggcagagcccggcggccgcagacgtcccgccggccgggtccccagggccgcagacgccccgcagaggccggcgcggcgcccggggctcgccctcgccacacccactgcccggcccggagcccccagggcgccccgctcctggtcgcggggaggggaaaggggtccccgtctgccgtcacccaaaacaatggggtcgctttgtctgctcgggcctctcaagatggccgagttgggtggagacagcgtctccctgggctgagagcgggcgaggccgcatccctgcctccagtgtcacatgagcttttcggtttcgatttgtgtccaagccaagtggccttcgggagggatgtgtcgggggcagacccgcggagctgggggcagccggggttctggttcgggaggaggtcgggcgggtgtcccagccctgccttgtggggacccagaggccgaggcccacagagcgacggtgccagccccgggcctgcgagcatcactgttgtaggtggatgctctcacagcatccttgctgaacgggtgtatcctgattttacacctgaggaaactgaggctcaggttaagtgatttcacccaaggtcaccagctaatcttagtcctgagactagactcagtgtctcagctccccatccactgcttgttttcactgatcatacctcatatttgtttaatgcttcgatgatgttaatgataaccctgtaatatttgagtctaattttacagattaaaaaaaaaaaaaaagattcaggttaggcacctagtagggggaagaggctagagttagcgtgttccagctgtctcctcaaataatgatcgcccaccagcaaggttacattcatctaagtctggggcttgcctgcaggcaggctttctcatggattcattacaaccactttgtagcccattacaac

SEQ ID NO: 25549 - DNA, 1088 bp, Artificial sequence
  DNA replication origin
tcagcgtcccggtgtggctgtgccgttggtcctgtgcggtcacttagccaaggtgacgggtggttgtgggggcctgtggaggtggactggggaccgggactgggggcggctggcgcggggcggaggctgtgggggccggaccagatccctgaagcagccagggccgcgctcccgggcggccgcgctttctattccggaggcctcgggaccgctgcggtttccgcaccccgcttcaggaatgggccgggcggccgcgggctccccgaggctctgcagcagcgccagagctggcgccgcacgcgaacagagcggccccgccgcgggggtcccccgcccggccccgctgggggcgcaggcggaggaggccgccgtggcggagccgcagcccgcgcgggagggcacccggggtgttcgttggggaccgcggcgggggactgggcccgggcctgcggcggcctcccggaagcgcgcacacgctcgtggtagttgccgcgctccgaaatgaggtcatcctttgtcagccgcccttctattttcggtttacttaaacttcgcaaatctccaattcggctttaaaaatatttggagaacgcgatggaatttcgtgttgcctctgtagacgtcctgcaaggttttaaaccggcgcggtgtcgttccagatgcctgaggaaacccagacccaagaccaaccgatggaggaggaggaggttgagacgttcgcctttcaggcagaaattgcccagttgatgtcattgatcatcaatactttctactcgaacaaagagatctttctgagagagctcatttcaaattcatcagatgtaagtcacttattaacccagaatcggattttggtttcagtgtgaacttcttgggggtgctgtatgcttaaattaatattttttgttaacaggcattggacaaaatccggtatgaaagcttgacagatcccagtaaattagactctgggaaagagctgcatattaaccttataccgaacaaacaagatcgaactctcactattgtggatactggaattggaatgaccaaggctgacttgatcaataaccttggtactatcgccaagt

SEQ ID NO: 25550 - DNA, 734 bp, Artificial sequence
  DNA replication origin
cagaaaaggcggtgaagcaggagtggaagaacttggggttggagggctagaggaagcagaggagcacatgtggtctgtactctgaaggagagggcaccacattctgagaacctctccatgacaggacacctggcctggtgggaggcaggtggggttcctaagaaaatgtgtgagcagaagatccattaaaaattaattagagaagaacagagggaatggtgttccaggcagagggaacagcatttgcacagcctcgtgggggcgagtcatggggagtgcgccagacacagaaataggagcacagtgggaactggcgctgtatggggaggcagcagcgacctgcagggcctcacaggcctaaagagctctgtcttcctcctagaaggatgggaagtcagctagaatttgcagagggtggggaggagggaatagatagggccaggtctgtgttctcaaagctcaccctggctacagtttggagacagaccagaccatatgcagggagcagttaggtggttatggaggccttccaggtgagctgacggttgtgtggaagcgggggatgaaggtggagggaagtggctgggttcaagaggtacttaggaggcagaagtggcaggactcagtgccagatccgttgtggggatgcttggggttctttaaggtgggatagtcagtgacctggctaacgagccctcaaagagggctggagacaggggggaagctcatgaggc

SEQ ID NO: 25551 - DNA, 884 bp, Artificial sequence
  DNA replication origin
agccgccccatctgagaaaggaggagaccctccgcctggcaaccgccccgtctgagaagtgaggagaccctccgcccggcagccgccccgtctgagaagtgaggagcccctccgcccagcagccaccccgtctgggaagtgaggagcgtctccgcccggcagccgccccgtccgggagggaggtgggggtcagcccccgccaggccagccgccccgtccgggagggaggtgggggggtcagccccctgcccggccagccgccccgtccgggaggtgaggggcgcctctgccaggccgcccctactgggaagtgaggagcccctctgcccggccagccgccccgtccgggagggaggtggggggtcagccccccgcccggccagccgccccgtccgggaggtgaggggcgcctctgcccggccgcccctactgggaagtgaggagcccctctgcccggccaccaccccgtctgggaggtgtgcccaacagctcattgagaacgggccatgatgacaatggtggttttgtggaatagaaagcggggaaaggtggggaaaagattgagaaatcggatggttgctgtgtctgtgtggaaagaagcagacatgggagacttttcattttgttctgtactaagaaaaattcttctgccttgggatcctgttgatctgtgaccttaccccccaaccctgtgctctctgaaacatgtgctgtgtccactcagggttaaatggattaagggtggtgcaagatgtgctttgttaaacagatgcttgaaggcagcatgctcgttaagagtcatcaccactccctaatctcaagtacccagggacacaaacactgcggaaggcctcagggtcctctgcctaggaaaaccagagacc

SEQ ID NO: 25552 - DNA, 734 bp, Artificial sequence
  DNA replication origin
ggagaatttgaaaagtacagcaggactggcagagggagggacgactacagagagtaaagaaagcctgaacatgaggaatctcagaccacttcccactgcggtggcaaaagttgtctaagtctctgagcatgtcggaatcgaaagtgccattttcaggccattgggagccatggtctgatttgtattgaggccatgtggtgttacagtaaaagataagccttttagggcagatttctgaacggaggccaagagtatacagattgtgtaggaggcacccaaggggggtagttttaggaggaatagactgagaggctcccatagtgaatggaagggaggggggtagaggaagaagagactgccggtgacgtcccctttcccgcggaacttgtcaggaatagaggaggtaaccaccgtgtcaggcgtccctgaaacggaggaaccagaggcctggaggctggaggaagcccttggcccagcgctgggtctttcggaaatgggagatggacggtcaagagttcagggaatggcaacagtctctttttactcaccctggcggaggctttgatggtggatgaagtcaccagcaatgggagagtctaggagattgtctgggtctttggcaggttcggggaaggggagattggccaggagaggggtgataggggagggagggagagagagagaaaaagagagagagagagagattgatagtgagcgagtcctggccagagtct

SEQ ID NO: 25553 - DNA, 725 bp, Artificial sequence
  DNA replication origin
tatgattacaggaggtctggcaggggcctgtgggttgatacgcccaggtacgctcttctcagggaactgcagcggcccctactggcctagtaggatcttgccgatggaggtcatcggcatgggcctgggctgcaagccacactctttccttttcttccggaaggagggtagaagacaaaataatatagagatcatgccaagtaagttcataagactgggtgagatatttaaattatttgatgtaagtgtcgggatcggagaagaacctggacgtttctcaatttgggaaacattagagagggaaaatgggacgtggacacggaccatcccttcggcccatgccacttcccggagaagaagcaagggagcaggctgctgggcgtgttgggctcgagaacgagtaaggggtggagatggggaggactcagagtcggaggtggggtggttggagagaaggggagagagaggtagagccggagcggaggcatacggtggggggtcatgctgttccggtggaggattaggatgttgtcgaggaggggagaaatcggtgggatcaaagaaggagaagtcgtccgctggggctattgggatgaggggagcaggaggtgagtcgggtttggagcaggcgaggagaatttgaaaagtacagcaggactggcagagggagggacgactacagagagtaaagaaagcctgaacatgaggaatctcagaccacttcc

SEQ ID NO: 25554 - DNA, 2183 bp, Artificial sequence
  DNA replication origin
gctgggcctaagaggggcattagccatggaaaccaggtactaaaggaccaggagggccacgctggccatcgggggacattttctttaattttttgtgctcggtcctttagtgtttttacaaaatctcgtactaagccagattggttacgataaaagcaacactgttcatctagaaagaggcagagtcctccctttttggctgtgagtcggtctacgcctctgtgattttgaagaagcgctgctgctaaagaatctatttgtgattggagagttgtgatggatttggctatctcttccaagctatctgtgaggtctttggagagggattggtaataggaaacagaggtggttaatcccgcagtctcagttccacctcctgtagttattctggggactgctaatagaggtatgagttgcatagcacggcagtgtcggatgcgggtattaactgggattggtaggggttggtctcctggagcaacattgatttttggagtgaggaaaaccagggtgcaggtaggtgcctgtccagttagaggggaggcaaatataagttgaggtactgcataggaaaagtatgccttggcttggtagacagaactggttgtgtatgctaaaaagatgtactgttttgttgtcctcatgcatccatactcctagggccccagctagagctgctgctctgagtggttgtaaagggtgtttgctttaggctgggggctttgggttcttttttcccagcgtaagaggaagcattttgtgtccactaagatccatgtgggagtgttgctgaatgttgggataaggacacagtcgcaggtggcgggtgcagggatggtgcatggagaggggagccaagggaagagggataaatgggggtgtcggccgttgcagtactctgagtttttgttaaggaggtgggaggtgtcaagggctggggggctagataaacgaagcctgtctttattgttggtggctttgagagtagtctgttcggtggagggtttgagttgtgcggtgtaagttgcacagtttggaatttaggtggctgaggggaatgcttgagggtggatgtcgctggcgcacagtggtgctggataggataagattgtgtgggttgttacggttcctactaataggcattcatcacagctgtggtagggccaggttgcgtaagtaggcatgtaaggttgtaacacctggaccgaactcgctagctaactgggggagatttttgttaatgcctgtatgtcgagtttgaggggcagttaatgaggatttcaggatggtagcttacttgggtggaagtccagttataggctgagcaggggttgcattgtatgttgtggagaggagggatacgcagagccagcagtctcttgccagagaggaattggagttttttagtaaggagtgtgtgagattaagtgttctgtataggtgttcaggggttgtaggtattggttggactgaacgaagggttggggtattgattatgagaagggttagaaaggcagatagtgagcagaaaaataaatagttcggttccacccagagtaaagccacagagagagccttggaagaaaaggtcgattatccacttgaaaaaggcctccagggtgtcgttccgtgggtggaaccaggaaatatcttgtgagagggcgtgaaggaagagagtgaagcggcaggatagacaaaagcagggcatctagggaggatgtgggaatgtttgatagtgattgtgattcctgctgtaagggtaacgattaggcagacggctaaagtgagggagacttttggctggtattccaattggaaggagttacactatataatcccactgcaaacaatagggtaagtattataatgcctgcagttagggtgtaatagagtgtttccattaaaggaggctagttgtaatagtactttaaacctgtttgagatggatggatttactgatgtgaagtttcttctgggatggatgtgaggcggagtcaggttggcccaaggagtgtgctggaataccagttagaagttggtgaggtgctggttggaggatcggaggtgggagctctctttaacctggaaaggtgatactagggggtatgtcctgagagtttggctgcagtaggggttgtaagtgtcacacacgtccatgtgaaaagaccaccaaacaggctttg

SEQ ID NO: 25555 - DNA, 1457 bp, Artificial sequence
  DNA replication origin
gccgcggcggttgtcggctggggcggggcactccacgactttcccggccagacacggtcgccttcctaggtgtcttggcctgcgaggcactcgtagcccgcccctctcctaggtgacgtacattggagacgccgtcgctcagcgacccgggttcgagtccccgcctcggccgccatggcggatgcggagccggaggctgggggcggcagcgaggatggcggcggcggcggcggcccggctcctccgggccagagcggcagcgtcgcacgtgtggccccgctgggccccgagcagctgcggcaggtcctggagcaggtgacgaaggcgcagccgccgccgccgccgccccccttcgtgctgcgggacgcggcgcggcggctgcgggacgcggcccaacaggccgccctgcagcggggccggggcaccgagcccccgcgcctgccgcgcctgctcccgccccaggtgaggcgtcgggagggacgtggggaaactgaggcccgaagggggccgacgccccgcggcggggtagctgcttgtccggggaggccagtatccgcccgggttaagactcagggcgtccccaggctgagcttcttagggacggcgttcggcccccacctgtcaccaccctggcattttcaccccaggagcctcactctaggagcggttgctcacgctgggccctgtgcctggaacgccctcgtgccttctctgccttcacagccctgctgggggcttttgcgtgctccctagctcttcttacaggcctttcaccgctggttcagcctttgtggagcacttagagaccgtgttcccagcactccccactatgtgcaggaggtgaagccttgaacacacttgctgaagaacgaacataaggcaggttctgggattgacgggggctgctttagagtgggtggtcccgtaggccagacactggagctgaaacataaatgaattaaaaggaaccaacttagcttttcagttgtaaggtgccaaggcccaggcttggaacaaagtcaagcacaatacactagttcgctgcaggacttaacatcctgggtgatagtgactgatttgtaaccgcagtacccagcacagtgcctgatacacaatgtttggaatatgtgaaagcactctgtatactacaaaacatcctttcccagtgggtttatttcctgggccacacaccttttggttgctaggggggtgataactagaagacggtcgcccaactccggagggtgaagcatagcgcctgaagccagagggcctacacggcatctgtaaaattccaccccatttcagcgctggggttgtaaacaaaattagtctcaccccaaaattgccaaaagaagacagctttttccactagaagaaacgggttagggaatagaatcaggaaccttcactcgttgagtttttttgactgatgttagctgcttagggttgtatcc

SEQ ID NO: 25556 - DNA, 1071 bp, Artificial sequence
  DNA replication origin
cgggatgcagggtggggccgggggccgagggcgcgggacgcgcagcggaggcctgaggaggggcgggcggcccctgttccccgctgcggaccgccggattctgcgggcggcgagccaggcgctccgtgtgttgtggcatttagtgtccgccactccgcgcgggcgagaccgcgggcgagggagacggggcggacgggcatggagaccctgcggggctgaggcaagggaagagtggcccgggggaggccgaggaggggctcggggccaggcgtcgggggcgtcgggggcgtcggggccgcttgcggcgtcgccggactcacctcccgcggcagcccctccggactcgtcggccccgccgggccggaggaggcgggatggactccgggccgcgggggctgccgggagcctgttccctgggcaacggggccggcaccggggccagcaccgaagagcagcagctggctccgccgggggctagagcggcagagccacaagtggcagcgggcggggcggacgtgacgcaaatgcgtttccggtggggtgggcggggcttcgcgtctccttctacggatatctgtggaccttatggaaggtgcgtgagatcggttcctttcccggggtggggtggctgtgaatgttactgcttaggccgcaggttggaccagaagctcaggagctccccggattacatgaggttaaatggaggtcctctgtcttaccccagcctagcccgcaggcccctcgcagcctctgcgagctgctcgggagacagttttgccgagcctccgttttttcacatgtgcagtgacagatgaacgggacgatatacgcaaatgagtgtcagcagatccgacatccaaattgtaattattgtcactataaattagtactaacagagttcactgggtaccaagccttgcatgctcatctcgtccagaaactcctctctgaactgccctcagtcagaacattctgcttgtaatgaaagctggctttcgcctagtgctcagtttgctgagtactgctccaagcactttaagtggatcatctcatttgaacctcacagtggtc

SEQ ID NO: 25557 - DNA, 998 bp, Artificial sequence
  DNA replication origin
aggtgacactgacaccctgacattggatgaatccacgcagggaatgtctgttcattcagcgctggagctttgcgccaagcctctgccctgctccagtactcctcatcgggggatatctgtgaacaaggcagaacagatctctaatctcagggagctgtgtgcagagtagtgaacagataaacatgtcagagggtgcagagccagagagggaggagcaggagacacaggtgtctctttaataggatgacagggaaggctcctctgaggaggtagcatgggctgattcctgaaacaaagaggcaactagtgcgagaagaccttagagagaggctctggaggcagagggccctgcgcaccgaggatctgagcagccaggctggctgtgtggagcacggtgtggggagccccctcccgtcggctttgtgggccctgcccatggggctctttcagtccagtgctgtggtcagtcacagagggctgtggccaagccagggaggtcactctggctgctgcttggaatatgctggagggggcaggtgtggcagctcagcagggccagcaaggattctgggtgatccgggtaggagaagacaggatggggcggggttggtggtcggactgcttccaaggcagagctggcagatttgctgccacgttggttctgaggtgtgagagggatgagttggagatgattcctaggtctgtggtctatgcagctgggtgagtggacatgctgtggattgacgcagagaatcctggaggcacggggagaaggaggagatggaacagcctgctgtggccccgccatgtcctctccctgcagtggagagctggcgtgggaggcgggtggcgggtgtacctctcggggagctgtgcgctggcagccactggcatgcagacaggagctcgcctagggagatttgggcaggcttgtgttctgaagaggaaagggcatcaggagagaacaggagttggggggtcagaggagtcggaggcca

SEQ ID NO: 25558 - DNA, 1241 bp, Artificial sequence
  DNA replication origin
ccggcgtggctgcagccgcgtggagggcggtggcacgtcgctgcacgtggcctgtgagctggcgcgccccgagtgcctcttcctgctgctgggccacggcgcctcgcccggtctgcgggacggcggcggcctcacgcctctcgagctgctgctgcgccagctgggccgcgacgccggggccactccctccgccgccggagcccccgcctcagctcccggggagccgcgccagcgccgcctgctgctgctggacctcctggcgctgtacacccccgtgggtgccgccggctcggcccgccaggagctgctgggcgaccggccgcgctggcagcggctgctgggtgaggacaagttccagtggctggcgggcctggcgccgccctcgctcttcgcgcgcgccatgcaggtgctggtcaccgccatctctccaggccgcttccccgaggccctggacgagctgccgctgcccccattcctgcagccgttggacctcactggcaaaggctaggcccggagcaccctaggcgctggattttgggacaaaactatttttcagagcgttgtaccggcactttatatatattgatctctgtacggcacaatctctgcctcatctgtcgcatgcactgggggctgggcttggatggtcaggtgagttccaagtggcaggttttctgggtgcagctgggctcgggccttcagctcgctgtccagcccctgaagggagtgaggactaacctcccaccttgatctagagcctcggacaggtgtgcgtcccagatgggtgacagctgagtgccgcaggagctcggtaggtgcaggggtggggactggcatgtccaagcagcaggacagcgtataaaaaggcctggaagccaagagaacgagctctgcagcgtagggttctcacgggaggtcctgtgcggtcagccttttgcaccctgtggactccgggccagggagggcacacagggctggcaggcccgcggtggctggtgttgaggcatgaacaaattgtaccgggtatcccccaccccactctgaccaccagttcctccttggatatcactccccctgacaggcagcccacccaggcctggatttgtccctgtctcccccttttgcttttcccccatgactaatgggcaccaggtcttgctgctcctgcttctcacctctgcagtggcagcaggcccctggccccaggtgcatgccggtcagtggggttggatgtgccttcc

SEQ ID NO: 25559 - DNA, 1091 bp, Artificial sequence
  DNA replication origin
cggagccagaggtcagacgcctaggctcaggtcggggctggggactcagagggcagggtcagggcctaagctcgattgcctgtgggttgggggtccccaccaattctggaatgagcccaaactgagacgcaggggacctgagttctaggcctggctctgccgtggcttgctgaccttggagaattggagaagcttgtgccctgctggaaagtgggatggcagtacccgcttcatctagtagtcggggagatcaagagaggtatgggacctgaagaggatggcagactgtgcagtgcggtgcacaccggtctccaggttgttttcaccctcctatctcctcccaggagctaacgtgtaagcaaacatgtttggatagagggctggtgccacgccccaggctcaccccgcccgcacagccgtcgtccacccctcccctttcttacagataaagctgaggctcggccagggactgtgatatacccacatccccggaactaggtgatcgcggtgcaggaaccaggtaggtctgagtctggatcatgcctctgaacagcccaggaagaggctccaggggcctccaagtggtctggggtcggagatcagggtcagggttgcgcttgggctggagagtggatttgcctcagcttgagatgtgggcccaagctttctcatcccctccctggccttttctttatttggggtcgtatgaacctggcttaggtgggaacagaagctcttccagtgggtccctgggttggagaggggaggggagatttgagggcatgggcagcaagggcatttccagcagaggtgccagagagcaagtcagtttcaaggagggagaacaggtacagctagatcaaggatggaggcggtggttctgggcgtcggagagatggagctgtagggtgactggaagggcctggccgaggctggaggtaggtacaggcctggtgggccaggaccggaggggctgtgtgaggggcagaggggagtccccgggcctccccagtttccccgcgcctcaccgtggcctcttcctttccccgcaggtgtgccttcgcgggatccatgccttgaggcccaggaac

SEQ ID NO: 25560 - DNA, 1215 bp, Artificial sequence
  DNA replication origin
tgcctggccggggccgcactgcgccgcccgccgcccgccgcccgccgcccgccgccggcgacggcaccgccgccctgcgatccggccgcggcggctcagagcgcggctgcggcgggcgcgggcggcggtggctccctcccgtgcgtccgtcgtgggacctttgcccgctcgcccgcgggggacagcgcgcgctccggtccgcggcaggggcggggacgcccggcctgtggcccccgcgccccccatggtgagtccccgtcccccgcgccgcgcccgcggccgccgccccctcctcctccggcacacgcgcacgcaggtgcagccctcgctgcgccggccacctgcgcgcggacgccccgctcggccccgcgaccctccgccgcccgacgtctggccgtgcaggccgggaggggacgggtaggaggtggcgggtggccccgggcgcggcgctgccttcgatggcccaacccccttattcacgagccgcggccgtgactctgcccggtgacgtggggaggccgaactttacgtaacccgcccggcgccccacgcgtgccggcacagggcatatctggggcccggaggcccaggcttggggaaggggctccagtcacggtgttgcccacgggccacagcctacccgcaccgcgccgctctctttaactcagttactgccagtgatagtgacccagtcagtgtgtgtggacgcggcctgccttctgtcccaggccccttgtgaccaagggcttacccttgaaagaaggcagtagggaggttgggacggagccagaggtcagacgcctaggctcaggtcggggctggggactcagagggcagggtcagggcctaagctcgattgcctgtgggttgggggtccccaccaattctggaatgagcccaaactgagacgcaggggacctgagttctaggcctggctctgccgtggcttgctgaccttggagaattggagaagcttgtgccctgctggaaagtgggatggcagtacccgcttcatctagtagtcggggagatcaagagaggtatgggacctgaagaggatggcagactgtgcagtgcggtgcacaccggtctccaggttgttttcaccctcctatctcctcccaggagctaacgtgtaagcaaacatgtttggatagagggctggtgccacgccccaggctcaccccgcccgcacagccgtcgtccacccctccc

SEQ ID NO: 25561 - DNA, 1470 bp, Artificial sequence
  DNA replication origin
ccgtccgccgccgccattggcccgcgccgccggcccccgccaccacccattggccgccgcgctgcaccattgttacgtcactggccggcgggcggggcgcaccgctggacccgcggaaaacttcggagaaacttgagggagcgccggcggggagaacggagaggaggggcggggccgtggcgaaaggggcggggcgttgatgggcgggggcggggctcccggaacccgagctgcgggcgaagaaaggctccgagctccgagctgccctagcccgggagggcgccgctgctctgcgaactcgggcgcgcgcgtaggtggcccgccctccgccgtgcgtgactttcctcgtcgcgtccagctccccttttctttgaccttacgtgaccttgggaaaaacctccaggctgctaccccatctgcacatgggagggccgggggtaggagccgcgacccctaagggctccaccgccttctgcccggccagggtcgtgcctggcgcgcccccgctccagctgacccgcgcaagggagggaggggcggacggatggggacagctgtttaggagcgcgcactgcgcccatctcggcctcaacactcatgtttccacttcgtttcacgaccaccagccacagtggacacgatgatccccagttcacccgccagcaaatcagggctcagagaggtggcctcaaagagaggagcggccaggagggaagccgggggtttgccctgcggttcttcccacatctgggcgggatagattcgattgggcctcggccacccccaccgtctccgtcgggggttccaaggtttggggtcatgacctagggggcttaggagcctgggtccatctcaactaatttatggcctcactcgcccccagcggctgggaattctaggcccattttacagatgtggacgcagatctggagaggggcaatgactgctcaaccccccacccatcctcccagacacgaccttccacctggaatccccccacacacgttctcagaggccaggcagccggggtctcatggtgaaatccccacattccatgcaggggctctttctggttccttccctagaatgctgtccctgcccttccagtactatctcaccagggagaccctcccactcccccactccgctccaaccaagcaaggcctctgcctcgccccggtgggaggggcctcgtccagagggcacgcccctgcacacacaatcagccctgtcctggcttctctgtgtgccccagccagtcagtctgggtggaagtcttacctgggccctctcaacagacctaggcaggcctctgtccccagcccaacgagctcaatcccttaagcacacacgccacagagcagtcctgagaggccaggtggacagtaccatgaggcagacaaagctgtgaggcccagagagggtcaggccaccccagcccaggtaggcactcacatgtatcctgcccag

SEQ ID NO: 25562 - DNA, 1067 bp, Artificial sequence
  DNA replication origin
tcctgaggtcacttttagatccagccccaggggaaccccctgctttgggttgcagccgccatctctgctgcagtgtcttctgatgaaagctgtcccctgtgggcatgagtgtggacatgctgcacctcctaaggcagcagtgccaaggctgatggtgccctccacggtggtttcatggcatcgctgctgcactagaggctgcccagggacgtgtgaacagctgtgaaggggcaggttcctcagggagggaggatgggctgcggggagggtggctggggcaggggaatgggcagagcatgacttccaaacacctaggaagccccaggtggagggcggaggggggtcttgccatcttgggataggagttgacctttgaccccatcatgctcctgctgggacctgacccaggcacactcctcttcctctgggagggcttgtcccaccagggcaggggtctgtgtgtgcccaggcagggagccacaggcagtagggggaggctggggctgcaagcacagaggccccggaaagtgtgtgaggacgctggggagtgggaagggccctcggaggggtggtatggccggcttaggttttctcgacaactctagttgagtatgcactgcagggagacggagaggccgcagccactgaagccaactgtgctggagcaggcggagggcaccaggggtccctggagagaagtgccgcctcctgccaggcccctgacctataggtgagggtgtgagcagaagaggagaatctaggaggcctcccgggtattaggggaaagctgagcacctggaagatggcagagccaagaggtgtccatggccctggagatggggtcatgagtataaagagggcgcttggagtgtgaggcaccagggatgggaggtgagaggcccgaggccccagccggggcttccaggaaaggaggtgggagagggtcttggggccaagaaggcacagggcttcccgaagccaaggtgtcccaaaaataagggagcggtcggctgggacagattcagatgtggtggctcacacctgtaatcccagaactttgggagtcc

SEQ ID NO: 25563 - DNA, 1875 bp, Artificial sequence
  DNA replication origin
cactgcgacccgcagcctccgccgaagccgggcgagggacccccgacccgggcgcaccaggctgcgggtgcgggggcggggacgcccagcgccctggccccgggggcggggttcgcgggctgagtgcccactccgctctcccctcgccccgcggcctcggcgggccccccgcccaccagggtctccacctccccccgggtgaaatggccacagtcccgccatccgcgccgccgccactgcgcctgcccccggctgggccgatcggaggtcccggcggggcgggcgaggcaggtggtccggcgggccccttccgggttcccctcccccagccggagtccgcggaccgcgctgggcgcagggagggggctgtgcgcgcctccgcttcccggccttcccagcggggacgagcgccgacccccgcccagtcgggagacgccctcaaggtcccaggctctgcttctgcccgcccgcggcccgcggactgcgggtgacagggtccccggtccgagccccatctccctaggagagcggaccccagcgctcctgtaccctccacctggtggccgtccacgcagcccggcctgctcgcgcgtcccaactgccacttcccttgccttccccagccgcacgtctaccaggctcctgtgtgtctgcctggctgggacttccgcatactccaggcccactttacaggtgcagatgctgaggccagagcgcctcaggagctggatgcaggggagagcgtgcgggcagtgtggggagagactcggcctagccttccattgcagctcctatccctgctgcgccaccccctcggcctgtcatctgtccccatccaggaacccccaggacactgtcagcagagcccactgagggtccagtgctgtccaggtggcggcatcaggattcccaggagccagccctcactatgccaccctatgtccgtatgtccagcagggatctgagggcctggaggggtgcggaggccctgccaggagatgctttcctcagtgcccattgtgaagggagcagagggctgaactggaaggggcttcctggccccaggagggcagtgattaggtaaactgcccacccttcaaaagtgatggacaggaaggggaaaggtggagggtggaggagctgcaggttatgccggtgacccctgagagacaaggagatctccacagtgtatcagttctcttctgctgtgcaacaaacaaccctgccagggtggctttaaacagcaatgatgtaggattgtttgcggttctctggattgactggatggctcttttgcttcctgtggcgcccgctgggatcactctacagctgtagggatctggaggcccaactggagtgaaatgtccaagtggttcatccacatggctacagttggtgctggttgccagtgggagctcggctgcctccagcatgggctgccaccctgcttcggtgctcctttgcttggcttctccacgtggctaacttggtcttcctcacagcatggcaggacaagccccagtgtgcaagagctcattaaacctctgcttccatcatgctttctaatacctcattctccaagacaagcccagagttcacgtggaatgagactcacaaaggcatgaatctcaggaagcctggtttattattatgggcatcacagcttagcacaatgatggggaagcagtggggacagatcgtagacagcagaccttccagggccagaacaagcagggaaggctcctggaggaggatgggactggctaaggaggggctgggaactctcttccttctccctgaagctccaaatcctcagggcctggggaggttggaggagcaccaaccactaaatcaagatacaaacgctcaaggctc

SEQ ID NO: 25564 - DNA, 790 bp, Artificial sequence
  DNA replication origin
agcacacacacgcctaatcccacccccattgtcatagatccctcttgattctgggcctgtctttctgggggaaactgaggcccagagggattgagggcccccaaggtccccgagtctccaggtgtaccttggaggctgtgctttagtggggcctcccccggccttctttgcagtcctgagtgtgtgaaggggaggaatcgggggctgccaggccaggagccaaggccgggggtggggagcagctggcaggtgtcccggcaggaggcccggctaggggagaccagaactcctctgctcctccctcccaacggcttcccaccccactctacagcaggccgctggcaggcccggaagggcttgggagccggagggtgcttgccggggctcctgaaggcctgaggagctcctgagggactggaggcttcgggcctggaaggctggaaggcactggccctgcagcttggttcccggggctccacgtgtctgaatgcaaaacaaaggcggctcacaatgagaaggcgggtgctggggatctgcccccgtcgtgcatgtgtcaccacacggtgtcgaagcggacacctgcctccgggatgagcgcattgggcaacactgcatgctttgcattgggaacatgtttgtgtgtgtgcgttgggggtgtgtgtgcggtggggggctatgggctgggatgtcccttgaggtgatcagctctctacgttccgcacacacaaacacacagtgtgactgagacacacatgtgagtattgagatctccagggctgacttcctgccg

SEQ ID NO: 25565 - DNA, 1945 bp, Artificial sequence
  DNA replication origin
gcaggcggaacggaggccgtcgggttcgggttcccgtctcggggacaccccgccccggaggcctcgggccgcgccttcctcctgaacctgcggggtgtgggatcccggggaggagacggcggtgccgcctccgggtgtttctgcgcctcccctagctgtgtcctcgacgaccgcgcccgccggcagcggacaagaactcgccgccacgcccaggccgtcgccccatttcacagactggaaggcgaggcggggcctcccggggccgcgcgcaggtcctccagccccgacccggcaggcgcccccctccccggccgcgcagcaggaggagcccgggcctctcggatttcgcccgccgcggcccccggcccccggcccctggcgcagatgttctcccgcggggcgttccgggcagcgtttcaggggcccttagctggttttgcggggcgggaatgggccgcccaaggagccgtcaccacctggcaaggcttagggagccactggccgggatggggagccccgcgggctgggcggatgcggggagccaggctccccacggccgcaccctcttccctcctcccagttccctggcaagggaggggggaaactaaggctcaaagaggttgggtcactttctcagactcagctatccggctttgagcagagccctaaaggatgggaaagatctggacgtttggagaagggagagggacaggttaggcaggagaatgactcggacaaaggctggaaatgcgggtggaggcctgtggccagctaggctggactaggtggtggggacggcacacccgcccctctggggggtggtcagtggagcctttgctggcatctgggggctgggtggatacatgcagctgggaggagccgggcagagtggtccagtgtttgctggagagattccgaggctggtcgggagggacagagacagacactgggacaggcagacaggccttggccagggcttgtggcccctggtgagtgctggacattgattctggggagacaccaaatatctgcatttgttgggtggtggtgggggcgggggagggcggagtaggcaggattcttgtggccctctgcaaaaattcctcatctgcactctcaaaggtatgagaggccaaatgccgtggctcatgcctgtaatcccagcactttgggaggccgatgtgagaggacaggagttcaagaccaacctggccaacatagcaagaccccatctctaatacgtgcatatatatatttaaaaaaataaaataaaaaggtctgggaaaggttaggacgtctgttgggctccctggagagggaggtgcccagcagtgtgacagcctggcctaagggtcaggttgcttcatgaagagtgatggctcccaggggctgagggcagaggctagagggcagggtgctgggcacataggctggactagctggggcaatggatgggggggcaccgccccgggtggggcacctgggacacgtggcctcagggctggtgagctggcaggccacatctggggcatcagcccagacagggtctggggcagcactggcccaatgagagggtaaagaatgtggccatgctcccacccagccaccggaacggaaagcttgccccctgtgggccttgaccccacgctgccctgctcctgtgccatcacatggccaggctgctcctgcagaggagtccacaccactgcagcctcccttcctggcctcccccacattctagctgactccctcttccctgggccatctttagacacagagcccttggtccctgaccttagccctcttctgtctaacctccaaaccctctcctgggggtgagctcctctccccaaccctctgccctccacccctggcttagggcacccacagagcctcttctgatgtcaccttttcctgaactgatccaatatcagctcccatgggg

SEQ ID NO: 25566 - DNA, 1826 bp, Artificial sequence
  DNA replication origin
acatctgcgccaggggccgggggccgggggccgcggcgggcgaaatccgagaggcccgggctcctcctgctgcgcggccggggaggggggcgcctgccgggtcggggctggaggacctgcgcgcggccccgggaggccccgcctcgccttccagtctgtgaaatggggcgacggcctgggcgtggcggcgagttcttgtccgctgccggcgggcgcggtcgtcgaggacacagctaggggaggcgcagaaacacccggaggcggcaccgccgtctcctccccgggatcccacaccccgcaggttcaggaggaaggcgcggcccgaggcctccggggcggggtgtccccgagacgggaacccgaacccgacggcctccgttccgcctgcgccccttcaaggctcccggacgggcctcagtggcttccccgcccctccccaccgcgtcccggctccccgggcggggggtggggggggtcgcgtgcggacggttccccaccccgcgcgtgcgcacctctcctcccccaggagattaagtggggactctgaaccctgtctccagccctgatggggaggagtaatccgattgctttccaaacccggcctcgccttgcaaacttgtccacccccaacccacccggacggccgggccgccgcctcctctgggcctcgtctccccttcaagcccccggccttgtggggaagggggaatccttgacgcattttacagacggcacatagggtcggggcagtgctttaaccggagaccaggagcctgactcttccagggctctgtgagacagcctggtgcctggcgggggtgacacagccccactgtctgccccgcgtttacagccaggaaccacacctgagccatttccaagggtgacatgtgtcacagaactgtggggaaggggctatccagagattcccagtaggagacacggggagacctgcagggtgagtttggacgggactagagagggggcagggctgggggaagaaagtgcccccagcggttggccctgagagaggattccagggctcccttgaaagaacagcggggtgggggtggggagcagaaaggaggcctgcgggccacatgcagcctctggatctcagcccagcagcccgaggagccacagctgggtgcagagtggctcattcgtattttactagatccctcgggcctctgtgccttcccagggctctgcaagccggggaagaaaagaatcgttgcttcatcctgcaactcccagacggtgcttcccgaccctggtgcgggtggtgaggagggggagggaggtggttgtgaggcctgctttgcagttgtttgtggaatacagtaagattcttggctgggatgagccgaacaggacgaagaaccgaattctgccggggccgcttaaggaagactgcctaggcgaggtggcccaggctggggatgagccagtggaggaggaagtctcgagagaggggacagcagtgagcccagcaccctctccatgggagtctgagtgtaaggcatcccgacctgtctgccagcgtctctctctgctgggggctgctaaggtgcagataggaagcggtcgggggcctctgtgtatgggtggaggaggcggatggtggggggcaggcaggcgacggggcagggaagaccctatgaaaactaggacctgtcctatggacaggcttcaccggcggacagtgggggaatctggttaaactctgagtctaaacctcacgctggccgggcacggtggctcatgcctgtaaatcccagcactttgggaggccgaggcaggcagatcacaaggtcaggagtttg

SEQ ID NO: 25567 - DNA, 2579 bp, Artificial sequence
  DNA replication origin
tatgtctgatgcctgattactaatcattaatgtcctagaattgggtaaatgcctatctcccactaatcttggttgttcaaaattatctatgtctattcttacaaattgattgtttctgaatttctgtagactgcatctttctggaagactgagaggtatgaatcacaaattatacgtaaggcaaacccagcatattcctgggacctgtgtgaacaagtcttgggcctgtttattatggccgggcaggagaccccgccacgcccttctgtgctcctgctgtctagaggctgagccctacagcccaggtcctgactgcactcaatgcagcctccctttcaggtgggctcatcttcccgcagctgccaaaggtcagggcccctttgcccaggctgtgtccctacctgaatgcccttctaccccttccagtctagctcggtctgggctgcaggctcggctggagggcactctaaccacaacccccaggtgaccagggtgctccctccatcctcgtgtgaatggggtggtcaggccatatcgtgggcatttcctgagcttccacagaagcaatgccaaggtttggtcttccacctcaaagctgggccccgcacacgtgatgtgagtccaggggttcacagagaggctggccctagtgagagtggggctgggggccctagggctacccctgatggggaggggaactcccatccctgggagaggggcatgaggatctctgagcatggaggaccacacacatctcttcattgtgtggccctccctgcctcccggcacccacatccatgagctgggtgatccctgcggtttgttgattggctgactgatccttggcagggctgacaccgatgccccccacggctgggcaggggatgctgggaccaatagaggtccccatggtgtcacaggcagctccttagacactccaagcgagttcaggtgccaaggtaccaaggaaaaaggagacagcaggccgagagaccagaatctggggggcctgaaggctaccagggagaggggaggcttcagggcaggaggacgcccactgtctgacaggttttatccacaccatgtcccagctgcagcggacaaggtcctgtctcctggcaagagaaagcaggctcagagtggcaggctttacctcaggacaccgcagggagggcactacacctggggccggtcctagcactctcagtgaacccgtcaagtcaaccagtctgtcccctgaggggtgggctggaccagcggagccatccagactccccactcctctgccttttttgttgttgttttggagacagtctcgctctgtcacccaggctagagtgcaatggcataatcttggctcattgcaacctccgcctcctgggtttgagcaattctcctgcctcagcctcccgagtagctgggattacaggtgcaaaccaccatgcctggctaatttttgcatttttagtagagatggggttttaccatgttggccaggctgatcttgagcccctgacctcaagtgatccacctgccttggcctcccaaagtgctgggattacaggtgtgagccaccgtgcccggccaagcaatgtcccttccacctcaccccatccccactggtcagaactgcagggaaacccagtctctggcagtgtggtggttctgaccagtggaggtggggtggtgaggggcgccggggccagcagctgttgagaagccactgaccctatgcctgcgacacgcctggtgggcccagtcctgggtccatgggctctggggggcagagatcaggcccaatcctccttgggccccactgcaccctagagcagctgatggtgactgagacgaggccttggagatcctaggctgggagggcccaggttggacctgccaggttcgctgtcctcagccaggccaggtgtagggctaaccacagcactggcgggatcatggccctgccccactgcccagcccaagctgggagcaggcaacctgggcctggacaggtgcgggtcacccaccctcaccctcacctcagcctcagcctcctcctccagatgccagatgctggaggcggaggcggcccctcacaactcctcaggcccctccgggacgctgtgggtttttttttttttttcttttttttgagacggagtctccctctgtcgcccaggctggagtgcagtggcacgatctcggctcactgaccttagcctcccgggtccaagcaattctcctatctcagcctaccgagtagctgggattacaggcgccggccaccacgtccagctaatttttgtatttttagtagagacggggtttcaccaaattggtaaggctggtctcgaactcctgacctcaggtgatccacctgcctcggcctcccaaagtgctgggattacaggcgtgagccaccgcgccttgccctgtggggttttttattttggcagagggaggagatttaaggaaagaacaacccggctataagcccgaggggctgctgtgaccccgcccccgttgtccacataaggaaaatgaggtcccgggagagcggaccagcaccaggtcttccagag

SEQ ID NO: 25568 - DNA, 1812 bp, Artificial sequence
  DNA replication origin
ccagaactcctgggctcaagcgatcctcttgcctcagcctcccaaagctgtgtgagccaccacgcctggccatttaaatcattttcaaatgtacaattcagggacatacagtacattcacgatgttgcacaaccatctccacagtgaagttccagcaggaaacccatgtccatgaagcaggcactcccttctcccctccgtgtgctaggccagtgcagggagagacatgatatggggctgccagcaaggcagatgctaggggaaattgagggagatggctggaggagaagagggtcttcggctatcccctgcgtcactcccaggagccccaagatgtgtgcgcagcagaggagactctgagacacattctcctctagaccaggcactgctgaacactggagcagtgcaagcaggacggcaacaccaagaggtcctgggcggggtggggtctggggagggagagagatacaagaaccaagagtcccagggctgcagctgagacagggctggtaatgaggcacagccccggagtgggcaggggtggggacctcccatggatgggatggtcagaaggctcctggaggaggtgacatgtaggtggggtaaggcagaggaagcctgggaagattgggggaaaggtgttcccggcctagaaacagccgaatgccagcaggcctctccgtgtcacacccctgcctcctagggccatccatctctctgtctgtctgttccagggagggttccccggtttgtcttttactgaaagatcctggaggaggggagggctagttgttgctcttatgcaaaggccctgaggcaggtgcagggtgtgaaggggaggggagacatgaggccaggagtcgaagtggagctggaggcagggccatgcctcatgtgcctggggccagctgtggagtgtttggaatttcatccttggcccacaggaaatccccgtagggaccgggggtgggggtggggggtggtgggggttgtaagccaggaaggaagtgatccagcccttgtttcaaagatgatctctggctgtcatgtcattaggggatggcagttggaagggtgtcgtggtatctaagctggtagaggaaagagtacggcccaggtatcccacctcccagggcaccctcgtgtcactcttgacaggcccagtacttgcagtgtcctggggaaaagccccatgtgtctctcatctgtgaacgagaggtgaatggaggcccatctagctgggccaggcctgaccatccgcaggactgaatgccagcaagcctttccacgtcccacccctgcccactagggccatccgtatctgtctgtctgtcccagggagagttccctggtttgtcttttactgaaagatcctgggggacgggagggctagttgtcactcttgtggacaaggggtaggtcctcagccaggaaacctttctttttttttttttgagatggagtcttgctctgtccgccaggctggagtacagtggcacgatctaggctcattgcaacctccccctctcgggttcaagcgattctcctgcctcagcctcctgagtagctgggaagacaggcgcccaccatcacgcctggctaatttttgtatttttagtagagacggggctttaccatgttggccaggctgaccccgaactcctgacctcaactgatccgcccgactcggcctcccaaaatgctaggattacaggtgtaagccactgtgcccagcccaggaaaccactcttggaaggcagtttctagacagagaaaagaacacccttttctctgagggtctaaatgttggtg

SEQ ID NO: 25569 - DNA, 1714 bp, Artificial sequence
  DNA replication origin
ccccggctcctcccctcatatcatgcctgatcctaggaagatatttcacttctgggtgcctcagctttctcatctataagggtggggtatgagatggtcatggtcatagtttttgtttttttttagggtggggggacgagatggtcatagggtcacagtttttttttttgtttttgttttatacagacgggatctcgctatgtcaccgggcgccatggctcaagcctgtaatcccagcactttggaagtccgaggcgggcggatcacgaggccaggagttcaagaccagcctggccaatatggtgaaaccccgtctctactaaaaatacaaaaattagccgggtgtagtggcgggtgcctgtaatcttagctactcgggaggctgaggcagaggttgcagtgagcccagatcgtgccactggactccagcctgggcgacagagtgagactctggataaaaaaaaaattaatgaaaggaaaaaggcaaggaggaatcccaacgatgacaggttgaaagctgcagaggagactgatggggagtgacctgtgaggtagcaggaccaggtgaactggaatccccaggtccagataagtgagggtttccaggaggaggagtggtcgactcagctgctgctgagaagctcagcgagaccaagaagtgacccccggattgggcagcggagaggttgtaggttaccttagcagcagttaaggggtggggacacagccctgctggatggggtgatgagaggctgggacgggaaggggtggaggaggtgagtgtagggaagtctacagaaatgtctgaagggagggagaaatggccagaggcaggagagggtttgggggcaggagtcggtccagagtgaggctgatggcacagaaaagcctcgaggggagggcagcgggatggggtcctaggcctgaggaggacgtgagtacccgacagggaagtttgtctgtttgggtactgggagaggagaaagatcctgaaggctttcgtttttctctgaagaatgaggtaaggccacgggctaggagcccaggcagaaggggctgtgggaggtgtaaggagaggggagcaggcatgaggtctcactttcagagtgggagtctcaccgaaaaacatgatagggctgccggctttgtggatgcgttagaagtgtgggatcacaaattcccaatcccagggctgtgtgtggagccctctccccaagcgatgggaaggcgagtgtccttaacgttggggttccctatgctggaaggatggactctattacagtccatcaggccaggaggtaggtactgtttcctgtattttacggttggtaaatctgagagcttcaggccaatacagtatcggtgtagcattagggtcagacaaaatagaacagggcccggcacatattaagtgttaatattcgttggaaaaaaaaaaaaaagaatgcttgtcaagtccactgctgcgcccctactggtagcccagcctggcctcagccttgggggctggtgggtggagagggcggccttgtgtgctctgctatccctattgccttaatgacccagtatcacctttgtgcccttgtaggttgatccttctagtctcgtggcagaactttgtagacaccaagcgagcggggcagcgtgttctggacctcattcctcacacagggctcacctccggatgagtcagaggccttagccggtggcccag

SEQ ID NO: 25570 - DNA, 1145 bp, Artificial sequence
  DNA replication origin
gcacgcctcccgcagcctctggccccccatctgaaggaccccgctgagagtcccgtcgacttctcaaagtaaaatgtgtctggcgctgggaagccgcggagcgcccggccgggactactttccgctgcgcggaggagtacgggcgcgctaagactccatacaaagaggaaactaattgggggaaactcgctgcgcccccgcctttcccaggggacgcggggctggcgggggcgggggccgcggcgcgggggacgggcttcccaggcggccgcctcccctggcgcgagctgcgtggggactcgggtctgcggtgctgcccgctaattgggtgggggaggccggggcccccggggtggcttgggtgcggggtgcgccgcggcttcagaggcccaagggagggtccccgtgggtccccggggcacagagtcccggcgtggggacgcccaagccgcctgggtggccgctgaaagatgaatgaaggggcccagtcgtcctggggcgggggtccaggaagggtaaagaggaagaagctattttcatcccaagctctcggcacgggaggagggtcaacttctttcggggcgagggcagccacttttccggacctgccgcccgccccgcctccctactccccccggcacccccacgagggagaacacggggtgcgggcgggtggggtaggctgaggctagcctgagagccgctgccttggagagggaccaccgggcagccgtacagctgttaggaggctgaggagtgtaactgccttggaggtcccggtgccctacccccagccaaccctgaaactacgcgcccttcgtaattagaccagtggaggtctatacggaaaatctttttaaagcagggaaggctatttttcttttaagttacttcaaacctgagcttaatttggggactagctctggatataaatagctacagggagaatttgggagttttatggttttaaagcctgagtaaataagcagggttttgtcttgaacattttctgcagcatgaaccattattaactttattgaagagaccacgttcacttctgcctaaatggcctttaagaaacagggctgggagccctcctggtatagaagcccttcccccaccaagttcaggtgggggacttagac

SEQ ID NO: 25571 - DNA, 821 bp, Artificial sequence
  DNA replication origin
gaggcggccgcgttgttcctccctctccgcttccctgagacctcggggcccttctccaccatggccggcatcggcgggggccggggccgtgcgaaagtggcggggacccgcggctcctgaggagggggcgccgagacgggggagggggcgcggggccggcgcggggccgggcgggcgcggcgggagcccacgggcgcgagtccgagtcgggggaggcccaaacgggcagagcgcggagccgcttcaagcccccagcgacgagccgagcgcaactttcgctctcatcgccgccctcacttcactggcaccaactactccgggagcagcgagcggagaggggaggaggcaggggcggggcctgcaggggcgccgggggaggggggcgcgcagcccaactgacgcgagatggctccgccccccctcgcgctcccattggctctggtgggatttggacagccagcggcagcggggttggctccgcgcgcccgtccgtccggggcggcggggcgggggagcggggaggggcggctccgggcttccgttggcgaggttcggttgacgcgtatcgcccgccgtacgtggtttgaggtttgccatctccctacgccccatgatccatctctccaggcagcggcgaggagttcgcggccctccccgccccctacccttggccgcggcccctgcccttgctgcccgcgcacgcctcccgcagcctctggccccccatctgaaggaccccgctgagagtcccgtcgacttctcaaagtaaaatgtgtctggcgctgggaagccgcggagcgcccggccgggactactttccg

SEQ ID NO: 25572 - DNA, 984 bp, Artificial sequence
  DNA replication origin
agcagcaactcctgggaggaaggcagctcgggctcgtccagcgacgaggagcacggtaggtggcagccgcccccgcggccccgggccccgcgccccgcgccgcgctgaccgccgtattctgcttcccccgcaggtggcggtggcatgagggtcggaccccagtaccaggcggtggtgcccgacttcgaccccggtgagtagcggccccggccggccggcggcggggatgagcgggagccccgggtccccggcgagcccgagggggcgggagcccgccgacaactttctttttgtgcgttcgccctgccgtccgtggggagaacagcagggcgaggacgaggaggcgcacacgcacacgagtgttctgcaaacgtgcctctgcacccgggggaggccaggtcgcccccagcagggccggcgccgctgcccccttgcgcctccgaggactgcgggtggcgtcggaggtggccacacctggcctgggggcgctgggggtccctgcgtccaggtgagctgcgcctcggccaggggtaagggtggcagtgccggagagttagtgtcctgcgagcgccccggacttaggaggtccccagagacccctttctcggaacccttcccaaaggctgctccccacgcctttgctcctcctctcagcctctgggctcttgctggctcctgactgccctcccatccagaaggcgagtagaagaacgaccccccaaaaccagtcaataaaagaagtgtgttttccagagggcgcctgcctggggaagagagtctcgcgtgtggcagttggattttaggacctatttgtaaatgtgtgtatttccttttttttggaggaagagattgtgaaattgagaagcatcagaagctttagcctaacaaatgcttttcacctacaagaaagccctacaccctagaatggaacacttagttccctggctgctattctgtgtagaagcaaatttaaagtggtacaag

SEQ ID NO: 25573 - DNA, 1171 bp, Artificial sequence
  DNA replication origin
cagccgccccgtccgggagggaggtggggggggtcagccccccgcccggccagccgcccagtccgggagggaggtggggggtcagccccccgcccagccagccgccccgtccgggagggaggtggggggatcagccccccacctggccagccgccccgtccgggaggtgaggggcgcctctgcccggccgcccctactgggaagtgaggagcccctctgcccggccagccgccccgtccgggagggaggtgggggggggtcggccagccgccctgtccgggagggaggtgggggggtcagccccccgcccggccggccgccccgtccgggaggtgaggggcgcctctgcctggccgcccctactgggaagtgaggagcccctctgcccggccagccgccccgtccgggagggtggtgggggggtcagccccccgcccggccagccgccccatccgggaggtgaggggcgcttctgcccggccgcccctactgggaagcgaggagcccctctgcccggccacgaccccgtctgggaggtgtgcccagcggctcattggggatgggccatgatgacaatggcggttttgtggaatagaaaggcgggaagggtggggaaaaaattgagaaatcggatggttgccgggtctgtgtggatagaagtagacatgggagacttttcattttgttctgtactaagaaaaattcttctgccttggggaaaaaaaaaaaaaaaaactgtgaaatattcagatgttttcaatgcgtaaatggataaaccaactgtagtacatccatatactggaacagtacacagcaacaaaaatagtgaactactaatatattcaacaacctagacctacttccaaagcattacagtgagtgaaagaagccagtacaagttcattcatacgacactctgaaaaaggcaaaagtacagggataatgaatagatccaaggtttccagggtctagaagtgtgaggaagcttaagaaagtctgaggtagcttttggaggagctggaactctttggtatcctaattgtggtggtggtatatgaaactccagtggtgccccgcattggaatttgctttctgtgatttcagttacccatgatcaactgtggtctgaaaacattcaaatgaaaattccaggaatagtacctgaatcatc

SEQ ID NO: 25574 - DNA, 1460 bp, Artificial sequence
  DNA replication origin
gctggccgggcggggggctgacccccccacctccctcccggacggggcggctggccgggcagaggggctcctcacttcccagtaggggcggccgggcagaggcgcccctcacctcccggacggggcggccggccgggcggggggctgaccccccacctccctcccggacggggcggctggccgggcagaggggctcctcacttcccagtaggggcggccgggccgaggagcccctcacctcccggacggggcggctggccgggcggggggctgacccccccccacctccctcccggacggggcggctggccgggcagggggctgaccccccctcccccctcccggacggggtggctggccgggcagaggggctcctcacttcccagtcggggcggccgggcaaaggagcccctcacctcccggacggggcggctggccgggcagggggctgaccccccccccacctccctcccggacggggtggctgccgggcggagacgctcctcacttcccagacggggtggctgccggacggaggggctcctcacttctcagacggggcggttgccaggcagagggtttcctcacttctcagacggggcggccgggcagagacgctcctcacctcccagacagggttgcggcccagcagaggcgctcctcacatcccagacagggcggcggggcagaggtgctccccacatctcagacgatgggcggccgggcagagacgctcctcacttcctagatgggatggcggcggggaagaggcgctcctcgcttcctagatgggatggcggccgggcagagacgctcctcactttccagactgggcagccaggcagagaggctcctcatatcccagacgatggggggccaggcagagacgctcctcacttcccagacggggtggcggctgggcagaggctgcaatctcggcactttggggggccaaggcaggcggctgggaggtggaggttgtagcgagctgagatcacgccactgcactccagcctgggcaccattgagcactgagtgaacgagactccgtctgcaatcccggcacctcgggaggccgaggctggcggatcactcgcggttaggagctggagaccagcccggccaacacagcaaaaccccgtctccaccaaaaaaaaaaacgaaaaccagtcaggcgtggcggcgcgcgcctgcaatcgcaggcactcggcaggctgaggcaggagaatcaggcagggaggttgcagtgagccgagatggcagcagtaccgtccagctttggctcggcatcagagggagaccgtggaaggagaccgtggagagagagggagacgagagggagagggagagggagagctgtttcacagtttttgatgattgtgaataacgctgcctatgtgtgcaggtgcttttttttgtttgtttgttttgaggtggtgtctcgctctgtcgcccaggct

SEQ ID NO: 25575 - DNA, 777 bp, Artificial sequence
  DNA replication origin
atcatcccttgagggatatgcaaggaactggcagcaatggccgcctatggagagaactaggtgatcagaggacagggatgagaaactcacacttcacgtaggccttttataccaggaacgctagttaactatttctaaaataaaaatttaaaatcacttcattacagttagcacaaagaggtcagcacagaatgaggcttaagttgtagaggccccaagaatcagtccccctgcagaaggtggaggaaggggttcgtcaggaccagagacggacggggacgcatgactgggcccggggcaggccgagctgaagggaaggtgcctggccgcacccctgaagtcaggttagggcagaatgaagggctgtgcattttctgggagacagatgcaatgctttccgctttccacaggagaggtccctgattaggtggggggtgggagagaaaaggcaagaggaatggtggggattaggggcaggttagttaggaggccgcggcaccccctcgggtgggaagaaggacttgtgctgtccctggcagtagtgatcgatcaaagtgcttctaacttggcgaccagatacacagcagtgtcacacaccacagaagatgcagaaacaggtgccggggaaaagggttttagtctcagactttgtgtaatttggaggcacggatgggcatgggggtggagtggtccaggggcagctgagctctgggaacagggctttaggtgtgagcgctgtggagtcctcaggtgctgacggagcacccaggcagttgg

SEQ ID NO: 25576 - DNA, 1011 bp, Artificial sequence
  DNA replication origin
ctccccggttcaagtgattctcctgcctcagcctcccgagtagctgggattacaggcatgtgccaccatgcccggctaattttgtatttttagtagagatggggtttctccatgttggtcaggctggtttcaaactcccgacctcaggtgatccacccgcctcggcctcccaaagtgctgggattacaggcgtgagccaccgctcctggctgaatggtcttttttctctgttggaaaccctggaagcctgcccatttccagagggcctgaggtgtctctgggtctcctctcagacttctgcatctccaacctgctggagcaggcccacaccctgggctgtgtgtctctgaaagaggagctggagtttcaaggactaggagagtggggaggggccaggaaacacgtggccctgcagtcagagctctcaggagttgggattctgtgtagagatgttggtgtttattcccagccctcaggggctgcccactcttcagtctttggggggaggctgaggatggtgagcaggttgggggaggaagggggaagcatgagcagggtcggggactggtggggaaggaatagagtggtagggaatggcaggcatggggggaattgcaagggggttgtagggagaataagggaggatggtgggggaactggttgggggaatgggggtagaataggaggatggggagggatgggggaaatgctgggggggaatggtggcaggtataaggggatgggaggggtgggtagagtcagggaatggcttggaggaaattccagcacttttgaaattttcccaacttcaatgcatctaaatgatgctactggattttgcctcgttatgaaaagcattagaagttgtatgtttagggccaggcgcggtggctcatgcctgtaatcccagcactttgggaggccgaggtgggcgtattacaatgtcaggagatcaagaccatcctggctaacacagtgaaaccccgtctctactaaaaataaaaaaattag

SEQ ID NO: 25577 - DNA, 886 bp, Artificial sequence
  DNA replication origin
cggagcttgcagtgagctgagatcatgccactgcactccagcctgggcaacagagtgagcctccgtctcaaaaaaaattaacaaaaaaaaaaaggataggattaaagaaaaattctccagtttgtccacagcctgcattccatttttttttcaccattcttaaggatgagtaagaatcgagcttgctctgggacccatcaagagtaacgtctgctgtgtgtctttgaaatattcgttcgtgggcgggcgcagtggctcacgcctgtaatcccagcactttgggaggccacggccggcggatcacgagggcaggagattgagaccatcctggctaacacggcgaaaccccatctccactaaaaatacaaaaaattagccgggcatggtggcgggcgcctgtagtcccagctactcgggaggctgaggcaggagaatggcgtgaacccgggaggcggagcttgcagtgagccgagatggcgccaccgcactccagcctgggcgacagagcgagactccgtctcaaaaaaaaaaaaaattcgttcgttcactccgtccactgtacagttgaagaacggggtcttttctgagcctgttaaactgtaaaccctgcaaagttgcccagccgggctgggggtctgtcattgccactgccctcctgtgaaccccacacatgtgagccggtggccccctttcctccccacctctttaacttcactgcacccaggcttcataaccctctgcgtggactctgaagaggggcagccatgaattcgctgacgttgttttcagaactgtgggttgtggggttttttgcccttgaatgggtgtccagctgccagtgggtagtcaaaggacctgaaaccctaaaaatgcaatagaatttctg

SEQ ID NO: 25578 - DNA, 1550 bp, Artificial sequence
  DNA replication origin
gcctcctgggttcaagtgattctcttgcctcaacctcctgggtagctgggattacaggcacactccaccacgcccggctgatttttgtgtttttagtagagacgtggtttcaccatgttggccaggctggtctcgaactcctgacctcaggtgacttgcctgcccgcggcctcccaaagtgctgcaattacaggtgtgagccaccatgcccggtccatgtcctgcttcttttaaaacaaccaaaaatagtccagcctaggaaagggagtctttcctgattttggcaaagttaaaccaggccataggtaacacacagcataaggcaggcgttgggagtgggccccagtcgacagggtgccaggactgtgggctaagcagggctggggacatgggaggcctcagtgcctgggctatgggaagtggttgggaccctgagcctgaggtcagtaacatcccaactcctgacaggcaagaaagggcacctgaggctcccaaggggagtccaccatgggggtgggggagaccgctggagtccataggtccctgtgagggacggcgaaggcgggcctgtcacctctaaaagagctgtgcctgtggcgcagacgggggtgccactgtggcctggtgagtgtggctgtagaacaagcatctgttgggctaatggagccagagacatggtccaatgtctctgatgtccagatagacttccagcagccaggtcggactatctggggttctggaacgttccatgggtgaagctgtaggaggagatgctggacttcctgcctccactcacatgagtcactggagcaatacaagaaggcagactggccttggctactcacactggtctcagctctggggtagggctctttataagccttcttgagaagtgaaaaatgcaaagtcctttctgtcccctcaccactgacttgcaaactccagcgaaggcctcacccctcagctggcccagagcctcccagaagccctcccttcgcttcccacctcgccaggcccagccaggctgggtgctgccttggtgggcctaggtgaatcactgacacaccactgatgcctttggggcagaaggcagaggcctcgggagaaatgcgcaggccccagcggcctggtggagggtgcagggggcgcaggggcagccaggaccgccgaggacgctgggggcacgtggcaaactggctaccctgtccacccgtgagcaagacaccactccgggggcgtgggagggtccaagggagggagaaaggaaagtgccaccaaactaatgtggagccctgccctctgcatgcgaaaaggggctccacggcctgagtcaccctcagccccacctgcgtgtgcgcgagggtgcgtggcctggtacgcgtgcgcacggtgttggtgagcgtgtgtgtgcgtgtccgcttgaggggaatgtgaccgtcgtgtatgcgtccgcgacagtgcggggggccgcatatcggacccgtgcgtgtgcgtaggggtcgcgtgtggccatgggcacacgggcgtgcacgcacgggggctgcgtatgc

SEQ ID NO: 25579 - DNA, 941 bp, Artificial sequence
  DNA replication origin
ggctcggggcccgagggggccggggcgcccgcaccttttcaggaaacggggcgcgcaggcctcgctacggccgtgacccccgctggcgttgaggacccggcaccccgcggggccgcgggtttcacgcggggggacgggcggctcaggggctgcgtggccgagcgcgctgcccgggccggccgggggggcccgggcgttattggaaagttggtcctgagtcattccgcctcagaggcgcctccgaccgcttggcgggcggcgcgggggtccgggtatgggcagagggcgcgaatccccctcgcgcggccgccgagggccggcgactcccggggcaccgggcggctcctggccgcgggctctgcgtcttccccgcgggcgccaggcggctctcggcgggctggccggttccacgccgccagccagccccgtgtggggacttcggtctagtatttggacccgaggagataattctgtgtggaaaattctctcccttcggttggaaacagtaacaaactggaaacggatgaggtgttatggacgtgcttggaaatgcaagaaaccttcagattacgagctgttgacgggaccagttgtatttcacgtttttcgaattaagctcagaatcagttttcagaatgacatgtgatgcgtggtgcgtggtgtgtgtgcctgtgtgtgtgtatggatataattcattcatttttgtggcgtcagaaaggttatgtcgagcgttgtagcggcttcttaatttacattcacggcatacaactgaagaggagccattatttattttttttcctagcatttgctgcgactacacactgccggagcgtttggaaatgttgtttgctgttaccctgtatttgtctataaaattcttactgtagggaatggccaagtggaccatcagttcgtcctgagatcttctcatgtctctcacg

SEQ ID NO: 25580 - DNA, 1595 bp, Artificial sequence
  DNA replication origin
ccttccgctgagttcataaataatccattccacaggccttctgctcaattaatatatacttcttccactgtacagcttcttaaagactattctaataggactaaagagaaaagataggaataaatagcactttttatctgactttatttcagaattaagctttgttttgcctattttgatttatgtagttaacattttccattgccttgattgactatcatttagtatgtcaaaaaatgaatagttattcaaaaaaggtaaaatttttatcttgtcctagggaattgcctcaaaatgttgatagattgcctggtcttattacagctctgtgacataaccatcacttacaacaggctaatttgtcctacagcattgaaatgcagctgtttatcttggagagagacagcttctcatacttcggttactttggcacagttttgcattgtgtgtttctgtgggggtgagtgtgtgaatgtgggtgagtgtgtgggggtaagtgtgtgtgggggtgagtgtgaatgtgggtgagtgtgtgggggtgtgtgaatgtgggtgtgtgtgtatgggtgagtgggtgaattaaagaggaaagcagagatgttgggggtggaggacacacttagaaaacaatgcatttgttgaacaaacacctattgggtacctactgtgcgccgggcagtattccaggagctggggactcagtggtgaggctcctctagtgggaaaaaatactaacaaatgtgtaacatcgggtagtgatcagttccatgaataaaaatcaggtggcatcaagggaagagaggtgatcagcactggcttgtctgaggcagccaagggacagtgggggagcatgtggaccctaagctggaactggcagggctgtggggttcaggagctgtgtggaacacaggtcagatgtgagggcagtggggcagccagagggtgaggggaaaggcactgggcagcccagaactgggagggtgagaggggccccggggcaaggcctggtgttgctggggtgggggaaggttgtactggggtgtgcctgagggtggagcggtaggattggccagcaggtggggtatgaggtaaaggtgactcccagtgcttgtggagaacctaggtgtcctgccgagggggtgcccagtgagtggagggtgatgggcttgggggagaatggggagtggagccatgcaggctgcagatgggggtgagtttggtggctcgcaggatcatggggctggagcgagtggagaggaggacagagctcgtgggggcctgggcacaccctcagaggctgcctagaggctggggtgggcttggccatgaagtgactgaagggaggcaccagggcagctcagccagggcgtgggccatcatccagttcctggtagatattgtggaatggtttgttttgtttgagagagagtctcactctgtcatccaggcctggaatgcggtgacacaatctcagctcactgcagcctctttctcccaggttcaagtgatcctcccacctcaggaaccataggtgcatgctaccatgcctggctaatttttgtattttttgtagagacagggtcttgccatgttgc

SEQ ID NO: 25581 - DNA, 1417 bp, Artificial sequence
  DNA replication origin
gatggtggatggtgaatggggatagatgggtggtgcgttatgaatggtggatgatgggtggtgggttgatatagtattttgtagaaggacagttgatcaacagacagatgacggatggtagatgaaagcagatagttggctgggcgcggtggctcacgcctgtaaccccagcattttgggaggctgaggatggagtatcacttgaggtcaggagttcaagaccagcatggacaacatggtgaaaccttgtctctactaaaaatacaaaaatgagccaaatgtgatggtgcacatttgtaatcccaactacttgggaggctggggccgaattgcttcaacctgggaggcagaggttgcagtgagccgagattgtgccactccactccagcctgggcgacagagtgagactctattaaaaaaaaaaaaaaaaaaaaaaaaaaaaagagtagatagttgattgtggatggtgaatgggtaagtgtatggatggcagctcacagatggtgaatgttattggtggatggatggatagaagagtgattatggaaggatggttgatggatggtagatggtagttgaataaaggagaacgagggaaagggcggacggtggcaaaatgaatcatggttgcatagtggatggttgatgggtgaaagagaaatcgtagctgttgaacagatgtgtatgtatggatagttgttgcaatgcacggtgggtgagaaaaagttgtggattttggatgtagatggatggtggacaagaccaaatggtggagggatggattgatggtggatgaataatggtgaatgaattttagatgatgtgtgaatggatagtagtaagtagagagacagtaggtagatggataagagtacaggagttactggatataaatcaatgggtgggtggacagagcatggtggataaattgtgaatgaatgtgcgctaggtgatggatggatgattgatgggggttgggggaatgggtctgcagtgcatgcttggatctgcatcatgcacgttggaatggctgggtggtgagtgaatggaggatggatttgtgggtgttgggaagcagagaggtagaaagatgaacagcaaatggattgtgcatgatgtttggatgatttgatgatggggagatgagtttctgggagggtggtgaattggtcattaggggattactggtggagagatggatggtgtgccttgtggattggggagacactggttgtagctgatggaagggggagaatggtggatggttacactgggttccaatggcaggatggtggatgagtgactagggaagggtgcaggaaggatggtggaggtgggtatgtaggcagaggactgaaggtgaaagggaaactactcagtcttggagacttccagggccttccaccctccaggccat

SEQ ID NO: 25582 - DNA, 2351 bp, Artificial sequence
  DNA replication origin
cgtgaacccaggaggtggagcttgcagtgagccacgatcgtgcgctgcactccagcctgagcgacagagcgagactccgtctcaaaaaaaaaaaaaaaaaaaggaaaaggaatggatggtaatcagggagtggtggatggataatggcataaatggatacatggccgacaggtagatcataaagagtgggtgttggcggggcacggtggctcacgcctgtaaccgcagcactttgggaggccaaggcgggcagatcacctgaggtcgggagttcgagaccagcctgaccaacatggagaaaccccatctctactaaaaatacaaaattagataggcatggtggcacatgcctgtaatcccagctacttgggaggctaaggcaggagaatcgtttgaacctggaaggcggaggttgtggtgatcggagatcacgccactgtgctccagcctgggcaacaagagtgaaaccccatctcaaaaaaaaaaaagtgggtgttaaatggtggatgtttggtgagtgatgaatgctgaatggatggatggtggatggtgaatagatagatggtaaatggatagatggtggatgatggttgcataaatggtgaattgtggatggagatggacggtggatagtgaatagatggtggatagtgaatagacagtggatagtggataatgggtggatagtagatggtggataggatgataaatggatgggtaatggatggtagataagtagataatggataaatggtggatgatggatggtaggtggatgatggttggtgggtggtggataatggacaagtgaatggtgatgagtagatggtgaatattaagtggatggatgggcggcagatggtagatagtggatgatagatggtggatggtggatggtaagatgaatagtggttggtggatggtgggtggtggatggtgggtggatggaaggatgggtggtgaatgagtgaatggtggatggtgaataggtggatggtggatggtggatggtgaatggccgatggtggatgtgaatggtgatgggtggtggatgaatggatggatgaatggcgaatggtggatggcagattgtggataagtggatggtggatggatggatggtggatgggtgaatgggtggatggatgaatggtggatggtagacagtggatgagggatgatagatgaatggtgggtggtggatgagtggatggcgaatgggtgaatggacatatagatgggtggatggatggatggtggatggtgggtgagtgaatgatgggtggatggtggatgaagggatggtggatggtagatgggtggatgtgtgaatgggtggatggatgaatggacgctggatgagtgaattgtggatgatggatgagtggatggtggatatgtgaatgggtagagggatggatgggtagatggatggtggagaatggatggtggatgagtgaatggtggatgaatggatggtaggttgtggatgggtggatggtgaatgtgtggatggatagatggtggatggatggatagtgggagtggatggtggatggatgaatggtggatagatggatggtggatgtatgcatgaatggacggtggataaatgaatggtgaatgaatgagtggtagatggatggaaggtgatggtggatggtgaattgggatagatgggtggtgcgttatgaatggtggatgatggatggtggatggatggaaggtgatggtggatggtgaatggggatagatggatgttggatgatggatggtggatggatggaaggtgatggtggatggtgaatggggatggatggtggatgatggatggtagatggatggaaggtgatggtggatggtgaatggggatagatggatggtggatgatggatgggagatggatggaaggtgatggtggatggtgaatggggatagatggatgttggatgatggatggtggatggatggaaggtgatggtggatggtgaatggggatagatggatgttggatgatggatggtggatggatggaaggtgatggtggatggtgaatggggatagatggatggtggatgatggatggtggatggatggaaggtgatggtggatggtgaatggggatagatgggtggtggatgatggatggtagatggatggaaggtgatggtggatggtgaatggggatgatgggtggtgtgttatgaatggtggatggtggatggtaggtagatggaaggtgatggtggatggtgaatggggatagatgggtggtgcgttatgaatggtggatgatgggtggtgggttgatatagtattttgtagaaggacagttgatcaacagacagatg

SEQ ID NO: 25583 - DNA, 1127 bp, Artificial sequence
  DNA replication origin
gcactggccgcgcacttccgggctgcgcactcgccagacgagggaggcagggccgagtttcacgcccccaaccctccaaagccctccctgcccactcctcggaagatcttcaccctccaggcctagagcgacctcggccctgggtcctgacagaccgctaccgtccgggcccgcaccggtgtggtcccggctcaccgcagagctgcagccacagcaggacccggcccaggacgcccatctcgcctcggctccttgcaccccaccaggagactttgccccactggacccacgtgaccaggcaggtcgggtgggggcaccagggtcggttacacatttacctccagacccgcccagggccgactcttcaggcccctgggaggcaccttctcagcctccccttacccgcccctgcagggcctgaacaccttaggttctcaggaagaagggcaaagaagaagggcttggcgagactgacctaccctgtaaaatgggtgtcttgccgggagggggaataaacgacctttgaattcacccctttctctgtcctgtgtgctgctagggctgagctagtctgctcaccattggaactgggtgtccacttctccacgcagtgcccctgtcccatgggctgtgggtggtggttggatgatagaaggaagatcctggatggaacatggtatgtggatggtataggagggtggattgtggatgatggtggagagtagtggatggtgagtaggggacagctgatggacagcaacattgatggtgcatggtgtacggcatatggacgcatggcagatgaatggtaaatggttgacggggtggatggtgagtgatagagggtggatgggtgatgaatggatggatgaggatggtgagtgaaaaatgaatgaatggccgggcgtggtggctcatgcctgtaatcccagcactttgggagggtgaggcaggcggatcgcgaggtcaggagatcaagaccatcctggctaacgcggtgaaaccccgtctatactaaaaatatacaaaaaaattaaccgggcatggtagaaggcgcctgtagtcccagctacttggggggctgaggcagaacggcgtgaacccaggaggtggagcttgcagtgagc

SEQ ID NO: 25584 - DNA, 1678 bp, Artificial sequence
  DNA replication origin
ccctggaacccccagcccagcctgactcctctgcccacaggtcccccatcagctcccagtgcccccctcactcgggctgcctggttgccaaggttatgcgtgggttctgggggccgggccacaaggggcaaccgcctccctctccctgccctcctcctgtttcccgggtgggagcgtcgccatcttgctgtgggtgccctccccagtgtgtggcagcttttgggttaaggcagctttggaaaacctgaaggaaggaaccaagcggccctggggtggaaatgaggcccagggtccctgaccccgcatggggcaggaatgggccaggccaagcccattgagccatcctccccacccgcacacgcgggggccccaggcctggaccccacatctggagccgacaccccgacccagctcaccagtgaccctcactcaggagtgactgagctggcaggtgtgcaggtgacaggatgaggacgcagcccaggagtggctgtgaaggggctggaaggaagcttttgcccagaggcttggcctgcaggccccacagtcaccctggaagctggtgggctgccgatgcaatgggacagtggccaccgaggatactcaaccaagcgggcaggctgtgtgccagtgaagctgtatttactgtcgctgaggtgtgaatgtcatatatttttcaagtgccacaaaagattgttctttttttccccaacgattacaaagtgtaaaaaccgttccttgctccacccgtaggggctgcatttggcctgtagcttgcggaactccaccttaaacaaggaaattagcttctttctctggggccttatcagagcctttaatacgtgatgaagctccaggaaagtgcaggctgcagcatttcccaaacttacctactcatggaacccgctttcctcccagttcccatcatgttcttggagtgttgtgtgaagcagtttgagaaaaaggtcccctagggcagcagtccccaacctttttggcaccagggaccagttttgtggaagacagttcttccatggactgatgggagtggggaaggtttcaggattaagctgtcccatctcagatgtcagccacttaaggagtgcacacccacccaggcccctcgctggcgcagtgacaataggggtccctaggagaatctgatctgatctgaagggaggcagagccaggcaggagtgggctcgcctcttcctgggcggccacttcctaacaggccagggacccggatggtgggtagaggggggggtgttggggacactttccctagtgttctaaagatggagctttaggcaccaggacaaggcaaggctttgggggaagggcatggagcaggcgcttcctgggaagaccacccactgctgggcatcacaagggctgtggggacaggggtgcctcccatccctcccaggacacagcctggctgggaccatgggaccaagctcccctaggttcccccccactccctgcctcctagaatattctccagaggccaaagtcccagtcctgcagtgcctccatgccggtggggtccgccctcaaggcacagcagtccctgaaggcgcttcagagactctgtgaacccccagcccagtggcagtagcagcccggccttaccatgtctgagacggcgtgaccttcttgcaccaggactgacacc

SEQ ID NO: 25585 - DNA, 1554 bp, Artificial sequence
  DNA replication origin
ccggagcacatccctgagctccacggaacaagcgccgcgccacaccacgccacgccacgccacgccacgcgtctgagcacgacctcccaagccccgcttcgggacacttccgccactccctaaaccacgcccccggaggcgccctccctccggtcctcgcccccctcgacgcgccttccctccagtccccgcccctgaacatgcctttccagagccccgcccctgcccgaccgcctcacccgcgccacagtccaggtgcgagcccacgtctgagacgccgaatccggctcctgaagccaggacgagttccccatccagcggcaggagctgcaagagacacgggctgaggcggcgccacgcgggggtccgggcctgctccgcgcccaccccgcccccagtcccctgggacgagaagccgagaccctgtgcacggaaggagcccgggcgagctcaggcccggggtcctcggcctggctgaggctggcagaggaagcggatctggcctgggaaagatggggccgcgtgggcaaggccccgaagcgggcacagcccagtgtcctgtccctgagctggaggtctcacaggccaggggcagagccggagccggggagcgagacggagccgtggggagtctggggcggaggtgactctggccagggcctgtcgcctccccccgtagccccttgagaacgtgcacaggcccagggctcccaggttccaggaactaaagtttcgaaagttgcccggctcctggggagtctgaggccgcgctcttggtgtgtgagggagggagggagaggctgcatctggcggccaggggtgcaggaggaggcagggagtgtagcggggaggtggagttgcccctgctgtttcctataggcttgggctgggccgtgcagctcccgcaccacagaagtggggccacagcccaagtctcgggtgtcagcagaaatacggggggtctgactggccgcccctcactccccctctcctccaagtgccaggacctcagcctcctgccttcttgcttctgcacttctccctcaggggctgagggtgagcgctgggccagggcaacccttgctgccaggttgtgaggggctcagcacagcagggcgcgcccacccgaggcaggacccactcttcggcccttccaggagcactgcacctgagcaagaggccaacacccccagcgacgtgaggtcacacttcagttccgtgcacacctgagggtgtggcactgccagcagggcaagtccccccacaggtgcagaggtggagccgtggggacggaatgtgtcatagctcaaagcgcctcaggaacagggaggggttcccaggaggaagcataccaagaacaccgttttttaaagaacgaaggggaaaaatagaaacgtaacataatagttgaacagacgagcacagtaggtaaggccaggagtttgagatcagcctggtgagaaacatagtgagactccatctctacaaaaaatttaaaaataaaaagaggatataatttttaaatatagggcaacatttataatagaaaccaaa

SEQ ID NO: 25586 - DNA, 1187 bp, Artificial sequence
  DNA replication origin
tggccgccagatgcagcctctccctccctccctcacacaccaagagcgcggcctcagactccccaggagccgggcaactttcgaaactttagttcctggaacctgggagccctgggcctgtgcacgttctcaaggggctacggggggaggcgacaggccctggccagagtcacctccgccccagactccccacggctccgtctcgctccccggctccggctctgcccctggcctgtgagacctccagctcagggacaggacactgggctgtgcccgcttcggggccttgcccacgcggccccatctttcccaggccagatccgcttcctctgccagcctcagccaggccgaggaccccgggcctgagctcgcccgggctccttccgtgcacagggtctcggcttctcgtcccaggggactgggggcggggtgggcgcggagcaggcccggacccccgcgtggcgccgcctcagcccgtgtctcttgcagctcctgccgctggatggggaactcgtcctggcttcaggagccggattcggcgtctcagacgtgggctcgcacctggactgtggcgcgggtgaggcggtcgggcaggggcggggctctggaaaggcatgttcaggggcggggactggagggaaggcgcgtcgaggggggcgaggaccggagggagggcgcctccgggggcgtggtttagggagtggcggaagtgtcccgaagcggggcttgggaggtcgtgctcagacgcgtggcgtggcgtggcgtggcgtggtgtggcgcggcgcttgttccgtggagctcagggatgtgctccggctcaggcgaacctgccgtcttccgcgactctgaccgcttctcctggcatgacccgcacctgtggcgctctggggacgaggcacctggcctcttcttcgtggacgccgagcgcgtgccctgccgccacgacgacgtcttctttccgcctagtgcctccttccgcgtggggctcggccctggcgctagccccgtgcgtgtccgcagcatctcggctctgggccgggtgagcactgaggggagggaggctcgggtcccctctccccacctcggcccgaccccgcccctcctggtctgcacacgttgggtctgagcactcaggtgaagtctcttcctcgggctggctccggtggggacccggctgcccgcagacg

SEQ ID NO: 25587 - DNA, 1630 bp, Artificial sequence
  DNA replication origin
ccgccgcgcctcgccccgccgcggggaagactgagccggcccctccgtcgcaggcgaggccctcggcgtcctggaggcgaccatgcgggagtcgggcgcacacgtctggggcagctccgcggctgggctggcgggcggcgtggcggctgccgtgctgctggcgctgctggtcctgctggtggcgccgccgctgctgcgccgcgcggggaggctcaggtacgcggggcgggggcgcggaggtggggctgggggttgctccgaggggctcacgctgcgtccccgctacgccctcaggtggaggaggcacgaggcggcggccccggctggagcgcccctcggcttccgcaacccggtgttcgacgtgacggcctccgaggagctggtgagggggctggaggggggaccggggcctcctcggggccgggactcggcgccgaccgccgcctgaccctgtcaccccgcagcccctgccgcggcggctcagcctggttccgaaggcggccgcagacagcaccagccacagttacttcgtcaaccctctgttcgccggggccgaggccgaggcctgagcggccgcctgaccgtcgaccttggggctctccacccgctctggccccagtcgaactgggggctagccacctcctcgtccagcccccaaacctccccttcctttccccctcctccgggggccaaggacagggtggccttactcagtaaaggtgtttcctgcacctgctgtcagcctggctatgccgccaccggccccgcccatgaggactaggagcccagccttgcgccgcattcgcactgggggacatgggaggggtctagctggccactgctggaggcagcgctggtcgtcacctgggcggccagaggctgggatctgcgaagttgaacccagaactaggagtggggcttcccccgccttccggtgaggggagggtgaggagctggagggaggggcgggagagaggcaaggggtggacggagccaaaggccgtgcctggtggggcggacggaaaaggggtgggcatccctcctggtaccaagctgctgggtgcgaaggcagatcatatggggtcacccatgtgcaagcgtgcgccactgcaccgacacagacaagggtccagccctgtgtgtgcagctgcaactgtggcagtgaccacttctgtgaaaccagcatctggggctggagatgtcaccggcatccccagtcatggcctggcccccatttggaatcttctgcccaggggcccagcttagccaccaggacacgtgctgtaacccagatcagggccccgtgcttcgaggtgcggctgtgttgtggttggaatgagtcactctcagtgctgtgcagtgtcccgttgagtgaccgccacagttcacgtgtgtgctccaacagctaccatctcgcatttttaaaagaagtggccgatactcccacacgcactttttagccacaattttctttagtgtcaggtgcaaactggagagcaagcctgagctgaccagacaccacctgccacccactgctcacccgtcacagatggactgtgctggcagggacctgcctctggtgtggactgtggaaggagagatgctctgggcttccaggggagccgcctgc

SEQ ID NO: 25588 - DNA, 1084 bp, Artificial sequence
  DNA replication origin
aaaaaccagaaccccccaggtgcccatccagcagaaggcccaggagggcagtggggtggcagggctaggcggtgctgggccactcagtgccgacttggggaagtgcacgtcctgaacagccttgccaagcagccgaccggtgggaggacaggggaagcctggcccaagctgtggacaagctgtgtctgccgccacagttaatcacaagcctctgacgacacagggccacagagctggtcactcaacatctggtacaaagggtgaggtgaaatccacgcgcaggggattgctgtgccgtgggccggggccagtgtgcaggagtgtgttgggtgggtctacgtgatcatacgggctactaatcacgggggctccatgcgggggcaggactggtgggggggggggcgggcagggcggggcggggtggggtatcccagtggctgcttcgtggcgccctggggctctgacttccctcagcccagcaggccacagggcctgcctgcaccacgacactcgctggttttatggcaggaggcagaagccgtggaagcgaatggaaaacagcacagctgacttcacagtagtagatactggtgacacttcatggctgcgacccagaatgaacttaatgcacacagggacgcagggtgtcactggtcctgggcctttgtccatgactaggtggtcagcaggacttctgcagctgactgtgcaatggctaaatgaaaaaaaggccacagactaacctccactttcctgtcttcaaaattctagtgacactgggaatgctataggacctcctactattctcttaaggtcctaggaaagtttcaggaactagggaaaagactgggtactgaggctgtgtccccagatgtctgcttccgaagcagccgcgtcatgacgggtttctgctgaggaagtggtgttggcagggccccatatgccctctcgggttgtcaggggtgggagacaggctgtatgggggtccttcatgtgcagatggaacagcatcgcctcacagctgtgcagacgaacagatgtggtctactgccacgaacaatgcggcataaaactgatcaatatt

SEQ ID NO: 25589 - DNA, 1182 bp, Artificial sequence
  DNA replication origin
ggggagggtggggtgggtgtggaggtgaggggagggtggggggtgggtttggagggaggtgagggggagtggggggtgggcttggaagtgagggggagtggtgggtgtggaggtgagagggagtggggtgggtgtagagatgagggggagtgggggctaggtgtggagatgagggggtggggtgggtgcggaggtggggtgggtgcagaggtgggggggtggctgtggagagggggagtggggggtgggtttggaggtgggggggtgagggagtgggggtgggtgtggaggtgaggggggagcagggggtgggtgtggaggtgagagggggagcggggtgtgggatcagtgtggaaatgctgttctgaagaggttccctaaagagtgctgagccctccgatggggcccctgacttgggctcatgccaacttttcgtctaccagtggcccttcaccaccaggccaggggcacacctgtgcacagccagggactggcgggtgccccgggggaagggacatggaaagtggagtatgctgccaggtgatgccgactcaccctcgctgtcctcagggtacccacccagcagccctgcccccaagaaccaatgctacagatggagtacccagccccggcctgagcccagagcagtcccgtgtgcaccacacaacagacggtgcacgggcacagcacagagatgacacaaaggcagtagcatggctccgtgtgcaggccccgggctgagctaggcctcttagtgatgcgtttaccttcacaacaacattccacatgccagtaacatgaccactgtcctcttctcactaacagatgagccacagatgtcaactctaagaggaagtgggaaggaggccccgcctgctcctgcagctgacactgggtggcactgagacagggtcacatagcaaacgctacggccacgcacacccacatggcccacggctccagacttcttccacacaccagcacctgctgcggtctctaaaacgcacagacggctgtgggccgcgtggcttttctctgggatatcttctgcttgttcttgggcatgtggttttcttatgttaaattaattcccctgtggcaaacttctcaacgcaaacacatgcgaggcaggaagcgtctacagcgctcccgttcctgcgcacgcaggcccgtatgcatgtc

SEQ ID NO: 25590 - DNA, 975 bp, Artificial sequence
  DNA replication origin
cccggccgaggctggaatttttaaaacttagaaacctggacaaagggccctgtaaaactgaaactcagacccctgaggatggggtgctgctggccggcactgggtctctgagctcaaaggcagccccacaggctgggtccccagtgactggaaggagtgcagccagctgacgctgggctctctgaggtgactgtggcagggctgttctgctggcgtggggaaaactccaaactggcaccagtggccgactgccagaaggaacttcgctgccaggatggtactgctagggtgtcactctaggagggagcgggcaggaagctgcaagtcgtcctcccgcctcccagccttgtagtctccctccagcacctgcttcaggcagagctcaacagggagtgggggggtcagagctccccaggattggctggggtgtggggtggagtgaggaggacatcagtgccggtgaagcaggtgaggggagggaaccaggtgaggggagggaaccaggtgaggggagggaaccaggtgaggggagggaaccaggtgaggggagggaaccaggtgagggagggtggtcctcttgttacctacaggaggactgatcagataagcaacattcaggatgatggggctgggttcctcactgtccaagtgaggagttatagataaggaagaaaacgagaataaaccgtacaacactgggatagaattgggttattggtatgaacttgcagcttcaatatagacagacagatacagggataaacacagccatatatgggtgtgaacatacagagtcctagctctgtctaccgaagagtatccggaagcagcagcagttcagctacaagcacacccagtgtggaccatggtctctaaagaccattctccaacataggacagggctcctcaggcagctccagagctgggtcaggaaaccgcaaggtgagcctgcagcagccggtgcccagaagtgag

SEQ ID NO: 25591 - DNA, 2421 bp, Artificial sequence
  DNA replication origin
tacttttgtgcaaactgagttcctgagaataatgtagtttgtaatcacaatttccaaagagccagaatacaactttgaaaatatgtctatgttacagcacagttcccgtttagatttggaaaggccagatctcataaaatatgacctccacacatgctgacaagagcttcctccagggaagcccaccagtaatgcctggtggagagaggtggctgcacaatggcccccagggcccccgccctcagactaatcttctaggtcccaggccagaggccagtgggaccacatcttcccagcaaaaccaactttccctctgcttcctcttcccagtcacactcacaggtggtgcaccaagttgaacctgacagtggaactgtgtgggtttcaagatcgagtgatcagaaaggaacggtaaacaagctgggtgcagtggctcacgcctgtaatcccagcactttgggaggccgaggcaggtggatcacccgaggtcaggagtacaagaccagcctggccaacactgtgaaaccccttctccactaaaaatacaaaaatgagccgggcatgctggtgcgtgcctgtagtcccagctactcgggaggctgaggcaggagaattacttgaacccaggagatggaggttgtagtgagccaagatcatgccactgcactccagcctaggcaacacagtgagactcgtctccaaagaaaagaaagaaaaggtaaacaaaatattcagattttaacatgcaccaaagacctcactttcaaagcaacggtgaagtcaattaattattcagttggaaatcgtgtcactgacaaaggacgctagaaagcaaatactcttaatttactgatactataagtaaccaagaatggtggttcccacggaaataaagcatcacaggctgtccttgatctcaggacctctttctactgctgctctcacaagataccgtgtaacatttcactacagagtaatccaacagaagccctctaaagaatattgcaacttaagttttatttgtaaacaaaattccaaattccagtcaccaatctggcagagtagagtaggaggcctggaggcctcactgtggaacactttcatttgtttcttcgtataaatatcagctttatcagccccaaagattagaaattactggttcgaactgaacagtcctagcccagtgacgcaaatgacccaaggataaggttttcataggtttggcctgaacatacgcatttcctcctcctactcagtggttttaggtgagacagtctgagggtcttgaccggcacacccgttagggagagatgaagtaaaagagtttcacgctgcacttttacctgtctttaggatcctaattatcgttaaatggtttaatcaaatttttgtcctaaaaaagcataataggttagctgaccaatgattaaaacattatagatccggaacgaactagagaaggcatgcaaaattcagatgagaaagtttctaagtgatagctccagctacccctccaaatatcacaaaggtctagcagaattggaattaaaaaaaaaaagtcctcttgcacggtttatttaaaataaagccttaaccttaaaattcccttgaaggtgttacagcaaagtaggtattcaggctctgaccaacaaggggatgtagacaggctgtcacccaggaggggccgttagagctgggctccctggggatgcaagggggtcccacggggcagtgggcgaggcagatgcagaaagcacacccagctgcccccacaacgcagagaagcgtggggtggggaaagggaactaattccacactgcctccggaccccaaaggcgaggtgcgggggcgggggcgggggcgggggcggatatcccagtgagtgctgcaggaaatgatatccagactcggagggtggatctaggaagccgccagggcgagggcccggcgggggggagggggtgggagtgggaacgtaggatgtggctccaaggggcaggatgagggggcgggacgatcgaacgcggatgtcgagcctagggagggcaaggagggatgaaaagctagcggagggacgagggtgcaaggagcggctggagagagatgggctgcgggcctgggggcgctgccagagcgagaggaggcgaagcccacgagctgggtgggcaggagggcggcagggtctgtccgggcggggatgggcgggcgtggggatgcgcgggctggggcgcgggggtcgcagagccgcaggtccggccctgccggcgcgcacttaccccactcgaggaactcggccacgtacttgtcgcggcgcagggccgagtggctgcactcggtgtacaggcagacgagcacgtcgagcagcgtttccacgctcagggcgctctcgttgcgccagggcccgtccaggagcagctgctc

SEQ ID NO: 25592 - DNA, 2485 bp, Artificial sequence
  DNA replication origin
ccgaccccagccccgacccggcggcccagccccgcggcccgcagccaaccagggcgcggccagcaccagcgcagccaaccactacggggccggccgccgccgcgctgacctcagcgcgccgccccgccccgcgcccggctccctgctcccggcgggctcgggcctcgccgcttgccgtagggagccgggatgctgggaaggcagggccgggcctggggagcggcgcggggtgggggtggggggggcggggcggggcgagtgggccgctgagattgcggagcccgcgcatgcgcagagcgcgcctggtgggcgtgtgcgccttcgccctgcggacccggtgccttcagtattcggggtccgaccgcgcgcgtcgcggatcccggggccgaagacgaccccaagtatcggagaggcagagtcgcgatctcaggccgtcgagccccgtcccgcagtccgcgggcccatgttgcctgcggggcctcggacctgcccggccgaggtgggggtcgagggcggcccggcaggcgcagctctgatggcctcggcgggttgtgggctatttaaaacggcttgtcccagctcgaagcggtcctggaagactcgggccctacccctgactttaccgatgagagactgaggcccagacggtgtggggtcagggcccaggcttctgggggatgctgccaaggcgggagccagcgtccccagtgcccggtggattcgtgatggcttgcagagggtttcagtttccactgtccagccctccctgcagaccaatgcctaggtgtgacagtttggtaggaaaggggccggatatttgtctccaggctgggtttgcctagcgagtcgctgcatttactaagattgttggttaatttgggtggctgggggagggaggctgatggagataccccccaaccccaacaaacccttggcgtcaggagaggaggggcttttcctggagcttgcggaaggtcaccgaaatcgtgggggtatctgagagcttctggggcgcgcgggtgcaggggaaggggtcatgcttccgtggaagcggtggcctccaggtggagccgatgaaggggcagataggggtttgaagcaggacgttaagggagcctgaagcaaaactaatctctggagctaaaaataggagtgggcctggcgcggtggctcacacctgtaatcccagcactttaggaggccgaggtgggcggattgcctgagctcaggacttcgagaccagcctgggcaacacggtgaaaccccgtctctactaaaatacaaaaaactagccgggcgtggtggcgcgcgcctgtagtcccagctactcgagaggctaaggcaggagaattacttgaacccgggaggcgaaagtgcagtgagccaagatcgctccactgcactccagcatgggcaacagagcacgactccgtcttaataatagtaataataataagaagaagaagaagaagaagaggagtggctgcctatgccggagttgttgactggaacaagaggaggaaccttctgggctgctggtaatgttctatgcctggatttgggtagtagttacatgggagcacgcataagtaaacattcttcaaactgtcttcttaagatgagtgcatgtcactgtgtgtatgtatatataataccttcatttcttaaaggcaggtgagaacaatctggcgttagaggtgagagtactggttgcctttggggtatcaactggaaggaggcacaaggagaggcctctagggggctgggaacattctgtatcttcagcacagccgttttgtaacgttgggtctgtaaatgtgtataaattcatcaaactgtattctaaatatttgcatgttactatttgtgtatgacaccttaaaagttttttttaaaaagtctgagcagatcacctggctcaaaatcaaagttaaatcttcccccttggaccccttagggcctgagatgagcaaggggaaagggggctgtgcctggtgccatctccttccccaaacctccctcggctcgctcagcccacttccacccatctagaaccaccaccgggaagggagaaagggagaagtggggaagggctccaatcccatctggattggcagagggtaaagctgaccctgtctctcctgggaacattcatgggctcctcggtggttccctgctgctttgtctcctgaagtccccttaactcaagcagatgtgccactgggtggatgcttacctggtggctgtggaggggaggggccctctgcccttcctgagggacttttggacaggacctaaatggatccatgggtcttgtgcttgctcatccacccagctcacatctgtcctcaggaaacactggcacactcctcgccccaacattagtgaacaggtgggtcccagcacagcagcatagctctgcctctgaaacagcacatgagcccttcctgccactgtgccctccaaattgagtgccaaatattga

SEQ ID NO: 25593 - DNA, 2203 bp, Artificial sequence
  DNA replication origin
agctctggggatggccaggtcctgccgtgtggccagcacagtctcacctcactaaggggcagctcctgttcacagaggtgggcaaggtcctgctgccaggcacgtgctaaatgagcactaattgtcgtgggccacctttgtgtaacaaacattaactctaaagtgtgtgccccttcttaaaaagtcctccttagtacggtggtgggtaagacggaaatggtatgtgtgtgtatagtgcacaagtgtgctggagagctacgccataatcctagctcagctcacaccgcatgtcctgtgagcaggcactctccaggcaattggcctgaaaccagatggcttcactgaatcatggaagccctataaagatggcgtagtatcccatttacagggaggaaaccagggaccgagaggctgaagagcctgcctggggtcacagagcttgtgaggggagagctccgtcctggagtgcaccatgacactgtgcactgggctgcggggccccggaggcaggaaggtgccggggtggggagacaccccgtcactgcagctacattgacactggccacaccccagctggggcctggagacctccagtcccaggacagcactggggcggtacaggaacacatactgagactgggagggaaagaggcttgccctggaaccacagctggagaagcccagagccaagggaggaacccccaaggccagcggcccacaggggagccctgttgccctccctctcctcctgcaccaggggcgctgagccctgcggacaggcatgatgggtgctgggcccgcaaatcatgcagaacccgcccacaccccagcagccacaggttgaactgattcttgctgagctctaaaagcctccaagggaatcccctgagccctaggggcaaagatgtgactgtggccgccagggagataggggtccagcccttcatggccctggccccacctgcgggggtttggggtaggattcaaggcccggctagcctcagtcccgcatcatggctgcagggtggggcctgacatcctgggccctgccctgcctctgtgccccagagcagtcagggagaacggatgcctgaggctaggctgcttgtgcgcactctgtcctggcctgggcacccatttccccggcatcccgtctcccccagccccggcctcccagcagtcaggtcactcagtcatgcaggccaacatttcctcccagcgagcggtcaccagactcagtgccaacactgcgcccgaggggtgtgcagcctgggttggctgggtggggtgtaaaggtggagaaaggtccaaagcgctggtgggaggggtggcctctgagacagtctctgtgcaaaggcctggcatcccggcctcaggctacccgacccagtgagctgggtgtccaaggccatgtagggagattatcctctgaatgctggggagggataggagccagacccacgatggtggtgactgatggagacctggggtgtggagtacccctacccccgctcagtgcagaatctcacgctggcctctcagccttgcatggtggggccgaggtgttacccattaacagatgagtaataatctgctgatgagtgtatgatctgcccctggctcagacaagggaggtggtggactggccatggcagctgtccagacttgatatcaccctgaacgtccccaaacctccctccctccactcttgcttcgccctgaccagagatggagggtggtgctgggaataggaggtaggtgagtgcctgtcctggccaacagcagaggccctcgagggaaactgcaccgcaggtgtcactctagagcccacagcgggggctgtcaacctggagtgtgcagcagaatcgcctacagccctctggcccagccccagtgactctgggtgagtgggtctggggtgcatttcaaacaagtttccaggcgctgctgccgccagtcctatctggagacgactctctgagaagcacaaggtggccagagggacaggagtgtcctcagaccgcctctcccagagagtgggcctcctcagtccgcaccccagacaggatatgccagccttgaagcctctgtggacatctccatgctcaggggcgatgcccggcctctgccaaccacgccagcttagatgaagtccaggcacctccctcagttcaccgtgtgcccctgagcgagtctctcgccc

SEQ ID NO: 25594 - DNA, 1401 bp, Artificial sequence
  DNA replication origin
ggcagccccggggcgcggctgcggggcgcggcctcggctccggctgagggtctgccctcctagtgggagttgcggagaggaggcgccgcggagcggagcgggaccaggcccggggaaacgcggccggaggcggggcgtcggcaggaggggcggtgctaacggccccgggttcccggtgctccagcgccccctcccggctcgagagaggaacgcccgaccacgtccctcggcggccgcgggcggaggagccgggcgacactcctgtccccctcgccgccgcctccagcctcccccggcacagccggagagaatgaggctccaggcaaagccaagcaggatccagggccggggcccgcgcggagccgacaccctgctcataggaaagcgaggcttgcttcccattgcacggaaggggaagtcgaggcccgggcgcttgctggtccggcgcagggagctcggctccggcgcggagcggggagggggatcgggctcagcgggggcccgatctaggcgactaggagcgcccatcccgggactgcagccaggcggtctgggagggggtgctgtccttaatttctggcttgaaggacaggtgacccgggacaggtggagacggaagtgagaggggcagccaggtgatggggacggcgcatgcaagaacccaaaggccgggagcatggggctactgccgacaccagaggctagtcccacccggtgttgacctggcaaccagccggggaggaagggagctgtctgaggccacacccgacgcccaccggtgtcacccggagctgaggtcatccggcccgccctgggctggcagagttcagcctgccccaccctcagcccgcccaccgcaggggaccttgcttgtcgcctgccctacttggccccactttaaccctggtgctgtgcacacagacaggcctggcagggctcaggtctcaggcggagggtcagggttgtaacttccagagcctctgaggactcctcactgctgagggcagcagctggcagcctccagctgggaagctctggggatggccaggtcctgccgtgtggccagcacagtctcacctcactaaggggcagctcctgttcacagaggtgggcaaggtcctgctgccaggcacgtgctaaatgagcactaattgtcgtgggccacctttgtgtaacaaacattaactctaaagtgtgtgccccttcttaaaaagtcctccttagtacggtggtgggtaagacggaaatggtatgtgtgtgtatagtgcacaagtgtgctggagagctacgccataatcctagctcagctcacaccgcatgtcctgtgagcaggcactctccaggcaattggcctgaaaccagatggcttcactgaatcatggaagccctataaagatggcg

SEQ ID NO: 25595 - DNA, 1322 bp, Artificial sequence
  DNA replication origin
atcacccagtttcagaggggttttttatggccaggagcagtgtctcacgactgtaatttggaaggccaaggcgggcagatcgcttgagcccaggagctcgagaccagcctgggcaacatagtgagatcccccccatctctaaaaaattattattttttttaaaaagtaggctgggcacggtggctcacacctgtaatcccagcactttgggatgcggaggcgggtggatcacgaggtgaggagttgaagaccagcctggccaagatggtgaaaccccgtctctactaaaaatacaaaaattggccgggcgcggtggctcacgcctgtaatcccagcactttgggaggccgagacgggcggatcacgaggtcaggagattgagaccatcctggctaacacagtgaaaccccgtctctactaaaaatacaaaaattagccgggcgtggtggtgggcgcctatagtcccagctactcaggaggctgaggcaggagaatggcgtgaaccgaggaggcagagcttgatgtgagccaagatcacgccactgcactccagcccaggcgacagatagagactccatctaaaaaaaaaaaaaattagccaagcacggtggctctcgcctgtaatcccagcattttgggaggaccatgcgggcggatcatctggaggtcacgagagagagaccagcctgagcaacacggtgaaacccctctctactgaaaatacaaaaattcgccgggcacggtggtacacgcctgtagtcccagctactcgggaggctgaggcagaagaattgcttggacctgggaggtggaggttgcagtgagccgagatcgagccactgcactccagcctgggcgatagaggcagactccgtctcaaaaaagaaaaaaaaaaaggagccaggagtggcggcgcctgtagtcccagctacttgggaggctgaggtgggaggatcacttgagcccggagaggttgaggttgcattgagccgtgatcgcatcactgcactccagcttgggttacagagcaagaccctgtcgaaaaaaaaaatacggtttcagttttttattttttggtgggtttttttgtttgtttgttttgggacgaagtctcgctcagtcgcccaggttggagtgcagagtggcgtgatctcagctcactgcaacctccgcctcccaggttcaagcgattctcctgcctcagcctcctgagtagctgggattacaggcacccaccaccacgccaggctaattttgtatttttagcagagacggggtttcaccatcttgctcaggctggtctcgatctgctgacctcaggt

SEQ ID NO: 25596 - DNA, 1228 bp, Artificial sequence
  DNA replication origin
gtcaatatttttttctagaatggatgaatatgaatggatgctagatggtacttggatggattttggatgaatagtgaattttggctggatgatgggtggatagatagaggatgttgtgagatggatagtgaatgaatggatacgtggtggatatggataagagatggtgatggtaggctgggtgtggtggctcacgcctgtaatcccagcactttgggaagccatggcgggtggatcacctgaggtcaggagatcgagaccagcctggccaacatagagaaaccccgtctctactaaaaatacaaaaattagctgggtgtggtgggcacctataatctcagctacttgggaggctgaggtaggagaattgcttgaatccagaggcagaggttgcagtgagccgagactgcgccattgccctccagactgggtgacagagagagactctgcctcaaacgaacgaacaaacaaacaaacaaataaacaccaaaaaagagatggtgatggtagatggttggtggatggatggaggaatacagttaatagaaatatgaatggatggcaaatggtgaatgactggtgggtgaattgtagatgggtgacttgttgctgattggatggaggttaagggataaatcaggacaaatgaatagtagagtgatgattcacaattagatatgtggatggagatgtgaatggtagatggatgtgttaaatatctgatggaaagctgttacatagtgagtgatggatggataggtggtggatggatcgatggtgaatgaatgttggatcaatgggtatttagtggtgtattgatgcttggtaaatggtgggtgctggtggtgaatggatgggtgcatgatggatgggtggtggttgcatatgggatggtgactggagatggatggttaatggacattggatactggacggtggttgaatggtggattgtgaatggatggctggtggttgcatgggggaaggtagatggtggattgtggatgagatggatgttgggttattgatggtagatggtggactgtggatgggatggatgttggggtattgatggtagatggtggatggtggacgggatggatgttgggttattgaaggtagatggtggactgtggatgggacggatgttgggttattgaaggtagacggtggactgtggatgggatggatgttgggttattgaacgtagatggtgggccgggcgcgg

SEQ ID NO: 25597 - DNA, 1103 bp, Artificial sequence
  DNA replication origin
atgttgggttattgatggtagatggtggactgtggatgggatggatgttggggtattgatggtagatggtggatggtggacgggatggatgttgggttattgaaggtagatggtggactgtggatgggacggatgttgggttattgaaggtagacggtggactgtggatgggatggatgttgggttattgaacgtagatggtgggccgggcgcggtggctcacacctgtaaccccagcactttgggaggccgaggcaggtggatcacgaggtcaggagttcaagaccagcctagccaagatggtgaaaccccatctctactaaaaatacaaaaatcagccaggcgtgatggtgggtgcttgtaatcccagctactcaggaggctgtggcagataattgcttgaacccgtgaggcggaggttgcagtgagccgagatcttcccactgcactccagcctggggaacagagcgagactccatctcaaaacaaacaaacaaacaaacaaacaaacaaacaaacaaacggacgtagatggtggactgtggacaggatggatgttgggttattgaaggcagatggtggactgtggatgggatggatgttgggttattgaaggcagatggtggactgtggatgggatggatgttggattattgaaggtaggtagtggactgtggacaggatggatgttgggttattgaaggtagatggtggattgtggacgggatggatgttgggttattgaaggtagatggtggattgtggacgggatggatgttgggttattgaaggtagatggtggattgtggacgggatggatgttgggttattgaaggtagatggtgaattgtggacgggatggatgttgggttattgatggtagtggtggattgtggatgaggtggatgttgggttattgatggtggatgatggatggcagatggtgggtctcagatggtggcgggatggcaaaagatagatgaatagctgtgaatggtagacggaccgtggctggactgtgggtattgaatggaagtgggatgttagataactgacggtggaggcttcctggttgcagggtaggaattacatggaccagagat

SEQ ID NO: 25598 - DNA, 1196 bp, Artificial sequence
  DNA replication origin
cggctcaagggaagatgaggccgggcccttgctgggggctggagctgggagggcgcgggcgctgaggaccggcggccagccccgcggtgggcgtgagtgcgagggaggccgggagagcgcgtgtgggcggggagcgcgagaaggagagcgagccgggagagcgcggagccagcggagcgcggaggccccagcgccagcacccgcgcgggcggtgagcgtgagtgtggcgcagggtcgcccctccccagcctggccccggcagtgcgggccccgggagcgccctgacggctaggtgcggggtggttgggagcgggaggagcatggggggggatttgggagttttgagtcgagctccttggggaacgggacggcgtgggttcgcggggtcagcccggctgtggaacgccatgcctccgcgcgcttgtgtccccggggctgtgcccagcaagacctgggatcccgcggcgctgggggtggtgggtgccctcgatgtgtggtgccccggctggcactggaccctggcgccgggcagggcaaggcagcccttgggcacttgttccctgcttgcctgcccccgcctggctcaagctgacagctctatcatctgcctctgtcatccctctctctctgggccaagtgtcatctgtgggtctgtttctgtctctctctctctctctcttctcctctgtctccagctcagtcacctctcgcctggtctctgtggcagtatttttcttgcctctccctctgcctccttcccaaggctggctgggtctctgtcctggctgccctggactctaacctgagttctggggtcctgggatgggatccagaagaggcttgatggagggccggacctgggagcagtggggcactgagacatccctgggctttggggttgggcagaggagccagaggttgtggcttcactgcccgctgccccgagaggcctcctgcagtgtgtgcccctcctagccctccctgggcctcagtgggaccccagctgacctgagtggggtgtttggtgaaagaaacctcatttctcagaatagcagccctctgctttgctggcggccacaggaccaccctcacccaccccagcaggacgtcacaggcattccatcctgctggtctctgctctcccactgccttgtccccttcctgcagggctgcccccgcccgtggccccctactgc

SEQ ID NO: 25599 - DNA, 781 bp, Artificial sequence
  DNA replication origin
taaataaataaataaataagcaatgatctcccccacccagatgggtaaactgaggccagcagcaaggcaaggcatgccccaagtcatgggacagagtttgaggcttgctccctcccgacccccccagggtcccgagcgcataccttcccttctgggcctccagccccctcagcagcgcctggctgtggtggagcaggccggggggtgctcatgctgctgccgccactgcgccactaagctgcacgaggactgggagcagaaatggggtgtctgctgttggcctgatgctggatccacactcccccgaaggcttcaggtgctaagcccaccccactccaccccagcccaggcccagtgcccatggctccagctggacctatattgcactgctccctgcctgagcccgccgccagagggggcactggaccctggccgcacagtgtgcctgcaagagggcacaggcaggaggggagacctgggaaggcttcctggaagaagtctgctgatctgaggcctgagaggtgagcaggaggtagctaggccagctgggaggacagaagcacattctgagacaggaatagtgcaggaaggacacggagtgtcctagggacctaaacgttcctgagacgggaggctgggagtagtagggactgggttcaagtcagccagaggccaaggtgcccatttcctcctcgagagcatgcaccctgcacaccccgggccaggccctcagcacccacagcccagggggaaatgaagtcctgcccctgcacttggccgc

SEQ ID NO: 25600 - DNA, 1693 bp, Artificial sequence
  DNA replication origin
aggagaatggcacgtggggagggagagcaggctgggggatgagcccccctggctggcaatgccagcatgagggtggcccctgggaggatccagcctttggggtagggatggggtccctgctctgctgtcctctgacagctccttcattccacagacatcccagtccagtgacacctgttctcacacttgagggtcacatatggtccgtggttaaaagagagtctgggctggagctcaggaatgtgcactgttcagggatcttgctgcagtggccgagggccattcagctaagtcccccctgctgcgtggctgtccttcctcgaggcccttgtgctcttttgggaaggtggacccagcagcttcccttctaggtggagaaatgggagacagggagctccaggcagggccatctgcccgagcacaggcgtgggggtgggacagggcaggcaagtcagggccaccggggcgctgagggacagagttctgcacgtagcactgcagcctcaaagaccttgaacgggaggtggagatgctgagggcaccgggaaggcctggggacgcagcccccgcaggctcctgtgggcactgaacaatgagccaagagcaagcccagagccagccgtttgggttgccatggcaactgcttcccagctcctctgagcctggaggaggccaagggcccagcagggaagaccccaggaagggactggcaggagtctgggtgcaggaggcagctgggggtgcgcagaagcctgggctcattcctggtgaccttggcctctccggcctcaggctctggctgtgcaatgggcttctggagctgagcacagctgcgtcctatggtgcctcctgagagctgtgaccccaggggctgagcaccctacccccagggttgggactgggtagggcctgggacctgtctcagggatgttcctgtgtgaatacacatgtgcccatccctgccctggggactgggtgggaagggtctctgatctccctagtggggcagtgtgcaggacaggggtaggggggaataggagtgccaggcctggcatggccatgatcctgcccatcctccttgcaggctgtggcaggtgcctgggagaagggccctcggctgggccagcggctgccctcaatcgtggtggagcccagcgaggcggaccctgtggaaagtggggagctgcgctggcccctggagagtgcccagaggggcccctctcagagccgggctgctgctggtaagtgagggtgcctgtgggggtgctgagaggaggaagtggccactgccagggtcagaagcggggcgtgcttcctgcggctccagcaagcaaggccttcccgcctcctgcctgttcacactccatcctccgcccgccttggagtctctgcctgagactctaggtgctgcctggccttaacccccctccctagcaccgtcctccctcccacctgcaaatgaggtccctcatccactctcagccgcaggcctgggcacgggaggtgcacggtgcataattgttgaatgagtgatgccacattctcgcccctccttatccagtgcaccctcgtcatcacctctggagcaagtgtgccttgctcactagggcctgggaggctgtgagcctacaggtgcttgtggtggggggatgggctggcctgttggcaggctccatcccgctgcaggtgccct

SEQ ID NO: 25601 - DNA, 1310 bp, Artificial sequence
  DNA replication origin
tgggcagaggcaccagccacagagccagctcagccctgcccagcctgccccagtgccaggcccaagtggtcacccaagaggcgctctggactggccagcctgggctgggagctgaggccctcacctggaaggccacaggcagagcccaaactgtcctcagtcccttgcatccccatcaagtgtgcctactggccaccaggaagtgcctttatttctgcttcaaaccacggaacaaagcggggtgtgatccagacctgggccatgggcagaagagggcagggctgcggtccagaccctgtgacacaggaagcagcctctgggctttccaggctgggcaggcccggccctcctgtgcatcagcccggccaccctggggcagaggccctcagcagtcagacagcagagcccagccacgtccttgtcctatccccgggccggggctgctgggtcctcggagcaggcacactcgctgccagcgttatctgcagctttccctggttctccgggcagactcggcgagggggctgcagaaacataaaggcggccgtgttggtcggcggggggagtgcagcctgagaggatcccaggggcccgaaatgagcgtttggcaggcaactgggctggggcaggccaggaggtcccctcgggtgatgagaagcgggaggggtgctcggccagggaggcagaatgaggctgggctctgcgagcaggggcagctcccacatccaccagatgatggggtggcagagggaagggaagtccagggcagactcaaggatatccccagagcccaagtcccaggggttacccgagtggtggtccctgatgctgtcctgggccctgggcagaaactgacaagaggctttgggcagaggtgggggttatgggtccagacagataacccctctggccacaatgaaaagggggttttctggccagtacaggctgaggtctggggatgggaagagggcaggcaaggtgctgagcggccccagctgcggctgaattcacttcctcctcagggaatagactcccaggggtctccaggggacaacatctcccagggcacagggcacacctcatgccccttgcccagcccccagtggccctcagagccattcacaaggcccccacagcccagcctgctgcctctcctgttccttgggcctggcgccggctgccccctcctgctcacacaatcctcccagaagtttcagcttttattttgagatggagtctcactctatcgcccaggctggagtgcagtggcacgatctcagctcactgcaacctctgcctccagggttcaa

SEQ ID NO: 25602 - DNA, 1105 bp, Artificial sequence
  DNA replication origin
ctcactgctgccgggaccagcgttaagcgcagcgtgagcacccagaggcccaggctccctccctaaccggaagcggctgcgggcagcgggcagcagaccactctgccccaaccccatattgcagggttgaggtgggagcccgggcggtggccccagccgacgccagggggagccgcagaacgactcccgcggggcgtccccaggtcaccgcgtgtgggggggcgggacggggtaccggggacgggacctcgctggcaccgcccctggcgtctccgcccgcgggctctgggcgtggctgggcggtctgggccccggctcgcggtgaagggcggcggggtggggcagccccccgcggtcgggcctctccacccctggctcaagagcacgcagggtcctgggacctgcggtgggggtcgcctccgcccaaaagctgccctgctggacggggcgcgctggcggggtgctgtgggcgccctgggactccgcccgagctcggccgctcggctgtgtgggtcccgggcagccgtgttgagccagatgtcataattctcaccccggagccgtgtggtggggatcaaatctcagtaaatggcgtcatcgcccacccacgtgccggcctccctgcaccccacatcccacgtgcctgcaaggcatcctgcgagatgtctgtcccctttcacaacactacccccatgtcccccagcctggtcaagcctctccctccctggcttcaggaccgatgggaaggactggaggaggacggagaggactgaagggccgccccacccctcacctgagctatagtccggggagggcccacggggtcctgcggtttaaaactgaagcgggctgccaggccagcttccgcacctcacctcccacctttcccgcattggggggttggctatttttagaaggaaggcggtgggagaaagtgcatctgaaaagtgcatcttcgtcctggaggctggcgaggcagcgggaaagcacaaaggggcagtgtctcctgcctccctcctctcatgggcccctggcacacctgcccgggccacagaaaggccatggacttggcacagctgacatttatggagtgtaccactgcccg

SEQ ID NO: 25603 - DNA, 1679 bp, Artificial sequence
  DNA replication origin
caccacacggctccggggtgagaattatgacatctggctcaacacggctgcccgggacccacacagccgagcggccgagctcgggcggagtcccagggcgcccacagcaccccgccagcgcgccccgtccagcagggcagcttttgggcggaggcgacccccaccgcaggtcccaggaccctgcgtgctcttgagccaggggtggagaggcccgaccgcggggggctgccccaccccgccgcccttcaccgcgagccggggcccagaccgcccagccacgcccagagcccgcgggcggagacgccaggggcggtgccagcgaggtcccgtccccggtaccccgtcccgcccccccacacgcggtgacctggggacgccccgcgggagtcgttctgcggctccccctggcgtcggctggggccaccgcccgggctcccacctcaaccctgcaatatggggttggggcagagtggtctgctgcccgctgcccgcagccgcttccggttagggagggagcctgggcctctgggtgctcacgctgcgcttaacgctggtcccggcagcagtgagggtggaagcggccgcctctggcttctacaccccgggtgtgacagcctggcctctcagtgagccccagatcaggcaagcatttggtggtgggggtcctgctccctggccttccctacctgggagccaggtcctcagccaaggtgaacccatttgatcccgacgacaatcccattttctggaggagtaaactggggctcagagattgaggtgcctctccaaggtcgtggggagctgggcttgccctctggtgggtgtccctggctaggcctctccctcctaacggctccccacccggccttctcctgaccccagaccaacctcgtgacccaggcttctttgagataaggctggggtttttccaaagggattttactgagaaacttcgggaaaacatggacatagcatgaaagaaacattgcaacctcatgctgaaaagcgggcacaggctcaggtgcctgtggagagcagatgggagttgaggggacttccaggagcagtccccaggccctgggcaccaccagcttttcaggcacctgtgtattgaatggagcgacccataattggaggtcccaggaccccaacatgccctgggagctggggggcgggtgggagaattagaccgggaagtctccagtccaccaaggcctggctgtatgggaagacccagtccacagagccagagacctaggtcgcagtcctggcctctctgggcacctgtgtggccgagagcaggtcactgagccctggggagccagccaccttggaccccggctgtctctgctcagttttgcttattccctgttacccctcatctctgcctgttggagacaggtggggtgggactcaggccagcaggtgggactgggctgggaggaagggcctatgggctgctgggcacctctcgggcttgaagtgggactcttagcaccccacttcacagagggaacccagggctcagggtagtgactcaagtggttaattggagggcttcctggaggaggtgctggcatctttgagtctaatttggcccctctgcagatggtgctgcagcatctcaggcaccttccagtctgttatgggctgcttttcccccataaaattcgtatgtt

SEQ ID NO: 25604 - DNA, 2336 bp, Artificial sequence
  DNA replication origin
ctagttcttccagccaaatgttgaggagtaagaatggtgagaacaaacatccttgtcattttccttatttgcaggggctggaaggaaaaggaaagcttgcaaggaaagctttcaaaggaggtttatagggccgggcatggtggctcactcctgtaatcccagcactttgggaggctgaggcaggaggattatttgaggccagaagtttgagaccagcctgggcacacataatgagacccctgtctctacaaaaaatataaaaattagccaggcatggtgttgcgcacctgtagtcccagctacttgggacgcttaggtgggaggactgcttgagtccaggagtttgaggctgtggtgagctatgatcgcatccctgcactccagcagtgggtgaagtgacacagcgagacctcgtctctaaaaacaataaacaaaggaggttgacgttttggcaagattctttttttttttgcaattgtaagatttagtagagtgaaaacagagctcctatacaaaaggaggggacccaaagagggtagctgttgccagctcaaatgcctgggtttatatcccgatcattgtccctcccactgtgctctcaggcgatagatgattggctatttgtttacctcctgtttttgcctaattagcatttctgtgagctctctttaatacctgattggtcgggtgtgagctaagttgcaagccccatgtttaaagatggatgcagtcaccttcccagctaggcttaggcattcttagtcggactaggaaatccagctagttctgtctcagtcccccctctcaacaggaaaacccaagtgctgttggggaggttggccaacgaccgtctaagtgctaggcaagattcttatgactgatccgaggaggcagcattgagggggcctgggaaggagagcagctcggaggctgtgatcaggtgaaggtggatggcaggtggggaagtgagaggggacaagccccgcacagggcttcggcccagggcacagtacaggcagtcacctgcaagaggctcctttggagcgttgaggagtggagcgatggtccagtcccagcgtagttggggaggctggggagtgggtgagcactgcagagtgattgggaggatgaggagcagctacgggagggaaggtctaggggaaagcggggagtagaagctgaggctgggggtagggagggtggggaagttcggacttgacttctcggacacagctagggtggcccagggtgggagctctcagtgactgtgtctctgggtggtttcttgcccctgctgctggccccacaaagggtgtattagcctgacctggggagagtgggacccggggctcaggccgggcgtcagtctctggggccttgcaatcagggagcggcagcataggagccggggccccctggactctccgggcactggggacagagagacgcagagagaaaagagagccagagagagtccatgggggtgtggggaggcaggcacagggacaggccaggcgagagccttgggaggtggaggggggagttgagaggggccttcaggtctcagccccgcaggcgccagcatggcagcaggcaggccagccgggggtggcagggcgaccctgataccgatgttccgcctgcttccaggctgtgctcaggggtgaccggggtagatggacagaggctgccagcccagtgcaggagggccacatcatcacagggacagtgccgagtacccactgagcagatagatggtgacggccggtggtgcaaggcatctgaaccccgaggtcctgaaacccaagtcaggtttggagaacaaacaggggccaggaaagggaatggccggaggggaagctggaggctgggcgtgcagccgggaggacagagaagaagctgggtggggtgcaggttgtccgtgaaccccaggggaagctggtgaggtgtcatcagcgggaggtggggggtggaggaaggaggttccaggatggatgcccggctgtggggctcgggcaggagggaaccatggaagggcttaaagcaggggagtgacctggctggacttttgctttgggaaggtcgagaatagcttgggaagctgttgggagctgcagggtcgaaggtggcatggctggaggctgaggggccatctggggacctcactggcccttcagcgaagttctggtttgggacaaaagcaggctgagtgacccccaagcctctgcctatgtaacctcctaagagattcaccgcacagctgcccctccttacccggcgctcgtctgggcttcctgggagagaacctccacatctgaccccactctgggacctgc

SEQ ID NO: 25605 - DNA, 930 bp, Artificial sequence
  DNA replication origin
cctggcaggccacggtgccgagggccctgggggagcaggagcagccgcagctcagccacccccatgtccctgggacaccccctccattccctgtgttggggaggggccagagcatgctatggtggagagggagaggagtggggggaggaggagaggcaatgggtgggaaacagcattgagaacccccccagtccctggttaaatatagacccgaggctcctccttctgccgcccctgtggctgcatggccatgataagccgcagggtggccttggccactgccctcaggccccacacctcctcggcgggctctgtgacacccagggaagggggtgggctcccatgggggtccctgccctccccgttgagccaaagtagtcaggccttttgggctgaaggcgggtgagctgagggacctggagggcagtgaaggagctggtgggggctggggggagggttttaggcctcaggacctaacatctgggaaggcctagatgtggctgctggtcctgccctcgggtgttgtgagctgtggtctggactgggccccagaactgcatgtcagtgccctcctccaattctaatgggagggtctggcctggcagaggccgagtgacggtgggcacctgcggagaccctttttgggggatggtctcaggaaaggctcctgatggaagcagctgtctatatctccgtgcccagctgcggcctggcacactgagggctctcgccaagagagtggcctggtgatgcttccttttgacagcctgagggctgcctcctctggagagccttccttgaccaagcccctgggtgtggccaggccccacagggccacaacaggtttctgcatctgctcctatggccactccttcttgcccccagctctcctgctgccaagatgccatcaccacagacagacactcctgg

SEQ ID NO: 25606 - DNA, 1689 bp, Artificial sequence
  DNA replication origin
ttcccaggccactcctgaggtgccctcgggggtcatgaatggtgtcagccagcaggcatccactggggcagcgtctgaggaactgaaacccgaggcaggtaagggcctcagaaacaacacgaagcatgaaaggaaacgggccagaggtcagggcagctcagctgaggtttccggaaaggctgtcctccctagctccccaaaccctgcccccgaacatgtgcaattctttatttatttgagacagggtctccactctgtcacccaggctggcatgcagtggtgcaatcacagctcactgcgaccttggcctcctgggctcaagcgatcctcccacctcaactttctgagtagctgggactacaggtgtaagccactgcacccggctaattttttttttttttttttgacactgactctcactctatcacccaggctggagtgcagtgacgcaatcttggctcactgcaacctccacctcccaggttcaagtgattcttctgcctcaggcccccaagtcactaggactacaggtgcgtgccaacacacctggttaatttttttttttgcatttttagtaagacggggtttcaccatattggccagcctggtcttgagctcctgacctcgcgatccgccccctcagcctcccaaagtgctgggattacaggcgtgaaccactgtgcctggcctaattttttaaatttgtttttatttttttgtagagatatggtcttgctatgttgcccaggctggtctcaaactcctgagctcacccaatcctcctgccttggcttcctgaagtgctgggattacaggcgtgagccaccatgcccagctggacaattgcactttaaattcttgcagcatctctgcaatgggagcccccccattgggcagataagaaaagtgaggctcagagaggtggagtgacttgcctcaagtctcacagcgtggagaatgggacctgaacccagatatgcatggccctagatccccacctctccatggcctttcacagcctggctcctggtcaaactagggccatgcacacagctgatcacagggttgcagagggtgcaaggctcgcagaggtaccaggaggggaggtcagggggattgcccagaggaggatacactggggtgggaagagggggacatggaggtggagagctcttgtcgggtggaggctggcggagagtggggagcagcaggaatgtaaagctggacacgggcaggacacgccctgcctgagctccgaccctattagacctgcaatcagggctgagcatgaggctatcaggtccggctcagccgggagtggaaggtgggtgtgggatccaggcggaaggtaggggttgacccaaattgctctgttcagccaggcttggggccccaggttctgcctcttcaaaggtgactctaagggagggctcctggcagctggggcctgttgttcctggagcaggccttcagctgtgctggggcatctggcagaggacagacaatccagccccgatggattgagccgtggcctgcaggtcttcgtccaggttcgggtcttggggcggtccctctcaccgcccttctcgcccgcctgtgcagaaggcaaatccgtggccgacctcattactgaacggcaactgctggcggccttcgaacagcttctgcgcctggagacgctgctggtgg

SEQ ID NO: 25607 - DNA, 1577 bp, Artificial sequence
  DNA replication origin
ctggccgagctggcccgcgtggtgagcgcggaggaggaagcccacccttctccccccgacgacggcgacttcctgcgcacgccgcgccgctggcgccagcactgggaggaggcggtgcggcgaagcgctcaggagcgcgtgcggcggccgggcgcggggtgggccttcggggaggcggagggcgcgtcgggtttggcccagcttctggccgagctgggtggcttggttcgccgcgacctgcagaaggtgcggcaggaggtgcagcccgcgtatgcggcggccggcttcccagcgtgggaggtctatctgcgtgccttccacagcgccgtggcccagcgcctccaggagctcgcgcgcgacgcccgcggctgcgagcagctctatatcctgctggactgggccgccaacgtctacggcaggtgagtctcggccagggcgcccagtggcgaggacagctgccgcttcctccgcaggccttggggagccggctttgaggagcaccggacctttcttctctgttccctccctgggagagggctgagagccgagggcttcgacatgctttcctcggcgggttaggccgtggggcgctcccgccccaggttttctaggggtcacccatacacagttccagaatttgaaaagtttccgcggggaggttcccatgggagcagggcctgtgctggttccaccaggtgcctttgggcgcatcagaaaagggcacatcttggccaggcgccatggctcacgcctgtaatcccagcattttgggaggctgaggcggccgatcacctgaggtcaggagttcgaaatcagcctggccaacacggtgaaaccccgtctctacaaaaattagccgggcatggtggcacgcacctgtaatctcagctattccggaggctgaggtaggagaatcgcttgaacccgggaggcggaggttgcagtgagccgaggtcgcgctattgcactccagcatgggcgacagagcaagactctgtctcaaaaaaaaaaaaaaaaagaaagaaagaaagaaaagaaaaaagaaaagggcaccccgttaggccagacgggcatctgggttcagggtacagcctgcggggagcggccacctcccgctctctgcctgggatgaggatggattgccttccccgcggagcggttcccagccccaccggcaggagcgcccacggaggtgggggaggttgcctgaagtcccgcactccttaaattgctccttaaattgtgtggggtcagacccgtgtccgccctgctgtgggcctccgtgctgcgggttggagggtggccgattcctgagctgtgtttgaggagagggcggagtgccatctgggtagccgtccttcagcgttctgcaggaaggcaggaacccagctgtcagaggcttcccgggagggggtgtggcatggcagcctagaggcgcgcgcgcgtgtgtgtgtgtgtgtgtgtgtgtgtgtgtgtacagatgcccaggttcgggattggcgttagactttgagcctggccagaagaggggcagcggctgccgcatcagagccgctcccgcccccagccccctgccc

SEQ ID NO: 25608 - DNA, 958 bp, Artificial sequence
  DNA replication origin
gcggggcgggctggaggcgcagcgggggctaccaggggacccgcggcctcaggtcgggggctgggaggcacgctcagtgcggggcttcgctcgcagctcgtggccgagcacgtgaaggcggccggcgccatctccgcggagctggaggccaccaccctgcgaatctgcacgcgggcgctcggcctcttcgtgcccaggtgcggacgcatcctcagtaggggagcgacctggccgggtgcgctctgcaggtgggagggaggagtctgcgtagggacctgattgggagggtggacccagggtcatcgcgcagctagggagggtccccaaaggctctgtgtatcccgccccaggtttgaaaaggcttttctggcgtcggaggcggtgagcgagccgcacctgggcgcctacatcaacgcctgcgaggagctcaggtagggctcgcccgctcctgtgcgggcgcagcgtggccagcagggggcgcgcgagcgccgggaacctggatggaggggagtgcgcgcgcgtggagggggcagaggtgaggagtgtgtgtgtgtgtttgtgtctgtgtgttggtggatctgaggggtgtgtgtgcgtgtgtgtgtagcagagttggggggtgtgtgtgcgtgtgtgatggagctgagggtgtgtgcctgtgtgtgcatgcgtggagagctgaggctgtgtgtgtgcgtgtttggcagagctgagggctgtgtgtgtgtgtgtgtgtgtgtgttggagctaagaggtgtttatgcatgtgcgtgtaggggtggagctgagtggtgtgtgtgtgtcagagcctagatgcgtgtgtcttgtgtgtgtgtgtccatccgagcaggggccctgggggagtgtggatggctcttcaaggctgagcagaggccgaggggttccagctccctgcctgctgccctgggctccatttttccctcccttcatcccaggc

SEQ ID NO: 25609 - DNA, 1406 bp, Artificial sequence
  DNA replication origin
gtcccggtgtgctgaagggccaggccggaggctgtctggtgacactatttggtgggtggccctctcatgcctgtggaagccacgggaagactgaggcaggtccagagcagggaaggcccatgcctgtggctgcccccaccacggcccggatccactggccttgtgcctggtcagccttgtcccagccaaagcagactcggggcttcctgggaacaaaaagaggataaggctggttctgcagcttgaagaatttgggttagatgtaggagggacttctcagcagtggaagttgtcaagttactgcagggggtgtgtcacccatggagtgtgtgtccgggggtgaccctgaggtgtcagcaatggaggcaagcgtaaggagactgctccagcgtgcacctgcgtccccgcttctctctgcaaagctgccgctgaaatttggcggcagctgcgggctggggtgctgggaaacctatttgcattggcagccgggctggctggggaggctgaaagttgagatggggagatttccagagagcagctgagacaggtggtgacaggtgcccctcccagccctccacagtgggcccccatagtgtctctgggcctgaccctgaccctggcgggagtggggggcaggtgactgcaggtgggccaaggttccaagagctccacaaacttgggtcgcctgaggacagggtaaggagtctgaaaggctgtggtgccaggcaagcagggggcgtgtctatccccactccctccaggccccctccctgcactgtggacagtcagggggcagttccccgggcagacctgccccggttcctatgccagggctggggcctggagcctgagtcttgctggggcctagagcctgggggttgagtgcctggggcttgtctgtctcttctgggagcaagtgctggggcagtgccctcctccatgggggcaccagggctggaggtcaggagcagggcaggccagggcaagggaatatccagacctcccctggcagggtggggcaggtggggcaggaatgaggaagtgggagggttggggttccccatctccagggctggggtgggggcaggtatgtgatgctggtgccaataagcggtcccgtccctgatgggaaaacaggctggcagatgctcaggatcctcccagccaggggccagaggggcatgtcttttcccaggggaggggtccaagagggggcaggtgattgacaggtcagcctgtcccctgcttgaccccacccctgacctggtggccatgagtgtcccaggcagggtgcatgggaggggagaagggagggcttggcctggtctggtcctggtcaggttctccccaaggagcccctgccacccccttccccacccttctgtctcaagctcctcactgagcca

SEQ ID NO: 25610 - DNA, 779 bp, Artificial sequence
  DNA replication origin
ggtgaagtcagagccagccataaggccgggggcctggcctccctgtgaccccatgttcccagaggcccacctacgggaaggccttgggcaccctggggttggggtggtggggtgctgaggctggagcaaaacctgagttgagtggaggtcactgggagtgggaggccccaagagaggctgggaagaggtgctgaaggctgagcggcttgtggcagagggagggggcccggcttagaccctgagggttcctaggcccggagacaggaagtcagggttttcctggcaggaactgtgtgcacatgtgcacctgtatctccatgccaggagggtgtgtatgccatgtgtgcagatcctcctgaacccagcggtggctggggctgggacttcccaggccaagccaggccgagctgggggtgggatggcagctcctagaggatgcagtcagggaggctgggggcagaggcggggctgagaccggggcaccctgggtgcctcagtcctggggtctggccactggcctttctgctctaaggggtggaggctgagcccatgagaccttgcaatgagcctgcagtgcttccttggccatctgttgtccaggccaagcctgcagggtgccggtgggggtggggctggctctcagagaggtacttgggttctcattggccaggtcacctggctgataagtgtgtgtgtgtgtgtgtgtgtgtctgtgcacgtgtacctatgtgcaccagcccctgtcagcacccccaggatggaggcccttgcctagtctc

SEQ ID NO: 25611 - DNA, 906 bp, Artificial sequence
  DNA replication origin
gggcagcaggaccccaaccccagtggccttccaaatagtgtggtgtaggagggcttcctggaggagtgggtcctggtggaactcatgggcataggaagttctctatgccagctgcaagcggccactctcctccccaagttcagctctcctaaaactctagtctttcaccacagctctctggtactgatgcaaaatgcctaagtgcagctccggtcccttctgcctggggttcctgtagaacatgggcccttctcggagccggcataatttccaggaaaacagctgcagagctacggcctatgcagggttctgccaatgacagaggccagtcacgtggcaggacctctcttgggaagcccagtgctgcttcatggggctgtttggagaaggaagtcggggaggagaggggagggaaggggaaggaagaggaggggaggggaggggagggaagaggaggggaggggaggggagggaagaggaggggaggggaggtgttaccgggagagactatatccaagtcatgaagcactgaagtatgttagcaggagcaaatccatccaggtctgcagcaacctcagttcttacctcctcagaaaagagaattcaactgagaagtctaaggcaaagtgagagactgcaacaagtttgaaagcaggagtgaaagtttatttaaaagctttagagaaagagcctgggcaacatggcaaaaccctgtctctaccaaataataaaaataataacacaaaaattagccagcgtggtggtgggcacctgtggtcccaactactcaggaggctgaggtgagaggatcacttgaacccgggaagtggaggttgcagtgagcccagatcatgtggctgcactccagcctgggcaacagagcaagaccctatctcaaaaaaaaaa

SEQ ID NO: 25612 - DNA, 858 bp, Artificial sequence
  DNA replication origin
acttctcaggctgtcaccagccctgagactcttcctggggatgccctactgtctgcatggggtggggccattgtgttccctgttgacagatgaggaaactgagtctcagagaagcaggcacagaggttgaggccttaagcctgaggtccctgctgccacccagccttccccaagaggagcagtgacttgctcagcatcacctacagctccatgagaccctggctgaagtctgctgacctcctccgggactgtgggatggccaggacagctgaccaggagccactttcacggcacatcccctcctgcaaaggagggagcatgaggaccctcagcagcccagacatgtaccatcaggcggtgccccaccccagccccacgggacactgtcgatttgttgatagcccccctgcccctttcctcctaggaggaagccaggccaaggattccttttcgtatttggcagatggagaaaccgaggcctgatgaggtatggcttctgcagctattccatgagcctgacccactgtccttgctggagaagggccatgggagagaaagcagggcctatggggcagcaggaccccaaccccagtggccttccaaatagtgtggtgtaggagggcttcctggaggagtgggtcctggtggaactcatgggcataggaagttctctatgccagctgcaagcggccactctcctccccaagttcagctctcctaaaactctagtctttcaccacagctctctggtactgatgcaaaatgcctaagtgcagctccggtcccttctgcctggggttcctgtagaacatgggcccttctcggagccggcataatttccaggaaaacagctgcaga

SEQ ID NO: 25613 - DNA, 1821 bp, Artificial sequence
  DNA replication origin
catgtgatgctggcttcctgctggggaggagccgtaggctggcctttggctcctctggaagtgcctggcctcttgggaactgctttctgcatctgcgagaagagggtaaggactgctcctgccctatgggccccattggctgtcatcccttgggcctccatgctgccccattttcagaagactttccttgtcttgaggacttcacgtatgttaccattgaccctcatgcctgagcttagagaggggaagtgactggtgcagacacaagtccaaggcagcagcctcgtttcccaatccccagccggtgctctgggcgggccactgccgtcagtgggggacaagggtggcagccccgcctcagccctgcaaagcccgtggagaccaggggctgccttcgaggggacagtggggcctaaggcctgacaacgccctcctggcagatgcagacttcccgagcaatttcccgatctgcttgggaatgggagggggggtgagggggtggggtgggggaacagagtctggcaggagaggcttgtggggattgcacaatgaggccacagcagccagccgtgaaggcagccaccggccagggcccctcagcccgtatcctcatcgcccctgtgtggatgaactccatctgcgcggtgccggtggaaggaccctcccagccccgggacaccgcggctctgtggactcatctgaaaaatgtcatccctggagtcctaggagagaaggggtggggttggcagccttaacgccccatcctgcatcctggcggcctcccgcatccgctcccccacaggttccccagagacaggatgatggatggcaatccgagtgcaaacctggcgcttggccagcactctggaagaggaagttctcagttcccagggcacctgaacccacagccgcccccactccgctggcccccctggtcctggaagacctgttactaggctgcagaaggggtggcggagtgatcagggggcggggaaagaggccaaacaaaagaggggaggagcagaggccccagtgaggcaggagggaagcccctgcccagcgggaaattcctaaatgtctgggtcctttccagagggcaggaattcctagcctagagtgtgaaataaggaaggaagtgaatctccagtgggttcccttcacagcccctttccatcctccccacatgccccacccccacatctcccaaaacaaaccctgagagacggtgtggatggggagacaggcctggaaacggaggcctgcgctgaatgggcaaagccgggttgatgatccagacgaggccctggagtctgggccttgggcccctccccttctgcctgctccggcagcctgtgggtccagccccagccccagagggggaaaggctccagtgggagtcccataggcctggctaggaaccccactccgctacttaaagtggtgtgagccgggtcagccacttcacctttccgcatttacgcatttcaagcaaggcttgacgaccggaggggctcaaggccctgtgcacagccgcgcggccagcactctggccagccttgtagcccccttccccttagggggcctccttcaggaagcccccgtcccctgcctccttgtggccacggtgacaccggaacacttcagaggggcggctggggagttggggtgggacgggctctcccgcagctggagccggtgtgtgacgcgggaacgcggccaagcgcgccccatccaggcggcctatcaggagccgtcgtcggacaatggctccgcgcctgacaaccccgtcgtccccgtgccgtcccccgaactccacatacc

SEQ ID NO: 25614 - DNA, 1262 bp, Artificial sequence
  DNA replication origin
gcggttgcggcggggcggggaaggaggggcgggcggggcggggctgactctgcgactatttcaggccttgcggaacccgggccaggacagtggcggccaggccgggacacggtaagtgacctccgcttccacacgtccattccccgccgctccgcgcggcttctcgcccgcccctaccccgaggccaggccggattccccgaggaaagagcctgtcgccgcggcggggacaggagggggctggacgcttccagggaaactgaggccctggcgcgcccagcgtccgcgcgtccgggcgcagaggggccaaggctggctgagggcccgggcctgccagaggcagggagggcggggctggggcaggcgcaggggtctcccctccattacagcagaaaggccccaggtccggcgtgactccccggccgggcgacacaggccgagtcacttcctcgcccgtgcccgggtgtcctcatcgggggatgggtgcgccttccacatcctgcccaggactgaaggagccgggcccagcgagctcccgggaggtgtgtggacatcagccctgacggggaaggcgagccaggtcagtggacctgaggagaggccgggcagcaggaggctggggggcgctgttgagccactggctgtgacccctctacgagcctcccagcaggccccttcctgcctcagtgggcccaaccagcggcaaggctcaaaggaacgcccctcctccccttcttcctttctggctgcaccggctcgctgctgcctgcaggacagactcaggacacaggagactcacccccactgaggcccagctaggcgcccagcacttggctgtgcggtttggccacatcccctcagcagcactgtggggtgggggtcctcatccccttttcaaagacggggaaacggcggcttgtgaaggaaggaggtgtgcagtccacacactagtgagaagtgtgctgagcccacaccgaaagcgtttctctttccatggcaccagctgcctcggagagcggagacctggggcgaggcccagggggctgcagcaggaccttcaggcgctctgggtttcgtgtcacagaggggagaaggcggtgatgctgtgggggtcctgcgggagctgtgcctggaggtgggacagagcctagtacatgtggggtgggacagggaaggctgaggtgaggctggcagggagcattgctggtaagggccaccctcccccaccccaggagaatggcagaggtggggcctgggcaccca

SEQ ID NO: 25615 - DNA, 2650 bp, Artificial sequence
  DNA replication origin
tcagcagcactgtggggtgggggtcctcatccccttttcaaagacggggaaacggcggcttgtgaaggaaggaggtgtgcagtccacacactagtgagaagtgtgctgagcccacaccgaaagcgtttctctttccatggcaccagctgcctcggagagcggagacctggggcgaggcccagggggctgcagcaggaccttcaggcgctctgggtttcgtgtcacagaggggagaaggcggtgatgctgtgggggtcctgcgggagctgtgcctggaggtgggacagagcctagtacatgtggggtgggacagggaaggctgaggtgaggctggcagggagcattgctggtaagggccaccctcccccaccccaggagaatggcagaggtggggcctgggcacccagggtggggctgagtggccctgccagacagaccagctcccgcgggtgctaggcatgcacctgagaggggctgggaagcgaagttggggcaccgggtggggagcagaggtgccccatggccttgcccctggggctccctggagcatgcccctcttggtcctggagtggaatgctcaacccaaatggcactagggaggccagtgccatccaggagtgtgggactctgcccagggcactgggtgagcatggcaggggctgggggtgggaggagcccaggcttcctgtccctcaggtggctctggccaagcccctccaggatggggacagggtagtggggctggtggaggcagcggggccatgggaagagtcggatgggcccagtctgagcctccatggctgctgtgcttggggcaaacacctcctactcagcctcagtttctccttctggatggtggatcatcctgcctgccttgcagggctgtttcaggggtcacttgaagttaccatgatacatgagacaaggctgcatgcatttagtcttggggtggggcagacaggtggcatcaaggttacaggtcaccccagttcttggggaggcccagcccctgcctgcttccccctttcagatcagccatgctcttctccagtggacctggccttgctctgacaatggtcaggtgctgggcagggactctggggaagctcgggtcttgcctctctggatgtagcttgcaggatagctggggatgtggaggcaggggaaagctgggctctgggaccgggtggcctgagttccaagcccaagctattgactatagggacagtttaagccgaaataacacccttccagatgagagaaaggaagagatgggatgggcacccaggaaggctgcagaaactggaagcctttgtgatgatgctacgatcccatttgggagggggtgggagccaggaagcctgggttctggacccgagttgctgtgtgacttcaggccgccctgtgacttgctgagccccttgccccagtgatgtgtgaaaggctgtctgaggtcccacccactgtggcttctgtagatcctggtcaggctctgcccctttcatggcccagctggagcagctgtgtttctgtgaccccaccgctggatcagaactggacaagatggcagaggggctgggtctgggcaggaggaggctgggttccagtctcaggccggttctggtgttctagaccccggcatgtcccagacctttctggacctctgttcctgctctgtccaaagggacagagcccatgccccgcctcttccctagggtcccgtgggatccagggaggtgtccattgcctgcttcctgcccagagggtgggctggcagggaaggatttgcccaagtaaagtgaaagtccccctctgtgtggcgggcttggcgtccccagcctcttccttgcttctggggctgtgaagtattggaaggggagctgtagatggtgagatgctcgtggccagggaggaagcacagttgttggtgctcatctgggccaggagatgagcagagccccggtggctgaatgggtgaaacagactgagtgtactcaatgcagccagcatagctgtgtgtccagcctgggagccagggccggtccatggtgaccactgatgccttcacccccaccccgcaggagcctgcaggcctgaaccagggtgatgctgaagatgatgaccttcttccaaggcctctagagccatcagcctgtgccaggcaccctcgacttgcctagaggcccccaaaagttgcagtccacatcagaggcagagtcagaggcctccatgtcggaggcctcctctgaggacctggtgccacccctggaggctggggcagccccatatagggaggaggaagaggcggcgaagaagaagaaggagaagaagaagaagtccaaaggcctggccaatgtgttctgcgtcttcaccaaagggaagaagaagaagggtcagcccagctcagcggagcccgaggacgcagccgggtccaggcaggggctggatggcccgccccccacaggtgctctaggaccctgggttagagctagtctggggcctggacggggttggcgctcatccgcgtgagtgagccacttgcacagtgggccggcaagtggggctggaaggcgcgtctgtctccctgctttcacctgtgccgcaatctggggggctgggaggccttcagcctagtcagggacaccgacat

SEQ ID NO: 25616 - DNA, 1755 bp, Artificial sequence
  DNA replication origin
gcggcggcggcgggcggtgtgagcgaggaggagctggtgcggcgccagagcaaggtggaggcgctgtacgagctgctgcgcgaccaggtgctgggcgtgctgcggcggccgctggaggcgccgcccgagcggctgcgccaggcgctggccgtggtggcggagcaggagcgcgaggaccgccaggcggcggcggcggggccggggacctcggggctggcggccacgcgcccgcggcgctggctgcagctgtggcggcgcggcgtggcggaggcggccgaggagcgcatgggccagcggccggccgcgggcgccgaggtccccgagagcgtctttctgcacttgggccgcaccatgaaggaggacctggaggccgtggtggagcggctgaagccgctgttccccgccgagttcggcgtcgtggcggcctacgccgagagctaccaccagcacttcgcggcccacctggccgccgtggcgcagttcgagctgtgcgagcgcgacacctacatgctgctgctctgggtgcagaacctctaccccaagtgagcagaccaggggctgggcccgggccggcagggagggtgtcctctgtaggaggggtgtcgaggggtgtcgaggtgtgccgccggcagcttttagtgaggtcggtgtttgcagagttttgggtccgagaatgcaggggtgggacttggactccctggggcagagcctggacaggcagagactgggcctggacacagggataaggctggggctgggtctgcgttgctcttggaatccttaatttcctgggcctcagtcacattctgctgttggggaaactgaggcacagaaaatggtagggatttcattcacgagcgcccagtctgaggagggggcaaagcaatcaataaccatccagagctggaagggctgtggcagcagaggccaggccccgtgcagagcatgggcccaaagcaggcctggagaagtcagggaagccagcctggaggaggtgaaagccagcggtccttctctgagccagggaatcaggccaggaggcaggaggaggggtgatagggcaggtaggggagaaggtgagaggaaggtcggtgctcctgagcatgtcctcttccagggcactctggagctgagcagagctatgcgggcacccccaggcaggagagttccaagtgatgggctagggccacgtgtcttgttagacccccattgtgtagggttaccctgtgagcccgccgcagagctggagcccctcaggtgggaggctggctgtgcagctggtacccctgctgagtacagcctcaggcgtcccttgactccatagatccctgggcgtgcccgtcattcgcacggtctgcatggagagaggcttactgcagtgtggaaaggcccagggcgggggagtccaggggctgttattgtggggcttggccactgctggccccagatcctagtgtgaaactttaggaaggaagcctggaggtatagacagtgtgggcagtgtctgccgtctcgggggccttgggtggcctgtgggctcagttcgtgttgaagggtcagcctctggcagaaggatagagaaagggtccagtggagagggtgggagaggagtcagcagggcataggggaactggcacagggcaggggccacgggagagataacccagcccagagccagttcccgcttgctcgtcctgactcaccaggaaatgccgggcacctgcacccctgcctgccagtctttctgtcccagtg

SEQ ID NO: 25617 - DNA, 1010 bp, Artificial sequence
  DNA replication origin
actggcacagggcaggggccacgggagagataacccagcccagagccagttcccgcttgctcgtcctgactcaccaggaaatgccgggcacctgcacccctgcctgccagtctttctgtcccagtgacctcggggtctgctggcctggggttagcaacaggcaactaaagccaagctgggcatggagccctggtgagagggtgcccaggggggcatcgttgaagcctgtgtgccagaaatgtggggaacggagggacacagctgcatctggattgggtgaggggcagagagaaggtcatttgtaaacctctaggcagacaaagggcccttaggaagtgccagggctgggcagtcccctgggagctctggggcgctgcagaggcgccaggacagtgagccaagatgcgtctgtggagcagtttggggcagcccttcctgcccattctggcctacccctgggattgggaggtggccggggctggtgagatgcccaagacctgcagggctggagcgcagtgggctgggagctggctggattccagggctgctgtgagtaggagcagggttttatctgggtgacaggtagtcttggagcaggaagaagatcagatcttaaaggtggctctggctgctgggtgaagaaggaattgttggaggtgagggaaggagcagagaggccgggaggaggcttttgcagtgagccagcggggagctgatgggagccggccagggcgccagagtggcatgaggctgctgattttgggggctattttggagcaggacctaatggggggggggtggtgagagagtcagaggaggcatgatgacttcagagtttctgttccaaaccaaactaagtagatggaggacccatcatctgaaatggggaccgggtgggggtgcgggagggtgtgctgggcagtctgggcctgccagagaccaaggctgagggcctgggctctagcttgagtggtggtgctgatttggtatagttgtcctcatgccagcct

SEQ ID NO: 25618 - DNA, 1894 bp, Artificial sequence
  DNA replication origin
gagggaaggagcagagaggccgggaggaggcttttgcagtgagccagcggggagctgatgggagccggccagggcgccagagtggcatgaggctgctgattttgggggctattttggagcaggacctaatggggggggggtggtgagagagtcagaggaggcatgatgacttcagagtttctgttccaaaccaaactaagtagatggaggacccatcatctgaaatggggaccgggtgggggtgcgggagggtgtgctgggcagtctgggcctgccagagaccaaggctgagggcctgggctctagcttgagtggtggtgctgatttggtatagttgtcctcatgccagcctcccctgcctgcagtgacatcatcaacagccccaagctggtgggtgagctgcagggtatggggctcgggagcctcctgccccccaggcagatccgactgctggaggccacattcctgtccagtgaggcggtgagtctccacctgggccagggaggggcagggaggcagcagaggagaggctcggagacagacaggacatgggcagggagcttgacgggtcttccaggtgagcgaggtgagggatagtgccccagtgacctgcccctcctcctccaggccaatgtgagggagttgatggaccgagctctggagctagaggcacggcgctgggctgaggatgtgcctccccagaggctggacggccactgccacagcgagctggccatcgacatcatccaggtactgcaatctgccccagggcacacgtaccgcccgtgcacgtgcatggggagccccacgcacattccgtcctgtgtgcatacccatgcccacctcggggcaccccctctgttcccgcctgtttcctccccgtcccctgcccccttgtccaggcgagcccctgctcagctcacccaccaccaccctgcagatcacctcccaggcccaggccaaggccgagagcatcacgctggacttgggctcacagataaagcgggtgctgctggtggagctgcctgcgttcctgaggaggtgggtgtgtgcccaggatggggtccctgtagccaccgctctcagagccacggcccctccctagtgcctcaggtggggagctgagctggatccccgccctctacccctgtccctgtcattctgagccaggagttgtttcccactcagccagggcactgagagcctcaggtggtctgacctccaccaggattcaacgtgggagcctcttgcgcccaccccatcagcaaagctctcagcagagcagcctctagcttcaaagaggataccccaggagggactgagaccccgccaccccttcatacaacactcctagtctccaccacctgaattctctctgctctctccctctcgacctctgagggcttctccagccaaccacacgctcactcctacctggtctcccaactctagagagggcctgggagcagcagagatgggctggtaccctcttcaggagcccaagccttagcttgtgaagccagttccatgatgcccaggggctagcggcccctcccttggctatgggcagccaaacagaaaagtgaaccccaggagctggcagggagggcagggaggctgctgctgtggtcccagtgtttgggctggtcctgaatgtgccccttctggtttcgccagctaccagcgcgcctttaatgaatttctggagagaggcaagcagctgacgaattacagggccaatgttattgccaacatcaacaactgcctgtccttccggtgagagtgttgggaggggcttgcgggagtgggagtcactcagcgggcaggagaggggagctggaaggtggagggaggaggagctgcttaggccaagaagtggaattcaaaccagcaa

SEQ ID NO: 25619 - DNA, 1145 bp, Artificial sequence
  DNA replication origin
ccaccccttaggtctccgctaagatgtccacccccaaaaggctttcttgtctctaaagtcggcacctcctatcattcacaaccttggttaaaccctatttacaacttgtaattgtctgtttctttgcctgattatgtcattagtattgctggccctcaacagaatgagctacttaagggaggactgagacctggcttcccttgtacttcattgcatcctggtaactagaacagaggctgacacctagcagacttctccataattgttggtggcataggtagatggatggtgggtgggtgagcagatggatgagagctagatgggtggagggatgggagcatggatgagtgagtagatgcatgggtggatgggtgggtgggtgagtggttgagtggatggatagctaaatgggtggaggggtggatggatgagtagatgggtggatgggtgcttacatgggtaggtggatgaatagatggatggatagacgggtgggtgggtgggtgggtggatgggtagacaggtgatgagtgggtgagaagatagacggatagccagatgggtgaaggaatgggtggatgagcagatgggtgcttgtatggtgggtgaatgaatgaatgggtggaatggatcagacagggactggacttggcgaagctggggtcaaccctgtcaagacccattcaaacttaccctaacatgtcagaggacccagcccaggaagaaacaatgtccctggcccaccagaacttcaggcagccaagggctaagcctccactcccgaatatgagccctggtcccagagcataggcctaggccgcagaggccccccaggctgggtgaagctggcctctctggtctcagtctcccctgtgagaggcagtgtcaggtaaagctaagagtgtgggccatgcagccagacactaactagccgtgtcaccttggacacatcctgtgagctctccaggcctcctctgtgaaacgggaatgggaagtattgtcctcgtagtgctgtggtgaaggccacaagaatgagcccctggtgaggttcacacagtgactggcacgtgggcagctgccaggatctgggttcccaatgccagccctgtgaggccttggccacagtgatgtgacagtggtcctga

SEQ ID NO: 25620 - DNA, 1106 bp, Artificial sequence
  DNA replication origin
ctgtcacggcaataggaaacaaatacagaggccaaagggtcaacagtgagaggtcaagcttgccctgcccctgcccagacctcagccagacttctgggtggcagggcccacggtggcacccccagggcctgtccctgccttggggaagggggagcctgagaggacccaggaggtcttgggcccttcggtagtagacaccaagccctcgggggaccaccctctagttgaggccttgggggatgaagagggagggctcagggccccattgcagggccagcctgtaggggccgtggggccacctggatgtgacgtctaatgctggcggtgctcacagctcgccacaggaccctaaaagcccctgccagacgagagctcatcttttccttctttctcttccagttctgtcttccattccaccattgctgaatcccgctcacggcggccctgggctgcagagggcagatgggtgaggctcggcccctgtctccagagagctgaagagggccctcggccccacccacgaggaggacagtcatgaggccgactgtggaggggctctggacagaggtgtccggggatccctgagcctggctgcactctccctcctggttctttccttgcgtgcacacgatcagctatcgtttacaaagagtccttggtgttgcctggttggctgcccaggatgggagctcctgcccccatcggacatgtaaacaaaccaaggtctgtccagttccagctgacagggcctgcacctccgccagggctaggcagaagtagcatcagagcacaggagacccgggaggaaccgagaaccagcgctgctcttaacagctcccagcggggtgtgcccaaggcttgctgggcactcacaggcaggtcaggccacaggaaaagctaaccaacctttataagggaaaataggggccgggagggctcctgcgcccccatgctgacgtccaagatgctccggatgcgcttgacctcactgttggataggttccccttgatggccaggatagcgctcaggtggcctttgctggcaaagagagcatcctgtcagcccagcctgtcacccacacccctactcaccagctccctgcact

SEQ ID NO: 25621 - DNA, 1217 bp, Artificial sequence
  DNA replication origin
gctgtggccaggaagtggccggtataaaggatgcccaaggtctttgtacgtgtgtaggagttagcgtgtttgatattgttaatataataataattattttttagagtactgcttttgtatgtatgttgaacaggatccaggtttttatagcttgatataaaacagaattcaaaagtggctgtggagtgatttattttgggagctgcacaatgatggggggcccagccaggcagccttagcagctttctgagcctctaggggtccgggcaaacctacctaggttctgtgtcaatccccagcctgtcccagcccccagagcacctcatgtggtccaggcaggagatggcccaccatcccctcactgtgagcaggagctttggaagtgtctgcctgtagggcatggacagtcacttcacccttccgtgcctcagtttcctcatctgtaaaaaggggactgtgaccctttggggcttcctccaccgtcctttactgaggaagagggtggggtggacacggggcagccatttcaaccgcatgcacgggacacagagtgggaactgactcttaccatgctggcattgacctgaaagctacagctgtggacacaggaggtctggtttgtattcagagacgggctcagctgccacggaagggtgggcctctccgcagccaatctggcctggaatttgggaaggagcagagtccctggaagggaagaagggtaccttgatgaacgttgcacagaggccggggagggccccaaggggagccgtgtgcacctgaagaggggtgtgggcttcagcagggcctgggacagcccggagctgggggtgggggagggcaggccctttctcctgagttccattcttggggccaaagcggatggcatgaggccaccgtgcagtgagagaaaggagggagacgagggccaggggcagtgcggcttggcacggagaccctctgcccggctcctggacccgccggtccatgtggctgcgaggtcctggcctggttgagccacgtggggagcgtgggccttgggcgggcgagttcccgttcctctcctcggagcacagggtcagggggaagtgggggcagcgcgactctcccctgcatggccccctgaccctgggcaaacgtggggagagatggcgcctgagccccgatggaagctgtcagtgggccctggcacacattctcccacgggggcggactta

SEQ ID NO: 25622 - DNA, 1321 bp, Artificial sequence
  DNA replication origin
cgtccacccctggcagaggggcgggctccgggcgcgaggccccaggcgaggaggaagagggtgcgggcggcgccttggaggttcctgctgttcctgcttttcggggcgggggccttccgggtcactgtcccgccagctgttggatctgcaccagtaacttctccaggaaaatcccccggagaggaggatctgcccggcggaggggagcgagtcccccagcgcggggacagggcgggcggagcggggcctgggccaggcctggtgcctttgtgcaaggacgggccccgggctgcccaggctcctgtgagcaggggtggagcggggaggccgcagcccccgcggaacaccgggcgcccccggcctccagcagtgggaagcagcccgggggctgacgctccctgcaggagccaggagcaagcaaacaagcagcttgagtgcaggcgcggggacgggccgggggtgcctgcgggtgaaagggcggctcaaagggacagtcgctggaggcccggtcttgaggaggtgcctggagcagacccgggctgggcgctgcgggggagggaggaggttgcggaggccggcgggcgggaacggggaggaattccaggtttcaggcaaagaaagacggcaggactggggaaaagggatcctggacaggagactccgcaggaggaaggagggggccggtaagtgggctccttccagctggggagcggggctggaaggggctggagacgcgagtttcaactcatgggatttatggcttggaaagacccctctgcccttcgggggcgctggggtccccaggggagagatgagggcggcagcgagggccccctcgtgcagtgagatggagcgagctctcggtgggctgagggaaagagcagcccaggggcttctaagagaccgggagggaaccaggctgcttccagggacagggagggcctgggaggggagaaagggctgaggaagcgcttggtcaagttcagggggagaggtccctccgcactcgcagttgtgccctgtgtcaccacgatgttgttcccaaagtattcttctggtgttttttttatttttattttttccttcttttcacaggtgttgacccaaagtattttctctcatgcctggccactctgccctggaccctcaacccagccgaatatgacacatctccagaaacccagcaggcgcaagccgcagggttggccttaaaatcctgcttaaacaggagaccctggaggcctgcttcagtgccaccagcctaaccgccagggctcatcaaagacgctgcccagatgcattgaacgtaagcaagatcagc

SEQ ID NO: 25623 - DNA, 1171 bp, Artificial sequence
  DNA replication origin
actgcttctaccctgtgttcagagtggcagacagaggactccgagggtggacgtcacagtggctgtgaccctggctgtctggctttcctctctgcaatgccagcagattctatggctcactttccacaggtcctgagcctgagaaacctcaggaatgcaggtagagccattaccctctgtaagaatgacacagcccagctaggatggggtcattgcagggacagcctcctccccagggagctgggagcacaggtttcagtgctggagaactcacgggtcagagtctttgcctccactggaactggagaagtgagcaggaatgcaggcaggaggctgtcagggtgcaggcaggaggctattgaggtgcaggctgtggggggtgcaggcaggaggctgtgggggggtgcaggcaggaagctgtgggggggtgcaggcaggaggctgtgggggggtgcaggcaggaagctgtgggggggtgcaggcaggaagctgtgggggggtgcaggcaggaggctgttggggtgcaggctgtggggggtgcaggcaggaggctgtcgggagtgcaggcagaaggttgtaggggtgcaggcaggaggctgttgaggtgcaggctgtcggggtgcaggctgtggggatgcaggctgtggggtcctgtctcatggcccagtcagtgactcgtcctcctgggtctctgggcttcgcgcctgattgatcatcggaatcactgcaggcagggacggggtgttgaaaactcgggtctttattcaacatccccattattctgatttgctggggctggggctagggctgcgccagcatctgggccctggaggagaccccttgggggtttctgcagcacaacccagcactgggatcccctgctcctgtggggagaacacggcggattttcagtggccaggagggaacgcaaaagtggatggactcttgctctaaattgtcatttcggctctcccagactcctggcagccaaggagaaggaagagatcctgacttcgtgttgagtgaggctttgtaactgtcccgacatgcacacacctcatatcatgtgccaggtgggggaattcagcggcagagaactcttgcatttctctccttaaatgcctgttcttcgcagacctgtgaaaacttagaaatagttaaaaacaggccg

SEQ ID NO: 25624 - DNA, 1709 bp, Artificial sequence
  DNA replication origin
gcaattgataagaacttgcaaagctgagaaggcaccgatttaaaactcgcgccaacgcggctgcgcgccttgtcctccgcccaggaaccctggaggccacggcctcgcccggctcctgcgctggcactggacgtcccgccggctgtacctggcgccccgtggcctcgctcccgaccgctgccccgcagaggcctcccgaccgccgaggccctcgccacgcccgggtgcccccagggggcgccggcttccacccacagagctccccaggcctgggcgggcgcagggagggcgcgaccggggcgcacccgcgcgggaacttggcagagactcgcgggacgtggcgggggcgcctcaggaaacgcgccgcggggctgcggggtcgaggggaggggactagtgtgcaggggccaccctctccccagccccgccccccgagtccagctccgcccctgatgcgtacctggcgggactgggtcccaggggctctccgcgctccttctgggggcgccacgtccggaccttgtcccctgctgaggactacctcgcgggccgggcggggtgaagggcgctgttaagaaggacagtcccggggaatgaggggcgagggggagaacggggtcgccgggtcgggagaagatgacagacggggcagagtagaggctgcagagggtcgcccggagagcgcgggggtccccccaccagcatcccgtcgccgcttcccgtctgaccccacccgctccccgtccccgcttcccgtctgaccccacccgctccccgtcctcgcttcccgtcggaccccacccgctccccgtccccgcttcccgtcggaccccagggcaggtgggaacgaagaagtgagttgggtccccgctgtgggccctcgccctctcaagccgggccgtctccagggcttcaggttggggaacgggctcctgtggcctccagcaggctcttccactcggggcctgggtttcaactcagtcctctcccaccaccttttccatgtgtcttcaacgcccttcttcagccggggtgacccgaactgcccagagggcttgcagccttcagggacgcagtttccagtttctgggcgcccatatggacactcccctgaagcccgcctccccttcccctgggagcaggggccttgcaggttctcccaccgctcaccttgcacttgcttcctccgcctgtacagggaaaggcccacccagctcaacccaaaggcccagggccccttggtggaaaaccccaagggggacaaacaaaagacctctgcaatctggtttagagtagacaaagcttcccttaagcaagtgatctgttaggttttgtgtccccacccaaatctcgtctggaattgtaatccccataatccccacgtgtcaagggggagaccagatggaggtcattgaatcatgggggcggttttccccatgctgttctcgtgatagtgagttctcacgagatctgatggctttataaggggctcttcccattgctcagcacctctccttgctgccttgtggagaaggtcccttgctttccctttgccttccgccatgattgtaagtttcctgaggcctccccagccatgctgaactgtgagtcaattaaacctctttcccttataaattacccagtctcaggcagttctttatagcacatgaaaacggactaatacagcagttcaccacaaacccaaggca

SEQ ID NO: 25625 - DNA, 1065 bp, Artificial sequence
  DNA replication origin
ccaccagcaccagcaggacggccccgggttcccacagcccgcgcaggcgctcgcgcagcggcctcacggccgggaacgaggcctcgctgcacacgccccggagcaccgcgaagccgtcgccgtggcggatgtccaggtcctggagcgtgaccaggtgctcggcgtccgccgcgtccacgatttccagcagcgcgggcgccgcgtttgcctcgatctcctcgcggagccgctcctccgcccacgccgcgcactgctcggggagcggccgcacgcgaactgcgtgtccagcgtggtcctgcccacgtcacgctccccagcagcacaccccggcagccctggcggggcgcgggaccagcccgcagtgtccgggacgcggcggggaggggaggagagggaggaaggggaggggaaggaggaaggggaaggggcctgggagcgcagggaacggcgtaccaggactgtccgggcaggggcagggaggggagaggagggaggggatgggggagggcaagagaggagaaaagaggaggaggggaggggaggagagacgaggggtcagggcgtggcggggctggcgagtcctgtggcgcgggggaggggcgggcgtctcctggacttgcttccacccggcttaatcccgcccggggcggctccaactccactgtcgcgctgttctcggaccaaactgagagtggggcggctatttctcggggcccaatgacgagatgcagatgaactgaggaggaagagcgtttttattttctgcaactggttacagggagaaaggcctggaaatgatcaccggaccaactcaaaattacagttttccagaacttacataccttctaagcggtatgtctacgtgtaagtgtgcatgcatctgaagacattagtgatgaacttacggtcatctgtgagtcctgaagaccttcctctggagcctcaataaggttactgaatctaaatgggtccagatgctggggggattacctttatcttgtctcctgctaaatcaggaggtttggggagtgccttcagaccctcaataaacttgtttctggaggc

SEQ ID NO: 25626 - DNA, 1742 bp, Artificial sequence
  DNA replication origin
aacgcggctgcgcgttgcctggaggccacggcctcgcccggcccctgcgcgggcactggacgtcccgcaggctgcatctggcgccccgatgagcgctcctggacccccgcggcctcgcttccagccacgacctccagggcacggcgccaccccgacggcccagccaaggcctccccgccgaggccgacgccctcgccacgccctggtgccccgaggagtcgccggctcccgcgcgcagagctccccaagcctgggcgggcgcctggatagcgcgaccggcacggacccgcacggggtcttggcagagacgcgcgggacttggcgggggccactccctcctggcgggcggggcaggaaacgcgccgcgaggctgcggggggcgaggggagggaaggggcgaaggaacctcagcctccccaccccagccccgcccccgggcccagctccgaccccgatgcgtccctgaggcctgggtcccaggggctctccgcgcccggtcgccccttcccggagtcgccacgtccagatcttgtcaccggcccgggaccacctcgtgggccgggcggggtgaagtgccgttaggaaggacggtcccatgggatggggggccggggaacaggagacgcacgccaggtcgggagaagaggacggactgcgcagagcagaggccgcagagggtcggcccgggagcgcgggggtccctccacacgctccccgtccccgcttcccacgcggctcccttcggaccccagggcaggtggggacgaagaagtgagtcgggtccccgctgcgggccgtcgtcccctccagccaggccatctccagggcttcaggttggggaaggggctcctgtggcctcctgacctcgggcctcgcaagtgtctgccctggggtaggcactgacttggtgtggattgattgatgaattgactggaagaaggaaggcaccctaggaactgcaggctcttccacttagggcctgggtttcaactcagtccccactcaccaccttttccatgtgtcttcaaagcccctcttcactcgggggtgaccctgtctgtccagagggcttgcagccttcagggacgcagtttccagtttctgggcgcccatatggactctcccctgaaggccacctccccttcccctgggagcagggggcctgcagtttctcccactgctcaccttgaactttcttcctccgcctgtccgggaaaggcccatccggctcatcccaaaggcccagggcatcttggtgaaaaaccccaagggcgacaaacaaaagacctctacgatctggtttagagtagacaaagctcctctttttccctccagcacatagctcatttaagaacaaacttagacactggatactgtagttgggtgaagtggctcaggcctgtaatcccagcacttggggaagccaaggagggaggattgtttgaacccaggagtttgagaccagcctggagaacatagtgagaccctacctctacacacacacacacacacacacacacacacacacacacacacacacacacaatcagctcctgctggtgcacacctgtagtcccagttactagggaggctgagacaggaggatcgcttaagcccaggaggttggggctcttgtgagccataattgtgccactgcactctagcctgggtgagaaagcaaggtccctgtctcaaaaaaaaaaaaaaagaaaaaaactggatactttggccctcgttgagga

SEQ ID NO: 25627 - DNA, 969 bp, Artificial sequence
  DNA replication origin
atgggatggagcacacagggtggaggggttaccacagtcctgtttccgtcgtggttttacttaaattcagcgttacctatgtggtgtccctggacactcccagcagcgagagtcctggtggatggcatctctttcccttctaaccatggccggggccctgggtgacgtcccttctaaccatggccggggccctgggtgacgtcccttctaactaggtccggggccctgggtgatgtcccttctaactaggtccggggccctgggtgatgtcccttctgaccacggacgggggcctgggtgatgtctcttctaaccatggccaggggcctgggcgatgtccctttgggcttcgtttgcatttccctgctgactgaagacggcttttgtgcaggtcctatttttttctgtctttccgtgtggaaattgtgaagaccacccaaatgaggaccacgggcctcttaattcagggcctgtggagcagcggcctgggcccctcccttgggtgtggcagaggccagcaggcgggcaggtgggagggctttagaagggaaaccgggaggctcaggcaggctccgatagaggtggggggctgggtgaggggcctcccaggtgctgtgcttggggaacttggtctgctttcctggtttgtgtaatttggtcccaccgaggcaggccacagactgggggggtgtcatccttgcccaagccctgaccaccccgcagtagcagctggaagggtgtgctgggagactccggtctccagctctggctgttgtccctttctagactcagcctctcctttgtgtctctagaggcgggaatttttgctatttttccatgtgtttcattgagccacagtcacctgttttgacattgtccctgaatgtgaccagcagagccttggagtgaattctggctccctctaacctgccctcctgagtctccgggcaccgccccggcttctgggca

SEQ ID NO: 25628 - DNA, 1271 bp, Artificial sequence
  DNA replication origin
tgaccagaccccaggaacagggtcacctctgcctactcctaagagcacctcaggtccccaagcagggccagggtgcacctgctctccatccctggcacacaggccctggcctgcacacacaggtggtccccagctctgtcccttcaggttcattacaggggaccctaatcctctaggccagcagtgggggtgttgccatgcccccaacccagcaagaaatgtgagaccaggacaggccatccggtccctgggtagagggcctgcctggatggccttccctcccgcacctgccccactgctgactcacctggaaggatccagaagcattggtgggagggcctggggcccccaggagttggagggaaggggcccaagagagtgcccggagttgttagacttaagtgcttagcgtttgtggaggggatgggacagggccctaacagggaggggtggggggaacttctagagggtacaggggcagcagggccaggcggccccgtgggcagggacataagactaaattgctacaagtcaaaatgcgaccagtcaaccctggacaagtccttgctcaaaatgctgagtgtttgtgagagagaggagggggaatgaggtcctatggggaggggaggagggggggaccttctagagggcacagggcgggatggccgggcggcctcatgtgcagggacctggcatatagaaggctgccatgagttgcaggactgactagggattaaccctagacagggcccggatggaacaagtgacgagcatctctgaggtcagaggtggggagggctgcaggcctggggtccactaggtcctggggcacaggggaggatggaggcccggggtccctgaggcctctcctgcagatgccgtggagtggccggccctgtagaccaaaaggtgttgtggatggtcatggagcggagaggggtgatgagatccctgggtgcaagcaggtcaggacaggggaggcggagccaggtctgtgcccacaatgggggttcctggagccgctgctgggagcaagtcccccttactgagtctacctgccatgacagatggggatactgaggctcagagagaggcagatgtttgctgagggtcacagccatcaggaaggggcaggagccatggagggtacaggaaggaaggagagaggtggggagagcctcacgggagaccacaaggactctgctgccaccatagcccagagccagcccctgtcccaggaggacaactgtgctatgggccagccccagggg

SEQ ID NO: 25629 - DNA, 1100 bp, Artificial sequence
  DNA replication origin
gggtcctcgccctcccaggacccttcctccctcccctcccctccccgccgcgtcccggaccctgcgggctggtcccgcgccccgccagggctgccggggtgtgctgctggggagcgtggagtgggcaggaccacgctggacacgcagttcgcgtgcggccgctccccgagcagtgcgcggcgtgggcggaggagcggctccgcgaggagatcgaggcgaacgcggcgcccgcgttgctggaggtcgtggacgcggcgggcgccgagcacctggtcacgctccaggacctggacatccgccacggcgacggctccgcggtgctcccgggcgtgtgcagcgaggcctcgttccgggccgtgaggccgccgagcaagcgcctgcgccggccgtgggaacccggggccgtcccgcgggtgctggtgggcacccaggccgacccggacgacgggcgccaggtgctgacggcgcggggccgcgaggggcgctccccgttcccggaggtcatggccaagagccagcggatggtggaccgggtgttcatgcaggcggtgcgcgagacggaggccttggtcccgcccgaggaggaggtggagtgttgggaagttttctgttgtcccctggactccatccagaaaaagatggccctggtggcagcctcgaagcgcggggagggaggctaggactggggccgcgtcgggaactgagcctgccgggacgcttctaacccgcgcgctgcctcgagtccctccggtgcccaggccttgttccccaagacccacgggtgcagagcagaagcgcggccccagcgcccgaggcctgaaagctgttctttaccttcgcagctttccaagttactataataggtaaaaggcaagggctaacgtcttaagtatttaatcgatttccttatgcagattctgcactcgtaattactaaacgtgagagcccaggatgaactattcggtgcattttttatttttttgagactgtcgccaggctggagttcagtggcgatctcggtgatctcagctcactgcaacctccgcctccccggttcaagcgattatcctgcctcagcctcccaagtaggtgggactaca

SEQ ID NO: 25630 - DNA, 1479 bp, Artificial sequence
  DNA replication origin
gcctggccccactatgagcagtgccgtgctgcagggctgtctctgtcatcccggccggattccccatggtggctgcccactgtgccatgacatcttcaggagttgggccatgcctcccaccccatcgacacctggggagagccttggccattttgttttttaaacctgtagagcacaaagagatgttgccattcccctcattgagacacacacccctcttcccctcctcgtgccaagccctatttttggttcctggttataagctggctttagggagccccctgcaactgcctggtagctttctgctcttgcttttttttttttttttttgagacagagtcttactctgtcgcccaggctgaagggcagtggtgcaatctcggctcactgcaacctccacctcctgggttcaagagattctcctgtctcagcctcccaagtacctgggactacaggtgcccgccatcatgcctggctaatttttgtatttttagtagagatggggtttcaccatgttagccaggctggtcttgaactcctgacctcaaatgatctacccacctcggcctcccaaagtgctaggattacaggcatgagccactgcgcccgtcccactattgcttttgaaaacacaaacaccactgacgcagcctgaacaatataatccgttgcttttagagacctggccctttagaacaaaaagcctacttcattctcctgggatgagcaggggcctctctgcactcttctacccacaaaaaaaactaagcaccatctccatcttcagcagcccctccactcccttcacccgcaagcctctgctcttggccagattaacggctttttgtggctggagatcgcacaagtgctgtgcccagagcagtttcctgtccccatcagagtggtgagagagtcttaggaaatgatcttaggaaacggccctacagtaaaagttccagctggcacagtcatgcaaatatcaccaacagctgcttttcacctgggagagtcagggtgggtgggaccaaagggccggagaaggcgtcttctcaggatcagattgaggagggggatcctcacctgcaggggtgtcctgtattggcatcgacctgtcgttaatccagcaaacacaccctgaagacttctcctgcccatgcggagcctgaccctgtgcctccaaggaaaccaacaattatgatgcaacgtgatgattggtacttcaggagtaccctgagttcagggaatcaatgtgcattgtgggccggggtgaatgggaagggaagggggtcagggaaggcctccttaaggaagctgccagttaaatgaagccccaaatgctgagcaggaagcggccagatgaacagaataggggagggttgtctatggccatactatcctgagcgcaccccatctcctctgatctcggaagctcagcagggtcgggcctggttagtacttggatgggagaataggaaagcc

SEQ ID NO: 25631 - DNA, 1048 bp, Artificial sequence
  DNA replication origin
atggcaaaacccccgtctctactaaaaatacaaaaatcagccgggtatggtggagggtgcctgtaatcccagctactggggaggctgaggcaggagaatcacttgaacccgggaggcagaggttgcagtgagccgagatcctgccattgtactccagcctgggcaacaagagtgaaactctgtctcaaaaaacaaaaaagatcttattttttagagcagtttagagcagttccaggttcatagcaaaattgagaggaagatacaaactatcccaagtgcccccagcacccccaacatgcagagcctgccctgttatcagcgtctccctgggtaacgcattgattgcccctgatgacccaacatggacacattgtaaccacctggtccatgctacattcgggctcactcttggtgtcgcacattctatgcagcaaaacatttttaaaaataaaagcagcacagagtaggtcagggtgctttgcatctggtgacggtaagtacagtatcgttctgggaaacgttctgtttcagttacatatttgaatgtgtgtgctgtttgtcatgcaaaattcttccctaactgtgagttgtggtgacaaaagattgagagagactttgggagttcaagggatgaagaggcacatcaggttagggagagcctggaagggctttttggggtcaggtaccctggaagatagggaaagaagggagaaaacccaacagaggccaagagtattgggggagggattgaggggacagtgaggagtgtggaggatgcccgggagggggcaggtgggtggcagtgaccggaagggtggtgagaccatgggcggggtggagccctggaaggctgtgaggaggggttggggtctgaacctgtgctcctgcttactggatgagtaaaccccagcacttacttagtctctctatgcctgtttttcagcagtgggatgggggcagttatggtgcccgtctgggagggttggtgccagtgccaggtgagtaaattgtgggattcccctggcacagtatatgaagtatcagaggc

SEQ ID NO: 25632 - DNA, 1144 bp, Artificial sequence
  DNA replication origin
gatgactcacaaatgcagcagctgaagcctgagtcagcccgagcggcgggcacgcgcgacgcgctcccgccatgccggggagggggcgaggccgggccggggagcgcgcggggagggggcggccggcgcccgggcccgcgcccgcccgccgtccgcccaaactgcgccacacgccgcggcggggtcacgcggcggccgccgccatcttgtgcggccgccatctcctggcccgccgcgcccgcgactcaccgttttcgtcaaataaagacataaacccaacgctgctcgcccgggactgggatgaagtgaggcgcgatataaacccgagtccgagtccgaggaggcggaggcgaagcgcagcgaggagcggccgggccaggtgccgccgccgagcagcggggaggggctgtcccagcgacgtccgcggtccacacccgtcagcgccggagctgggcgacctggcgcggagagacggcgccgtgagccgtgggcggtcggggagtgcaccttccccgccagccagcggcccgaggggtcgagggggcgggaagcaccgggcagggggccgccccttcaccggactcacctctggaatgttctcgctctgactgaacaacgccgccgccgcgctcaagctaccctcggccccagcgtccgccccccgcgtcaggcctcactgcccattggctggaggcctgccacagctcgctcgtcattggttcgcttgcgacgtcaatcgcatctttccgcgccccttctgcttcctgaggctcaactcgcggcctcggcccgcctccagccccggtctcgcttccttcctctcccctccccccgcctttcccagaggtcttcgcggcgcagcccttgggtctcgcgagacccggagtggccctggtggcggggccggggtaccgggggccgttctttgtcggtttgggccttgagggggagatggtggttggtcccctccctcgccgggtctgggacaggccgcggcgtcatggcgactcccgggacgcaggagccatcgtcctcgaaactgctttcgaggccgtgtttttgcggctgccaccttcggggagaggaacccgaccgcgttctccccgcagcgggcgctcatctccctttcccgttctcccgggac

SEQ ID NO: 25633 - DNA, 1563 bp, Artificial sequence
  DNA replication origin
gtcccgggcgagcagcgttgggtttatgtctttatttgacgaaaacggtgagtcgcgggcgcggcgggccaggagatggcggccgcacaagatggcggcggccgccgcgtgaccccgccgcggcgtgtggcgcagtttgggcggacggcgggcgggcgcgggcccgggcgccggccgccccctccccgcgcgctccccggcccggcctcgccccctccccggcatggcgggagcgcgtcgcgcgtgcccgccgctcgggctgactcaggcttcagctgctgcatttgtgagtcatcgcgcgctctggggcgggggcggcccgatcccggcacccctcggccgtgtgtcgcttcccggctgtgcaccctccggggccgccggctctcgggggacgcgctggggatggggccagacgccccggtcgcgcgcccccctccttcgcggagctgcccggttcgccagcccccgcggaaacgcctcggagcgcggtagccatggggaccagggcgaaggttaaccgagtatttgaatagcgaggaaaagggaggccggggcgagcctggcgttcgctcgcgctctcttgcttaatggcaaattgtgggcgagcgctgcgtttaaggaagtgctgctttgaagtaagccatggttgccgaagcaacgattagttgtagagaacagttccctaggttgcccttaaaaatgaagacgaacgggggtgtgcctgagaagtttgcttatccaggcggggtgggcggcggagagggctcgggttcgttcttcagcacttccaggatggccgcagaggcaaacctgctgattgccctcggtctgatggaatctcacggcggctgaggcagcacagcttgtgttttcttgtcaggcatttccctaccagtcacagcttagtcgaaatggaggcctttttatgttcccgcagattgtactgtgttacatgagaatggctgtttgcatgtgatctcagatgctttttaaggtggagttaagcagaagcataactaggatgtaaaaaggaggcgtttccatccagcgatgatgttaaacctggggggatttttgtgtgttctttccctttttctttcagagctgttgcgcagccattggtacctgtattggggaaacatagcatacaagcaagaagcttacagcctcagtggcgaaaattttttcatgtcagagaccgagaactcttgcagtcgtttatgtcatcccttcttctccagacagaagataccaaaaagttgcaatcaaagatctcttcatcttattgataaagccactaataagccaaaatgtctgtcaatgtcaaccgcagcgtgtcagaccagttctatcgctacaagatgccccgtctgattgccaaggtaataaactgctcttcaatttagttgatagctctttttgtagaattttgaagtttgcatttgtcaggggaaactgcacaactaaaattcttatttcctttaggttgagggcaaaggcaatggaatcaagacagttatagtcaacatggttgacgttgcaaaggcgcttaatcggcctcca

SEQ ID NO: 25634 - DNA, 1163 bp, Artificial sequence
  DNA replication origin
tcgccgcgggggcggtgcagagggctggatagtgctggtcgggtctccgctgactcccgcgggctgcgggttcctcctgtcccgagcgcgccggcaaccgcgaaagagccgagaaacggctctgggcgacagccagagccctcccgctgagttggcatttacacactacaggcctgggttggctggattacagatcgagagcctattgtgcgcaaaagttgcggttgcatccctgggactgcgctgcaccgaatggagccccagcattaattaatgacagggccggggctacgggaaggcgccgggctcttgcatccttaactgtgacccgggagtcaggttctcgccaacaaaccttcccgtctccggatctgagcagctgcgggctgggcgcggaccctgagggcagcaggcgcctcttgccctcaaggagctggtggtcagacgggtgacagacccggacccagctaaatgccatccggatggaagagtgcaataacgagggtggcacaaaggggatgggtttgggggcgaaatgaatctgtagaggaccccagggaccagcttccaaatgcctgtagggggtttataagcaggcttttcttacagtcagtgcgttgctgctggaagactggaagcatctctgggtgccagcctcgggccaggctcggtagatgcctgcaggctggaacactggaaatgctacctgacctggaagccttccttgcccattcacctcttcacgtgctcggtgcctctactcagctcctggccagcggtggatggaatccatgggtgcagggtccgaagagggagagtagtgtgagatgggggtgacacgaactgttaccgagagtcgagtctaccttgtgggttcatgacatttgttacctcatttagcctcagggtaaccctatgagatgggcagacacacatgcgatccgaagtctagacaggtacagtgacttggctaaagtacacaggttggttagcgacagagctgggattctaacctagctcccaaagcttggataataggtaagcccttgtagtggggggctatgtcatgcttgctttccctttggtccgttggcatcccaactctcttgctatgtttgagacatttcttgctccacgaaatatatgtttgttgttgttgttgt

SEQ ID NO: 25635 - DNA, 1220 bp, Artificial sequence
  DNA replication origin
tgccggggtgcggcggcggcagcggcggccagcagggcggaggctgaggcagcaagctcgctagagagggagaagcagtcgggcgcaggcgcctcctccgcagcccgctccatggtcggcgcccacagcccgcggcggcctgtcttgcgctccacttccttcacatcctcctccgcctcctcgttttcaggcgccgccggcggcgctgtgtggaggcccgcgagctgaaattcgcggtgcgacgggagggagtggagaaggaggtgagggggcccaggatcgcggggcgccctgaggcaaggggacgccggcgggccgaagcgcagcccgccgcccgcaggctcggctccgccactgccgccctcccggtctcctcgcctcggccgccgaggcagggagagaatgagccccgggacccgccgggggacggcccgggccaggcccgggatctagacggccgtagggggaagggagccgccctccccacggcgccttttcggaactgccgtggactcgaggacgctggtcgccggcctcctagggctgtgctgttttgttttgaccctcgcattgtgcagaattaaagtgcagtaaaatgtccactaggaccccattgccaacggtgaatgaacgagacactgaaaacgtaagtaacctgggcgttgtagttggcggaccttcggggtggcattcgtgctcctcgggcagtgccttgcagtcgggtgttccccccagccgaacgctctggaaatagagggcaggccgtagtcacccaggaggcagccaggtcggaccgtttcctccagaagtctgccgtgtcccgctgttcgcgggcgggtctgcgaagtacatcgattatgccggcagtctagtcggttaataaagcccaggagttgcagcgttacggatcggtgctttgagaggccaggttgccgcgcaatggattgtgcaaacgtgtgtgtcagatcactgcagtggtcagtgcttattttagccgaactctgcttttaacttggtcaggcagttcttgagagactgtcacattaataacatatgttaccggtgctgattaagagtaatcgattgggtcaagtgggcggtctcgttctttaagatggtctggaactaaatttaatcacagtcactaagtgtccactgagggatctttgcggtccccttaggaattccaaaacactagcgcgcagcctttattaaggcag

SEQ ID NO: 25636 - DNA, 2695 bp, Artificial sequence
  DNA replication origin
gcctgcccagccatgccctcagccctgtgttcacctcggagtggggcccacaccaccccagcgattgtcaggctggctctgcccaagccgtgatgagagggactgagccagcaggaggggctgccgctgttgagcgggaggagggcagcactgacaaggccccctgggggtggggctttgctggtcaggtccccactgggtctgcaccccttcctcactgccctcagcctcccctttctggaggggctcacttcctgtgctcacctcgggcccttcgtccccgcccttctcccaagactctcgattgtacagctcggcctatcctggcccgggccttcctagcaaaaggctaagccagaaactggccttgtgcccaggctggtcagccagggagggcccagtctagggtccaaaggctggatgcagaagtccccccagccttctgcaccaggggacctgccccctatgcccctagcctaccaggtgttcactcagggaggtggacacttcaaccctgcccttaggaccccccacaagccaagcccagcagcagattcagggatgcaccccactgctgctcctgggccccagtgtctaggttggcaatcccctcgtgtcccaaggaggtgagagcccagtgatccgcagcttttagtgtccaggtgggcatggagatgcaggatgaggcctgtcccagaccctgatccccaggggtggggcagaggaggccctggccagcaggtggcagcacaggctgcgtccttggcgcttaggagctggaggaaggtggggagcaggattcctagcccccgctggctcacctatccgcctccactccctgagctggccgagcccctcagggtgcccaatcatggtaggagccctgagccagaggctgggcagggacagtggcaactggcaactagggtgagttggcgggggggttgcaccagggaccagggcgaccaagccctaaacagccccaaccccccttctgcccagggtccctaccttgtggttccaccttgaggccaaggggctggacacccagaggcccctgaagaggagcctgccagtaaaggggggaccagtggctccccagggctgctagagggtcttgaggactgagcccaatgaccagtggagccaggggggctgttcagcctgaaggccgaggctgggagggaaggaagcagggaagagaagatagagagtaggtgttggcggggtaggaaggaggcagggagatgcctgcatctgatagtgttgcagcttggaagactggaggaggaagccagttggagggaccggaaagctctcaagtttctgaggtcaaccccccacctccactatccctacctcccccaccctgcaggatgggcctgaggaacgtgccaggctccacacccaggcctgaatgccctcagatgctcaggcctggagctcctccctcgctctctcccatgttcctgcctgcacagcccgatagacacgagggaaggggcccatggactaggtagggcaggcagaacagagtggccacctcctggctcttgtcccatctcacagaaggcgaggcccacagcaggcccaggactcaagactcctggggcctggctgctgcccttccccctcccccctgggaaaggagaggcaccactcagacgcaggcaggccaaaaccctagtttatttcagcatcagcagtatcttagccatcaaaaaaataaactctaccaagggtgacggaagtctctacagcaaggctaagggctcgccagacggcgaacatcaggggtgcatggtgggcactgcccaggcaataagttaggaagcagcagggctggtgtcgggtgtgggccgggcttcatttctgggcaggcatgaggtcgtcgatggcctggccctgctccagccgctgctccatctcgatgagcagcttcactccgtccaccaccatctgcaccagctccacctctgagaagcccaggcggtcagcgttggagacgtcgaagaccccgcccaccgcagccgtgtccacaccgcctggggagacagcaagtcagggcggaggaaacagggctgcccaaaggccacgggaagccgcagcacctgccctgctcacctgtgcctcgcttctgaagtcgcagccgcttaagcacctccgagaacttctcatgcttgcccaggttgggcagcttgatatgcacacctgcccgcagcccggtgcccaggttggatgggcaggtgaggatgtagcccaggtgagggttccacatgaactcatagtccttagacttgaagagagtttcaatctgcagacggagaagagggtatgagggagaaggcctgcctgaaacccctacaggccctgagactccccagtgccggaaatcccccggggggactgatgctggggcacccacatccctgctggggccctggggtctgggcctgccccgtccctggcacctgggtgaggccggtgcagaagcgggtgaacacctccttcatgttgccccccttctgcatggagatgacccgcaggtggtcctcctcgttgacccacaccaggaaggtcttattgtcattgtgcctgcgggagggctggtctcagggcatacccagaaaaaagccccaggccgcccccagaccaaaggaacttcccaagtccctgaggtgctgctccctgccat

SEQ ID NO: 25637 - DNA, 1892 bp, Artificial sequence
  DNA replication origin
gcgccgcggggtggtgccgccgctttgtccgccgcccgcagcccccaacaccctggccgcccacccgagctgtcccctcgctgggaccccgcgcagcctgcccagtcccccgcccaagacctcgaggccgaaacctcaggtccttggatatctggatcccctcgcacgcccttgcctctgggcgggaaactgaggcggagagcctccgggcactcgaggacgcttgggttcatccgcatcctcgagcctgcccgcctagtccagccagcccccgcggcggcggcgaggggccgggcgaaagctttcggggcttccgcagcaggtacggcccccgccccacccccggccagtgcgagctggcccggagccgccgaccttcctcaaggtgcccgcaggcgtttcctgggcgatcctggtgcaaagcgaaggcgcgcgggaagcgcagtctggctgcggcccagcccgggggcacccgcggtgccctgaccttggacaagtcctgggtctcggggggctgcgagccagaaaccacggggacgctgtggccttaagaggccgctggcaagtgcagcctcggagtttccagaccccaaccctgggccctcttcgcaggggacaagtttacccgacccccaaaggcagtccccggagacttcaggcaaagatgggaggaaacgctaataaacaataagcataagtgcgattaaaaaaaaaaactgatctcacgaataaccagaatcatgcaaattaagcagtgactccacctgcccctacccccaacactcccagatcgaccccagccattgctggctttgagctggaatgcgggaagacaggcgtccacacgctgcctgcaacttaaattgctgcatgctttttgcaagataatttggcagaatctattaacgttaacaatgttcgaactccgtgacccagcaatctccccttctaggaatgcagcccttagaaaggatgtctcagttctctccactaatggaccaagagatctgtggagggaaaaacaaacataactggatacaacccgatgccccatcaggcgggagtggccaagggtagggaggcatctgcttgctgtggaatattatgcagctgttaagagggggaagtggaggatgtggggttaatatccatcagggaccctcatctgttgctctgtgaataaagcaaagaaggggggaactcttatctgtgggtatatttgatacaaatccctccagcagtggcacaatgagcacctaacaggtgccagccgctggggatacagcaggcagcgaggtacacagcgcctgctgctggaagaagactggccatgagccagcagcccaacaaaccagatgacatcagatcggtgctgctggggccagggggacacagagcagtggcgttccaggtataagggaccccgaataggtgcctcagagcagaaggcaccagagccaaggcccaaaggcaggggaagcctgttcgcctctgcctatgtgagcatcggtgtgggggccttttctcctgtctcatccccatggtcactgcagaggagacacatgcctctttgctccttggcatgcttcgtcctgttccaagccagcattttttagacttaataaaaccaacccatgtaaaaaggcaaacggcccctctgggctggccagacagcaggtgtcccttaagcctggaattcctgcactctgtgccccgtgcagcctcttcgcccagttttagaaatttctgcagctgcccacctgctaccccacaaaacctgaagggcttaagtttctgtttctggaagggatagctgcagcccctggaggcagacttggggggagggagagacttgggggccacactcaggacttcctctgtcttcagcaact

SEQ ID NO: 25638 - DNA, 2131 bp, Artificial sequence
  DNA replication origin
agagggacaggggctgactggggatcacagagcacagtggggtaggaggctgtgctgcttagaggggagggactgcagtcacgtggtccctgccagggatttgggcacagcagcctccccagtgggcatccttcctgcctgttcccacctttcttcaaatcagccattggttctctgaagccggtttactggctttaattcttaattaagagatagggtcttgctatgttgtccaggcagaactccaactcctggcctcaagcagtcctccctcttcagcctcctcagtgctgagctttgggggtttattggctttaaatcctaatcccactttgacctcactggctgtgacttcaggcaagttatttaacatctctgagtttcagtttccccatctgtaaagtgttccctccctcctaggatcctggggagaagtcaatgagatggcacagctgggcatatacagcatcagctcttgttaggggagccccaatacaaactctgcacagggaatcatcagctgaggtaggggggattggttctgcttgaggactcaggctggggactggggcaggctcagatggagcaggtgggcagggctgaggaggctgcctggaggaaggggcactggaggagttgaccagccagtaatagacagagaggcaagagggaagtcggaaccaagggaaaccaccgccgagtcaccaagtcctaccttaggcccttataggcacccggccctgactccacaccaaccacagctgagaggctggggaagagaaacccaagagaagtggaaagtcagaatcccccaggggagaaattagggggtgactcaggcgggtgcatcatcaagggagagaagcatccgctggaacacaggttcgggagctgtggagggggctgtttcaacgttgagagcagaaggcagggaggctgtaaggcagaagtagaggcagctggtggccagcgtggtggccccacagggacaggagcccacagagagtgggaggccatggaaggcctctcaccagcttactcctgggggctctcagccgcagctagggcagggacacagaggggctgaggttggacccctaggtttccatgatggaccctgagaagccaatgcaagggccacaaacagcctggcctggcctgccccagaggcgagagagttgagagtgctctacaggctgccagggctccagaggggagctcgctctgcaggagcctggccacctcatcttaccaggctggagtggctgagtgactggggagggtgccctagggtcattgctaactggcttgggttcgggcgcaggctaaaccctaggctgggtaggggggtctctgttcctctccaagctctggtcctgagagctaagagctggaggaagaaaatccgtgtcccctgcccccgctcccctgcacacacactccacagaggagccagctgggaatggtgttgctgagacagaacgccactcccgcttccctgttctgcccatcctccagcagcacctcctccagtctcctgcccaggctgctcaccagacccaaaagtgggcccaagtcatccagttctcattatgccttggttcgcaggaggggacacaggacccctactccctcctagaagcagctctgcactcaggacaacgtgcccccgtcgggggaggcagggcctgggcggaaggccacttctgcagacttttccaggcccccatctgctgcacagagctctggctgaccctagcccaagccttttagaaccgccccttgacctgcgattccttttctggaattcattttagggcccagtcaggggtgttcccagagcagtctgcaataacaaaatgtctatggcgaagtgtcctcatagaggactgggcagtgagccacgggccagccctctggtgaacccccaggggccgtcaaaggggtccgggacagcagtgacagccaggccttggctcctgccgcccttcaaatgtgcctgggtgcgacggcaacccgcggccggcggggcggggggaccttttgtttgtttgttattatttgtagagatggtgggggtctcactacgtttcccgggctggtctcgaactcttcagctcagaagaacctc

SEQ ID NO: 25639 - DNA, 1830 bp, Artificial sequence
  DNA replication origin
cggcctcccaaagcgcgggatcacaggcgagagccaccgcgccggccggccgccatatggattttgtccagtctttcgatcttccagcgaccagcaaatgtaaacagagcagctcacatgagggaagaagtcgcccaggaaacgtcctctgggaggggcgggaagggcagcctggcgctcccaggatcccgtgcgcggagggggggagggggaggcggaggcggggcgcgacgtcatcagcgggcgcggagccggaagtgttgtggccgccgccgccgcgcgtcgcggaggcacgtgtggagccccggcagcaggagcgtcgcaggtgagactccgcggggtacagggtggcagggcgcgggtgagggtgacccgggccgggcacggcgcgcagggcctgtccctccagcctcgcatgggcggcccccgccggcccggcctggccccttgttgcctctgcatcggctgggcggtgtttgcgtggacggccagctccgcgtccccagccccttactggggagccctgaatcctctgtcataccctgccacctagcccccgtgggggagactggggtgaggaatcaagcctggcttggaggtgacctcattgaccatttgcctctcccccgccggtggacacctcgcaaaggcgcttcctcatctcacatcttgggaatgggagtcaagctcctggagaagggtgatgggagggtcgggtcctcactccgggaatccttgggaccgaactccgccattgccaagcctcagtcttttcatctctgatttaggctcatagtccctgtctcttgtcctagaccaagaaaggcttcagaggccaggccagagtgcagcgctattgggctccctgtcaggcagtggcagagactgaggctgagctagccacaccccgcccatgcccactgctgggatgtaggcctcgaagccttctacctagaccctaggccctcatcctgcctcctgacttgctcatgcctacacacacccctccccaggtccttggcccttgccagacattagcaccatgagcttcgtggcatacgaggagctgatcaaggagggtgacacggccatcctgtcactgggccatggtgcaatggtggcggtgcgtgtgcagcgtggggcacagacccagacccggcatggtgtcctgcggcactcagttgaccttatcggccgccccttcggctccaaggtgacgtgcggccgaggtggctgggtgtatgtgctgcaccccacgcccgagctctggacgctgaacctgccgcaccgcacgcagatcctctactccacagacatcgccctcatcaccatgatgttggagcttcggcccggctctgtggtctgtgagtctggtgagttcctcaggctgcctcagtttaacgcagaaattgacacaaaggtggaggtcagagcctccagcctgcccttcctacagacacatgtggctcctcagtttctattttcacatctttccgggatgctgacagcagggagtgaaggtggaggcagagaagcccgttaggaggctggtgctgtaactggagtgagaggtggtgggaaatggaccaggaggagctggggaggactggtgctctagtgagggtcctgcttgccttggtggggcgtggccagcttgatgcttggcgctgtcctaggtactgaccgtcaacctctagtcctccgtgctgatggtgaagcagagagagttgccccttctggaaagaggccagggctaccccgaggagctcactgtaggtggggagccttccccatcctcatccatgatcagatcctcacctgctaccaatg

SEQ ID NO: 25640 - DNA, 1553 bp, Artificial sequence
  DNA replication origin
aggtgctggggccgcccagtgtggcgattgaagccaagattggccccaggcgctgatgcatctaggttgttggtggcgtgttcctcccgggcaggagagctagggtccaggttcacgaagagtgcctagcactgccatgctggctttctgagggctgcaggtcaccatgtccctccctggggtgtctgggtgggaggggtggagagcaggacttagccaactccatcagctgctgctcctgtgcatcctgtggtgggtgctggcctctccgcccctgccccactctcgcgagagagctcaatcaagcagcaccttctcctggcctcctcagatatgccaggtcccctcctaggaaccgtgaactagagagaccaggttcctgccctcgaggagggggacacagcctaggtgagcatctcagtgccgctggttgctgtgaagcctgtgagacagggctgcgtgtctgaggggtacccagagtggggactctccagctaggccaggcagggaagacctctctgaggaggggacatttgagttgaaaatgatgaggagggacctacgaagagccaagggacagctctgcaccaaggaggagccgtgccgaggccctgcagttggagcatgctgccgagtcaggctcagtgggggaggcagaggggctgggagtgaggttggaggggaagcgagctccaccccggaggctaacaagtctgacttgccccttagtgggaagggggcatggccaggctttgcagaggggcgaggcagcaggctgggggcacccaggggaggggctggacaggtggggagaggggctggcccctgaaaggaatgtgggaggtggcaggacgtgggacgggatagagggagtggaggcacctccatgggtctggcccaagcacttgcgatgctcagcgctatttgggttccaggcatgggtggcaagtgtgcagtggctgctctagcaggagtctccagtggaggggcctggggatgggagtggcatcaggtagatggcccctgaagctggagtgggaggagggatgcaagccttgaccctctccataagacaggaagtcaagcagaggggccatcttgagggaagctggggagggaagctgggggcaggtgcgctggggaggactggggccgtgtggctggtggccaggccctgcgtcctgagtccaaccaggccagggcagagccccagcccctgtgtggtgggggcaggtttgggcaggcttggtgggggtgggctgtctcaaggggaccaaggagcttctggggagaggtgggcatgaggaccggcagggtgggccactgttgacggggattgaggaagtgatgggccatgcatggaataagacagggctgagtgatgggatggcctccctgtcccccttgcacagatttccccggaggctccaggcagctgggctgctctcattccctatacctgcgctaggcaggatagggcagggttgccactggcctcgcctgtgcccacaacagacagcacggcatacacagcctgtcaaccccagctcacc

SEQ ID NO: 25641 - DNA, 1309 bp, Artificial sequence
  DNA replication origin
tcagcaggaaccggcaccctcaggcgtggctgggtgtacatgagctctgtgcgtgtgccaccaggatcacccatgttgggggagtcagggccccgctgggtgtaccctttacctggagcctggcacagaggcagggccttcgggtggaggggcatgcccttgctgatggccagagatgaaagtgagacccagaaagagatcaggaaactgggatgttcagattctcccgggggcccctccaactctgctcctcgggcgcagccggcatttctctgcacgtggggatgtaaaggaaaatgaagacttttcaaaagcagagcccagagccagggccgggcacactggaggccctggaagaacttcaggcagcgggtaggggacagcgccaggactgccagggcttcctgggccccacaagccaagggaggtttggaggctttgctgagtgcccctgggggcagcagtggggttgggggaggggggtgggaaaggatttgggggcagtgaggacggcaccaggggatgcgggcacccagggttctggcctggctggcaggaggaggggtgagccatgggggcggggtcacagaagcatgggcagcagaacccactgggcctcgccgatagctgcttattaaaggtgctggggtacaaaaattagctgggcgtggtggcgggcgcctgtagtcccagctgctcgggaggctgaagcatgagaattgcttgaactcaggaggcagaggttgcagtgagccgagatcgtgccactgcactccagcccgggcgacagagcaagactatcacacgcaaaaaataaaaaatggaaaaaaaaaattaaaaaacgtgctggggatgtcagggtgcaggcgtggggcagcgaggcgcccagctgccttcttgagctgtggtctggtctgggcattgcctgcagatggccacagcaggcccagggtgctcttggcagcctggggctcctgggcgtgtgtgccccttcctcttgcatcctggtttcatctccccggaaagggcatcttccagcccttaatcctgacccagcccctgaaaggaaaagcaggcatcccagcaccaatgtggctatgcaggtggtcctgtggagcaggccatgggggcctggggaagagtgtgcaggctggacggctggagcaaggacccccaggttggagcctggcaggcaggtgagagtctgcagggccagatcccacagagccttggggcagcgggcccctacaggggcaggactgcatcctggagatcagtggctcccacagagagcacagcaccagtccca

SEQ ID NO: 25642 - DNA, 1260 bp, Artificial sequence
  DNA replication origin
ctgccggagctgcggaagtcgtggaagcgtcggcgacgcatcgcgcgatggcgcgggcgggacaggtgagcgaagcgcggcttgtagccttttccctctctcggggggacgagtggggcaccacctccgcgcggggctccccgctgggccaccccttcgccagcgcccagccccgtgcggcctgtcggatcaggcagggcagagtcggtctcggcgctgtccccgcccctggggtcggaagcgaccggggctggccgggcctggtctctggtgtctccggccgggcctcggttcccctcctcccccggcttcccccggccgggccgagctcccctcgcgcgcccattgtgaggtcacgtcctgcaggcgcgccctggcacccgggccaagacgcccggagcggctgctgcagccagtagcggccccttcaccggctgccccgctcagacctagtcgggaggggtgcgaggcatgcagctgggggcccagctccggtgccgcaccccgtaaagggctgatcttccacctcgccacctcagccacgggacgccaagaccgcatccaattcagacttcttttgggtaaagggccaagagggaagggcgaggcggggaggaagcagctcgggccgccttccctccgtggcctccaggacatccgccggggatagattatgcgtttccattggttacccaccttgagcgagccgtttgatagaaaccaagagcttgaaacgtgcattaggccattgtggactcccagtgggaggcgagtgaatgaattattcatagttaccacgttttcgcgggttgtttttttttgagagagtggagcatgttgggggctgaggaggtgttgggcctcgaaagcccaaggtggtgcccttcagcgctgtcccggtcgctcttctttacctgtggggttttaatctcttcagggagacttctgtgagggaagatgtgtgaggagctaaaagggtggggaggggaagtgcacaaagggatggagagaaacgaagaagcggggaccttggggatgtctgagagccactggtttttgttctggttctttcttttgcttagagtttctggaaactaggcatagctgtgtggcggggcggggtactgttagtgttcggaaggttacaagagctactgtttcacctttcataaaggtgccctgctggttccaaatagtttgtgtcgcgtacggtgactcacaccttaatcccagcactttgggaggcggaggcgggcggat

SEQ ID NO: 25643 - DNA, 1456 bp, Artificial sequence
  DNA replication origin
ccgcgccatcgcgcgatgcgtcgccgacgcttccacgacttccgcagctccggcagtcgcccgggcccggcagccccgcccctggccgaacacccctaaacccggggacacctcctccggcgtccgcgcctagccgccggcagcgccacgcccaccgccagcggcgcagcgaggcagcctggagtgaccgcgaccaaggagcggccgcccgggtcagcccgcgccgcccgccgccccctcaccccgtcgcaccgctgggaaagcgcacggtcggccgcgccgccgcgcttcctcgggcttcgcgaccctgccgtaaagcggcccctcgcgccgtcgcaatgctgccgtgcgccgcgggagccagggggcgtggggccatggtggtcttgcgggcggggaagaagacctttctcccccctctctgccgcgccttcgcctgccgcggctgtcaactcgctccggagcgcggcgccgagcgcagggatacggcgcccagcggggtaagcaggggcctggggacattgggccgggaggggtgaccggaagggaagacaaacccgggcctcggggccactccctgttctgcacagccgcctcaggcctttgtccaggtgctctcgcgtcctatcccgaacagtcccgcagccccgaggctcccgcatcaacgccctcagtcggatgggactgagggtgccgccgccaccacgccggggactgttgacagccagaacctttaagcgtaacagagtcacctggcaagtttgtacctaccttatttgttcccgagaatgattattttttatttttaaagagctcttggcttaccgtgcgttttttttcgttgtgtgtgtgtgtgttttggctttgttacaattattagtgcttttcttcaagcggcgagcactttatcatcgtacttttgtagcacttcacgttgaatagttgttatttgcaaactatgtgtgggtatatgcatgttactggccaaagatccgcaaagaatgtctgtagcaagaatgtctgtggcaagcaatttttataagtggtacttttgggagggatgttttgtttaagggaggcctaggccttgattccgtctgtcagatgaaaatgttgactaacggtgtggaatgggctggagataaaatattcaagcaaagcatgcaaataccaaacaggctaatgaaggaggctggaaaacttggtttaaacaataattaaagaagtattaaaaaagtgttaattaaaaattggacgggctccgtggctcacgcttgtaatcccagcactttgggaggccgaggcaagcggatcacgaaatcaagaggtgagaccatcctgcccaacatggtgaaacgtctctgctaaaaatacagaaattagctgggcatagtggcgcgcgcctgtagacccagctactcgggaggatgaggcaggaaaatcgcttgaacccggg

SEQ ID NO: 25644 - DNA, 1763 bp, Artificial sequence
  DNA replication origin
tactatgtacaggggcatggctatgtgagagaccagggtgaactcaggaacagataagggtgttcagagcacaggagaccaggaggttggcagcaccaggccctgggggccttgttgaccaacccaaggaatttgaagttgctgcagacagtgatgcgtggcagcactggtggatgaattggccttttctcctttcccccaacactccagggtcattcctgcctgaggactcctgccctcagagctctcctggggcttttatttattttgttttgagacagaatgtggctctgttgcccaggcttgagtgcagtggtgtgatcttggctcactgcaacctctgcctcccaggttcaagcgattctcctgcctcagcctcccgagtagctgggactacagacgtgcgccaccacgcctggctaatttgttgtattttagcagagatgtggtttcactgtgttgcccaggttggtcttgaactcctgaaggcaatccacctgcctcggcctcctgaagtgttgggattacaggcgtgagccacctcgccggcctctcctggggctttgaacgcctgcctccctcctctcatttgggtctcaggtcacccgcctgcctctgagttcacccctgaccacctagactctgcctgttccatcatctttgttccatctctgcctgttccatcatctcggcaagatccggtatttccttatgtgtttatggcctacttctcctcactggaatgtaaactcttagaaagcagagatcttatctatcttgttcacctatgcatccttggctgttatgaggatcatgggagagcaacaaatatttattgaggaaataaaagaacaaggtaataaagccagaacaaagtggtggcagtggagatggattcaagaaatactgagaggccgggcatggtggctcacacctgtaatctcagcactttgggaggccagctgggaggatcacttgtggccaggagttcgagatcagtctgggcaacatagcaagatctcctctctgcaaaaaatttaaaaaacattagctgggagtggtggtgcacacctgtagtccctagctacttgggaggctgaggcaagaggatctcttgagcccaggagttcgaggttacggtgagctgattgccactgccctccagtcagggtgacaaagataccctaactcaaagaaatattgaggaagtagaatcttttccacctgttgtagtagggcgtaagggagcggtgcaggcatcccaggtttctggctagggttgtgggtgagcagaggggacagttactgggcgcagcggcacagaaagaatgagcagtcgatgcttggcggtgcccagcccagtggctgaacttagtgacatccaagctgcagtctggctgaaatcactaacctgaaagtggtatggagaaagtttgtttgaccctgactcagtgcctctccccgggccaaccctaccgtgttacctaggagctccccctttgtctttataaatgagataaaagtaaccagacctccctggaaaaaccgaggagcacttgcttctctggtgactgcggggcctaactgcagggttcacaaagggctgctggtgctgggtgataacatcggaaaggaacagcagttcacaagatggggctgggggactggcccaggaacccctccaggttaaatgatgcctccgggccccgcacttgggacgtctgcaggcactgggagggtttttcccaagccgctggcagcag

SEQ ID NO: 25645 - DNA, 876 bp, Artificial sequence
  DNA replication origin
gcggctcctcgcaccagcagcccagccgacccagccagtcccgctcggccgcctgcgccgctcccgccgccgaaaatggcgtctcagtgttgctccccccggcgccccgcctcgccccgccccacaatgccgcgcgccggcatgacgtcatcgcccctcgccccgcccggggctggggaaactgaggctgggtggctccccgcaagcgctcggcgagctggggactggaggggcgagaaagttgtttgggtatcaggtgggcggtcacagggaggagggtgacggtgcaggacccagcgggcctcccggttgtaacgcggacgggggtggggcgctcggggcagggcgcggctcgcggggtgggcggccaggccctggcctctccgactccgcagccgcgatgaccgagcgcttcggcagcttcccttccagccggactgtgggccctaccagaatgcggccggggacggtgcaggcccggccgcagccgccaccactgggctcccgccccaccccactcccaggcccgcgagcttcatgcgctcgtttcggtccccccaaaacccagctaggaggccttcgggaggccccggaatcagatgatcccggccaggcctttctccctcctccaggaaaaccgacagcctttggtcgagaccctgacctctaaccctgcgccctccccttctcattattccctctcctcggggcttttggaccctcgtatctgtacgaggaaactttccaggcgctccccctcgacacaaactgcgcctcagacgggcaaaggggaagggccggggtgtagactgtgagggtgggagacaacccccctctgtccccacgcagccaccggcgcatctccctggctgcagg

SEQ ID NO: 25646 - DNA, 1389 bp, Artificial sequence
  DNA replication origin
cgggtgccccgccgccaggccaggtatgctcctggcgcggccccgtgagcctgtacgctctgtctgtgaaacgagggttccctgcattggactaaagcgttcagagcatgcctgcctgggtctctcaggtgttaaaagttcacgtagttttaaactgtgagctgtgaggaggagagatgtttctcagtagctccttaacttttaaactaattccctggtgtcaacatgcgattcccacgttgtcttaaactccacgtgaacagagtggcagtattttttcatcggtggcacctccgagcacatctgctaggctcacttcccacacagggccggaccccaggccctggacccacaggcccagccagccacctcctcacgggcctgacctgccagcagcggtgtggctgggaacctcacctctgccaccctcaggtcagcgtcatccccaggacccagggtgtgctgtgcctgcctgagcttcagtgctgggtggagggtgaggggtctcctgagcctccgtgtcgggtggagggtgaggggtctcctgagagcccagctggggtctgctcacgccacaggcatttttgtccctgcagcccaggggagggcaccctcttgtcaggtgcctgagtccctgcggctggtcttggggatgagcctggagacagccagaagccgggaggacaggagttggccttgaaaatgggagtctcccgcttaccgcacggaagagctgctgtgaggtggaggcgggactcgagcgtgctcaggaacgggacgggagccgccctcattctccagcgtcctccgtgccaggcttcgtgcaaatctgatttgtgcaatgactccccctcagcttccaccccgttggccttttcagtgaagcccacactccccgatacccagggacacagaagccttaggacaccctccctgaatcccccagctgtgcccagcccagtgactgctgcgggatgacagcacagtccagccttgcgggccaggggaagggagggggccccacggccaccgtgaccacatgcaaggttaggggtcagatgtgctttcctggggaaatgacttcctttcctggatccaatctaaaggcccgaattttgaaaagaaagcggcaggcgggctctgaagtgattccgactcccgtgcttaagccgcgtgaggctctcccaggcctgctggggccccgcccaccgctgggctgtccacagccaccctcctgccagcttcacgatgtccccatgactgtgcagcccctacataacgtcaccccaacaaaaacacgctgcttgaccggttccacctgcttccgagccttccagcccagcctctctccagccaacaggacggaggaagcccagggccccgaccttc

SEQ ID NO: 25647 - DNA, 1073 bp, Artificial sequence
  DNA replication origin
tgtgctcagccagcgacccctgggggcctagctctgctgagggccggctgcctggtggtggggttcgtaccctcccacccctcctgctgtcagctgagcccagcctcacttccccctccctgttctggaaggagcgagggcaatcagggtgagaaggagggagacgcaatggtaggaacagcgcaagaggcggccactgccccacctcaacggaaagctgtcccacacaaagcaggggccgcccacctgcccagaccccacggaaggggtggccactcaccagcctccaggcctccgtgctgccgcgggaactgcacagccaggcagagctgcagcgccagctgggtcttccctgccgagctgcgtccggccagctcagtgatgccgtccaggggcaggccaccgcggagcagcgcgtccagcaccgggcagcccaggctcaggcgctggtgctgcgtggggaaccgctccttctgctggtgcagctgcagtgctaaagggcagggatagtgtcaggcctgactctcctgggcctgcgggcagggctggggactgcgggaggcatggtcagcctgcctgtgccaggtgcagtgtggctggagcacaggtgcctgcggtcatgggggtgagcaaggtgctgagggcagggaggggggcccagccgggaagggcgggtgcacctgagatgcagagtcagggggagccccagggccaccatcacatgcccgcagggatccccctatggggcaattgcagcaccagacgccttcagccaaagcttccagagagccccgaggcgctccctaacagcctccatgtgaagaaaaaggcacagctctgtccagctgggatgccctggggtgctgaacagttctcaagcggctttaatgggctcccgcaggcgcgcacacatgcacaccacatgccgtcagttctctgtgacagataccattctggagcaatgctggtctcagcctcttggctaaagggccttggatgagccatttgacacagcctcctccacgacaccgaagcccctcagggcaaggctcaaggtgggacatgcggtgcag

SEQ ID NO: 25648 - DNA, 1195 bp, Artificial sequence
  DNA replication origin
agagccccgaggcgctccctaacagcctccatgtgaagaaaaaggcacagctctgtccagctgggatgccctggggtgctgaacagttctcaagcggctttaatgggctcccgcaggcgcgcacacatgcacaccacatgccgtcagttctctgtgacagataccattctggagcaatgctggtctcagcctcttggctaaagggccttggatgagccatttgacacagcctcctccacgacaccgaagcccctcagggcaaggctcaaggtgggacatgcggtgcaggctgcgctcttggcctggggcctgggccgggaggagcagcccctcccttggagtctgcacactgccttgggcaccccgtccaggtggagcaggccaccctgactgtgaggcctgcccagagccctgcccacagcaccgtgtgtgtggccgtggcacctgcccaccacggcagccccaagttcagcacgttcctcggggcctgggccactgagccacctgcaggggagagagggccctgctcatgccaggaccccgctgcctactagggcctgctgagatgcagggatggaaaccttgtccgtccaggcgcatggggttccctgggtacctccttcccctgctgagacctggtttcccacacgtggtggtgggaccgtggccagggccccatctcacaccgttcccaccctgccagagcctgaagggctctgggtgctgactgccaaatccacccctgcttcctgcaccccctcctctggtccatggagcaaggtccccaggaggtcccacagcccgtgtccacctcacgcatcttctgacccgatgctgtgaccacagccccatgggtgtaggacaagcaagatgggaactctggggctggagcagctgccacacgccctgaggctggtccctgggtgaagtctgcacagcccctgccctgcaccactgggaccatgatgctggagccacatgtcacccctggcagagatgccagggcccacctacctgtaaggatgctgcttccccgcaagtgtaaggaggccgttctcagcaagtgccagacctcggggctggagaggttggtcagtctcttcaagtctggtccagaaaagtgtaaaacctcctttaccgatttcagtttggctgaaataacacagataaattacaggaaaatgtcagactgtca

SEQ ID NO: 25649 - DNA, 1263 bp, Artificial sequence
  DNA replication origin
cacgcatcttctgacccgatgctgtgaccacagccccatgggtgtaggacaagcaagatgggaactctggggctggagcagctgccacacgccctgaggctggtccctgggtgaagtctgcacagcccctgccctgcaccactgggaccatgatgctggagccacatgtcacccctggcagagatgccagggcccacctacctgtaaggatgctgcttccccgcaagtgtaaggaggccgttctcagcaagtgccagacctcggggctggagaggttggtcagtctcttcaagtctggtccagaaaagtgtaaaacctcctttaccgatttcagtttggctgaaataacacagataaattacaggaaaatgtcagactgtcacaacgcagggcaacacagtgacaaaaggtgctttgttaagagcactgtgagagcaccgtgcttccgattctggggacaaggtgggtagggaccggatcccctgctccctggaaaccctggacacagtgtggccgatgcacaggcacgaggaaagggctgctggacactgcgccctgagtcctggcactcggacagataccagcctcgtgagctggggcagaagccagaagacagggctgggcaggtcccggtgctgagagcaggttccggtactgagaagaaacgacaggcacccagttccatgccagctggagacagtgctccagaagggggcaggaaaaaaccagcaccgagctttccaccacccgcccaccaggcatggatctgggctgagccgcgggagaggacatgtgccctggggaggggagcgctgggagggtagcagagcccaggtccaaacgccagctgcgcagggcagtcagggcagggggcagagcatgtgcgaatcagaacggcggtggcagcagttacaggggtgcagatccccaggacctgccatctggggaggagggcaaggaagttaattttggactcagataagtgcatcactttctaatttcaaacttgtagaaagacgacaaatgctgcagactgatcagccgatcagggaagtgcgaggaagcgcacacgagagggagcagtggtggacgaagcgccccacccggccacggggacttacacccaccacatcagaaaccccctcaacacgggtgcgctgaacgctgcagtgaaaagacaaccattgtgcggctggaaaacagtaagcactggtgtgatcttcagaaaagccacacagaaaacacaaggagatggaagggtgg

SEQ ID NO: 25650 - DNA, 1175 bp, Artificial sequence
  DNA replication origin
ccccgtctctactaaaaatacaaaaattagctgggtgtggtggcacgtgcctgtaatcccagctgcttgggaggctgaggcaggagaattgtttgaaccaggacccgggaggcggaggttgcagtgagccgagatcacattactgcactccagcctgggctacagaaaaagactccatctcagaaagcacacaaaaaaaagaagaaaatgtttgttcatcctgcctttaattccttattacaaggcgtgaatttttattgttttttttgagacagtctggctctgtcatccggggtggagtgcagtggcgtcttcacagctaggcacaacctcgacctcccaggctctcaagtagctgggaccgcaagcgccactacactggccagctatttttctttttttttttttttttcggtagagagtaggtcttgctgtgttgcccaggctggtcttgaactcctgggctcaggcgaccttggccgccttggcctcccacggtgctgggatgacaggcatcagcagtgttgaagcctgtgaggtggggtccctgtggctgactctgccctctcctggggccattggcagtgcaggggtccttgtgtgtggaggaaataaggagatgatcaaagtatgattccacgaatcacacggtttattgtcaaagaagatttgttctcgggttcacagtgctcagaggggaggagaggggaggaggtgaagacacctggcagggaagcagggcctccatggatggggtgcattcacggcagggaggtgagtggcagaacggccagggtccggttgctctgctgggatggagcgggcccctggagagtgagatctggtgagagttcgaggtttgccttggtagcagtggagagcgtgagagcgggagctctctgagaagctgggaccgaggtccagctcccaggccagcagcgtatagcttgcctcaaagcatctgcacaaccttcaagctgatgtctgtttttgcagtccagcagtcagggtcagtaactcacataagggagtgtctgacaaggtttaagtggcattcccaaggttgcggagttcactcaagtcctcacatatgtggtctgataagacatcacactcttgcaggggggtcaggtcaccccaaaacatcagactatgtaagtgctgtgaatcacttc

SEQ ID NO: 25651 - DNA, 944 bp, Artificial sequence
  DNA replication origin
gctgcgagccgggcggcagcggggtcggaggtcgtgggcggcagcgggcgtgaggggtgaggcagggtcaaggggcgggggcggccgcgggtctccattgcccgagcctgtgggagcaggcgggcctggggctgcagcactcaccccgggagccccgccgcagctcgggtagcgttcaggcacctcgccggggccgggccgcgtgcgttcggagcggggaaggcggtctccggggcccccggtgcgcgcggggaggcgtccgctcaggggaggccgaggtgggcccgcggctgcgcccccggccttcgatgccttcgctcgtccgcctgggaccgcgctggcttcgcatcgaagtgggagaggtctgaacagttattttaatactttgatttggaaagaaaatcctttaggccgggcgcggtggctcacgcctgtaatccgagcactttgggaggccgaggcgggcggatcacgaggtcaggagttcaagaccagcctggccaacatggtgaaaccccgtctctactaaaaatacaaaaattagctgggtgtggtggcacgtgcctgtaatcccagctgcttgggaggctgaggcaggagaattgtttgaaccaggacccgggaggcggaggttgcagtgagccgagatcacattactgcactccagcctgggctacagaaaaagactccatctcagaaagcacacaaaaaaaagaagaaaatgtttgttcatcctgcctttaattccttattacaaggcgtgaatttttattgttttttttgagacagtctggctctgtcatccggggtggagtgcagtggcgtcttcacagctaggcacaacctcgacctcccaggctctcaagtagctgggaccgcaagcgccactacactggccagctatttttctttttttttttttttttcggtagagagtaggtctt

SEQ ID NO: 25652 - DNA, 838 bp, Artificial sequence
  DNA replication origin
atataaatattagccaggcgtggtggcaagcccctgtaatcccagctactcaggaggctgaggcaggagaatcacttgaacctgagaggcagaggttgcagtgagccgagatggagccactgcactccagcctgggcgacaagagcgaaactccgtctcaaaaaaaaaaaaaacgagccataagatgacatccgtcccctgccagaaggggcagcggcagctgtcctgttggggcccctcccctcttcccaccacccccactcagcggcctcagctcacctttctggtgagaaagtcaaacttggcgtcacactgcatacatctccgacactaggaaagacacgacaaagcgttaaaacgcagcttggtcactcaccacgtcgctggggcacgaccacgggctgctgagaaagctgggccctgccacctccccacgcacccaagcagcctgaggcaggcagggttgtgacgcaggacggtggactggccgcctgtgcccaggctccagagccaatgcggtggggtgcaggctgctcccaggcctgcgggagatgcacccagcgtaaccatggggcctgaggtgggcttggggtttgactgtctcgcagcagagcatgcatcctggcacttcaggtccctccacactggacccaacagcagttcaccttaacaacgcctttttagccctggtcctgttactggaaccaaagagcaacgccacgaagggactaggaaatccacagcaagagccaacctaaacccctaaaccagggaaggctgtgctagcacccacttcacaaacgaggcgagcatggggaggtgctgattctggggctgc

SEQ ID NO: 25653 - DNA, 928 bp, Artificial sequence
  DNA replication origin
ttctgcgacaggtgctgcagccagaaggtgccgctgcggcgcatgtgctttgtggaccccgtgcggcagtgcgcggagtgcgccctcgtgtccctcaaggaggcggagttctacgacaagcagctcaaagtgctcctgagcggtaaggacgggtgtcctgcacagtcccgcgcgctccgccagccggctcctcgtgtctgtggcgatgctgtgggctgtgcacggggcgttctgcttctctgacgttctctcgccctccctcccttccccgttttcttctggattcgtttagaagcggttatagagccttcccttcttttcagaggcggaatgtcgtctaaaatgttggtgctgactccgctgggcacgtccatcaggtgggaggggaggccctgggcccaggcagcaccttcctccttcccccgggtggaacccggcgccggcgctcgggcgtttgcaaccactgtggctcctcggaggggccggagacctttgcccaatagcacgatgcagacccggttttgagccatctctggggacctggtgtgggagaagggcattctccaggggcatagggtgtgcctccctggaatctgaacaacgagcagcgccttctccccactgtccgtccacctctggccactgccgtcccagcctcctgtcccctgcctgcccgccgtggggtctgggaccacctgccttcctgcccacagctccatcctgtgtgaaacgggcatggtccctggctggacggtgggctttgttgtgcctcctttctgctgtcttggtcctgtcctgccagctcttaggacgtgtgagcagagtggtttattgttctttgatctggaccttggtgatgaattccctgcatcgtttgaaggatgtaaaagaatttctaggagctttgtaagcaagcagaacctgtcta

SEQ ID NO: 25654 - DNA, 1096 bp, Artificial sequence
  DNA replication origin
tgcccgggacagcgacgcagcgcgccggcggccgcgacagggccagcgagagccccgcagcccgccgcagctgccgcctcgccgcggccgggccggagagcacggcggcgggagcgcggccttaggaggcggccggagcggtgggcacagctcggcgcggagcgtcctgtcaggcggcggccgagggcgtcgcggactctccccgcgatgatgccggtgggtgagggcgggcgggaggtggcggcggcttcctccgcgggccgctggccaaacctccttcctcccgcggctcccagcccccgcgggccggtgcgaggccgggcgggcggggaaggaagtggctgggcgggcgcgcccggccgcggcgccccccaggcgggcaggtgggggcggcgccgggctgtcagcgcggggccggggccgcctgcgggcccttcctgctcggcctccgcggccgcggggagaagcagatgcatttggggccggtcatctcctcggtcctctcaggtgcgcggtcggacgctggggcacaggtctggtgggtggcgcagctgtgacccgcctgaaacgaacgttctggggtcgccctgggagtcggcggggtgggcacccgcgcccggagttcccacactctgcaggcgcattcccgtagccttcgcggttgtactgaggaaaggtgccgagtgcacggatttggagagccatcttaggaattcccttttcccgtatctgcaatgttggttcgttttgctttaactggtttgttctccgtgttctgaaggttgaacgaggttcgtttgtagtggtggtgtctttgtcctgcccttaaggatgctttcgcctagaaagacattggccattagatttgccatcgtcctaccgacccttccctttacctataatctgaataggaggggatgctgaattctgatttttaaaaattggctttttgggaggtaagcatcatgacttatgaaaaaatgtgggactggttgtacccagttggagaggtattggttttctgagcgcctatatcgtaagtaaaattctcaaacacgtttatagtaaagtaacacagtcatttttttaacctaca

SEQ ID NO: 25655 - DNA, 1719 bp, Artificial sequence
  DNA replication origin
ccccggagcgagcatgtgacccgaggccgcgcgctcggaaccagccccggcccgacgcccttggctggcacctgcttctcccccaccggcgtcttccgcggctctcggggccgcgccccccgcaccagctcccgagccttggccttcgcccgagcgatctcccgcctagaaccccgcgcccacctgtgccacctgtgcccacctgcgccagcatccctcgaggtccagctccagcgtccccggggagggtccggtcctcgtctccagggcctgggtctctccctgcagtcccgtctccagaggcgccgccccctcgggcctgagcgccggagtgacagagccctgggcagggccctgagcagaccctcagtaaaggctgccaggggggtaggcacccgctcggggccccccacatggtgccattcgcccggaccgcggcggagagcagacagggggactgaggtgctccccgcggcagcaccgaactcccacgggcatcagaaggcaaggtctgcggatggccccagacacagaaggcgtaagccgccctgggaagcgccggcccagtggagaaggccgccgcgaggtcagggtcagtctggagcctgtctggttctcggagaggcttctggctgctgcagagtgggggcagagcaagggaggaggccagggagctcccaccagcccattcctggggagccacccctgtccctcagaggccacgggggctcgtgtttgcgagtgtggactttccagttagacagacttggttcagcaccgcctccgccacaccctcgcctgggatcctaaacaagccgcatcttctctgcatcgtagtgtgcttgtctctgtgatgggagagtgtagggataatagtgcctgcctcgtgtcaagaggctttttcggatgcgagggatggaaagcgcccagcacaatttgtggcacgtggtagctgttccataaatagcattctgtagttgggccgtgattagcaaggaggcttagtgtacagacgtccctgggatttttaaacctatccacacctgggcatgaatggctaatgacacccctcttctgggagcagagtttggagagaagaggaggctctagataatgagtgatcctaggctgaaagtcagagacatacttaagttctaattctagctgctctgcttctgacctcctgtggggccttaggcaacttgcactccttctctgggccttggtttccccagctttgacagctgatgtccctgagtcacgaaggggtacttctggcccacgaagcctgacaaaggacaggttttgccaaggctcttcagagaggtgccccccggggtaaggtgatccaaatgagcctgctcttccaggaagggaagcattggcacaagggctcccctcttgcctgcaggacctgtgggcacagacagtggcagctaccgtgcctcacaccaaagcatcctatatcctccaggtaagggtccatttgaggcaggctggtcagctccccctcaagtccttcccgctggtccccatcctcctctccacccagcctgccacctccaggcatcggcccatcacctcccacctggaccaagctcattcattataagcccactgctctagcctccacgcccccaccattcccaacacgcccctgccctccatcttcctggagcacacacggcccaaccctgtaaagcccttctgtgtctctcc

SEQ ID NO: 25656 - DNA, 853 bp, Artificial sequence
  DNA replication origin
ggcagggacactcttttctgtggcctggggtggatgtcgctgggtttccagctgtattttatttggtggaggcagcggtggagtctgccctccatgcacatttattaggtgtctactgtgtgctgggcactggggatctggtgggggacacaagtgcagcctcacaggccacaggggccacccacggccaaacaaaagaccaaaaacaagcagatcgctgggtgttttcccaccaacttattttctaacctggataacaaaaaatattacttaatgccccagaggagcaaatggaaccacgactggttcacagccaacacttgtgaaaacaggtttccccgggcagctgtgggggtggaacaggagctgcacgtcccattgtcccagagtccccacccccacactggggaggggctgccagcggggcctagggtggggtgggagtcggcctggagcgggggatggtgagggcatgaggctggagagccgcaaacccaagccctcaggggtttaactacccttgaccgtcagggcagaagggaggccccgaggggtcccagtggggagtggttgggtcggattttccagcgggagggaggctaacttggagtagaggtgagggcagctcaggttggggtggggccagagaaaaaaggaggtgtgtgtgttgtgggggaaggactgagggggtgaggggcacggtaacacctggcatttggctgcagtgccagatggatcccagagtgggccacaggcccaggctggacaggaaggggagtcatgaaatgtggccttcttggggacagcgtggccaagcagatgtcagcacagagcccacagcgccctctcttag

SEQ ID NO: 25657 - DNA, 1135 bp, Artificial sequence
  DNA replication origin
agtttgagaccagcctggccaatatggtgaaacctatctgtactagaaaaaaaaaatacaaaaaattagccaggcatggtggcatgtgcccgtaatcccagctacttaggaggctgaggcaggagaattgcttgaacccgggaggcgaaggctgcagtgagccgagatcatgccactgcactctagcctgggcaacagagtgagacgtctcaaacaaaaaaaaaaagatgggtgggtaggtggataaataggtggatgggtggatgggtggatgggtggatggatgggtagatggatgggtggatgggtggatgggtgggtgggtggatgggtggttggatggatgggtggatgggtggttgggtgggtgggtgggtggatgggtggttgggcgggtgggtggatggggaggtgggtggataggtggatgggtgggtggatgggtgggtgaatggtgtgttctcagcagcagccagaggaccactcctgtctccctgtatatgctgatttgctggggtttctggccagaaagaatcatataggctgtccataaaacagctggagaggtgggtaaagtttaccctgcagatgacaaggctcaggggagcaggagagctgcctttgaatatttagaggactgtcccttgggagtaggcaaggacacccctcctgagcctcacggctccacaggtggaccaagaaccagtggcagaagtaccagggaggcagatggtttcttgaggctcaagctgcctgctggtttcagacaccttctcttctggggcttctgccaaatggtaaatggaacccgatctttttgcaaacttacatttttagttctgaaattgttgatgactccaaacatttttataattaacaaagtgtcttggctgggcatgatggcttaggcctgaaatcccagtgctttgggaggtcagggtgggaggatcacttgaggccaggagttccacactagcctaggcagcatggtgagactctgtctctacaaaaagttgtttaaaaaagtagccagaagtggtgatgcacgtctatggtctcagctactcgggaggctgaggtaggaggattgcttgaggcagggagtttgaggctgcagtgagctgtgatcttgcca

SEQ ID NO: 25658 - DNA, 1516 bp, Artificial sequence
  DNA replication origin
cccgcccgcgtcctacctttcgaacgcagcggccggccgggccggagcttgggccagagccggagcctgggccgcgggaccagcgccgggggccacgtcctggcgctgcacctcctccctggccgcccctgccgggaaggcgggcggcgcgcccagcagctccacattggtcaccgtcttgccgatggtgaaccagtcgttgatctgctcgatggtgagcttccgcagcatcctcaaggcccaggcgtcggcatcccccaactgccgggtctccgcggcgggaacaggcgacggcggaagcgcaccctggaagccccgcccccgctcgaggccttccaatcagaacgcgccgcgcgcccttgtgggcgggctccggcccgggcgcgtgctgcccgcgctgcctggtcctcgtgccgccggccccgccccgccgcgctaggcctgccgggagccgccgccccgagcgagcccagggtgagcctttctaggacctcaggggaagcttgagcgccgcggctggcccgggagtctgtttcacgggagttccgtggcaacccctgtgtgtacaagaaaatgccctccggtcactccctggcctctctatttagaggctgctgcctcggaggtttgtgcgctttgagcggaccgggaccctacatacgtttcttgagcacctcagggtgaggagatggaaggcaaaccagagaagggatttgcgttcgtgggtcagacgtaccaggacatccttgcacctaatatggggggagaggggcaagaagaaggtcaggaaggtctcggagaaagtaacgccaggcagacccctgcaggatacgggggaatgcgccagacggaggaccacccagggttataggggagggcaggcggccctgatggctgaggtgaggatctgggagaagttctttgcagccggatcataactgaattcatcttccttcctaaaccggtgtctcaggcggcggtgtcagactcacagctggacacaaacaggtgcggacaggaggtccaggcgatcacatggaccaaagatacaggctgaggtggtcccggccgagctctagaagagtgagggtggagaacagagccctagcaaactccccaaaagaaggagccgcgggaagaaatcaacaaaggatgcacgggaaggcagccacgtgtgcaagggaagggagggtcagaagagagacatggccacctgcctggggtgtgtccccctcactggccagggcaggatctatctggcccatgtgggctctcaggaaagagccatgtgaacaaatacagagacggtatcgagagcatggctctaatcagcagtgtaaagcccaagcagtggcaaataagagggcggtttgaaaacactgtagacagaaatcaggcaggtaggttgagctattggtgtctcaaaaattgaacccataatcatactaagccaggagttctggctccaaatcctggcataatgagctctagacctcatattaggactctgccaaat

SEQ ID NO: 25659 - DNA, 1142 bp, Artificial sequence
  DNA replication origin
cccgcccacaagggcgcgcggcgcgttctgattggaaggcctcgagcgggggcggggcttccagggtgcgcttccgccgtcgcctgttcccgccgcggagacccggcagttgggggatgccgacgcctgggccttgaggatgctgcggaagctcaccatcgagcagatcaacgactggttcaccatcggcaagacggtgaccaatgtggagctgctgggcgcgccgcccgccttcccggcaggggcggccagggaggaggtgcagcgccaggacgtggcccccggcgctggtcccgcggcccaggctccggctctggcccaagctccggcccggccggccgctgcgttcgaaaggtaggacgcgggcggggcggaggcggctggagggcggccgggcgaggcctggcgacgagggcacgggccatccagatccttctcgcgagcccgtgccctctcgcggggctccagggacccctgaccgtccagggcgagtggtcactacacaacccgacgcgcggcccagagcggtgcctgtaaggaagctgagctagaggtttttttttttttttttttttcagttcttaatgtttaacagactagtttttgaggcactcaggttttcaggataacggagcggagggcagaggtcccataggccccttccctcccagagtttcccctgtgagcatctgcgtaaggtgtgggtatttgtgacagtcggcgaacctgcatcgctgcgtcttcgtcacccggaggccatcgttacaggagggttcacgcctcgtactggacgttctgtgggtttggacaaacgcctaacgtcacgcattacagagttcactgacctacagatcttctcggccccactgttcctgcctccctttccctacaccacgtggaaaccactgatttttttactgtctccataattttgcttttccatactgtcatctagttggaatcacacagtatgtgtagcctttttgatgggtttctgtcacttagtattagtatgcatttgggggttcctccatgcctttccatggtttgatagcttctttccttttagcactgattaatattccactgtctggatgtaccacagtttatctccattcacctactgaaggagagcttggttg

SEQ ID NO: 25660 - DNA, 1430 bp, Artificial sequence
  DNA replication origin
gctgaaaccttgcaagcaccaggactcgacgctgcagcttcacctgaagacactgccggtctttggacgaatccactgtcctgctttgcttttgtctgcgtccacctacatctacagcgtccttggacggaatctttcatgcaatatatgttgaaggctggctctgtgccagatgcctctctaggcacaggggacgcagcccgtccttctgagtgtaccagccagggtgggggccatagtagacaaaaataccagcgtctggcagtgacagtgcctggaggaacactcagggaacacggagacaggcagtgctgtttacaacagggtggccagggaaggcctctccgaagggttggcattggagcaaagccagcatgccaggcgggacaggctgccaggaagggacaggtgctgaggcccgaggcaggagtgagcatggccccacagtgcccaggtcagtggggcgagagcactcagagggaggggatgcccgctgagtgactgtggtgccacgcaaggactttcaatttaaccccaaaggtgaacaccagccccaccgagggttgggctggtttgttttaatctctggctgctatgtgcggagactgagacaagaatgggttcaggagggctttgggcagggtggggaggagctggggatggggaagtgcaaggtgggagtgctgggagcacaagctggagcttgaggggtacgcgccgaagagaaagggtgactctcctgtctttggccagagcagccacggagtggggatgtccttactgagaaagcaggggccagagtggggcctggggccaggcagagggaagcaaggtgtgttggacacatcctgcttgggggccacctgggcaggtccaaggagactcagctgcgcgtcctgcagtcagtggcacagggaccacaaagtcgtgacagcagcgaggtgtcagcagagacaaaggccctagtctgagcctcagcattctggcctcagaggccaggaggaggagagaacccaggaccgcgaggggagaaggccagtaagtgatcttcacgtgaagtcccggggcttggtgaggggaggccagaagctggccacggtggagcaaggtggagggtgctgcggcctcaccccgggtgagtggcgtggaggggcaaacgtctgtccccctggagggacacttggccatcgctgtgctgcctgctgctgaaggaagggctccccaccaggggctgggttaggaaggtgtggggtgtgccagtcgctccctggctcctggccccctggctccccaggcagtgtagtgccaggaggtgagtccagggaacctaggcagccccagccaagtccccacgttctgcctgcccctcctttatttttgattgttcagaaaagtgtttccttggccacccaggggtctcctcgtcccct

SEQ ID NO: 25661 - DNA, 1408 bp, Artificial sequence
  DNA replication origin
tgttatcaaaataattatatggggctgggcatggcggctcacacctgtaatcccaacacttagggaggctgaggtgggtggagtacctgaggtcaggagttcaagaccagcctggccaacatggtgaaaccccgtctctactaaaaatacaaaaaaaaaaaaagaaaaaaaaattagcctggtgtggtgtgcacctgcaatcccagctattcggggagggggctgagacaagacaattgcttgaacctgggaggcacaggttgcagtgagccaagatcttgctactgccctccaggcaacagaataataataatttttattatggaatcagtgtcaaatgctggtgccttctgggggcaacacacagtttcccaccaaagtgcatcagtgccccaggcagtcaaggtgccaggagacgaggaggccgcggatcttctgtccacctgggagcaagcctgcagcttgggaccctcctgggaccctgcacccgccagtgccctgccctcctgggctctcatgggagtgaaggagggtgggctctgtaggagttaaagaaagaggaaagaaacatgaaaagcggctcaacaaaggcaggtttattttggagaataaacctgaaagggacttctggccgattttggtcaggagccatctctcctacagactaaggatctttaagggtttaggaagtggggagcttatcgcaggctcggaatgtttctatgtgagggaaagtttattgcgggcttggaatgtctctggtcggaggggaggttatctcgaggttggcatgtttctgattggagatgttatttgtggtttacggtcgtgctgacattagctattgggctgatgtgttttgggctggatttaggcagctttttaatcaaagggaacctaaaatggcggtgtttgtccaagaaggccatactcctgctctgtcccgctccagcccttgggggcccctcgggctcttctcttggatggtgtgtgaatgggcacatgtggaggggctggtccagctctgcctgcctctggccatccaaaggagggacagcagggcctgggcagcaatgccggccttggagccccggggctgtggaggctgcttgacaggacacggagccccctctgtgctcaggtcgtggagggcctcgggcactacggtctgccaggcaccacatgtcacagctactcaaacacccagggccgccacggagggccaatggccgcaggatggctcaggacccgccccacccctgtcgctgcctttctggctgccccctagtccctggacaggcgctccccagccccaagcaggccccagccaatctcctgcccaggcaggagctccccctgccgccctcacagacctcacctcttcctacacgtttccaaggccgcgccc

SEQ ID NO: 25662 - DNA, 1417 bp, Artificial sequence
  DNA replication origin
gggcagctctggcaggctccggccctgctgggctccccactcctctttcctgcaccttgcagggctgctcctggcctggccctctcccatctttgtcctgcaggccttgtgtcctcagagaagccctccctgggctgcctccaaactccacaccatccacacacccagctcagaccctgttatcagcccacagcccctacagggccctggcagatcctgcccctgggactagctccttaatgcatgccatcccttcaatggcagcctctctctctagcttgtgagggccaagcacaggaattgtgtcactctgtgtcagtggagtgtcacacaggggcgtttgccaagctgtgaatgactttgttccattcacaggcagaaggagaagtgcagaggaggctcccggcagcctggacagccacgttcttggggacctgagtccctcgtggacgagccccactaggctttgtctcctgggctgggcgcagagtgggcctccagaggggtctgcaccggccacagtgtggtgggtggaatctgagagcaccgacagagtgctggtggcttctgagcagccacttcagcagaaaggggtggccaggaggggcagctgccagggaacaggccgtgagagggggtggggataggaggggcggggaagtggttggcagatgggcaagggacaagagaatgttctggtcatgccaggggaggccctgggctctggcagagccggagagggtcccagccgtcccaggagagagagctgcgctggacacaagcaggagtgtggggaggggccagggcagcagggagtgggaggaggaggagtggaaagggctcctgagggaaaggcaggcagtggcccatggagggtcgcaaacaggttcaagacggggcgagggggctgtcctggccccaagggaggccccacatcacagcagagcccatctgggggccccaggcagtgtcctgccctcctggggaacacccaggcattctggaggctccagtgcaaccgtcctctccccatcccggtggcctcaggctccccaagctaccatccttcctgtgcccagcccaggctggcagcactgtgctggagtaccacagagctcggtgcctgtcccaggccctgaccccacccaggcagaactcagtccagacgcaatcgctggtctctggtcaaccaggtccacacaggggcagaggaagcagggctctgaggccacctcgggtgtgaacacgtgcgtccccgcagatgccaggtagccccagtatcgtgccaaccactgctgcctgaccaggaccccaggggacggggacaccctcctgggtgtcgcagttgaggggtcctcgcagcctcctaagccttctccagggcagcctcctaagccttctgtgtccagagcaggag

SEQ ID NO: 25663 - DNA, 1258 bp, Artificial sequence
  DNA replication origin
aatctgacacctcggccacccaaagtgctgggattccaggcctgaggcactgcgcccggccctgggatgcggacatctaggatgctttttcaacccaccatacatgagacagggacacttggacaccggtgtggggtggaccctgagccccctggatgcccagggtctgaggttgggtccttggggttcacaaggctggtgaatccagacctttgttccggcagcccgtgtcctggctgtgctctgggcgcctcggagggcagacgggcagacaaacatgtgcgggctccgcctcccccgtctgctggctgagccctactggcggggtgattttgtcagcggctgcacctcagccggcctgcatcttccagtcctctggcaaacgtccccggggctccacaggcctttgtgtaaggccagaggaggatcacgggtgccataaaccttcacggggccaagggctggtgtcccggggctggtgacttaacaggcagagatgtggagaccagggtgagcccagcagtggagggcgatgtcagggaggggtgcggctggagggatattagagggggctgctttaacttgccaagtttggggttaatttgtgagccagtgataggcgatgggtacagctgcagagggcgaggggggaaagcaggtgaccatggctgggatctgcaggataggatggggcattgctgctgggggagggaagggagggccgggagggagctttgggacttgctggaggccctggaggggtggctgaggggtcagggctttatactgagcagctggccccagggaatgagtggtgtggccaggtctccatttaagggacagaactgagatgcagaggctgcaggaaggtggcagagttgctgggggtgggaccagcccgtctgtgcacttgctgtgtgctaggccctccaggtcggggagctggggaaggggacctgggctggaccctgagggagtcacacagtccgtgccctttgggagctcgagggccagtgagggagaatgtgggaatagcactacagcctgggcatctgggagggcttcctgggggtggtgtcccaatctgggccttgaggcacctactgggtgagaagtggggacgaggcaggacttccaggcagagcccacagtatatccacagtgaggcaaaggctgagccccgtgggccttggtggggagtgtggactaagcatttggagaaggaggtgggagcaggggcagggcctgggtggagcag

SEQ ID NO: 25664 - DNA, 1591 bp, Artificial sequence
  DNA replication origin
gaggtccttccatttctcagctctgggcccagctccctgatgtcccccacagctgggggtgagctgggagttgccctcgtggtggctgaccaccacagccgccacaggcgagcctcctgcaagcatcctctcctgcctggggatggctggtcccagcccccctcttcgagctggtgtgggaagaagactgctgggagtggcccatcctgacctacgtccttgcctctgtggggagctccaggtggaaggggggccgggccccgtacctgggatgctgagaacttgctatgtgcggagcccttggcgtaggggccccagctctgccagaggggaacagagcgggtcagggcatttagagcaggaggaggtgcagagcgggagcctgctgttccgcctcctgctgtttctgtcccgcagcccggccagccgcaaccagaggattctctacaccgtgctggagtgccagcccctcttcgactccagtgacatgaccatcgctgagtgggtttgccttgcccagaccatcaaggtagtggggctggggaatgctgggtggggctgtggtgtgtgggtggggctgaggtgtgtgggtggggctgtggtgtgtgggtggggctgtggagagtgggcagggctgttgggtgtgagtggggctagggagcacgggtgggaatggggagtgtgggtggggcttggagtgtgggcggggctgtggagtgtgggtggggctgtggagagtgggtgaggctgtggagtgtgggtggggctgtgggtgtggggtgggctgtgttgtgtgggcagggctgtgttttgtgggtggggctgtgttgtgagtggggctgtagggtgtgggtggggctatgagtgtgggcggggctgtgggtatgggcggggctggtggatgggcagtggccggcagaaacactctgggacgggtgaggagctgcagggtctggggtggagtcggcctgcccagcctggggcctgggagcatctgggaatggcagcttcaggaaagggcagggtccacgtgtcagagctgcgggcaaggctctgagttcctctcccccatgcaagctgggggtgggcgtatagggccaagtcgacttcccagatgaggacacaacgggaacagttgtcttagcctgtcccagttagtatctggggcgcggtgtgtggtgtgtgatgctacctcgagggccagcaagctccttgtgcgtggctggtgacctgctcactgccctctgtccgtccccgcccagttggagtcttagtggatttagtggagtcttggttggagtcttagtggaccacagcacctctcaaagactcttgtggtttacagcgacctgtgtgctccccctgcaggcagaaccaccccccgccccatcagcttttcttctcccttctcccccatcacaacacgctcccatgttaccggagctgcctcccctagtagggggcctcctgcccgctccagtcccaattctcacctgcttcccttacgaaccccctgctcccctgagtgggaacatctaggcttccccttcccagcagcagggtggcaggcagcaccacccaggacaggacc

SEQ ID NO: 25665 - DNA, 1133 bp, Artificial sequence
  DNA replication origin
tgtcatgtcgaagcctgagatgacgccggctcccgccatggcctgtgaggagggggcgtgtgggcaggaagggcgactcaccacggcccccagcccatgaggggtgggtcagagcccacctctgccaggccctcaggctgtccccttccccgctaggccctgatctcccggcactaccatgccagctgcatagtctgtggtcacagccccctggaggcagtgggtacagttgacgatgaccaggccgcgctcggtggccacccgcagctcctgcagcaggtcgggcttggtgggtccgttccctgaaccgaaggtctccatgaccacgcccttcaggggaggctgcaagaaggcccgaacctgtggggcggtggggtgggggctggatggtgagggtctctgccctcagcaccactgagactcgccccatgccctcccaaggagagggaccccaagccaggggcagctggtgcctgctctgctcccgggacagtggggctcctggcagacgtgcatggctgctggcacctggagggggctgctccccccacattctcccaaagggtcgccctgtctgtagggacgaaggctttgtgtggcagaacgccgtggaaacacttcagagaggtgggagaggagccaagaaggccatcagaggccccagagcaaacacccttgtccagcacagcaggggcggctcccagccagctggaatctgcgggaggacgctgcctctagaaaagcatggaggaccccgttctggctgtgagccgcgccccaaccctgcccactccccgagaggctggaaagcaccacgacggaggacaggggacagggcctggggctggtggggccacactgcagacatctcaggtccacgcggggtctgcactggctggtgagggccccagggagcctgagggccgtgggagctgcagagggctggggctcagggctgcaggggcaggatggccggggcggtccctaccagggcggcagggatcccagggtagaggcgcagcaggcccacgtcctgctccatgctgctgtgcaccaccagcccagccttcccgtccaccttccgcaccagctccctgttgactgaggacagggaagggcctgtgtggtgcctt

SEQ ID NO: 25666 - DNA, 672 bp, Artificial sequence
  DNA replication origin
ccacagagttgaccccaccccttgcagacctcagctgccctaagaaggagtactggacaaatggaggtggtgggatcccgggatgatgtcacatgggcctaggcagaggatggggggatgggcccttgtctgaggctagggctgtggggtcttgggccggccggtccccgtccctgtgcacaggacatgagctctgctggctcctgagtgaggtgcagcggggctgggctggccagggcagaaggtcagcatgctcattctcacacaggcatccgggtgtcattgggttgctgcgggaagccggggcctccctgtccacccaggagctggaggaagcagggacggagctgtgcaggtgagtgcagctagagcacctgctcttccagggatgtgggggacacagcttggggaagcgaagccagacctgctgggagggacaagtgagtcagggtgtgggggctttcagaggcgaggcccgctgacctcagtgtgcaccaacctggctgatgggaagaggtgtctaccctggaccatgtcatggggcaggggaaggagttgttctcagctgagcgaacagtccagcaagggtgtctctgtgtgcacatgtgtgcatgtgtgtatgcatgtgtgtgggtgcatgtgtgtgtgtgtggtgggcttgaggaggggtat

SEQ ID NO: 25667 - DNA, 691 bp, Artificial sequence
  DNA replication origin
acacagcttggggaagcgaagccagacctgctgggagggacaagtgagtcagggtgtgggggctttcagaggcgaggcccgctgacctcagtgtgcaccaacctggctgatgggaagaggtgtctaccctggaccatgtcatggggcaggggaaggagttgttctcagctgagcgaacagtccagcaagggtgtctctgtgtgcacatgtgtgcatgtgtgtatgcatgtgtgtgggtgcatgtgtgtgtgtgtggtgggcttgaggaggggtatgggaattggttgtcgggtgtgagaggggctggggtgtggactggggggtggctggggctgcatttggggaggttggggcaggtggggcacagaggagctgaagcccctggcaggtgacaggtctcgtgagctctgttctccccagcgtggttcctgtcctgggataaactgacctaggccccgcctccacctgctggccgcatggcaccagtggccagtgtgccttccgatctcatgctgccgagtgaccaccgaggcaggctcaggccttctgacatcatgttgttgttggggagactgaggcgcagggaggccttcggcgagggtgtcggttgtgggtggaggtgggccagggatgcagggatcctcctctgtccgccacagccagaatcgctgccccccaccccatgccttgt

SEQ ID NO: 25668 - DNA, 987 bp, Artificial sequence
  DNA replication origin
tccagaggccagccaaacagagggacaaaaggaaccgtcacctgggcaggtagagaggcctggagggaggcagcccccatgctcctcacacccagcaagaaggggtcaggggctgggggcagcagcagggagtccctggccatcccaggccagtgcatgcacacatgatgggggccaggggtccacacccccgatttcagccccagctgaaagaaggcacgaggctgcccttggccttggagcaccacccccaccgggcagcagcagggcccgccccacccgcccacctgcccaggctgtgcaaccaggcaggcacagctcacctcttcccttacagggtggcctggctcacggtggaggctgcatcaggagcttcaggcagagcaggggctggaatggtccccaggggctcaccaccagagtgtgaagcccccttgacactcacaggcttccgcagccctatggagccctggtgtggccctggcctgagaggggggccgggtgcagcgatactggggtgacagaaaaccagacagcaactgggacgggactgtgaggactaaagagttaagcaggggcagcatgctcatccaggggttggagggctgcctgggggaggggacttcaagctccagaatgaaggcgcaggaggtaaggagatgggcagagggtgtctggaggagggaccagcctgggcaaaggcagggtggcaggaagggggagtggcagctgggaaaggaccacttggccaagtcacgtccatgcaccccaccctgcccagctcacacgcacagctgcccccggaaggatgggccaagtgacccccgcagagaccccacagagcctgggcctgactccccacacacatccacagtcccggacccagacagagcctctcagagccaggctgtacagacctggtgaggggatgtcagagactttattgccgtcctgcccaacaaaggccttcaggctttacatgagagc

SEQ ID NO: 25669 - DNA, 2197 bp, Artificial sequence
  DNA replication origin
agcccagccccgccgcgtcctcgctggccccggcgtcccctcgtcccgcgggccccgcgtggcagggcggctgagctccgagcggcggtggccagcgcggcggcgccttttatgcggcgcagccgcccttcccggcgccggaatgtgcccgcgccgcgctggcccgaccggtttttccgggcggggcggctcccgggcccataggtcccgcgactgatcctccacggcccggggacctgctccgcgcgcccgcgcgggggtggccctgactcagcggccgccccgccccatccggcgccccagcctccagcgcctggcctgggcgcacctggcctcccgggttctgggtccccgccgggccacgcccgaaccgtctcgtctgggccgggggtgctcgggcgcacggagggcccggggctccaccttggccgggtcgaggcccagggtggccggaacaggtgaggaccagcgcccgacaggagcccagggccgcgctagctctccggtgggtgtgggggctgggctggacacacccaccccagcccctctcacttcaaagggaacttcgtgggagggggaaggggaggggtaaagagaaagtgaaactggagggagggaggtttctgcttctcagaccctgaacccccaccccgcagcccacaggggtagccccgtacctgcctcctcatttcccacgcggggggagggacgccctaccccctcacgcagcaagggcctgagcctcgctccccccactcacagcccagccccgaacgtcctggcgcagctggccctgccggtcctacccacttagtcacctggaggtgtccaggcctgaccagtggcgcctcccagggactctgcttcagcagaacatggcagctgaggggagggctcaggctctaggaaataccctagagcccccttcagcacttgccccaagtctggagccattagtgtgtctgtatggggttgggcagcagggtggtgaccattcattccagtgcagggcggtgacacgccatcccaccacccgcccagccagccaggagccaagtgctcaggagccaaggtgagccccagaccagaacacagccaccagatctgagggaccccccagacatttccacatgggccgcgtgtggctcaaccaccgcagccaccctggaaagggaatcagaaaggttttgttattttcattttgcagttggggaaactgaggctcagggagggacagtgacttctggggattgcacagctcttggtggtagagaagggatgacaggccttgccatcgctgcatctgtgggtctcagtgcctgggtgtggagtccgaggggctgcggcatgggggtggggatggaagtgggcataggggagcttgagatcaagaacaggagcttgggagctcctcccccaacacaactgcatgggcaagaagaacccacctctcttcttttctttttttttttctttttttttgagacctagtcttgctgtgttgcccaggctggagtgcagtggtgcgatcttggctcgctgcaacctccatcttcccagttcaagcgattctcccacctcagcctcccaagtagctgggaccacagacacaaaccaccacacctggctaatgtttttatttattttttaagagacagagtttcgccatgttggctgttctcaaactcctaggctcaagctatccacccgcctcggcctcccaaagtgctgggattgcaggtgtgagccaccaagcctggccaccactccttaattctaagttctggtctagcccagtcctgggcagactcttcccgacgcacagccacttggatgggctcccctcgcccaggtggctcccgtgtccagcatccaagggaactgacgagagaggacggggagaaggtgacaagtacaagcacctgcagttcccaccagcagcaggaaatattgaggtgtgaccagaaggggaacttcctagcatacacgagaaatctggttacctccagctggggaagggcggtcctggagggccctcagctgaggagtctgattttaggatagaaaatgctggtgaaaaagacagtagtcgtgatggagaggagatgttccccagagatagccctgggatccaggtgattcgagatgggctataggaaccaaggcctcccccagcgtgaaattaccaggtgtgagc

SEQ ID NO: 25670 - DNA, 2372 bp, Artificial sequence
  DNA replication origin
acgcgcggcctggagtcagagtcacagtcaggggtgcgccggcgaccaatccaggggagcccacggaccggctccgcgctccaggtcggccgccccatgcgccgcgccccgcagtccccagggcctggctggctccacctgctgccagggaagaccctcggccggagagccaagtgctgctgggaggtggccgggcgtggccgggctgtgctgtgggaaccgctgggtgggggcgcgctgggttgcccacgctcctggcgcgctgccggcctggagacgccgccgccgccctcttgcaccccgagggcccgcacctcgaaactccgtggaattcccagcgaggaactggcggtgggcccgtagggttgaggagcgctccttgccctgggcttcctgggagctgcccatcaggctgccggcagccgcaccctgctgggcggccgatggttcccgctgccggctccccggagcgtctccactcactgaggccttagggagcgctgcgcggctcctacgagtgcgcgctaaactcgtgaaggacctcgaggcacaggaactgggggtggggaggaagtttgcagactacacccaggtagaggagaagcggcgcccatgatgacaggtgccttcgccggagcctccctggaacctcgtggtagctagcgcccacaggagaggtgtgcgcgtcaatctgcgtgtgaagccccgggcggccctgggagggactcagcaaagggtcgaatctgtccccacctccagccaggggccggggtcttctgcctggtgctgcctggcctgctgtgtcctctggggtggagggtccccctccagtccccacctcctcacccagtgtttagagagctgcggggagtcctgggagatgggtcagacaggcctgggtttgaggcctgctagggtggccttgggccagtcacctgccctctctgagcccgacctgcacacatagggggttgatgtgaggagacaggaggtgactgtggagggctgttccagaagagggccagcagcaggacagcaaggtcccctggccacccaggtggggggagtggagttcccgggagagcatccaccactggccagtgcctcctctgttgctcagcaaatgccattgtggccacctctcaggatctggcttcagagcttggggccgtgggagcgcccagtgggtctgtggcatcggaggggttggagtgtcttccccagctgctgcctgctgaccaccgcagccccctgtagccatttcattttacaagcacgttcccccgtgccctctgcatgggccctcagccctcagcagccccgtgagaggggctgaggctcaggtgggagatggcggctgtgtccctgttctgcggcttggaggcattctgtccggtgtgcgtctgtacaatttagactgatgacaataaacatgttccaaagcatcgctgtgtccctggggtgcttgtccttttcccccaggcctcagcgtggtttctcccttgaaagcaagccagccttttccttctaatctcagagaagcagaaatgaggatggttggtggaggggcagtggcctggtccttacccaagaccctccctcaactctgcctctggcactttggtctccagggaagcccccagcctctgccaccagctttctcgttgcagtgacctcccctgggccactgggccagaccccctccctcgggtttgagctgcactgcctcaaggagccaggctggggaaagggcttggctcccaggggccccactttcaggggctccagcctgctcccactccccccactcaccacaacactgctcccttggctggctcccactcattcccgctggagcctgtaggctggccctggggacctggccaggagaatgggcaaggtgggagggttgagggattgaagagacagaggcaccttcctccaccctccctgcctctggcacaggggaccgagagtctgtcgtgcattcaaaccccagctctatgcctacaagcaagtgaccttggcaagtcccttatcccctcggaggacctgtttcttccttctgtaggatgacgtggagctcgctggaggttcccctgacatgatgcagcacacttcctgagtgctcagcagggcagagctcaagctgtcactggagctgatgtggtgggagggccagtgggggatccttgaagaggccgaatttcagccagggcctcggaggaccaatggaaggcctcaggtggcaatgaggtgtggtcttacaacaggcccctacttggtccctggggacaccaggaggacaggcccctactttgctgagactagacctgtgcttcctggcaccccagcccctccactccggcctc

SEQ ID NO: 25671 - DNA, 1590 bp, Artificial sequence
  DNA replication origin
aggggaactggaccaagagagtgctttaatcgtcctctggccacaaactgtggccaaagtgtgccatctgctggccacaagtgacagtgtccccattcgagatgtggctgagggaggtagagactctggagtcctgccagggcttgggtattgtgggcatggagggaggttcaggcagccagatcccgtgttggaggggagaggggagccaagcacggcgggaaaagatccaggctgcgggccttgcaggctgggcttggggccagggctctccaccctggtggggagggcactggctggaaggtttggaggccacttggtgctacacacgtcctcccaggaaacagagaaggtgcaggtaggtcaggaatgcttccacctgggcccaggaagagtcctcaggctggggcagctgggcgccgcacactggcttgcaggtcccatgaggtcaacctggctgacttagggctgggctgtgggaacccgggcaaggcatcctgagggtggggtctggcactgcagcctcgaggtgcagtgtggtggggggtgagaggagccagggtggggccagtgaggtggccagagcagaatatagggtgggggcatggcagggccgggaaaggctgggataggaaggacaggagcccctctgcagggggaatgcagcaggacctggtggcacagagaacaagcctggggttcatgcattcctttatttcttccacaaatgtgaatgagcttcagtgctgtgccaggtgctcaaccaaacatttcctgccctcatggagctgatattctaaaggggatgaaggacaataaactagacaagtaagaaacatctaagtcagctcctggtaagtgctaaggagggagaggaaacatgggcaaagctgcaggatgcaggaagggcctgacattttaggtaaggtgggcagggaacactttgcttagaaaaggcctggtggctcacgcctataaccccagcactttgggaagctgaggcaggaggattgcttgagcccaggagttcgagaccagcctgggcaacatagtgaaacctggtctctacaaaaaaatcaataagttatctcagagtggaggtgcgtgcctgtggtcccagctactcaggaggctgaggtgggaggatcggttgagtctgggaggtcgaggctgcagtgagctgtgattgcgccactgcactccagcctgggcgaaagagcaagaccctatttcaaaaaagaaaagacctggagaaagtcaggcatgtggatgtctgggggaagagccccctggcagtgggaacagtggagcaaacgctcaaatgggggtgactgcacgtttgggaacagcgaggaggcccttggggctggagcagaatgcgtagggggtgcagagcgggaggagacgggtcagtcagccagggccgagaagtggaaggagcccaccgccttcttaaaggctcacctggcggctgtggtgaagcaggcatggcattgcagaaccccctccaggggctgacattccattagggtggtagggacaggagatcctgatggatgggctgcgggggccgtgagcaagcaggagtca

SEQ ID NO: 25672 - DNA, 1220 bp, Artificial sequence
  DNA replication origin
ggctccaagcacccagggaaggaatctgagcactcaagccccatgtcctcctccctccctgaaacattgctgcgtgtggtctgaatggaagccgagttccggcaattaatcccatcagaggggccctgctgaatggtaggaggtttttttctgttttgctcccttggtctagatttccctggggacagctctgaccagccgccgcgtgcctggtaaattaaatgttaaaaaaaatccccacaatgactttaatcaatccactgacatggcgggtggcctcccagaagcccttggtccgctgaagggagcccccccctccccgccccaggctcagggtcttggatgagacaggatgggggaagaggacagtcttccccagtccccttcctgtgggggagggaggagggtgggtggtccccagagtgtcctcctggagagggacagagagaaaggggggactctggccccctttataacttgccctgatcccaggccaggagtgatggtggacgcagggagggggcagctcttccccgcctctctcctgaccagaagcctgggtgagtacagagcaggtggtcacgatcggccatgtggtcagcaaatccagcgtttatggtgattctgttggagacaaatggcagtgctgggctctgggttggagtcaggttgagacaacgtccttcagcctccactggggggagtcaggggaaggaccgggggagcaggacggccttgcggcgccgccggagcagtggggttgtggggcgtggccatggtccttcccaggggagagtagaggagtgcagggggcagagagcacagaaagtctagcccagccttagcaccccagccaggccataggtgcgcgctggcgccgctgaaaacgttctccttccctcgcctgtccaccttccaggtcctgctcaaggcgcctaatatcccctgggcagggtccctgacacttccttaactcccaaagaccttccgcgtgggcctagcgcatttaggcgaacctctctgcctgcttgatcctctcccttcctccctcaagccaggcatctcacccacttgcgcgcgaggctggggcagcccacaggaggagcgcgggacccgggcttgagtttgcacccaggcagagcgcccacccccgcccctagcttcggaccctgaaagtaaagtcgtcgtgcccggcagccagcccgaatcttccagccctc

SEQ ID NO: 25673 - DNA, 841 bp, Artificial sequence
  DNA replication origin
ggcgcagcacccccggccgcgcgagccgcgcggcaaagtaacgggacggcgcctacgccgcccgcccccctcccgacagccctcaccttgcctcgtcgccgcaggaggtggctggtgaagcccaggatgatctccgagtccaggcagagcgcccccatctccagcaggctgggagccttgcggggcgcgccgcggggcggctcgggcggctggggcagcgccatggaagagggaagcgcggggagcggcccctagtgcctcccgccaccgccgccccgcccgcgcgttcactggccgcgcgcccgccgccgccgcgccccgcaccgcgcagggccgcccgtcaagcccccggtcctccgcgccccgcgcccccgagccctgcgctcgctccgcgccgcgcgcccccgcgctccggccccgcccgcctgcgccgacagcgccccttccgccccggcggcgagccagacaccagccacgcggactggaggtgtggggcgacggccccgcgcgccactgggcggaggttggaagccagaatcgggtcgcggtccgcgcccacctgcctcgctagcccccagacgtcggtgtctactgccgggtatccggcagggagagggcagcgcggctgctgtaaaacccttccgactggggcataatcgcagccccttccccctccaatctgtcctgaggacacggcgcgttggggtcctggcccatggaaacgctcagagcccagtgacctgtgcactccaccccgcccacgctccagagcccccgttcaaccttggcctatggacctccaaggcccaccccaaccggaccacggagcgtgcgcagcggg

SEQ ID NO: 25674 - DNA, 1356 bp, Artificial sequence
  DNA replication origin
gggcggaaggggcgctgtcggcgcaggcgggcggggccggagcgcgggggcgcgcggcgcggagcgagcgcagggctcgggggcgcggggcgcggaggaccgggggcttgacgggcggccctgcgcggtgcggggcgcggcggcggcgggcgcgcggccagtgaacgcgcgggcggggcggcggtggcgggaggcactaggggccgctccccgcgcttccctcttccatggcgctgccccagccgcccgagccgccccgcggcgcgccccgcaaggctcccagcctgctggagatgggggcgctctgcctggactcggagatcatcctgggcttcaccagccacctcctgcggcgacgaggcaaggtgagggctgtcgggaggggggcgggcggcgtaggcgccgtcccgttactttgccgcgcggctcgcgcggccgggggtgctgcgccgggaaggagacggcaggtccggagccgcgtcccgcagcccgggctgggactcgctgccgcactttcccccattagcgttgtccaagtctccctctgccttcaaggctgtgtcccaaccggacccacccggaggctgtggctagggcggagagcgcagcgcagggattctcgggctcaccttgcgccttgctaggatgggcgaagtagggggtcggggcccctgactgatcgtgagcccccgaggtgactccagccttgtgcaccccgtgttctgcggatatgggatgtgagcttgtgcttcccgaagcgccgcggcggtagaagcgctgaagttgcgggtgtggctggccaggggcgcaggaccggtgctcccgaccgctgcgtgcttctgtgttgcgtgtgtgggtggggggacgggatatagagagtgtgtgtcccggagcagtggagcggcgggaggcggtgctgtctgccggcagtgcggggtggggtttgggtgttgtcctcagtacccagatccagatgtgggctgacgcccgttttcattctccaggctgcgaagagacgggtaggggaagcgcttccggccccccaggctgggtggaaagcgactgcaggcttacggatctcagaaagagtggagagcccctgccactttattccatacccccttgcgttttcgaacccctaaggtcatcaacgacccggaaagccgggaggggatcacccaccccactttctggggagtgcgtgcgtgggcggggaggcttatccaagtaaaagggggtgggcaaaacggaaagggtcactttgacgtactgagtctctgcgaaggcctcaccgtatgtgccggcagccgcgtgtcctggtctccgccgggtcacgaccttcggagtttccgagtg

SEQ ID NO: 25675 - DNA, 839 bp, Artificial sequence
  DNA replication origin
ctacagcccctcccacaacaccaaatgcagccaggaagttgggcaggaccaggacgagccttctcccaatcacccagcaggcaagctgggcccctggcaccatcccaacacccagacactcccctgccaggtaccccaggcctccctgcacagccctaggggccacccacccccaaaaacaaccaccctgttcactggctaccaggagtctgtgacccctttatagactgaggctcagagagactgagacacctgcctcaggccacaccaccagggtcgcagagctggggttccaactcagacctgggtgactccagggcccagagacgcacccttgccactgccctgctggccccatcttggggagcctctgggctgatggggtggccccagtcccaccctcaggagaaaaagatggagagccaggcgtggaagataaagcttggagccaggtcgcctgacacttcttcctggtgaaggcaaatttgcgggggtcggggagagggggccctagggacgagagcaggaggggcctttcagccttgctcagggcagcccccacaggctaggtcaagcggctggaggacgagggctttgtggaggccacgttggcggcaggggtgagggttttgagggcagagccgggctacagccgtgaaccgaagctatgagctggggagggaagatggggacaggacatttaggaagagctccctgagggcaccaggcaagggccagcatgcggcacctccgccagaaacagaggccaaagctcaggcaacacccatcacatggggtcagaggccagcgcaggagggacgcaagcacgaccatcccag

SEQ ID NO: 25676 - DNA, 762 bp, Artificial sequence
  DNA replication origin
tctgtgccctggcccctatgctgtgccagcctggtgcagcctggctggtgtgatggctcagtggtgggggcgatggcgcctggtcccatccagtgtcttgctgtgttgccctaggccggtctcgcataagtgactagggttggagagatggcccctgccctgtgccttgaattcctggggccttgggtgggcctctcagtgccccccatggagcctgctgggtcggggttgggtggtgagagtccctgagaggagggcctcgtggcccgtcctggggaggggtgcgtggcccactcgtgggctttcgctgtggggcccggcctccaggatgctggctggcacctgggctgctgggggaaggtaccctggcccagatgcctgggccgccgctgttgctgagcaggtgaccagcagcctcggcttgtccccagtgggggcttcagcttgatgggcccccctccagcactggcccccaacacctgggacttggatgcccggagctccgaggcctggatagggctggggcctccctggcagctgctgtctgaattcctgatggcaaagctgggtgggggcttgggtgggggccactttggcttcctgtccccttttccctgttgcccctctgcctggccagcccgtggtgggtggtgcattctcaggtcgatccgggcttcctccctcccctgccctccactctccttcctgcctcctgctgtgcagccctggagagaagggcagggtgggcttcccaaggcctga

SEQ ID NO: 25677 - DNA, 1271 bp, Artificial sequence
  DNA replication origin
ccagacaggaccaaggggctggcctggtcccccgggcccagtgtccaggtgtctgtagcacctgcgggtcttggaggggcgctgagcacggtcaccatccaggcccagcagtgcctggagggcatgtggagtgtctcgcgggtcaacagcttcctcccgccggcgtgcctggtgagtgtcttgctcagcggatgggagctgctggcctccttgtcagaactgggcttccttcgggggtctctgtccacgttgagtgccctgcagtaaggcttccctgaagggaggggacggcgggcatgggggttcctgacactcctgaggccccacatcagatgcacccttgatggtgcacagcagctgttctcaggtccctgcctgactcagggaataccttctctgggagcacgtgcccctccctgtctgtcttttgagactggggctgagggcccaccagtgcccagcacagggcttggcgatgcacagggcaccgtgtgtagatcggggctcacgaggcagatggagtaggagggcccttgtggcagagcgagggcctgtgtggaggcctgggggtgtgaggcgtccatggacgtcgggcgggggaccggcagttgcaattgctggagatgcgttgcctgcccctgtggcaccctgggggcagagggacatgtgggtggctgtgaagagccgtgtttctgcctggtacactgtctagtcaccacacagcgaccagcacaagctcgcccttctcccttggtctccaggcctggtggtgtttccaggggcagacagaggtgcagagaccccgtagtctctggggcaacattggccactgatcctaaggccaggcagaccctgcccttgccttctgggctttcggcctccctgtgactggtgaggtggcctgtctggacatcaagatcctgccccagctgggggctggccttggcactagctgccctggcagtggctgctgggctggtccttctgaggctgctgggctgccctaggggtcgaggtacgccgaggctcactggaggaacttctggacaccccccgggtcccagctggtgtgatggttcccctgtggccttggcacctacacccttccacctgtgaactctgtggtgaggccgaggagagggagccccacccttgccacgaggtgcctcctggccccagagctgaaccccacccttgccatgaggtgcctcctggccccagagccgaaccccacccttgccatgaggtgcctcctggccccagagccgaac

SEQ ID NO: 25678 - DNA, 878 bp, Artificial sequence
  DNA replication origin
gaggagggatactgtctgggatggcagggcctctgtctggagtgtccctcctgggtcccggggcggcttgttctgctgacgtgccgtgcctggcctctggcctgtgccacttgggacaccctgaggacgctgggccttccagaccagcccacgtcccctcagcacggggaccccagtcctctgctagcctgggtacaaaggacgcctcgggcagtggttatcgactggacacttggggccgaatgacgcttggcacctgggtgaccgtgacctgaccaggccacggtgcccaagggggtccttggagagcttggggcactgggcccttggggaaggggccggggcgaggggtggccaggctgaagcaggctgccttccctgccttgcctggggttgcatccccccacgccgcccaggaccaggtttggcctgagggttcggggtcccacgtgtctgggaatggaacgtgcggaggtggagctcacgtttgctgggctgtcccgggcgtttaattacgtttgtgcttcattatgaggaggcctccctttctgggatttatttgagctaatgagttggaaatgccagggtagtatttcagatgagggagcgccacacatcaccgtacgtggggcaattagtgttcctgccaaatagttatcgtggtttcttctctaattacgccgctgggtgctcccaggaggctcaggggtgagagggtggggggtctgtgtccatcggtcttgaccagtgtggtcgctgcgattctggagtttgatgggggagaggcggaaagtctggcttctggaccaccatctgcctccctctctgcctccaaggagtcctgctggggcagaccgcccacacaccccgagctggga

SEQ ID NO: 25679 - DNA, 1774 bp, Artificial sequence
  DNA replication origin
atgaaagaaattaagcaaaacgccagcgctgcagccgccgcagtgggggcagcgagaggccgggcccggctctggggtgcaggtccttccacactggggtcagttttagggagtcaagatagacgtgagaggccgagggctgtggggggggcgtggggcatgttaggggacagaggagcccagggtgggtcgggggagcgccggtggtcagcgttcaccacacccttcgccgggtggcatcctggcctctggcccgcgtgggagcgcctcctgttgggaggtggtgacacccagtgtgtgtgttcgttcacccctgtggcgtcctggtgtccctgtgctggtgggtccatgatccggggtaggggctctgggtgcctgcagcacaaaatgtgctgggagggtgtggggccctgcagaggtggggtgggtgggccacagagaagccaccccagggaatgagtaggtgtggcccagtgatgggacctgggaacacatccccagcagcagggttagcacagccagggctcagaggcgcggcgggcctgtactctgtgtgtgtgcctgtctgcgtgtgtatgtgtgtgctctgtgtgtgtatgtgtgtgagtgtgtgtgcgtgtctgtgtgtgtgcgcgtgtctgtgtgtgtgcgcgtgtctgtgtgtgcatctctgtgtgtgtgtctgcatttctctttctctgtgtatccttgtctctgtgtgagtgtctgagtatgtgtgtgtgtctctgagtgtctgtgtgcctgtgtctctctgtatatgtgtctctgtgtctttatgtgtctgtctctgtgtgtgtctctatgtctctccgtgtttctgtatgcatatgtgtctctatgtgtgcgtctctgtgtgtgtttctgtatgcgtgcacgtgtctctgggtgtgcctctgtgtgtgtctgtatgtgtatgtgtgtctgtgtgtctctgtgtttctgtatgcatgtgtgtgtttctatgtgtgtgtgtctctgtgtgtgtgtctctgcatgtatatgtctctgtgtgtttctgtatgcatgtgtgtatctctatgcatgtgtctgtgtttctgtatgcatgtgtgtgtctgtgtctctgcatgtgtttctgtgtgcatgtgtgtctctgtctccatatgcatgtgtgtgtctgtatctctatgcatgtgtgtgtctctgtatgcatgtgtgtctgtgtgtctctatgcatgtgtgcgtctgtgtgtctgtatcatgtgtgcgtctgtgtgtccctgtgtgcatgtgtctctgtgtctgtatgcatatgtgttctgtgtgtctctgtatgcgtgtgtgtctgtctctgtgtgtgtttctgtatgcgtgtgtgtgtgggcctctgtgtatgtttccatgtgcatgtgtgtctgtgtgtctctgtatgcatgtgtgtatctttgtgtctatgcgtgtgtgtgtgtctgtgtgtttctgtatgcatgtgtgtgtctgtgtgtctatgcatgtgtgtgtctctgtctctgtatgcatgtgtgtgtctgtgtttctgtatgcatgtgtgtgtatctgtgtttctgtatgcatatgtgtgactgtgtgtctctgtctctgtgcatatgtgtgtctgtgtgtttctgtatgcatatgtgtgtctgtgtttctgtatgcatgtgtgtgactgtgtctctgtgtctctgtgtgcatatgtgtgtctgtgtgtttctgtgtgcatgtgtgtgtttctgtgtgtgtctgtgtgtgtctctgtagggtgtgcgtgtcgagg

SEQ ID NO: 25680 - DNA, 1151 bp, Artificial sequence
  DNA replication origin
aagctgcctccgcccagccggccactaattacagggcaggaggggcccagctcaggtggggacagcgggccaggcctcacactggcacccccaccgcaggaatgtggacaccgcgcccctgctccaggcgagagcagatcccatatgaggtcagcagagcagggagaaggtgagggccagggagaggcaaggccggtgcacagcctgtcagcaccgaatgtgcggcacagagaatgagggggcggcgggctccgggcgcctccgtgagaagaggacagccgctcaggtcctgcagagcagctcagtccaggagagggcaggagggaggagcatggccccctggcccagccctcgcaggctgctccccaggctgagggggagcacttgcaagataagggaatgaactgccccacagaggtgtgagagccgcagagggctggcgctgtcaggggagccatccaggggcatggctgcctccgaccctggccagctgagggaaccgaaccctggcaccctgtggcctgccggactagagtcagcagaaagcagggggaagcccattcgaatgcaaacggggacgggcaagataagaaggatcccatccaggggaagatacaaattctgacgcctcggcctcaccggccccactgcaggcttggggagactgaggctggggggcaggctgagggtgggttgggcttccagactgacctcccgagccagcagggaaccaggcagccctggtgctgggcagaagcaatggcgtctccaaagcacacacacagatctcaaactgggccacatacaggcaccggactcgggaagaccctgacaccagccccagtaccctgagagggggcagacgccggggaggggcaggacccaggatgccggagcccagagcaatcactgcaaacactccgaaacccatccacagcagggacaccccacacaggtgggtctggtgcgtcgatgccaggaggcggcggctctgacccggcagaggctgcgcacacgagggccaccctgaaccagggctccaacgcagagccagagacaggccccatttcctgctggaggacaccacagtccactctgcgctgaaatctctgatttctccactacagcgtaaatcaaattacccgagactc

SEQ ID NO: 25681 - DNA, 1362 bp, Artificial sequence
  DNA replication origin
gcttctcaggtgccgcccacctctgccccaggtgaaggttatgctgcggatctggcccgcacagggggcccagcgctcggccgaggccatgtccttcctgaaggtggaccctcggaagaagcaggtgatcctctacgatcccgccgccggtcccccaggcagcgcaggcccccggcgagccgccactgctgcagttcccaagatgtttgccttcgatgccgtcttcccccaggactccgagcaggtacgggcaggcggactgggcgtcctcccggagacccggagccgggctgctggctcagcacatgggtccgatctgcgcccgcttctccgtgcagggcgcagaggaagcgtgagcgaggggcccgctgcctgcggcgcctgcctgcttacctccctcatcgtcctggccagcgtccttgggtgtctccatccgcccctgccgaggctctgggccaagtccacagggaaaggcctggttttccggagcccgccctcccgggaagctttccgagcagctgttgggctctgggctctgggggcgcccggtgctccctgcccatgctgagccgtgcaccgtgtggctgcgtgtgcgtctctctgcgcgtggtggtctgcccctgcgcccggcggctggacttctgggctttgcgggtgtgtgtctgcacgtgtctggccagtccctcctacgtgtgtcctgggtcctgttcatgtgtgttctgtgctttccgtgtgcacatgggatctgtccttggtcccaggtgtgcagcccaatctccttgtgggtcgactgcctgcatgtgccaggacagaccggcctcaggcccacagacgtggcagaaggaaggggccacagccctgcctgattctcttgcccccctaggccgaagtctgctcggggaccgtggccgacgtgctccagtcggtggtcagtggggctgatggctgcattttttcctttggccacatgagcctgggtaagcacccttgccccaccctagatgggtcctgctggccaccccctcccatcctcatcacggtggttgctggcagcttctgatgggaaaggaggctggtcctacacatgggccgtggtgggcatatggggtgaggggcttgtggagaggaagctgaacccctgccgaactgaaaggcagagggcttaggatggatccaaagaggcccctgagatctcggtgcccctggttggcccccggggacgccagtagccataaaggctccttgcgtggtgtgtggtggggcctgacgcctgcgtggcccccaggcaagtcgtacaccatgatcgggaaggacagctcaccccagagcctgggcatcgtgccctgcgccatctcctggctc

SEQ ID NO: 25682 - DNA, 1517 bp, Artificial sequence
  DNA replication origin
ggccgcccagctccggcaagcgcccccagggacagctcctccaccaccgtgaacaccagctcgtcctcgccgttgagctccactggccgctgcagggtcactgtggtggtgagcaggccccgctccggacagcgactgccagcagccaggcgggggcaggtggccccaggaagcatcggggacccagccacctgcccactcatgcccacgggaggggtccgtgccactccatcagtgccccctcccccaggctcttctggggctctgcaggcttccagcaactgaggaggtgggggagccgggctgggcagtggcctcctgcctccactcactgcagccttttccgggaccagcagctcaggccaagcgctgctgtcctctctctggtcaccccagacaatggccttgcagggctcaggggtaccctggtgggtgtctggaccagaactgcctcgaggggtgctggcagccatcggggtgcccacggccttcctgggggatgcagcctctggtggcgagggcttccggccccctcgggcggggctggcctgagctccgtcggtgccacctggacctcctgagggaccctcgttgccgtccatgcattccagccgctcctgcagctccgcgaaggtgctgcagcggaagtggtctgcgtctcggggacccttggagggccggtggcggctcagggcagggatgatgggcacgaagtcaggcggaccttcgttgtcggtgagctcccggtctgacagcgccgccccaccgggccccacgtagatgaccgtgtcacaggactgctcgctgctggaggagtaatcggggtcaccgggcaggcagggaggcgtgcggtcggggtccagggccacagtgcgtgggtggaagggccgcaggtgcgggggccgacgggcccggccttcctcacaggagctctccccgccagaggagctggaggcgtactgggggaagaaaagtggagctgccgagcccagtctcccctacacgcccccgcttccccgaccctccccagagcacagggccaatgctgcggtcactgtgatgaaaactacagcaggcaccaccaaccatgtcccaccaaacgctgggagcggaactgagtctcaggggaagaacttaagtgaccattcttagcaactttacaaggaaaacggtgtcaccccgcgctgggagggaacgggaagctcaaaagacaagcatgtgtgcccaggccagtggccaggactcacaccaagggccgtgtaaccccagagtgccccaaactccaccctccagccccagagaggggtccctaggaagcccctgcagaggtggtgcggctctcctgagcaccccagggcctgtgcgggggcagcaggctggagtgaggccaccacaagccacatacagcaagccccgattctgcccactgcagccagggacctcaggctgggctccccaccccccagggagggccacatgggcatagcctcatgacatcagaacacataggacatcta

SEQ ID NO: 25683 - DNA, 1133 bp, Artificial sequence
  DNA replication origin
gacgggcaggagccctggcggccctgtggccggtcccagagcagccccacgggccgggcccagtgtcggggcgaaggctggccggggtaccgtcatgggcacaaagcaggcgctccgggctgctcacagccgcgtccatgagctgtcagccagtggagccccgggccgaggtggctcctcgtggggctcggcggactcagacagcggccatgacagcggcgtgaacgtgggggaggagcggccacccacgggcccggccctgccctccccctacagcaaggtgaccgccccacggcggccccagcgctacagcagcggccatggcagcgacaacagcagcgtgctgagtggagagctgccgcccgccatgggccgcaccgcccttttccaccacagcggtggcagcagtggctatgagagcctgcggcgcgacagcgaggccaccggcagcgcctcctccgcccctgactccatgagcgagagtggggctgcctccccaggcgcccgcacccgcagcctcaagtcccccaagaagagggccacaggtgggtgcagaggtgcacagccctctacagtttacgggctttctgtgtgtagatgtgcacagccctctacagtttacagggccaggagatgctggacagatgggcacagccttcaaggtcccagacccacacagccgtggacggtttacagactcgcctggggctttttgtgtgtggaggtgcacggccctctgcagtttataaaccccctgtacttgcccttctctggccccaccctgccctggggggctgatcctggtctgtgtctgggtgagcacaagggcagccctgcacaggtcgccaggctggggcactggactcgggtttgggtcccgggcctcgtgcctccctggcgagtgtcgagctgcctggaaggcccccgccagggctgccccaagggacagaactgctcaggtcatggcagggaaagtgggaggccctggtggtggtgggggcgcccttgagagctgtgggcctggcttggggtcggcttcctccctgccctgggcagagcgccagcctgaggattcctggactggatcccgaaggcctccctgtcaggactcgggccggctccgcagcgtcccc

SEQ ID NO: 25684 - DNA, 1141 bp, Artificial sequence
  DNA replication origin
aaggctgcggctggcggagcgcaggcagcagcggctgcgggaggtgcaggccaagcacaagcacctgtgtgaggagctggccgagacccagggccggctgatgctggagcctggccgctggctggagcagtgtgagtcccgcccgcccacggacccagcccggcccaccgtgtgccctgacagctgccctcccctcccagagccctgttgctctcctgtacctcgtggtgggaaggctggaaggcagggtcggccgggccaagatgcctttcctggggcctctggggggccaggtggctgcccccagcctcgggcctgacgcaggtgcccctcccctctcctcccctccccagttgaggtggacccggagctggagcccgagtcggccgagtacctggcggccctggagcgagccacggcggccctggagcagtgcgtgaacctgtgcaaggcgcacgtcatgatggtcacctgcttcgacatcagcgttgcagccagtgctgccatcccggggccgcaggaggtggacgtctgaggctgggcgccggacaagaggagggggcgtgcagcgggctggaggacgggacgtgggacggagcgaggatgtggtgggggctgcggggggaggatgcggaggggtttctgtgcaggacgggagtctcagagaggagacggagtgtgggggagggagggccggccacgcggtggacagagcgagggtgccagggtgaccagaagaccgtcaccacccgacagcaacgcaagtgcctttgaccttgatttggacttttctcccttttgcatttggtgctacagacttgagacaccagcagaagttgtgttcagcccggccccgctgcgcctgtccgggccggggctggcgccggttgtgtttgtgtccaccttgccttctttgcagccaagcagtttttgtggagtggagtgggacttacctgcacgccccaggggtctttcaggattcaggatgacttttcttttacaatggtttcctctcggcagagcccgggttgtgggggatctgtgtggggttctcaacgcagatccatcctggggtctcccgggcagggatggctgacctcgagtcccctcccttcccgagaacccgctctgtcccgagggc

SEQ ID NO: 25685 - DNA, 843 bp, Artificial sequence
  DNA replication origin
cccaatcccagaggctggagtcccaagggccacctgcgatggacactaggggcctgggtgcgggtgaccctgtggcctgacctggggggccctgtggccacacgaaggactgtgtctgtgtgggaccacagtgcagggccggcgggaggctctctgcagacggctcagagctgtcctggacctgcttccaccgcagccggagcctctttaaggggatgctgtcattcacgtattcttttattccttcttcagccagtgtctcctcagccctgctgggcctatccctgtgcccaggatcggggaaggtgatgactcagaccccgccaggccgggagacaggcagagaccgcacaaggtgtgacgtgccatggcagagaggcctaggagcctccaccaaggaggggccccaccatcccccgcctggagccagggaggggcacctagccggggacagggggagtccccaagggagggaggggctgcacagccagcctctgggcaggggatcacagcacgggggatggtggggcctcatggccaggacctcgggttgaaggtggagtggagcagctggaagccagtgcaaagccgcagaaaggggcaggtgcccagacacaaccttcgcaggccaggcaggcggggggtactggcatggggacagagtaacaggcttaaggaagcaaactagttccgctggggacctaccaaatgagaagcagataggactccgaagaggccaggaggcaaccagagcaacagctaaggtggccccagagggcacatgtacaggtcaggtgaggccatgagctcacagcagtcaaagggctggggatcccccaaagg

SEQ ID NO: 25686 - DNA, 793 bp, Artificial sequence
  DNA replication origin
agacaccccagggacagcagcaggggctgcttgcggtttggaagtcccacctgtgcccagaccaccagcagggtctctccttcccaaaccaccccctttccaattctgggggcgtcagagactgctgggggcatggggtgaggcagggaagggtggtgcgggaggctgagtgggagggagagggtgggatgaggccctgcatgctggacaggactctgatgcatcacccatcccagggaatctgagtctgaaacacagaaaggacccacagccattgggtgtccccgggccttagcttgctgggcccagggcaggccgggctgcttcttgcccggggaactcagcagacccctggatcgctccggggtgggtgagaggctgtggagggaaccctgtcctggccggctgacctcacagccctctcctgcagacggggcagtcgaggagtaaaagaatgaaaagcagtcaaacagccccaggagacgcaggtgaggctgggcgacgagcggaagctggagatggggccgcatggtgggcagcagcagggcaggcttgtggggtgaaggaggctggggcatccggcatggcagaggcagcttgagtttggcggaagggtgaggcgtggggcctgggcccacaggaggccagcgtggtttgggggcctggttgggtctgagatgctttgggtggtccgggggacgtgtcccataggcagctccaggtggaagctttgggctgaggcagaggctgcctatgcactcaccagctcgttaattcatccttcattcttgcc

SEQ ID NO: 25687 - DNA, 752 bp, Artificial sequence
  DNA replication origin
cagatcatgtcctcgttctcgccacggcgcggaaagctaacaagagtcagcccggctgcaatctgcagtgctggcggttcccgttgaatgagtgaaattggtgtgagggtgagataggcggtcgttgaacagagagcacacatcagacctcacgacaatgagcttcttgggaaaagagacctggcttcctttgttgactcgcgggagtggcagctgcggggctggctggaaatgagagcagagccaaggagccttcagggctcagacttcaccagggagagttgtgtatctgtttgtgttatttctaaactgtgtgtacaggtctttcatggcggtaacatgtataatcaacgtgcattcgcatacacaagcatctgttcttttctctgagccagttgttaaaacatttaccagcaccgctgtgggggctggggagaaggtgctttggaggggggtgggtgggacaccttagggtggggagagggtgtgtaggatgagcccaggtagagaaagagaaggcaagggcaggggaggtggtgtctaaattagggcagagcttaccaaggacaggccaaggcaaggaagggggaaggtggccgtggtcatggctgggcgggaaggagggtgcaggaggcggggccgtggtgccgggctagaaggaggcagccacggggttctggtctactgactttcatttccttttctttcttgaagcgtgttccgggcagtccatccaccccccatttctgcct

SEQ ID NO: 25688 - DNA, 1094 bp, Artificial sequence
  DNA replication origin
gccctcggggtcacctaagcctaacctaggctgggctccggggagatgggtcacgttccaggacacaccttctcaaatgcagccccaacagacaatacagcaaactagagagtcactgccactgaggggagccctgtccatcagggtatcctcccctgcagagcagcctggccaagcccagcccagctcaggctccgttgagacccaagtggcctgaatgcctccaaacctgtgcagacatcacaagcatatctcccatgctgtaagcagtaaggaagtccacagatgcctctcccaaaggctaaaaggtctacaagggcaggaaccaggtctacctcatttctatcacccccattcccagccctgagtccagcacgaagcaagtcttgattgccattggataagtgggtggataggtgggtgagtaaatggatggatggagagagaaagggagggagaaatggaaggatgaatggaaagagggatggatggatggatggatggacagatagatggatggatggatgagcaggtaggtggataagtgggtggatagatggatgggtagaaggagagagaaagaaaggaaggaatgggtaactgggtgggtgaatggagggagagaggaagggtgagtgtatgaatgggtgagtggatgaaggaatagaggatagctggttgatggatgggtagatggatggacagatgatggatagatggatgaatggatgaataggtggatggatggcggatagatggacgacatatggatagaaggatgggtagacgatgggatgaactgatgaatagaggatggatgatggatagaaagataatagctagacgatgaatagatggatggatagatgaaagatggatgatgaatggatgaatgatggagggatgctagatggatgatagatggatgaatcatggatgaatggataatagatggatgaatgaatgatgataaatgaatggatgatgaatgaatggatgatggatgatgcctggatgatggatgatgggtggatggatggataatgagtggatatatggatagatgatggatggatggatggatgggtagatga

SEQ ID NO: 25689 - DNA, 1976 bp, Artificial sequence
  DNA replication origin
cctggggacatccggagatggccgccacctagactcatccccaggacccaaacagacagatgaacagagggcgaaggatgcaggactctccaaagggagcacaagcgtgtctttggggcggacgtcctgcatcgatttagcacctctgtctgtgaccccccccacccctgccgtatgcagtgtgacccgccccccagatgctgtacgagggccttgagggctgcccaaaaagagtggggagcagagaggctggcagcaccgagaggggccacctcaagatgtcaccccattttgttagtgaggaaactgaggcagaacagctcagcccagaggagaggcagagttcctgtagaatctcacggcagtttactctcaagagacccggctctccaggcctgatggttatgatgcaggcaggcgagcccgaaagtggagtttagccctctgggtttttggcttcacccaggaaagaatgcaagggcaagccagtggtagaagaaacagctttactgaagccacagtgtcacagctctggtggtgtcccggctctggtggtgtcccggctctggtggtgtcccggctctggtggtgtcacagctctggtggtgtggcagctctggtggtctcggagctctggtggtgtcccggctctggtggtgtcccagctctggtggtgtcccagctctggtggtctcgcagctctggtggtgtcccggctctggtggtgtcccggctctggtggtgtcacagctctggtggtgtcacagctctggtggtgtggcagctctggtggtctcggagctctggtggtgtcccggctctggtggtgtcccggctctggtggtgtcccggctctgctggtgtcacggctctggtggtctcgcagctctggtggtgtcccggctctggtggtgtcccggctctggtggtctcacagctctggtggtgtcccagctctgctggtgtcacggctctggtggtgtcacggctctggtggtctcgcagctctggtggtgtcccagctctggtggtgtcccggctctggtggtgtcccggccctggtggtctcgcagctctggtggtgtcccggccctggtggtgtcccggctctgctggtgtcacggctctggtggtgtcccggctctgctggtgtcccggccctggtggtgtcccggctctgctggtgtcacggctctggtggtgtcccggctctgctggtgtcccggctctgctggtgtcgcggctctgctggtgtcgcagctctggtggtgtggcagctctggtggtgtcccagctctggtggtctcgcagctctggtggtgtcccagctctggtggtgtcccggctctggtggtgtcacggccctggtggtctcgcagctctggtggtgtcccggctctggtggtgtcccggccctggtggtctcgcagctctggtggtgtcccggccctggtggtgtcccggccctggtggtctcgcagctctggtggtgtcccggctctgctggtgtcacggctctggtggtgtcccggctctgctggtgtcgcggctctgctggtgtcgcagctctggtggtgttgcggctctggtggtgtcccggctctgctggtgtcccggctctggtgctgtcgcagctctggtggtgtggcagctctggtggtgtcccagctctggtggtctcgcagctctggtggtgtcccagctctggtggtgtcccggctctggtggtgtcacggctctggtggtctcgcggctctggtggtgtcccggctctggtggtgtcccggctctggtggtgtcacggctctggtggtgtcacagctctggtggtgtggcagctctggtggtctcggagctctggtggtgtcccggctctggtggtgtcccggctctggtggtgtcccggctctggtggtgtcacagctctggtggtctcgcagctctggtggtgtcccagctctggtggtgtcgcagct

SEQ ID NO: 25690 - DNA, 653 bp, Artificial sequence
  DNA replication origin
ggacgtccgccccaaagacacgcttgtgctccctttggagagtcctgcatccttcgccctctgttcatctgtctgtttgggtcctggggatgagtctaggtggcggccatctccggatgtccccaggttgctctgtgtggggaagggtggggaggctgctgggaactggactctcctggagagaggcagggccagtgggctgtgggtgctggggcttggcacggtgctccccagcctggtggccccctctgcagtggatggagtcgggatcctgggggcagtgagtctgggaccccgtcttgggaagtcagccagccccaggagctgatttggccaacctggcctcaattgagcaccaagggggcctgagggagcaccgagggggcctcctgggagtttgtcacatgatggaggcctcgagccgtggcccggctctgtctgctcgcgccccctcacccacggctggctattgtggatggtgatgttcctgttacaactgagggatctccatagaaacccaacaaggtctaattagacacaagtaagtgcttcccaaatgcattttaattacagctctgctgaaatgaacgtcaaactgaggtttcagttgctgcgtgtgtgaaccgaattggcgccttctccttttccagcca

SEQ ID NO: 25691 - DNA, 1944 bp, Artificial sequence
  DNA replication origin
tcaaaaatgatggaattcctgctgggtgcagtggcttatgcctgtcatcccatcactttgggaggccaatgtgggtggaccacctaaggttagaagtttaagaccagcctggccaacatggtgaaatcccgtctctactaaaaacacaaaaattagctgggcgtgatagcgggtacctatagtcccagctactagggaggctgaggcaggagaatcacttgaacctgagaggcagaggttgcagtgagctgagattgtgccactgcactcctgcctgggcaacaaagtgacactccatctcaaaaaaaaaaaaaagaaaaaatggaattccttcaatgattttctttgcagaatagttaaatctcttctagttttctttttaaacattcacttcccgccacagccttcctcaagtatgattttcccagcatgctctgcagtgagtgattggtggacacgcccgcccattctgcaggagctagactttcgcctgtgaacctgaaccgctcaagaagacacccgtcaggttgtattcaggagcagctttttccaggaaagtttccattgctgtcagttttattttgtgttaattatttccaccataagagtcactgtgattgggatgaaggctgggcgtgtggttcttagttctggcacagagacatagatgctgcctgggtcagctgggtgagtagggaggtgagtgtgtagggaggtgagtgtgcagggaggtgagtgtgtaggaaggtcagtgtgtagggaggtgtgtgtgtagggaggtcagcatgtagggaggtgagtgtgtggggaggtgtgtgtagggagatgagtgtgtagggaggtgagtgtgtaggaaggtcagtgtgtagggaggtgagtgtgtaggaaggtcagcatgtagggaggtgattgtgtagggaggtgagtgtgtggggaggtgagtgtgtagggaggtgtgtagggaggtgagtgtgtagggaggtgtgtgtgtaggaggtgttttgggagttgtgtgtgtggggaggtgagtgtgtagggaggtgagtgtgtagggaggtgagtgtgtaggggaggttagtgtatagggaggtgagtgtgtaggggaggtgagtgtgtaggggaggtcagtgtatagggaggtcagtgtgtagggaagtgagtgtgtaggggggtgtgtggggagatgaatgtgtagggaggtgagtgtgtaggggaggttagtgtatagggaggtcagtgtgtagggaggtgagtgtgtagggaggtcagtgtgtagggaagtgtgtagggggtgagtgtgtggggagatgaatgtgtgggaggtgagtgtgtagggaggtgagtgtgtggggagatgaatgtgtggggaggtgagtgtagggaggtgagcgtgtagggggtgagtgtgtggggggatgaatgtgtggggaggtgagtgtgtagggaggcgagtgtgtagggaggtgagtgtgtagggaagtgtgtggggagatgaatgtgtggggaggtgagtgtgtagggaggtgagtgtgtagggaggtgagtgtgtgggaaggttaatgtggagcggaagttagtgggaattgctgtgttttatgcccctcacacctcatgcctgcctgctgtctgcctcttaacaccttcgaatgaactggaaagaatggctggcaaggcctgcaggacactgaccctaccggccacatgctccggtgcacagtggatggcgggtatggcagatggtgggcggtcctcttggtagcccctgctctcctacctcctcatgtggctccagcccctccccagcaagtcccccaacccctccgactgtgggtatcataggaaggggccgtgctgggctgaggatctgctgggtctgtaatgacttgggagagacactgacatcagctggcaggacccaagtccacaggccaggaggggtgagag

SEQ ID NO: 25692 - DNA, 1116 bp, Artificial sequence
  DNA replication origin
ccgtgacctgccagatgaccatccaggttaaattgagatctgagtttcataaaagcaaattaaatagacatacatgtatattttgataattaaaagttttgaaccagccattcactcaagggtagttctggggaatttgtgcccatgagaccctccccctggtgggacagaaggagctaggagtgggaggccaggggaggcctgtctccctcatcccccatgtccagggaaagctgtgtgggcctgggccagctctctggccccatgggcactctgtgcctggtgacagcagaggtcctgctcttgggaggctctgaccccccacagcggggctgctctgggggagtgctggggagctgcggtgtccggggagggagctgggacctgctcccttgtgctggtggtgtacctgcctggcacctccctggcaccaagcgtctcataggaccctgcaacagtcccggctggggatgctgcctgcaggtttcaatggggaaactgaggctcagaggtgggatgggacctgccaccctgtgtgactggcaggacagagatggggctggattgggccccagcatggctggccctaaagtcccctgctttcatgctctgaccataaggctttcctcgtggaggttgctggggagatgagtggggttgttgcacaggcctcccgggtttaggccgcacctgggcagggacctcccagcagagatggtccccccatttggtgtggagggaccacatgagcaaggcagagtaggaggtgcattggggatctcgcggtgtagggggtggggcctgcagggggcggctgggatggggaatggggccgaggccggggggtgatggtgagggtgggagtgtgaaatggcagtgcccccacctgggcagctggagtgcatggccctgagcattgggtcctgcatggtcctgcggtggcctggtgggcccaggagaccagaaggcctgggctgatccctgagggtctgtctggtgggggtggccaagggcactcagggtcatggtgctgcagagggggtgtcagagggcagtgttggcaggagttctgagtgaggaggtgagaatgcctggtaaaggtggagggggagggag

SEQ ID NO: 25693 - DNA, 803 bp, Artificial sequence
  DNA replication origin
cctgggcagggacctcccagcagagatggtccccccatttggtgtggagggaccacatgagcaaggcagagtaggaggtgcattggggatctcgcggtgtagggggtggggcctgcagggggcggctgggatggggaatggggccgaggccggggggtgatggtgagggtgggagtgtgaaatggcagtgcccccacctgggcagctggagtgcatggccctgagcattgggtcctgcatggtcctgcggtggcctggtgggcccaggagaccagaaggcctgggctgatccctgagggtctgtctggtgggggtggccaagggcactcagggtcatggtgctgcagagggggtgtcagagggcagtgttggcaggagttctgagtgaggaggtgagaatgcctggtaaaggtggagggggagggaggggagggagaaagagggggtgaaaagggggaaggagggagggaggagggagaggggaggcccagtagacatcctcacccggggggcagtgagggttagggaccctgccctgcgtgagtgattgggcaggggatcctgagggcgcttccagcccctgcatggtcaggaggtcacacgcccactcacccgctcattcattcattgcgtggtcgggagctcacacgcccactcacccgctcattcattcattgcgtggtcaggaggtcacacgcccactcacccgctcattcattcattgcgaggtcgggagctcacacgcccactcacccgctcattcattcattgcgtggtcgggagctcacgcgcccactcacccg

SEQ ID NO: 25694 - DNA, 873 bp, Artificial sequence
  DNA replication origin
agtgagggaggctatggaaaggctaccagcaggggttaactggctgcctggcgtgagatggggtccaggtggagggggtgagaagggaggggagcaggggcaggatggaaaggactgcggtgaggcacgcgggtccatctgtgcagagctgctcgtggaggggtgtggaagcccaccccatccaccgccccactgggcctgcgcagtcaggcggtccccgggagctgagtaagggggctctgaggagagggtcctcatgacggttggggtcaccaagcccagaggaggcttccaggcagccaatttcagacttaattcaggcagccctctggggctgaccgagtgcccttctcgcccgcgttggcgagcaagaggcaggccctggtgtgctggtgcatctcctggcgggcttatgaggggctggagccctgggggactctggagcagcccctccaaaggatgccatgggcacagatgctgtgtctggctacaagaggcacttggatccccaggtttgctgctgtgtgtgcgtgcatgcagatgtgtgcatatgtgtgtatctttgtgtgcgtgtttctgtatctctgtgtgggtatgtgtgcgtctatgtatatctctgtgtatgcctgcatgtgtgtctacgtgtgtgtgtgtatctttgtaactgtgtgtgggcacacagacatatgaacgtgtgtatccgtgtctgtgtatctgcccacatgtgtctgtatgtgcgtgggtgagtgtgtgtctgtatctgtgcatgtgtgagtgtgtgtctgtatctgtgcatgtgtgagtgtgtgtctgtatctgtgtgtgtgtgtgtgtgtctgtgttggttccttcagcagggatgtcagctgtggc

SEQ ID NO: 25695 - DNA, 970 bp, Artificial sequence
  DNA replication origin
gtgtctggctacaagaggcacttggatccccaggtttgctgctgtgtgtgcgtgcatgcagatgtgtgcatatgtgtgtatctttgtgtgcgtgtttctgtatctctgtgtgggtatgtgtgcgtctatgtatatctctgtgtatgcctgcatgtgtgtctacgtgtgtgtgtgtatctttgtaactgtgtgtgggcacacagacatatgaacgtgtgtatccgtgtctgtgtatctgcccacatgtgtctgtatgtgcgtgggtgagtgtgtgtctgtatctgtgcatgtgtgagtgtgtgtctgtatctgtgcatgtgtgagtgtgtgtctgtatctgtgtgtgtgtgtgtgtgtctgtgttggttccttcagcagggatgtcagctgtggccagggggcccgcaagccagccctaaatttgggcaaatttggcctgacctagggaagaaggaagctgtgttcactgccgctgagggtgggtgggagaagggctgagagggtgagaactgaggggccccagggggcaacagttaccctcagtggtgcaggtggggaactgaggcagagccagaggctgggagacaggaagaggtgggaagtgaccggagtgaggctgagcagagggagcgtcttcgtttcataaaaagccataaatccagccgaagctaactgtggaggaaagggtactgggcccctcctgtcttccccgaccccgtacactgacccgaggctggacgaaccctcagttcctgcccaccgagagcacgcatctgttcatgcccctaaaatatgggtgctcaggacactatcagccttggacagctgctgtttccacttgatctgtgaaatttatgccgttgggaagacaaatgttcttagccagggctgagggaaggtatgagcagccccccttccctcctgtccaattttggaggctgggaatattggcttcactctgacagctccc

SEQ ID NO: 25696 - DNA, 833 bp, Artificial sequence
  DNA replication origin
gggagtgcagtggtcagaatctggaggcagacctggccctgtgccctctgctgtgtgaacttggacaggttacctacctctctgaacctcagctctcaagatagtaagaacagtgacctcccaggctgcttggggggttcatcgcaaccccattcatgagggaggtttagccaggtcagtggtcgggcaggcagcaggcctgggctcctcacgccgcagatacccactgatgacctgtgaggggcctggtgtccgtccaggttccaggacatccacaaaggggtggcgaaggctcctgctcaccttcaagtgtgaaatcgggtcattcacgaggaaacgggatctttgcagaaagctgtttggcgcgtgatctagaaccacaggttccgcgggggagcgggggcctgagtcggaagaggggctgcaggccgggaggcaaggaggagccattcccagggtgggagaagagggctccaagcagaggctggtgggggcgtttgctgtgttcccggaactgcggggggccgctgggacctggcaaatgatgggaagccatgggtgggttttgagcagggaccgctgtggtctgatcagattgaagggaatggcactggccagggaggaagcagggagcggagcagtgggctggggccagacgaggtggtcgcagtggacaagtgtgcacgtgtgtgtacgagtgtgtgcgtgcaagtgtgcatgtatgatctgaatcagtctcctgactgcagccgcccgccacacacacctgcctgtaagatagagaaggcgggtcagtgtggctgctgacttttggggatggggcctacggggct

SEQ ID NO: 25697 - DNA, 764 bp, Artificial sequence
  DNA replication origin
catgacatcagcaccttctggccaaggtggaacggtcactgggcgagggtgagatccagacatgtaccttccagccagtccctcacataagaagcttccagaaacaagtacagatctaactctaaattggcagaagtaaggtggggggggggcctgtcttgatttccagtgactcttggtgagggctgcgctgggaggccctgcagggcctggccccaggcaggagctgaaggcccttggtgacctctgcctccaaaagtgcccgcccctccaccttcctctctcagctgccccacctctcccgctgccactgcagccccctccctcccccacccacaccgtgtgcctttccttctcttccttcttgggcatcttctgctccaaaacccaccacccgccgggttctatcaaaggccatagagccgaacagcagcaagagcccccactgatggcgggaggtgggggggcggggggggagcagggaggggcggaggtggagggggaatgaggtggtggaggcagaggtggggagggatggttgtgccactcacactttaatacatatttgtccctgacacacgcatgaggtgtccagtacagtacccagaccacagccggcttgcagacatgctagtggccattactgaacattttattggctgtaattgatcgggtgcttcctgtgtcctggacattgtccagcgaggcaggtgctgcccctcccagcaagcagggctctttagacagaggaggagctgacagga

SEQ ID NO: 25698 - DNA, 801 bp, Artificial sequence
  DNA replication origin
atgttggatggatggaatgggtgggtgggtggatggaatgggtgggtggatggatggatggatggatggatggatggatggatggaaaggtagatgggtagatggatggatggatggatggatggatggatggatggatgggtgggtggttggatggatggatggatggatggatggatggatggaaaggtagatggatggttggatggatggatggatggatggatggatggatggatggatggatggatggttggatggatggatggatggatggatggatggatggatggatggaaaggtagatggatggttggatggatggatggatggatggaagatggatggttggatggatggatggatggatggatggatggatatttaggtagatggatgggtggatggaatggatggatggatggatggatggatggatggatggatggatggatggatggatggaaaggtagatggatggttggatggatggatggatggatggatggatgggtgggtgggtggatggatggatggatgcatggatggatggaaaggtagatggatggttggatggatggatggatggatggatggatggatggatggatggatgggtaggtgggcagatgggtaaatggatagataaatgggtatacagatgggtgggtagatggaagcatgggtaggtgggtgtaagattggatggatggattggtggatggacagatgaagtaccgctctcagtactgccttctgtgtcaggtaggggccgctctgagcagacggtggctgccaacc

SEQ ID NO: 25699 - DNA, 2060 bp, Artificial sequence
  DNA replication origin
acagaacccaccccgagggtccgtgcccaccctcctgtccacacaaccgtggtacacacatgcgcactcacacagagcacatgtgtgtcggcagcagccaaccccagtccaggcaggtggccacggacacagcagctgggcccgtctcacagagcgaggctgctcgggatagaaaatgaggctttgaaagtcgtggtgtgtttggaggtttagacgttcgctcagggttgactgcacatttctcccactgcagagagaatgaggcccgccaggcagcccacgcaggtccacggctgggcttgagaacagggccggtcctcgcaggcccctcactccagcaagcaggaccttccagggtgcagaggctctctgctctggggccaggactctgagacatcggttgccctggaaagggcacaggcccggcaccaggtggagtggctccggctcagctccccttccccgcccatgcggcctggggcggatcccctgagggccctggtgcagcttcccctgtgtgaaatggagatgtggccaccagctcatcacagcaccgtcgtgagtccaggaaatgaggcagctggagtaccgtgtgcttaggaggtcctggcaggtcgtccacgtggttagtgtgtccaccgctaccagcagcagcggtaacagtagcagtgggggtgcaggagggtgatagtaatagcagtggtggtagtgataatattgccagtgggagtaggaggggtggtggacgtgctggtgacagtggtagcagtaacagcactaccggtggtaatagtggcaggagtgatagtagtagtggtattaatacaggtggtggtgaccatagtaatggtagtgatagcagtagcagtggcagcagtgatagtggtagttatagccggggtggtggtggtggtggtggcggtggtggtcctaggagagcaggggcgctcatcacagcagcagtagtagtcatggtggcggtgatagtaatagtagcggtggctcacgcctgtaatcccagcgctttgggaggttgaggcgggtggatcacaaggtcaggagttcgagaccagcctggccaacacggtgaaaccccgtctctactaaaaatacaaaaattagcccggcgtggtggtgcgcacccgtaatcccagttactcaacaggctgaggcaggagagtcacttgaacccgggagatggaggttgcagtgggccgagataacgccactgcactccagcctggcaacacagtgatactccgtctcaaaaaaaaaaaaaaaaaaaatagtagcagtggtggtggtggtggtggtggtggtggtggtggtggtggtggtggtggtggtggcggtggtggtggtggtggtggtggtggtggtggtggccgtggtcacagagcagtggcggtcttcatggtagtagtagtagtcatggtggtggtggtagtaatggtagcagtggtggtggtattggtgacacagcagtggcggccattgtagtactaatagtcatggtggcagtggcaccatgcagtggcatcagtgggtgccctccccaggagatgtgtcaaagctcggccaccacccggcccctgcctagcgcaccccacgggtctggggactgacgtccactggtgcctcctcacgggggacagtctatatcccctggttaaaggtaatcgctgtgacatcgcaccgttgtcccaactgtcgcaccagctctcaggcgctgggtcagtggctgaaagcgaaaggtcagcattgcctcttgatcgcactttaatcagatttggcttctcccagcttccgccaccacccttgccagggcctgggcctcattacagaaagtagaaggagatgacatcattcacagctaattgtcttgtttgtccgctggctccgtggttgttttaataaagggcagaggcggataaaggctacatttgcatcctggaaggggaggctgacaagggtctcctgctcatgacatttattgtttgcaaatgagataacccaataacagcagagccagctccctgccgaagcagagaacccaccct

SEQ ID NO: 25700 - DNA, 868 bp, Artificial sequence
  DNA replication origin
cctggcccatcttctgggactcagaatttcccactgggccctctatctgcctccagggccagtcccagcctggctgtcacaggccaggaggccctgccccatgcaaggaactcaccaaggacactgcccttccgtctgtggcactgctgcttttgcctgccggagggcaggtggggagcggctgtccgtgcctcctctccaggaagaaaggcactgcagcccgtcacaggtgcttccaggttggcggaggggcagggcttgggctgcagggccactgcaggtgagacctgacaggtgcaggcgggcgccgtgagggaagcgtgtgcaggggcccagcctgggcgcctcccctccagggacacccatttccacccttcctttggaggcttcctcttggctggaaattcagagttcactcccacaggcaaaggttgaatcgctgatgctgcgccaggcgaacgccatgcaccgcggccccgtcagggacacattttaattaagtgaggacaagagaggtgccctgccgttcctggggggaccctggactgccaccagcatctcatgacacacctgtcaaatcatcacggtcctggcaagaagttcgggagggctgggggcagggggctgggagaagaagggttgcccctggagtcagcccggcctttcctcagcttccagaaggaggtgtgtcttgggaggatgtgggcagagcagaggcagggaggcccgggtgcaggcagatggtgaatggcccttggggcagccatgagatgtgtggggcttcaggaccccaaaggcctatctgctctgcatctttgaggacacccaccctcagtcagcctgcagcctctccatggggacttgccct

SEQ ID NO: 25701 - DNA, 795 bp, Artificial sequence
  DNA replication origin
cacctgggaaatggctccgggggacaccacagatttgccttcaaagcacttgttcaagcagttactcactgggactgattgcagaggaggtgggcagggggcgctggccgggcctctgggctctaattagtcaggtaataaggctgtttgtgccaatttgctgggccgacaggctggctgctcactggctgcctaacgaggtggggagttggggtgagtggcccaggcaaggcccattgactcaccaatgggctgcggctgcccctcctgctcctgtctgcagggcccaggagaggtgagtggaagctggggaggccggaggtccctggcgtgggaaggccacagcagtcattggcacccagaccagcaagaccaaccctccagctggaggccctctgtccctccgaggactcactgcccgaattgccagacaacctgccaggagtcccggcacccacacctcctgtccttgtgggtctgggttgtttgcactgagtgcagagctctgcggctgatgtagggagagaacagagggcttaaccccttcctgaatcctctcattctggcccccaccactgctgagtttaacaccatcctgacacccactttccagagaaatcagcagagcctggaagagcctcagggagttgaaggagagacgaggagaaggggctgccactgtgggttttctgtgtgacctcgggtgatggcctgccctctctgagcctgggttccctgtctgtggtatgagctggtgctgcaggtcagcctttgtgcctctcagagacagtgtgt

SEQ ID NO: 25702 - DNA, 1986 bp, Artificial sequence
  DNA replication origin
catgcctggtgcctgggtgccacgtggttcctcctcctctacatgggagtccacggcttctcacggcatggccagggagtaaacatgttaccctgaagatttccaagtgagttgggtaaaagtcacaggactcttgactcagccttgggagtcccagatgtcacttctgccaaattccattggtcaagcaagtcgccggttaaggccagtgcaggctcaacggggcgggtggatcagagtccatttctccagggaggagaaacaagaaatttgctaccatcttgaatctaccatggtctctggagcccggccccttgcctcccaagctagatcctagcttcttcggcctctctttgctgtctctgtcccaccaggagaacaataggggtgggtgccctccaggcctgtagggacccagccagtttctcctaacccgggcagctctggcccagagggattgtacatggcagtccaggggttgggggctggggtggtcaggctggaacgggagcggccaggggcaggggacaggaatgtgggggaacactggtcctagggaaggccaggaggcctgaggaggaggccagcggatcccagcaggtgagggagacagtggggcaggaggggagtgaggatgggggattgtgacggccccttctcccagcatgaacctcccaagccggctgtggatgtcttgcagctttgctccttggagctggggcccccactgtggtgactggccgctgcctcctgctgtggtccctcccccagattccagcattgcagataataagtgaaggggctcccagtgccagccctgcccacttctgaacaatagtgagtgtcctcaggcactcagagcccaatgaggaagaaagacacatgactggctggcaaagccctattgtgaggggcacggagggaaggggcgggaggaccccgggtcggctgctgggtggcctcgtggtacagagacctaaggggtgggaaggaggccctcagggaggagcagaggctctgtaccgacaggtgggctggcccctcatccacccatgtcctctcctggagcctcagtctgtccatctgtcaaatgggcagagggacagcaccatctcatggagctgtcgtcggggctgcaggctgtgaatctgaaggcttggcacatgggaggtcctcacgaggatgagattcttcgctgtgttgtcgagttttcccagcagagggaagcgtgcagaggcgcagcagagcctggtgtgctggaggaacagacgtgtggtcggggggctggaggcacgggctgtgaagtgaggtaggggttgagggtcaggttttgctgggagagccttgacttctgtctcacagcggaaaaccagagtccttcaagcagggagtgactggagtcccaatttggtttctcaattatcagggaggagggtgagctctaggggttgccagggagatgggggtctccgtggtgggtgcagggcttgctggaactgttctggaggtccctggagatagaggggccctgggttggccctggagcccccggtggtgctagagaacttggcatctgggtgtaggctctgccgggggctgtgtccctgcccagtggccctggctggccttgtctggagaaagctccaccatgtttggccctgggtggcggctccatcaaggccactgccagccgctggccctcagcccttccaggagcctgctcgggagctgccgggacattgctctgcatcgtaatgacgcgtgctggctctcgaggaaggatgtgacattcagcatccaggaaattcattgttattgccgcacactgaatgccaaatgaacccataacggtggtgggactgagctgaaatattatccaggtttcaagtgactctggattattgcaaacacacagggcagggggagtgggtggaggggttgtgcagacgcaggtctgggacagcggctggcaacaggaaaagggga

SEQ ID NO: 25703 - DNA, 1013 bp, Artificial sequence
  DNA replication origin
cagggcagggggagtgggtggaggggttgtgcagacgcaggtctgggacagcggctggcaacaggaaaaggggacagagttggaggcaacaggttgcagctgctgggggcagggggctgggggcagggggctgggggctgggggcagggggctgggggctgggggctgggggcagggggctgggggctgggggctgggggctgggggttgtgggctgggggctgggggccgggggcagggggctgggggctgggggctgggggctgggggccgggggcagggggctgggggctgggggctgggggctgggggcaggggctgggggctgggggctggggcaggcagggccggagcctctctcagtagctctttgctgccccagggaggtcctggtcacagcacgtgggctgacgtggctgctcagaatgggggtgcgtccaccagcggtggctccccggcacagcaggccccaagttggccccgcccctgaggcccgcccgagggtgaaggcttctacagggggtctccgatggcagctgcctgaccagtgcagcacccgcaagctgcactccagcttggggctcccttccctgtcctcccgtccactgtcaccttgcacagccttcgactcgctctcctgactgggaccggcctctcccagccaagctgggcccctgggagagcccccacactaggtctgcaccccgtggtctcccatccctgactccgtcccacaaaccaagctcctgggtggggagagggggcctgtagctgcatgcagtgatgggggggccagtcccccacctccccaggctgttgagaaggcaacaaggaccaagggtggtgagtggctgtccccctttctcagacccagagccagtggctgccccgtggttactttgtccgacagcggtgggttggccggggttggtctctcctgcactggggcagaggctggggggacaggcagcctggatgcagcctctgagcctgtccctctcgggaatggcagc

SEQ ID NO: 25704 - DNA, 906 bp, Artificial sequence
  DNA replication origin
tgctatgtccttagggagccaggcctgcagaagacgcatccaagggagaatcaggccaggcttatgtttcgtgccctggaatatccaggagcccacccagcaccaaggggcagctggccaccttctgtttaccctggagctgctgggccccagcctgtgctcacagcccaccttttggccctgctgggactctgggtctggaatgctttccatgtgagcttcccaccaggagcagtggctgaggcttcagccagcccagcccagcccaggcagctgctgccagaactttcgcccagcagtgagctggtgattccctcctgaagagctgggaaaggagaagcacggacaaatgagaaagacggaggcctttccctgtctcctggggtctggaggcaggtggggactgtcctacacggagcctagaggtgggtggggactgtcctacatggagcccaggggcgggtggggacaggggagccgtccggggccttccctcatctgactggctctcccagcgtcctgcagatggcaggggaagcaggacatggcccacggtgaagacagctgcagcccgcctccctgcatgccttcctgtgaggatgccccgtgactgactcagaacccccgaggccacaccaggcccggctccccaaatgcctcccacaacccagaatggaggggcccaaaaaaacggagggcctgggacctggagggagtgggcctctggtggatggtaggagtgagaaggagcttctctctttggccagggacgagggtggtctggcatcctggcagaggcaccaggcagtgaggacaatgagggctggatatggatgtcagacccatctatcctcgtgggagtggggtacagctgggacccatctatcctcccaggagcagagtgca

SEQ ID NO: 25705 - DNA, 1555 bp, Artificial sequence
  DNA replication origin
gagtgtttgctactgttgcaggggcggtggagctagacggggccaggtgagggacaacgccagacagtgaggccaccatcagggaaaagtgggtatggggaggccggaggggccctgctggctgggtgctgctgggtgcggggagtggagctgcacaggccaggatcgagccctggcccaggaggagaggcccctgggcaggtgatgagcaaagcccagggcaaagtgaaaagctggggccttgcttcaaacattatgaggaatttcagagctctaaccaagcttgagttcctctgagcatgggcctcgccacagccatgaagccggccctggggctgtgctggccaggctgagtttgagaggcttgtgcaaccccaggaggggtgaagaggcctttctcccccagcagctgtgtgacctcaggccaggggccacacctggtctgcacactgcctgggagcacccagtggggctgtctgcaccagccgcccccagacctagaggagctcaatggggtgagggtggaagcatgagggagaagtggggagcctccttatggtgcagggggagcggggtacaggaggagtctgggggagctcccttatgggatagggagatgggatgtggaggagcccaggggaccctttacaggatgggaagacagggtgcaggggaagatggggagcaggagaagccccttataggagggggagacggggtgcgggaggagccccttactggacgggaagatggggtgcgggaggagtcccttatgggatggggagacggggtgcgggaggagccccttacaggacggggagatgggtgcgggaggagccccttataggacggggagacagggtgcgggaggagccccttacaggacggggagatgggtgcgggaggagccccttataggacggggagacagggtgcgggaggagccccttacaggacggggagatgggtgcgggaggagccccttataggacggggagacagggtgcaggaggagccccttacgggatggggagatggggtgctggaagagttgctgagcggcagtggtgaaggaggttggaggccactatggtgactgtcccaagagttacgttggagtgtcctaggagtagaggggaagatgcggctgtcggctgcgtggggtgccctgagagggccagcgtgatgctggggtgccttggcgtacatgggaggtgtcatcctattggcagggctgggccagagccgtggacagtgcaggacaaaatgggggaatgggacctgggctctagtggacagcagacggggctggctcaggctaggcccaggggtcagagcaggcgggatcctggggacagcagatgcacagcccgtatagatgcccaggacttgcttcatttgtgttaattaccttcttttgattttcctgatcaataaattatcccgacgtaattggattatttgcatggctggcaagaggtcgctgtgatttagcgcctggcatcctggcagctgcgtggggtcccattctctctgagctgtcggcctggtcctg

SEQ ID NO: 25706 - DNA, 1308 bp, Artificial sequence
  DNA replication origin
gctggtgcatctgctccggcagctggccgcccctccatccgcggccgtaacatttcaagacagttttgcttgcaaggagtcacagtccattggttttatggaaacactctctgagtttacttcccgcgcaggggaaagacagctgttttatatgcacttggaggaacacctaaagggttttagtgttaattaagttgggaggacggttcttaacaagcacctttttgtaaatgtcaagctgctctgctgtttcactgttgttatggaaggtggaaattaggcagcgccccctactccctcctgcggcaggaaagggggcaccacctgtgtgtgctggggcaggtgtgctgacaccggcttgctcagtagagccacttcctggaatgatccggaaagtataagggcagcccaagagggcagaaaagccgcagcatccagagagtaatggggaggctctgagtgttgggggctggtctcagggactggctccatctggggagagctcacaatgtgagggctgcagacacagctcccacccagagccctggcaggaccccctcatgggcaggtccgggcagcacatgggaatccctgtctcagatggtggatgccagcttgaagctcccaatttcatctttagatttgggcctggacgaaaagtccgacgtgcggggcggtcagcgcttcggctgcggtgggttcccgccccttgctgcctccccaggatgggttcttggccttctggagctccaggccctacccggtttccccctctcatcaaaacatgcgaccaggccatgtttgcggggaggccagtgccccacagcccctgactgtccccggtggggcctgaggtcgatcaggagcagggagagatgaggcgtgaacacctggctgtgagctggtccttccacgtggaacaccctggatggatgggggctgcagatgggccccggggcacacgatggggaaggggaggctcccaggagtatcttcagggcccacagggaacccccagggaaggggcttggacgggtggggctgtggttcccgagggcctggaaagctgtgtggacctgagggtgtgctgggtccaagcccagctgattccagcgggtgggaaaccgtgtgtgaggctctggacggcctgtggacagggcagaggcccgggatgtctgggaggccgggtggggacacagcctttccctgtcggctcaggagttggcaccgctgaggaaagggggatgttcaacaaatgagcttcagagaaaccccccaacaccactactcctggaggaggcatcctga

SEQ ID NO: 25707 - DNA, 1643 bp, Artificial sequence
  DNA replication origin
tgcttaggaaagtgtcgagaaacctccagcgctttggggcaataagggtgtagtgctgtcaagatgctcatcagagcctagtaagatcacctaactgctaatagctggtgggagcgggaagccagcgcctctgatggagcagaaaggcccacgtgtgaggaggaggcaggaagggcttcgcttccaggagggccagggcgggaggactggagactgtgtcctctgagtccctgctcaaggaccgtgtgaggaactccataaaattttatggagtgaatgaactcgccgtgtttggctcgagcaagtgacaggcttgccagctctgaaggtctgttaaaaggcagatgggaagatccgcctctattctgagacaaacttgccttgtgtggtgcgaggtgaggtgtggggaccggcagcgggcctgccgcgcttcccgggcagcggagccggactgcgcacccagcgccccgctctgtggtgtggggtgtgtggtatctgagcccgggacgcggctcagtgactgtgatgggggctgttcagctgttgtgggactgagttacacgcatctcactggcaaagccacatcatctcaccccacaaaatacggaatttggggtgtcatgggtcaagaggctctgcgctggacagtgtggggtatggtgggtgtgtgtccgtctggacgtgtgtccctctgcctgaagggatgcagggccgtgaatggacccagcagcccccgcatcagccctgccctcccacaagcagccgaggaggctggtcctaagccggcgtctgcacagctccctgagggggaacaagggggagggtctcagaatggggctgaatttttctccacattcagtccccggctggacctgcagaaacctaggacggctttgaccctggtttacagctttcgggaaccccagggaatgctctggcctctaggctggaaccctgcccctctgaccccagccctccggccattcctacagcgaaggcccagggatgttaaccagtgcagaggccgggagcagtcccgggaggcgcccctgtttagatctcatggctggtctctgtctccacgttctcagaggcctgggaggggcaggctgagggctctgccagaccctcctgcccagagcccctccccagggtctggcccagcgaggggatggcatcactccctggggtgggtgccggggattacggcaggtttggggaggaggctggtggggcctgagcacgggctggtgtgggggccaggtgaagggtgcccaggtgtgtcaggatgcggctgggagctcactcggctggggggacgcctccccagcgcccgggtggtgaaagtgggtttccccctccagcaagttctttcctcagcccataaagcgggaatcctcccatgtggaaatatggagacaggcccctcccgctgcctgttctccccacggcaggtgaagggcctccttggagggcctctgctttccagtctgttaacacgaagcctgccagaaagtccccaggaccccaacccccactccttagagaagctgctctggcctgtctttgtccctccccgacactgccaactccaggcccccgttaccccactacttatgggcttggtcacctgtcacctcccc

SEQ ID NO: 25708 - DNA, 1673 bp, Artificial sequence
  DNA replication origin
catgtggaaatatggagacaggcccctcccgctgcctgttctccccacggcaggtgaagggcctccttggagggcctctgctttccagtctgttaacacgaagcctgccagaaagtccccaggaccccaacccccactccttagagaagctgctctggcctgtctttgtccctccccgacactgccaactccaggcccccgttaccccactacttatgggcttggtcacctgtcacctcccccaggaggctccttgggccccaggctgccctccagctgggcccagcggctctcctgccagtcccgctggctggggactgcacctgctccccaggcgtggcctggtgccatcacccggacacccaaggacaggtttggactgcccatcctaggctcccatccaggagagggtttggcgggggcagcctggacctgcccattccttgctgtcctagctgcccaggactgtcccagttctagccccagaagccctcagccccagaaaactaggggtgacttaggcttggcggggcgggtcaggatgtatccccactagggagacagtccggccccccaagccatgtgcagagaagcccagggcagtgggatggaaggaggggttcggggaagaatcctgctggggggggtgtccaaaggacaacccgaaggagaggttcaaggaagtcctggctgagcagagatgctggcgggcagcgggggcagtaggggaaccggtggatcgagggctcttcctctaggacctagtgcttccaggagcatctcaggagctgaggggcatctgaggccacagacgggaggctgcatgggtggcgggggaggcgtctgcagcagcaggcgtgggagcccctgaaagctcttggcaggggagggacgggcagctggcatccacgaagccccctgggctgtagcctggagcccagcctggaagggcagctgggtgagaggaggctgggcacacagatgcacagtatgggcaaatggccaggtggggctgtgccgccccggaccgcagggtcccacttggcttctgtctgtcacagtcaccgcccccacttggagagcgtttgctgatggagctcagctccagaaagtgctgtttaaagattgaagagctccaggcaggcgattacagagcacgtgggttgactctctctgacccacagctggtggagggaggggaggagctgggggcgccacagctggatgtgctcctcccccacgagaagcgcccagggcacgtggagcagagggaggtgctggctctcattttcctcctcactggagcgaggcgctggaaggccactccgagggtgggggcggcacgctgcctgttccccactggctctgcccttggggcaccttagcttgggtccagcccacctgccccaataccccttgccggaccctgccctgctgcctgcccctgcctgaaccccaccccccacccaacagtgcttcccgcccagtctttcccagttgcaggctgaagccccccactccctgggcatcccctaggagccctccctagcaccgcctcccacacccatttcccagataagattctaccgttgagaacataccatgggggggccacccaaggcccctgagccacacgtccaaagcacagacaccttcggaacaaaagcctcttg

SEQ ID NO: 25709 - DNA, 1599 bp, Artificial sequence
  DNA replication origin
gttgcatcttttatggaatttgacacactgactgaaattcacctggaaaagaacatgcttagtaaacatggtttcctgggggcggggcggggggagggggcagaggggagggaacaatgaaaattggtcccgcagacaaggttcaagttagagatcccagaaagaagcagatgtacctccgtgcagtgaggtacactggagcaggcacatcccacggaaagggcagggtggacgatggaaaacaggctggaaaacaggctgccaggggacaaaatcaacgcagatttccaagtcacaaacacaggcaaattctgtggattaaagaaagacatctaaagatctacaaacacaaataaaaagaatgcttgatttcactggaaatcaaagatgttgatgagagtaataatgagaaattgtttttcacccataaaattgggggtggggagataaggattagactttctaacaatgacaaaagtgtaagaaaaacaggtaattggctgcgcggctggtggtgaatactttttacaaccttctcagaaaacaatatggaaatgtccaccatgaaggagcagagaaagcctgtttgaggcctccgctgtagctggggacgcctgcctgaacacagaagaatcatccatatccatgctagttgcagtttggtaatagaaaaaaaaaaaagaatcagaaggggaagaaaagagaagcaccttaattcttcgccggcagaggagagctccttacacagcagcatcgcccacaggacagaagcctctgcagccatcaaagaaaatgaggtcgaactaagtgggccaatgtagaaagctcccgggacatcgtgttaaatgtaaaaagcaagttgcagacaacgcatgaaatatgtatgattccatttgtgaaaaagcagcatcgctagacaaaactgtgtattttatttcgtatgtacacacgtgtgcaggtccatgtaaagaaagcagtccagacggtggggcggggttggatatgaagccagccctgctttgtgtctagataccctggcatgcttggagccccccaggcccgaggtcatgtgctcctgccataatttaaacaaatgccttaacagcaaaaagaaattagaatagtcagctggacgtggtctggagtgcaagacgaaggggcggtgcggagagaagggaggcgacctgaccaggcagtgtcttagggaccggagaggagtgaggcccacggcggtcctggggagcggcccacctagagcttgtcgccagtgaacagggagccgtggcgagagggacggggaaacccaagagaccgtggggtggggggaaagccagggaagccccaggcttctaggaagggcctggcgcggagtcagtggggaggagcaggaggccggcgtggccttggacaagaggctcggcggcgcgggggagccccaggacccggggagctgcggagggaagaggaggagcagagcgtggctggaaaggcggtgggacagggaggggtaagctgtgcggccgccttgtcccctacggagaggagccctgggagctgcgggaagagccgggagagagaagaggctgtgggcgggggaca

SEQ ID NO: 25710 - DNA, 1612 bp, Artificial sequence
  DNA replication origin
ccagcccaccccagaggccgagggacaggtaggtgagccacagagggggcggaagggacccgagggcactgagacagaggcttaaaaggccaagtcaagctctaagtcctggagtcaagcagccggctgtcccggcacccggccgcagtgacatccagagagcagccccctagcagtgtcactcaggtgataatgcaagaaagccctgtcctgtgtgtgttcagggcctgggaggcctccgtgagctggctgcacaagcctggggctgtggcactcgcagaggacctgcctggcctcttcatgagcacgagggtctcacttaaccctcaacataccccacagggccggattgaccttctcacctcactggagagggagaagaaccaggagagtctcaggactaaggcacccctccgggcgtcgggtgtgcaggggccgagctgggatgccaattctgcgtcacagccggctgcaggttccgcagcagttttaggggcgacattaccgaggtccttgtgggcgggagagggaagtgtggtggggcgcagagtaggccacggtggggtggggaagcgtcaaggacgatgagctgtcaactgggcgttgaaggatggtggggctccatccagcagaggtgggggtgtgagtgtgatgggggaatgggtgtgtgaggtggttgggtttgtgtgtatgtgtgatgagtgtgtgtgtggtgcatggtgtctgtgtgatgggcctgtgtgtgtggctgtgtgcaggtgtacgtgtgatgagtttgtgtgtgtgtggtgtgtgtgatgagtgtgtaatgagcatgtctgatgagcatatgtgtgatgtgtgtgataagtgtgtgtgtaatgagtgtgatgagtgtgtatgatgagaatgtgtgtggtgtgtgatgagtgtgtgtgatgagcatgtgtgtgatgagtgtgtgtggtgtgtctgtgatgagtgtgggtgatgagtgtgtgtgtgatgtgtggggagtgctgatgggtgcaggtggatgtgtgtgtgtgattgggtggtgtgtgtgcaatgggtgtgtgtgatgagtgtgtgtgtgatgtgtggggaatggggatgggtgcaggtggaggggtgtgtgtgtgtgatgagcaagtttgtgataagcatgtgtttggtgtgtgtgtgtctgtgatgaacgtgtgtgtggtgtgtgtgagtgggtgtgtggtgtgtgtgcaatggtgtgtgtgatgtgtgtggggagtggggactggtgcaggtggaggtgtgtgtattatgagcatgtgtgtgataagcatgtggtgtgtgtgtgagtgtgatgaatgtatgtgtggtgtgtgagtgtgtgtgataagcatgtgtgtgatgagtgtgtgtgtggtgtgtgcgatgggtgtgtgtgatgagtgtgtgtgtgatgtgtgtggagagtgctgatgggtgcaggtggcggtgtgtgtgtgatgagcatgtgtgtgtgtgtgtgtgtgtgtggcgtgtgtggggagtggggatgggtacaggtgcaggtggatgtgctcaccagccaggttctcaggcccgtgctagtgctgtacctggcacaggaggtcagaaggaccattgctcttcc

SEQ ID NO: 25711 - DNA, 821 bp, Artificial sequence
  DNA replication origin
ccacccctgatgaccgagggcatcaccgatgcccaagggttaggccgctgggaattccgggcaggcggctgcagtgggagagttccagaagagagccctcccagcgagtaagatcctcacgtgagagagagctcctggctcatgttgggcctgggaggctgtagacacctgacaatgggacaccaaatgacaaggtggcccagctgccccatgtgaactggaggtcccctgatccactaagccctcgagctgggccacgcccaagatgctcctccctcaccaggtgaacgccacatgtgccgggccaggcccatgtgcccacaggccctcaggcacccacggctacacctgtggcctcatctgtggctcccgggctggctgatgggtggtctggaggctggtggcaagaggcatcatccagcagccaggcctgagcagggcacaatgacagtcacgtttccatgaagtgggagtgatgtgaagccacagtcctgtgggcccccaggtgtggccagaggctggccatgagaaggaccgagctggtgacaaggaggaagctgttggtggcaaggctcgttggaacagacacgggctgtacacacatctgcatccaggtgaccactcaggaagacccagatggggaggctgtgaatgaccaggtgacaagacaccccagcaggtgagccagaacaggggcaaggtggctccggggcggtgggggctcggcaggggctccggggcggtgggggctcagcagcacagactcccctcagggatgcccctgcttgggtccatgttgtccgcagccaccacccagggga

SEQ ID NO: 25712 - DNA, 1312 bp, Artificial sequence
  DNA replication origin
tggtggcgagagtgcccgccctgccccaggcccctgtgcccctgtgagtcctgacctggggttgccagagggagaggcaaagaatgggtcccaagctgccgttttggggcacactggccgaccctcgatattgccctggcaggaaggggcaatgtatgggtcagtgagcgatggcaggggtgagggatcagcctttctcagggtctgtcctgggtgggcgtccaactgccctgcctggcgctgctgagtctgcccctcatttgtaggtgaaagtgcagctcagagagttgaggcaccctgtccagagtcacacagcccggaggtggtagcctggctcaggcttggtggcccgtcctcgccagcccccccgtctgctggtgcatgtaaaggcaggtctgaaagaggctggtgagggcatcactggcgcagggcaccaccacatgtgggcagacccctgcctggtttgtggggctttgacctgtttcaggggactgctggaggaggtgtggagagacccgtgtttctccattaggaatgggggtgcatctcccttgggtaaagctacaggacccctgggagcccagggtgtgccaggctgggggacagtgtgcacagagggtgactgctcagggccagccgtggggctgcatggacacagagtcctggaacccaccgtcagagcatgagcaacgcagccactgggatggggttcagcagaccggccctcccctcactgccgtcttcagtacagggcatgggggagcaaacttttctcttacagggccatatggcacacagtgcgctctgtgtctacacaaacggggtgggccagattggcaggagggccttggctcgctgacgcttgttccagggagagcactgaggaaggctgggtggtcctgctggcagtctggcttcctgggaagagtgaggtcctgtagccagacaagaccctctcccgcctgtgcccaatctgggcgcttatccttggcttcccagggctggagctgctcctcccagatttcagaggtcaggctgcactgcccgaggtcggggggctccgggacaactccttcctgacccttctcattgacagaggggagggaacggtcagcccacagaccttgggtgccgccccctctctgtgctccctggaaaggcgatgcgggctgaccctgtggacattcgctctgggtaatttattagtgagctgatggctcggctcagggctcaggtcccagcggggtcatatttccggccgtatctgatagggctcggctgcaccctcctcgcctccgtccattgcgcctca

SEQ ID NO: 25713 - DNA, 2071 bp, Artificial sequence
  DNA replication origin
ggaggtggtcatggccaccctgttatctcctgtagaggacggcacacggctgctggagtcactgcagtatccacccaaaccactcctcccacaggcctgccctgaacctctgaggcacccatccctttgggggaccctggaggagttatccttgaggaccatgtaggcccctcactctcaccctcccccttctcagcccttgggggcagggtccttggaggaccacggggagccagggaagcatctcaggaaatgcaaacacctgccctgtgaggggcaggggcggcagtaccctccaaggaccccagggcaggggagaacctgaagggcagcaggaggtccccacactgccccctatccagctgggagcagggcagggaggacctggcctggcatcagctcccagggaagccccagccccctctggcctcagtttcccgacctgaagcaagagaggcaggctcatcacccccagagcccttgaaaggcagacacctgcacctgcacagatgcctggtaggcactgcacccctctgtagggaggagtgcccaaaagtcaagaaccctgccaaggctgtgagagaaaattcacacttggggggctccaccggtgagcacgaatgaggagagcacagcctctgccgccaaagacacgggggtggaggcgaggaggcgccattcacagccaggaagcaaccagcgcaacagaggaggggacagagagacagagatagaggtagagagatagagagagaatcagagagaggaagggggacagagacagaaacagggagatagagacagaattagagagaggcagggagacagagatggagacagagagagagacatagaaagatagagacagaatcagagagaggcagggggacagagagatggagacagagagatagagacacagaatcggcgggggcgcggtgcagagagagacacagagagagagtgtgagccgtgctgaggggtgggcccccaggagcccaggggcgccccaccagcaccagcccaaaaaggtgggcatgaccctctgggaagcctttctgtggacccggtctcagagccctgacaattcccagtccccagccccagggcttcccgctaccgaaaggagacaaagcaaagatgtttcttgcagccttatccatgacctccaaacattgcaaatgacaatactaaaatgcaaccctcatgaatacccaatcatcgagggtgactttcagtgacgggacctcggcccagtggaatattatgcagccattaaagatgataattatgaagaccgtggcagcaaaggaaattgcttgcgatggcatttctgaacgagcagggaacaggatttacctgcactggggacaccacagaggaaaagtggtgtctgctcaacagcgtggccggtcgcaagcccgggaagccagcctggcttccaggaaagaattttctcctcctcttattttcattcctctgagtgccacttgtgcagtaaataataaataacgtctctgcttatcttaggaccatgttccagtaaatgaggactgcagcaggagccgtgagccctgactcccggccagagacacgacgtcagaccagaaagaatgaggaggccgcgtggggcccgcgggtgtgcagggcagagagggtaaggcgggccgctgggacacagcttctgcaagctggccttccactgggggctggagggggcagggagcaacagacgtggaaaggccatcctccaccccaggaatcagggggtgataggaggagggcagggggatcactgagggctggggggagcagcggggggcaatgggtgccttgaaggatttggtctggcagaggagattggaggcccccaggtggggcacagcttggcagaggaagtgggagccatggagggctgtggaagaggcagctcagggaggagggtgttggaggagggaagagggtggagagaggacaggtcaagactgtcaccaagggtcagtgttagggttaggggcccagacctcagaccctgaggctccatccagcctctgaggcactgccaggctgg

SEQ ID NO: 25714 - DNA, 1193 bp, Artificial sequence
  DNA replication origin
cacagcttctgcaagctggccttccactgggggctggagggggcagggagcaacagacgtggaaaggccatcctccaccccaggaatcagggggtgataggaggagggcagggggatcactgagggctggggggagcagcggggggcaatgggtgccttgaaggatttggtctggcagaggagattggaggcccccaggtggggcacagcttggcagaggaagtgggagccatggagggctgtggaagaggcagctcagggaggagggtgttggaggagggaagagggtggagagaggacaggtcaagactgtcaccaagggtcagtgttagggttaggggcccagacctcagaccctgaggctccatccagcctctgaggcactgccaggctggggcatgccacaggcacagcaggagctgggccagactcagcatgggcaggcctcacgccctcgcggggcagcctcgccagatgccgagcagcaggctgtgtacagcgagcaatgccccagccaggaacaacctcagagctggcccggctcccagggtgcctcagccccagttgtcaccatgtcacagacaaggatgctgaggttcacagcagcccgaaactcccactccatcttccagactcaggctgggcccatacacgtgagcagaccagcagagaaagggcccaggtaggcaaatgtgtaggagctgcccccgcctgcagcctgggaggctcggccccagggaaaaggaggccgaggccaccaaccagccctcctcacggccctggcccggcccctgccccatagagcttgcaaactctggccccttagccagagcccctctgccattgcagccccctccccctgtccacatgtcctggggaccctgtccagcagcctgcatccgagacagcgggcagacgaagagaggttcagtggggacttgcgtgaagagacggggtcaggaggggctcctgtcttgcctgggcccctgaggctgagtctggctgccctgcagtccctgtccaggagctgcccctcaccctacaggaagtgacaggcccagcatagcgcaccagccaggacagggtacaggttccaggacggtgctgctgggccccacatggctcagacctgggtaccagcggcctcccgccggggactcaccagtctgcttcccgcccccacaccaggagga

SEQ ID NO: 25715 - DNA, 927 bp, Artificial sequence
  DNA replication origin
ggctgtctcggagcccccggagtgcttgagctctcctggaagccctgcccgtcctgcccgtcctgcccgtcagagccgcaggaggccgcgccagcaggtgagggccacgtgccgcaggtgcaggacaaggccgaggagccgggcccgcaggtcctccagtgccgttgccacgggcttggcccggccgcagtataggcccagggccagcacgagcaggacgcacacacacagctgcaggagcagggagccgccgtgtggcctgggccggccgggcactgcggccagagggcaggcagggtcagcgccagccagcgcgacccttccctggaggactggggctggtggggaagggatggggagattccaccctgtccatgcccatggcccctccctagcctcttggggtctccttgcaacaagagctccccaactggggactccttagaggccctggccctgtgacacctccctcggggagggagtgagggtgggtgcacccacggagggggcagtggggcacagggatgtgggctcagaactcacccctgacagtggctgtggcgttcttgtcagcaatgtctgcgaaagagaatggagagtcagctgggggcacctgcctcagtccatcgggcgcccccgccctctcgtctcaccctgcacccccgaaggaccctgagactattcatcagtgagagacccaggcccagccggtcctgacacttcctcaaagggacagtcatgatttgagaatccgccctcatgttctcctccagttgctgtttcatggaccgggactgtgtgtccagatgaccccaggggcccaggtcttacaggggttgtggcactgaaggcaggtggccacggcccccccatgtcctgggccctgccagagctgtgtgggtgtggccggtgtccccgcctccctct

SEQ ID NO: 25716 - DNA, 1048 bp, Artificial sequence
  DNA replication origin
tccccgagggaggtgtcacagggccagggcctctaaggagtccccagttggggagctcttgttgcaaggagaccccaagaggctagggaggggccatgggcatggacagggtggaatctccccatcccttccccaccagccccagtcctccagggaagggtcgcgctggctggcgctgaccctgcctgccctctggccgcagtgcccggccggcccaggccacacggcggctccctgctcctgcagctgtgtgtgtgcgtcctgctcgtgctggccctgggcctatactgcggccgggccaagcccgtggcaacggcactggaggacctgcgggcccggctcctcggccttgtcctgcacctgcggcacgtggccctcacctgctggcgcggcctcctgcggctctgacgggcaggacgggcaggacgggcagggcttccaggagagctcaagcactccgggggctccgagacagcctgagccctggccctgctgcttggtgaatcatgggggccaaaaggggctgctgcctgagggctaactaggaaaagggggaccccgtggcgtgagatcggacatggggggcacagcaggcggccccgccacactagtcagcacagccctcctgtctcctgtgttgggtccatgtgagattttattagaaagaggattcgactgctaacagttgaggctccccaggctcacccaaagacccctccctcgtcccagcaggaactcctgctgctgctagggcctggcccggccatcaccgtgtgcaccctcttgaggagggggacacactgcccgtgttcaaggggctgctcggaggaggcaaacccagccttttgcgattatggcttgtggggaatccagacctcgaaaccccacggggagggaagggtctggttgtcaaggtgggtccctttgatgtgaggtgccatcctctgagcccaggtctgacccccctacccagccccgtgagtctggagaggccccagggaaggacccctcatcaggggcggcttcaggtgtagaagccgaggggaca

SEQ ID NO: 25717 - DNA, 1079 bp, Artificial sequence
  DNA replication origin
ggtgtggggcgggggcggggggcacctccaggcctcgcacagggccccttggctgtcccagtaggacctgactggccagcctatgtggagggcgtccagcttgtctcccccaaccctggccggatgctgtctccatgccagctggcccaggggtggccagatgtcacttagccctgaacgaattctgcatgaattctgccatccaggcagaggctgcgtgtggggaggagctcacggcaccttccagcctctggccccaggttggccccctccccagctgagtccccctcctgggtgggtgccataggcctgggagaccctgtggccgggctcagggaggcttctgaggcctgtgagttcacctcactgtgtgtgggtcctgtctgtgcttggctgagggtcagggaagtggtaatctgggctccacagaatcgggggcatcatctggttggggatttcgggggcacacgtaccacatagaggactgggccaggagccatggcaggggtctgtgtgtgggtgagtatgggaggatgtgattgtgagtgcctttgtgcatgggagggtgtgattgtgtatatgagtgcatgagaggatgtgactgagtgtgcatgtgtgggtgtgacagtgcaggtgtgactgcatgtgaaggtgtcactgagtgtgcacgagagggtgtgactgcatgtgagagtgtgtgactgcatgggaggatatgagtgtgcatgagtgtgcatgtgagggtgtgactgagtgcatgagagtgtgactgcctgtgagtgaatgtgtgactgcatgtgcgagtgactgcctgggaggatgtgattgtgcatgagtgtgcatgtgggtgtgactgcatgtgagggtgtgactgttgtgcgtgtgaaggcttgattgtgagtgtgcctgggaggatgtgagtgtgagggtgtgactccctgtgacatgagtgtgcatgcatgtgagtgtgaggaagagtgtgtaggtgtgagtgtctaggcaggtgtgtctgcagtgtgtgcagcatgtgcgtaagtgcatgtgaatgtgcgtgtgttgcatgtgagcatgtgcacgcc

SEQ ID NO: 25718 - DNA, 1033 bp, Artificial sequence
  DNA replication origin
acacccatagtctctctgcaccatcctcatcagggagccggcacccacccagtccactgccaggctcacaggtgggcactggggcgctcacctcactacacgtggcgtcgaggggacacacgcagggctgcatgtggccagggcccaggcagagccccccagctgcttccccaggcaggcccgtgcccccgagcgcagcagggaggtcggggccagctccccctgcctgcactgtgcctaaatgacagcgctcttctcctcttggaaggaggtgcgtggggacggccgggccagcagcagctccttctcgtggatcaggctgtccagcaggtcctcctgacggtagttgtggtagaccttcaggaaggccagcgtggtgatggccagccaggccagccatgaggcccagaggccaaactgcacagagggcagggtcagggtcagaagccgttgggggtccgctgtcagtgcaaccccctcccaccagcccccaggctctgctctgcagggaaaggacaggactcagaggaaggaggaggccggggacatggggcagggccagctcctgaagaccctgcccaagatcaagcttctgagttccttcctgcagccagcatcgttttccagcacctgtggccctcccggaacccactctggtgcaaaagccctgggcactcagaccaaccctcactccaggccggccagaggccccgaggaggggcagtggccagtggcgagtgctttctcctccagcagctccggcctgtcggctctaaggagggcgggtaaacagcggaggctcctccaaccaccggaataaattgacctttagccgctgtttccaaacagttgaaggagaaacaatttaatcagaaccaggcctgagctacattaagctgattctcatttgagcgtatttgccatcagactgcactcacaccttaatccaactggcacaaattaggcctgaggcctcttccactcactaaatttgcatgaaggtgtctttgacaggtccagttcatctcggcaa

SEQ ID NO: 25719 - DNA, 727 bp, Artificial sequence
  DNA replication origin
tcgcccaacaattgtagggcaaagctcctggctctctggccagcggctcagccatgtcccgcactggctgtcctggtggtcaccctccaccctatgtcctgctgttttagctgtgaagagctccaggacatcgacttggagctgggcgtggacaactccgccttctacgatcagtttgcaattgcccaggtagggggctctgggcaagaagggaggcttgcaatgctgggagggggccatttactgctggacatttgctgagctctcccccatccagaggaggaggcaggctcctgtgtggataaggtagttagcaatgggaccaggcagtgggagcagtcgggaaggcttcctgcaggaggtgggggagagctgggcttttgtaggtgggtttggggaggagatggccacagtgagttagaatcaggaagtggcaaggccctggggtctggggtgggaagtgtgggggtgtggggggaggtggtgccagaaacgaaaccaggcatcagatcctgggggtccagtgtagggacaagggctttggactttggtgctggcgctgggtgggcctgttcagatcagagctggaggcttagaggagtcccctagccagggggaagctgatacagagtccaaggaaggaggcaggggatcccacttgtgaattcagatttgccaccctgcccttgtataagctgcgtcccccgccccctaggagacttggtgg

SEQ ID NO: 25720 - DNA, 1279 bp, Artificial sequence
  DNA replication origin
ccagggcgctcctacccacaggcgctgggattctcattcctcctccagagtttgcagccccactcagcatagccctggctccctcccttctccctgaagcccctcttcttcccctctctggcccctctctcagccaaaaccaagcggtgggctcacagcgggggcaacaggagggcttccccactcctgccgcccacacccctctgagcccttctcatctcccacctgcgtgcaggaagtgaaaacctacaacaaaggatgggggtgagggcagagtttgggaggagcctgggtttcatgagtgctctcccggaacctctacaggatctcgggctgctcctgggcacagcaggcctcagccaggggagtgggagggcccacagagggcacccacagagggagtgggtgggttcacagagggagtgggtgggctcacagagggggtgggtgggctcacagagggggtgggtgggttcacagagggggtgggtggattcacagaggtggtagatgggctcacagagggcacccacagagggagagggtgggttcacagagggagtgggtgggctcacagagggagtgggagggttcacagagagcacctgcagagggagtgggtgggcccccagagggcccccagggtgccactggctaagggtgtcaccgcaccccaggtgaaccaggttgtatgggctccagtatctagccggagcaggaaagagaaagaggaaaatgcaggccaggaggaggaaggcgctgagcccacaaggcacagccctcgccctgcagtctctctccagctccccatccaaggcctgagctcgaggtgggcctgggtggctcccctccagacagccatctgccgtccctttcccggggcgatggtgccgggtggggctccccagttcgccttgtcactgggacctggagagctcagtgcaagccctagaccgggctgggagttgtcgccggtcctggcgagtgtggcccggctgagcccgcccaggaaggtccaggcctgctgggtgatgacagtgcaacatctgcaacccaagggagcagatgcccggaagcgggaggtgatgcgcagctggggaggggaggcactggccttgtacgcaggaccggtggtcgtcatggtccctggatgtgtgtgtagacaaagggcggtctgagtggagggggtgagggcggattgttgacatttgcgggcctcggagctgcctgagagacggagggactcgcgcgcctccccggggaggtgggtctgggggcg

SEQ ID NO: 25721 - DNA, 1105 bp, Artificial sequence
  DNA replication origin
gaggaagaagagcgtgcgccaggcgtgcgcggcggccagcagcagagacaggaggctggcgagcaggctgaagcggcaggcggccggcgggccccactcctgcaccgtgaagcgctcgcgctcctgcaccgtgaggttggcgctcagccacatgccctcggtgaagagcaggcagcggccgcggaagtcgtggccgttctcggacagcgggaccaccaccacgaagctgaacaggaaggccaagaagtagcaggcgcactgagcgaaaaggaaattgttgagcgccatggccggcccgggcgagagcggcggcgggaaggccgcgggaggctgcgccgggcggggaggccgcgggaggctgcgcagtggcggcgccggcaggtcccgcgcgcccctcccgggacgcgtgcgcatcggccgagcgcgggaagcgcctgcggtcagcaccgcggacagctcctggtgcgcgcgggccaggagcccggggtccaggggccagagaagggcggcctgcgggagatgcgggaattttaccaggtcggcctggagggaccgaccctgtgccgctaaagacttcgggagccacctgtacgggcctcacacaggccgactctgggtcgtcagttcctcatcagctcgaacgaaaggagaccaggagagagagggcggggcggggggtgttggaggacacccccaaggtgctcatagtgaggtgtaggagtgcggtttgcagtccaggctgaagtgattcctttgcgggggtcccgaaatgcaatgtatgaggggaggggccagatcgtggaggagtcggggtccaagggactgggacagaggtcatcctcgaagagatggggagggtgaggccaggtgtgggcaggagggggtggaccgggagcttctgcagcgccagccctccgcggggacgtgtgttacactgcctgacatgggcaggaccctggagctgcatttgtaagataaataatgggtgtcccgagcgcctcattaagacatctttgctgagatggaaatcgctgaggcattaattaatagaattaatgccttttctagttgcctttaagactaagtcacctttagtccaattccc

SEQ ID NO: 25722 - DNA, 1432 bp, Artificial sequence
  DNA replication origin
tttttatatgcaaatcaataaaaagccctttgctatctcatttaaatcagcgaataattaaccaggctgtccagcccacctccattctcctcaaatccctggaagtgagaggggccagcactgaccaggagagcagggtcccagggccccctctggacagactgcccacacagtgggcgctgggtctgctggacccaggaggcctggggggctgaccacctcctccgggacatggtcagagcaatggcctgagccagccctgcgaagaccctggctccgagagagcggggacagtgacagtgcttcagacagtcacccactgaggaacgggcaccacccgtcgcccgagacctgtgtcgccacccactgaggaacgggcaccacccgtcgcccgagacctgtgtcgccacccactgaggaacgggcaccacccgtcgcccgagacctgtgtcgccacccactgaggaacgggcaccacccgtcgtccgagacctgtgtcgccacccactgaggaacgggcaccacccgtcgtccgagacctgtgtcgccacccactgaggaacgggtacgacctgtcatccgagacgtgtgtcaccacccacgcactctgcactccaaggctccacacagagaaacaagggcgtcggggatgctaagtccaaatgcgattcaggggagcccagctctgggagtggggcatcttagggcaccttcattctgtgattttgctttttttccctgtttatggatgcgtaagagtgagctatgataaaatcctatgagtaagtctgatagctctcccatgcatgtgaagtggagcttctatgtgataaagcactgtgtcatagttttacaggcagcattttttctttcttagaggtacataaaacaacagcgcaccttataatcagcggcattcaacaaaatggttaaaaaataataccccgcagtccagcagggtctatgcaagaggaggaagaatggctcacattagatcagaccctcaggtgactcaccagtctgctacaaggactaagggccaaaaaaaccgcatgaattatctcaatagacacagaagacccatataaagttcaacacctatttataatttctaaaaactctcacaaggctacaaataaaagagaacatctttaacctgaaaaaacctactttccagaaacccccaggaaacatcagacttcacagagaaatctaagacacaatctcttccagactagaaatcaagggcgacccttatcaccactcagtttaacataatctcgaaagtcccaggaaacactgcaaacaaaaaaaaaaaaataagaaatgaagaggtgtaaggactggaaaggaagagataaaactgtcacgactggtggataacgtggccatctatgtagaaaatgtcactgaatcaacaaactactgggac

SEQ ID NO: 25723 - DNA, 1093 bp, Artificial sequence
  DNA replication origin
ctcctcactcaccctgtggggcctgcactcattcattcaccctgatggggccttcactcattcattcacctgatgaggctttcacgcgttccttcacctgatggggccttcactccttcattcacgctgtggggccttcactcattccttcaccctgtggggccttcactcattccttcacctgatggggccttcaatccttcattcacgccgtggggccttcactcattcattcaccctgtggggccttcattcattccttcacctgatggggccttcaatccttcattcacgccgtgggaccttcactcattcattcaccccgtggggccttcactacttcattcacctgatggggccttcactccttcattcaccccgtggggccttcacgcattcattcaccccgtggggccttcacgcattcactcctctgtgagcgtaagcagaggggtgcttgcaggtgagactggagagggccactgggaaggtccttgtggccaaggggagggtttggctgctccgagtgctgtggtgagtgctccgtggtgtcccagctgtggtcacagctgtgggatgccagggaggggtggcgggagtgggcaggctgggtgtggagggggcaggctggagagaggaaggggcttaagggatggagtgagagcggcccagccccagcacagccctggtccccttcaccctaactgtcctctccctgtctccccagcctgccttctcaggggatacctgggcggggggtgagtgggggcagtggggacggtgggggctgggaaggatggggatctggctttctcactcattggggtctttccagcctgaggtccttcacccccacgaccctcacaggtctgtgcccccagcaccctctgctcctgacccgtggcccaggcccttatctgtccggcccggctgggtggggtgagggtggtgctgagtgagtgcagggggcatcttgaagcccctggatacagctggcctcttaggaccccccgcttctgcctctgtgtgggtgctttgctggggtcaactcaggagccaatgggggctgtttcccctgcctcccctcctcgtg

SEQ ID NO: 25724 - DNA, 1226 bp, Artificial sequence
  DNA replication origin
gcctggcgaggcggctgggcgaacctggtgtatccaggcctggcgaggcggctgggcgaacctggtgtatccaggccgggcgaggcggctgggcgaacctggtgtatccaggccgggcgaggcggctgggcgaacctggtgtatccaggcctggcgaggcggctgggcgaacctggtgtatccaggccgggcgaggcggctgggcgaacctggtgtatccaggcctggcgaggcggctgggcgaacctggtgtatccaggccgggcgaggcggctgggcgaacctggtgtatccaggccgagcgaggtggctcacgcctgtaatcccatcacatggaaggccaagacgggtggaccgcttgaactcaggagtgcaagaccaacctggccaacaggtgaaaatccatcaatacaaaaaatacgaaaattagctaaacatgctggtgtgcgcctgtagtcccagctactcaggaggctgaagtgggaggattgcttgagcccagggaggtcgaggctgcagtgagccataatggcgccactgcactccatcctgggcaacagagcgagaccctgtctcaaaaagaaaaaagtggcgtatccatcaaggggaatattatccagcctcaacaacaccaacaacaacaacaaacacaggaggtcctgacacaggctgccacacagctcaggcttgaagacattatgctgagggaaagaaccgacacaaaagggcaagtgctgcctgactccatgtttgtgaggctcccagagcagtcaaaaccgcagagacagaaagcagaatggagggtgccaggctgggggaaggagggtgtggggagtttgtgtttgctgtttcagagtttccgtttgggaaggtcaaaaagttctggagattggttgcacaacaatgcgaatgtacttactgccactgaacttgaactgtacctggaaacatgggaagacggtgtggaaacaagcccccagtcagctggtctggcagctgatttgatgcagatcaagagggaagtgaggaatcgatagggaagactgtgatcacccctaatcggcacagacagataggaggtgttaagggggttcagaagaggttaagacataggagagatggataagaaggttttccgtacttccgatcgaaattccagaggggctgggcacagtggcttatgcctgtaatcccagcactttgggaagccacggcaggtggatcac

SEQ ID NO: 25725 - DNA, 1124 bp, Artificial sequence
  DNA replication origin
cgcggtggctcacacctgtaatcccagcactttgggaggctgaggcgggcggatcatgaggtcaggagattgagaccatcctggctaacatagtgaaaccctgtctttactaaaaatacaaaaacttagccagacgtggtggtgggtgcctgtagtcccagctactcgggaggctgaggcaggagaatggcgtgaacccaggaggcggagcttgcagtgagcagagatcatgccactgcactccagcctgggtgacagagcgagacttgcctcaaaaagaaaagagaagggaaggggagggaaggggaaggaaggggagggaagagggaggaaaggagggaaggagggaaggaaggaagggagggagggaggaagggagggagggagggaagggaaggaaggatggaaggaaggaaggaaggagggaaggagggaaggagggaaggtgggaaggcgggaaggaaggaaggaattccaagaggtggaaataaataaaacggggagagcccaccagctccctgacaatatggctgagaattttccagaactgataaaatatggaaacttcagcctcaagagtgcagcactctcaagcaggaagaataaaagcagcccatacctagctgtcccgtggtacactcagaatgctgaaggagaacttgctggaggcagaccccgcgaacggcaagaacaggagcagatgaccgtctctgaagtgccgaggcagaggcagcagccggacccacacgccctgctccactcccacttacgggtgtgggagaagcatcagatcagcaaaatgactgcgccaccacccagctccttagcagagcaacctccacagaatacagctcagaaagaggggacgcctgggctgccagaaagagtggggtgcaaacatgtgcaaacctcaacgagtgctggctgtgtgcaacaaagccctgtggaaagtggagggtgataaaggcaaggcagacctgagtattgggcagtcgtaatgatctgtgagccaggaggggcgtgatcaggaggaggatggaaacactggctatctttgaattctaaatatacttgttaaaattctaagagtgactattttaaaatagaaatagagcatataactt

SEQ ID NO: 25726 - DNA, 1439 bp, Artificial sequence
  DNA replication origin
gggagaagcatcagatcagcaaaatgactgcgccaccacccagctccttagcagagcaacctccacagaatacagctcagaaagaggggacgcctgggctgccagaaagagtggggtgcaaacatgtgcaaacctcaacgagtgctggctgtgtgcaacaaagccctgtggaaagtggagggtgataaaggcaaggcagacctgagtattgggcagtcgtaatgatctgtgagccaggaggggcgtgatcaggaggaggatggaaacactggctatctttgaattctaaatatacttgttaaaattctaagagtgactattttaaaatagaaatagagcatataacttccacttaactctccaaggaaaaaatagaatgtcagactgagccagagccatggaagagtgctcaggcagcgggagctacacgtgcaaaggccctggggaaggagggaagaggcgcatgcctggcactgatgtcagtgcggctggaggcagacgggcgcagaaaggggtctgagacgtggctgaaggcagcaggaccagacaggatggggcctcagggccgtggttctgagcttcattccaacagcaggaaaagggaggcatgtttgtaacctgcagggaggcgggagccatggacaggattgcatctgtgacttgccagcatcccgccggctcccatgggagcagactgccctcaggccccagcggagggagggagaacagacagaacaattttggcccctggacatggtggcggcaggggaggtggtgagcaatgcaggaagggagacttaggaagcagtgcctagctcctcggtgtggaggcagtgaggggagggaagaacacggagagaggctggctcggggcttgacaaagtggtggggtgtcccacgggaggcaaaagcagatggtgggggcgggcgagagagtcacggttctttcagcctcatcaagtgtgtgtttctgaggacgtggagggcggtgggaggctgacggtgcacagacagcgcgggagcgggggcggggggcagtcttcatagatgagatggggcacggcccctccggagaggaggcctctcctcggggagaggaggggatgacagaggcagaggtggggcagccagggaggtaggagggtgctatggactgaagtgtggcccccccaaatccttatgtcaagccgcaacccccaatgtgactgatttggaaatagggtctttagaaggtaactacgacctttacgaagtcataagggtgggccctaatccaacagggctgtggccttccaagaagaggaggagacaccagaggtgggcgcagcaaggccgggagaaggtttcatgagaaaccagctctgacactggtggcaccttgatcttggacttccaggctccagagctgtgagaaaataaaggtctatcgtctaagctgc

SEQ ID NO: 25727 - DNA, 913 bp, Artificial sequence
  DNA replication origin
ctggcagagctggtgggcctccttcgggcacctcactgagcaggctaagccagtgctggccctcgggagacgcagtccacctccctgctgacctccagtgagccctcgagctgtccctccccagcctccttctcggttgcctcagttgtctggtgggagtccagatgggatgcgtgctgtttcccgtggcggcacgcaggttacttgcatgatggggagagccgctcagctttgaactgtcttatgtcgggggtccgtgccatcttttgcttaaagaaggggttctccacctaacgaggtgagaagacactgggccttgcaaccctggtgttgggaatttgaggagctggagggagcaccagatgggctccctggaggtgctcctttgagagcagggaagtgcctgagacccacccgcaccccaacccatagtctgcctgcgtgtagctgtgttctgacttgctctgcttctggccttgaaccctgcagactcagaagaggcaggggtggggcggcagagaaggggagagggggagagggctcagggcaggccctgtaggctgatgaattggatcttgcctgatgatcttggagggaaggaaataaagtctagaatgtcttgcaggtgatttttggccactggactgtgttttgaagagatgtagtgccaagactttgtaggtctccaaagtctccggaggtaatttgtgtgtgtgtgtgtgtgtctgtgtgtgtgtggtggggaggggggcgggtttcagaagtatttatgaatggaatggtgactggaatgaggacaccactgcgactgtctgccctcccctgcgggccttctcccttctccttcactctcccctctaccctcccatctttccctgaacacctccctccctgccccacggctccagggcct

SEQ ID NO: 25728 - DNA, 1588 bp, Artificial sequence
  DNA replication origin
gtatgtgtgtgcaatattcaaatgaagaggacagagcttcctgcctgacacaagcccctgactgactgccccacccaccgtcccttctaagagcagcagcctggtcccagctcttgccttccctcctcagaccagggataagccctgaccaatgtctacctcctgcagccagacacagacaggctgactcaggtgctcttggagtttgaactgagaaatgcaagagaagcttgcaaaatgctgagaggctccacaaggggctgctgaagccccagcaggcaaagctgccagctacagagcaaaaagccaagggaggggcagggatgttggaggaaggacctggctggaggtgactgggggcggtcgtgtccttgtcagcaagcatagagcagaacagctgcccaaggtgccacagctggaagggtgagtgggtggatgggtggatgaaagggtgggtgggtgggtggatgggtggatgaatgggtgggtaggtggggggatgggtggatgagtggatgatggctgggtaggtggatgggtggatgagtaggtggatggatgtgttggtggataggtgggtgggtggatggatgaatggatgggcagatggatggataagggtgggtgcatgggtggatgaatgggtgagtaggtgggtggatgggtggatgagtggatgatgggtgggtaggccgatgggtaagtggatggtgggtggatggatggatgggtgggtggatggatgaatgaatgggcagatgaatggatgagggtgggtgggtgagtggcaaatgggtgggtaagtggggggatgggtgcatgagtggatgatgggtgggtaggtggatggatggatgggtaggtgggtggataggtgggtgggtaggtgggtgggtggatggacaaatagatgggcagatggatggatgagggtgggtggatcagtcggtgggtaggtggttagatgggtggatgagtggatgatgggtaggtggatgggtagatggatgaagggatgggcagatggatggatgagtagatgataggtgggtaggtggatgggtggatgggtaggtggatggatgtgtgagtggataggtgggtgggtggatagatgaatggatgggcagatggatggataagggtaggtggatgaatgggtgggtaggtgggtggatgggtggatgagtggattaagggtgaataggtggatgggtaggtgtatggataagtggatggacagatgggtgggtggatggatgaatggataggcagatggatggatgagggtgggtgggtgaatgggtgggtaggtgggtgaacagacggatgaagtgtgggtgtgtgtgggaatggatggatgaatgggtgaatgggtacataggtgggcaaggtgggtggacatgggtgagcaggcatgttttcacttacttcattctgtaacaatgtcagagatcatctcagggcaccacagtaggatgcaaaataaaatctcaaaaggggaaaaaagataaaaagcattctgggtgctgaactgatgaaggaaatgaacccatggccaggctgctgctcaggtggaccccaggaa

SEQ ID NO: 25729 - DNA, 883 bp, Artificial sequence
  DNA replication origin
ccctccacaccgggctccagggccccttccagagcagaaggccttcctgccctccctcaagctgggctttgggtctcctggtgcactcctggacccgaacattggtgcctgccctggtaccaccccaccctggagggcacgggcggggctgactcatctgcgttgggagctgatgcctggcagcggtgctgggcagtgggtgtgtttgttgatccagtgaatggaggaatgtgaggaggttggtggggagtgagctttgacctgcagccccctcccctgtccacctgcctgggggaaagtcagagtcctgagccttactcagaggctggagtaggaggtcaggtgtgggcgaggggtccacctttcctgccctgatgggggagggaggcccagcgcccccagggccgctcctgcctggggctgtctcccttgcacccagtcgtgcttccgagctgcacacctggtccagagaggccagcacaggccggagcagggtgaagaaggtggggtgaatgtgatttagttggagagaggttggagaagtccctggggtcggcagggagtgcagaggagggctttgggccctgattaagagtgtgtgtctgtgtgtgtgtgtgtgtatgtgtgtgtgtgtgtgtggagtggaggccgaggtcagaggtctgggagggtggaaatgtggacactgaaagggggttttccgtcaggcttgaacccaccatgcccggggcagcagggttcaacccggcttgagcactgattttctgagacatacagaggccccctcctcttctccttcagtggctcaccctcaaccctctgtacctccagcgctcccagactccatcctggccctattctgagcttgcttcctggccctggg

SEQ ID NO: 25730 - DNA, 1256 bp, Artificial sequence
  DNA replication origin
acccctcgcccacacctgacctcctactccagcctctgagtaaggctcaggactctgactttcccccaggcaggtggacaggggagggggctgcaggtcaaagctcactccccaccaacctcctcacattcctccattcactggatcaacaaacacacccactgcccagcaccgctgccaggcatcagctcccaacgcagatgagtcagccccgcccgtgccctccagggtggggtggtaccagggcaggcaccaatgttcgggtccaggagtgcaccaggagacccaaagcccagcttgagggagggcaggaaggccttctgctctggaaggggccctggagcccggtgtggagggccggaggccggccttccaggtgcattccaagaattgcagagtgcctgtctaggagcagcggccgcccaggttggagggtgtccagtgagcgcctgccttggctggctcctcaggcacacccggggctgtggcctgcagctgctcctgcactggggctgagccagcaaacttccggggctggggctgctgggcagggcaaggtccgcacagggagcagacagacgcagcctgcaattcggcgcttatccccaccggagcggaggcacaccaaagccaaaggacacgcagctggcctcaaagcagaagctgcatcggggctgggaagccattcaggagcccttttctctcccctcgccctcaccctgagccctggccgccacggcccacacagcaggccctccggagagagatgtcaggactccgagtggagacactttatccgcatgttcttgaccctcatacagcccttacgggtacttattctattttacagatggggaaactgaggctccacagagtcatatccgagcctgaggccgcacagggagtgctggcgccggttctcagggcaggggttgtgtctgctctgtcacatgtcacacgggggctcccccaggcctgccttcctctgccctccctctagctgccagtggcccccaaaccccaggcctggtgcgctgcttcctgcagctctgactgagggtcagacgtcagaagggacttccagagctggggtctggctctcatccaaccaggctggctttcagagccgactatgggcacgccccatgctggtcaatgtcggcggtggggggatgggtgcccccctcaatctaggagacagatgaggccggacagcagaggggtggcagagaaaacccaccccattgcgacacctc

SEQ ID NO: 25731 - DNA, 1264 bp, Artificial sequence
  DNA replication origin
ggcagcagggagtcaggtctcattcctgactacagggaaatttgacctccaggcaccagcaaaaagccaggggcttgagcttacttcactgtccccgtccagagctgggccagctgcgtcctgccccacacccacaggcagcaccgcatcactttccagtcaccacccacccctcccgcagcctgcatgaaccgcataacttttccaacccaggaagtaactgcactttgatggaaggcgcagagtctatttcaggtaggagcttccacgtccccacatgtgcggtgtgtgtcattcgcttgacagccgtcagctcctccacaaagtgggcgctcacctgaaggttaactcaggagccctggctgtggaggctacagtcgcacctggccacttggtccgtccccactagcgacatcccctttgccgggctgcagggcccatgacagtccagggatgggagggcagggcctgggcagggcccactgcaccaacctggcttttagaacagaaaattgctgctgccctggtaggggtgggagcagtgtgaggtctcagaccccaggcctggaacccaatgctactatttgctgcactgggggctgagcaccgacaccccaaaagcccctggctgggtggcaccctcggggtctgaggcactgctctgggaccccaccttcccagtgcagggcggcagggagcaggtcccagcctgagctgctgtcccacccttcagagtgcagatgtggaaactgaggccggaagagggcgagtatcctgctccattccagtgccagacggaggggcagggctggcagtaagggaatttcctacgtccagcgccttctgggtgtgcctgacctctggcccggttcctgggttcctggttccctgcctgggcagggtctctgcctctctgcctcctggtgtgtccagctggagtgggcagtaatgctgtggtcacagctgagctgcgggagccctgggtggggagcttgagccccagaaggcccagacagacagaccaccccccacgcctgtgctccccagggggcattggggacggtcagggacacagctggtcaccccgccttcccctccttagtcatggtcactcctggggcgactccccagttagagggttgacgggtgggtctgggggcgtacagggattggatcctaccccacccaaaaggaacagagagctgtgatggaggctgattcccctaagcctgccagcggttgcggggtgggaagggctccctgt

SEQ ID NO: 25732 - DNA, 1217 bp, Artificial sequence
  DNA replication origin
gcagagaccctgcccaggcagggaaccaggaacccaggaaccgggccagaggtcaggcacacccagaaggcgctggacgtaggaaattcccttactgccagccctgcccctccgtctggcactggaatggagcaggatactcgccctcttccggcctcagtttccacatctgcactctgaagggtgggacagcagctcaggctgggacctgctccctgccgccctgcactgggaaggtggggtcccagagcagtgcctcagaccccgagggtgccacccagccaggggcttttggggtgtcggtgctcagcccccagtgcagcaaatagtagcattgggttccaggcctggggtctgagacctcacactgctcccacccctaccagggcagcagcaattttctgttctaaaagccaggttggtgcagtgggccctgcccaggccctgccctcccatccctggactgtcatgggccctgcagcccggcaaaggggatgtcgctagtggggacggaccaagtggccaggtgcgactgtagcctccacagccagggctcctgagttaaccttcaggtgagcgcccactttgtggaggagctgacggctgtcaagcgaatgacacacaccgcacatgtggggacgtggaagctcctacctgaaatagactctgcgccttccatcaaagtgcagttacttcctgggttggaaaagttatgcggttcatgcaggctgcgggaggggtgggtggtgactggaaagtgatgcggtgctgcctgtgggtgtggggcaggacgcagctggcccagctctggacggggacagtgaagtaagctcaagcccctggctttttgctggtgcctggaggtcaaatttccctgtagtcaggaatgagacctgactccctgctgccagcccctcccctacctccatcttgcaaacagcaggtgtctgataggtgtgtggttcatggcccagtggacacattacattggagaaggcacacccacctctgttttcaggatggtggacgggaaggccgggaggtggaggccacataggagccagtctctggagggtggtccccaggggccacagcagacccaggcctagtggacacctaaagtcaaagactaagttctaccaacggtgggaaggagagagggcaggggcacgggctccccgtcgctggaggggtgagcagggtccaaccacctggcc

SEQ ID NO: 25733 - DNA, 2202 bp, Artificial sequence
  DNA replication origin
tggccagattgcgggtcagagtgctgcatatatggtctggccgtggtgtgtttgcaggttcagcctcatgctgaaaagcagttggaacattctccggtgtagagcctgacggggggcctgggtgagatcgggcagccttggcagcaccacagaaggaggagagcagctccggcctcagcctccggggcctcagccggagccctgtctatgccgggccgcagcccagcgagaccctgttacactcactgcccccagacagcacccggtgggacacggccagctggggcagctcagacacagagccaggcacccaggcacgggggtataggaacctgatgggcaggagggccagtttcctcccaccgtggctccaccccactgaccaagggggatcctcttgactggggtctttcaggggcttgcacagggcaaggagcgctgggcagtgccaagaggggcagtactcaggtcagggagcatcttctgtgtccagggacaccctggggcctggggcacggtggctctcggcggcactgcttgtctctaaaaggtcaggattttttgcatggagggacccccggggctcttggctggagaggacactctggatgccaggggccgggcctgggagagttcataactccgtccactcagcctgtgccaaggggacagggactccggccaatggaggcgggggaggaaaggagggtcagttctggggcctctttaggcagcaacagccaaggcgggtgggaatatatgcagaggcccggctgcctggctcttcatggtggtgggagcaaccctactgccaccaggaggggcgttggggacctgaggctgcctgggagggacccggctgtctctggcagctcagcggtcagcagcgatgagaagccaggggagcgtgaggagcagcccaggacagggcccagagtgggtgggcagaggtggccggaaggtcttgcgcatctgggtgagtggacggccactgggtgaccaagagggccgggcctgggagggtggcttaaaaccacagtgcaccgggggctccgggctctccgttctacagtgcccagaccaggaccccctgcagggaggaggggcatcccaaggacagcctctcaggatgctcctggcagcctggtgctggaggtgcagaagaagaaactgaggcccaggcaggatgagtgactgggccaaggtctgctggtgagggcccgggctggggacatgcagatcagaaccctggcttacacctgtcaggctgcctcctggaaggagcccactggccccctggggcagttggacaggtggagggctgaggggcggtgcggggagtaggggctggactgccggaaacaccaggcttggtcgtggaccaggctggggagtgggcctgagacctcaagggcaggtgctccaggacactctcccaaggcaggaggggaggaatagagcctcctggggaggcaggcgcttgggtgctcgaccccgctcagctcccgtgacctcaaatgcccttcagcctggggtcccctgacttaccgggttgggcagcacttgaagcaaagccatgtgggacctccagtcacagcccagccgtgcccaggtgtgggactgtgggcacagacccagcttctctaggacccagccgcctccagttccccacctgttgtgggaggtataaagtgcctgccttggaggtggtgggaagccgagggccagggtggagagtgctgggccggggtggaggctcagagcgtgtccctgccaggcccggccccctagctccctccccgaggctccacgctgctgttctcagacgctaaatataagatctaagccatacatggttgcaggagggcctgggatgcccctgaccttcgaggccagttcccagggtctgtggttggggacagcggctggggggatgtggtggcgtggagctgatgtcagaggtgcaacccgcctgtcctgctgttctgttttggggaaaggcacgtgttggggctcttctgggctgggcctgttacctacccgggtgttcccagggctggagtcagacctgttgcgactgaatcctggtaaaaccctgagtgccaagggtttccgtcttcctgttggtgtgggccccctacccacatgcagacgggcagactgaggcccaggggagacctgggagtcgcccctcctccccag

SEQ ID NO: 25734 - DNA, 1104 bp, Artificial sequence
  DNA replication origin
cagggggaccgctggtgcagcagtgcggggactggggtgacctggaagcctcagactcggagtgaatgtggatgtttttcctgagcccaggaagccagtcctcctccaggaagccctccttgcctgcctggctgcgcttcctcctggtggttccccaggcctcccggggccttttgggcctgaagcctcataccaggtccccagcgtccgcctgggcggccctcccacactgcggctcaccctgggagagctggcgcacgtagccctggttgctgaggatgtactcgatgccctgccgcgagttcatgacggcgcgcacgcagctgacgcaggtgagctgcagcagggcgtcggagatacgtgcaacgccgcggcccgacagccgcgccagcgcctccagcagcaggtccaggccgctctgctccaggaactgcaccatccagccgccgtcgctgccctccaggcgcttgcgcaggccggagtagttgaccacagagggcatctggagcagccggatgcacagctcggggtccgcgctctccaggttggcctccgtggggtccgaatcctgtggccccagcttctccttcagcgctgcccacttgcgctgtgcgccctccttcaccgacatcttgccgagctgcaggcagagggcagggagccgtcagcggggaggggatgggggctgtcctcctggccaccagcgcaggcggggccacttccctcggtctcagtttctctgctgcaattcctgctcacgtgccatgctgagggttaggggtagcactgtgtcccccactatatcttaggcttccctgtacccatccctgaccgaatttcagcaaccgaggcggcaggcaggaagggccctactgcgcgcatgaggaccccgaggctcagggctgggaggggaggagccggctcagaaacctgcagcacgaggccagcacggcccctgcagagtgacgggaccggatgagcttggggaggactcgggggagcgggaggctcccctggctggaacattacccacggtaatgatgcgacaaaacggcgcatctgaggctgccttatctcaccccagggcacttcccccgccccagt

SEQ ID NO: 25735 - DNA, 1576 bp, Artificial sequence
  DNA replication origin
cacgctaagcagggtgaccacgtagggcacgttgtcgctgccggagagctcgttcatgacaatgctgaagcggtactgctggctgcacaccgtctgtggggagggcggggtcagggcacacccaggcagggagccccatgtgcccaggcccaggccctgccgcccaccttgtagtggtccagggcgtccagggtcagcacgtggccctcgggagagtagatgcacagggcagccagtagctcaaacacctgcttcttcaccatcacgttggatgtgtccagggctgccagggtggagtgggcaggctcagcagggccaatgcaccccttcccatgcctgtgcagctgggctcagggctggggctctgggcctggcaggcagacgccagggggtgccgggcacttgtctgtggcccacagcagtgggctgggacccaacgaggtgccccactcctcggtgtcctggccctgctcctggaccacagggccagaccctgcagggaagggcttggaggcagctgccccatcctgtcactggctctgggcccagcttttctcccaatgcagcacttactgtgtttatggcagacacaacctcattcctatgaacccctgcctcccaccccatctggagctgtgaaagttctgggggtgtctctcatctgaccctgctgagaacaattcacaaaagactccatagaggggccctgccaggcccaggctggggagacgggctgagaatggctggcccctacacctgcctctgtcccctgggtccgacagaaacgaggcgcctctggcttgcttgcctgcacaggtaactgccgcccccatgggcccagccccgcccatcactgcccaccctagctcgtccccaagcatcggtaggacctggcagcagccatggagtggcacagcaagggtttctctcaagggaccgggactaactttgggcacagcctggggagacttcctggaggacaggaaagtgagctggggcttaaaggcttagcggcgcaggaccttggaggacgcaaaggcagaaaacacgagcagaggcagagaccaagggcctgcctgcctgccgggaacgagtcccctgggtgctggagtaggggacagggcggggagggaggcgctagggaaggcgctgggaggtggagggtgacaccatcagtaggtgtgggccagacctcaagggctctgtctgggctgaggctgaagggcttggagctaggcaggtgtatgtagggagccactcgggtggattcgcatctctgactcagtgactcctgccgccgaggtgtggacgagggcagagagcccagagggtgggagccagcacaggacggggaggaagggtggggcagagccacacaacagagaggggcacagggggaccgctggtgcagcagtgcggggactggggtgacctggaagcctcagactcggagtgaatgtggatgtttttcctgagcccaggaagccagtcctcctccaggaagccctccttgcctgcctggctgcgcttcctcctggtggttccccaggcctcccggggccttttgggcctgaag

SEQ ID NO: 25736 - DNA, 721 bp, Artificial sequence
  DNA replication origin
ttgtagtgttttgcggggagctgcccctctggctctggtctaggttggcctggacgcttttatgggccttgaccagggggctcggtctgggtcgccccttgacagacaggagccgctcaaccacttcctccagggtgcattcctgggctgcagtaggggatgtccagggtcaagggagaagggagccggagagggagggatgggggcttgaggaagaggcaggaaaaagcggccacctcccctgggcagaggatgggttggggccaagggcaggctcccccccccatggtctaagacctcagtgtctgcccaccaggctgtgcctacgcccctgccccgccccctcaccatcgctggccaggagcacggcccggttcacgaggctctccagggcctcccagagcagctggctggagcggagggtgggctccaggtgcaggaggccctgcagcaccgacaggagctgggcagacaccggggagcagctcacctggacgggcgagtgtggggtgcaggtcagcagccggcccctccctggtggactaaggactgtggcctgtctgccagggtgtccagccccatcaccccctctattcccacggatccctagagatgagagtttcagcgactgtggtactggtgacatgtgggactgtcctgtgcattatgggatgttaaacagaaccactggtctctacctactcaatgccaacagcacccc

SEQ ID NO: 25737 - DNA, 774 bp, Artificial sequence
  DNA replication origin
gggggggctgcaggtgcagggcagtagtggaggtgggggtggaggagggccccagcccataccaggcagcaggggtgggggtgggggcgggcatcccaagcccgggagtggtggaggtggtgggggcaggaactcacaggagcctggcaggggtggtggtagaggaggtgctgggggggccatggcccccaggcctggcaggggtgggggcgggggtgctgttgggagggccttagcccccacactgggcagggggggtggtgggggagggggagggggctcggcactggaaccagggagcaggggtgggggtgggggtgggggtggggtggacgcctgctgctccagggctctgggctgcgaaactttcaggatgctctcactctgggcgtggtccacgggctcgcaggcagcagctgctgctggctgctggccctccacgctgggcttgggggttgtagtgttttgcggggagctgcccctctggctctggtctaggttggcctggacgcttttatgggccttgaccagggggctcggtctgggtcgccccttgacagacaggagccgctcaaccacttcctccagggtgcattcctgggctgcagtaggggatgtccagggtcaagggagaagggagccggagagggagggatgggggcttgaggaagaggcaggaaaaagcggccacctcccctgggcagaggatgggttggggccaagggcaggctcccccccccatggtctaagacctcagtgtctgcccaccaggct

SEQ ID NO: 25738 - DNA, 882 bp, Artificial sequence
  DNA replication origin
cttggtctccgtgagcttcagcaatgtgctgatcttgaagccgtcggcgtcaccggtgtggctgccctgggaggggcagggagtgagtctcaccagcccctggcaccaggtgggatggggagctgcccctgacttacgtagttgaggaagttcccaattctcaggatcagctggcagaagatgggcagctggcggctggtgagcaggcctgcaggggcagccagggctggagaggggctcttggttcggagcccccagatgccctggcggtggggtgtggtcctgcttgccagtgcccctgcactccctggctcctccccaggctcagcccagcaccggaaggatcacaggacagggcctgggggctgcaaaccctccaccgacgggagtggacacctacagtgtgcctgacagacgtgagctgtgcctcactggtccgtacctgtccctctccctgcccagtggctgtggcaggtccccatggattcccctttcagagatggtgcccgtgtgtgtgcacttatgtctgtacatgtatgtgagggtgtgtgtgttgggggggtgtgtacgtgtgtctgtgtgtcctgtgtgcatgtgtgtgactgtgcttgtgggcttgtgtgtgtgcacgtgcccgagtggcggtgtgcatgcgtgtgtgcacgtgcctgagtggcggtgtgcttgtgtgtgcgcgtgccggagagtggcagtgtgcttgtgtgtgtgcacgtgcccgagtggcggtgggcatgcgtgtgtctgtgcgtccagtaggtgtgtgcaccgaggtggtggcagcagggtggtttccggagtggtggtgaaggctggcacccttaggtgctcttagcagccattatgatactggcagtagcaggg

SEQ ID NO: 25739 - DNA, 1646 bp, Artificial sequence
  DNA replication origin
tggggcccgagtttccccaggtgtgcatggtcagggcacaggcccctgctccttgtcagagaccaccgtcctcagggcctgtccctgtggccgtcaccctcccgcaactcagggcctcaccccgggtggtgcccgcgcggggctctcacgggactgtcacgtgcccttgcccccaggccagcatctcggccttccgggcactggatgagctgtttgaggccatcgagcagaagcaacgggagctggccgactacctgtgtgaggacgcccagcagctgtccctggaggacacgttcagcaccatgaaggctttccgggaccttttcctccgcgccctgaaggtggggcagcccggcgggacacagcctgtctggctagagtggggtcccgaggcccctggccttcctccggcaggatgggcagaggcacctttcgtcgggccgacacagccatgtgggccctgcgctgctgcggctcagggagggggacgcccaggcccatggagcccctgagggatgccacgctggggtgacggggccacatctgccagtgcaggagaacaaggaccggaaggagcaggcggcgaaggcagagaggaggaagcagcagctggcggaggaggaggcgcggcggcctcggggagaggacgggaagcctggtgaggctgggccggctgggcggggagggggtgactctgggatccttgtctgtgctccagcctccccaccacccccagccctctaggtgggctccagggtcccatgccgctctctgagtgccccacgctcctcagtcaggaaggggcccgggaagcaggaggaggtgtgtgtcatcgatgccctgctggctgacatcaggaagggcttccagctgcggaagacagcccggggccgcggggacaccgacgggggcagcaaggcagcctccatggatcccccaagagccacagagcctggtaagaccctctcccactgcctcctcatggtccccttgccactgtccctaccctgtgcctccaggaagtcctcctgacttcactggaaagccctctcctctccctgggccaccctggaggcccctaagactggggacagccgaggggacaggtggtggccgctcagccctcatccctccctccactcactccagctcctccactgtaaccgcaggccctgccctcagtgctgaagcagcagtccagcccgctgggctccagagagatgaggccaggcccactgaccgatgcccttgggctcagagggtgctagaggtggcaggaaaggcaggcggcaaggccctggtgggaggaccccattcctggggtggctgcctcagggtgctgggaatggcatggcccagtgtcccccaccctgccacagtgtagacagaccaaggacgctgaggccgggtcctgctctgagacatcagaggaggctttctggggaggaggttttgcagggcgttcaggtagacagcggaatggaggaggctgcacctgggctggctcgggggcagggtgcctgcccttcactggtgtgtccctccatccagtggccaccagtaaccctgcaggagatcccgtgggcagcacgcgctgtcccgcctctgagcccggccttgatgctacaacagccagcgagtcccgg

SEQ ID NO: 25740 - DNA, 834 bp, Artificial sequence
  DNA replication origin
tagtggccagagaaccgggcagccctcagagggtgttggcatggctgtcccgggccccccagccccacccactccgagtcagggttgcttctgtgtgataagccgttgagtgcgtttcttttatttggaagcagaggttccccctgattctgatgataataaaacaaagaaactgtgtgtgatccagtaaggtatgtacgcagccggcgctccgtgggggctaacagcagctgcagggcagtggggctggagcttgctgcccacacccctccgggacactaacctggcttctctccagcccgcgtggtgcgtcagtgtggccttgccgctcccgcagccctggtggtgggcttcccgccccatcccctccctctccgcaggttacctgctcaactggtgcctcctgcaggcaggacgcaacctcagtgctggccccgggcatgcgggcctcgagagggcaggtggcagggccagccggactcccttagcaagcaggatccgggccctggggcgtgggcgggacctcctggctggcaggacaggctgaggttgctcctgtctggtgtcctggcgctaactgcagttccagtaaccctgtggctttcctgctctgtctgttggtggagggctatcttcactctaagtgtgtcaatggcgtggggccttctggggcatgtccccaggaagtctgtgaggagaccgggacagtcgcaagggcagatgctgccagggacaagtacactgcaacccccctcctgttggacagtgtcctcccaccccgaggccatgggtgggtctatggagaagcagattaccccccgcacaccgagtctt

SEQ ID NO: 25741 - DNA, 1665 bp, Artificial sequence
  DNA replication origin
tgccgtcctcccagtcccccccgggcagggtccgctgtggggcgcttcacgtccacatgcttctaatactcggtcccagtgcagatgtgccacttgccccaataattccttctctagttgttgctttgttgtttttgcaaacaagattgtatccagagtcacatgctgtgtttggttatcatatcacttcagtctcttttgttctagaacattcctgcccctttttgtcttgtatgacattgacgttctggaagataacttcactttgggtttgcctgattgcgcccccaagtaggtccaggttgagttttggggcaggagttctaccccaagggatgccatgtcctccccagctgggtggggacgtttgtggcagcagcgctgaccacggctgcgggggtggtttctgaacctccactgcacgaacaccacgctgtctggttaataagcaccggtggtgacctgtggaaccaaccgctgcagcgcggttctgtgttcgccgcccctcgtccgagcgttcccccctcccctccctttttccatcacgtgagttttgaacgtgcagtaatccttcactgccactgccgtgcatttgatggggaccagcgggggccctgagcgcttcccatctttggcacaagcccctgttcctagctcaccccagacttgctgatccccccatccctgcacgggccttggtcttggccatttctccaggttccctgagtggggaatggtgctgagaccctcctttgagtgattgttttggatagtttttgttttcttgctgtctgtttagagtagtggttctcaaaccctgcttgggccatcccactggggagctgggacaccacctggcactgtggtggcagtgggggtgacactcagacaagggccatcgagggcccctggaccagaaagcgaagagggcgttgggggcaggaggcctgtggggccatgtgtgggggccgtctgggtggcgggagctgttggggcagggctgagcgccctcagcagcccactggagaaagcgctgctggggtcctcgtgtggggcccagggcccgacgtggaagcaatggagggctgcagggggtggcagtggggatgaatgagtaaggacagagtgcagcctgggtctcagacagggggtgggggacaggccacagagattccctatctcagcagagaggagacaggctcaggctgccacgccttgccaaaacccagcctggccaggccagcccggcaccttccacctagataagttgtgctgctccagagaaagagcctggggtcagagtggacctgcgatgcatggcacaacctgctggacagtggcgatgaggggttcagggacctgggcacccagaagcgggcacctgatattgtacccagcaaaactgctcctaataatgtcattttttctctctcttacaggcctcaggcccaggcccaaggccaagtgagagagcccaggccacaggacatgctgccattctgccaagagaggctcttctgggggccaggctgggactgggccccggaaaccaaaactccgtgccttacccagccggggccctcctggagccttcttggggtgttgtggctgggaacccgacaggcaccagtgccctgccaggcctggtgccctcctggaccgcct

SEQ ID NO: 25742 - DNA, 1958 bp, Artificial sequence
  DNA replication origin
gcgcgccccctggcggccgcgaagagccgcgcagcgcgtcctctccgaggactttgtgtccccgcaactgcccgcacttctgccccacggcaggggccccgcgtcccgcccgggcgcgctgtggctcgggcctggctgtagcgagcaggcgggctccagcatggagctccggccctcagcacccaagtctggggtaaagggacccatcctgtcagcgtcacctggctggcatgggagcaacccccagggatgcacgccaccgtggggcccaggttcccaagaggtcccacaccagaccttcccggcccagcctgtggagggactaggccccagagggaggcgatggtctgcgaggctcccgtgttcccggctggttgtcctgtctcacccatcccgccccacccctcccaagtagatgaggcttggaggaagccagccctggtggccaagagaagggtcctggggccccaagggcggaaaagagaatcaggttcttgcttcagagcagggaggcggggtcctttgttccctccctgacggctctcagttgccaaagagcctggagccacgaggccccttgggctcagggcaactccaaggctagtgacagggagtccatggagacgggacactccctgtgaggaaggagtggagcttgggcctgtcacagcaaaggtcgctcacactgagttagtgattcaggtgcagccaaggacaccactgcccacccctgcctgcagcctccccacccctcctctcttggcacctgaccgtgccccagcctgggggagaggggctgtttgaagcctggcctcctgccccctgcacccatgtccccagtcccctcttcttccactgggcacatcgacacttcctctccctcagcatccttgcggggaaaatgccgttgtatgggttccaagcagtcagtggggcctcagtggaaaagcagtcttcatgcatgaacttcctagtgccaccttgggggtgacagctggtcgggggtgaacagaccaccggccccagcttgggaaggggctggagcagggttggagggctctgagatttggcagaacctggagcctgctgagaaggggctgcacctgagggtggggcagtgggtctgggggtgtcaaggagggaatttggggcacagcagagagctgtgcaggtagggaagaggcagactgcaacaggagaaaccaagagcgtcatggaggtttgtttccagatgagagaaaccgacaatgttaaatgtccaccaggaaccacaaagtcccatcagacaaggaggtgctgccaaggcctggggggggccaccagctctgagcccttcctggggacccctggggctctgggctagcagatgtcagatagaggcttgggggactgggggacatgctagaccacctcactaagggggcttggactgaccctgcagaggcgaacgctagtgactcactgacttctccaggcccggactataaatagccacgggcccgggtaggggcagggagttggggcttttctaaaaacagtcctgcccaggcccaacagctggggcccctgccagtcacacggctcagcccgaattagaacacctccaccccttaccccccacagtgggcctgtccccaggtgtgggcagcacgggagccaccgagcttggggccatccatctgggccctgctgtctcgatgtgtgaccttgggcaagaacgagggtgcatgggtgtgtccacctgtgggttccactctttgggggccacacctcccagtgggaccatcgcacacagtggcccaggacacacagacacccacagccacctgcatacacgcgtgcagccacggagcctcgccatgcaaggcacccccagagctcctgttggttttggttcctttgctggctgtagcccactaaactgacttctcatggagcacagaggaaaaagaaaaacc

SEQ ID NO: 25743 - DNA, 1764 bp, Artificial sequence
  DNA replication origin
ccaggccatctgcctgcctggccgttggtccgtgcggcccctcacccctaaagtgctcgagactcaactgggcttcccgggcagcggcgagggggcggggatgtggcggccggaggtcaccggggcgtcactgcgcccgccctggccctcccccggcccgccccctgccccgccccctgccccggcccggctccatttaatggcgcggacgccggcggcggcgggctcctggccgggccagcgcagcggaagagccaagccagcatgtcggggacccgagcctccaacgaccggccccccggcgcaggcggcgtcaagcgggggcggctgcagcaggaggcggcggcgaccggctcccgcgtgacggtggtgctgggcgcgcagtggggggacgagggcaaaggcaaggtggtggacctgctggccacggacgccgacatcatcagccgctgccaggtgcgggctggggcgccgggtccctcccccaccgcccagcgagcccccctcccccgacccagacggcccctgtcctcccatgccctggccggtcactcacccgcttggatgccttccttccgggagcacctttcccagggccaccccacccacgcacgcacacgcaccactcacacaacccccgacccacacacaccgccctccttccacccacccctactccaccaccccggcagcgggccagggcacagctataaatacaagtcgctgagttggggacacccgatccttagggggtggcgcatgccatgggtgtgacgctggaccctccatgggggaaccagaggacccagccccaggatggtttgaggacccccaagacaccccccttcctcatttacagtgatcacctggggcctgtctgggtctgggatagggcttacctggctccccgcaaggtctgcaggtggtggagggggtaaaagctgcctgctgggtgggggtgaccccggtgagtcagccaaggagaggcagaggtggaagggggccaggccgtcctggggggcaattggggccgcgcctgagggagggtgcttgggacgatcctagccagacatgggagagggagggccacagacttctggccagggtgaccccgtggctggcagtgccaccgaggaggccagacctgctttgtcccccagggcccagggctgggcctctgccagccggcagctgctctcagcgcccccatctgttctgactgagctgcacactgggcactctctcgggccgccaccctggggctacatgccccatgccagggcagccaagtctgctgcccatgggctgacttacagctccaggcacaaaggggtcaactttgggatgcacgcgtctggggtttggagcctgcctggggctgctgccaataatggaacaagggcccccgcaccgtcccttctccgggttctgtggcctccttcctgagctccagagaggagggctggggcccaagacgaagggagtcagcccagcaccctgtgtggctcagggctgtccgagcccctcctgccggaagggactgtggcttcctagaaagttcttcctggaacagtgggggacctccccccttgctctccgtcctaagcagcaggcaagcacatccctcgctccagagatcccccaggtcctagaggtggtcctcagcccatgctccctccacactgcctctgccccgccaccttgtcctgggccgccagggggcatgtccagcgctctactgctcttcaccctccagggcgccct

SEQ ID NO: 25744 - DNA, 1107 bp, Artificial sequence
  DNA replication origin
gaagggaggccgcccaggaaacaggtcctaaaggtggacccaaggcgggaggctgtgggaggtgacgacactctcaggggcccccagatgcactctgaccacaggccccaaaccaccgggatgggaaaagaatgaggcgagccgtgcggggctttgggcagccccagatcacctctgggcagagtggaaagtccatgtccagggtgagcaaagcagcaactcttgccaagtgccaggggccaccagggggcttgagagctgggctcgaagtgatggctctgctggtgcaggcgtcagcagcaggcagagccagagcctgggtgtccagaggcttgggcagccagggaaggagcatagccaaaacccagggtggccccaggcccaggtgaccctttggggactggggagcagaacaggcttgttgccagggctggcagcttcagccctcctggcagccagcctgcctcccagatgcggcccagcccgctctgcccacggcgtgcactttgaccacctggaccactcggccctcgctctgtcctctgctcagccccttgagtgagagggtgaggtttggcctctgtgcgcctggagacccccatgtcgggtaccttcatctggcttcaggcatccacactccaagtaagaaagacgcagtcttccctggggagatccagccagaccctctgccagcctctgacgacatggggtggtcagacatggtgtgcacaagaacaggggaggtgctgggagcccggtggtaggggagaacccccaccgctaggaggagagatgggcactgtgaggtaggggtcactgagcacttgcagagagcctggggctggggccccaaagaagaccagtccctgaccttcccttgcagagcggcgccccgctgagatccagctcggtccccgcactcgcaggtggggacaaagggccaggccctgggctatcatggtgggcacgtggcaccagtgagggctccaaatgtggcagtgactcattcctccacgcctgagcctctgttcccctgtgaaggagctcttcaggatgatcctgcctcactggctcgtgaggaggctgcagggggacaggtgtgggctc

SEQ ID NO: 25745 - DNA, 1171 bp, Artificial sequence
  DNA replication origin
gcccctctgactcccagaaggtctctggtgcaccctggagcctaaggcaaagcgttacctgatggccccttggaaagggtgcccagagccccaacagccacagcacaggggccctcaatgcacaggatgccagctcccacctggcgctgccacaccacagagaaacaccctgtgatctcacacccctgcatacatggccatagctttccacccgtctgctggctggacactggctctagctagacctggagggcacgggaggctgggagtgcgctatggagacccagggcaggccccttcagcccgtgtactgggcatggccagacataaacagcccagtgccctgaggtcagcactgcagcagaaggacggggattctaaaccctgaccagggcgcgctggagccctgtggtcctcggcagggagcccagttatccagaggaagtatcttggagatggaaggaggaactagggggtgaaggccgggcactgccagcctgggaacagggggcaggggagacccaggtgcacctgccttcagctgcccatttgaggggtaggagctggacagcacgcaggggaaggaaacgccatggacgcaagggaggaagcacaggcggaggtacctggggaccccctcggaagtaggatggggtgtccgtgcccagagagaagagagggaacacaggaccccagcacagacaggcagacgatgtgatgtggccgcagagcagggagggcagacctggctcagaggagactcagcctggaggggagagaggcttggaagcagccaggggagcaggcaaggaggaagatggcatagtggggccagggggcatagtgcagccgaacagacccagagccgccctggaatggaggaaagacagccgaggtgtgaggtgggggtgtggtcagaaggtgggggatgcaaaatgtaggctcagcctggagaagggaggccgcccaggaaacaggtcctaaaggtggacccaaggcgggaggctgtgggaggtgacgacactctcaggggcccccagatgcactctgaccacaggccccaaaccaccgggatgggaaaagaatgaggcgagccgtgcggggctttgggcagccccagatcacctctgggcagagtggaaagtccatgtccagggtgagcaaagcagca

SEQ ID NO: 25746 - DNA, 1259 bp, Artificial sequence
  DNA replication origin
ccctgcagttacacacagccctgcctcattgcaggaacaccagtcccgggcagctgagacctgcacacctgtagcagtgacctcggttctgtcccagacctcaccccactaccaaaaggggcagagaacaattcctttgggttgaaggaatgaatgaatggtgggagcctgcaagcagagcccagaagggagtgaagcagtgtaagtgggtgaacccactgcaccacactggtagtcacaggtgtgtgcacactgggcgccagggccccttgctctgtgccgggcacagtcgtcgtacaaactgccattgagtgccagtgccaagaggttgggcccaggagcctcacggcctctgaaaagcaccgccggcctccccctgcgcttgccactctgctgccttcactgcctggcgtgagctcgctgacagccaggccctgggccagggctggggatggacacagaggcaggagagctggtcgctcccattccagggggagaggtgcaaacagccactccactgtcccctcctccccaagcctgcatgagagctgaaccaggaggtggtatagcatgggcctggcacagctagggccgagggggaagcgggcagagtgcagtggcgttgaggcacggcgccgtcagacatgcagtccgctaacgctgtggggaggagaaggctctggagcatgggaggtagcgagcctcgtccaggtgttgctgcaggtagggctgacgatgggggctgcattgcaggggagaaaggggcctccttgggaaccctgggccaagcagacgctgtggccagaggagtcatccatggcagtaaagggcctatggactgcagggcagagaagggcagtggcaagtgggccgggagtggagggggccctggcaggtcaaaggaggtcaatggacagcccccaagccaggcagatggcaggtggcatcccaaggatttagggacggggtggacaggagcaggacgatggctgcagggcaaggctgggacccgcacgggtgacaagctcagtgcaggggcagggcatgcgccatctgggcagtgtggaggtgaggagcaaggacaaagcctgtgtgtggagacgccttgcacgtgtcagcagcatggcgtcggcgtgggagggaggaggtagcgtcggcgtgggggaggagcgtggcgtcggcgtcgtggggaggagcgtggcgtcggcgtggtggggaggagcgtggcgtcggcgtggtggggaggagcgtggcgtcgg

SEQ ID NO: 25747 - DNA, 1301 bp, Artificial sequence
  DNA replication origin
gcagatggcaggtggcatcccaaggatttagggacggggtggacaggagcaggacgatggctgcagggcaaggctgggacccgcacgggtgacaagctcagtgcaggggcagggcatgcgccatctgggcagtgtggaggtgaggagcaaggacaaagcctgtgtgtggagacgccttgcacgtgtcagcagcatggcgtcggcgtgggagggaggaggtagcgtcggcgtgggggaggagcgtggcgtcggcgtcgtggggaggagcgtggcgtcggcgtggtggggaggagcgtggcgtcggcgtggtggggaggagcgtggcgtcggcgtcgtggggaggagcgtggcgtcggcgtcgtggggaggagcgtggcgtcggcgtcgtggggaggagcgtggcgtcggcgtcgtggggaggagcgtggcgtcggcgtcgggaggagcgtggcgtcggcgtcgtggggaggagcgtggcgtcggcgtcgtggggaggagcgtggcgtcggcgtcgtggggaggagcgtggcgtcggcgtcgtggggaggagcgtggcgtcggcgtcgtggggaggagcgtggcgtcggcgtcgtggggaggagcgtggcgtcggcatggtggggaggagctgtggggtggcaacccagaggcaaggaggtgggcagaggcccacgaacctggccctgaccctcagctcgtccccagctcacagcacagccctcccctggctgcctccaaggagtctccagttactgagtggccactccgtgccagctcagcccacccctcaccttcccagtgcctgtggaggcccaactagggtgacgctgggagaggagagggcttggaggagccacgggtcaaatgcaggaggccacacctgcctgcccaggaggactgcaggagccggatccttaacacctggaggggagcgggtgggtgcggtggcgtacatctgtaactccagcactttgggaggccgaggcgagcggatcacttagggtcaggagttcaagaccagcctggccaagtgaaacccggtttctactaaaaatacaaaaattatctgggcatgctggtgggcgcctgtagtcccagctactggggagggtgaggtggtagaatagcttgaactcaggaggcagaggttgcagtgagccaggatcacaccattgcactccaacctgggcgacagagtgagaccctgtctcaaaaaaaaattccattgtttaaagctgtccaggctgtgtattttgttttggcagccctggagactatagatagatagatgatatggagag

SEQ ID NO: 25748 - DNA, 1368 bp, Artificial sequence
  DNA replication origin
gaacttcatctatttctgggataaaccaaatctgtgtttagtcacacgtgactccaactgagtaactttcaagtcatttccctaaggcagaaaaaattctccattatgccagcaaagtggcaaggaagagccaagaatgcttgatcccatccccaccacagggaaccctgcacggcaggaggagaaaggacatctaagctggagactggtaaggtttcagccacccatggctaggaaagcatacactgcctctgagggggcgtgggcagctgcaacacgggagtcacgtgggaggggtttgcgggactccaggcatcacctcttcacaccggaggcaacaccgatggagtcgtgagaacatagtccaggtgtgtccagaattggtgggttcttgatctcactgactttaagaatgaagcactaggtcctcacagttgactgttacagttcttaaaattgttatgtctgcagtttgttccttctgatgtttggacgtgtttggagtttgttccttctggcagactcacggtcttgctggcttcaggagtggagctgcagaccttcacaaggagtgttacagctcttaaggcagtgtgtctggagctgttcattcctcccggtgggtttgtggctttgctggcctcagaagtgaagctacacaccttcccagtgagtgttacagctcataaaaagtgtggacccaaagagtgaaagagcaaagccccaaacatgtggcagaacaccaacacgttcccactgcctgctcgggcggcctgcttttattcccttatctggccccacccatatcctgctgattggtccattttacagagggctggtctgttttacagaaagctgattggtccgtcttgacagggcgctgattggtgtgtttacaatccctgagctagacacagaagttctccaagtccccacagagcactgattggtgcatttacaaaccttgagctagatacagggtgctgattggtgtctttacaaaccttgagctagacacagagtgctgattggtgtatttacagtcccttagctagacataaaggttctccaagtccccaccagattagctagatacagagtgctgattggtacatttacaaaccttgagctaaacacagagtgctgactggtgcgtccacaatcccacagctagacataaaggttctccaaatccccaccagattagctggatacagagtgcccatgggtgcatctacaaaccttgagctagacacagggtaccgattggtgagtttacaaaccttgagctaaacacagtgctgattggtgtatttacaatcccttagcttgacataaaggttctccaagtcgccgctagactcagga

SEQ ID NO: 25749 - DNA, 1185 bp, Artificial sequence
  DNA replication origin
aggggcagggacccttttctttcaggctgttggacagggtgggcgaacgctggggtcctcacatccccctcactgaccccagccctgggcgtggccagcttgtgtccccgcggcctcccagcttccgggaacgcggggccagaaagcagggccctccagccccccgctcaggcctcagaggggacgctgaggcccggcccgttccaggccccgacgcagcggaccctcggcagcccgcccgacactcaccgaagacctcctgcgagtagcgctcggcgcacacgccgcggctcaactccctctggctcacgcggaccttgagctgtagcggggccacgtccgcgaaggggcagctccgcttgggcatggccgcggggccgggagctacgcagctccccggccgccagccccttaccaacgacgccgtgacgtcacagctgcgcgcccatccgcgggcgagagcgggtttgaggagagggagcgacgcggcgcgtcataggctgcgggcgaagtgggaggcgggactcctgcgcggagcggcgcgggataggccgagggagagatcgggggtgggactcgtgcgtcggtgtactggactcgacgccgcgggaaaggccaggggccaggttgaggatcagggtgggcgggtccgtgggagagatttgtgcgcgcgccgctcaggataggcgggaggagagactaggggcggggttcctatgcggcgcgaagcgacgaagggtgggagccaggtcgcggcattcggctgcgcgggaagagccagggggcgggggcgaggccgagggtcaggacggtgcaacgagggcggagcttgtgcatcgggggcgggcctcgtttgaggatcggcgtgggataggccagggcgacgtcggggcgggtctagtttgaggagcggcgcgggataggccagggcaaagtctggggcggctgggtcggtggcgggattcctgtcagcttttgtttggttcctaaacggtagacactggttatagttcctcatttacttctccgaagttaagaggcagcccgcttcttcctagctcttttttcccctttagagacagggtctcgctctgtcacccagactgagtgcagtggcagtctcggctcactgtagcttgcgcctcccgggctcaggcgatcctcccttctcggcctccccggtag

SEQ ID NO: 25750 - DNA, 1624 bp, Artificial sequence
  DNA replication origin
acgggccgggcctcagcgtcccctctgaggcctgagcggggggctggagggccctgctttctggccccgcgttcccggaagctgggaggccgcggggacacaagctggccacgcccagggctggggtcagtgagggggatgtgaggaccccagcgttcgcccaccctgtccaacagcctgaaagaaaagggtccctgcccctagcccccgcgccctcttccacgatcccggttagtcgccgccctgcagtgagcggcacccgcctggtgctttctcaggactgtcccgtgcaggatgtcctgggagaggttggggagcggggcgtcctgcatggagtcaacccgaagagtgcccctcctgtcccaagaggtattcatggagcgcgcggccctgccaggcacggcggctttctcgggagaccaaaggcaggcaagacagatgtgccccgtctcccgggagctccccagcctagttggggagaccagcaggaggagtcgccacaggtggtcggggcaggcacaggtttgtgcaggcgcacctgcagggatggcacggaaggcttcttggaagaacagtctgagcggaatcctgtgggggcgagtaggagttagccaggcagaggaagggaaggaagagggcgaggcagaagccaggcagcaggagagcgaaataggactccgtgtggctgcagtgtccagttctgggtgggatgtgagggcagtgagctcccaggccttctctggctttctcctgtggatttcaggcgtgttgatcttattgatcatcactctgactggggtgattaataccctggggcaggtaaaaagtggagcttaccttgcctagtgattgggacacaaagtctgcacctgtagagcagttagaggatgacccggggtgtgtgatttacctggtgccgcttgtgccttgggaatgagggaaagactctgcctcccgaggttcctctgtgcggtgtctccagtgtgctagggctgtgaaagcgagtgctattctgggccatggggaggtaaggggaatgatgccgtgggaactgtggcaggaccgcaatcgtgtgccctctcaggacagttgaaaaattcaaacactgtgcaggcaagaagaggaagatggaaatggggcctggctcagtatggccctttattcttcccgagtgtcctgacctgggcgttggcaggtgtgtgccactcaccgggtcaggtcagggaggtctgctgggtgcagtgggccttccatggtaaatgcaggacacctactttgaactgtgtgacagtttccaaattccaggccacagctgttaccctgatctcttaacctcgaattgtccacaaggccttgaggacaaggattagcctcaccacgtgtctgtcccattcctttccccttatagatgggggaaggtgtggggggccaggaggaaggtgcagggtgttgtgggctggcatcagctactccatgtgagttaccctgtcactattattgctgcccacttcatgtagagccacatagagtttctgggatctctgcctttactgtgttatggtgaggtgcaaaacaaaaaacaaagcatttctgggtctggccctgggcatctgatttttcaaag

SEQ ID NO: 25751 - DNA, 778 bp, Artificial sequence
  DNA replication origin
aggggctgtgctcgctgctcccgtgtgcgggcaggtgggtggggcaggtggccctggtcttccttgcactctgccgaggctccaggaggccccagctccccatgccctgcagccctgcctgccaggcttttgttgaggcccgggctctgtcctgcagaacctgttctggggacttggcccaggaggtatttactgtgaagggggccagggtccagccacttggttagttccaggtcactgtgtttggggacgattctcctgcagatggggcctttgctttaaaagcacagtcgcctgtggtggaaggcgggagggtgggtctcgcctgggagggtgtgtcctccctttgcgaaggccctggtgctgggagcactgtcccctgctgaggtcccaactcaccctggaggacctgagcccaggccaccttgctcacctttcaaacactccttggcacctcaggggctgccggggcccagcctgatggtggcgtggcatgaggcagtgtggtgtggggcagtgtggtgtggggcagcgtggcatgggggcagtgtgatgtgggggtgtatggtgtggggcagtgtgatggggtgtgtggtgtggggcagtgtggtatcgggcggtgtggtatcaggcagcgtggtgtcgggcagtgtggtgtggggctacgggcggtgtggtatcaggcgacgtggtatcaagcagcgtggtgtcgggcagcgtggtgcggggctgccgtcctgcctgtggggccgcagttccagctccccttccttgcagg

SEQ ID NO: 25752 - DNA, 835 bp, Artificial sequence
  DNA replication origin
cagcctggagtagagtgtctgagctggaacaggggtcctagccccactctgtgaggcgagaaactgaggcttggagagaggaagagatggggcttcccaggacctggtgggtggtatgcaaggggagctggctggtgcagcgggggctgtggtgagggccctgggaggggcagggggatgcacgcagacagaggctctgcctgcccgcagagtgccagctgatgaagacggagcggccccggcccaacaccttcatcatccgctgcctgcagtggaccactgtcatcgaacgcaccttccatgtggagactcctgaggagcggtacgtgggctgtggcggccaggccaggcacttgggcagccccagcgcttaggagggacacggggatggcggggtgctggcacctctgcctgtagccatcctcactccccagtgctcccaggccctcctcagagcccagtttggaaactggcccagtcctgcctgtggggtttgggtggggaaactgaggctggagataaaaactggctagggaccgggtgcagtggctcacgtctataatctcggcactttgggaggccgaggtgcgcagatcacttgagaccaggagtttgagactagcctgccaacatggtgaaacccccgtctctactaaaaatataaaacttagctgggtgtggtggtgcacacctgtaatcccggctacttgggaggctgaggcacaagaatcgcttgaacccgagaggcagaggctgcaggagccgagattttaccactgcactccagccagggcgatagagcaagactccgtctcaaaaaaagaaaaacccggtg

SEQ ID NO: 25753 - DNA, 882 bp, Artificial sequence
  DNA replication origin
gcacctgtcctctcccaccccccacgcctggtaagcgccgcccctgggcctgcccctcccgcacccccagatccagctcccagaaccccccagatgcagctcacagaacctggggctgggcttgtggcagcagggtcaggggcaaggctggggttgggcacgggagctgcgtgctcgggggcagcacggggccatgctgggcacggtgggggctggcagcagttggtggataagatgggtttcaggggtgccgggcctgggcgctcatcagtcttcccgctcagttagcgtcccggggagtggcagctggcaggatgggaggcactccatcaggggccgacagctccagactggcatgcaggcgggtgggcgtgagcagcggggtggcccaggatgggggacgggtggggtgggctgcatgcagccccctgagcctgctctgctctcactgagcgcccctgcctgcccgctgcacctgcaggggccctgtggctgggggaggggacgtgggaggcggggtggagctgcgtggcacgtatgtgcgtgtatgtgcacactcgggggtgtgcgagatcccaggtcagggacaggagccggcacccaagggtggcaggaccacgcctgctcggcagcccactggcaggggcatggagggcttgcggagtgggtggggtctcctgatgagtgctcttgggcacaggggcagattctgggccctggatcatcctccctgcaactgggtgttggccgtcctccagaggtgtcaggcagctatgagtgggctgtggctgtccccttcctggtccaccccagacctgacaacagcctcttcccacactcaggccctgctgggtggggtgtccccaccctccaccagcatcc

SEQ ID NO: 25754 - DNA, 835 bp, Artificial sequence
  DNA replication origin
ggcacttttcctggggtgtcagggattgagaggccactcttcaagtggactgtactcctgcctcgagtggggggcatctgaggaccacaacagggtggggaactcaagttaagtcctggatgacaggttccagttcccctggggaccctcaggatagtgaaggagaagactccatgtgggttggtctctttgtgtgaggggtctgggagggcagccctggctgatgtgtctgtgctcccaccctcctgagggacccggagtaggcaggtgcaggcctgcaggcgtcctgtggccatgaggacagtgatgctgggccccgggtggctgtctcctccacctgccccgtcctgtgtcaccccagtcctggatcagggagtagtggggccctgccgcatctgctgtcggggctggccgcccacccagcatcctgtctgggctgaactcgttaagatgcgcgccacggccctggctgcagctggcacccccccaagtgatcctctagctgaccctctaggcgagagatgaagaaagagaactgtgtgtctctggaccccttaccccgggtccctggggatcctgctcctcccctggaggggtctgtgtgctgggctgggatgccgaagacaaaggccacgtgaggccccttcactcacacccgtctcctggggtaggccctgatcgccgtctgttccctgggtctgtggggccaggcgaggggaaggcactgaaagcccagggcccatttgggcctctgcccatcccaggactccccaggaatgctcggggctgggcacctgtcctctcccaccccccacgcctggtaagcgccgcccct

SEQ ID NO: 25755 - DNA, 970 bp, Artificial sequence
  DNA replication origin
gggaccagtccccagtgccgtcctccactcggccccccactcaggtcttctggcagtggtgtggggtcccccatccggacttgctgacatttctgaaggggcacctagccgtcttccctgccagaccctgaggcccaggccggggttgcactgggaccctgcctgctccaggtcccgggtctgaaacatgtgcagcgggtggggacttgggggttcttgagcccagcatgggggtgtgagagttagggactgaagaggccccctgggcctgaatgctgggcggtctccattgcccttgggagtggctgctggcaggagatgactctggctgtgtgtggggtggggcgtgccctggcctccccatttgttgcctgcctgtacccgtctggagtgagggcctggcgtggcaacctgggggtctgtgcccactctgtgtttggtgccctcagctgtgcaggcaggtgggtggggtggtgttgggggggtgactggggtggggtggggggatgccagctggctgatggtggggagatggaaggcccctctgtggcgggtgcttcccatggtcggtgtggaggacgaggtccctactgcctggttccagttcccccagcaatgcagggcacttttcctggggtgtcagggattgagaggccactcttcaagtggactgtactcctgcctcgagtggggggcatctgaggaccacaacagggtggggaactcaagttaagtcctggatgacaggttccagttcccctggggaccctcaggatagtgaaggagaagactccatgtgggttggtctctttgtgtgaggggtctgggagggcagccctggctgatgtgtctgtgctcccaccctcctgagggacccggagtaggcaggtgcaggcctgcaggcgtcctgtggccatgaggacagtgatgctgggccccgggtggctgtctcctccacctgccccgtcct

SEQ ID NO: 25756 - DNA, 1790 bp, Artificial sequence
  DNA replication origin
gttgtgtggcccctcccctgcccccaccccagcctggttgtttacagggttcgagggctgctggtaaaggggtgtgtactcccgggcccgggcagaggcctggcaggccgggcccttcgcggtgagctgtgcggtctcctggcaggcggggagggtgggttgcgggcccctcatgggctgccgtcagcggagccgtctgctcaatgtgctggagaaggtaaatgggcccccggcagctgtcggggcgatggatgtgtcggcagtggggaccacggtggccgctgtcagctggcgcccgctcccagggcctgctgggctcactttgctgtggagaagcagctcggtgccgcctggcaccctgccagccgctgccaccaccgtctctgcgaagtgtttatccagcagtttcctgagaactggggactttgagagaatgttcagggagctgaggacgtggtggcctaggggggctgacacacctggtggctcaggaggtggtcagtcccgggacgtggagggccaccagctggccctcaggggcccacccagtcctgcccatggcgcgtgggtcctggcccccatgtctaagtgggtgccgctttggggggcctgacccacagtgtggcctgggacacgtgtgtgaggcgtggagagggtgggctgcctgtgactgtccatgtggtccccgtggtggtggtggggtgggttgggggaggccaggcaggagcagcttcctctcagaaccccggtatttggtccaggaggacttctgggaaggaaccctctttccctgggggtgctccagccccttcctggggatgagcggggttggggatggaaggtcactcctgccggagggccacccgggacatcgggatgccagagggaccagggctggggttgtgtggggcccaggaggtgcaggaggagtcgagggagcctggtctccgctgtccccccgggcagggacaggagtctggccaactgcctaccccccaccgagggcagccacctcccatgcctggagccctgggccatggatgtgctggctggtggggagggttacgggtttcatcaggcacaggagcccctgcccttgtggcttcacaggacctggtcttggataggtgcagtgtcacagggttaagggtcagggtggctcccacctggcccagggctggccttgagagaaccctgaagggtgggaccggagctgctgcctcccactgcccagggggccagcaggagggtgagactggaactgctgcttccccgctgccgagggaaccggccatggggcaggagggtgggaccggagctgctgcttcccccttgcccaggggaccagccatggggcaggaaggtgggaccagtccccagtgccgtcctccactcggccccccactcaggtcttctggcagtggtgtggggtcccccatccggacttgctgacatttctgaaggggcacctagccgtcttccctgccagaccctgaggcccaggccggggttgcactgggaccctgcctgctccaggtcccgggtctgaaacatgtgcagcgggtggggacttgggggttcttgagcccagcatgggggtgtgagagttagggactgaagaggccccctgggcctgaatgctgggcggtctccattgcccttgggagtggctgctggcaggagatgactctggctgtgtgtggggtggggcgtgccctggcctccccatttgttgcctgcctgtacccgtctggagtgagggcctggcgtggcaacctgggggtctgtgc

SEQ ID NO: 25757 - DNA, 1369 bp, Artificial sequence
  DNA replication origin
tggtgaggtgtggggtgaggccacgggggtcagggccacaatgtcccagcaggccgggggatcagaaggagcaccctccacagctggccgtgctctgggggccctcctgccccaggcgtggctccaagttggggcagaaacaagatggtggggagatggaaggcccctctgtggcgggtgcttcccatggtcggtgtggaggacgaggtccctactgcctggttccagttcccccagcaatgcagggcacttttcctggggtgtcagggattgagaggccagcactggagcccttcaaccgccaggggccctgcccaagagagacgggaggagggaggggctgtgggcatggctgcgtgcccccggccgagccccggaaggagcctgtgcccgtgcccacttcctttcccgagggcagtgtctacacgtgggacactgtggccagccctccctcgcagcaggcactgtgtgctgtccccatgcccagcttcctcccacgcagggagcgagggtgagggccctgggaacccactgggtggagggcacttggcaaagcctgctgcaagttatggggagagtgggcgggggcagagtaggaggcgccagggaggggctgcagcctcatctgcaggggtcctgagtaggcagggtgggccatgacatgggtggggcttgtttggggcagaccaaaaatgaggtgggggacagggacagggacagggtcttgggatgtgctgggctctgcgatggatgggtgtgtggcaggtggggtgcctttgccggcccgaggggtgggtgacgggcagtgcctgtgggggaggacatccaggcccaggtggtctgtcaggggcagcaccagggaggcccagtaccccacccagtagagccccaggagaatggaaagctgagacccaggtgcttccctggagtggcaggaagagaggccccagcgcctccggctgtgcctcagcgaggtggacggggtcatggtggtgccgcctgcccgcaccatgttcctcccggggtgtgtgtgtcgggctgaggcctgctccatggtggagcggaaggaggtgaagaatttgcagtttgtgtcaagttacaacccctgccttggcggcaggacctggggtctctctggtcatgatctgcctctgagggtcacctcccctaagtctccgttttcccagggagctgatgggcatgatgagccctgcccgccctgcctgcctggtgggctttctgggagagcagaatgggtcctgggctgggcgaggcccaggcaggtggagcgccagtcctctgcctggcgggaacagacacctctccttgtgcagactggccacttgtgccccctcagaagggcttgtgc

SEQ ID NO: 25758 - DNA, 848 bp, Artificial sequence
  DNA replication origin
agggccctggggctccaggccaggatggggctgttaggcgaaccctaggccccttacttcctcatctccaacgggagttcccttccctgccatgccgcctttaggtgtgttttccttgaaccttaaggaatgataggtttggatttcagaaacgttggaattgagggggttgggagttcatgggtgactctgctgccaatgttgcgggctttggggtgggatccttggggcgctgtgtttgggctcacacaccccccaggcgggcccggtgactgcagaccccacccataccctgtaacctggcgggcccacctgcccaggccctcagctggttgtccagctcaggggtggagacaccccctgggcaggcctggcggggaggtggctgctccctgggcctggagaatgcagagaggcccttcggctggccagggtctggctggcctccccacagactggggccaggggcacagcagccaggtgtagggcgcggagacgctgagctgcacaagcttggtgaggtgtggggtgaggccacgggggtcagggccacaatgtcccagcaggccgggggatcagaaggagcaccctccacagctggccgtgctctgggggccctcctgccccaggcgtggctccaagttggggcagaaacaagatggtggggagatggaaggcccctctgtggcgggtgcttcccatggtcggtgtggaggacgaggtccctactgcctggttccagttcccccagcaatgcagggcacttttcctggggtgtcagggattgagaggccagcactggagcccttcaaccgccaggggccctgcccaagagagacgggaggagg

SEQ ID NO: 25759 - DNA, 1211 bp, Artificial sequence
  DNA replication origin
caggtggcgtccacccgcatggccggccgctccttgcggaggaaagcctgtcctccggggcctgccgcatttcgccactcccgtccctggggtcccctgtgtgtcttgcagatgtgctgtgccaccctcctggcagggccagccccacccgcaacactggttagaggtactagctgccttcctgtccctagcagggctgtgctgggctgaccccacccgtgcttcacagtgctcaggcctggctgggggtggggagggagggagggacgcagtgactgtcctccaggcccggccgcagccccttgcagacgccctgttccactcccccccagccttgctcctgcaggtcagggtgcttgtctcagaggctggcccgcacctgtcccctttgccgggactccccacgaccgtggcctggggcactttggttctcagctgaatccccaggtgacagtcccaccacggctacttgggctggccacacgtggcgtgatggtgccttcaggggtgatgtggtcattgagatgagaggggacgggtatgccctgtgtgtgaggggtggggtggcagtgtctgcaggctccttctcctgctccttgggaggtgagcgtcatctctgggaagtggcccaggctgctttctgttgttctgatgtgtgtgctctgagtcagaggagcttcagggacagaagggaccgggcatggggacacaggagttccggctgcaggcctgtgtggacctgtggctggacccaggcgaggcctctgggtctgcacatctaacagggagatggttcctggagggtgagcttaggctgttaagggcaggagctagtgaggaggctggtggggcctatagggacagggggccagatgtcccctcctgtttcggctgtctcactggataagcagcccagctcagctctggccattggtggtctggtgggctcagtgttgctcagacgtttgcattttcaaagatttgttctgttgtgtgaagtctcctgatttttgaaggctgacaattttaaaaaatcaatcctgggccagggcgcaggtctggctgaactcggcctccagcctgcagttttccttcctttgatagctccgtgccaggctttggccagaggctgtgtggctcttttgaggtactttccccaaacagcttgctcaccttgcccgcttgccccagtactcctggggccgtgcacc

SEQ ID NO: 25760 - DNA, 1253 bp, Artificial sequence
  DNA replication origin
acaggaccctctctcctggcctgaggctaggggccagatgacagagcccagaggctgctgaggctggccggaccccaactcagggccgcccacaagccattctccactccaccaggtctctctcccaccaccgctccctggtgtagatggggaaactgaggcccaaggagctcaatgaccttgctcttggaaagggtcatggcgatagagtggctaaccagggttcaaactcagctctctggacgccccactgggcctgatgtcctgtccctgccaggcccctcctgaaggcacgacatcagcagcagcctgaaaatcacctggcctcgggggagcactcctgcctaggcccagctggctgatgggtgccccagtaactggggcctgggcccctgggcagtcaaggccctggcatctcctgggtcagcccgagatccaacagtctatcaacaaacacacatttgccaaggataaagaagcagcggccccaggcagcagactatgtgacacagagaggaacagggccagggtcggggcagggggtccctgacaccaaagagggctgtgaggtgaggagaggacctccaggcacaggtggcaggactcctggggaacaagcaggggacagcacacggggaggggatggagaaggcaggatgcggcaggaggccttggggggaagcagagccagaagctccccaaggaccacaggcgtctgcagcctccttgtcttcatctcgaggccccgcgtgccatcactggtagctgcccactcaaacactccaaacacacagccagccacacccctgattcccccagcatctcatctcggtcactccttcaccccacccccaggctcctgtggctccttaggcctgctcttctgtgagctcctatacatcccacaatgccccatcttgtgacacctacttttgccacacctccctgtctgctccagctgtgtttggggtctccccactaccagatgtgaaacccatctgctagagggtgtacgtaaagccggggggctgctggcatgagatcactagaacttaggagggaacaagtctggaaaaagaagtcaggagagggcggaccgattccgcctggggcagaagagagtgacttggccagaggacctggacctgaacaggaagcccaccctagcaggacagaggagcaaaacagccacccagactccaccgcaccccgctgagcaacggagggtgggtgaggcagaagggcctgcacag

SEQ ID NO: 25761 - DNA, 957 bp, Artificial sequence
  DNA replication origin
tgcaggatcaatggataaagtgtgctcaggtgagggttggctggtgggccgctgcagggcgggggcctgtccagtgctcccccacttacttgctgcctcccgactgctgtaattatgggtctgtaaccaccctggactgggtgctcctcactgacggacttgtctgaacctctctttgtctccagcgcccagcactgggcctggcaaaacctgagacgcccggtacatgttggccaaatgaatgaaccagattcagaccggcaggggcgctgtggtttaggaggggcctggggtttctcccaggaggtttttgggcttgcgctggagggctctggactcccgtttgcgccagtggcctgcatcctggtcctgtcttcctcatgtttgaatttctttgctttcctagtctggggagcagggaggagccctgtgccctgtcccaggatccatgggtaggaacaccatggacagggagagcaaacggggccatctgtcaccaggggcttagggaaggccgagccagcctgggtcaaagaagtcaaaggggctgcctggaggaggcagcctgtcagctggtgcatcaggttagggaggctgggaaggccttttggggatgggggtgatttgtccaacggctgggggaggtgggaatggggaggtgagcaaggcagcagctctcagggcctggctgttgcgggtggtggtggcaggggctggaggctctaagcctagaataaggagaggcccaggtccagggaactgtgttcaattacatggatttgacacttggcagccctgagtgttttggggagagggaaggcaggcgggcagatgggggtcagagagcttagagggatggcagcccacctgggaaggcaggtgcgggtggagcccccaggcacgtgcagtgggtctctggctcacccagggcgaggagctgcccttagccaggcgtgg

SEQ ID NO: 25762 - DNA, 1099 bp, Artificial sequence
  DNA replication origin
agcccggccccgcccagcgccggcccgcggggatgcggagcggcgggcgccggaggccgcggcccggctaggcccgcgctcgcgcccggacgcggcggcccggtgagtccccgcccgccgtggccgcccgggcctggatttcctccccgcgggccgggccgctttgttcgcggccggtcgggccggggcgcgagccgcggcgccgccagaatggaggagcgggagcaggaagtggccgagcgggcctgggcggggagggcgcggggcgcgcgggcccggccaagggagggcggccccacgccgggcgccgggggtgcaggctgccggccccagcctccctcatgaccttggggaggccgctccgccgggcgaggccgggacccgagagaagggacgccgccgggcctggagctggggctcggggtgcccctgcgggccgtggggctccccgggcgctgggccagcgaggcagccggcggaggtgccccggggttggagaaagactcgccgcggccggccttcaagtttgtgggagggccccggaaggagacttcgtttcccacggacgaaaagttgtacgtggtggcggggtacccaggctagccacaaaggactgtgaccctcctgggccccggaactgcttcctgtcttgggtgggccctggaggtcctgcccgcccatcccagaggccaaggcttggagggcagctggggcttgccccttagattgagtatcctggggcgctagcgagcttggtcctgtcgggacggcctctgagtgctgccttggtcagcgggtgagcttgggcccctgctctgcagccagaggccgccccacattcactcctgggtctctcggccttgctccaggtggccacttcttgactgctttgagtccctcatccgagcgaagggcggacggagtccgttggtgggggtccggttgcctctcccgggagctgtgtagacttctcatacaccagggttctggaggcagatggaggagccctttcgaaaacagagtatttttttttaagttgtgacttaataatagtagcaagaatatgtgcttatggtaaaggcaggcggcaggtacggag

SEQ ID NO: 25763 - DNA, 2077 bp, Artificial sequence
  DNA replication origin
ggggaggggacagtgggagagaagctccttatccctctcaggtcgggatgtctgggttcaagtccctcctgccccacaccgatcagggaaggggggctgttccaggcagagaccgcccagagttggtgctgggatcctggccagcctgtagtcctcagagcccctgtgactggctgggtctcaagtgcaggaatgacaggacaccgtcacacagccactgtcgcggcggtggtggttcaggcagaacctctgcagactcaggcggccatctggcctgggagctgccctgaggccccgccctgcagctgctgctgggacctacacagcccagggccctcgagtcctgcccccggccagcagctgcagaaggtgacagggcaggaggcccctgagctctgggaggaggcagccgtcgggcccttccctggtgcagcagtttttgtcggaaacatctggccacagagcacctcagcagtcccagcagcagccgtggggctgggttctctcctgaccattctgtctggggtgggagggggtgttcttgaagagaggactctgctttccctctgggacgctggaggagagggagatggccctgcccactgggagatccccgtcttgggggagggcagttcatgccaaggtgaagacaggactggagtgtggggcccacagtgggttgcaggcaccagcagatgccagggcaccaggctgggaagactgggaggcctccttggagacagccagtgcaaaataagcaagaggtccaaccacttcaagaacagcccgcaatgtcactgcctcttccatgagagggtgccctgctccctcccacatccccaagcctcggccacttgctggccttgtctcatggccctcttaccctctgcttcctccctgaattccttcctccatccttgcatggcagagcccaggatggtggacagataccaggaactcttcctcggggagcagtgggcaggtgggacagtcccagagggagccccaggtggctcatggtgcaggtttgctgggtgagagacagacaccagacgcccaggctctgggggcaacccttgtgtcaggtatcccacccaagcggcgcagaccactgggcctctgacttggccccctggaggtgggcccttcctggggttacaaagtctgagctgggagggagcagaggtgctcaggcgagaggcaggaatggggagtcccctgtctgaggagcgagtgccctcatgcagggggagagagtccttctcttggtcagccccaagaggcagggatgaagcccgagttttggctgcagactctgtcctgagcactgggccgaacctgctgcctctgtctgcatctcctcccaccccctcccctgctgccagctgaactcactctggctgaaaataaaaatgctcccccaaccccaatacttagcagcctcaggaaggtaactcacaagagtctgtctttcacaaaagggttattatcaactgtgggcctctggaatgggggaggggcagttgtcggaggaacttctggctaggaaggggtcggggtggcagtcacctgcactctcctgtgagtgtccaggagaaaggggtctgtgtcccacttactcattccatacccgggccatctgcctcccagtggacttcggactgggtgtccgggctgaccaagtccacccagcagggagggctctgggctgtcagctgtcacagcccaccctagacaccgctcctcctctgtctggtgtctgctcccagctcaaggtgggagccaggcaaggtgtgcccctcttctcccactccccagcaaagtcccccttttgtgagtgtagctgccagtacctaggtgaatggttgactcccctcggagccttcctgctccttggaggcccacctccaactgacctcctgtcctggcatcctcccgcacttcccccagaggcacaaggtcttgggattgggccttttaggtcactcttggccgccccctccacgccccccagagtggggcagcctgaaagtcaacctaagccacccccgccccgcgcgcggaggcagaagtccgg

SEQ ID NO: 25764 - DNA, 2513 bp, Artificial sequence
  DNA replication origin
cgggcggccgcccgctcgcggcgtccccgacgcccgggtggctgcgccgccacccgccccacgcctccgcgccgcctccagctgccgcccggcccaccagatgccgccgccgccggccccatttatggcagcgcggccgcggggagcggggagagggccggcgggcgggcggggcgggcagagccgggagcccacccccagcgctcacctccgccgccccgagctcctctccggtcgccgctcgcgcgcgcgccctccccagggcggccctggcgcgcgtggagctgcgggcagcgcgccccggcggggagggcgcggggacggcgagggcgccgggcggggcgcgctccaacttggctggcccagcgccgcccgccgctcgccccgccccagagagagcgaaactcggggcgggggccggagggggcgggccgagcgacttcccggagcggcggaaccgctgaggtcaccctcgcccccccttccctgtccgccccacccggccgggccccgcgcgcagccagcaggggcgctggggtgtgaggggggtttagggcactgcgcgggggcagggggtctctcgcgatacttggcgctttggcctgggtcccccacctcccaacctttcccggcatggggtccttactgcgccagtctgcaaaaggaacccttccgagggtccgcttgtatcccagcccgcgttgggcagtcacccgagggtaaacccgggaccctggcctcccgccacctcgcagggcgccggccttgggatggcgtaggggttgcgtggattgggggtcgttaattttgcaaagatgacacctccttcttccttgaaagcctctttttgaatttaattcagctgggaccctcttccaaacattcaagcaggatgtcgatcctagagtccagaacggggacttccaccctctccacagaccccagcccagcgtctatgggggacccagcgcagagaggcacggaaaacgggcacctcccagcagacatggtggcacggggggacaaacgccataacagagacagtcggaagccctccagagcccagggtaggcaggaacgtgttcaaagaggaggagactccggacaggggctggcatgggagtgggggtagggaggagtgggggaaagtgttctagggcaaagaagcattgagaagatgtgagggggacgcctggttgtgggagagggaatcgccagagaagtagagagtgtgtttggcggggttagggtccctcccaggcagatggagccttttcccaggggcacaacctgggctgcccttgactgagcaggtttgaaggtactctagaccaccggatcatcttcacaacagtcccattaactagacgctcttattttcatacctttttggtgagagagtttaggtaaggtacccagagccatgtatcaggcagtaagtcactgaaccacgatttgaattcagccggtctcattcttctctgccttggagtccgggaaatggagaatgtagtggaggagtcaccccagtcaaggccaagcagtggggtgggggtggtgctggaagaggggctggatcacaaaggacaggacccggccaggtatgtgtgtgcaggaggagtggagcccacagtgggatctgaagtctgggaaggaaggcctcgttgttatactaaaatatcattccttgtttcaccggatggactgcatctttatttcctaaacctggcaactgcagcttggacccctggaatgacactgcacttacagccactgagactagcttagggacggcagaggcctggctcccactgccgccggccatccaccctaaggaccccttcctgaggaaggtcaactcccctctctccacgcatttaaataatcatctgccttgccccagccaccagcaggaatagctgaattcaagtaagttaagggtgaactcagatgtgactgctcccttcctgccctgcctggatcacagccctgccccggcccctcccaaccttgagcacgaccaaacctttaacctctttgaacctcagtaatcctcatctgcaaaatgggagtcagagtgcatcccggggtcttcgtgaacattaacgacagggcctggcactcagcaagctctcaggctctggaatgttcttccccaaagaacccttcactggtttctcttcatccctgtctctgctgaaagtccactccttagtcagggtggccattcctgcccaccttcgctaagttccctcgcagtcccttctgctgcataccctcctttccagcccattccgggtgtcctgtgattgtgggatattccagcaccttctgaaagggaaggggctgtttggtcacttggtgcttaaaagttggcaggacgcaagtgggtgttcagtaaatgtttgttgagtgaatgtgtgacggttgcttctgtgagtgattacgatggtcccaccatccctaatcctgactcctctgtggcaacattccagccctgcctgcccacaccc

SEQ ID NO: 25765 - DNA, 1838 bp, Artificial sequence
  DNA replication origin
atgtggctgggcggccaccagcagacatctggccgcctcaggaggctcttcctggctctaaagagaatccagttccaaattcccactttctctgctcaaagttacagtgtggtcataattgcacgctctcatggacccacgtcccacccgagtgacaatgatgccacagccactcagcttctagctggctctactcctgctgccttaggatccctgctggggctgcacccccccccccaccccgagacaccagctgtgcccagatggcccctgctggcactcactgtgccccaggccttcctggcaggggttcctgctgccgctccccaggagtgtcctgttccctcccagcgccccattgggacgcacaccaacaacttttctgacatgtgaataattcacctagcgtggggccaggctcatgaagacctccccaagcctgccagagaggtggtcaggaaagtcccgggccgggagatggatgtgccatctcacacggagaaacgggggcagagccaggtgctggttggacacccctcagaacttggctggaggggacgggagaggaagatagtgtcacagcctaggcagggcacagcctgggggccggaatgagttggagagtgaggggaaaggagaggcaaggtgggaggaaggctgcccaagttaccgagtctgaggccaagttccaggaagaggcagcattctctctgccaggagggtggagccatctggcccaagcagggacctccacctggtcaggcttcacaccccatgctgtgtcccacctgggagggcccatcccttcccttccaccccaccctcaggacccacagggatgcatcacaccagaagggacttgacgaggccacagtgaaacttgcggacgtggcggtagaggtccccggactgcgtgaaacggcgctcacaccaccggcaggcatgcggcttctctcgagtgtgcactacggtgtgccggctcaggttgtgggagtactgaaaacttttgccacactgcacacacgtatagggcttctcacccgagtgtgtccgctcgtgcctcttcagtgtgtatgtgcacgagaaggtcttcccacagagcgggcaggtgggtgccacgccgtcgggtgagagccgggcccgggtgctgtctcgctcacggaagtgggcactgaggtgcagctgcagcacgtgggagctgggaaacagcttgctgcacaacgggcagatgcagaggggcccaccaggccccagctcgtcctcactcgccagtcgccctgcaccaagctccagctcccggctgccctctccgctgaggggcagcggctgcaagcccaccaccaggcccttggctgcaggaacaggaggtggcttcgggggactgtgggggctcctagagctgctgctctcctcctgttcggacagtgagtcccgttcgtccttcaccagtggctgggcccctggctgcctctggctgcagaggggtgtctggaggacgcacggtgggtggacccgctcctgccttgggccagacttcaacgacaggtccagggcctggtctgactcttctgggacctggcagggaggaggcccagatgctcgaggagggagggcagccttgaccccaaacggggggagcttggcctttcgggcagctgggcagaggtccgcggtccagacaggccaggggcacggtggctgagcaggttctgccccaggggcagggttccccgggtccagacttcgatccttctcctggagcctgcccttgcagaccttgacgatgtcatacatgtgcaggtagctggcggctgccaggacgtcctccacaggcaggc

SEQ ID NO: 25766 - DNA, 933 bp, Artificial sequence
  DNA replication origin
gtttctccgtgtgagatggcacatccatctcccggcccgggactttcctgaccacctctctggcaggcttggggaggtcttcatgagcctggccccacgctaggtgaattattcacatgtcagaaaagttgttggtgtgcgtcccaatggggcgctgggagggaacaggacactcctggggagcggcagcaggaacccctgccaggaaggcctggggcacagtgagtgccagcaggggccatctgggcacagctggtgtctcggggtgggggggggggtgcagccccagcagggatcctaaggcagcaggagtagagccagctagaagctgagtggctgtggcatcattgtcactcgggtgggacgtgggtccatgagagcgtgcaattatgaccacactgtaactttgagcagagaaagtgggaatttggaactggattctctttagagccaggaagagcctcctgaggcggccagatgtctgctggtggccgcccagccacatgcttgtctgcctgagtgcaggtctaggaagcctctgggcatcccccagggtggggtctgggccgctgagctgtgtgctgctgctgggccaccgtgggccttaccttgacggtcactctgcctgctagggggtttccctggagctgtgggcatttccgtgcactgactgagcagaggcaagggctgccctgtccgccaggggcagggtttgcgggccttcctttccccacggcgaggcatgggtgaaagtggccatggcggcagggttaggggcaggtgaggagtgggagtcgcagcaccctaggggcctccatccgcagccttgggagactgacgctcctcgaacatgaatagaatgtggagaccacaacccccacacatgtcgttggttcaggtcgccctgctttgcctgcctaatggagcacatct

SEQ ID NO: 25767 - DNA, 1040 bp, Artificial sequence
  DNA replication origin
aattcctgggacttgcaggggcggccttccttctgtgctgtgtgttcagaggtgccagtgggtgtgcgtgcagagaggtacagacctactttcacagagatgcagacttttcttcttctgtatatggaagggtagtggcgagagggaggaggtgcagggaaacagaaaataccctggaactagcaggttccatggctcatgcctagaatcctagctactcaggaggctgagtggggagggtcacttgagtccaggagttcaagaccagcctgggcgacacaagaccatgtctcaaaaaataaaaataaaaatcctggaacttgaaggctacagaaaagggaagtgcagatactgaagctccactgagtgaggagggcagatattacccctttctccaaccacttctcagcttgaacataatcaagccctacttcctcagcctggaagccgacctagagttggctcagtttctttagggatcttccataaaggtggtggtggtggtgaaggtggaggtgatggtgatggtgaagatggaggtagagatgaaggtgatgatggtggaggtaatggtgatggaagtggaagcaatggtgctggaggtggaggtgatgatggtggaggtggagatgatggtggaggtgatggtggtagaggtggaggtgatggtgggggtggaggtgatggtggtggaggtgatgtgatagtggaggtgatggtggtggagatgatactgatggcggaggtaaaggtaatggtggaggtgacagttgtggttccatggagggggcggtgatggtgatgatgaccatgatgacagcgtgggatgtgttcattgaagatgggactgaggtggggatgaaagaagtcatagaaaaccagggcagagcctctgtgggcttggagttcacccctgagagctgggacagccaggattggagccatgtctgcaccgggtttgtttgttaccggctctccaggggtgtctgtggagtggagcctcccacaccgggaaggactcagcaccattcaggaacact

SEQ ID NO: 25768 - DNA, 1330 bp, Artificial sequence
  DNA replication origin
ttctgctaaaattagtgaaaacaaaaccaggagggttccacagagggaggtgagtccctggctctcccccagatccactgccacctccgataccagggctatagctgggccagcagcagccttggtgctcaatcattcctgcctggcaggggacagtcctccgtggcctgggacctttctgaacggccaccctctccgcctcagccacaggctctggcacaggctccagaggcagcatcttctgctgctgccagcccgtgttgggagtggcctagccctccaggctgctgtccctggactcctcactgctgtggtgtaccccaccatcctccacaacagctggaggtgaaggggtgttgagggaaagtgggagggggaggggagcaagaggctgcccagagcaggggaacagagccaggccagggccggattgcaaaggtccacagaccagcaatgcccaagcacacctggcgccccagggaggctgggggtgctctgtacggccttgttatcctggggagtctgggggtgctgtgtacggccttgttatcctggggagtctgggggtgctgtgtacggccttgttatcctggggagtctgggggtgctctgtacggccttgttatcctggggagtctgggggtgctctgtacggccttgttatcctggggagtctgggggtgctctgtacggccttgttatcctggggagtctgggggtgctctgtacggccttgttatcctggggagtctgggggtgctctgtacggccttgttatcctggggagtctgggggtgctctgtacggccttgttatcctggggagtctgggggtgctctgtacggccttgttatcctggggagtctgggggtgctgtgtacggccttgttatcctggggagtctgggggtgctctgtacggccttgttatcctggggagtctgggggtgctctgtacggccttgttatcctggggagtctgggggtgctctgtacggccttgttatcctggggagtctgggggtgctctgtacggccttgttatcctggggagtctgggggtgctctgtacggccttgttatcctggggagtctgggggtgctctgtacggccttgttatcctggggagtctgggggtgctctgtacggccttgttatcctggggagtctgggggtgctctgtacggccttgttatcctggggagtctgggggtgctctgtacggccttgttatcctggggagtctgggggtgctctgtacggccttgttatcctggggagtctgggggtgctctgtacggccttgttatcctggggagtctgggggtgc

SEQ ID NO: 25769 - DNA, 1332 bp, Artificial sequence
  DNA replication origin
tgggcatgggggcacgtgcctatagtcccaactattcactgggaggttgtattagtccattttcatgctgctgataaagacgtatttgagactgggcaatttacaaaagaaagaggtttattggatttgcagttccatgtggctggggaggcctcacaatcatggcagaaggggaatggcacatctcacatggtgacagacaagagagagaaggaacttatgcagggaaattcctccttataaaaccatcagatctcatgagacttattcagaatcacgagaacagcatgggaaagacctgtccccatgattcaattacccactgggtccctcccacaacacatgggaattcaagatgagatttgggtggcgacacagccaaaccataccagaggctgaggtgggaggattgcttgaacccaggaggcaaggttgcagtgagccaagatcatgccactgcactccagcctgagtgacagagcgagacccctatctcaaacccccccccaaaaaacagatacaggtggatgattggatgggtcagggatggatgaatggttggatgggtggaaggatggatacagggtgggtggattgttggatagatggtgggataaatattcgggtggtgtatggttggatggatggtaggatggtggatggtggataattggctggatggatagtaggatggatggatgttggatggatggatgaacagtggggtggtagatgggtagataaatggttggatggacagtaggatggtgggtggttggatggatggattgatggatggatggatggatggagggttagatgaatgcatattggctggatgatagaatggtggatggatagatgggtggtaggatggtagatgtttaggtaaatggttagatgggtagtagaatggtgaatggttggatggatagattaatggatggatggtaagatggtggatggttggatgaatgtttggatggatcgtaggctggtggatggttgcatggttgggtgggtggatgtatggttggatggtgaatggttggatgaattgatggatggatggtaggataggtgaatggttggatggatagggatgattggatggatggattgatggtggactgatggatggatagatggttggtagatgataggttggatggacagttgaatggttggatggattgatggatggttggttgggtggatggatggatggttggacagatggttgaatagatggtatgatggggttaaggacagatgcataggtggtggaaagatggatgtttaaagatggttggctaggaagataattggatg

SEQ ID NO: 25770 - DNA, 772 bp, Artificial sequence
  DNA replication origin
taatggatggatggtaagatggtggatggttggatgaatgtttggatggatcgtaggctggtggatggttgcatggttgggtgggtggatgtatggttggatggtgaatggttggatgaattgatggatggatggtaggataggtgaatggttggatggatagggatgattggatggatggattgatggtggactgatggatggatagatggttggtagatgataggttggatggacagttgaatggttggatggattgatggatggttggttgggtggatggatggatggttggacagatggttgaatagatggtatgatggggttaaggacagatgcataggtggtggaaagatggatgtttaaagatggttggctaggaagataattggatggatggaggatcccccagggttgctacctgagcaaactctgggaggtttggaaatcttgatcacaggggtctgtgggcctgtcctgtggatgagaagtcaagactggagaggctttgacctgggctggttttagggataggggccactgtgaggacagagatgcagaggcacagacaaggaactgggtggaggtgcactctgcaggatttctggtgtctgatggagatggttatttgtggactccagatgattctagaagtccccaagactcttctgggtgggattcatgaaggcaggtggcaggttccccagcttaaaagccaatagaaaagtaaagaatcgggccgggcacggtggctcacgcctgtaatcccagc

SEQ ID NO: 25771 - DNA, 1128 bp, Artificial sequence
  DNA replication origin
aagactggagaggctttgacctgggctggttttagggataggggccactgtgaggacagagatgcagaggcacagacaaggaactgggtggaggtgcactctgcaggatttctggtgtctgatggagatggttatttgtggactccagatgattctagaagtccccaagactcttctgggtgggattcatgaaggcaggtggcaggttccccagcttaaaagccaatagaaaagtaaagaatcgggccgggcacggtggctcacgcctgtaatcccagcactttgggaggccaaggcgggcagattacgaggtcaggagatagagaccgtcctggctatcacggtgaaaccccatctctactaaaaatacaaaaaaattagccaggcgtggtggtgggtgcttgtagtcccagctactcaggaggctgaggcaggagaatggcgggacccgggaggcggagcttgcagtgagccgagatggtgccactgcactccagcctgggcgacagagtcagactccgtctcttaaggaaagaaaagaatcggaatgacagataccggcagtctgaggattggcggagatggcctcgctgactgggaatatttgagcagaggcaggaaatggctggggcggagggactggcaggagcagaagcctgatgtggggcttggggcgtgctggggcgtagcgaagtggcaggagatcccggagcaccggcagggaggggagccagagggagaggaaggtgtggaggccttatggagctctcctggggtcttggatgttcactccgagtgcgatgggagctgcaggaaggtttgatccccggagagaccagatcgggcttgagctctgaccgcaacccctggcgctggttggagggcacacgggcaaggcggtggtgggagcgctgcggcagtgcaagaccacagagcagggggatatgcggggggtgggctgggagggctaggtggggcgtctgacgaggctggggaactcctgttcttaagctcaggccggggtgagcactgtccctaggagggtgtggccaatcctcgccctcaaggcactgcggcatgaatgaagcgctttaaagggagttcccaaaatgaaatccctaagcgaaa

SEQ ID NO: 25772 - DNA, 2063 bp, Artificial sequence
  DNA replication origin
ccgcggcgctgggcgccctgggcatccgggaggagcacccgtcccgccctctccccgcgcccggctccgcactccccgccagccctgcgccccgctccccgcgcgccccctggcggcaaacttcgcaatggctcccgccgcgctctgcttttcggggttgccggaggggcggggctgccggaggggcggggctgccggagggggcggggctgccggagggggcggggctgccggaggggcggggctcgagtgggaatgcaacccttggacacggtggatcctgggaatctaaccttccgtcccggggctgatgagctccagccctgccccaggaactgtgctgggggcccctggggatggggacgcaagctcagagggcggagacctcgggcgccccggcttcgtccgcaaggcgagacgggccgcaggggactgctagggtctgcaggggggtctgcgggggtgagggggcgggtgggctcggaggatggccccgggctcccagggaagctggaagggcgtcgggggaggtgacggcgcggagacctcggactctcagtcctgcaggggccgcggacacaggtggggaggagtgggggagtttttccctgggagaaatgggaagcgtcgaaggattttaaggagtgcggctggtcgggtttgcattcggggaggtcgctttgtctcttgagtggagaatgaggaggtggcaacagcaggggagtcaccgggaggctgctcgggtccagctcaaaaacgccaggcccgcccccgccccgcaggtccgcgggaaggaaggaaaaggcgttggggatgcgtaggaggcagaggccttggtggtcgatccggtgtggagtggggcaggggctgcgaggagggcgcccaggactggtatcagtgaacagtgacggtggggcagggcggtgaccttagcaccagcgcttcggtgggggggaggaagcacctgagccgcggagaaaggcctgcgtgaggtgggcacaggctggcgttgaagccctggggtggactcacgtccaggggagggcggtgcttcacacgtcccaggcactgtcttgtgtggccccaagtgctgtctgaatctctcctgcgtcttgggccccagcaccaacagccgtcgccctggagccaggcagcagccttaagcttccctgggaggctgactggctgggagcagggaggtcccatcggggaagtaggggcgtgcagggggcttggcgcctgcagtcctggaggggcagggcagatgataaggctaagtacctcctgtcctttgctcagccagccactaggaggaggccgcagagaagaagccgccaggggctgggggaggccagggacggggcagggaggaggggctgggctgaatgcaggtgccccaggagctgcgggctctccttccacaggttcgtgtctggtacacggctggagaaggcagggagggtgggaggagcctggcttggagagaaagggctggccggagacaccagagtgctcagggcaggggcgggagaggtggtccctcaggcctcagtggcagaggcatggggatccagggctgagagtgagtctgtggttcatggggttaccagaaaggggtcctgatccagatcccaagagagggttcttagatctcacgcaagaaagaattcagggcgagtccacaaagtaaagcgaaagcaaatttattaagaaattagaggaataaaagaatggccactccatagagcgggccagagggctgctgggtgaccatttttatggttttatttttattatatgataaacaaagggtgtattattcatgactctcctttttagaccataaggggtaacttcctgatgttgccatggcatttgtaaactctcatggtgctggtgggagtgtagcagtgaggacgaccagtggtcactctttttttttttttttttgagacagagtctcgctgtgtcgcccaggctggagtgcagtgacacgatcttggctcactgcaggctccgtctcccgggttcacacctttctcctgcctcagcctcacgcctgt

SEQ ID NO: 25773 - DNA, 1475 bp, Artificial sequence
  DNA replication origin
agcttgatccacttcgtaagattaagaagtctatggctctgggtccagttcagctgtggcagggatcttggtcagcttgtctgctctgctcctggtcttctcttagtctcaagatggctctgcagtcccaagaatcatgtcctcacccagcagaggcggtgagtagagacagagaatgtcttacctcacatcaactctttaacaggaggacggcattcctagaagcgcccttccccacacactgtcccctgcaacagcacacttcccctcatatctccttggccccaaattagttatgtgcccttgctcagtcctggacctggccccttccccgagatcaagagatcaccacagatggctgaaagcccctggttctgttggaaagaacaaggaggaaaggctttgaggcaggtggtccgcagggcccgtcatgctggagagctgatctgtaggtgagcaaaaaaaattccattttccctgatgaaccgcagagaaaggattcccgctgaagtagaaaggagatgaccacctcagtcctcttcctcatcttgttcaccatgggtcctgcagagcttagggggtgtgtgggtgctgggtggtaaagatccaggacctgggcagagatgggatccgccctcagcgcagggttatgacagtactctccgaaactccactcgattgctcttctgcctcctcatcattgtcctactctgcaccatgggacacagagcactgccccagagccggcagtcaggagcagtggagggaggaatggagggggcagtggagggatgaatggagtgagggagtggagggatgaatggaggggataggggagggatgaatgtagggggcagtggagggatgaacggagggggcagtggagggatgaacggagggggcagtggagggaggaatggagggggcagtggagggaggaatggagggggcagtggagggataaatggagggggcagtggagggatgaatggagggagtggagggatgaatggaggggataggggagggatgaacggagggggcagtggagggatgaacggagggggcagtggagggaggaatggagggggcagtggagggatggagggggcagtggagggatgaatggagggggccatggaaggatgaatggagtgagggagtggagggatgaatggaggggataggggagggatgaatgtagggggcagtggagggatgaacggagggggcagtggagggaggaatggagggggcagtggaggaatggagggggcagtggaggaatgaatggagggggaagtggaggtatgaatggagtgagggagtggaaggatgaatgtaaggagtaggggagggatgaatgtaggggcgagtggagggatgaatgtaggggggagtggagggatgaatggaggggggaatggagggatggagtggggagtggaggggtgaatggggggagtggagaggtg

SEQ ID NO: 25774 - DNA, 1222 bp, Artificial sequence
  DNA replication origin
gagtggagggatgaatggaggggggaatggagggatggagtggggagtggaggggtgaatggggggagtggagaggtgaatggagaggggactggaggttgaagggaggggggagtggagggtgaatggaggggggagtggaggggtgaatggaggggggagtggaggggtgaatggaggggggagtggaggggtgaatggaggtgggagtggaggggtgaatggaggggggagtggaggggtgaatgtaggggggagtggaggggtgaatggaggggggagtggagggatgaatggaggggggtttggaggggtgaatggagggagagtggaggtgaatggagcggggagtggagggatgaacgcagggttctgtggaaggatgaatttagggggtagtggaaggatgaatggaggggggagtggaagggtgaatgggggggagtggaggggtgaaaggagcagggagtggagggtgaagggaggggagagtggaggggtgaatggaggggggtttggaggggtgaatggagggagagtggaggtgaatggagcggggagtggagggatgaacgcagggttctgtggaaggatgaatttagggggtagtggaaggatgaatggaggggggagtggaagggtgaatggaggggggagtggaggggtgaatggagcagggagtggagggatgaatggagcggggagtggagggatgaacgcagagttccactgaaagatgaatttagggggtagaggagggatgaatgcggcgggacagtggtggcttaaatgcagtgggtgggggtgctggtgtgtgtctgggaagggtactgtgctctctgctctttgtagccacgtgtcagggtgctttctaagaagggtgcaggcagacactgttttcttcaggagagaagctccgaatgggacgtagggaacacagccccggagccaggaagcactgagctgctcccagccaggccctggagggttggcatcattcgagagctgaggagtgtcccccacccctcagctgcacttgggtctcagctgggatgaactggatgtggacacagtgctgggcaggcgattatcttcatgggcctgggcgctcctgctgttgtggataattatcttggcagtaaggctgggtccagtagtcggggtctcagaagggaaagcagggaagcctgggagagcagccagggagaggggaggcctgagg

SEQ ID NO: 25775 - DNA, 4425 bp, Artificial sequence
  DNA replication origin
aaaggaaaaccaagaaggagtgagtccccaatgcccccaaattgatccatatattgaatgatccccagtaaaagtagctccatgatgattccaaagcccttaggaaactaaaggtgccaggagaatgaatagacacgtctccatagaagacacacactggtcaacaagtacatgggaaatgtccagcatcctccaggaaatgcaaagcaaaaccacagtgagatcccacctcccacccgctgggactgggcagatgcagtcctggcaaaccagtcttggtgaggagcgggggtatcagagccctgctgcactgagatacacacacacaaaatggaatagtattcagtcttaaaaaggaaagaaattccagtactggctgcaacttggatggaccctgaggatcctatgctgagttaaataagccagtcacagaagaacacgtaccatacaatcccacttatgtgaggtccctagagtagtcactttcatagagatagtagctgacaggaggagcatggggagtgactgtttaatgaatacagacttgaaatttgggaagaggtaaaagttctggagatggatggtggtgatgggtggtgatgatggacattggagatgggcaatggacatggatggtggtgatggatggtataaatggatattggatgtggacagcggacgtggacagtggagatagagggtggtgatggctggtggacatggacagtgaagatagagagtagtgatggatggtggagatagagggcggtgatggacagtggagatagagggtggtgatggacagtggagatagagggtggtgatggacagtggacatggacagtggagatagagggtggtgatggacagtggagatagagggtggtgatggacagtggacatggatagtggagacagagggtagtgatggacagtggagatagagggtggtgatggacagtggacatggacagtggagataaagggtggtgatggacagtggagatagagggtggtgatggacagtggagatagagggtggtgatggacagtggagatagagggtggtgatgaacagtggagatagagggtagtgatggacagtggacatggacagtggagatagagggtggtgatggatggtggacatggacagtggagatagagggtggtgatagacggtggacatggacagtggacatggacggtggggacagagggtggtgatggacggtggacacagacggtggagatagagggtggtgatggacggtggacacggacagtggagatagagggtggtgatggacagtggagatagagggtggtgatggtcagtggagatagagggtggtgatggacggtggagatagagggtggtgatggacagtggacatggacagtggagacagagggggtgatggacaatggacatggacagtggagatacagggtggtgatggacggtggacatggacagtggagaccgggggtgatgaacagtggacatggacagtggagacagagggtggtgatggaccctggagatagagggtggtgatggacagtggagatagagggtggtgatgggcggtggacatggacagtggagatagagggtggtgatggacagtggacatggacagtggagatagagggtagtgatagacggtggacatggatagtggagatagagggtggtgatggacggtggacatggacagtggagatagagggtggtgatggacggtggacatggacagtggagatagagggtggtgatggatggtggacatggacagtggagacagagggtggtgatggacggtggagatagagggtagtgatggacggtggacatggacagtggagacggagggtagtgatggatggtggacatggacagtggagacagagggtagtgacggacggtggacatggacagtggagacagagggtagtgatggatggtggacatgggcagtggaggtggagggtagtgatggacggtggacgtggacagtggagatggagggtagtgatgtacagtggacatggacagtggagatagagagtggtgatggacagtggagatagaaggtggtgatggacagtggagatagaaggtggtgatggacagtggacatggacgctggagatagagggtggtgatggacagtggagatagagggtggtgatggatggtggacatggacagtggagatagagggtggtgatggatggtggacatggatagtggagttgaagggtggagatggagggtggtgatggatggcggtgatggagggtggagatggagggtggtgatggagggtggagggtagtgatggacagtggagatggagggtggagatggtgggtggtgaaggaggttggtgatggagggtggtgatggggggtggagatggagggtggtgatggatggtggagatggagggtaaaaatagttggtggtgatggaggatggagatggagggtggatggagggtggagatagatggtggtgatagagggtggtgatggagggtggagatggtgggtgatgatggagggtggtgatggatggtggagataaatggtggtgatgaagggtggagatggagggtggagatgcagggtggaaatggagggtggtgatggacagtagagatgaatggttgtgatggatggtggagatggagggtggaaatggtgggtggtgatggaggatggagatggagggtggatggagggtggagatggtgagtggtgatagagggtggagataaatggtggtaatggacagtggagatggacagcggaaatggagggtggagatgcagggtggaaatggagggtggtgatggacagcggagatgaatggtagtgatggatggtggagatggagcatggaaatggtgggtggtgatggaggatggagatggagggtggtgatggagagtggtgatggatggtggagatgaatggtggtgatggacgatggagatggaggatggagatggagggtggatgaagggtggagatggaagatagtgatggagggtggtgatggatggtggtgatggaggatggagatggagggtggatggagggtggagatggtgagtggtgatggagggtggagataaatggtggtaatggacagtggagatggacagtcgaaatggagagtggtgatggatggtagtgatggatggtggagatggacagcggagatgaatggtggtgatggatggtggagatggagcgtggaaatggtgggtggtgatggaggatggagatggagggtggagatggagggtggtgatggagggtggagatgaatggtggtgatggatggtggagatggaggatggagatggagggtggatgaagggtggagatggaaggtggtgatggagggtggtgatggatggtggagatgaatggtggcgatggacggtggagatggaggatggagatggaaggtggtgatggagggtggagatgcagggtggaaatggagggtggtgatggatagcagagatgaatggttgtgatggatggtggagatggagggtggaaatggtgggtggtgatggaggatggagatggagggtggatgaagggtggagatgaatggtggtgatggacggtggagatggagggtggacgaagggtggagatggaaggtggtgatggagggtggagatggagggtggtgatggagggtggagatgcagggtggtgatggagggtggcgatggaggttggtgatggagggtggcgatggagggtggtgatggagggtggagatggagggtggtgatggagggtggagatgcagggtggaaatggagggtggagatgcagggtggaaatggagggtggtgatggacagcagagatgaatggttgtgatggatggtggagatggagggtggaaatggtgggtgatggagggtggagatggtgagtggtgatagaaggtggagatgaatggtggcgatggacggtggaaatggaagatggagatggagggtggatggagggtggagatggtgagtggtgatacagggtggagataaatggtggtaatggacagtggaaatggagggtggtgatggacggtggtgatggatggtggagatggagcgtggaaatggtgggtggtgatggagggtggagatggagggtggtgatggagggtggtgatggagagtggtgatggatggtggagatggagatggagggtggacgaagggtggagatggaaggtggtgatggagggtggtgatagacggtggagatggagggtggagatggtgggtggtgatggagggtggggataaatggtggtaatggacagtagagatggacggtggaaatggaggatggtgatggttgtacaacaatgtgaatgcac

SEQ ID NO: 25776 - DNA, 1694 bp, Artificial sequence
  DNA replication origin
tcttacctggacgcccacagtggacctgacctggccgaggggtgggggtggggttgggaactacggaggcgctcggggttcctgggtaagttcccgcggactgctcgctccttgccgggtgctacaataggcgtatccggtgtccctggagccaagctaggggacgggatcaacgtgggggcggggcagcgtgcccgaagggcattgctgcattccaggtgttggggaacgcagtgagcgaaggcgtggaggtgagggagaatgtggaaggcgtgcgcccggccggggaaccctgggctttgtcctgtgggcagctggagcggctgggcgttcccggctgcgacaacgcccacctggccccgcacctgggcctgctcgcaatccagcggcgcctctccgcatctgccttcacggatctcagccccagcagagcccttgtgccggaccctggggcgggattgcgagttcagagggagtcaagaggcgcccttgagtatggcgggagccccaccccaagcacctggtgggaactcacttgcctagggagagagcagggcagtgagcactccgggctggctcccaggaaagaccctccggcaggagcttggattgcaaggttggggaggagggaggccaggggagggacctgcagccaggtgatccgggtgcctgtatttcttcccaaggataatgtgagttgatgctggctgagatctgctccgatgagggtttgaaagagagagctccgggtgtcaaagtcagtggatggcaaaacatgcctggagggagcaaccaggcatccaaccacaggccctgggctggagggcgggggggggggggggtggaagcagaggaaggagagagaaggaaatttgggaggaagagtgggcacgaactggctgcccaattgtgtgggtgggtaggtggcagggagggactggttgttctgggtctgcccctccggccccaccacacctgcttccaggtgagcttaggaatttcccaggcttcctcccagctggagccagacgtgtccctcagaggccccagccctgcccatcctttcctgccctacccagggcttctctaccttcttggcttggcctgctccttgttcacaccttggtaaatgacccttcacaaaagtcattttctctatttgtgcttttctttcttttgccaggacgcttgactttctcgacagggagggggaggcaagcctggtgcccagtgctctgcctgcactggtcagtgcgcgtggctgtcacttggctgggaagctaggccaggagagcagctgcagctgtggaggtcggcagttgagaggtggagagacctgagcacacttgggccagtcgtcccgtggcatttgggagcccaggaccgagccggggggcaagtgtgggcaatgcttggagccacagagtgggggtagggaattggaggggtagagaggacaactcaaaccaagccaggaacccacagaggagaccaggaaaggaaaaccaagaaggagtgagtccccaatgcccccaaattgatccatatattgaatgatccccagtaaaagtagctccatgatgattccaaagcccttaggaaactaaaggtgccaggagaatgaatagacacgtctccatagaagacacacactggtcaacaagtacatgggaaatgtccagcatcctccagga

SEQ ID NO: 25777 - DNA, 1130 bp, Artificial sequence
  DNA replication origin
acgctcgtggcagcccgggccgagcccacggcagagcggccgccggcggcctcgcgcgcgggtccctgacgtctgcgggaggctcagccccgcccccggaacgccccgccccgggcacgcccccgcccgccccgcccccgcccggccgcgccgcaccccgcgccgccccgccggaaaccaggttagggcgggtccgcggccgccaggtgagcccgccccggtagccccgcgcgtggtccggtcggcagaggcttggcgagccgccatcccgcccctgccccaggcccaccttcccccaccgcccaggccccgctggcctccccggctcatctcgcacccggcgcagaccccatgccctcccgtctcggcagcgccccccgcttcgcctcccggtccggccccagctcgacgggcggaaccgggtgcgcacagcagccccgcgccctggcccagggccagcgggttaacgcttaactacgctccaggagctgtaggctccagccgcgcctcgagtccccaacctttggccccggaagccaaaaagaggagcggacggtgaaggagtcagggtgagttccagaggccgctcccagattttccctcccgagcctggccagactgggcgtatgtccgacatctccacctctgaccccgggcgctctgggctgagctgggggcgatggtggtgggcatcgacgccgtcttacctggacgcccacagtggacctgacctggccgaggggtgggggtggggttgggaactacggaggcgctcggggttcctgggtaagttcccgcggactgctcgctccttgccgggtgctacaataggcgtatccggtgtccctggagccaagctaggggacgggatcaacgtgggggcggggcagcgtgcccgaagggcattgctgcattccaggtgttggggaacgcagtgagcgaaggcgtggaggtgagggagaatgtggaaggcgtgcgcccggccggggaaccctgggctttgtcctgtgggcagctggagcggctgggcgttcccggctgcgacaacgcccacctggccccgcacctgggcctgctcgcaatccagcggcgcctctccgcatctgccttcacggatctcagccccagca

SEQ ID NO: 25778 - DNA, 2131 bp, Artificial sequence
  DNA replication origin
agcgtgcgggcctcgccgggcatgtcctaggcggcggccccgcccagcgctcggccgggcgggcgggcgggcgcgagggcagggaccgagccgggccgagctggggaacaagccggggaccaagccggggaccaagccggggactaaggcgagccggagaccgagcccgaacagcaggtaggacgcgccggcccagcgctggccgcggcccgggcctcccatcgcccgcacctgcacggctgtggggtctcacggggcgcggggtcccggccgaggccggacaaaggcgcgggggttgggggccgcccggcgcacctggtcaggcgggtccccgccgccgcggaggcggccctggtctgcgccaggccgggaggagccgccccgtttctacgcggcctgcggagggggcggcaagcctgggcacccgggtccccgccccggcaccggctcggccatggccgcccccggagagcgctgattcagaaggcgccgctccctcccccgccgggcccggccgcctccctcctggcctggtctctcctcccgcggtccctccctccgtcttcctcctcctcccctctctcctcatttcccttcgccgccgtctccccgctgtccctgcctctcccggcctgtgcgctccttccaccgccggcctgccccgcccggctcgctgcccttccctgccctgggcctagccacctttccccgcctcacctctgactgtggcccttccggccggggcggctgaggggacaagtttggggcgtttattattcttcctcctagcaacgatggccagcccagccccgaggcagccgaaggccgttttggagcgtcgcgggctcccaggccttttcagggtgggcggccggggcagtgggtggcctggctctggcacagcggcaccaccaggctctggggctcggcttcatttcgccttaaacagggaccgtggactcctcagggcgggccgcggcaggtgatggcagagggtgaggcctaggagggctggctgggggccggaggtgcaatggtggggtaggccctgcccgatagagcaccctgtggtctcccccagcagccctagggagggtggggctgtagaggcctcctggaggctttgctgtctggggctgcagggtcatcgaagtgccagccccttggcctccagtgcctgcctgtctggctggagctgggtgcgtggcttaggaagggcagggcccccagagtgagagggtcctggctgcctggagctgccttctcctggtgaggatttttctacatcttcccacctccctgcccaaggtgagggtttaccatggggcacgtggtcacttgggcattcatgctagctggagctgggtgttggttttccctgctgctcaccgaagggagctgagatctggtgaagagcctcaaagctgaagaccttgggcgtgggcactgggcaaagtagggacaaggagccactcactcctctgcctggcaccctcatgtggtgtggccctgccctcaggatgcactcagcccggcagcctccccttctcctctgctccactgggcctcagctgctgtcatccctgtcctgggttattgtcctcacttcttgactggcctcctgagtcacagccccatgtccactcaggagctctggggccggcctcacaggtatgtgacttggagacccccacagagcccttgcttggaccccgcatgtggcatcttgctcagctctccttctcagtttttgaataagggtaccgcgttttctttttgtgctgggccctgcagtgatggagccagtgctgggccctttagggacttcatccccttccaggactagccacaggactcccaggggtatgtgaggccctccatccctctgccctgtccctctgccctggtggcaccagctgttccctctgcctggaatgcagtcccacaagcgttcatgggctcacttccacccctgtcctgctgagcctggaggctgcctcccagtgagcccccatccccgccctgcctctgtgttccctgtatccctctttgcaccttctcataagccgtttctgttctctgtgcctgccccctgctgaagggagccccaggattctgagactctgtgtct

SEQ ID NO: 25779 - DNA, 1041 bp, Artificial sequence
  DNA replication origin
ggtcacgagggcaaaggcctggcagtgggactcgggaccatacccagggagggcgggtggcctgatgaggctggagcccagcttctccggaagctgccagcttcccttagagggtcaggatctgggctgggccttggatgtgtccagggggctaagaaccaggccagggagccccactctaacaatcccctcttccccagggccagacgggcccagccagcaccaagatgagtgccacgtcctggttcctggtgagcagcagcggcgcccgccaccggctccctcgggagctcatcttcgtggggcgtgaggagtgtgagctcatgctacaggtttgcagggagcgcttggggccaggagggtagggggtagacagtctgtccctgtggaggccaggaaggtgcccaccccacttgctgcaggccaccctggcgaggaggccgccatgcagcccaggctgggcctcttaacttgggtcccggatgcaccgagggctctggggctcccgtgggtgcgtgcaggggtgtgtgtgtgctcacaggctcgggtccctgccccgtacgtatccctgtctctgacaggagggggcttaggcttttgtcaggttctcaaagttgttggggtccctagaagcgtgagttggcgtccttttgcagagagggagctgaggctgggctttggaaggtcctggaaagccggtctgtccatattcttgttgtctgggggccccgtctatgctgtgagtgctgcctgagcgggggtcccagtatcttggtcccagctgcaccctggtgaaggctagtgccttttggcggcctccaggcatgaggggttcttctcagggcatgagagcctgccgagcaccggcactgacaatcggaagtttctctggccctggtttgaggtctgagtttggctttgtggggcttgcgatctggctgtttgagaacaaagagcaggggtggtgagctaaccccataggcccatcctggcctgatgtccttcctctaccccgtgtgcctgtgaacgagttgggctccc

SEQ ID NO: 25780 - DNA, 1508 bp, Artificial sequence
  DNA replication origin
gctgggcaccagctctgtgccaggcttgcactgggcacaaggacactgtggggagcagaggcagggccctggacagcgtggtccgtgggacagcacgtgggtggcagctctgcctggaacacaactcccctacccgtctacctgctgtggtccaagctaccgcccctcttgcctagtgaaagcccaggcctcgggccgcccactctgcttgtctcccctccatgtcccatccccgtagccccagctcagctctgtcctcccacagcctccccctcctcaccggccccaactcctgctgctgcggctccttgggcctcagcacaacataggcaggtgtctgctgaccgcccagtccccagtaccaccttctttacacaggactggaccctggacaccttgctggcccctctctgcagtggatgccaagggagggcagggtctctgcttgacaccctgcccagtggaaagatgtggcgccgaaagcaaggactgtggagggggcgctgggacagggtgtggaggttccagggcaggaaggtcggtgtgagccgggtccggagagccagggcaggtgtggggagaggctgggtccagtggaggcctgcattcctgtctgtgcgtggggtgggggtgggggtggcactgagcagagggaaggggaccctggcggggaccccgggtggaagggacggagggtgacaggtttggttcagccaccgagcttgggatgcctctgagaggccccagtgcagcagccatatccagtaggaggctggaagccgaggacagagcaggctccaggcagcatgtggatcatctgagcagaggtggatagggcctcggggaagcagcagcgttcggaaagggccactgaggcccctgagcatgagctgagagggcgggggtcctggcgcaggtgccaaggaagttgctgcagggaggggcggcaggtgcaaacatcctcaggtgggggcaacagaggggccaaggggctggacatggggctgtagggtgggggtgagaagcctctagggcaggtgcacagggagtgaggggtgacagaggccggcagggggcagcggtgggcaggtaggaggccgctgcaggggcaccgggaggcagacagccttcccacactcgccacacctgcaaggcctccctgagcctcagtttccccatggagatacatcttacaatggtgacaccacccacaacagcgaggggtagaaatgcaggcccacccaggccaggggcggccactgaggagagctgggaagcccccaacactcccgacctgctcagggctccactgacaggtgcagaaactcggaatcggaccccaaactcaccctgagcaccctgcccccagcacttttcccctaccccagggagaagcaggcagagcaggcctggtgcaggggtggggcaggaagagcacccacaccagtcccctgcctgcaggctgactctggcttcttccagaggctccaaagtgccgccgcctccaa

SEQ ID NO: 25781 - DNA, 1128 bp, Artificial sequence
  DNA replication origin
gtccttgctttcggcgccacatctttccactgggcagggtgtcaagcagagaccctgccctcccttggcatccactgcagagaggggccagcaaggtgtccagggtccagtcctgtgtaaagaaggtggtactggggactgggcggtcagcagacacctgcctatgttgtgctgaggcccaaggagccgcagcagcaggagttggggccggtgaggagggggaggctgtgggaggacagagctgagctggggctacggggatgggacatggaggggagacaagcagagtgggcggcccgaggcctgggctttcactaggcaagaggggcggtagcttggaccacagcaggtagacgggtaggggagttgtgttccaggcagagctgccacccacgtgctgtcccacggaccacgctgtccagggccctgcctctgctccccacagtgtccttgtgcccagtgcaagcctggcacagagctggtgcccagcgaacaggcgttaaatgacgcaggaacgtggacccaggcaggacttcctgctgtggctgtcactcctgtggtggcccaggctgtggtccagggtgtgcgtgtgtgcgtcgtgtgtgtgcgtgtgtgtgccgtgtgtgtgcgtgtgtgccgcgtgtgtgtgcgtgtgtgtgctgtgtgtgtgccgtgggtgtgcgtgtgtgtaccatgggtgtgccgtgcgtgtgtgcgtgtgtgtgccatgtgtgtgcgtgtgggtgtgccgtgtgtgtgccgcgtgtgtgtgccatgggtgtgcgtgtgtgccgtgggtgtgcgtgggtgtgcgtgtgtgtgcgtgtgtgtgccgcgtgtgtgtgccatgggtgtgcatgtgtgccgtgggtgtgcgtgggtgtgccgtgggtgtgccgtgcgtgtgtgcgtgtgtgtgccatgtgtgtgcgtgtgggtgtgccgtgtgtgtgcgtgtgtgccgtgtgtgtgtgcgtgtgtaagtgtgcatgtgcatacatgtgcatgtctgtaggtgcacacatctgtgtgtgttgtgtgcatgtgtgtgctgcatgtctgtggggaggtgtcctccgtgagagcgtgtgacagctgggatttgcactcttgcgtgctgccccagag

SEQ ID NO: 25782 - DNA, 1005 bp, Artificial sequence
  DNA replication origin
ccccagagggcgtcagacgtgaactttgggaacatctttattctgttttaaagtgagcacaaattattagacactttccccaaaatccatgtgtttggggcgtcttccggccatgccacacatctgtgtttgcctggctgtttctgcaccgagttccgtccacagcccgggtttctgttgttttaagtcttgagccctgggccgggggccacttctcattggtggctggaggctcggccaagtgaggggctgcttctggttggagaggggagtttctggaagggggttccccatgtgtctccagcgcttcctgcagtctggggaggggcttggcaggagcaggtctggtgagaaagccctggccgggggtggaggctcagtcctgggagtgggcggggcagctgggctcggggtgttaacagggtcctgcggggggactctgtgctgagtcaaaggagccggaagctggtgtgggccgggtggggtggggaaggtgggtgcaggcaggggagggggcttggactgaaggtgagacccaggcctgggcaaggatgcggtgtgcccagagctggcagagtcatctgcctgaagcctgactgtggcctgggtggggtaaggaaggtttggagaggctttggggcctgcgggaaagggggctgtggagagagaggctgaccgagggctgccgagaggaagaccagtgttgctggagcctgtggtggagaggggcttggtgggtgaaccctccagggaaggcctggggcagggctcagaggacctggaaggtgtgcagagttgtgtccagcaggagctctcgaggcccagcgggtctgaggctaggggagcagcagggaggcgtccaggctggaaacccctccagggtttccactcctcagcagagatgacatccaagtcacccgccctcagccacctcagccctttccagaggggacaggggcagtagctccttccttcatgcccctgctggaccccatcccctgggga

SEQ ID NO: 25783 - DNA, 913 bp, Artificial sequence
  DNA replication origin
gggaaggtagtcattacccccagcctgctgcagtgacaggtggcgggggcaccgggacgcgggtgccactgttgtggatgcagcagcatccgggctctgggaggggcctgggaggagccgggctgcatggtcagcctgctggagctcctgggctttcggagctgcatcgctgggcactggcggatttagctgtggctcacagaacaaatggctcattgggtgagctgggtggccagagcccaggaagctgctggggtcaccctgcaggagagtgcagcggggctgaggcgggggccagcagcctccctgggagcagagggccccgttcagagggccaggagggtatagagcccctgagccccccagcatctttttgggagtgtctctcaggttaagtagctttggggtctcataaggggctttagattctctgacattacagttatttggagtcttcgaagctgaagggattaagagtctctagacagagtgtttagggtctctgaggctggggaatttggtctctctgtgagtgagatatttagggttccttaggctcgggggatttgaggatctacgtgttagaggatttggcgttcctctgggtgaagggatttgaggtctctgaagctgaggtgctttggggtctcatgcccaggggattaagttcgctccaggttaacggatttgagtccttcaaggtggcaggatttggggtcacttcaggctgagaggatttgttgcttcttagggtgaggggatctgaggtctcctgggctgaaatctgaaggtcttaggctgagggtttataagggttttacgctgcacgaccaaggccccccgagttcctgtcagtctctccgatctcctcccgcactgcccgccctggccgggtgccctctcggagcccctc

SEQ ID NO: 25784 - DNA, 930 bp, Artificial sequence
  DNA replication origin
accccaccccgacccctccacaccccaccaggcactttctcactctcgctccttcccttccctttgtgcccaccggacccacgcggaccctcgtgcagctgtcctcctcccagacttctgcctacccgctgcactgactgccaaaggcgcaaatcaggtttcatcagaaaccaccaacccctgagccctgctggctcggtctgcagaatccagtccaaatgcctgatactagggagcatagcctcacccccccatcacctgcctctcaccactggggacagagggtgcccagctggtggcccaccaaccccacaagaactgtgggctcaaggggtgcaggcgtgcacaggtaggtgtgcacaggggtgagcagtgtgggtgtgcatgggtagctgtgtgtgtggggtaagaggtgagggatgtgggtgtgcacaggtagatgtgtgtacaggggtgggggtgtgagtgcacaggggtgagcagtatgggtgtgcatgataggtctgtgcacagcagtgagagctatgggcatgtatgggtaggtgtgcacaggggtgagtggtgtgggtgtgcatgagtagggtgtgtataacgaagatgcaggcatgcatgggtaggtgtgtacagaagtgaggggtgcaggcatgcacgggtaggtgtgtgcaatgggtgaggaatgtgggtgtgcaagggtaggtgtgcacaatgggtgaggggtgtgcatgtgcaagggtaggtgtgtgcaaagggtgaggggtatgggtgtacatggtatatgcatgcagagggttaaggggtgcagagaggcaggtgcggggcagagggcctggcagtggccctgtgtgctcaccccatccgcactgcctgggcctacctgttcctggtctccggtcccccttctccggcctggggttcgaggcctcgcagtat

SEQ ID NO: 25785 - DNA, 1158 bp, Artificial sequence
  DNA replication origin
tgagctccccagagcacctgtcagtgtccagactgtgaaacacatgcagctggtgacagccagtgtggggctgtcccggaggtcatgacaggtgcagccagctgggcagcctggctccttggctccgttagagcgagggcagcacattgtggggaccaaggaggagttcagggccggcagcagatggggactgcctggtagcagatgcccctgcctcagcagcccctgggtgtgtccctgggtcaagagggagtccccagggaggggtaaggcgtgtgtgacacatctcaggggccctgcatccccagcgcagtgtgcacatggttccctatgggtaactggccccagcgcagtgtgcacatggttcctgacgggtgactggccccagaccctctggccccccagcagtgtaagcagctgggggccatgacgcagaggccccctgggcttccgcaaggatggaaagagcttgggtggagggcccaggaaggagactgtgggcatgagggccagcgccctgacctgagggcactggacactgcttctgttcactgctgccatcaggaagggctgggctgccggcttctcagagggagtcaggagtgagattctatctgaaatatacaatttccctcctggtcattaaggcaaacaaactaaaatgccgcagggaccatgtagattgcagtggctgcccacccccagggccacccatttgtggcctgaaccatttaccagccttggaggtggctggacccaggtgtgggctccccctggcctcctgccctctgttggatgcgctctggggtcgggaaggccggggcagggttgcaggacggaggtggggggcccccaccatgccccaggggatgagcctctgagtacatcagaggggagagaggaggggccaggcagggaggaggggccaggcaggcagggagcctctaagcacttgtgggaggaggtggggccaggcagggaggggccagtgagccacctcggaactcaaggtagtcaacattccccacagaggcggggccctgggctgccacagggccaagctgggaggtgatgccagggcctgccccagagtccagcctctcctgggctgccagttctctgcttttcacactgggggccccagcaacacagggtctg

SEQ ID NO: 25786 - DNA, 1092 bp, Artificial sequence
  DNA replication origin
gagggctctcactcgccgctgggctgcacctggtcgatcatcttccgggcctcctccacctccgtgtcctgcgcctcggtctcgatggtgtatgtccctgcgtcactgaggctgtcgtcctcctcctgtttccgtgccttggtcagctgggggtccgtgggggcgggcggtggggtcggggggcccacggggctggtcccatggggtgtcaggggagcgggcagcaccggaggaaccttctcggggctgggccgggcggccggggagctctcccgcagacactgggccatgaagtcctgggccaggcgggagcggcgccccacgcttccgaaggggcgggcaggggttcgggaggcgggcgaggggctgcccagccgttcctctgtcttctcccgcttgagcgagccggccctctgtggccccgagctgcggccccctgcctggactggggctgggacactggggcggtccctatcggccggcgttgggccacggcgcttgtcggccttggggtccccggacgggctgtgcgtgaaggactgggagcgcttctttcggggtgtgtcctcgtcgaagaactcgatgacaaaggcctgctggttatgtagtagctcctgggggtcccgcttgatctgcctctgcagccgcacctgctccccgctggcctccaagggcaccccagcggccgaggccgccttggccagggggtcctctgagtcactctgcgtgccgtcctcgtgcttgtggcctgggggagacaggggaccccaccttgtcaggccgagagaaaggaaacagctgtcgatctcaggcagcctcatcaccccatgccttagctgagttgacaaagcaccccagccctcagggcccccccacacagggcaaagaagtgcaacgggaagacgcaggaccggactcctgaccaggcaggtggctcttaggcaattaactgaaaaatgggaagtcaacccagctgaatgggcccctctgcatggcaacagtgcagacccagccaaagtccggtcccctgcctgtcccgggactggcacggccgccagctgggcactcacccttcagggtgcgggtgtggac

SEQ ID NO: 25787 - DNA, 1540 bp, Artificial sequence
  DNA replication origin
aggcccggaagatgatcgaccaggtgcagcccagcggcgagtgagagccctcgtggggaacgggggggtggaggcgatgccgggggtggcgagtgagagccctcgtggggaacggggggtggaggcgatgccgggggtggcgagtgagagccctcgtggggaacggggggtggaggtgatgccgggggtggcgagtgagagccctcgtggggaaccgggggtggaggtgatgccgggggtggcgagtgagagccctcgtggggaacgggggggtggaggtgatgccgggggtggcgagtgagagccctcgtggggaacgggggggtggaggtgatgccgggggtggcgagtgagagccctcgtggggaacggggggtggaggtgatgccgggggtggcgagtgagagcactcgtggggaacggggggtggaggcgatgccgggggtggcgagtgagagccctcgtggggaatcgggggtggaggcgatgccgggggtggcgagtgagagtactcgtggggaacggggggtggaggcgatgccgggggtggaggtgggcggacgttgtcctgctccggcccagccctggctcctgcctctggcccagctgggcaggagggagcctggtatgctgcccacagccccgcccctccccttcccagggctgggtccgtatcccatccgcatgtcctgctgacagccaggctgcatgtcccggccaccagccactctggccaaccaggtccctgctctccctgtggcctgggggtggccagtgtcagtggagggttgggaggtgggcttctctgaccctcggtgcctgggaccatttcctcttggcaggtctttggggtgttggagtcccctgaactctccagggcatcttcggccacctttcgcccagtcatcagaggggacagagatgagtctgatgacgggggcgtggcccagcggatggcgctactgcaggagtttgcctcccggccactgggtgcggccccccaggcggagcaccaggtacaggcacagacggccaccccaaggaggggctgggcaggaagagggcagcatccaagccggacctggggtcagcgggccccccatggggcgagactggactttcctctgagggacacgctcagaggagggtgggctggggcttccatgaggagggatcggggccaggtgtcaggcccactgttgatttgaggtcctgggcaaaacgggctctgaggtcaggacagggccacggctgctctgccaacctggaactgagttctgtgaggctgcctgggctgggcaggcagggggtcgcgttggagcaagtccaggcgaggcaactgggatccctggctgcctttgcaggggcacgcttgctcatgcggcaggccctgggtggcgcgcatgcgtggggctggtgttggctgctctggacgcccctcctgttccctggcaccccctgcttctcgccgttgggcttgcgtgtggaaacactcccaccctcctctccacagggcctcccggtgccgggctcccctggg

SEQ ID NO: 25788 - DNA, 1415 bp, Artificial sequence
  DNA replication origin
gtcagaagtgggtgtcccgctgggccagcctggctgacagctactcagacccgggcctcacaggtaagtggctccagtgctgcgggggagtcgggccaggccggggcgggcctcaggccactgaccacggacacaggctgcctcttcctgagcgtggagggcctgcagaccagcggccctctaaccggctgcctttgtgctccacagaggatggcctgggacgtagaggcggggagccggaggggtccctgcctgtgcgcatgcggcgacggctccctcagctgcccagtgagagggctgacagccctgcgggcccagagagcagcaggaggagtgggcctgggccaccggagctggacagtgagcagcccagccgcctcttcggccaggaggagttggatcctgacagcctcagcgatgccagtgggtcggacgggggccgaggccccgagccaggggtggagccacaggacagcagacgcaggagcccccaggaggggcccacgtggagcaggggtcggcgctcaccaagggcccccggggagccaactcccgcctctttcttcattggggaccagaatggggacgctgtgttatctaggaaaccgcttgcggctccaggggatggggagggcctagggcagacagcccagcccagccccccagcacgggatggcgtctatgtcagtgccaatgggagaatggtcatccagctacggcctggacggtccccagaacccgacggccctgccccagcctttctccggcaagagagcttcactaaggagccagccagtggtcccccagcgcccggcaagcccccccacatctccagccacccgcttctacaggacctggccgctacccgggccgcacgcatggacttccactcccaggacacccacctgatcttgaaggagacggagacggccctggcggccctggaggcccgactcctctctaattctgtggatgccgagtgtgaggggggcagcaccccgaggccgccggaggacgccctgtctggggactcggacgtggacacagccagcaccgtcagcctgcgtagtggcaagagcgggcccagccccacaaccccccagcctctgcgggcacagaaggagatgtcgccatccccgccagctgcacaggacccgggaggcaccgccctggtcagtgcccgtgagcagtcctcagagaggcagcatcacccacttggcccgacggacatgggccgtggagagccggtacggcgctcagccataaggcgtggccacaggccccgagggtccctggattggcccagtgaggagcgtggccctgtcctcgcccacctacccagctcagatgtgatggcctccaaccacgaaacccctgaggccaccggggcaggacggctaggttctcgccggaaa

SEQ ID NO: 25789 - DNA, 1177 bp, Artificial sequence
  DNA replication origin
tcacgtgcacacacacacgtgcatgggccgagggcagggcccgcagtcccctggtgtgggtagaacaccctgaccatctctggcgtggagagggccttccatcccccagggtgtgcctcagggccccgaagcccaggctggccctccccactcttcctgtactcctggctcaggcccctggtgcctttgggtccccacgccatctgcccatgggcctgaggccctaggcctggggagggctgtcccatggatctctgccgcagtactgtggctcagtgaagggtgccaagtacacctgtgccctccgctggtagctgctctaacacccttctgagcccgcaggccccatgaccagggagggagggagggctgtgagcagagtcctgccctgccccccagatgtccatgggcacagcaagcggggatggtcctctgtggccaccagagctggcctcctacctggggtggccggacatccgcgtctgcagagcggggcccaccccgcccgccgaggcagctgagctgtcctgcgagtggattggtttgaggtcaaggtgctgctgctactgccttctgccctgtgcacccacctacccacccacgatcccagtggagcctctttcctgactcccagcatcctcccacagccccaccccaactgctggctgcactgggcaggccttgcgtatggctggaggctgaggcagggttcgctggaggaaggggtggggcggggccgagggtcacccctgcttggtggagcctgctgtccctacccgacgtggtgcactggtggtgtttgacccaagcatgcggctcgccatcatgccccgctacagtgcaggagcgcagctgctgccaggcttagagcaggggctggtgaggaggccaggactctgcccaggagggcggaacctgaagctttgggtctgacaaactcaagcaggcagcagggagggactgcagtggccttgcttgcgctctgactggtccttgcctgtctgtgtggtccagcctgggccgcagcaggtcctggtggggaggtttactctgttttggggtctgtcaggcactgctttcccaccacctgtaagggggtttcccacctaatcagctgcagactgctcccgggttgcagccactggcctgggagcaccaggccgccttccccgcatgt

SEQ ID NO: 25790 - DNA, 1891 bp, Artificial sequence
  DNA replication origin
tgagtgggtgggtgggtggatggatggatggatgagtgtgtggatggatggatggatgagtgggtgggtggatggatggatgagtggatggatggatggatggatggatggatgaatggatgagtgagtgggtggatgggtgagtgggtgggtggatggatggatggatggatgaatgagtgggttggtggatggatggatgagtgggtgggtagatggatggatgaatggatggatgggtgagtaggtgggtgggtgggtggatggatggatggatggatgggtgagtgagtgggtggatggatggaaggatggatgagtgggtgggtggatggatggatggatgaatggatgagtgagtgggtggatggatggatgggtgagtgggtgggtggatggatggatggatgagtggtgggtggatggatggatggatgaatggatgagtgagtgggtggatggatggatgagtgggtagatggatggatggatggatggatgagtgggtgggtggatggatggatggatggatgaatggatgaatgagtgggtgggtgggtggatggatgaatggatgagtgggtgggtggatggagggatggatggatggatggatggatgagtgggtggatggatgggtgggtgggtggatggatgggtgggtgggtgtgtggatggatgggtgggtgggtgtggatggatggatgagtgggtgggtggatggatggatggatggatggatgagtgggtgggtggatggatggatggatggatggagagtgagtgggtggatggaggggtgggtggatgcagatcttcccaggaggtgagaccgccagtacaaggagggcctcctcaaaggttttcattagaaatgaactccctcacatggtcattcagtaacagggccctctccaggccaggcgctggggaggatggggtagggagttgggtgggagtgagagtggtctttgccaagcagtggtcagtactgcaaaggcagtccctgaaaggctgtggggcaggcagggggggtcccaggaccagggtggatggcaagtgtttgttgtggaggatgctgagcttgaagcccatgagggacctggaaggaggtggccaggagcaggcggcccttagagagtggcccacactggggtggaggcgcaggcacctgaggctgtgagcagcatgaagttggtggggaggacctggggggcttggaaggatggggactggggacagggctcttgggatgcttgaggtattgggggagcatagggaagaaggctgccatcagcggaggaggctagcacagggctagggctctggacagagacactgcacctggctgagaagggggtgggtgcttccaggcctgagagcagaaggggatgtggggggcccatgtgggtttctggagttctctgccttccatggtgggtgagctggagcatgccatatgacgggggcaggaggccagggagtgctgggcgggggcctgagggccaggggcatgtgccagttggtgtcacccagaggtggagggagggcttccatgttttgtcttgatgtggaatggtggacccagctaggacccagtcctgaatggggccagggcagccagtgggatgtgcaaggccatctgggcagagggtgctgggggtgtttctctggtcgtgccagtgtctggcgagggttgtggtgccgctggaggtaggggtagggggagggccctcagggtggtctgttccttgggtgactgccagtgtgggggccgaggaggcttggggtggggcctgtccccatgaggatgggtggttggcagtgacagggagcctaggtccccacggcctgggctgaaggcctaagtggggcaggacctgctggtggc

SEQ ID NO: 25791 - DNA, 1178 bp, Artificial sequence
  DNA replication origin
cgcgagccaggacgcgcagggagctgacgctgcaggtgggaaccgagagccaggacgcgcagggagctgacgctgcaggtgggaaccgagagccaggacgcgcagggagctgtcgctgcaggtgggaaccgcgagccaggacgggcagggagctgacgctgcaggtgggaaccgcgagccaggacgggcagggagctgtcgctgcaggtgggaaccgcgagccaggacgggcagggagctgtcgctgcaggtgggaaccatcagccaggacgcgcagggagctgtcgctgcaggtgggaaccatcagccaggacgcacagggagctgtcgctgcaggtgggaaccatcagccaggacgggcagggagctgacgctgcaggtgggaaccgagagccaggacgcgcagggagctgacgctgcaggtgggaaccgagagccaggacgcgcagggagctgtcgctgcaggtgggaaccgcgagccaggacgggcagggagctgacgctgcaggtgggaaccgagagccaggacgggcagggagctgtcgctgcaggtgggaaccgtcagccaggacgggcagggagctgtcgctgcaggtgggaaccatcagccaggatgcgcagggagctgtcgctgcaggtgggaaccgcgagccaggacgggcagggagctgtcgctgcaggtgggaaccgtcagccaggacgggcagggagctgacgctgcaggtgggaaccgagagccaggacgcgcagggagctgtcgctgcaggtgggaaccatcagccaggacgggcagggagctgacgctgcaggtgggaaccgcgagccaggacgggcagggagctgacgctgcaagtgggaaccgagagccaggacgcgcagggagctgtcgctgcaggtgggaaccatcagccaggacgggcagggagctgacgctgcaggtgggaaccgcgagccaggacgcgcagggagctgacgctgcaggtgggaaccgagagccaggacgcgcagggagctgtcgctgcaggtgggaaccatcagccaggacgggcagggagctgacgctgcaggtgggaaccgcgagccaggacgggcagggagctgacgctgcaagtgggaactgagagccaggacgcgcagggagctgtcgctgcaggtgggaaccatcagccaggacgggc

SEQ ID NO: 25792 - DNA, 1242 bp, Artificial sequence
  DNA replication origin
ggaaccgagagccaggaagcccagggagctgtcgctgcaggtgggaaccgcgagccgggacgggcagggcagggagctgaccctgcaggtgggaaccgagagccaggacgcgcagggagctgtcgctgcaggtgggaaccatgagccaggacgggcagggagctgtcgctgcaggtgggaaccgcgagccaggacgggcagggagctgacgctgcaggtgggaaccgagagccaggatggtcagggagctgacactgcaggtgggaaccgagagccaggaagcccagggagctgtcgctgcaggtgggaaccgcgagccgggacgggcagggcagggagctgaccctgcaggtgggaaccgagagccaggacgcgcagggagctgtcgctgcaggtgggaaccatgagccaggacgggcagggagctgtcgctgcaggtgggaaccgcgagccaggacgggcagggagctgacgctgcaggtgggaaccgagagccaggacgcgcagggagctgtcgctgcaggtgggaaccatgagccaggatggtcagggagctgacactgcagtatctctgggacgtttatgggcccagaaatagccctactggctaagcacccgagatgttccagccacccggtcaggggatgaggccttatgctaggagaggggagagatgacattgagaatcctgctccgagatgtgtgttcaaagggcagggaaaggggccagataaacttgacttgtggctccagtgaacaggcaaggaaacttgtctatcccctgactgtgggtgagaaggaaaattccacagtgagaaattgaaacctcagggaaagttgaccaactaattaacagagctgaagaaacaacttgcaaatgggaaggttgatcatcagaaattaggcagatgcaggaatgggatgaagacatgtaaaatgtcaaaggagattatgaggcatggaagatagaatgaaaatctatttaatgagttttacaggatgaggataaagaaataagaggagtcgatattcaaagagataatggctgagatccttacagaaataaccaaaagcataaatccttaagtttaagctgcacgagtcccaaggagaatgcataagaataaatctaacctgaacacagcatgttgaaactgcagaactccaaagacaaagagaaaaccttaaaagcaaacagagataagagaaactgttttcaaaggaacaacaattagcttggtg

SEQ ID NO: 25793 - DNA, 1076 bp, Artificial sequence
  DNA replication origin
cctggcctgggtggagtggggtggaggccccacagaggggtttttctcccacagcgcctgactttggtccctgcaggtgaaggagcttggcgctgtcatctataactgcagccacctggcccaagacctggagaagaccttccagacctactgggtactgggggtgcccaaggctgtcctccccaaaacctggcctcagaacttctcatctcacttcaaccgtttccagcccttccacggcctctttgatggggtgcccaccactgcctacttctcagtaagacgggttgagaaggagcccatcagaggcccctgttctcccctggctggccagacccacagggagccctctgggctggccctgcagacaccagcagcatcagctgggtcctcaggcagccagcaccatgggtggggctgtggccctggggtgagcagcaagcaggctggcatcagtaggctctgggctgtgcctggaggcaggcttagctccaggaggacagctggtcagcaccatccctgggaaacaggccgcctgggaggtggtgggaggacctggggccctgggagtctccagactgctgggcgaggccaaggggcttagctgggcactggagagggaggggaaccccacttgctctgcggggaaggaagggaagagtgaggggtgggcagatcctcctttatcagcccacgggggtgggggtggacagccctccagccagccgagggactggtctgtagtagaggctgtatcagaacaagggaagcctccctagatgggggtgggggtggcaccctgaagggagtggataaacttccctgtggccaggaactgtttctgggacgtcaatccagcctggagcccagggcagtccagctgcttccccactctctccgccaggcctcagagccagtccccaggacccctgttgagccgaccccttctttcctcatatttccaggcacctgggccccctccctccacaccacatggggcctcttaggtggtgcatggtggggtcacaagttcagaatgggctgggctggcagagccttcagggatttctctcccg

SEQ ID NO: 25794 - DNA, 1196 bp, Artificial sequence
  DNA replication origin
gcaggggcgggcgcatagaggcgggcccttggcaagaggatgaagggccgcccgcgcgggactcacacagaggcaccgggaagccacgagttttttttaggcctggcctgtgggccaggagtcagggaaggggcttcctggagggctccctggaggaggtggggctcagggggggctggactcggaaatcagagagcaggcgggcggtttgcgacgcccgggcggtcgcaggcggctcctggcgcagtgcggacccgggctgcttgcgggaggaagcggctgaagcccaggccggggtcagaggggagggcgcgtgcggggcggggtcgccgagagaaaaagaggcccccctcagccctgccaaacgcagtcctggcccggagcctgtccgtccaggccgacggcgtagcgcgaactccagtcccgctcaaagagctgccgcagctgctcctgcaccgtggcccccgcgggctgcgcgccagggctctgggtgaccaccaagcccacccccgccgtgctgctgaagtaatcctccgaccagttggaggtgcctgcggggaggatggaggagacactggggcgccggctcccacaggcccctctgcagcccgctcagcgccaggcccggctacgggtttggggacggttggcagctggcccctccactgtcatcagactccagccggggaagcccctcgcttaggtgcgggagggacagctggtcgcggtagaactccaccttcatcacttggggacaggcgtcctgactcagtgttctggggccctgtggggccaggtgacaggcgggtggcctggtccccggaactccatggagaccccgtcccccttcagcagcagcccctccctcctgaggtgtccacgccggtcacaaagccagtgcctccctcgcccgtgcctggccaccctggggcccgcccgccgtgatctgatcgcgctcacctatgtaggctgccttctccgtgaccatgaacttgctgtggttcaccctgctgaatgggatgttggaatggttccccaccggcacgatgaagactttcttaggggagcagaggcagcgcgtcaggaagggcggcaggagggccgcctttcccacgcccggccgggagcacgccctcaccacgtccacagagacgttggccgcggggttgctgagcgcctgcagggaccgcaggtag

SEQ ID NO: 25795 - DNA, 1266 bp, Artificial sequence
  DNA replication origin
ggcgccggacaggggcggcgcgggaggggagcggggctgaggggaccgggagggcgggaggggacctgcgactgaggggacagggagggcgggaggcgacccgcggctgagtgagggaagggcgggaggggacccgcggctgaggggaccgggagggcgggaggcgacccgcggctgagtgaggggagggtgggaggggacccgcggctgaggggacagggagggcgggaggggacccgcggctgaggggaccgggagggcgggaggcgacccggggctgagtgaggggagggcgggaggggagcggggctgaggggaccgggagggcgggaggggacctgcgactgaggggacggggaggatgtgaggcgatccggggctgagtgaggggagggtgggaggggacccgcggctgaggggacggggagggcgggaggggacccgcggctgaggggacggggagggcgggaggcgacccggggctgaggggacggggagggcgggaggggacccgcggctgaggggacaggtcctgcgtgcgggctggggagacaggcgggcgagggtaggggtgcacaaggctgtgtggtttgtgggctgttgtgcagggtgggtccaagcatgtgggggcaggcttgtcctggggatgcagtgcccagggttggtggatggggctgagaggaccagcatttgagctggagggcaggaaggtgactccagtctgagaccaggacttggatgcagctccactggaactcaccctatcctgggagccacctgggcacctgtcctgcagatgcaggatttgaacccaggtttggcaactcagttcccactcttctgctatgaatgctgggtcagaaggattctcaaaacaccctggcttatctcacctgatggttcctgaccaagaccacagggtaccctcccctggtggaggtccatggggccatgctaggctggagttcagggatggctcagcggtatgaaggagcactggatgctgaatggaccccagggtgccccgaatgctctcccggtcttgaggcaccactttcctacccttctctacttctctccttttcctacccttctctacttttttctttcctacatttgtgtccctgccacactgtgaactcagccatatcttcctcttccctctttgctttggggaaagctagcaaagttcatctcaggtacagtacaagttacttttctgttcgattagtgacctcatacttcccccatctaaaggacacctta

SEQ ID NO: 25796 - DNA, 1020 bp, Artificial sequence
  DNA replication origin
gtctccgaggcagtggagcccctccccactcatgaccccagctgcacctgctgccaggggagcagctgtgggccaagtgacccagggaccctcctctgcccccagccctgctaggtagttgccccagctccacacctactggctgggtccccttgggtaagtggctcccctcccccagcctcagttttcacatatgttacccaccttggggattgagcggcagggtctgggcagagcaggaagggaaactgaggccagagagtggcttacctgccattgcccttggcttagcggtgggcaggctctggccagattcctgtccctttccttggcaccaccccgtcccacgaatttgttgtgggtctggtgtggctggagctccaggcagctccagaggggctggggtggccccagctggtggtccctcagggttgtggggtgcactggggagccctggcagggccacgtggagggagtgggagggggcaggtgggcaaggagtggagggtttggcagccatctgggaggcagagcggtggggctggccaagttctgtctgtgcaggttgggggtgcgtccaggtgggagcagcaggggccctgtcaggtggtggggcagtgtctgaatgcaaaggtgagtgagatgggcccaggtggccaggacagagctgtgcagaagggagacagggtcttgccccttcactgcctggttagggagaaggggcctgtggaggagatcgtgttgtggggttgccaggggtacaattcttgggctgacaccgtgggcaaggctggtttggcaggtgggggaaacggaggttgtggctctgctggggggttatggaggccaggggtctgggcctggcccccggagcagtaggaaggtggcggggccgggatgacgtgggggtgagtgttgatgcctcctggcactgacccagccctgcctgccctcacctcctgcccttctcttccttcgcttgagagaacctcctccaggagacaccatcctccagccctg

SEQ ID NO: 25797 - DNA, 2242 bp, Artificial sequence
  DNA replication origin
gtccaaagttaattctgcggacgcgacaggcgggccgggggcgcggggtggggcggggcctggctgggaggggcggggccgcggcgacggcagccaatgggctgaatgaggccgacggcaccgcccgcgagcgcgctccgcagtggcccggcagggctgggcggagccgggcggggtcctagctgagcggctgggtagcctggcgcgcggtgtccgcagtccgaggtcggccgcccgcggcagcgcagggcagcggggcagagcgcggctcccgcccgcccgccccgtgcgccggagccgggaccagcgactggacgcgacgggccgccaggcccgcaccgcctggccgccgcgatgtgcgactgcttccacatggtgctgcccacctggcccggaacccccggcagcggtgcgcccctccccgcctgcagcccgctcccctggggcgggtgggctacgcgcgagggcgcgcgccggggcgtgtccaggggcgcgcagtgcgggccttgggggcgggggactcggagacgcctgcgggactcgcgcgtggttctgggccttcccggccgctggagtctcttctcccatgcctcgcgttctacctgtccgtggctgtaggttcctgctcctctcccggcctctgagactgtctctgtcgctcactttgtttctcggtggctgactcgtctctgtcgctcactccctctgtcactcgcggtccctgtctgtctctccttctcgctcctgccccgctcctgggacgctgtctggtcgagaggcggcctcctgggaggtgctaccgcactctggagcagggctggtgtctgcaaggggcgtgaaagccggggccgccgggacccggggcacctgcaccaggcttgccctctcacctgctttgcgggagagcagccaggctggtccaggagtctgggctctccactttggtccggggcttccaggcagggctgggctgcgtctactgtgtggctgtgtggtggggtcgctggctaggtggaggctgtggcagggctaggcctgaggtctggggcctggtgaggggcctgaatggggtcaaagtcaggccacagggtcccgcagtgctgggcaagggaaagtgggtgctacctactggcatgcccccagggatggtcagtagcctccctctgagccgcaggctacggcatgtgtacctgctgctctttgtgtgtctgtccctgcactgggcctggttccggggcctgggtgtctcagcatcttggagggcagggctgaggggggcagggcagtcccttgggcgctgggtctatgctgctgcagctgaccacacccagggcattggcagccactggccagggggttgggctggccggcactggtgcaggctggaccccactccttggggaaaacaggtcaatgctaatggtgccgacaatgctgcaggtgagaggggtgcccctggcctgggcatgccccccagctgcagcaggcactaccaaggcccctcctgtggcctgtctgtctggtgcgcacttagggtgggaggcttgtctggggggctccagagcagggaggcccctacagcacctgcttcacggtgtcgcagatgggagcccaaggtgtttgggcacagcagcgggaggatgatggctccggtgggctggaggcccctggccccctcctctttcactatgactggccctgcccacatggctgcaggtcgacctcctcagagggagaagggcagggcccccaggcatgggaccactaccctgcccccagcttccctgcacagcctttctgctctgcttcctcctcactcacgggcacccagagactcccaagctgcagggtccaggaccatctcatccaccccctgcctccacagaggcttgtgctggcttcatggttcccagcccgtctggggcagtccctccctgtgtccagcctacggaaccatccgctcttagggaataaggtcagtggctctcgctggagctttggtaggagacttgcaagatcagagaccttgggagttctgtccagcacaccggttcccagaccctccccaaccctgcggcccaggaacgtgcattcctgacaagcaccctgccaactactgcctttcccagcctggatttggtccaggccttttccacctgcagtttcctctcagcaggctggagatgggcggactctcccctgctctcgtcttcctgtccagtccaaacctgccctctgcccg

SEQ ID NO: 25798 - DNA, 1708 bp, Artificial sequence
  DNA replication origin
cctcccagccaggccccgccccaccccgcgcccccggcccgcctgtcgcgtccgcagaattaactttggactcccgccagggagcgacctctggatccccgcaccgaggctcctggacttgccgctgtcttcacctcccattccgggggagacagacactttagtcagaagctggggtggggggcagcctgcggggacaacaggggtcgcgggcaccgcaggaggtgatctggcagcataaggacaagatagaattctgcaggggctggtgggtggcagatacgaggacgcggctgagagcgtgcagcgggaacagggcgccccgggcagggctgcggggtgggcgccgcgtgcgggagcgcccagcgctgggggcagtcctggagccagaaccccgcccagagtcatcctttctgctgattcttgtcaagagcctagggcctaggacacagcggcaaccagcaccccactggccctgccccaggggctccaggtctggcgtagacacaagcaagcctgtaaggatgaggcgttctgcagggcggcactgccctgggggcgggggaacggaggtcctggagggctcctggcagtgtaagctgggaccttaggggtgagacatgtgccaggcagtgtaggaagcgttctggagagaggggacagagtagcgtgtgtgcagagaatgggggcaaaagggctggggttgaaagtcaggcccagtgggcgggggcagggcagcaaggaggctgagggggctcctgtcggtaggaggtgccacttaaggctccaagcagggtctctgagcgtggtgagagctgaggaaagactgcgcaggtggctaggggtgttggcatggggcacagctggaaacaggagcagtggaaccacggccatggtatgggagggagtgaaaggatatgcaggcagaggggacttggtgaggatcagagtgcagagggtgggagcctccctgggatctagcttgggcaccacacagaggcagcacacctgggggtgtggacagggagggcaggggcccaagggagttctaagagtttggtgacgcctggcctggtgtagacccaaaccgggcataccccagaaggagtggagttctgcagggattgtcggggaaggcagggctggaagagacccaggagaggaccgccacctccatgaggagctgcctggcaatgtccaggggtgtgggtcagatgcagggacacacacacacacggacacacatacggatacacacacacatacatacatacagagataaagacacagagacacacagacacacacggacagagacacagacacacagatacacaggtacacatacagacacacacacagaggcacacacagacacacacagagacacacagacacacatggacagagacacagacacagagatacacaggtacacatagaggcacactcacacacacacagacacacacacagagacacacagacacatacacatagagacacaaacacacatgctctgtcatacacacacacacacacacacacacacggacaccttttcctggggtgggaagaggccaggctgtaccggaagggccaggcagacacacacactcatagataagatcacaaactcaccaagacacagacacaggccacctgagatatttgatacactcaggcctgcatgcatgaacacccacac

SEQ ID NO: 25799 - DNA, 1220 bp, Artificial sequence
  DNA replication origin
tgctcccacagctgtgaccctggacccctgtttcagctgctgaggccctggtgggcgggaggagggattctggctggcccctggggagccagtcctcaactgcacatagccgcagcctgcctgtttgtgggggtacactgcccaagttgcaggccctcccagaggcatctggagtgagatagagctctcaggaccccaggttccttgaggtggggaagctctctggacagacaccccaaggtgtcttactcatgacactgtcagcttaaccctcaagctaggagaagacccccagaaggagggtgggaggggcagtccccagctccccgacagtcacaaccagactgtggccccagcactcagggcagcgcagagccagaggccactgcagagagacaccagccctctgtctcagagtgggcaggagaagggagggacggcctccgggtggagcaggccctgcccagaccccatcctgaattctggggccacaggggagcatggcgcagctgcgtgtgtgtgtctgtgcccaccttggaagtgggcagccccgtgcagggcagaggcaaagttcctggacctgggcagctgtggttggttctgggaccatttcttagccaggggaggacaggcccagtggacacagctaggggaagatctcagccaccccaggctgaggggcaggaccagggcaaagtcctcccaagtgtggggtccccacactcccgtgacgccacgctgaacttgcgctctcactcggcccccaccaagatggcctggagggttctctcatcttgctgaaggaaaacagaggcaggggcagcaggtagtagcccagggacagggacatgtcgggggcaacctcggcttccccacccagggctccatcctcacccatcccgcaaagccaaggggagtccccgtagccctgcgcagatcacgccagacaatcaggagaggggccacttcatttggatggggacccaggaggccacatgactttgtcaagggcacacacctaaaggggctgaggacacaaaggtgggtgagtgccctgagcggcccctcgttcccaggccctgcagccagactcagacacagaggactagcgggcgaaaccccagcagaccaggcagaggcatagacacatccagggacacacacagaggtgtatgcacccaggcaccctagtggctctctccctgtgtccagggagtgac

SEQ ID NO: 25800 - DNA, 1763 bp, Artificial sequence
  DNA replication origin
ggtcactcaggcatattagttccctgctgctgccataacaaaatacccccgacacagtggttgaaaacagcatgtgcgcatttatcaactccagttctaggtgtgggcaggatggtgtgccttctggaggcttcaggggagatctgttttctggtcccttcagcctccagaggcatctgcagtctcgtatcactccggctctgcttccatctttgcgtctcctctctgactctgaccttcctgcttccttctcaggacctttgtgattacatgcctcatccaggctccactcctcctctcaagagccttaatttaagcccatctataaagtgtctttgaccctgtaaggtcacatagccacaggttccaggggttaggatgtggacatctctgtggggctgttcaactgccacaccagctcttcaacccatatgggtcatttctatcctccaaccaccctgggagtactgtgctccccacgctcttcacgtggaagctgaggcccagacgggggtggggaattgcagagaacgaggagagcagctcctgtcccagctctgcttctcacgcaggcctttggggtggggcctcagtttccccacctgtacacaaggacaacactcctcctgcccccctcccagctccctgggcctcaaggacggcaaggacgtgcagtggatgaggggcagcagtgggaacggacactgcccttaagctggcaagacaggcccaggcctggtctacaaacccagccagctcctgatcaccatccttagggtcactgcggtgctggggtggccaagccaagatccagtcctgggcagtctgaccgaagagcttccatactgcatggcccggctgctctgcccctcaggaaggagcggggacaggaggctgggtctaaggtgcagagaatgatctcatcttgtcatttgtaaaattaaattgttctgtagcttggctgagaaggaccagggagggaaggggtgattcaagcaaggacagagtccaggcagggccccaggccccagggtgggagaaatgcgagcctgaggtagatagggggtggacagtaggtggcatggttcagggcttcaccagggccaggccctccccttacccagaggaggcagtgatgggggccagtctgggaaggccagggaggagatggagtcaaggttgactccttgagtctgggggtgagggcagatggcagaaggcctggaagcccggaggggagctgccagaggccagcctagctccttggtcgtccagtggctggagaggggctgtccgtcagccctgctctgcccgggtctggctggtgacaaaggaggggagcactccatgcggcctgcgagggaggggtggagcctccccgcagctccttcccccaggaatggggacgagttaggggcgggcgaggttttgggattcaggagtcagcaagacggacttggctctcgccagggacaggtggggtcctgaggggccgtcgctcagctgcacccacagaggggtcggcggcgcggcaagttaggctgcggggcgccgggagaaggggctgcgggtgacgggtgcgctgggacggacctggggagctcgtcgtgaggaagaaagaaccactctagggccaggcccagtggctcaagcctgtaatcccagcactttgggaggccgaggcgggcggatcacgaggtcaggaaatcgagaccatcctggctaacacggtgaaacccagtctctattaaaatacaaaaaaa

SEQ ID NO: 25801 - DNA, 1152 bp, Artificial sequence
  DNA replication origin
gccacctcgggccctgtccaggcccaggcgttccagggctgctctgcgggccgcgtgcgagagggactctcgggaggccccggggcgccgcacccactccttcccacttgggactcccgcgggcgcccggctctcgctcctctggccagcgtgggcctcccaggccccctcgcggctctctccagagcaggagccccaccttgggccgcccctctcacacctgccgtgggtctggtacgcgcctctgtgtcggactccgcgcccgcctgcgtgggaggaagccaggactcccgggcgaccgggccattcctgtggtttgtgtcagttccacagcagcacgtgggcactttccaccgtcagccactgggcagcccggggcactcctgcagcgtcccctggccctctccagggcaggggaaggttgggcagtcctgggcggccagcaccccggcgtgcatgtctcctgagcagctgcccatcgggcctctgctggcctgggggctccaagatgcaaggccggcgggagctggggggagagcctttgagtgacctccaggaggaagcagccagcgcttccctccgagtggcacctgagaggctgagtgatgacagtttggaatggagacggacctgccccgaccttctcctgtccgatgggaaagccagcatctccatgccccgtgagggcggttccacctgcactgcccgatgtcctgaccctggggaacacagcagcacttggggggagtttgaaggctttcgggaatcttcagccaagtctggacaattctcacagtcccttgaactcctcgagggacccacagaaccccagccaccgagaaccacttctgccccaaaagagtgcagttctcaccaaccatgccagggtggaccttgggtgacaggaacttctgccgtcccaccttctgaggtatttctgctgtgctgtggtcaccatgttgagtgggacgtgtacacaccaagaggcctacagccctcgaatgctgtggcgtgctggccagggagggggctgacagccccagagcgtctgcttctctcctggccttcgtccctggccatgtggttggcagtcccatcctgaggccagggaagcaatgagttggcagaggaggctgcagaaatgggtcacac

SEQ ID NO: 25802 - DNA, 1137 bp, Artificial sequence
  DNA replication origin
tctctcaggcccctctcaaggtcagcgcaccagtttcccctgtgtcgccctgccactcgctgcctcatgcccggctcacaggcctcgctccccttcaggacctcagcgcccctcaactgctcaatgggaataatgtcttcacggccactttcagacacacccttcaggctgccgccactcggagctggcccgcacctgaggcttctattcaggcctcccccatttcctagcctcctggttctctgttttcctcacacaatgacacagtcagggcgaatctcactgggagcctctctgttcctttctgcccttcacttccttcctggccagcccaatgtggcccatgggccaacagggcaaccattttcatgcccctgtcttcaccagggccaatctgcctgcctggctggccctttttgagttttccatgtttgaaaatttccataatatttaagaatgaggaaagatcattgaaatctagatctctgaaaaggcggccctccctatgactggcgttttctgcgacagcccaggagcttgagcacgtgcacggcagtctgtgcgtggcagtggcgcatgtggtggcgtgtgtggtgtgtgtgcttggtggcgtgtgcgtggcggcatgtgagtggtggcgtgtgagtggtggccgtggcagtgtgtgcatggtggcatgtggtggtgtgtgaggcgtgtgcatggcggcgtgtgcgtggtggcgtgtgcatggcggcatgtggtggtgtgtgaggcatgtgcgtggcggggtgtgcgtggcggcgtgtgcgtggtggcgtgtgcgtggcggcgtgtgcatggcggcatgtggtggcgtgaggtgtgtgcatggcggcgtgtgaggcgtgtgtgtggcggcgtgtgcgtggcggcgtgtgcgtggtggcatgtgcgtggcggcggcagtggcatgagtgcacacacactgttgcacatctctgaatgcgttgtctgctgcaggctcaggcccgttccttccagagcctttccccacctcctgctctaggctttgctggctcctgcctcaagcattcgggagtcatccagtggccctgacacgtttatggggccacctagtggctttaacccacctgaacccacacctctgcctgcacc

SEQ ID NO: 25803 - DNA, 1310 bp, Artificial sequence
  DNA replication origin
tggcggcagcggcggtggcggtggctgagcagaggacccggcgggcggcctcgcgggtcaggtgagcgggcccggcggaccgctagggcgtctacggcggcgtgcacttttgtgctgcagggcgcggaggagcctgggggcggtgcgcggagtctgtggctcctggcgctgggtccggggcggaggcggcgcccgggaccaccgctggggctgccgcggcgccctcgccgccctcctgggcgctggttcccccgcggggtggccgctgctgagggggcccggggaacagaggggcccgggccgccgtctgcgttccttgcggagcgcggagctggggctttgccgaggcctgcgggcggccccacgcgggagccgcttcacgagggcccggctggggtacgcagcggcgtttcccgtacctcggctctagttgcagcggagggaacgccaggcgcgccgcagccccctctgtcggagcccggccgcggagagggccgcggatgtgggaggaggcccagaccccgggcgggtcggccagcgccgtcttccctgggctcctccggcggtgcgaggtgggactagggaaagtccccgagacacttgcagaagtcagacgcaagcctccctccgcgtcttcagacgcttctcgccccgcaaacaggatcgtcgtggcaaaggctccgacagcttgctggaatagagggtctccgctgcctcgcttctcctgtggccttcgtgtgggacgcacgggacggcgggacccagataaccgttctctcaaagcgagccacagaaaaacattgcctgttcacaaaacttacgttttatcaactttctacgtacaaccactctattttcaagtgtcaccgtgttttataattagggtggaaatccagaatacaaagtgagttacaccccttttctaggaagagtagtaggctgtatcttggaaaaggggctaggaagtttccctcaacttgccactggaacatgttttcagggaaaagaaggagtgtgtttcgttccaagtaacaaaagtacctgcaattggctgggcgcggtagctcacacctcccagcactttgagaggaggcctaggcgggtggatctcctgaggtcccgagttcgagactagctggccaacgtggtgaaaccccgtctgtactaaaaatacaaaaattagctgggcgtgatggcgcatgcctgtaatcataatcctagctatgtgggaggctgaggcaggagaatcgcttgaaccagaaaggcagaggtctcagccgagatcgtgccattgcactccagcctgggcg

SEQ ID NO: 25804 - DNA, 1113 bp, Artificial sequence
  DNA replication origin
ggcgtccacaaagggtcgacgctgcgctctccgcgcgctacgcccgctgattggccactcgcgggccgggggcggggcctcttgttcaaacccacgcgggcggggcatctgtggcgcgtcttcccgcgctgcggcgacggccgttggggctcgcgcgcgccctcggttgccccgcccccgcccctgcgcccggccccgccacgcccacgccccgccggctcccaggtctccccgcgcccagtccggccccgccccgccagctcccaggtctccgcgcgtctggccctgaactgaacgcgcctgcgcctggggcccacgtggggccctcgggcgggcgtggcggggcaaacagaggtttggactctctcgcttctgcctggctcaacttctccgccgaggcatccgtgccggggtcgggaggagccgggcacggcaattcccgggcggtctgggctccgaggtctatccaagcctctccagagaccggggttatctccaaaggcttcctaggtttacacgtaagaaatgtaacgtgaaagttcaaagcaggggacacgtgttttaaatctcttagtggaaaaggttttaaataggatgcgagaacctgcaatcattgacttaagtaataccctgagcgcctgcagcaggcccggcaggcgtggctgcagctgagagccaagtgctggaagttgggggggaatcctcagatcaatccgcaggtgcggatgcgccaaggtcggtggtaaatgctgaaatgctgtcgggaaacctgggagtgacgtgggggcgctgctcacataggtctctaggataaggagcgtcttaaagcaccaaaaggaagagtggacgagaattcaggagaggaatggctggggcaaagcccgaggcaggggcaggaggcaggagcacgtctcagtgcagtgagaaagaaccctgtgatctcgtgggaaagttttaagtgtgaggggtggagggacttttgggctattctgggagtgggatggagactactggcatggtcagcagagaaggaactggaatctgaattgtgcttgaaaagaatcactgttcttatttaaaaaaaaaaaaaagggggtctctttcgcccaggct

SEQ ID NO: 25805 - DNA, 1155 bp, Artificial sequence
  DNA replication origin
ctctcctgttaccacaaattgcgtggtttcaagcagcccacctttcttagcttgcagtctgtgggtctctgcttacgctggagtcaggcggcagctggtcacgctctggtctggagctcagggtccccttccaagctcgctcctgtcgctgggaagccgggtgtgggactgaggaggtccctgcctccttgtggtgtcactgatggctgctccctgcttctggggggtgctcatgttccttctcacgccccccgccctgtcttcaaaccagcatccgcaccttgaagccttcccaggcttggacctccctgactccccctcctgtcaccagccacagaaaactgtcctcttttcaaggctcccgggactaggtcaggcccacttgggaattagcgttaagctccactctgccgtgtaaactcgcccgaccttgggagtggcacctccgcagaggcaccagttccaggggctggcgcaggggaatctgggagagcacatgttcttagaattcggcctaaactggggtgcttaaaataagggcacggctgacacgcagtggcctcctggttcttttggtgcagggtggatggcgtttaatccaggactggagaggcgcctggggagtaggcggtgacagaggggcggtgtgagggctgggatccggagccctgcaacactgggagggggcggagaggagggatgcacagaggctcacgaggaggggctggtgggaagagcaagtgcaagggttgggcagggcagggcagggcccacaaagtttggcccaaggcccccagtggcttggagaggagaggagggtggaggacggctggcaagcccataggtacataaaggcctcaggaggccagcatggtgactcatgactgtaatcccagcactttgggaagctgcagtgaaaagatcgcctgagtccaggagttcaagactagcctgggcaacataggaaaatcctgcctctaccaaaaatacaaaaattagctgggcatggtggtgtgcgcttgttgtcccagctgctcgggaggctgaggtgggaggatggattgagcccgggagattgaggctgcagtgagccatgatcacaccactggtggagaaagagtgcaccccaggagtttgagaccaagaacagcaaag

SEQ ID NO: 25806 - DNA, 724 bp, Artificial sequence
  DNA replication origin
gctgggcgtagtggctcacaccgtaatcccagcactttgggaggctgaggcaggaggatcattggagcccaggagttcaagacctgcctaggcaacatggcaaaaccctgtttctactaaaaatacaaaaaaagtagctggacgtggtggtgtgcctgtagtcccaaccactcgggaggctgaggcaggagaattgcttgaacctgggaggtagaggttgcagtgagccaagatcgcgccactttactccagcctgggcaacagagcaagactccatctcaaaaaaaaaaaaaaaaaagaaaagaaaagaaaagaaagaaaagaaagaaaaggcaaaaaaggcaaaagaaaaaaagaaagagaaaacatgggttcatggaagaagcacggaaagtgtgaggcagagcagcctcggagctgacacgctgagtgggagaaaggcgggttggacacaggagagagaagtccagggagcagtggagggctggcctcagtgggctgccaaggtgtggcttgaagatggagctggacagggacacatttgcccagcatggaggctgggtgatgaggggcttggtcatttgctgatgtgaggtggaggcaggggcccagggccagcagggacaggagatgcagctggagctcagggatgggtggacgggggtgtcaggctgacctgggcccacacacactgtggtcttgtggctggagtcatccgagggac

SEQ ID NO: 25807 - DNA, 1716 bp, Artificial sequence
  DNA replication origin
gagtgggcaacaccaggcctgagctgcagaggagctggattttgtctttccaggacccctccctgcagcctttccaggacccctgtcctgccttgcctgtctggggacacacggacagccgctgtgccgcgccaggccccagcacctgcctgggagctcctgagtgagtggagcctggctctgagtgctgctattgctaaaagaggtaagactggggtttcctgccactccctccctcaggaaggtgacgaggccatgctgtcatcaccagtaagataccccagcccggttggctaacccctagctcagccctgtttgtggttaggggagttctagacagaacataattagacccctgctacttcctgaaacctcagctaggactgcagggaggggtgcgaggctagccacgcaggcggggccctgggtaagtcgctgggctctgcgtgctggggagtgggcctggggggccaggctctgggatggggctgggggctgggagctggaggcgggcagagggggatctgaaggcaaaggtgatttgttggtaaagatggaggctttgttgagggttcttaatctggggtccctcccgagagaacccaggacccccagtgaccacagatgtgatggggccggaggatttgggggagagggacaacagtttccattgtatctttgtcaccgccaccttcctggagactttcttctggaaaaggcttccctggctactggtccagatgggggtgagtcagggggctggactttgtccctggaatctctccttggccacttgcttccgtgattggtcggggggcactgaagggctgggcttctctctgtggggcctgtgctgcttgtggggttacacagagggaaaagcagggcagtgggggctgtgctgcggtgagtggcagttggcccagtcacgtgacaagatcctggagctgggcaggtcaccggcctttggagtggcgttcggcgcaccaggcacagcggggcggggggcccaataccttctgtcaagtgcatgacgtgggtctgtaccactgcaagggactgggactgaccactgaagactggccagttgggctgagcacaaaatgatatttcaggagattggccaggccgaggtgggagagcagaggctcctggaagaagatgaggataggggctgggcacggtggttcatgcctgtaatcccagcactttgggaggccgaggtgggcggatcacttgaggtcaggagtttgagaccagcctgaccaacatggtgataccctgtctctactaaaaatacaaaaattagccgggcgtgttggcacacgtctgtaatcccagctacttgggaggccgaggcaggagaatcgcttgaacctgagaggcggagcttgcagtgagccgagatcgcgccattgcactctagcctgggcaacactatcaaattgggaaaaataagaaagttgacaatgggctttggatgggtgtggtggagcagggaggttggagctggtgactccacatttccctccctagggtttgtctcaaacgtgacggcagaaaagaggtcataggtttgcctggtgccaaagcaggtgggagtaaaagacggaaatggctaggaatggccagcaaccgtgaaacagcttagaaattacaggcaatccagccaggtgcggtggcttacgcctgtaatcccagcactttgggaggcca

SEQ ID NO: 25808 - DNA, 1782 bp, Artificial sequence
  DNA replication origin
ccaggcctgcctgtgggggcacttcctgcgggatgcggggactctgatgagacccaaaggaggaatgagaaatgtgggcagagctggagccggccagggatgggatgatcccacaggtgtgagagcaagggagtgccctgtccgcacctctgctttctggtgtccccaccatacctttctgttacgtcccttctctccttctgagaggctgtcccatcccagctgcacaccattctcattgaagtgaaaaggctgcctcccgaccccagctgcccagggcagtcatccacaccctggctctgggccatccgcccctctcgtggttcctacggtccgtgtcctctgtggcacctcaagtgccccctgcctgccccagggacagccactcactgggctcagagccccctgacacacacacagcagggggcttcgagagtccagggatgcctcctggagtcacggctctgccaagctccccaaagttgacttggtgggggagctggcatcctgactacatggccgtgttgacaggaccagcgagcagcctcctggtatctgctgttaatcctcatgactgctctcaaacctctcaactctactgaagacacagacacagtcatgcccacagctccacagagagttcctacctaaacacccgtgcaaccagcacgtgatgaagacacagatatcaccaagaacggcttgatgcctcctacagaagtgtccattgcatgttggaagttcctgagctgaacagcaaggttgtttgccatcttcatctccctaggcaagactgccctggaagagcgagtgatgtggatggagacagggaatactgaggtctgctgacgtcagtcgatggcggccatgtggatggacggcgggcatgtggacggacggtcagacatgtggacggacgggcgggcgtgtggacgggcgggcgggcgtgtggacgggcaggcgggcgtgtggatggacggcgggagtgtggatggatggttttggtggttgacaccaatcctgcgtgcaaaggcttgatgtgggttttcccggggttcccgtggggagaaaattccttcacaatgaaccaaatcccgctcccactgggtgttcctcctcctcctccatctttttctcctcttttggctcctcttatgacatcataagacatatatatttggtctctgtcccccattactgacacagagctcctaatcccttagacttgcctaggtgatgggagcatcttttgttccaatgaggcagctcttgctgggctcctgggtagctccaggatgggggctggtcgccagcaagaccaagccacgatgagcagcttgacacttctggcctcacccgccatgctctggggaagggaggggctggagaccaagcctgtgtgatgaagcctccatgaaaagtcagaacaatgggatttggagagcgtctgggttggtgcacgcgtggaggctctcggagggaggcgcccggagaggccgtgggagctccacccgcatccccataccttgccctgagcatctctgctggctgagttgtttcctttagtaataagccagaagtggccgggtgcggtggctcacgcctttgggaggccaaggtggacagatcgcttgagttcaggggttcaaaatcaacctgggcaacatggtgagaccctctctctacaaaaaatacaaaaattagctgggcgtggcggctcatgcctgtagtccgagctacttgggaggctggggtgagaggatcgcttgagcccaagaggca

SEQ ID NO: 25809 - DNA, 1326 bp, Artificial sequence
  DNA replication origin
ccctggcagggagcaagacccagaggctggtggaggaaacaggtagaggaaggggagtttattaggggggtggtggtgccgggggcgtggcaggctccgaggcccagctggacacaaggacccagattcgtctggccaggcctgggcaacccagcctcgaccacactaggtatgggctgcccagaagaggagccactctgcccagggtgggctgcagaacctgatgggccagagtcctgtcctgggattgttccagaaatcaaggctgtagcttgagactgggggcttccccaggtcttccaccctgaggggagagcagctggccgtggacaccaccctcagggagctgagaggccagaggtggagagaggctgggggccggctctgcagcccccaggcccccactgcagcccccaggccacccttggctgccggcttagggcccttggcttgctcagcctatctttagccaccatggcctcgtagggtgccctgcagccccttcttggcccaggcgagccctggagcagttcttcacttggacaggtgcatggtttacggtgagggattcagcttgccagaacccgcatgccccttggaagcccctttttctgcccccagcagctccactcccaccaccgcacccaccccagcagctagtctaaagctctctgtctccagggatgctcccagcccccctccagcagatggcctttctggaaacacccttaggctgagcctctgtccactccactggtgtaaccaacaacagggagctcccaaggaccccacaaaaaggcagacattgtaagggggaaactgaggcccaaagtgtccggcagcttgcccagatcccacgggcagggagcaggagccgggattgggctcattccttcagctggcaaccgtccatttgtaggggcagaggcggcagggacatagcctcctgcttggagctgggaagcgggggcggtgagggggacacagaggaagactacccagctccacccaggcctgcctgtgggggcacttcctgcgggatgcggggactctgatgagacccaaaggaggaatgagaaatgtgggcagagctggagccggccagggatgggatgatcccacaggtgtgagagcaagggagtgccctgtccgcacctctgctttctggtgtccccaccatacctttctgttacgtcccttctctccttctgagaggctgtcccatcccagctgcacaccattctcattgaagtgaaaaggctgcctcccgaccccagctgcccagggcagtcatccacaccctggctctgggccatccgcccctct

SEQ ID NO: 25810 - DNA, 1503 bp, Artificial sequence
  DNA replication origin
agggtctgggggagctcggggcaggggctgtgggggtgggagggagggtctgggggagctcggggcaggggctgtgggggtgggagggagggtctgggggagctcggggcagcggggctgcaaaggaggcccagggccatgaggagggtaagtcccccacctgtggagactctgtgggtccccgcccagacctggcacccagcaggtacttcacagaagagctgtgcctgggcagatggctcctgggtgtggtgggacgttcagcagcatccctggccccacctagccaccgcagccggctgcacgtcgctccttcctgagtcctggaagctggccctggatgtggcacctgttggctccagctggctccaggccctcaaggagtgtcacagggactgttcggccggggtttgcctgctgctgctacccccccagggacgaaaaaggatggtcagtggagaccagggaccgccgggggcaggagcagatacagggcgagtggacacgccccaaggcccagctccacaggggttggggggacagccaggctcgaggcgggttccctagggaagtgcattccaaaggggatcagccccccacgctgtgaagggcaatgagaaggatgcagcccccaccaggcccagcccttccttggggccccaggggagggtctctgaggagggtgagcttcggggcaggggccctgagctgcaggtggaggggtgtactctgcggttgaggagaattttcaggggccagctctggggttcagggggccacatgataccaagcccttaccccagagagccacccacaccccacactgagggtggaccccccaaccttggcctcccactgctgcagggtcttcctccccaccagttcctagagaggagagctgggagtgacagtccccagagaggggacagccaggagcccagctctgggaagcccccagggacctgcttcaatctctcctggaccctccaggtaacagatgggttctcggagcatcccctgccagcccagagcttgagaccacaggggaatagcccctgccccgggagcatcgagcagcccagactgcagccaaaccccgcgccaagcagagagggcaagagaatgacaagcatggtcctggggggccgtggacgcatggtcaccgcgggagcagtggcggaggtggctgtgagttggaccctggcagggagcaagacccagaggctggtggaggaaacaggtagaggaaggggagtttattaggggggtggtggtgccgggggcgtggcaggctccgaggcccagctggacacaaggacccagattcgtctggccaggcctgggcaacccagcctcgaccacactaggtatgggctgcccagaagaggagccactctgcccagggtgggctgcagaacctgatgggccagagtcctgtcctgggattgttccagaaatcaaggctgtagcttgagactgggggcttccccaggtcttccaccc

SEQ ID NO: 25811 - DNA, 985 bp, Artificial sequence
  DNA replication origin
cccaggtggaaagcaccctggctgatgccagcgctcagcacccatgctggaaacattttggttccctctgcaggctgtcggggttccagccaagctcagctgccaggggtctggttaacaatccagggtcagggacccaaggcttctgggctgcgggacccctcactgtcactaataaaggagggccagtggagtcggggctgaccccacagaaactgggggtttctggcagacagacctgcaggcccgcggcacgccccaccccgggcagcttctgaggtgggggagctctctgcctccaaggacccacagtcctgggagggggctcctcccgtcagcaggccctggagaaaggccaccatcaccaccctgggcatgcgggccaggcccaaatcctggagcaggacgggaagctttgcagaggggctgggcttgagcggagcccgctgaggcaggccagggcatcccgggccgaggggacagtgagggcaaaagcagggaggggtgaggggtgacgcagagtgggcaaggccatgggccaaggaggctgggccaggagacggagggcaggggagcaggagggctcagggctgtccgtgggagaggaggactgggggagtggacatccccaagccacagccaccctcaggctgtgggagaggcgaggcctagaggacatccagcctgaaggcactgcacaggacatcgagagggctcagaggatcctagggcctaagggctaagaggccacgtgaggctggcagggcagagttgcccgcccacggcgggggaggatgaggggcaggccagagggcgggtggggggcatttaccaggtgctcagagttggtggagtccgggcaggagctggagggctgaggaacagcctgtgcatgtgaacacgggcatgccagtatgtgtatacgtgtgtgtgtgagaatgcacacacgtgtgtgcgtgtgaaaggagttctgctgcacggctct

SEQ ID NO: 25812 - DNA, 870 bp, Artificial sequence
  DNA replication origin
ctgggatgtggggagcccctctgcctggctgcccagtctggaaagtgaggagcgtctccgcccagccgccatcccatctaggaagtgaggagcgcctcttcccggccgccatcacatctaggaagtgaggggcgtctctgcccggccgcccatcgtctgagatgtggggagcacctctgccccgccgccccatctgggatgtgaggagcgcctctgcccggccgcgaccccgtctgggaggtgaggagcgtctctgcccggccgccccgtctgagaagtgaggagcccctccgcccggcagccaccccgtctgggaagtgaggagcgtctccgcccggcagccgccccgtccgggagggaggtgggggggtcagccccccgcccggccagccgccccgtccgggaggtgaggggcgcctctgcctggccgcccctactgggaagtgaggagcccctctgcccggccaccaccccgtctgggaggtgtgcccaacagctcattgagaacgggccatgataacaatggtggttttgtggaatagaaaggggggaaaggtggggaaaagattgagaaatcggatggttgccgtgtctgtgtagaaagaagtagacatgggagacttcattttgttctgtactaagaaaaattcttctgccttgggatcctgttgatctgtgaccttacccccaaccctgtgctctctgaaacgtgtgctgtgtccactcagggttaaatggattaagggtggtgcaagatgtgctttgttaaacagatgcttgaaggcagcatgctcgttaagagtcatcaccactccctaatctcaagtaatcagggagacaaacactgcggaaggccgcagggtcctctgc

SEQ ID NO: 25813 - DNA, 1139 bp, Artificial sequence
  DNA replication origin
cacagggttgggggtaaggtcacagatcaacaggatcccaaggcagaagaatttttcttagtacagaacaaaatgaagtctcccatgtctacttctttctacacagacacggcaaccatccgatttctcaatcttttccccacctttcccccctttctattccacaaaaccaccattgttatcatggcccgttctcaatgagctgttgggcacacctcccagacggggtggtggccgggcagaggggctcctcacttcccagtaggggcggccaggcagaggcgcccctcacctcccggacggggcggctggccgggcggggggctgacccccccacctccctcccggacggggcggctgccgggcggagacgctcctcacttcccagacggggtggctgccgggcggaggggctcctcacttctcagacggggcggccgggcagagacgctcctcacctcccagacggggtcgcggccgggcagaggcgctcctcacatcccagatggggcggcggggcagaggtgctccccacatctcagacgatgggcggccgggcagagacgcccctcacttcctagatgtgatggcggccgggaagaggcgctcctcacttcctagatgggatggcggctgggcggagacgctcctcactttccagactgggcagccaggcagaggggctccccacatcccagacgatgggcggccaggcagagacactcctcacttcccagacggggtggcggccgggcagaggctgcaatctcagcactttgggaggccaaggcaggcggctgggaggtgtaggttgtagtgagctgagatcacgctactgcactccagcctgggcaccattgagcactgagtgaaccagactccgtctgcaatcccggcacctcgggaggccgaggctggcagatcactcgcgattaggagctggagaccagcccggccaacaaagcaaaaccccgtctccaccaaaaccagtcaggcgtggcagcgcgtgcctgcaatcgcaggcactcggcaggctgaggcaggagaatcaggcagggaggttgcagtgagcctgagccgagatggcagcagtacagtccagcttcggctccgcatgagagggagactgtggaaagaga

SEQ ID NO: 25814 - DNA, 1079 bp, Artificial sequence
  DNA replication origin
ggaggggtggatagagaagtggatgggtgcatagagtggtgggtggatggatggaggggtgggtggaggggtggatagaggagtggaagggcagatagagggatagatgggtggatagacgggtggatggaggatggaggggtgggtagaggggtggatagagaagcggttgggtggatagagtggtgggtggatggatggaggggtgagtggaggggtgaatagaggagtggaagggcagatagagggattgatggatgtgtggatagagagatgggtggatggaggatggagggttgggtggaggggtggatagaggagtgggtgggtggatagaaggatggatagagatggatggatgggtggatggatggatgatggaggggtgggcggaggggtggagagaggagtgaatgggtggatagaaggatggatagagatgggtggatggatggatgatggaggggtgggtggaggggtggagagaggaggggatgggtggatagaaggatggatagagatggatggatgggtggaggggtggagaggagtggatgggtggatagaaggatggatagagatggatggatgggtggatggatggatgcctgggggatgggtggaggggtggatagaggaatggataggtggatagaggggaggatggatagaaatggatagatggatggctggagggggggatgggggttgatgggggatggatggatggatagagggatcgaaggatagagatggatggatgggtagatggtgggtgaaggggtggatagaggagtggaagggtgtatagagagatggatgggtagatgcagagatgtgtgaaggaacaagtacagtaaattgttaactagaattcaagtggtgagtggggttacactgtgtgattcttttcatgttgctatatgtttaaaaatatgcaatgttggggaaattatagacaagacttttacacacacacacacacacacacacacacacacacacgtatgtacactgctaaataacataagctaaagaagggatcataatagaaaccttaaaaacccagaactgggccg

SEQ ID NO: 25815 - DNA, 994 bp, Artificial sequence
  DNA replication origin
tcggttctagaccagggagggaactggggaagagaatcctggggatcgctaggggagaggagtacttctggaccgcggaggccacgcgaatcctccaggcccccagggcgggctcccccgtcctccctgcgcccgtgggcgcagcacgcccatttccctgcctgggaaacaaaggccccaggtctgcagtgcgtctgatggcggggaggagactgtggccgagggagccgtgtccgtggacggcgtgctgagggtcccccgcgcagagctgactgcacccaggagagaagcggccccgagcgcaggagccgaggttgcgggtaacaccacctccgggctgctgtctcgacctctgctgctctcggcgcactcccgggcgcgggcgggggaactggaggtcggatgccctggagcgcgggccggtcgggcgcagcgcagccgcagccaccaggcggcagggcagctccgggaccggcggggctggggacgtggttgggggagctgagaaacacgtctcagtttcttaggtccgccagtctcctggcctgcacagcccgtcccaggagcagcccggtggggtcgcaagtggggacccaggcccctgacaccctcaccttatcctggagagactgtggcaagaggggaacagggaggccgctgtctcagagatatcaggtggaagaagtttctggtccctgtgcctcaccctgcaccctgcctctgatgggctgtgtgaccttaagcaactttctcaggctctttgtgtctcagtttcttctaagaaaatgggaggtgggctgggcgcggtggctcacgcctgtaatcccagcactttgggaagccgaggtgggcggatcacctgaggtcaggagttcaagactggcctggccaacatggtgaaacccggtctctacaaaaatacgaaaattagccgggcatgatggcgggtccctgtagtcccagctacttgggaggctgaggcgggagaatcatt

SEQ ID NO: 25816 - DNA, 1016 bp, Artificial sequence
  DNA replication origin
gcccgaggacgggcggtgtctggaacctggatacgaattccagttgtgtctcgactttcgaatctgaaaagtgggaacaatagcatcacccacctcggggtgattgtgcaaataaaagagccagaggcgaggccaagggcgatctgcctgggaagcgggccggcgccccactaaggcgcgcgtgcgtgctgggacccaggaaacccagcgctgggccagctctcccgcccccgccagctcgccccgcgccagcgccccagcctgcctgggctcgctccagcctctgcgggggctcctccgggccgcgcagacgcagcctccccgcccgccccgccgctgctccgccagcggcctcgacaggcccaggcgcgctccagcctgcggcggcatgaaggtgggcgcggatgccgccgccgcgaggctgcccgcctgcccggagcctgccccgccgggcgggaagggccagggaggctcctggccgggggcggagattgaagggtacggtgcgggcaggaatgctctgggctgggggttggggaggcgcggaggggactgggtggttcccggcctggggggaggggacagggaactcgggaccgaggggtggggagctgtgagtctcggttctagaccagggagggaactggggaagagaatcctggggatcgctaggggagaggagtacttctggaccgcggaggccacgcgaatcctccaggcccccagggcgggctcccccgtcctccctgcgcccgtgggcgcagcacgcccatttccctgcctgggaaacaaaggccccaggtctgcagtgcgtctgatggcggggaggagactgtggccgagggagccgtgtccgtggacggcgtgctgagggtcccccgcgcagagctgactgcacccaggagagaagcggccccgagcgcaggagccgaggttgcgggtaacaccacctccgggctgctgtctcgacctctgctgctctcggcgcactcccgggcgcgggcgggggaactgga

SEQ ID NO: 25817 - DNA, 920 bp, Artificial sequence
  DNA replication origin
ctcccctagcgatccccaggattctcttccccagttccctccctggtctagaaccgagactcacagctccccacccctcggtcccgagttccctgtcccctccccccaggccgggaaccacccagtcccctccgcgcctccccaacccccagcccagagcattcctgcccgcaccgtacccttcaatctccgcccccggccaggagcctccctggcccttcccgcccggcggggcaggctccgggcaggcgggcagcctcgcggcggcggcatccgcgcccaccttcatgccgccgcaggctggagcgcgcctgggcctgtcgaggccgctggcggagcagcggcggggcgggcggggaggctgcgtctgcgcggcccggaggagcccccgcagaggctggagcgagcccaggcaggctggggcgctggcgcggggcgagctggcgggggcgggagagctggcccagcgctgggtttcctgggtcccagcacgcacgcgcgccttagtggggcgccggcccgcttcccaggcagatcgcccttggcctcgcctctggctcttttatttgcacaatcaccccgaggtgggtgatgctattgttcccacttttcagattcgaaagtcgagacacaactggaattcgtatccaggttccagacaccgcccgtcctcgggcagaggtttgcgcagaaacaagcatcattcctgaccttagggacctcaccgagcctgcctgcgggcagggcagggaggtgctgagaattcgggtgcacgtgccagcacccggggccccagagctcccctccccatgaagccctccctcagccccctccctggagaaatggcgagccatctggaaggaggtcgagaggggacccgctcccgccaggacctctcttctgggagtggaggagtgggc

SEQ ID NO: 25818 - DNA, 2052 bp, Artificial sequence
  DNA replication origin
tggtccatgcaggaagggcctggagaggacattggtcccgccaggaggctgcaagtcgggaccttggcagggcttccatgggcagttgaagcccattagggcccaaggacaccatcccccggaggatggcagcagggggagcaggactggtgcgccagacactgcccgctgctagggtggggagtgtgggcagccaggctgggagaagtggaggccaggcccaaggtgtccgtgtgttggccagctgagcccatccctcttcagacctgcaccctgggtgcctctagaggcctccccgccctctccaggatgctcaaaggcccacactacttgaccctgatcatcccagtggcagccatccaggcatcaggccaggtctggcactgggcagccgtggggcttctttggtggagatgtgaatgaatgaggagcctcccggggctgcggtccctcctgggccccagcttgcctcctgcagcatggggtccttgtcagtcagcaggctgtgatgggcaggtgctgaggaacctgcggcaggagcgacaaggctaggggtgggtgggggccctggctcacccatcccagccccccacaccaggggagggagcatccctggccttcgggagctgtcagggcggaggccatacggggatgtggtggggtgggccagcccatgagacccctctgggctctgggtctgggtgggaagtggtctgcctggtctctgggcccagggtgaagggacaggtctcagtttgtgagtttgtggtcccctgctccatctcctaccctgcttcgcgggcagtgggttcaggggggatctgggaagcgggcttgagcctgctcagggcggggcagctgggcccccactcaccccaggggcttgccagcaacctgggcagggaggctcgtgtgccctgggactcctggttctgcagcgagtccctgcagacctgggtcccccagtgtgtctgcacggcaggaccccagctccctggactgtcagtccttaaggcttctgcggagtcccccatcctgagtgcccagcgccgtcggggtggggggttccctggggttggctgacctggctggccctccttcctgggctctgctgtcacctgagctgggggacttcttggcctggagggtaagccggggaccatctgctctcagggcacaggcctgcccttgcagggcgctgaacccaccacaactccctctagcccccagatggcaaagcactccttggcaagggctgatcaggggaggggacaagctgggccagccaaacctggggcgggggcccagtgtccccagggactggcatctgagacctccactgtttacacaacaccacacccgaggagtggattgcccagagtatgcgtgcgcgcacacactgcttccagcatacacacgatgcacacttgcatgagcacagggtacacacacatgttcacaccagcactcacacacaggcacacaccttcacacgtggagggcacacagcacactgccttgcatgacatgcacgcccattcacaccactgtgtacagctcagcctgcctcgagctcccagctgggtgccctctgaacctccaaaacccacagcatgatggaggacactgtgcggggagtggtgggggctgggggctggtgagtagacgtggctctgtggtgttggggcctctgggcctcagtttaccttccatgcaattgtaacaaccatttacaagacactttgaatctcaacgagccattctgagatggccgttagcaccctttgcagagatggggaaacaggcacagagcatttggtaatgtgctcaaggccctggggcaggagctggacagggtctgccccgggctgtctctggtggttgtggagtgaggggagttcacatctgcctgggtccggagcacagagggtactgctacctccaggcaggctgcctgggagggggagggacacggacagggcgggctccagcaggaggaacgaggtgggtgtgcgccccacccccgtggagggagcctgtcctcccctcggc

SEQ ID NO: 25819 - DNA, 1977 bp, Artificial sequence
  DNA replication origin
ggctgaaggtggggactgggccattgcccagtgctggtctctgcccgattagtctgggcaccaggccccgtgcccagctggcaagaggtgaggcaggagcttctggggcacctggggagcaggcccaggccctgggagctggggttcctgagctgagggagtcagctctgtctcgcctgggcctgcctcctggcctcccctgtggcctggctggcagggcctgggcgtggcctcgctccctggaactggcaaggatcaaagggtggaaagccgtcctccacccccgcccactgagacaggaatccgtggccccagggggcggaatccacagccacattcccggtgccctggtccctgcaaggcaagggtggggcagggctggggtgccaagattggcaccatagagcgtgggaacgtggtgctgctggcacccggcccagtgcctgagcagagcggacggcaccctcctctcggccgagccgtggcctttgtcccttctgacctcccttgatggcctcaggcaccagggcctcagctgccaaatgggcttccaccttgcctggaggtggggtttgcatcctggtggcccaggaggcctgggggtcctgaggaggttggggcctgggtttctgtggctcaaagcagtgggcactcccgacccccggggcgctctgggctgggggactcggcctccatctggggccagtggggaccacaggagggagagggtgttgacagctggggcatacctgctaggggtcacaccgagcccaggcccctggcacacacagatatgctcacacacgcacacagcagaaagcagaaaggcagccgctcaaaggcagcctcgcttgttctggccacagcccaaaagctccccaggagagtttgtcctcagctggcaggtgcagggctgagttggccctgtggacccccacccatgggtgcagggtcacctgctggcggagacaacagcctttaggcacctgtgctgggtggggtgggtccctgctcccaggggctggagaccagcctgctggagccagggccccaagctctgtcctgtagtcccatgctcagccccagcagtgatgccttcccacccccactgtacaggtggggaaacggaagcccagagaggtcagatgactttcccaaattggtggcttggaggaatcctggagacacagacctcccactcccaagagccagggccggtggcatcctcctctctggcctgtttcctcatctggggagtgggcccacagtgaccacctggctgagttgtcctgaagcccggaaggtaccagccagaggtcagttagcctcttctgtccccagcccctgggctcccagataagcagcactgctgtgtcctaagcccgcccctgaggcagggcgccccctggtggtgcgacagtgcctttctgtgcccttgggtgataggagctgaaggaggagaaggtgagggagaggtcaagcctggagcaggcgctgggagggctgcaggccagggcagaggggctgctggcttggagcaatgcccctgggggctggtccatgcaggaagggcctggagaggacattggtcccgccaggaggctgcaagtcgggaccttggcagggcttccatgggcagttgaagcccattagggcccaaggacaccatcccccggaggatggcagcagggggagcaggactggtgcgccagacactgcccgctgctagggtggggagtgtgggcagccaggctgggagaagtggaggccaggcccaaggtgtccgtgtgttggccagctgagcccatccctcttcagacctgcaccctgggtgcctctagaggcctccccgccctctccaggatgctcaaaggcccacactacttgaccctgatcatcccagtggcagccatccaggcatcaggccaggtctggcactgggcagccgtggggcttctttggtggagatgtgaatga

SEQ ID NO: 25820 - DNA, 1340 bp, Artificial sequence
  DNA replication origin
ccccgcccgcggtgcaggggagcgagtgcgcagccgcgtgtcgggactcggacccccgtggcccccgccatactctctttctccacccgcggagcttttgctcaggaatccactcttgcagccagggagcttccgggccccctcctccagggagcgttcctggctgctccggtgagcacttgcctcctcgcacccctgtctgggcaccttgaggacccagcctgaccactcccctctcctctgtctgcataggaaggcgccccattggaaagggaccccccccccaccagaccctggcaatcccatggccaggccagggttgggagtaaggacccaccaggaaggagggtgcccgccgcgtcaagtgggcagtagaacaaggctgggtcccagggatccccgcaagccaggtggctccgtggctcggccccgcagaggccagagtcctccgccctgcagccggcgctcacctttagcgccttctccctgggccatatgtggcagagggggtggggcaagttccaggcccacagggcaccacgggcctctgggaggggacgctaatgactgtaatttccacttagcagatcaggacggctggcagagtggagccatcctcctgcctctcaggagcccgggcgagatccttccttgggcccctcctttatctggactcctggccctgggcccctcccacgtgggattttgagattgctctcccctcccccaggctcagagggtggtcctgtttcctgtgggaccccttgtccccttgtccactggttggggtgctcagtggtgcttgaacaggggtcggggacgcatgaaggtgtactgagggggtagctgtcagccggctccagaggctgggggagcaggaaacaagcacatagggttgagggttctgagccgcgtgccaggctttagcctatgctggctcctttgtggtcagaagcccaggacattctgggatctgtcttgatgctgagcaggccagtgtcctgaacagcaccaggcgcccaggagtctctgggtggggcagttgtggctgccgaatggggggtgctagggcaggagggtgagcatgtgaggccaggctggcggagaggggctgggactctgtgccctgtggcagactggggaggtgagggaaggggttgctgtggccatcacaggctgaaggtggggactgggccattgcccagtgctggtctctgcccgattagtctgggcaccaggccccgtgcccagctggcaagaggtgaggcaggagcttctggggcacctggggagcaggcccaggccctgggagctggggttcctgagctgagggagtcagc

SEQ ID NO: 25821 - DNA, 1801 bp, Artificial sequence
  DNA replication origin
tatggcgggggccacgggggtccgagtcccgacacgcggctgcgcactcgctcccctgcaccgcgggcggggctggggccggaaacgcgcgcggcggcctcggattcctgcgcggtgggacaagcccgcgcctgcgcgccgcccggacagggcacgtcgcccgcgaggggggtggcgggcccaggaggaggggaccccgacagcccctcaccgcctgccggggcgggccgccacgctggacgggggcagcgcggggcggggtcggggggcggcagaaggcgcctttgtgcgtcgcgtccccgagcgtgtcgcggcgggcccggcaccggccccgctccagcgcccgcccccggcccgcgccccgggccccgcgcgcatacctggcgaggccacgaggggattctgcgggccgagccccgcctgggctgcgccgccgcaggcgggagaggctgaggattcttttgggaagcccctccgccggctgtaaccccagggccgtgccaccctcctgatcaccgcaagcatggaccccccagcacgctgcgggtgggacaggcagggcccctgtggggtggcttgactggcctggagttggggacgaagtccccgggcttggtcccccgagggcttggttgggcgtcccggggtaggtggctgccgcggcgatgtgggcggcttgcgtgtggccgatcggggtcgctgctgagccccggagagcggagggtccaggctaggctgggggagcgagaggcgagggcggagccgcggaggtgtgggcggctttcgtggtccgagaggccccaggttcccggcagggcggggaaggctggggcggggccagagccggagccgcgaagccgcgatggagagggcctggagggtgcgccaggagccggcgtcagggcctgcctccatctcctccaacccccaccccatttattcctgtaacaaatccctaccgggagctggcacagcagctgtgcgctggggacacacgagatgctcaccctccctgccctccaggagcttggactcagctgaggtctgcaggggccagcaggagcagggccgagggccctggtgggaaggtcgtggcccactagggaaggctgggcccggggggtcaggtggagggcaggctgagctgcgagctgtgtcttcagcctacagcaaggccaccactcccagcgcctggcctcctcgctcccgaaagctcagctcagcctacatgtgccgacccctctgtcccccaggcccaggttgggcactggtcaggacggtgctcccagagggacccagtaacaggaggagctagggtgagagcatgagggtggggggagcggcagagaggagggagaggcaggaggtgctcagggcaggagtgtctggagtgaggagggagaggcaggaggtgctcagggcaggagtgtctcgagtgggtctggacaggaacaggaagggcattccaggcagaggggcccaaagaagcaaaggtgcaccagggagaaatgcccgctgtgctccaccacagtggaggtgcaaacctcagcatggaagatgaggctggagggaggggcctgggctggaacatggccaggatggcagtggggagccattggagatgtttgagccggggagtgacagggtcagattcgagttttggaaagataacatcttgagccattaaacagatttctaggatttcaggtttatttatttatttatttagagactcacttcactctgttacccaggctgtagtgcagtggtgcgatctctgctcactgcaatcactcaaggc

SEQ ID NO: 25822 - DNA, 1008 bp, Artificial sequence
  DNA replication origin
gcttgagcttccaggacgacttgaagggcacaggcccagggctcctcccttctgtttagctacctgggacttggatgtgctgtgtgacaccaagccagtcactccgcctctctgggaggctgcatcccagacaggggctgagcatctcattctgcaggctcttggtgagggctctccttgctgtggtttggggaaacacagtatttgactccggcttggggctgaaatggcagggccctgaaacccagccggggaaggccagagaggcaagggcttctcaactgatgcagacacaggccaggtcgggggcacaaaggagggggtagagctgggtgggactcagaagggggcagaggcaggacagggtttgcagaagcagtaacacctgagtttcagtgtggggcacagaacccgggtgggcggacctgtaaatagccagacatagcctgacggggtgtgggctctattgaggttgtggccacaacaacagcttgggtttgatcttgcaggtactggggagcaatggtgtgtgtgcttcagagcagaggagggggcaagtcagatgtgtgtttgagatgctctcttggcagccaggatggagacaaggtgagttggggagccaggaatgggacagggctcagagtggatagacgtttaggaggttgaattgatcagagacggagggaaagaggtggctcctgagcctgaactgccaggggaggggtgcctctgagagatggaggtcccaggccactggagacccgcgtcgcactttggagaagagccggggctggggacagaggcatgtacagggtggcatcaccgccctgctcccgggatggggagaccgaggctggggaaggggcttagggattgtcaggatctctagcacagagctggtgaccaagctgtgggcatcatgagtgtccaggaggaaagatcagatcccaggtgagagaagagggctcagggagagggtgaattgtgggcagagaagagaggaagacc

SEQ ID NO: 25823 - DNA, 950 bp, Artificial sequence
  DNA replication origin
gaggtgggggggtcggccccccgcccggccagccgccccgtccgggaggtgaggggcgcctctgcccggccgcccctactgggaagtgaggagcccctcagcccggccagccaccccgtccgggagggagatgggggggtcagcccccccacccggccagccgccccgtccgggagggaggtaggggggtcagccccccgcctggccagccgccccgtccgggagggaggtggggggctcagccctccgcccggccagccgccccgtctgggaggtgaggggcgcctctgcccggccgcccctactgggaagtgaggagcccctctgcccggccagccgccccgtccgggagggaggtgggggggtcggccccccgcccggccagccgccccgtccgggaggtgaggggcgcctctgcctggccgcccctactgggaagtgaggagcccctctgcccggccaccaccccgtctgggaggtgtgcccaacagctcattgagaacgggccaggatgacaatggcggctttgtggaatagaaaggcgggaaaggtggggaaaagattgagaaatcggatggttgccgtgtctgtgtagaaagaagtagacatgggagacttttcattttgttctgcactaagaaaaattcctctgccttgggatcctgttgatctgtgaccttacccccaaccctgtgctctctgaaacatgtgctgtgtccactcagggttaaatggattaagggcggtgcaagatgtgctttgttaaacagatgcttgaaggcagcatgctcgttaagagtcatcaccaatccctaatctcaagtaatcagggacacaaacactgcggaaggccgcagggtcctctgcctaggaaaaccagagacctttgttcacttgtttatctgctgaccttccctccactattgtcccatgaccctgccaaatccccc

SEQ ID NO: 25824 - DNA, 975 bp, Artificial sequence
  DNA replication origin
aaaactgttttcagctgttttagtcagggtcgggtgccaggcacctagacacccccctccccattcccaggaaggttttggccaaacctgcatccaccaccttggcatgccaacgcattcgaggccctggcaggccccgactcaacagaaccgtctcgccctctacagccaccacagccacgtgggccaatacccagcacgcgccccactgccccaagcctctctgccggcgtggctctcccccaacctcactctcaatacaaaagggacagcaccgaaagaacaagggaggccggaatggtggcattattcaatcaaatatacagagtgcttcctttaatatgtacacatttacaaaaatgcactttcacgaggaggggcggccggggccggcaggtgggcagcgcctggtgccacggcacgcgtggacagttgcgaggggtctgtgtgaaggcacttgtcacgagcttcaatactgccgccgtcccaggatgggagaactgcgcagcaggaagggcacttctgaaagcacagtggagagatcgctggagcgggcgttctgggcaggaggaagcacagacggcaggcagggtggactggccagcaagcgcgaggttgacctgccagccttgggccacgccgatgacctcaggccccactaacaaccacaggtgcgtcaacagccacgggccgtgccggcagccagggccacatcaataaccagggtcccaccgaccaccgtaggtcccaccgacagccacaggtcccattgacagccacgagtcccaccgacagccacaggccacaccatcagccacgggtcccaccaacagccatgggccacaccaacacagccatgggtctcaccggcactttggcctggagccacagagaaacccgagtgaggaataaaaggaagattctgtaaacagtgcacaacctctggtaacaaacgctacgatttggtgacgacgc

SEQ ID NO: 25825 - DNA, 1094 bp, Artificial sequence
  DNA replication origin
gaacttctccgcctccagggagtcctcctcaccgcggcccagatcctcgtcctcctcatcctccctgacggccgcgtggccggccggcccgggcagcgcctcgtccgccctgcgcggcggcggcgtgaagttcttgcactggtagagcacgtccttgtggccccccggccgctcaatggggttgcggatggggttgagcggggcccactggttgttggcgctctcctcccgcggcagccggctcctctcccgctctttcctgcgcttgcgtgtccaccacacgcacaggaccacgcacgccagccacagcacgctgaaggcaccacacagcacaggcaccagcagacctggggaccggggagaagagccggtgggcaatgaggcctgggcacctgcggggcactagccacacacccaggcctgggagggccctgcgggccaggcggccgggccccaccctccggttgctggctcgtggggagggtcccaggacgggggctgggaaggtcaggttgtggggctgggcggctggggcagcaggtgccagggacttctgtgttcctggtggctggcaggatcggcaggatcggccggctctgtgcccaatgcctgagttgcctgcctggtgccttcccaggggcccacctcccgcgcttacctgtggaagagccgcccgtaacaaccgtctccaccttgacctcggtgacagccaggagcagtgagctgttcccccgctgggtgatggcggccacgatggcgtgggccgcgccctggatcaggctgctgtcaggcaggtccctggcagggctgaaggactgcggcaaagaacggcattgtggggatggctcgagggctccaggctcccagcagcctgcccccaacactgaggccctggccacactggagcaaggtgggcgcacgggagacgagagcccggggtcctgcagtggcgacttcaccaccaggcagtgagtggggagtagcggggggaggagtggaggggtggaggctgtccccatccgggcacacaggagagcccagggtcctgaggtgtggggacctcaccaccaggcagcgagcagtggggggaaggg

SEQ ID NO: 25826 - DNA, 1112 bp, Artificial sequence
  DNA replication origin
ggatgtaggtgtcaggttcacggccctgccctgcccacgcactgcctgtctctgcccagggcaccacggtgggcgccatttgctccgggatccgctccctgccagccacaagggctgtggcacgggaccgcctgctggtgttgctttgcgaccgggcgtcctcgggggccagtgctgtggaggtggccgtggtgagtgcccagtggggagcagcacctgggtgggccctgggtcccgtactatgcaggtcctggctatgctggacagaggctctggcgaggctagtcctggtgcggaaggactgcgggcaggcctgtctccctgcggcccctcgctgtccatgccgcagacccgtggaactgctccctgggcctggccagcatgagggagatgcagggctgtggtgtggagcccgcttcccctgcagctgcatcctcgcccggtcccctgctctgtttttgtctctgtgtccctacgtcacaggcagcaggagagtccgtgggcttagtctgccctgggaggcctgctttgggactggcacctgccctggacctggggggtgtcagatgtgaatggataccaagggggtcgggtgagactggggtggagacatgcccggagaggggagggaatgttctggaacatggtgggtgggtgtgcagagcagtgggtgtggccatggcacagtgtggctggtggaggccatggccaggcacaggaaggacgtgcagtgttttggtgccctgaggccgcagagggggtgggggacatggatgggtgctgctgggtgatggaagggcagtaggggcaggggaagatgtaagaagtgtgccagcacaggtcagggcgccatcagggatgtggtggaggcaggggcacagccccgggttgctgtggcctcgtgaaggcactaggtttgtggtgcccctggggtgtggcccataggtgggggtgggggctgggaactgacaagaagggatggccatcacggagcaggtgtcagcgaatggggccacacacctccccaactcactgcctggtggcgaggtccccaccgcaggaccccgggctctcctgtgtgcccggacggggacaccctccacccctccact

SEQ ID NO: 25827 - DNA, 1853 bp, Artificial sequence
  DNA replication origin
aggcaggccaagctcgacatcagaaagggcaggcggagcaaggcaggacccagaccaggcctgttttcccaactgcacatcgaagcatggggcctggctgagctctcgcctccctgggtgtccctgagggcagacggctctcagtccatccggaccccagcacccgcctcctgatctcacagagtggccagggtcagcgtgcaccagcctcgggtagggcagggcggctcacgggctgccctcaccttgctgcagtcacggcggccatccaggcagcggcagctgttgcagtcttccacccaggagcttccgtgtgggaacggagtgccccgggaccagcaggatctcccgaacccgatcactgtggggagaaggggctcgagggtcagcagtgggcatctggccctcggggctgggtgtcacccatgccccccaacccgccccaacccagggcaatcacacggggcctaccttcctggcaccgggggccggctcggccgggtgggcagctacagcgatacccgttgatctcatccacacacgtggccccgtaggcacagggcgaggactggcactcgtcgatgtctgcagggagagccaccgctgctcagtgcagtgaggccaacgcccaccgcaggaccggcatggcctagggcagcggggagccagtggcacacaggcgcaagccccaggacaatgaggagcagcccctgcccccgagcccaagctgctgcctgcctgaggccttcctgagcccagcctgaccctggcccaacagcaccctcctccgtctgcttctgcagtgggcctgtcccatcctggattagccccagctgctgcgtcggaccagccaaggggtgctggacagacagctgggccaacacccagggacaacagccctgcggccacagaggagcccacgtcaggctgcacgctccaacccccacagctccctgggccccggactggtcccccaggctggggctccccacttaatcacttggcagggtatacagcaggaaccccacagggcacagacatgtggggaaactgaggctcagaagagaggcaggaagtagttgtggccacactgcccttcaagggacgtggacgttgatgtccccagactcctgacaccgcggctgggctgaggggctcccagggctggggctgtctggccactcactgatgcggcagtcaggccccgcgaagccaggtgcacactcgcagcggaaccagttgacgccgtcaacacagatgccaccattgtagctgcagagcagagggtgggcatcaggtggccccccgtggtatgccaagtcccacccacccctgctgtggcccccagggtgccactcaccaaggcagagggttgcagtcgttggtatctggtttgggagaagagaacgcaggggatcagtacccaccccccaagcgtgccaggcactgtccaggctggcttggcgtgatcaggctgtggggctggggagggtcatcaaggagggtgccttttgctgggggcaggggcagcagggggaggggctggcagaagggactggggggcgagtcgggggcagggatgtcatctgggtggaggaaagcggcccccgcccacacccctcccacactcactgtgagtgcaagtacgaccctcccagccgtcccggcagatgcaggagaaggaggccccgctgcccacgcaggtgccaccattcacacaggggttgggcaggcagctgctgttcttggctgtaaggagaggaggaggagggagcgtctcacctggccctgggctggccctgggtctccataccgcgcccccaacccagacagggcagacagacccgggggca

SEQ ID NO: 25828 - DNA, 1479 bp, Artificial sequence
  DNA replication origin
cagagccaagactgtgggtcttttccagggccagccactgccatgcttgcaggtcctgaggtcagacccctgccctgggccccaagaagccctctggacaggaggcccatcctctgcaccaaggccagggcaggatcgtgggcggccgagggtggtagggaggtgggtggggggaggcagggaaaaaggggaagtaaggggagggggtggtagggaggcaggtaatggggaggcagggttgggggaggtggggaagggggtggtagggaggtgggtggggggaggcagggttgggggaggtggggaagggggtggtagggaggtgggtggggggaggcagggttgggggaggtaggggaggggtgatagtgaggtgggtggggggaggcagggttgggggaggtggggaagggggaggtggggaagggggtggtaggggtggtggggaagggggaaggcaggttactttggaggcaggggggaaggggaggttgggggagggggtccagtaccaacagatggtcagagggaggcgagagcatcagccctgagagagatgcccactccgacccaggactcacctatgacaggtgtatacctctccaccatcaggcacccaccctaccccatgtgctctgcccaccagagccccctgccctccagtcccgagggagtgcacagatggacagataggcctgggcagccagcagcccgggggctcctagcccaggccaccaggaaacccatcacaacaagcaatggccacagggggccaagcctggtgacctgtgacagccccgcctgcccacctggcacccagtggagagctgagcctgggacgccttggggacaacttcccctgcagcacccctgggtcactcaggccccatggtcaggggacgaggcctgccctacagctcccagagcagcaggtggggcagggtgaccaggcagacctcacctcacagagaggcccggagaagccctgggggcagtggcagtggaagccgtcggccaggtcctcgcagaggccgccgctgtggcaggggctgctggcacactcgtctcgttccagctcgcaatgccggcctccgaagccccgtgggcacacacactggtacccgttcaccaggtcctgggcgggccagccaggtgagcgtcccgcaggcaccctgacggccccgcagcacccacgccacacaccctcctggccccgcctcaccttgcaggtgcccccatgctgacactgcccgcgacagtcgttgacgtctgggggcagaggagcagggtcagaggcggggtcccatgtgcctcggcccacccgccggcgcccaccccccatactgactgatatggcagttgatgcccttccagcccgggatgcaatcacagtaatagccgccaatcaggtttttgcaagaaaaagcgttaaggcatggcttcccttcacactcattggcgtctgtgaaagagacaagg

SEQ ID NO: 25829 - DNA, 1563 bp, Artificial sequence
  DNA replication origin
gagctcctgcagaatcaggaactaccctgggcagggctggcccaggccagcctgtgggcctcagtagccccatctgtgagatgggtaccttgtgggactttactgggagcgagcgaaatgactgcctttgaggtgggggcgagggcacgtgctgtgcccagggccacatggccgaggcagagccaggagtgctcccctgctgcccgctggcctacccagcccctggtgcctcccggccctggcagcaccttgtgagtccgagccggcattctcatccccggggtcccggcagggccttcctttcctggtgcctgctctcggggcccagctcacgggtgaatcccaaaatagctcagggaggagtgacgggacagctggggctgaccgtcggcagccagcggccgggaatgcccgtgacagtggggctggccggcagggctgcaacccctgcctggctggggctgctccagttcaaaggcctgaggccgcccgccggccctgggtgtggcgtgggtgactgtgcctggctcccctgccaccctttcaggcaccacagctcactgggtcttgcgcccctcctccttcccccaggtgcagctacggctggcaagggaggttctgcgatgagtgtgtcccctaccccggctgcgtgcatggcagttgtgtggagccctggcagtgcaactgtgagaccaactggggcggcctgctctgtgacaaaggtagtggtagggggcggcaggcctaatgctctgccatcgaagtgtgggttgtgggggagcggggggccggcttttcccctgagcatcccacccctgcccccagacctgaactactgtggcagccaccacccctgcaccaacggaggcacgtgcatcaacgccgagcctgaccagtaccgctgcacctgccctgacggctactcgggcaggaactgtgagaagggtacgtggggggctggccacccaaattctggccaggcagggactggttccctggggagccggtcaggccccatccctctggcgtcctgtgtggtgggcccctgacccccagcttgggaacctgtgggcttggggaggagtgcttgtggaaagctgggggcctggctgccagctctgccccctccccgcggttctacagctgagcacgcctgcacctccaacccgtgtgccaacgggggctcttgccatgaggtgccgtccggcttcgaatgccactgcccatcgggctggagcgggcccacctgtgcccttggtgagtgtctgcacgtgagtaggggactcctgcctagtatcagtgggggtctgggagtggggcaactcgctggggatggggtgcagtggtcaagtccacacgtgtggctgcggctggcttggcgaggacaaatggcaggaagacccaggcttgcagcgccacctgcccatggggaccttattcccacggctcacactgccagggccccacctttctccaccctctgcagacatcgatgagtgtgcttcgaacccgtgtgcggccggtggcacctgtgtggaccaggtggacggctttgagtgcatc

SEQ ID NO: 25830 - DNA, 1357 bp, Artificial sequence
  DNA replication origin
cccaagtcagctcagaaagtgcaacaaggtggacctggtctgggcagatgtagatgtagatctacgggagtcggccccactcaccctcgcctggcccagtgtgcatcacacaacctggatggcagtgccaccctccctggatggctgctggctggcagcttgaatgtcacaccaaggctggaggaaggcagcagagaagttggccatccctgccctttacccgcaggaagatgagccggagtctggggggcctggtgggtgggggcagtaggtgagctccgcctgcccctcttgctggccctgtcggggaggcccagctgttgctgacagcctcggctcaggttccagtgcaggacgcccccccaccggatgctgcggagatggccatgccttcctgccgccgcctctccagggccctggggctgctggctggggaaaccaggaggtgggggcctggtgtgggctgccctgcccagggtcgagagcacgcccttgggacccacgaggtctgggctctgagcccggctgtggccgctctctggccgatgacccaaggtgtgtcacagccccgccctgagcctgggtctctgtgtctgtggaggagggattctaggcgggatgtgaggccacccacgcggaccactgtgcatgctgggctggatactggagacacgttcttcccggcctcagtttccccatttgtggcagctgaactgggctgataggccttcggtgctggctgtgtggcttgagggcggctcaggaagggccgtggttctttccttttacaaaaataaagtgtggcgggtgccggtgtggaagtgacgtggcctggatgacattcccgtcctgcaggaccggagagttctaggaagggccccccgggagtcccggcagggcctggatggcagcctgctgagccttggggtcgttgcaggctctctcccctgacggaggcaccctcaagtcaggccatgttctaccctggccacctgccctctcctgggggactcccaagacaggacgttggccgatagcctggggcagggcgagtcctggtggttgtgtcctggggggtgcagctgggggtgcagctggagctcctgcagaatcaggaactaccctgggcagggctggcccaggccagcctgtgggcctcagtagccccatctgtgagatgggtaccttgtgggactttactgggagcgagcgaaatgactgcctttgaggtgggggcgagggcacgtgctgtgcccagggccacatggccgaggcagagccaggagtgctcccctgctgcccgctggcctacccagcccctggtgcctcccggccctggcagcaccttgtgagtccg

SEQ ID NO: 25831 - DNA, 1252 bp, Artificial sequence
  DNA replication origin
gtcagggagaaccccaagctgctgagtagcagagccatggtggcaggaggaatgccacagaggagcaggcggggccggggttagctggatgtggagaggcgatgcctgccctgtccctggagacacccagaaagctcgtgggagaggcctggcctgcgccacgcggggcctgtggggggtggcattcaggcggtgacgggaaagtggggaaggcagagaggagggaggccaaggagcaagtcccggctgccacaggtcagggcggatggatgaggagtcagcaagggcctccacaagggagtgtccggggtcttacagccaagtccagatggtggaggcctctggacccagaccagagtgtgggggatccagccaggggggctggcagctttgccctagagtggagcagagaagtcagcagggcaaccagaggggctggggcccagggtctggggtgggcacgggcttcgagccgtggcgctcactgtgcgtgagcaagctggggagcccgagagaggggcgcgagcgggtggagagacagcaggtggaggtgagcaccgccctccagccagccttggattgcaggggtcccaggacctccctctgtggagtgggtttgcctccatgggacgaggacactggggcacagagagcctactgatttccccagggtcacacagcgtggcgttttggagaggagtcggggagtttgggaaccagctgagttgggagccaaggtggggaggtgggtgacccttccacaggccccacggttgagtggcctggagggtacagtgaggagctttcccggccagtcccagagcggggaggcaagcagggctggggccgcccacccggtcacttgcacacacagggattcccggcaggttgagcgagtcccaagtcagctcagaaagtgcaacaaggtggacctggtctgggcagatgtagatgtagatctacgggagtcggccccactcaccctcgcctggcccagtgtgcatcacacaacctggatggcagtgccaccctccctggatggctgctggctggcagcttgaatgtcacaccaaggctggaggaaggcagcagagaagttggccatccctgccctttacccgcaggaagatgagccggagtctggggggcctggtgggtgggggcagtaggtgagctccgcctgcccctcttgctggccctgtcggggaggcccagctgttgctgacagcctcggctcaggttccagtgcagg

SEQ ID NO: 25832 - DNA, 978 bp, Artificial sequence
  DNA replication origin
aggttgggcacacagctgtgagagccgggccctgagctcgggaggctccttagtgcagtaggtgcgtgtctgagcatgggatgtgtctgatggcggcagccatgtgaggacagtgaggagagactggggaggctggctggacagtcacgtcaccgaggggcagagacccggaggctgcaagccacccagagatggggcatgggcagaggacacggtaaccctgcccatggggagggggtgggcggcgagcggccggcaagtgacaccagcaggcgaggggcggcagagcagaccagtggtgggagctgaggcctgcaggaccagggacagaggaaggggctgctggcaggtttgtagctgggcaaggtgggtggaagggctgtggtagctgttgagtggggaagcaccagacgggaggctgtgagggggaggccgctgtggggcatgtgggggtggtgggggaggggccagcgggatggggagggggtcagtggaagggggagaggcgcacgggtcctgcagacatcctggggtggagcccaggggtttgtggatggatttgatcaagcaggaagggtgtggagtcagggagaaccccaagctgctgagtagcagagccatggtggcaggaggaatgccacagaggagcaggcggggccggggttagctggatgtggagaggcgatgcctgccctgtccctggagacacccagaaagctcgtgggagaggcctggcctgcgccacgcggggcctgtggggggtggcattcaggcggtgacgggaaagtggggaaggcagagaggagggaggccaaggagcaagtcccggctgccacaggtcagggcggatggatgaggagtcagcaagggcctccacaagggagtgtccggggtcttacagccaagtccagatggtggaggcctctggacccagaccagagtgtgggggatccagccaggggggctggcagctttgcc

SEQ ID NO: 25833 - DNA, 1073 bp, Artificial sequence
  DNA replication origin
cccggccttgcagcagccgcaggcttctgccccgtccccgttgttcctggaggacccctggccgggctggtttctctggcctgtgctgactctgccgcctccccaagaggagctgctgatcgagcgagtgtcgcatgccggcatgatcaacccggaggaccgctggaagagcctgcacttcagcggccacgtggcgcacctggagctgcagatccgcgtgcgctgcgacgagaactactacagcgccacttgcaacaagttctgccggccccgcaacgactttttcggccactacacctgcgaccagtacggcaacaaggcctgcatggacggctggatgggcaaggagtgcaaggaaggtgagggggccgctgggctgcgtggagggcagggagggcctcgggcagggccccgggcacaggccttgcggccaggctggctgcagctgtgcctctcgctcctctctgttcgcagctgtgtgtaaacaagggtgtaatttgctccacgggggatgcaccgtgcctggggagtgcaggtgagtgtgccgccggcccgtctttgccctcccaacctttgccctcacgtcctcactggcacacacagccttgctgtcaggagtcgcccggagctggctggaggttgggcacacagctgtgagagccgggccctgagctcgggaggctccttagtgcagtaggtgcgtgtctgagcatgggatgtgtctgatggcggcagccatgtgaggacagtgaggagagactggggaggctggctggacagtcacgtcaccgaggggcagagacccggaggctgcaagccacccagagatggggcatgggcagaggacacggtaaccctgcccatggggagggggtgggcggcgagcggccggcaagtgacaccagcaggcgaggggcggcagagcagaccagtggtgggagctgaggcctgcaggaccagggacagaggaaggggctgctggcaggtttgtagctgggcaaggtgggtggaagggctgtggtagctgttgagtggggaagcaccagacgggaggctgtgagggggaggccgct

SEQ ID NO: 25834 - DNA, 852 bp, Artificial sequence
  DNA replication origin
gagggtgggctgtggggccaggacacagaccgaggaggagctgccacgtgaatctgggcgtgtcagggtgacttggaccaggggcagtctgggggtgagaggggctctcagaagtggaggcatggggttggccaatgggttggaggagggagagcggggccagggcatcctggctgccagcagagtggaggggctgttttcagggcagggacggcggtgggggtgcccaggtggggagcagcagttgtggggaccccagcggctcagggcaggggtgtttcctgagggggtggcagagagacaggtgggctgagtcccaagcaaggtcgtcagggctcttgacaacgtgagcctggagaggctggggcggccgggacgccccttggggagtgggccagcacagtgtcctcccaggccttggcccgaggcgggagaggtggggtctggaggacccgttcaccttttattgtgcaaaacgtcgagcctgtgcctaagcgcagggaccggcatcacggactttgcataccagcgccagcagctgtggtgcccctggcccctggtctcctggtggcttacttaaagtgaggcttagacagcgggtcacgggacctatgcctgtcttgggggcctgaggggaggcttgtcttaaggtggggacggtagtggtgtttggcacttctgggagcaagtcacagcgcaggagaggggagggcaactgagcaccatgtccgtgctgtcgagggctggacacggcgcaggtgggtgcaggtgttggagcagggctgcaggtgggtgggcacaggtgtgggacgtgagactcacgccctggcagcagccgtgccttctctgtgg

SEQ ID NO: 25835 - DNA, 787 bp, Artificial sequence
  DNA replication origin
accaccccgaatggtgagtgagccctgggccaggtggcagctcctctcagcttcagcgtgcctgtggcagggcccagctcctctgtctgcttgggacaaagccttgctttaccctgaggatcatgtgtgctgtttccctttttgctttggctgccaggaagctctgccacgtttgggacttgcagagctgtgcatgcactctcttccccagtcctggctttgcctatgttgttctcctcttgggtgtgctcttttggggcccatggcagtgacttagtggaggggacacccttgagtgtgtctctggctttgtggccccctctgcttgtctgtactggagcatggagccttggtggccctctccctgaggcaggggctctgcagggccctgcaggggtaacgggatgacttccatgggtgaatgcagaagcacccacaggccaagggagcagctcgtgtgaaggtctgggcaggagcgggctggctgtgcagggggagcagccggggctgggctcagatcatggaggctggcaagccactgagaggacacgggctccgcctggcaagctgtggctgccttatggagggtgggctgtggggccaggacacagaccgaggaggagctgccacgtgaatctgggcgtgtcagggtgacttggaccaggggcagtctgggggtgagaggggctctcagaagtggaggcatggggttggccaatgggttggaggagggagagcggggccagggcatcctggctgccagcagagtggaggggctgttttcagg

SEQ ID NO: 25836 - DNA, 1395 bp, Artificial sequence
  DNA replication origin
ggacagagtcctggtgggggtgtggatggagccctggggggtgtggatggagctgacgggggtggtttgtggacagagcccttggggggtgtggacacagtcctgggggtggtgtggacagagtcctggggggtgtggatggagccctgggggggtatggatggagcatgttggggggtgtggatggagctctgggggggtatggatggagccctgggggggtgtggatggagcatgttggggggggtggacagagctctggggggggtgtggacggagccctgttggggggtgtggatggagcatgttggggtgtgtggatggagcatgttggggggtgtggatggaactcggggggtgtggatggagctctggggggtatggatggagccctggggggtgtggatggagcatgttggggggtgtggacagagctctgggggggggtgtggacggagcatgttggggtgtgtggatggaactctgggggggtgtggatggagccctgggggggtgtggatggagctctgggggggtgtggatggagcatgttgcggggtgtggatggagccctggggaggtgatggagcctgttggggggtgtggatggaaccccgttgggggatgtggattgagttctttgggggtgtggatggagctctggggggtgtaaacagagctcggcggggggtgtggacggagccttgggaggcatgtggatggaactctggggattgtctggcgcctgtaggcagaggtttgcgggccctggtgacctcagggagccctggagatgggcggggactgggccccgtggcctggcggggccatggcggatgtgggaaaacgggtttaaggggagcttaagaggtgggattgagggtctgttgtcagctcgacgtggctagggagggttctaggagcgggttggggatggccccccacttccatcctgtgctcctacctgggtgagcctcctcgggccgtccccgggtgttctgcaggcaggggctcgggggcggggccggggttgcccagctgtgagtgaggcccagggtcagcagtcatgttgggccctagttgtctgtatttgagggacagtcggaggtgtggggcgggggactgggtgggggtcctggaggctgggctgggtgtggctggtagcacgttggttaggggaggggctggacgtgggagtgcagtcttctgagacatcttgggaggccaggcctgtccttagctggatgaggccgaggcactgggacgtgcgtggggtgggcggcgggtgaggaccagggaagggctggcaggcgtggggttgggccttgctggggaagtgtggttttccccagcttagccaggccttggggctggttggatggggtgtgctgaggg

SEQ ID NO: 25837 - DNA, 1289 bp, Artificial sequence
  DNA replication origin
caggagcccaggagcctgcctgccagcgagggtctttcttgttctgtcttggcatgtgtgtgctgggctccagggcagctgtgcggggtggtgtggctggagcatggtccccgtgacagatctgggcttatgaggagaacgggatgggtgaaggccctgtagatacaggaggtgggcctggggctgaccctgcgtctatcagctcaggaggcctgaggtcctgggccatcagaagggctgagcttttctcacctgtgaaaggggcacactgccgctttttcattgcaggtctcacgaagtcagatggggctgctggactcccagctcgggctctgcttgtgcccccagcccggctcccagacctgtccagttcctccccttcccagccttccctaccctctcctttgccccctagggaggaaggtttttacagagcccaccccctgcatccagccgccctagggctcaaggtgggccaggctgaggtctgtgcctggagctacctaagctgctcgtggcaggtgtgaggttcagcaccactctgcttcctgttttttctgagcttgggctggggatgacagggccctggcctccccaccctaccttcaggggatcctgtctgcacactggggaccacccccctccttcccacaccttcccagtagggaccaggagagctggctggtctggtatggaatgtgggcatctgggttcctgtgttgggtgggcatcggtctgttcctcctgccatggccctggggcccagagccctggggagaactcagggcatgtccgccttgtacattgggggtctggttcaaagctttggtatgggggcagggtggggcattcagtgcccaggcaacacggggaccattggagccagggaggactgcccttggccagggaggattggagagtgggctgggggtttgtcgctggtccctgagggtgggctgaagggtcaaagccgcagcacgataggaaggctgggaggtggaggggcgggttggggagcaggcggcaggcctgggtgggaggggactgctgctctcaggggccctcctgggctgctccatggtgtctttatgaggggagcaagctaggccagtgaaggggtgcttgtggagccaggcttcggcctgagctgctgctggtggtggagtgggggcaggaagacaaggatctgcaatcccaggccccagccacagtcgctatccccagaccccaggcctgagcggggtccctgtccccagaccctaggcctgattggagtccctgtccctaga

SEQ ID NO: 25838 - DNA, 1271 bp, Artificial sequence
  DNA replication origin
ggacccgggcctcgtcgtcatccccttccagttcgcctggccggtacgtgcgctccatccctcgtgctccagcccttccctctctctccgcgccccggccccgcgcgcttcgcgacccccaacacctgcggccgggtctgcgtgcgagccgcgcgcgcccaggcggggcggggccggcagggggcgcgtgctctggggacttggtccgcgcctggccacgtgggcgcgccggggccccggggccaccgggagcggggtcgcggcgggggcggggcggcggcgtcccgcgtgcgcggcggtgtgcggcgtgtgcctgcgtcgccctgcgcgtgtctgtctgggtggggaggcgaggcgaggcgccccggtcccgggcaggccgcggtggcatgtgcgcagcgcgtgctggggctggtctagggcaggccctgactgagccgccccgggcccgtggccagcctgcgcctgccctgcagtttcctggatgcctggggggcacgggcgggcgccgtgggacctaggcccgggagagcctaacgcctaacgcttatgtcggcagaagcccccgatggtgacccaagatcgttcagagacagagatagtggatcctggtgcagtgaccttctgtggcactgccctgtttgtgggtttttttggttttgttattctggaggggcagaagctgagtcggggctgtctggtctcccctggcaggtggccagtcaggcaggagccctggcctgggcgtgctgggaggaggggtggtaggggtccagtgtcactgggaaacaggtactcatcccagtgggctggcaggtgggtagtggtaggtgggcaggcccaggcctcgggcgccttacctcattgcctggagcacggccttgccctggtgcccagaggtccttccctgcttggtcattgtgctgggggcctggaactgggtgagtgcgggaatgagagcaccatgcagacctgtgatcagggagtagatggatctgggagccaggaagtggctccagtcagcaggaggcaccggagtgtgcccacctggtatcctgggccctgaagtgattgtgagttgagggcaatccctgccgagctcacgccagttgggcctgccgtgtgtggctcccagtcctgtgctgtacctttgcagccctggctggcagccttgcctgctgcccccatcctcaccgcttcctgagctcccacccgtggaagctggccacagtctcctctggccatgtcctcaacccgtgagcaccccgccg

SEQ ID NO: 25839 - DNA, 1535 bp, Artificial sequence
  DNA replication origin
cctggtctggtgagggttggggctggagccctggccgccactgatctcagcccctcaccccagcaaggtgcagcagggggcaaatgtgttttgtgaaatatgtatgaggggcgagggttcccactgctgccttctggaaactcaaaccagggtccagctgcctggcatttctggctcaagggctgctgaaattcctgcagggaagggaccccctctccgatgcctcctatgtccccctccttcctaagggcaggtgcggccaccttcctgacctgggtgctctcatggacatcgtgaggtctggctgacccatgcccgtccacgctctggcggccccctatgccagcttctgtatgacttgtctaagtcctctgtccacccccgggctgggggctcctgagggtgtgcaggggcggagtctcccttgttcaccacttggccaagtgcccagcagaggcacccagcaccccctcccccaccatagtggggcagtgggcgcaggtggggatggagccctgggcctctggagccgggcagggggcttctctgtcctggggcttccctctctcgagtacccgagtacctgcccccaggccaaagcacaggagaggtggcatctccacagggagcccctccccccgtaggcggtaatcaccgcccacacaccggaaggcggcaactggaaggctctgaacacagcttggattctcttgtttggtgggggtctctgtgcgggcctcatcctggcttgtgtcttaatccccacgaagcctacccaccaccaagtttggggtgggcactctgagcagagccagctgaggtgggcatggggggctcccacccacccctttagggaccttcagctgagcctgcggcctggatcctggaggagctgctaaacagggatggagcaggcagaccctgcgcatggggtgttcacaggccctgtgcctccaaagctctcttccttcagccctcagccccagcagcatggtggcagtgacttgctccaggctggggggctgcacagccacccagctccgggcacagggcaaatttgcgagaggagctagggggagagaagacagctcagttatcatggggatgggttgaggacccctctggaccatatggggatctttaaccaccaaggtgacccctagctctggaaaggaccgtgctcactggaggagaggaaggtgccattggttttgaccctgtggaggagctgcgaggtcacccagggagagggcaaggaggtgaccgcagaggatggggtgtggaagcctggtgaccagggcagcagtgggaggcctctctcggggtagccttcagggacaggcactgccgacttttgttccccatttcccgcctctcgccccccaagcccagacctgagtttggggggcgagaggcgggaaacggggaatgtggcctgagcatttcctgagggcatggcctggctacctcgacgccagcgccgagctgagcagtctgcaccctggagcatttgttgactggctgcttgaccagcg

SEQ ID NO: 25840 - DNA, 1041 bp, Artificial sequence
  DNA replication origin
tgtcctgagggtggggctgtgggagatgcgtgcagctcagagctgctccccaggtgcccagaatgcttgtgaggcaggaggggacccagctcgcctggtctgcttcctgggccacaggtgcacagtaagggttctgcaggtgaatgggtgtgttggcactggttgtgggcattcgagggcactgctgggccatcagtctgcggcaggatcgatccgctcctggacatcattaggtccaggctgtggctcccaggaggaaagtagagaaggggacagtgaagtgaagggagcctcagtaccctgcagggtggaaccctgggcagggaggtggagactgaccccctgttgtcatccagcacagtgctggacagcctggcattggaggctgtcctgaggaggctgtgcctcaggggcccacaaaagcagtgccacctgtatgcaaatgctggctgtggcccaggtggggccctgtgggcatcagcaaggccagcgacagggctgccggggaggggctgtcaggtatggggtgtgtgccagggaggggctgccaggtatggggtgtgcgggtcttggccagcctcagcttcactctacccagatgaggccccagcaggacattcacaggacaggagctctgcctgacccacagcagccttgctgtgctgcccttaccagcagcctgcctggtgacaccacgagagtgcgatgggccctccgggttgaccagcagaggcctcccactacctcagagggacctctcgcaggcaccaggtgggtctggcccctgaagcactgaggggacaggtgacagggcacccggacctgggtgtagtccagcccctcactttgctccgcagcccgatggggtgggtcagcaggcagtgctgccgggcctaatggagctggcattgatttcccggcactggagggggggttgtaaccggaaactcccctccccgtctgctatatttagcactgcaggacccagcggaagcacagcttactctggagcctcgccggctctgtccaaacccctggcag

SEQ ID NO: 25841 - DNA, 880 bp, Artificial sequence
  DNA replication origin
gggtgggcctgctggtcacggggctgcagcatgagctgtgctcacgagagtggtggctgagccagtcctcaggagttaggatggggtgggcagcactgcaggctgcacgctgcagggaaagtatgttccctgctcctggggcaagtgaggggtccccaccctgactggggctgggctagagccactccacaggagcccggagccaaagctgccctgtgtcgggggccccagtagctgatccgtgcacccccagccttggaagttttccaagggaccttcctcggcctgtggggtatgcagaaatgtctgcaggcttgctccaagaggagcaggtggcggcacagggtggggacacaaggccagtggtcttgacatgggccaggttcctggtgccagcccggtcctggtcccggggcacggcctcagcctgggccgcccagcaccaggctctactggcccctgagcatctctggcctgtatgccctggccttgccttctgacctgtcctgagggtggggctgtgggagatgcgtgcagctcagagctgctccccaggtgcccagaatgcttgtgaggcaggaggggacccagctcgcctggtctgcttcctgggccacaggtgcacagtaagggttctgcaggtgaatgggtgtgttggcactggttgtgggcattcgagggcactgctgggccatcagtctgcggcaggatcgatccgctcctggacatcattaggtccaggctgtggctcccaggaggaaagtagagaaggggacagtgaagtgaagggagcctcagtaccctgcagggtggaaccctgggcagggaggtggagactgaccccctgttgtcatccagcacagtgctggacagcctggca

SEQ ID NO: 25842 - DNA, 771 bp, Artificial sequence
  DNA replication origin
tagacatcagtctggggcttccccagtggccaggctgggccaggctctcacctgtcatgcgtcttcatgaagtcccaggacttctgggcaccattctagaaggggcaggtcagcggttagaatgtcccaggatgggcggaggtgctcggggaaccgaggaggccacagacccattgcacccactcctaaccagggagatcggctcgtggcctgggcccacgggagccaggaactgcagctcccgtgggcagaggagcaagcagcctgggaggggcagggaggtcaaggacagcctaataccctacgagtgaggcagaagaccagggcaaagggcagggaaggtgtccaggcacctcatgaaacactgcccagcacagaccgagcacaaggggctgcagagagacgtacaccgtcaccaagtataggaaggctcatggaggctcggggagggcaggcgtgactccctcacagcagggcaggagggccctgcaggcagaggagaggtcaggttttcctgctgatgcttccttgggccactgaacaggtggagacgggagggcaggaggggccggcaccaggagtggatggggaagggtggcaggaggggctggcaccaggagcagatgaggaagggtggcgccccagccaggtaggagatcgcactgcaggactcggtgactgtcatgatggtgaccaggctcggcagcccccccacacacccctacccccagtttctggcctcgactctcccacataccctgtggtcccgtt

SEQ ID NO: 25843 - DNA, 954 bp, Artificial sequence
  DNA replication origin
ctgcctccctccctcagggggcatcctgtcccccccatcacatccaggactctgcccctcgccatcctggagaagccctcttggcccccagcctgagagaggccctgtgcccctcactttccctgttgcgggagtcctgttggcgctggaggacaggggatccctctccccaaggcgaagctaagctggtggtgctggcagggggcagctgggatcagtcggggtacagcaggtggagacatggggtcactgcccttttccctgacgttggccatatgggatgcctgcttgtggctgcacagtccccacagggctgggtctcaggcagcaggtgcaggcccaggcaggtgccctctgtggccctggtggcagcactctctccctcactccccgtgaagcctcagggcagcccttgcagcctcagcgggcagcccgccggcacagctctgctgaagggttctggtgaccagagctgagctggttcgggctgtggctgtggtggacacggatgtaggctcgggctgggcggcatctcctcagggccaagggacattgggctggacgctggctgccacccaggggcagctgcagccctcagctttttgctgcgtccagccaggggaggcctgtgatgtcaggcagaccaaaggcaggggacccccgtggctccgaggcgatggggtcttctttgcacccagccctgcccctccctcccaggcctcagcagcctccctaaacctccctgcaccttgacctggctggacctaagggtctgacacgcttttgaccttgagctgagagggtccttgagacctgcatggggtgatgttactcggggggaagcagtggtggggaaggggcatgggcacagcaggcacatggcaggctgtgggcagggggcttccctggagcctgccctggctgggtggtggttcgggggtggctgggtgtcag

SEQ ID NO: 25844 - DNA, 1791 bp, Artificial sequence
  DNA replication origin
ccttccccaccactgcttccccccgagtaacatcaccccatgcaggtctcaaggaccctctcagctcaaggtcaaaagcgtgtcagacccttaggtccagccaggtcaaggtgcagggaggtttagggaggctgctgaggcctgggagggaggggcagggctgggtgcaaagaagaccccatcgcctcggagccacgggggtcccctgcctttggtctgcctgacatcacaggcctcccctggctggacgcagcaaaaagctgagggctgcagctgcccctgggtggcagccagcgtccagcccaatgtcccttggccctgaggagatgccgcccagcccgagcctacatccgtgtccaccacagccacagcccgaaccagctcagctctggtcaccagaacccttcagcagagctgtgccggcgggctgcccgctgaggctgcaagggctgccctgaggcttcacggggagtgagggagagagtgctgccaccagggccacagagggcacctgcctgggcctgcacctgctgcctgagacccagccctgtggggactgtgcagccacaagcaggcatcccatatggccaacgtcagggaaaagggcagtgaccccatgtctccacctgctgtaccccgactgatcccagctgccccctgccagcaccaccagcttagcttcgccttggggagagggatcccctgtcctccagcgccaacaggactcccgcaacagggaaagtgaggggcacagggcctctctcaggctgggggccaagagggcttctccaggatggcgaggggcagagtcctggatgtgatgggggggacaggatgccccctgagggagggaggcaggcaggcagagaggcactgcgacctggaccacctgacctgataggctggggggctggactgactgtgaccaggaaggtggtctttgccttaatggcatgaaggagctctggcagaggggagatctgctgggggcaggtgggcatgcaagcaaaaggtggggccctaactggacagggctgggcttggaggaagacggcccgggactcagtgatccactggatgtgggaaaaggatggcagcagctccttcacccaacacatatgcctcatgcctgtaatccccatgctttgggaagccaaggcaggaggatcggttgaggccagaagttcaagaccagcctgggcaacagtgagacgtcgtctctacaaaaaaatttaaacattagccaggtgtggtggtgtgcacctgtggtcccagctactggggcgggggctgaggcaggaggatcgcttgagcccaggaggttgaggctgcagtgagctgtgaccatgccactgcactccagcctgggcgacagcaagaccctgtctcaaaaacaaaacaaaacaaaatattccttgtgaacctaccatgtgcctggtgctaagtgaggcaatacagcctcttgtgccgtggcctggcatgggagaaggtgacaccctaggaggtggggaaggctgagcttaggcagatggagactccaaggaggtgccctccctggaaaaaaccccaaggaggaagcctgctttgagaggctctctcaagttctcactcagctccttctcctacctccctgcgcccggcctctgcgctccttgctccctcctcctcggcccagctatctcctccttcaagtggtagcatgaaagccaccacttccaggaagccttccctgatccccagggcaaccaaggagttccactgccaagagggtcggattgggcgggcgggaag

SEQ ID NO: 25845 - DNA, 1745 bp, Artificial sequence
  DNA replication origin
gggcggggccggcagcgcggaagatggtgggcggggcgcgggtcgtgggccgggccgccggcgggggcgcgggggacgcgggggcgcgggctcacctggcggtaatgcagcgtgagcggccgcaggtagggtgaggcggcgcagcggcccacggacgccccctcgatgcgctccatggcggcgcccggacaggcgggggccgcgagctctgcgggggccgacacggggcggcgccctgtcccgacaggagccttcgggcgggcgcgtgaccgcggctctgagcatgctccgtgggcgcgcggggcggggcggccgaggtgggcggggcggccgaggtgggcggggctcgcaggtgccacctgtcgggtgccgcgcgcctcggggcgctggtcgccgcggtgccagggaagccgcgcaggcacgtgggcgtcgcccgggggaaggactggccgggtcgaccccggccgccgggcggggccagccgggccggggtacagtgcttgggtgggactcgggacctcttggctgggggagggagggcctggcggtggttggagctaagggcctgcagctttggggtgcgatgggccgagcggatgcctccccactctggggatggaccacaaccccgagattaagttactccaggggtccgcgggcggggccgggggcggggcagccccccagggagggagggactgtgggcccaggaagaaaatcacaggagaccaaagagagagggccctggaaggaagctaggggagaggagagtagggagctggaggggccagagcttgggccgagggggcctcccctcgaggttcctggtggcgagggtggctgggagctgccacgctgtctctggagctgtccctcctccactcaaaagccagctgcccttccctccccctgcaagtcctaccttgatgacggcccttcctgggtgtgggagggtcccaggcagcttcagtgcttccttgggcatggattccaaggaccccctccaaatgccaccacggcctccacgggggcaggaaacaatattgaggcccacactggccctgaaccctgacctgcacctgctttctgaactatggcccaggggacatgctcagggtggactggccatgtgagcttgaaatcgactcccagttccctgttaactattgccgtgtaacaaaacactcctccaaagcttagtgccttaaagcaccccgttatcgcctggcctgtgggttgcccagctcagccaggcagccctgtcttggggtctctctgcagttgtaatcaggtggcagctggggctggagtcgtctgaaggccaaacggggtggaccgtccaggatggcctcttcgcccccgccctcagttgggtggctggaacagctagggccggctggcctcccatgtggctggcgtgggcttccctgcagcatggtggtctcggggtagttggattctcccgtggcagctggctccctccagagcacgttcaccaggccaggccaagctgccaggctttgtgtgacctggcctcagatgtcatatggtgtcattcctggggcatcctgtgggtcagaaagtcctgggcctccggcagattccaggggagggacatcaccaggtgggaacgctggggagcacggtcatgaagccagcatccaagtccagctgtcaccgccccagtagctctacaggggcctgtgtctccctgctttagccattccgcctggtgtcccggaagc

SEQ ID NO: 25846 - DNA, 1498 bp, Artificial sequence
  DNA replication origin
actctgcctccgtcctcgcgtctccaccctcctgctccctcttctgaggtccttgtgaccacaatttagggcccccccgggtcatccggggccatccggggccatctcccacctcgggtccttctgttagtcaaacctgctaagtcccctttgccacagaaggtccatactcgcaggttctggggatccaggtgtggactctggggaggatgcgtcgggagggcatcaccaccagggcaggaccctgtggcgccaggatctgcagcctggggcctcgccccgcagcaagtgggcgggtttcttgcaggacacctaggagaccgctgtgggcttctgtcccccttcctctgtaaggggagtgaggcaagggcccctgccaaggatgagatgggaggggagggaggcgaagtggcccctgttggcagggggcttgggtgcgggctccgagggggcctggggagcaaggcttcctggtggcaccgggctggggatgctcctgggccatgctggaggcagggcaggtacaaggggggcccctgggctcctccatggctcagctccttcccagtaaggtcacaggcagcaggtggattggagagttgaggacactgagcagggagctacaggcatgacagagcccaggtgggggtgcggggggtggggaggacgtgggggagtcaggggcgggaggggtgcaggaaagccaggggcggggattccgaggtaagtgcagagggagtgtcccgagagaggctgagttgaggggaagctggaggaggatcaggatggggggtcaggaggtcgggggtgtggggcacagaagtccactgggtgtgggcaggagttgagtgcagagtgctcataagtgagcagagtggtgggctccaggactggcagtggggtgctggggggatacagcagagaccacacccggaggagcagcagggggctgggccgtgtgtgtgtgtgtgtgtgtgtgtgtgtgtatctgtgcatctctgtgtgtctgtgtgtgtaatggagagaagcagtatgtgtgtgtgtggaggtgtgtgtggggggctgtgtgtggggggtgtacatgagtgtgtggggggtatgtgtgtgagtgtgggggagtatgtgggggggtgtgtgggagtgaatgtgggggtatgtgtgtgggggggtgtgtgtgtatggggtgtgtgtgtggggtatgtgagtgggtgtgggggtatgtgtgtgggggggtatgtgtgtgagtgtgggggagtatgtgggggggtgtgtgggagtgaatgtgggggtatgtgtgtgggggggtgtgtgtgtatggggtgtgtgtgtggggtatgtgagtgggtgtgggggtatgtgtgtgggggggtatgtgtgtgagtgtgggggagtatgtgggggggtgtgtgggagtgaatgtgggggtatgtgtgtgggggggtgtgtgtgtatggggtgtgtgtgtggggtatgtgagtgggtgtgggggtatgtgtgg

SEQ ID NO: 25847 - DNA, 1503 bp, Artificial sequence
  DNA replication origin
gcgctttccgggtgggcttgctctgcaacgggggctggggctcacttggtgctggggccctgggctgagccgtttcccttcgagacccaggggcgcctaggggccaggaatgggggcctcggtccagcggccagccccaggtgacacacgtccacaaggcgggtgccggcaggagcagggctgggggcctatcgaaggaggggctgggtgggcctgagtgcggcaggtctattctgtgcctggcggtggtttccggagtccccatgtacagggtgggctggggagaggagggcagatgtgtcctcctctgacttgccacaccctccctcctcttcccaggaagggaccataaggcgttccctaaaactgtgaggccagcccagcccctgcccccaggcaaggcttgcagcccccagccctgctgtgggcctgtttggctgctctgtcttggggagaccctgccgtggttggggaatgcggctgggccgagcaggaggtggagcccgagagtcctgcggggatgtgtggggtcagcgtgcagaccgagggtcctgcgggggtgtgtggggtcagcgtggagaccgagggtcctgcgggggtgtgtggggtcagcgtggagaccgagggtcctgcgggggtgtgtggggtcagcgtggagcccgagggtcctgcgggggtgtgtggggtcagcgtggagaccgagggtcctgcgggggtgtgtggggtcagcgtgcagaccgagggtcctgcgggggtgtgtggggtcagcgtggagcccgagagtcctgcggggatgtgtggggtcagcgtggagaccgagggtcctgcgggggtgtgtggggtcagcgtggagaccgagggtcctgcgggggtgtgtggggtcagcgtggagaccgagggtcctgcgggggtgtgtggggtcagcgtggagcccgagagtcctgcggggatgtgtggggtcagcgtggagaccgagggtcctgtgggggtgtgtggggtcagcgtggagaccgagggtcctgcgggggtgtgtggggtcagcgtggagaccgagggtcctgcgggggtgtgtggggtcagcgtggagaccgagggtcctgcgggggtgtgtggggtcagcgtggggtctgagggtcctgcggggggtgtgtggggtcagcgtggagaatgctttatgggctgatgtgctacccagagaaccagggcatcgtctgcaaaggtctggggcagcgggcacccctcccacatcctaagggcaatgccagatggggatggacgagggagccatgtcggaagtcccaggagaagcagcactcgggagccgaggtggaggaggaagaagccacccctgttctcccagctccatggggggctgggaattgggctgagggagagaaagtgacttgtgtcttctccttgggccagactccgcggcccaggccagagcctcgtcatttatgagctctggcctccaagcctgtggctgcatctgaagcccatggt

SEQ ID NO: 25848 - DNA, 1834 bp, Artificial sequence
  DNA replication origin
cagccggcaggtggggttggggggggtgctagccaggtcccactgctgccgtgtccccacagattgggccagtggttcaccccctcttgctgacgtccctgccgtcatcaccactgcctctttctgtccccatgtccgccaccaccatcatcacctgaagttgccactgacggacaaacatggcctgtccctcctccttctggacttccttggacagagcttccagggaagtcagcaagagagtgtgggagatgcggaggcagccttccctggtggagaggaggccccccaccctccagctcacgggcacggtgggccccaggtggggaggaggccccccaccctccagctcatgagtacagcgggccccgggtggagaggaggccccccaccctccagctcccaggcacagtgggccccaggtggagaggaggtcccccaccctccagcttacaggcacagtgggccccaggtgcagaggaggtcccccaccctccagctcacaggcacagtgggccccaggtggacaggaggtcccccaccctccagctcacgggcacggtgggcctgggggccacgtgcacatggctttcagcattcccacctacagctcctcccgggaactcgatgagagcaagccaatggccatcccagcccagctgcttgtcccttggacaagtcttccctgcctctgaggctcctgggggagttcacacaggtgaaaggaggtgccagatcttagtgggcactctacaagcagcagcacgtgtttatgaagggcctggcacgaaccggggcactctggggagccatgccatgctgcctatgaaccagagaagtggggaggcagcccttggcataaggagccagagggcacacagcccaggaaatggaacagggccctgaatctgagtctcctgtgtgagctcaggtcctctgagaagaggacaccaggatcccatgcaggtgcgattcagctggggaaatgcaggtgaaggatagagaggggaggaggcacagcagcagggagagcctgactgacgcaggggtgctgggaaggatggaggtaagagagctgggtggtgggtgggaggagcctcagagctggggctgcctgggcacgatgccagtgtgatgcggggccagcgctgggcagctgggcattgtctactggctcctgcgtcaggatgtctgcacacagcctcgtcacagccatcttcacctggtggcagaggagggcatgtgtgtcccccgggggcagggtggtcccacagtctctgtgtgctagagactcctaaggggagacttgggggatggaaggaagaggggagggggtgagaaccttgaagaccagaggccccagggtggttggccgggtctctgcccaagagagaccaggaggcaagtggtcccaggaagggcagtggtctgggggcgggttccaggctgcctcgtggtagcaggagctcctcaggcttggggaccacacacaggttgtatacagagctggggagagactgacggcggctgggccctcagagcaatgatttggagctgggtggattctcccggaagctgggggcggggtgcagaggagctatgcctcggttggcaggaacctccgctgactcctcctgcaccttctttagatctcccactgagatgttgccctccacctctcttctccagaagggaaagatgttggggtgccctcaagtttcctttaccatgaaggactgtcccctggcaggtcagatgtcccatgggctctgggctcactcaggagcacatgctttccaggacccgcaggcactgggcacctgcagccatggcc

SEQ ID NO: 25849 - DNA, 1582 bp, Artificial sequence
  DNA replication origin
gttcgtcgggggaggtagaggcggggccagatccaagggggggtcagaccgcggggcagggtcggggggcaggtgctagggtggctccccggtgcgctcctgggattggtcccgggcgctggctcctctttagtccccagcggggcgggcacggccccctgaggccgcagctgagcctcccactcccggcctgcggtcccgagtcccggccgcacctgccgaggcccaggccgcgaaggagggaaggccgagccgggcattagcccccgcgccgggcgccgcggggagggtcttatcagcgcgggcagctggcggcctgtccctgcgcgagcgccccggcccaattcaatggccattgtccgccggtccctttgttctgaggtgtccgcttcctgccaggctaggagcgggcgggcaggaaaccctccgagccgaggcccagacgaggaggccggcccagcctggggtcagaggcgacggcagacctggctcggggctcccgggggctggggagtgaggctggggctcggtgtgcggtctgcagggcgggggcaggagcgggatgtcccctccagggggacactgtgagggcggggctcccgcctccagatcctgcggcgctgggggcgggtggaggaaggaggaggaagaccctgagacagagggtgcccctcccagctctgcagccttcctctgctccctgctggatgacaggctcagagagagcgagggcaggctcaagtttcagggtcgtgaaaacccagcgcccacggcctcccatgcggaagacgcccacccaggaccgtgggctgggaagaggggctgaggcctgggaggggagtgatgcggccagggttcatccctccttcacgggggccctgcggcgctcctgaccatctgaggccgtctccaccccctcgtcctctctcccctgtgctccacgctgcccattcaccaggccccacaggttcgcccagcacagcaccctggttggctggccatcggttgtaagctcacccgtagctggggctgggtctctgggagctggtgggagggggagttggcaccagtgccacagcccaccggtgcccaccagagctccccatggcactcgaggccactgaaccagctggagcaggatggccacagccgctgctcacttcccaccatgtgccctggggtctcctgcagttcctttttccgagaccccctgggtgccttcccagcaaagccctggccctgactcaggccaactcaatcagcaaacggaagccaccgcggggatttcaaacagcagaacttaatgcgaacagcttggaggggatgcaggaacgtagagaggagagtctggcaagccggaaatcaatttcctgctgcaagaggcagccggcaggtggggttggggggggtgctagccaggtcccactgctgccgtgtccccacagattgggccagtggttcaccccctcttgctgacgtccctgccgtcatcaccactgcctctttctgtccccatgtccgccaccaccatcatcacctgaagttgccactgacggacaaacatggcctgtccctcctcctt

SEQ ID NO: 25850 - DNA, 1756 bp, Artificial sequence
  DNA replication origin
tgttttggacagaatgacagccagggagggctggccacgtggctgcagcatctcctggctttctgcagggttcggtcacttgctgtccccaggggcagcctgggcctcatgcctgtgtatgcggcaaggggacatggggtggggggggtctgctccaaggaacatcctccccagctgggcctcagggcagggccatcgggagggagaggccacattcctgcccaccccccacccccctggactctgcaggactgtccgacagcctccgagtcctcgagggccatgtttccggaagactctccttgaagactctacctcctcccgaggcctggggcagctctgtgttggcagagactgaacctaggaccagtgaagaggcggctccctgtcccccatccccaggcctgagcacccagggagatcaggagtcagcgctgtgctggctccagagggctcaggggcaccacgttcccactcgaatctgggaaggctttgtgtgggcaggtgcagagctgtcattagggcaagggccgggaggggttggggtgtctcagcgttttcccgcagcagcctggcacctggctgccccaggattagataatcacacaggaggggtgtggcactgggaggggtcaggggctgggggctgaaggaggagcaagaactcaaggtttggggaaactgaggcagcccctctcttctgggcaggatgagatagcccaggcccactttggtcttggcaagccccagacagacgtccagcccatggcacttcttgccatcatctctaccagccacagacccctccctcagcaagccactggccaggacagggatgacacaaggtgagcagagtcaggacaaagagacacttgccagctgcagaggtcccagagcaggttctggcccagccatgggggtgagggtggcaaggaaggcttcttggaggtggcacttgggttgagtttgccaagggaggaggtgacagaggaaaggcgtgacaggcagggacagcggggcatagaccccagtcaggggaaagccgggtgctgacagggagggcaaggagtcccaggggcacaggtggggacagcaggagctgaggccatgctggaccagggacaggagcaaggctctggagtggcaacctggaggcggtggcaagccatggcagggcaggtggatagtggtgactgcttatttgctggggtccccaggagtcaggtcaggtgggggtaccagggagagggtgctggggctgtgaccagagctctagggaagctcccctatgcaggtcctacaggaccaccttggcagcggtggtgctgagcatgatcaccctgggcccctgctggtgggctggggtggtgaccacagtatgccagaaatgctggggtgctgcaggctgccttctggctcaggggctctgagcatcgttgcccaaccagggccccgccatccaaggagccagccccagagtgccctaccatgtgctgtgagcacccccctctcctgggtacccctgaaccctctccgaagcctggtcaagtggatacctgcctgccacaccctcctccacctcactggcctggccctggttgtggccctgctgggaccaccgtctccactccaccctgatccatagcccttctgtagcctccttcctgtgtgagcagaagcttcctgggtctccctgcacccactgggacagatcctgcacgcccccggtgctcagccacgcaggtcatggcgtttg

SEQ ID NO: 25851 - DNA, 871 bp, Artificial sequence
  DNA replication origin
gggggtgtccctgggtggggccgggaggtgggtggaggaggagatgagactggctccctggtgaaggtctcagcagggatttgttattaggggagggggacagcggaaaggagtaggttcaggtggggccaaatttaggggcctgtaatgtgtggagggcctggggctggaagagcctgggatgatgtgatcctgggaggtgaaaatcagggctcagcagcctgctggtggccttggagggccctgggcacgctcttgggctggtgtgtcccggcctggctcccggggaggttgctattcagagacagtatttcccagcccaccaaggggaggggtgtggtggtcacatggccactgggggacaggtgcatctgtacatacccatgcacaggatgctcgcaggctctgcaagctgggggaggcccctcgggccctggccatcaggaggcgctgcgggacagctgggtgggctgtgtggggtggcagcctgaggggccctcagtgcctgtgtgggtgcagccctcttgcaggtattgggcgtgtgtgacagtgtcatgaggagggcaggagcctcgccgatgggagaggaggcctctagggagggaaggagtccactgaggcagctagctcctttgtcacttaaatggggtggccacctggatttggggtcggggcaccctgcacaggggagcttcctcggagctttctctgctgcccggcccaacttccggcccaacttccattctcatcctgaccggtgcagtgtctccaggcgagttgggcgagggtcgcaataggatggggttggagggtgagttctgccttggggacacaccaagctcaaagacaaggtccatggggtggaggcagg

SEQ ID NO: 25852 - DNA, 1033 bp, Artificial sequence
  DNA replication origin
gcaggtggaggcggcactgtgggctgaggctgagctagggtcagcacctgcaggccacagcctcgcctgcctggggtccaggaacacacatgctgggagacatgtacccagcatggagacgatgttcgagcttctgtctctgtgctctgcccccgcggcgcccggaggatggggagtggctgccatccccacacagcccaccctccaggcctcaccccttcggacttcccctcccacaaatccctgaccggagcattccctccagctgcacgtggggttctggaaaatgcgtgtttctcatgcatttgttcatggattcactcagcaagcgtggagaaagcctgacagccaagtgcgtgcgcagagtcggcgaggatgaagcagggaaccgggaagtgctgcccacaggccagcgcccctgtccttgtaggggagatgcgcttcgagccaccccctccccaacaagatccataggcacaagtttgtgcagggaaatcagggcgtgaggcgcagcggccggccggcagaggagaagtggtcttgccagctgctggagggtgggctgtggggctgtgagcagagcgcatgcttagttccattttggagcactctggggaggggatggagaagggcccagaggatgggggtgtccctgggtggggccgggaggtgggtggaggaggagatgagactggctccctggtgaaggtctcagcagggatttgttattaggggagggggacagcggaaaggagtaggttcaggtggggccaaatttaggggcctgtaatgtgtggagggcctggggctggaagagcctgggatgatgtgatcctgggaggtgaaaatcagggctcagcagcctgctggtggccttggagggccctgggcacgctcttgggctggtgtgtcccggcctggctcccggggaggttgctattcagagacagtatttcccagcccaccaaggggaggggtgtggtggtcacatggccactgggggacaggtgcatctgtacatacccatgcacag

SEQ ID NO: 25853 - DNA, 778 bp, Artificial sequence
  DNA replication origin
gccgagggatggagcaggtgccaggtcacacagcactggtgtgggctgggtgaccatcaggtgctggagttaccagacacaagcccccagaccatccctccccgctgcatctgtggggagtggctgcaggggcaggcctggtgactcctgggccctgtcacagtgcccctgtgaggagaaactaccatgagcatccccagccaggtgcggtggctcacacctgcagttccagctactctgggggccgaggcaggaggatcgctggagcccagggatttaaggccagcctgggcaacatagcatgactcaatctcaaaaagaaatttaaaaattagaaagatcacccacaggcccacaagtgtccgagggctcagccaccatgtgggtgtggactgcggccagttgtctgccccaaccgggcccgacaccctgagctggtccagaggctcccggccctcagcatctgtgcatccaggtgtgggtctgggtacacacgctcaagcccgtgcacatggtggtgggatgggtgcgagcagacgtgtgtgcggatgaatgtgtgtacgtgtacacgcgtactgggtgtgcatgaatagcggccatgtaggagggtgtggtgtgcatggaagggcactcacaggtgtgcacaggcacacgtacgtaagggcattatgcatttctctgtggatggtcacatgcctgcacacgtgtgcccctgaggctgccagctccgtcctctctctggctggctgactctagctcagcagccagcagccagcag

SEQ ID NO: 25854 - DNA, 1355 bp, Artificial sequence
  DNA replication origin
ggcccgactctgaagctgccaatccgcccacctgctggtgcccccaacctcgctccaagccacagggtaaggctctaggcgcccacccagcatgaggcagccagctgcagagggtgctggccacactcgctcctcttcccctgctcctcagcactagacagaggctgctgggtcatccgctgtcagctgtgctggacatgggaactgctccctctggcacttggagtctcctgcaaagcacctgcgctcaggaaggcctggagacaaccagcgcccctgcagggacttgaggaagccaaagtcaggggcacagatgcccggcctgtccctcccctggccagcgtggtccacacccatacggctggaccaaatgagcatgggtcaagattgtgggcaggcatggcagcccctctacagttggggtacagggattgtgggcaggcatggcagcccctctacagttggggtacaggggtgtgggcaggcatggcagcccctctacagttggggtacagggattgtggggaggcatggcagcccctctacagttggggtgcaggggtgtgggcaggcatagcagcccctctacagttggggtacgggattgtgggcaggcatggcagcccctctacagttggggtacgggattgtgggcaggcatggcagcccctctacagttggggtacgggattgtgggcagacatagcagcccctctacagttggggtacagggattgtggggaggcatggcagcccctctacagttggggtgcaggggtgtgggcaggcatagcagcccctctacagttggggtacgggattgtgggcaggcatggcagcccctctacagttggggtacaggggtgtgggcaggcatggcagcccctctacagttggggtacggggtgtgggcagcatggcagcccctctacagttggggtacgggctgtgggcagacatggcagcccctctacagttggggtacagggattgtgggcaggcatggcagcccctctacagttggggtacaagattgtgggcaggcatggcagcccctctacagttggggtacaagattgtgggcaggcatggcagccccctgcagttggggtacaggggtgtggggcgtggcccagcttgttctctgggtcagggagtgaggtcactgggcagacatccctaaggacttggcaaggagcccagaggcggcaaagggtcagatctcgtgccccaccctccaactctggctcaaggggattcctccagggggctctccccaccccagctccatgggctgcaaagaaggagccatccaggcacagaacagctggaccaagacaatggagctcagggcc

SEQ ID NO: 25855 - DNA, 1554 bp, Artificial sequence
  DNA replication origin
gtcctgccagggcttctcgagggcttgggggaagaatagatttagtaaagcaggaagatctgttgttacttaacagaaattgcctgaggcttgtctgattctgtgttgcgatctgtggccagccgtcatgtcggtctgctggctgcacggcctggctgtggatattagcccctgagacccaggggctgccctgagtgaggggtgtggggtctttaggtccccccaactactgcagcagctgttgagtgggtgtgcatcagcctgggctggacatgggtgtgccacaggggaccgggtggacaagtccccgcttgggcccccagcgcagtgtgggcaccgggaggtgagtgctgtgaagaaagtgaaacggcaggaccagcccacaggggcttcactgaggctggggtaacaggaagcagcaactgggccagggtgggcgggcctgggggccacagctggcacccaggggccccgagggaggtgcaggtgggccgtgggaccgcaggatggggggcttggagaaggtgctcttagaggaaccctgaggaccagctggaggggctcccggcctagcagatggccactggggccgggccagagacgacagccaggtggcatggagtgggggtcttgttggagatcgaagagggtggatttggggggcgaaatgggtgaaacctgccaccagatcttatttggggaggagaccagacgtgcagctgaggggcgcaggcgaggcaggccgtgcagcgatccagccctcggcctgggtgctggggtgcagggcggggggcagcgtctgactctggtggtgctgtttgccaggctgtggggccccaggcacaggtgggctgcagctccgcaggagggaaggaatcctcatcccgggagacctgctttggggccagttgggtgttggagggggtttcaggacagacagctctggctgggcacttccactcgggaggccaggaaagaaggtttccaggctgcctgtgcatgagcggcttggcccacaggtggttgaggatattggctgaacggcccgcctgaggctggagggagagggaggggtggagaggtgggtgggaggtgagggccaggggaaagggaggcccgggaggcagtggctgtccaccctttggggatggaagcgggggaggttatcacagaagggggagggtggggtggggctcgggggctggggcgcgggagaggatggctggggtttggggctgaggagcacaagcggggccaggcggtgaccagtgtgctagagtcaagccccacaatggctggaggggaggtgggacatctctgggctggtggcggaaagactcttccccagagagggtgcggtgtggaacacagcatccgggtcctggagccgtggggacctgtgctgcacagacacttgggtggccgaggtgcggaggtgctgcggcccgggagtagacagccgtagtggccaggtgcttttgggtgctggcctgaaccgcgggtttgggcattcaggtctgtattgctcagtcccgtaggtggcttaggggccac

SEQ ID NO: 25856 - DNA, 1178 bp, Artificial sequence
  DNA replication origin
ccttggccttttgagctgctaggctggccactgcaccccgcgagagttggctgtgctgtggccctgcccctgcccctcccctggggtgcccaggtgctactctgtgagggagcctgacctcctggcaggctggtgcttctcagccggcgtctcagcccctcaggagggccgcatgggctgtctcctccacatcagccatgcactggtcctctgggggtgcattcctagcacagctcctggcatgcgtaggaggtcagtggggcagaggtgaagtcagggcaggtctgtggctcggttcccctgtgcctgagcactcccaggtccgatctgaggctttagtctccgtgtcctctgcctgcctagccagcctctgtcagcgctggaggtgggggtcctgtcccagttgggtgattctggtgcctggtgacagggttcacagccccctctgtcacatctgaccagctggcccagacagggcccgggtgtgcatgtgtgtctctctgtgtgtgtatacatgtacatgcagtgcgtgtatgcctgtatctgtgtgcatgcagtgtgtgcctgtgtctgtgcgcatgcagtatttgtgtgcatgtgtgtgtgtgtgcctgtgtctgtgtacgcagtgtgtgtgcctgtgtctgtatgcctgcagcgtgtgtgtgcatgtgtgtgtgcgcctgtgtatgcagtgtgtgtgcatgtgtgtgtgtgcctgtgtctgtgtatgcagtgtgtgtgtgcctgtctgcgtatgcagtgtgtgtgtgcctgtgtctgtatgcctgcagcgtgtgtgtgcatgtgtgtgtgtgcctgtgtctgtgtatgcagtgtgtgtgcatgtgtgtgtgcctgtgtatgcagtgtgtgtgcatgtgtgtgtgtgcagtgtgtgtgcatgtgtatgtgcctgtgtctgtgtatgcagtgtgtgtgtgtgcatgtgtgtgtgtgcctgtgtgcatgcagtatttgtgtgcatgtgtgtgtgtgcctgtgtatgcagtgtgtgtgtgcctgtgtctgtgtatgcagtgtgtgtgtgcctgtttctgtgtatgcagtgtgtgtgcgcctgtgtctgtgtgcctgcagtgtatgtgtgcatgtgtgtgtgcctgtgtctgtgcatgcagtgcgtatgcacacagtacgtgtgtgcgttggtgcac

SEQ ID NO: 25857 - DNA, 2083 bp, Artificial sequence
  DNA replication origin
cggggcggcgggggcagcctcggcgcctgtggacgccgcgccccgcgccctcgcgccgcgccggggcctcgggagcggctctgcaagcaaaagcaaggaggtcaggcactgagcgacgcggccgtgcaggcaggctaggggcagcagcatgggcggcggcggcgctgtgacccgcggggctgccacccgctcccctgccacccccgcccctgcgaccctgcccgagcccagcctagcgcagcccggccaggcccggccgcggggggcgccgtcccgcccgcccgcccgcccgagcccgtacccgccgcggcgccggtgcgtcacgctgcgtcagggccgcgccccgcgcgacgtcgctgcctcgcggccccgcccccaggcccgacatcctcgaagctgctcgagcttctgcccagcaaccggcgcgagccgcgcgctgtgcagaggtagccgtggaaggcggctcccggcgctggcaggcggccgcccccagacccgcagtgccatgcgcaggtgcttgcgcccgttcttcagttagcgatcttttggttaggaacgcaggtggacctgcttgtttggccatttgcattccggagtctgcctctggccgcggcctgtgggatggtcgttgggcttcctcgttcgttcagatgcttcgcgatttagcttgctacggacgccagcagccagcgcttgcagagagcgcggtccactctgctctgagggctttacaggggcaggcgctgctatttcccggcattttcctcgaggaaataggcacagagaggttagtcgcgcgctgaaggtcacacagccggcgggtgggcaagtcaggatctggccctgggcctgcagccctggagcttgggccccagggcgcgccctgcctctgtggctctgcctgtggatcgcagtcgcaggctcgctccttgtggggcctctagcctcccggcctggggctaatcctgggaggtgcgtggcatggggcactggctttgctgatgaggagaccagacttcagaggccgtgtcacctggcctgggccgcacagctggtgcatgccaagctcgcgtgcagacgaagctccagaggcctggctgtcaggagggttcctccccgaggacacacacgcaacctcctggaccgccaggctttagacttttaaaacttccatatgcaggaaaccccacaggacgcagccagcatctcgggtcatgggtgcacctgtcaccgcagtcctgggctaaacagtgaacaggagctctgtgtctctgtggtcgttacagttgtagtgaatgttccctgggagagtcctcttcagaagatatttgcggtattttcaacaaaggactctccaggatggaggagcaactacaagtcaggaaggaaaaggctgacaacccagttttttaaaaaacgggcaaaggacgtgaacagacaccatgcaatggcccagagtgcacaaatcatcatttctcccaggaatggggtgcccgagcccccaggcggctgaacttgagacttgtcacgtagtgttggtggaatgcagagcagctggagatcacctgctgcaggtgggtgcgtaactccgcacggccaagccgtttggaaagctgtagcatatgcatgagagtccggaaagttccgagagaaagtgtgtggatgcacccgccaaggacacacccaccgaggccacagctgcgatttcatagtgtgggaccccactggcaaagacacgctggctgctgtggccgtggtttctgtcccagccgtctgtttccatagaaaaaggtaacgggcataagcagtttccaggagaaatacaaatggccagagtggagacagcctacatgtccatcagcaacagaaaggatcagcaggttgtggtgggtccatttggggaatgcagtgagaaggaataacttacagcagcacacaagacctgggcgacagctgtctccgggggtgccaggatagaattgctgagccgccagaggtagtcagcgtcttgatctgcatggtggtgtggagcatgtgaataataattttcatccttagaaagaaaccaccctttgcactttga

SEQ ID NO: 25858 - DNA, 1934 bp, Artificial sequence
  DNA replication origin
gccccacgctgcgcgagaggtgagcccgtgccccgcggcccccgcgcccgcgcgcgcccacgcccccagcccgtgcctctacctttgcaggaacgcgctcatgttcaacaacgagctcatggccgacgtgcacttcgtcgtggggcccccgggggcgaccaggacggtgcccgcccacaaggtgggtagcggcggcccctctcggaacgcgtgccccgtccgccccgtccgccgtgtggctgacacgcagcctgcgggagagccaggctcacggcggcgctttctcctcccagtacgtcttggctgtcggcagctccgtcttctatgccatgttctacggagacctggcggaagtcaaatctgaaattcacattccagacgtggagcccgcagcctttctgatcctcttaaagtaagtccactctactggggagggacgggtgggtccgttttaggcggcctccggaggcttctgaagggaagcacacaggagctgatggactcctctcccaggcccagccccgcgatgggtgcttgggagccagcccctgacgcgggccctgcctcgcctaggtacatgtacagtgatgagatcgatctggaagccgacacggtgctggccactctgtacgctgctaagaagtacatcgtcccagcattggcaaaagcctgtgtcaactttctggagacaagtttggaagccaagaacgcctgcgtcctgctgtcccagagccggctgtttgaggagcccgagctgacgcagcgctgctgggaggtcattgacgcacaggccgagatggccctacggtccgaaggcttctgtgagatagaccggcagacgctggagatcattgtcactcgggaggccctcaacaccaaagaggcggtggtcttcgaggccgtcctgaactgggccgaggcggagtgcaagaggcaggggctgccaatcaccccacgaaacaagaggcatgttctggggcgagccctctatctggtccgaattccaaccatgaccctagaggagtttgccaacggcgctgcccagtcagacatcctgactctggaggagacccacagcatcttcctgtggtacacggccaccaacaagccccgcctggactttcccctgaccaagaggaagggcctcgccccgcagaggtgccaccgattccagtcttctgcctaccgcagcaaccagtggcggtaccgcgggcgctgcgacagcatccagtttgcagtggacagaagggtatttattgcagggctgggcctgtatggctccagctctgggaaggctgagtacagcgtgaagattgagctcaagcggctcggggtggttctggctcagaacttgaccaagttcatgtcagacggatccagtaacaccttcccggtctggtttgaacacccggtccaggttgaacaagacaccttctacacggccagtgccgtcctggacggcagcgaactcagctactttgggcaggaggggatgacggaagtgcagtgtggaaaggtggccttccagttccagtgctcctcggacagcaccaacgggactggggtccagggtgggcagatccctgagctcattttctatgcctgaggtgcccggggaggctgcagcaggtcagcgagtgagtggaggggaagtcaagatgctaactgcttcttgacaccatgaaaggctgctcttaactttgtctctctttgacatgtagtcagctgaagcttgactgtgtagagacattttccacacagccagaacccagggattggagtcttaggcatctctggtacagtggggtgcacgtctcaggtggaggaagatttacggctcaagacaggccccagatcccctcccagtggcacccatgccacctgctttgaggggttggatcttcctgctaccctcttggattctaagtggttcc

SEQ ID NO: 25859 - DNA, 920 bp, Artificial sequence
  DNA replication origin
gccaggcgtacaccgagtgcctgcagctgtggacaccgtgactgtgggcgatgggtggggaggccgccgaccctcagcggtgtgcagctcggccttgtgcgtggataccgtgactgcaggccgtgggtggggaggccgccgaccctcagcggtgtgcagcttggccttgtgtgtggacaccgtgaccgcaggcggtgggcgaggaggcccccgaccctcagcggtgtgcagcttggccttgtgcgtggacaccgtgactgcaggcggtgggcggggaggccgccgaccctcagcggtgtgcagcttggccttgtgcgtggacaccgtgactgcaggcggtgggcggggaggccgccgaccctcagcggtgtgcagcttggccttgtgcgtggacaccgtgactgcaggcggtgggcggggaggccgccgaccctcagcggtgtgcagcttggccttgtgcgtggacaccgtgactgcaggcggtgggcggggaggctgccgaccctcagcggtgtgcagcttggccttgcgtggagatccagtgtctggtgttctcttgcactggtctctgtgcatctggtcctgtgcccactgctgccatctgcagacacacacatgggtcaggagctgccttcggcctcttgacagggagcccagagccttccagcctcctctgctctgtgctgtgctgtccacacctgctgtgcacctgcatcttttccctgctctctggggactccccgcttcctggtccacaccctcctcatcttgtgaggtgcctcctgcaatggctccctgggagagggaccttttccgagctgcgcccctctgaaggtggtccccctccctgccctgtgtctggtgggcgtggcgtgcccggccacatgtctgcctcccagcctgcgcccctgccgtcgcct

SEQ ID NO: 25860 - DNA, 1266 bp, Artificial sequence
  DNA replication origin
gcggcgcggcccgggcgcgcgcggcgaatctgcggctgcgaatcggctggagcggggcctcgcgagagcggcgaggcctgggcggctgggcctgggcgggcggcgcgggctgctccggaggctcgggtggcttgagagtcttgggaggctccgggcgctgcccgcgcggtcgccggcatgacgggccgcgtgtgccgcggttgcggcggcacggacatcgagctggacgcggcgcgcggggacgcggtgtgcaccgcctgcggctcagtgctggaggacaacatcatcgtgtccgaggtgcagttcgtggagagcagcggcggcggctcctcggccgtgggccagttcgtgtccctggacggtgagtcccgcgggctggcgctgcgcggatttctcggtgcggcttaggcgggctggaggcggtgacggcgcggccgggaccagcgcctcggtaccgcacgctctgtcggggcgcgcggttctgcgccgtctgggcgcgagtgtggatccccttggcgagaatgtagaccttcttcgcgcgcctgtggacccccgtggcgtgcgtggacttcctcgacacacgcgtgggccagggcagccagcacagggagggttgaagagagcctggggagcccagaaggcccctcaagctgcccctcactgtcactctctgtgcctgcagttttgttttcagcaatgtctggtacttagaatccgattgctgctgcccttggccttggtggttaccgggcggatgccctagggccactcaggctgctgcaggcctcggaggggacgtttcagtgatgggcagtattgcgggctggggatggaccccagcctgtggaaggagctggactgtggccagtttcaggtggttgtgaatagagctgctaaaaggattcatttgcagctctctgtgtgaacatacgttttcatttctctggggaacttagctgtatgtgtaactctatgggaaactgtcatgaactgttttgtgatgtggctgtgccattatgcattctcaccagttgccccacatcttcaccagcacttggtgttgtcgatgtttttatttcggttgttctaacaggtgtgtggcatctcatcatagtggtattctgtatttctctactggctagtgatgttcaaccttattagggtgcttatttgccatgcccgaatcctctttgttgaaatgtgtgctcaagtcttatttttttatttatctcgagacaggatctcactctgtggcccaggctggtg

SEQ ID NO: 25861 - DNA, 1091 bp, Artificial sequence
  DNA replication origin
ctaagggtggggcctcgcggtgagtgcagccggggacgggacccaaggctggcgacgggacccaaggctggcgacgcgacctaaggcagtgggcgggcccttggcgatgaacgcagtcggggactaaagctggacgcggggcagaggagggtcctcctcggatagtgagcgcggtctccagcggcgagcgaggcctggggtgaggactcagccggatgcggggctgagggtggggggcggggcctcccgtggagagacggcctgcgaagggaactggagctgtgggcgggggaagggggcggagcctgggtctggacccgaactgtgggcggggcttgaggcgagggggccgagcgtggtgggcggggccttggctcctgagggcgacctgggacccaaccccgggctctgggagtggtgggcggggccagggcagctgcgctggggggcctggccgcagaggtggagacacccgccaggggccaccctgccccgccctccgcatttgcggcgtccgccgctccgctcgcccaggttccagagcctccccgtgcgccccgctattctccgttttctgttcccctaaaattcccactttctagcagtcattcgtggccacctgtggttacccgtgagtcacctcgctgtgccccctgcccagagcgggaaccctggctgcgcacgccctcaaatatctgcaggtgctgttcacaatcgccatagggccggtgacatacccaggaatgagcctaaaaagaaatgcgtaaccaggcgtagtggctcacgcttgtaatcccagcactttgggaggccaaggcaggcggatcacgtaaggtgaggagttcgagaccagcctggccaacatggcgaaaccccgtctccactaaaaatacaaaaaaattagccaggcttggtggtgggcgcctgtaatcccagctactcgcgagtctgagacaggagaaccacttgaacctgagaggtggaggttgcagtgagctgagatcccgccattgcactccagcctgggtgacgggtgacaagagtgaaactctgtctcaaaaaaaaaaaagagaaaaaaggaaatgcggaag

SEQ ID NO: 25862 - DNA, 1040 bp, Artificial sequence
  DNA replication origin
gcttcctccggcggcgcctcacggggcgtccccgcccgccggtgcgcgagagcgcgcactcacgcgcctgcgcacagaccccgcccggggcgccccgccccgccccccgggagccgcgggcaagggccgggagagtcgtgggggtccaccgggtcccggccagcttcaggcgccgccccctaaggaaagctcatcgtcgccctggcgatgcccacctccccacgcgcggattccccggcctcgacactttcccgcctccaccccgccatgccccgagtctccccgcccccctgccctcgccgccccttgtctcctgccgacccccgctgggttggcccggctgtgcgggccccgcccgtccccgagcccctccctcgcgcccccctgcgtgggttccccgggacgcagggaggtggcaaggaggtggccgggcctggcggcggtcgcggggactcgaagccactcggggcgccaggctgccgagcttagcctccagggctccagatgaccccgggcgccctctttgcgtcccagcatccttattcagcgccgcttttcagcgttgtgctcaggacaatggagaacaaatgtctggggccaaggctggctcctggccctggggttaacagtgaacttggggacccaagcaaagaggaggcaatggctagagccgctggggcccgacgtgtaggctctggggctcagggagggtgcttcccccatctgtttggcagcggctgtggtccagcaccagatgccaagccgagatttaggaaacggttttctggcctctcttctgtttccttgtttcacagttagtttacagttgcttttctcttcgccctgtgtcttgtctacaagtagttttactgaaacaaatccagcccgagcaaattgacctggagctggtttctttcctggcccacggggcttgccaccccagtgccccgtcagctccttctgcaaaggccctcatgccgctgcttcctccgttgagagagctcagcctccagctgtaactcctgtatctagaactgcaa

SEQ ID NO: 25863 - DNA, 2053 bp, Artificial sequence
  DNA replication origin
ccagccccagctgcgtgcccaggtacgcgccgcccgccgcgctttgttcccgccgggcacctgctgggggtgtcctggccgcggcctctgcgcgccccatccccggcccgggtcccccagcggagcccaggtcgccccccgcgcccccgcccgccggttcgacgcgtgcagccgccgcccccccgcagctccggcaagcgcggccccagccccccaggtcccgagcaccgggggccgcgctcagcttccgaggacccggtgctgctcagacccggcgggaccttggggctcccgggcggcgctcacctggctcgccgcaaccgcacctgcacacctgcctcaatgcggtgccggccggggtgacgagggtgcttcctctctcgggtaccacacgcttcctttcgcgttcggcgacactgtcagacctcggcctgggagcgacccccggcgcacggggcgcgcaggactcggttgtatcctccgtccagcgcgcggtggagatgccctgtcctgcggggcggggtcgtcctcgcgggtacctggttggcgctgtctctcatttagaggcgtcgccaagccagtactgctatttgcgcctcccagttgatcttgccattgcggaagactggctgttctgcacttggtaggggggcgcccggtcgcccagcggtaacgattggacagggtttaccctccggccatagcccagccttccttggacttgcagcttccctgagtctcctgctcagtttgaaacttttgtaatttcttcgtgacttggtagttcctgctcaggaagctcccaggctaaggaggagagagacacgctctccggaaaagttctggttctagaatagacagcaggcgagaagaggaggcggttgggggtagtgagagttctccctggggagatgggagggtgagcggaccttccaggcactggaagtggccagtatgcctggaggggaccccacgtggcattgagttgttccacccctagtcagctgcaggtgggcctctccgtgctttcctgtggctcccacagcctgcatctctgagcgtggtgttggagttgcagagccgctggacagtggggcttgccctcctggagcgcagggttgggacctcggggctttggttttgctgagtggacaggaaggatgcccacccggcacgactcttgcacctggcggggcctcccgaaggacccagtgtccatatgagacctaagggtcagcatttgcccaaggtctggggccgagcactgcagatgtgcctgcttgcctctcttctgggaagtctctggggcctcaaagccaaagccaggagcatctccccaggcctggctgcttctccattccaggtcttggcgattgccccaatgtcaggtcccacagccccacagcccttctcctgtctgcccctctgagtcactgcctcacccacagccccagaaccttcatgcgggctgttggcgctcccctgctccagcactgcagcacatagcctgcccttgctgaacctctgcagcagcttcctggggccctccgaatgagcagcaaagtctttaacccaagggaggtgggggcgtgtggcaggaggggccgggggccttatcagcccccctgtggagctgtgctctattctccaggggtctagaaagcccactctggtgtctgtggggagggtatgggtagggcgggtttcgagaagcctggttaggacaggcgggggtagatgggggcacctgggctgggtagcactaagtgctggggggggtcccgagctctggcctggacagggttgggaggaagggtaggcaggaggacaggatttgttctgttggtgtggagttaatgggcggaggagttaatgggcggaggggcgagtggcgcagctgaccaggtgggcagatgcagtttgttcgtaggacatgctcagcctcataatgagctcctgcccttacctgtcctggaacagggcccctcataggcgggcttgcccctagctttgctttgtgcttgtgccgcctgtccgtgcatcctcggacagt

SEQ ID NO: 25864 - DNA, 1849 bp, Artificial sequence
  DNA replication origin
tgggcagccctgccatgggccacaggctgtgaccctcagtgagaagggtgacaggccgggccggttgccagccctgggtctgtgtggacctttgggctgctttgccaaaacctcccacctcctccctccccaatggcccacggggcaaaggctgaagagtgggcctgcaagaaggtgtcccaggttttggcactttcagtgctcagctttcccaagtggccaccgcaagcccaacgggtcccaggaacatccccagactgcatgtcactgggacccagcaaagccaggtgacacaagccagcaccccagggagcagccagaaccttctgccgagacactgtgcccccagcaggacaggacggccagggactggcttccaggagggtctgtccagcaccccaggactggccggcctgtgctgcaggcagctaacacagcagtggcgccatgggaacgcctgcaacggggcagcttcccagtgtagtgtccccgcctggggcaggccaggggagggcagaaccagcacctgctctgcacagggcacggctgtgggcaggaggatgactccagctgtcaggtgaagagagggaaccaggagcacatgcagcaggagggggtggggactggtagggaacagggccagggtgtgtgtgcacacgcgtgcatgggtgtgtgtgtgcacgtgtatgtgcctgagtgggtatgcgtctctctctctcacacccacgccagttggtctacatgggcccaggctcggtctgcatccacccccaggggcccagcacacgtcccacagagaggagaaaccacgacgcagcccacaggagcggagcctggggagggggcagagcacagattgggcacccccacaaaaaagtggggggacgatggcggtgggggcatgagactgtctcagatttcttctctgccccacatcaagaggatgcacttaggaccaacttcttgtttaggaatcaaggctgctcccctccagggagtttcaggaaggtgtctgtaacctactggcccctgggggcaggagagggaccagaggatggaactgctgtcctgcgggggactcagacctcagaatccacctcctgggctccaggtcttggaccgcccacgagaggaccaggcagaggccccgcagagaagccatgcagtgcccgaggagggagctcccacttgggaagaagtgggtcagacaccaaaccttcccaactcagccccaggcaccgagccccaccattgcctgtgccctcagctgtcacaggctcaggggaggatcagcacagcttcccatgggggttttcacaatcccaactgcttcctgtgtggcctcagtcctggaggtggtcggccacacaggcacaccctgaacacagccgagggggccacctgctcctctcactccccactgatatcacgggcaccaggcaaaacccccgtgctccgtgttgtgggtctgggactagccagcaacatttctcaacacagcccacagaggggaggaccactgtgcttcccagcgccagtgaggggctgggaggggctccccatggaaggagaagcaggcacagaggcacaggcagccccacggcaaggcacaggacagtgactgagcagcttccacccaaggaaggagatgcaatgtctgactgaggattcttccaaaacaagaagagagatgctcatattcagtaagtcccaaggaggatcaaaagcaatgttgataacaaatccgcaccaaatcaaaataaaaacgctaaaagcaaccacagatcacacatgtgtcccacaaggaacaaggagcaggctgatcgcagactcctcaaaaccacaacag

SEQ ID NO: 25865 - DNA, 1870 bp, Artificial sequence
  DNA replication origin
tcctggaagccagtccctggccgtcctgtcctgctgggggcacagtgtctcggcagaaggttctggctgctccctggggtgctggcttgtgtcacctggctttgctgggtcccagtgacatgcagtctggggatgttcctgggacccgttgggcttgcggtggccacttgggaaagctgagcactgaaagtgccaaaacctgggacaccttcttgcaggcccactcttcagcctttgccccgtgggccattggggagggaggaggtgggaggttttggcaaagcagcccaaaggtccacacagacccagggctggcaaccggcccggcctgtcacccttctcactgagggtcacagcctgtggcccatggcagggctgcccaggacaggggcttggccccggaggcctgcagtgtgaggcgtggcccacaggccttcccagagggggttctgggagcctcccccagctgtcacacgcacctgcctgtgcctcacccgggctaaaatagcccctgcacagaaacgcccttgctgggcagggcccattcctgctgggagacacctgtcagggcccttcctgcctggggccatatggagtgtccagcctgggggtggtcgtggggtgtcgggggcctgggcctggatccacgatgccctgtctggtctagagcctggcctggcttccccttggcgtgactgcccacaggcagtggccgccgtctgctcagctgcatcctcctgcgttgggctcatctgtctgccttcccctgacacctcctcctgccagactccagggccaagggagtgggccccggctgcagaggcagtgccagctagctgagtgggtcaggccacagaccccacctgactccagggcagcgtggccaggagagcattggaaggagagagctgttcccaccttgaggctgacgcagaccagacctggctctgtcctgagcagcagaaagtatgtgcagggcttcaccctcttccctctgtctgtgtagagctccacctgaggcccagtgtgtgcgtagagtcccacctgaggcccagtgtctacgtagagctccacctgaggcccaatatgtgcgtagagctccacctgagggccagtgcctacgtagagctccacctgagggccagtatgtgcgtagagctccacctgaggcccagtgtctacatagagctccacctgagggtccagtgtgtgggtagagctccacctgagggccagtgtctgtgtagagctccacctgagggccagtgtgtgcttggtgcccacagctgagttagcccaggctcgtggtcatgctcacaggtgcacgtggccacacaagtcactgagcacagacccagatgggatgcagctcataacgtgcactgcgggggggagctgtggcatcttttcccagagcccctctggtctggcagcctcgggagtgtgtgcatggtatgggaggtgggaacagagctgggaggggctcccctccatggggtggggttcccctccagctgttggtgaggcacactgtacacctgcacacctgtgcctgggactgttgggctggacgtgtaggaacatggaatggcccctgggccttcgggtgactgagacagaagtacaggcccagcaggtctgaggacagggcctcctgatgactggacccagcctggacaatggccggcagctcccagccttgccacaggctgactggaatgcgtggtgtggtggagcccagcactgagggccggacgtgtgtttgcagcattgttctcacagccacctcggaggcttccctgctctggggcagatgccgttgctggagccgtggtgctcccagaggcaccctgggctcagctcagccccc

SEQ ID NO: 25866 - DNA, 1574 bp, Artificial sequence
  DNA replication origin
gtgcaggcacctggagcctggggatggcagggcgtgggctgagcatgtggagcaccagcctgtgacattcctctgcccaggggcagcagggcacggagcgtgtgtggccagctgccgccacaggcccccagctcccacgcgggcaggctcgcgaccgcaccaagggggcagctcctggagacaaaagctcctcagttttcccttccaacaaaacacagtcagcaggtttgggaccagctgcctggggtcttaaccatctgtgctctgtgcgcgcccccacccccttgcctgcctggaggaaagtggtggggttgacatgcgcctcgagggccagccgggcgctggtgcatttctcagaaatccgtgaagtgctcccttgtcctgctcgtgttctgtgctgtccttgggagtggcgcggccgcttgccagggctgcagagttggccacgcagcctctccaggaggccttgagccaagcacaggatgcagcccagcagtggtggcaccgtggagtggctgggcggaagagatcctggtccacgctgctgtctggagggcagggtcctcaggtgaccagagtccgtgcaggagcgagtgaggacagggctggggcaggcggcaggatgaggccgcccagagcaactcagtgagtgaatgagtgaaagcacgcacgccccatgctccagcggggccagagtgtgctgttgggtgagtctggccttccttcctggggttgtgggccctacttgtgggaggccactgtggggagggcgtccttgtagaagtgttaatcagagtgaaagccagtccctgtgcactgctgctgggaatgtagcatggtgcagctgttgcggggaacaggacggcagcccctcgggaaatgagacagagttaccgtcagagttactgtgtgagctagcagttgcacttctcagtagaacccgggagcactgacgcagggcctccaggggagatctccaccctgtgttcacagcagccttactcacggtgactgcgtgatggacgcagcctgtatccatcctcggacaaacaagtcagcaccatgtggccctccgcaccacccagcatcactgggccctcggtcagcaccgcgtggccctccacactgtggaatattacttagccctgaaaaggaaggaaatggacacaggctgcaacgtggatggaacttgagtatattgtgctgagtggaataagccagtcacaggaggacatgcactgtatgatcccatttgtgtcaggtccctagagtcattgcattcatagggacggaggtaggatggtgcagcctggtgatgccaggggccggggaaggtgggaatggggagttggggttgaatgggtagtttcagttgcgcaaggtgaagagagttctcgggatggatggcggtgagggctgcacaacagcatccacgcacgtagtgccactgacctgcacactgaaaaatggttcaaacggcaagttttacgttatatttaccacaataaaaaagagaaatagacatcgtcaagctgttctccaaaataaggctgtcaccgtttaccttcctacca

SEQ ID NO: 25867 - DNA, 816 bp, Artificial sequence
  DNA replication origin
ggccgtactcgggctccatgagacgtccatggcggactctggtcctccccttgtgctggggcctcacgtgcagcgtggcaagaggcagcgcggctctcctcggccagccctcctgtcccctctcctctccccagctgcccctgcgttgtggtctggactctccctgctcctccccttgacccttcagagatgtttccctgcaaatgtgctctgcgtcgggtccctcttagcattcccccctcagaggacctgcagggacccagctgtgtcgggaaaaggacagtgtgtgccaccagccagtgaggcgaaggtgcacgccagagaaggctgaggggcaggtggggctgcggggccaggctggctgcttcccccacagggggcctgggcggagaggacaccccaagagaagcagatgaggagctggggtgatcaagggaggccaagggccacgtggctgctgagctggggtgggcagggagggcatgggcagccagtccatgcgctacacagaggggctggagaggtggggctctgaggggccctggggccaagctctcggtcaagacacaggctggggcaggaccagagacaggcagaggaaggaatggggccaaggaacagggtcagtgtggggtggggccccatgccagaggttagaggtcaacagcaccagactcagaagtcagtgaggggtcgactcttgccttcatgcctttctgcattgctctgaagacccaatgagaccctgacccctgccccccaagccaagaggtccagacacagcctcacggcctggtggcaatggcccacagagag

SEQ ID NO: 25868 - DNA, 881 bp, Artificial sequence
  DNA replication origin
cgtctccccaggggacagtgatgagggggcccgtcaccccaggggacagtgatgaggggtgcccgtctccccaggggacactgatgaggggggcccatctccccaggggacagtgatgagggggcccgtcaccccaggggacagtgatgaggcgtgcccgtctccccaggggacactgatgggggggcccgtctccccaggggacagtgatgggggggcccgtctccccagggaacagtgatggggagggcctgtctccccagggtacagtgatgggggtgcccgtcaccccaggggatagtgatgggggggcccgtcaccccaggggacagggatgacggggcccgtcgccccaggggacggtgatgaggggtgcccgtctccccaggggacggtgatgaggcgtgcccgtctccccaggggacactgatgaggggggcccatcaccccaggggacagtgatgaggggggcccgtctccccaggggacagtgatgaggggggcccgtctccccaggggacagtgatgagggtgtcgtcaccactggtgaaagactcacctgcaaggagaaggtcagggccaggtctgtctccacttgtccactggggggcagcacaatctcatgggaccgcaggattcgtttggagccctgtgattaagcaagacctgttctagctcaaaggactgcatatcagcaggaaaccaggcaaagacaccgtgactcctgcactctaaaactggcaggattgcagccctgcagtctgggggtggtaggcacaggctggggtaattctcagaggtgccctggcatctttcccaagaaccttaaaaacatggagacccttcggcccacaggttccacctccaggaatctgccctaa

SEQ ID NO: 25869 - DNA, 1382 bp, Artificial sequence
  DNA replication origin
ctccccacagcctggaggtcctgggcaggtgccccccacatcctctcccaccacactctcagccctggcctcgagtccgcccaacagcccgcctcaccccaccctgtgccctcaaggacccttccccaccgccgagcactactctcaaatgcatggcgccagcctcaccgacaccccactctcacgacagtccctatggcagcacccatgccctcacccccgtctcaggcgtgcagtctcggagccagcaagcccccatggcacagctgcctgagcccagctggtgagagccccccacctctgccacctgtgtccgtctgtgccctcggggctgtcccgcctccgcaatctcccgtgctcatactctcaacaagccagcaacgctcacaggtgggaaccagccccaaaaggtggcaggacacagggagcccatgaaccgccctggtgctcggggacacatgggaggacccaactaggttctgggaccaggctgccagtggaaggtggaaggatgccccgagggcctggaggagatgctggaggggagagcgaggagcagtcagatgacctcggctttggaagccacaggtgcagggcgagggagccttggggtgggggccacaggctcaggggcagggcactggaactacatccaggggtggggcttttctgccaagagtgaagaacagatgatgggatttcaagcagcagacgatgtggctggtgtgacctggggtgggggaaggttgctccagcctctccccggggatcaggaggggacagcccaaggctgggaggacaggtgagggaggggcctgggagcagaggccagcattcagggcaaggacgtcaaacacagaagcaccagtgctgagaggggctgggaggagccgcctggggcactggggtgcagactgagagatgtgggcggagcagcctggggcaggagctcacagggaccggcagggatcagcaggacatcacctgcatggctacacagggaccagcagggatcagcaggacatcgcctgcatggctaatgggaaacacagggaccggcagggatcagcaggacatcgcctgcatggctaatgggaaacacagggaccagcagggatcagcaggacatcgcctgaatggctaatgggaaacacagggaccggcagggatcagcaggacatcgcctgcatggctaatgggaaacacagggaccggcagggatcagcaggacctcgcctgcatggctaatgggaaacacagggaccggcagggatcagcaggacctcgcctgcatggctaatgggaaacacagggaccggcagggatcagcaggacctcgcctgcatggctaatgggaaacagagcctgcatgacctccccac

SEQ ID NO: 25870 - DNA, 1238 bp, Artificial sequence
  DNA replication origin
actgctccggcctccacggcccctcctgccagctggcatttcagcctggatttgcaccgactgggtctcccccgcctgaggagtaggggaggccctggtgaccccactggggtggcggcagctgtggcacctgcccatggcgggccctgcacccagaccagcaagggcatcacagtgcgaccccacacctcctttttgaggacactcaggactcaggcctcttgaccaaggagctgcagccacgggggcagaacagggacctgtggcagcccggaccctacaacagcgcgcacctctgctgtggcttccagacaggagagcaactgacacgtgctccggacccccaactccttaagccaggctggacagtttctgccacccgatgtgccatggctggaaggcagggcctccccacagcaggggcaggagcgggctggcaccacactcacccgtggacttggccttggggccggcctgcatggtgctgtcttcgtggtcaatgggctggctggacagggaggcgatccagatctcggccgccttgacgggggcctccttgatgctgctgcagaggctcagcacctggccaccttcagacgggtgttgcatcacctgcaggccaggggcacggttctagaaagcagcacgacgggaaggagccccggtgccctgatgtgtgggctggggtttctgaagggctttctctctcagtgacagcaagggggaccctcagcagggcagccacagggcagggagcatccagtggacaggaaacgtggccactggggagaggggacagatacgagaggaggacacaggagccaggcggacagacgagaggaacacgtgggagctttcacgaacgggccataagcagagggcactgggctgtgctggagaggccagtgccaggcacagtcacgagggactgagatggacagacaggggtgtccgcggccctcctgatctcaggcacgactgctgtccatgcagtgccacccaggaagatcctggccccctgctccaaccctgcctccaccctccacccacccaagagctcagcagcagcaaagcagtgtgtgaagccggctgcccaacccacaggagccaatgcccagggaccagtgtctgtgggggaccaaggaggagcccagcactctcagccaggccggaatctccagcagcaggagacacccaccaggcctggctcacaggccaggtccagctcctctgttgtg

SEQ ID NO: 25871 - DNA, 796 bp, Artificial sequence
  DNA replication origin
cctctgtcctgcatggatccacctcctcgctgcccccactctgtgtccagggaagcctgggggtggtcactgcctggtttcccgggtggaatctcacggcaccctcccttctgtctgttcattccgcagataactactccgaggaggagtatgagagcttctcctccgagcaggaggccagtgacgacgccgtgcaggggcaggtgacctggggccggggctccgcgccctctcctggctcacaccgggtgtcctggggtctgtggggtcctcaccagctgtcaccagggcctcgtgagggtgggtgagccacgggcctggcccctggttggccgcccatctctcgtctcccgaccccaggggcccgagtttatgctcaggtggctctgagagtcttgggacacaggtgggctctcagtgccgggcctctcccatcgcccacgctgaggctggcagggtcctgccagcactatgcaggctgccgtggcctcagccactgcatatgtctctgcaggacttggacgaggacgactttgacgtggggaagccgaagaagcagcggagatcgattgtaagaacgacgtccatgaccagggttggtggagactgcttctatgaatgctggggaaggcgagggtcggggaggacgctgggagcctgggcgtgggggggacacgggcgtgggaagtgagatctcaccccaggtcacagcagcatgtcccgtggcagaccccctgattgccagtctcctgccgggtgccactgtctcccctgcctcgccacatctcctggcttt

SEQ ID NO: 25872 - DNA, 889 bp, Artificial sequence
  DNA replication origin
gcaatgtgggctgctgcagggaactcacgcgtgcctggcacccgtgcaggtcctggactcggagcaggaccctgcggagcacatccccgaggcagaggaggacctggacctcctgtatgacaccctggacatggagcaccccagcgacagcggccccgacatggaggatgacgacagcgtcctcagcacccccaagccgaagctgcggtgagccctacagggcggggcggggaggaacagccatttcagatgccccggccactctgcgaccactctggcagacccatgtccagccctggagacggggtgggcagggccagctgcctcgaagcctgggaaggctctggtggctggaaggaggggtgtgcggctgcctggcaggcccaggctacggctgcactgagccaggcagctttcctttcataggccagggggtgcaagctctgggctggggaggaccgagaggggtcccccagggtgctggctgggctgggtgtggcaccccgttgtaggggatccgtctctgggggatgccctgggaactgcaggggacctccgttcactcaggtggggagtagagctcccatgctgggtgcccctccctgaggaggaggaggcagaggcaggtggggagggggagggcaggtgtctctgtggctggatgggaggaggggctggctggggtggcctggcctgggcaggaggagaggatgcagggcaggcagctctgtgcatgggtctgggtatggaggcctcggtcagctgggggcaggaaggcaagcacaccaggcagaaggcaggtgccagcctctgggcagctgctgaggagccagaggccccagtcagagtcaggaagcttggtagaccttttgctctcacacttttttaa

SEQ ID NO: 25873 - DNA, 813 bp, Artificial sequence
  DNA replication origin
ctcagtagctgagaccaatggcgtgcgccaccacacccagctaatttttatatttttgtagagacagggtctccctatgtttcccaggctggtctcgaactgagctcaagcgaaccacctgccttggccacccaaagtgctgacactacaggtgtgagccagtgcacctggcctcctgtcaaatttttttcacttgaaaggtcttttaagtcttattgaatctgtaggtctcccttcctcctttttcttcgtacatattatatcaaccagggatgagacattcggcctggatggcctggatcggccagatggtctgcaagggtctggtttgtctggaaaggcatgggtggcctggatcagcctggatcagcctgggtggtctggaaaggcatggatggcctggatctgcctgagtggtccggaaaggcatgggtggcctggatcagcctggatcagcctgggtggtccggaaaggcatggatggtctggataggcctggatggtcgggaagggcctgggtggtccggaaaggcatggatggcctggatctgcctgagtggtctggaaaggcctggatggtctggatttgcctgagtggtctggaaaggcatgggtggcctgcatcagtgtggatagtgtggaaaggcctgggtggtccggaaaggcctggatagtctggataggcctggatggtttggaaggacctggatgggcctgggtggtctgatctgcctggtgggtccggaagggcctgcttcatctgatgtgcccttgttgttttgtcgagcatgttcacctgtttgctgcaggctg

SEQ ID NO: 25874 - DNA, 845 bp, Artificial sequence
  DNA replication origin
gtggatggcacccaggaacgcctggttcccccctgctgcgttgcatggggtctcctcagttaggaggtcctgggcccagggcaagtcaggtcctgggaggttgggggctggtcaccctgcatggcccggatgggagccctgtgcttggaatttggctcagctaggctccctggtcagcgtatggccgggtccacatgtaggagccacggcctagagaggcctaaaccctcacccgagccagaggccacagggctggagaggccgcagcacgggtgtggtttccacgggaggctccaggcccgtctctgctcagcagggtgtgccaggcccgagggagcaccctggacagcctgaggacagccccgaggctgaggcctccaccctggatgtgttcacggagaggctgccgcccagcgggaggatcaccaagacagagtcccttgtcatcccctccaccaggtgatgggggctgcacggcggggcggggcggtgatgcacctgtcgggggaggggccgtcacgggcatcagtcggggtgggtgcgtgtcagtccatcctgatgagctccctcgggtgtagacagcagattcagggcctcgtccttcttaaaaaggagaagcaaaccccctggcccggcattgggtgtcaagcctgcagccccagattccaccctacctgtttgagggcagggtcaggcgggtctgccctccagcaggtgcccccacatccccctgagtagcccctgcctcagccaaaagacacacatacaccagcttgattcttccaggatttcaatttcatgtttctgtgatatttgggactttttccaaagcagcgagtctgggc

SEQ ID NO: 25875 - DNA, 749 bp, Artificial sequence
  DNA replication origin
cagctgcaggtgggggtggagggcgtggcacgcccaggaggcagggctcgtggtcaccctggcaccaaccagagcagggcaaaaagagaagcacagggggccaagggtgctgggccacagagcatgcctgggctttggagggctcctgctacacagcagggcgggcgggccatgggttggtttgtcaggaagaccatgtggaccccagggcaagttctagtccttctgctgccctccctggtccagggcagcctcattgcttggctgatttagcccagggcagttctccaagctggccagctctcttcctgccaccgagcctctgtggctgcagggggagcaggggcactgcaggcaccagggctggcgtggtggggatgggcgctgtgcttctcttctgggtgtggacagggctctgtgcctccagatccccaggaagactgtgtatgaccagctcaaccacatcctcatctccgatgaccagcttcccgaaaacatcatccttgtcaacacctcggactggcaggggcaggtagaggggcagtctcttggagtggagggtcagggtgtaggacagaggagagtgggttcctgaagctgccccctacccggcacacctgggtgctggagctgctggctgtggtttgcctggacgtgcctggggtctctggagcccctgagagctttggtgagggtcaggtgctgggggtggcctgggcggctgtgccgaagtcagcgtctgcctgtct

SEQ ID NO: 25876 - DNA, 909 bp, Artificial sequence
  DNA replication origin
cctgggcacagcatctggggaaaccggggccccttcctcccgccgtggcgtgggctgtggacgcgcccgggcctcacccgcactctgggcctccagcttgttgaacaggtctctccaggccaggtcctggaagaagttgttgtagcggtagtccacggagcctaggtacctggccacggggtgggagcctgcatgccaggggtggggctggtgtcaccacgggggactcggagctgcaaggctcccaccgcggcacaaaagctgggccacccgaccccaggcctgtgctgctgccttccagacaagcccactttcctgccaccgaaagagaaagccaccactgcccctccctggtggatgcctgtggccccgctgaaggagctccagccctgagctgaggtcccagagccctgagtgccactgaggaaggcccagcagggcacatgtgaccgtgcagaggcctcggctggctcagggctctgacgtcggcatcgtgagggccacacgggagaggtgtcgcctccaggccttgctgctggtcaacagattaaggctgggtgggtttgtttcgtggtaagacacatcgtatggacctaaagaagtaatggagttcgacgacacaggacctggacgatttgagaggattaataacgagccctgctttgcacttctgactttggaaatcgaaactggcatagagttatcacagcgactgatggaggagacacccagctcaggccccttcagagggcgatggctttatcttgacccaaatggctgttttagggcaatcaagttatcttgcatataattaaaattaacaaagtgttactgtatcaaacaaacatttaaaaacaacaaatgtgtagcaagcagggacaccacgccatgccacaccgcgccacacca

SEQ ID NO: 25877 - DNA, 861 bp, Artificial sequence
  DNA replication origin
ccttccaggaccccaggcagccagtgtcacccttataacgtggaggcagccagtgtcacccctgcaacacggaggcaggggcaggaggtgcagggtgggagtgggtgtaaggccccctaaggccctggcttgctgcttggaagagctgacctgggagatacaagcagctgcgtccacggcctgcggcggccgggcggccagaacatgctgcaggctcctcgtgccacagccagggggcaagggcggaggctgctgggggtcagcaggggaggcccccacggctggtctttcacctgtgaaggcttgtttagcaggacaagacataggatgttcagcccccttcctgtgtcttcccagcgcccagccctacagctgtgggtggtcccaggctgcccacttcgagcagctcctaggccagcaagggggccccagggacccaactaccctgcactgaggtcagggggttgggggggtttcctaggacagcaaatgacctcacacagggcagaagacacggggtagagaacgagcccatgggaggaccagcaggggcccccaccctgcagcaggacacacctggccaaggaaaaggggtggctctgtctgaaagggcagctttgggggtgcctgggacttggctctgaacatgaaaggttgtagggggtggagctgcctcggaatgaaaactctttacccccatttggaggtctcggtagtttggccccgtctccaggtaagccacaagatgctggaaacccctctctgctggccccaggtgctcgagggagccctgggagccaggctctgcagtgtgtagggggcccaaggcacagccgctgaccaccgtgtcaccaggccagc

SEQ ID NO: 25878 - DNA, 2010 bp, Artificial sequence
  DNA replication origin
aacggcggtcggaggtggggggtacgtgggcacccggagacagaaggagggacagacccgccgcggatggagaggccacagggggccgctggagtacaccgcggcttgagggggcccaaggggccggcgcctcgctccagaacgtccgctacggcaagccccgcccccaccggttccgcttccggtctgcgccgcgcctgcgttctgggctccgttgcggcgggtgggggatgggcgcggtctgggggtccccggcgcatatccgggtctatggccgctaccgccccacgggcccttccgggcgtcggcctccggggtctcccgaagcacagacctgaacttggggtttgtcggccagagcccctttcggccctgcgcccttcaagcggcgcgatgccgctgagccccgggccacctccgcgcgcgcggggccgcagggctggggcggggcgacccaggacggggcgcgcgggcgggagggaggcgctgctccgccgcgtgctcccaaggggtggacggccgagagaatcacactgcaggcgggggccggcccctccaggtttattagtgttgcatcagcaccttgaaatagtccacacggtcacatacgtgacattagaatccgttccccaaaaagctatttacattaatccagggtttcattaaaaaaaactagcaacacatacatcctagaaaccaaacaatgcacaatgaaccgcatgggggtctgcagaaactacagtggtgcttctttggcccacagggtcagattccagaggtgcccagcaagcccagctctcagtcccctacaggccacacacccgcggacggcaggacaggtctcggggagggggcggcctggccctcggaagaagtggcctggtcattttcatgaggaattcattcccggaggaaggcgagaggcactcaggtctttccatctgggaatgaggacagtgtggcaaggctgccagtaccctgcagagacacccccagctctcacccagaggcccctctcctgccccagctctggccgaggcactgaaccaggacactggcttgcatgcccagagacagtggccaaggggaccaacatggaagaggaaggcagcagaccagattgcagggcgggactggcccacagctggcctgggtgagggtggggtctgtctacgtaatagtggacagtggccaccaggcctgaggggtgcctcggtggtgactggtggcttaacctttgagactgatggggctgagccctagctctacaaggggctgcctcctgtcctgtgaggccagtccagggccaggttctcggggggtgtgcacacctcacacacacatcccccgcccttaccgcactggctgtcagatggctttggtttctagttgtccttggtgggacagagtgctcctccatgcaccctcagaacagctctgtgaggtaggcagggaaaatgcgaccatcctgtgtaaccagtgggaaaaccgaggcacagagggctggcatggcccaggtcttgtctgcccaacctccctggtgctgggcatggtgtgggggatggaccgtggggctcctgggtgcagggcagacccacagcccagcagcagcaggggcacagggagtgccaccagaacccccagctgctggatggagactctgcccatgttctccccttgcgtggctaaggatggagctgtgcagccagatgggaggtacggggtaggcaggagggctccaggaaaggggctgcccacagccaggatgcactaggcagcctgtggccccttcctctaaaacctgctctgaggccagaaagccacagcaaggatgtttccaccttcatctccctactgagtgtgacccttgggaaagaaacaggaagagcaggcaggacgcggtgactcacgcctgtaatcccagcactttgggaggccgaggcgggtggatcacttgaggtcaggagttcaagaccagcctggccaacatggcaaaaccccatctctact

SEQ ID NO: 25879 - DNA, 2531 bp, Artificial sequence
  DNA replication origin
gagaccccggaggccgacgcccggaagggcccgtggggcggtagcggccatagacccggatatgcgccggggacccccagaccgcgcccatcccccacccgccgcaacggagcccagaacgcaggcgcggcgcagaccggaagcggaaccggtgggggcggggcttgccgtagcggacgttctggagcgaggcgccggccccttgggccccctcaagccgcggtgtactccagcggccccctgtggcctctccatccgcggcgggtctgtccctccttctgtctccgggtgcccacgtaccccccacctccgaccgccgttcccgtgtaccccgcccccccgccgaaccccagagtgcccacggcctccagcgtgtgtcctgagccttcttcccccgtccctccgcggaccccggccgcgcagaccccgcctccccaccggagagggcgggcacgtaagggctccgggctgggcctggggcgaggcctgggccgcgtggaggggaggtctcagggtcggaagcggggctgtggcaagagctctgggcctttccttcgccccgggcgtagcaaggccgggccctgagagcgtgcccgcagtgctggctgagggctgatgcccctggaacgtttgagaaggctggcagaggcgtggagtccgtgcagcaggctgccgaaggctttccaggctcccggggtggggtcggcaggggcagagaggacagttcgggaggctggtgtggagaagagctgcggcgggagctgggggatccactccacccagaggggtcagtgatgcctgacctttggctggaaggtgaccctagcagaccgcgatactgccaccatctgcccccagggactcaggtattggtgggcacgtgggtggccttgtgggccccgccccacctccccctgctcctacccccagatctcagaggtgtggacaagcagcctactagggctagagatggacagcaggaaactgtccccccgggggaagaagctggagtcgcacctctcccaagagcacaggcggcccccactgggcctgatagcagcctggggccagcccagtatccagagcagcgttcagcagggactgcagactcaggactgggtaagcggaaggaaaccctggccgaggctactctcctgtccccagcccgcctgaggccgctgtctctgaaaactccaggctggtcgtgatgagcagcctcaggggagggctgagtggggactgatgagaaacagatggctggactcaggaggctctcttccccatggccctggacgagcaccaaggtggacctgcacccttcttgcttccagaaccgtgggccgctgggctctgtagagaggtcttccaaggccaggaaggaggcaaggcaacacacttcccttagctctccccagtgcctcccaccccaggctgaaggtggcaagaagcgggagggaaagcaaggtccccagggggggtggtgtcctcccaaccaggtggggcagctgtcaggagaaggatttgtcactgaaagttgaccaaaacaaaatagtgggagaggctctgctgtgattccccaaactggaagcatctcctggtctctctactgctggacagtgagctacaggcttgtgtcaggcccagtagtgagaatggtgggatatagctgttcagccttaggacgttctctgagggcagaggaagccagaaccccactcgtgtggttccacttttggaaggttcaaagccaggctgagagatggctctaggctgtggcgagatgggtgcaggggctcctgggcactggcaatgctttggcagctggcgctggtcatgcggccagttcagtgtggggagctcattgagccatgcacacaggcgtgtctgcgtgtgttcccagggctgcccgctgaggcccctttgtaccctctcagtcatgtccttcaggcccaaatgctttcaaaacccctatgatggtgtcaggtgctggggagtggggtgaccaaaccagcagatgcagtggcttttgggaggcgaacatctcatgacaggcaatccggactataaatacacataggtcacctgtctagtgagggccgctcaggaggagggccagggggtgtgaggcttctgtcctgcacagggctggggacagggcactatgtctgaaggggtagggatgtggatgcaggaggagtgtgtattggacccatatccagcaaggacacagggacccagtggctcttgggcaggggcagccaggctgtatttgtagttccaagagatggactggtggctatgggtaatggtggttgaggacaaggctgggaggcagaagagtgggctgaaggcctccaagggcaggcgagcagtgggagaattaggttgttggccaagggtggaaagaggtatgggtgcatctctgctgacgggcaggtttttagtttggggacagggaatcttccctaaaaaatgtgggtgcccagatgactttataggtgggcactcccaaacaagaaattagtcatcct

SEQ ID NO: 25880 - DNA, 1970 bp, Artificial sequence
  DNA replication origin
tgcagatggtagcccagctggtgtcggaggacgtggacaaggacgtgctccttccccacccgctgaggtccaccgagtccaccaacgccttccaggccttcctggcgcgcagtgcgcctttctggcataatgcgactttcgaggcctcgaggtcacccccttcctaagagccccattcagcccattgtctgtcttccagtgcctttccttgggggcccacggtgggggcagcctctgcgccttctttgtgccccaccagggggtcaccacccacccatgttaggaaaacaggccaggcaggacctggctccggacagcctgcagctgctgaggccttggagaccgggctaggggctatgggaggccatctaggggaggggaacactgccccgggtcagtctgagagggccctggcaaggcctgggtagcaggagcttgccctcggggccgctgggaggaggcctggggtacctgggcctgcctgaggtgcactggtgtcctgggaagccccagtggcaggcgctgcctggagactcagctccttggctggcctggtctggggaactgggtatctgcctgcaccaggctgtgagatgggccaggcagagttctccagggggcggggtctcacattgggtcctgcctctgaagacccagaagggcacacgggaccccaggggtgctgtggtggggagcagcaagcccagggacccaatgcagtgcccagcacagagggaggctgtctggaggcagagatgcctcctggcctctggacagcgatgctggtggtggacgagggccaagagggtatcctgcgcagggggtctgagcaactgtgaggagctggctgccgcaggggcctgtgggacatggtccactgggtgactgcctcgtttccaggctgcagggccctcggaagggtgctgagccggggtaacgtgtcccagctgcattttggggacactaagttgcagggggactggattgggaggcggggcaggagagctgtgagcatgggttcccagcccggggtgggtgggggtggggaaagggccctgaactctgtgactgactgttaggggcctgactgggcttctgtggaggtggctaggtggaggaggctttggggcaagcggaggtgatcactcctgggctccaggtgagggcaggagctggacctgtgcggtggcctggaccaccagatacactacatgctggctgtgctgcccacctggcctgtaaccctccccttcccgctgctgagaagccacctgactgcactgccagccacctgctgccctgacacaggatccctggcccgagttgaatcctctgcacctgcctgtctccccttcttactgtaagactcagtgaagttccctcctccttcaggaagccttccaagattacacagccaggtgctccccttctctcccaagtcctctgaatgtcatttggtgcaccctagggatcctctgcatttctcaggagccctagggtaggtggatggagggcagatcctccaggggctagggcaggtgtccttaagggtgtggggagttttgggcagggcactgtccttaagggtgtggggagttttgggtcatgacccaccccctctgaggcccctgatgatgatgtggggaatgggatcctatgggcccagctgcatgccaggcaggcatccccaggtgtaaacagggcagagcggagctgacaggtaagcagttgccatgggggtgatgagctgggcagtcctctgttgctgagtggctttaaagaaccactcgttgttctgtgacttgggggttggctgggctcatcctgccagctctcctgctctcgtttgagtgtctcctgaggctgcagtcagagcgtggtggtccaggatgctggtgatgctgggatggttgccctctctgctccatgaggtctccctacagagcacctcccccatggtggcagcagag

SEQ ID NO: 25881 - DNA, 2470 bp, Artificial sequence
  DNA replication origin
agccgggggccgcgagggcgggcggggggcgcggggcctgcggggcagaggggcgggggaggcggcagcggcggcgggtgggggctgcgggcgggtcggggccgggcataaaggcggtgcggccttacctccgaccctgtacatgttggcggccatgtccgggccggcggcggcggaggggcccggggcgggcgcggcgctcggcgcgggcggccgggaaaatggaggcgcgatggcgggggcggggggcgccgcaggcgtttaaaggggccgcgctgctgccgccgccgccgccgccgccgccgccgaggccgccgaggccgcgcagggacgggagggccgcggcgcgggcgggagaggaagaggaggagcggccgcgggcggcggggaggggcctcgggcgccgccgcccaccgcacgggccgttaccgaccccgcgccgcccgcggcccgcgcgccccttcccggacagttcctctcggcgcccccgagtcctccccgcgcgccgcttcccgggtgggcccttccaccagaaccccctggtagatcctcccctggtgccctgggggtagaggggagatcctccacaagggccatttccctggtgatccctccctgtgccccacaggtgagtcctgccgtagctctccaggggttcctcctgatgctggggtcctccggcattcctccctgagccccccaagggccctgaagctcagcggcccagccctggcctcggggtccccaccccacacctcccttccaggcctaacctttgcccccgacaccaggcagggcgtgtccttggccttcgccgcccagcccgcgtggcatctctggacaggtggtcgtgcgcgccttggtgtgggcaggctccgtagccggcaaagcctccctgaaccgtgacctggtgagaaggccgcagaggaggtgcctgtgcccagaggccacctccaaagaccccacctgaggctggaacccagcgcctgctgaccccgccagccccaacagggctggagtccaggagcggccgtgctctttccgcagtgaggcagctgccttctcttcccaccacctgtcaggatgccttcccgtgtgtgcttgtgcacaggtctaaggagaggagagtccagtgagtgacccagacgccccagccaggaagagcatgaggtgcgaagggggcttcccagatggagagaaacagatggtcccagagtggcttggagacaggtgcaacatcagtgttgggggaggtgagcaaaaggagctgtctcggggttccaggctgctgatgtgagcagcaccgtgggtctctgtcctgcctgctcagatgctggagggagctgacatctacttgggacatccctctctgtaggacatggagcggagcgttcagggctatcaggagggagccccgtggccacggtgcaagatctaggcaggcgggacagacatggtcaggatgctggggacacagcatggggaatccagcacacaggacaccatccaggtgggtaggaaacagcatgtgctgggaggaaagccaggtgggggtcccaaggagagcggtggccacaatgtcatggctgcagagcagaccagtaaggaaagccccaccagggttagcacagggccaggaacccgagctgcagggcggtgctgtctctggggagagagggctatgggtcccaggacacatcctgcgggctgggctgcagggaacaggagctggcttgctggtgattgggagggaagagcagccagccagcggccaggtgcaggagaggggcaatgacagacaggcagcgtctctccagaaggaaggtggggctgctggcctcccctgtcctacagccccagcctacctctgtctcctcagcaggaaagcaaagctgcagcctgagatctccttccaccaactcctggcatggccagaaagttagccagaaacaccagaaagtgccaggcagctaggaagcatggggagagccccctgaagctgcgtgtgtagtgcctgcttccgctgccatcccagaaatggacgagcttcaccctgagaacccagccacaccactgggacacatcctgacagtgacatgcacactcttccctggccccagcctggagaggagcctcctgaagacaccagcctttgctccttctcccagtgggagtggagagaactgactgctggagtggagacagtcaaggctgtccttctgagggagcacagcacagggtctggtgtcccagggaggcaatctgaaattcaagccaggcctccccagcggagaggacacacccctcaccatgcagagtgacgtttagtaaactctcaaaagagagcacagagccccactcctccagccgacccatactctgcctccccactccagaccagtgaacaaggtggattgcccttaagccagctcagaggcaaagtccaaagacctcaggtgagtcaaacaat

SEQ ID NO: 25882 - DNA, 1326 bp, Artificial sequence
  DNA replication origin
agccacagcacagctgccacagggcacaaaaggacggctgagagacgaggtcctcacccacaccatggggaaaccgaggcatgggaaggttggagggggggcagccaggctggcgccaagatcacaggcaggcaggcctgaaggccgagcaatgcagccactaggaaggcatgagttggggtcggggtgtccccagccctagagcccaaagctgccaccactccccacccccaacatgggtgggggcagggagagctcttcttgggaccaatcccaaaaccatgcgcagtgggcccggctggagcccaggcagcaggcatcctctctgccagggtgagaaactgggccctcatgtcaggctggaaggggggtctccaggtggggagaaagaacaggaaggaacaggcccctccctcgagggaccccgcacccaggctgctccctgagcgtggggtgggctcagcgcacctgggtccacacagggacctggcaaagctgtatgaggctgtgggaggggctgccgctggatggggtacaggcccaccgcccctctgagaggacaggggaggcccagagctgctgatgcggactgaccgcccatctcacagacgggatgtagggggctcccaccgtccccaaggtcacaggactggccggccagaccacacggcgtccaaggcagcagaagccacgctcgagagacacagagtgttctgggcactcggggtcaggggcatggggatcaagccagagcgggagtgaccccagctccctccagcagcgcaggctgcaggtgggaaaggtaatgagcacctgcccgagagggtcacaggcagggaggggtctcagagtcctggggagggaggcgctgatggaatgatggaatgcacacgaccccccaccttcctgtgaaagaccccacggagtcccaggcacacgaaggagggcaaggctcaaagctgcaggcccggggggcccgagcaacaggaggctgggcccacggaggaagcccctgcccaggaggccctccggcctctccccaacccttgcaaagcgcctcccgaatgggctgaggtgagcgagaggcagggaaaagtttggggggacttagaggcgtgctcgggatgctcgctccctgctgaagaccccctgagggatccctgctgggggaagccccggggccaggctgcaggagggctctagggaggaacgtggcccctcaccggggctccccatccccagaggggatgcaccggagtcccagcacagggccgcgggccgggggagaccccacagccccaaaactcctgctcccagaccggcagc

SEQ ID NO: 25883 - DNA, 863 bp, Artificial sequence
  DNA replication origin
tcccctggtgggcccccccgcccctcttgcctccttggctcccaggaccctagcggccagacttctaaagcccacagacccagctgctggcatcggggacccagcagaatgcccgctaccccagcacccatgggtgcagcccatgcagcgagctgcccagcaccggggaggctcccagggatgaaaagccgcaaggcgtatggggcggggcgggggggcttttaacaggaaggtcagccagcacatgtaaaaattgaactcagaggctggacgcaggggctcacgcctggaatcccagcactttgagaggccgaggcgggcggatcacaagatcaggagatcgagaccatcctggctaatacggtgaaactccgtctctactaaaaatacaaaaaattagccgggcgtggtggcgggcgcctgtgatcccagctactcgggaggctgaggcaggagaatggcgtgaacccgggaggtggagcttgcagtgagccgagatcccgccactacactccagcctgggcgacagagcgagactctgtctcaaaaaaataaaaaagtaaaaaaggaactcagaggaagggccagtgcagggaacagaaggaaactaaagcaaaacaaagcccgtgaatgttctctgagaaatggatgggatccatcctgggatgtggtcagatgagaggaaagctcttgacacttgggttaggagaagtagcaaatgaaatgaaaggatcaggtgataaagttgaggataccgcacagaagatggggcaaaaacacaaagaaactaggagagaaaaaaatcagacatcagtccattggtccaacgtccagttaatagcagagaaggagcgagcaaagca

SEQ ID NO: 25884 - DNA, 1567 bp, Artificial sequence
  DNA replication origin
tcctacccagtgtggcgggggccttttcctccttgggaccctgctgttctcaggtggtacactggggtctggaagggagggagaatggagacacaggttgaggttgggtgcacacgcccgccttctcccctgggatagacgccacgggcgtccagagctgcaggatttgctccatttgtgaagtgccctcctggagtcccgaggggtggtgtggttacacctgcagtccctggacggcagggtccggccttggagcccctcctgggagctgtgcagcccgggtttggtcgcgtttctcagacgcccctgccttgctgttacagacggccaatgggaacgtggaggccaaagtggtgtgcttctaccggaggcgggacatctccagcaccctcatcgccctggccgacaagcacgcaagtgagtccggccttccctggggtgcccgcctggcgggagggtcggctggggagggctggcggggtccttcttccctagggcccatcggcatcctggcctcgtggggccaccctctgcccaactcactctggcgtctctttttctcccttccacagtgggcgggggtgtcctggctccgtttcctcgggggctgggtgaatgaagtcctcgcacgccccccggagtggtctgtctctcactggcatcctctgcaagcttgtcatggtgtggctgggtgtgggcatcattgatcgaggcttctttttcccttctatgatgacttctggagactttccaggctggtgggaccctgctgcctgcacttgccaatgtctctctctttttaattttgcggagaggcttctgttgggattctgagtagtgttttcaggaaagcagtcctctccttattctttacgattcaaacccaagtttagtaacctggctgggaggggctgctgtggccagcacagcgtgtgggaggaagccactggctgcatgggaatgccctcagccttggggacccagcttctcccccgggaacaggtgctcgcaggtggtggagtctcctgtgccgggggatgttgacttcagagccaggagccagaggcacccccacgccctccacatgctactgacacagggcctgccgagctgggccccacctgcaccagacacagtgtggtaccccactgaggcccttcatgtgtcggtgggggcaggcatgaggggcatttttggcttccactctgacacatcacctggggtgggatctgagcccaggctgaggctgtggtctgtagggtgacatttcccagtaggtgaggcatgtgactgcccgggtacccgtgtcgctggggtgggccaaggtcccacctgtaacctcccacgacccctaatggggtgaggtccagggactgtgggtttgcggtgggtcgggtgggaggaccctcgcatcttctgccccgtcccagcgctgtgggtgaggggcaggaagtcagcccaggcaacctccccctgctctgggaggggcttagggacaggacagaccatcctgccaccgatgccttgttcctgagcctttgctgggagtcggccagggcaggcgctt

SEQ ID NO: 25885 - DNA, 1497 bp, Artificial sequence
  DNA replication origin
tttcccagtaggtgaggcatgtgactgcccgggtacccgtgtcgctggggtgggccaaggtcccacctgtaacctcccacgacccctaatggggtgaggtccagggactgtgggtttgcggtgggtcgggtgggaggaccctcgcatcttctgccccgtcccagcgctgtgggtgaggggcaggaagtcagcccaggcaacctccccctgctctgggaggggcttagggacaggacagaccatcctgccaccgatgccttgttcctgagcctttgctgggagtcggccagggcaggcgcttgtggaaggaaggtgtcccttaaccccactgccttgcccaccggacagctgggacctttcctcagcaaccagtggatgcggacgtgagctgccctgggtcagtgcagctgggccgggcccccgagcctgggtccactctggacactgggctgtggggcctgtggctggcccaaagggagctgccagttgaccatgggctttctctggctttgtgaggaactggacctcctagctctctgctcagaggaggggagcgttcaaggtggggcatggtgatccttgacctctgaccccaaagcctgtgtactccactgctgcactcggcgggctccaggcaccaaggaggagagctggggatgttgaaggtccacaggctacacattctggaggggtgtttggtgtggcccttggccctgcaggtgctgggtgccagtcagcagcacggctggcggttcttagtgttggaggctggcctatgtcgactctgcagggctggcccgctggagaagcagtggtggggagcggcctggctcgctggagaagcagtggtggggagcgggctggcccgctggagaagcagtgcccaggctgagcggccgcagtgtggccctgccagtctgtgtggcctggggagtcaggcgccaccgttgagttgggcatgtttatggctggcccagggtggatcctgtctctgtcctctggcacctgggggcacagtgtccctgctccagagagcctgtatcagtggtttagtggtttttgagggtactgtggcccccttggctgaggttctgctctcagacgccccagaggatggccttttgctggaagagccccagaaggggactccagacataacgtgattagaggtatcagagggcaggttttccagaagggcctcgttggggctgataggactgggtggagagcagtgtcccagctcgagcactggcccccccaggtacacagcacagcccctttggacggtgctccctggaaagctgcgtggcggcccctctgcagggcgttcctatgaactgagagcccagctgcagggagcaggcgtcatgggtgatgggtctgccgctggtccagggactcagagcgcggccccactcttgcctggcggctgggccttgcggtgattctgcagggcccacaccccccggggttgtgtcaatctccgtttctcctgct

SEQ ID NO: 25886 - DNA, 1218 bp, Artificial sequence
  DNA replication origin
tggagagcagtgtcccagctcgagcactggcccccccaggtacacagcacagcccctttggacggtgctccctggaaagctgcgtggcggcccctctgcagggcgttcctatgaactgagagcccagctgcagggagcaggcgtcatgggtgatgggtctgccgctggtccagggactcagagcgcggccccactcttgcctggcggctgggccttgcggtgattctgcagggcccacaccccccggggttgtgtcaatctccgtttctcctgcttctctgtgagctcatggcagccagggtgaggcccccagctgatcccagggacaggtgtgaggacactctgggaggcctctggctctcccacgtcactgcctccacccagcccctgctggggcgtccagcccacagtgcaggcctcagggtggagggtagacacccgccaggctgcactgtggcccctgtggcagagaagccctccccccggcagggctgtgagcatgaagcctttctcaggacagaatgacagggagaggggaacgtccctcctcagaggagggcgtgggggccctggagaccacagccaagagtgggagtgagggcacagcctgggcctcacgcttaggggtgtatccagggtctgagggagggttcagagtgtgaggggtgcagggtacactagccagccccacctcctgcctgggtgtttctgcctgttgagggtcttctgaggagctgtaggcccacctcgcccgcatctccgacaggctgcaccacagagccctgttctgctgaccgggacgctggtgaaatgggagtttcggagccgctgtgggctcctgtccaggctgggtcagtgctcggatggggcctggcatagggcgggcgtgaacaaaagccagcctctggtctggggctggtgtgtgggcctctgggccctggtgatgtctgagttcagggtgcagtttgctcgtgggtccccagaagtgggagcgagtgagatgtgttggcctgggatgagaggactggggctgtcctggtcggccctgccctgttctatggaccgggaggaggtgaggctcagccgccagacaccccaggcttttgaggcccagatagggccggcccagaacaggcccagcatggctgctcccagcctcagtcttagctgttggcgcctgggagggcccagaggagccaggacttcctgcaggcacca

SEQ ID NO: 25887 - DNA, 1084 bp, Artificial sequence
  DNA replication origin
gacgctggtgaaatgggagtttcggagccgctgtgggctcctgtccaggctgggtcagtgctcggatggggcctggcatagggcgggcgtgaacaaaagccagcctctggtctggggctggtgtgtgggcctctgggccctggtgatgtctgagttcagggtgcagtttgctcgtgggtccccagaagtgggagcgagtgagatgtgttggcctgggatgagaggactggggctgtcctggtcggccctgccctgttctatggaccgggaggaggtgaggctcagccgccagacaccccaggcttttgaggcccagatagggccggcccagaacaggcccagcatggctgctcccagcctcagtcttagctgttggcgcctgggagggcccagaggagccaggacttcctgcaggcaccacaagggggccgcagagagcgagcagcccggctggctgtggtcccatctggggaccttgggctcagagagccggcagggcgctgagcgggatgagtggcccactggcggccggtgctgagcgtgcgaggggcggtggggagcaccactgcacgcccccattttgggtgttataagaaccctacttgggttcctagcacagggcaggaatccccatgctgctggccggtgcccggccccggtctcatctggacagcctgttctgggaagccccagtggagtgggggcaggggtggcctctggacaggggccctccacagccaggcttgtctgggctcttcccaaagaggcttggcactgggtggatgggcagccagagtggggggacgtcgaggcccagatgatcttcaaccgggtggtcttcacgccccaccgggaggcctgcggcccccgttctgccctgccccctggcggcacagccctcggtccgggccctgggcagggagcaggccgccaccctgtgctgaccgtgctgccgggtgctgtctgtctgttatatagccctgtcagtctgctataaggccggaccgggggcggacaacggcgaggaaggtaagagccggcctccgcaaggagggcgtcctcctgtctgtgtccctgggctggg

SEQ ID NO: 25888 - DNA, 2656 bp, Artificial sequence
  DNA replication origin
gcctctggacaggggccctccacagccaggcttgtctgggctcttcccaaagaggcttggcactgggtggatgggcagccagagtggggggacgtcgaggcccagatgatcttcaaccgggtggtcttcacgccccaccgggaggcctgcggcccccgttctgccctgccccctggcggcacagccctcggtccgggccctgggcagggagcaggccgccaccctgtgctgaccgtgctgccgggtgctgtctgtctgttatatagccctgtcagtctgctataaggccggaccgggggcggacaacggcgaggaaggtaagagccggcctccgcaaggagggcgtcctcctgtctgtgtccctgggctgggggcggcagcgccgctgagggacagagtttgggcgggccgcctgcatgcctgtgccctgcgcccggccggcccggctgaggaggggccctcccttgtgtccggcccacggcccaggcttggtgcggccccggcctgagggtgacctgctggtgtgggaggtctgtggtgggctgtatggggctgtctggccacgagatggggacggacagagggcggctgcccctcgccctcctggcctgggctcttggcagccgccgactcccccgctcctcttgctcttgcctgctgcttctggggctggcccggaccttgttctccctcctccttccatcttcatgccctggggagtctgggcctttagggtgcctggacttaaagggcacgtgggcaccagagtgtctgcaggggtacctgccaaggagccgccgggccgccatagggtggggcagtgggacagtgtccggcagcaggaggaggcacgcctcccaggactgggcctcctgcgtgctggcgccaggtggggctggtggggtgggccttggtctggcagtgtgcgtctgccgcggtgctgacaggggctccttgtccttcaggggaaatagaagaggaaatggagaacccggaaatggtggacctgcccgagaaactaaagcaccagctgcggcatcgggagctgttcctctcccggcagctggagtctctgcccgccacgcacatcaggtagcccccagcagctcccgccctgggcccctcgggctgccctcgcctttccagcctgcccgtccttctcttccaggggcaagtgcagcgtcaccctgctcaacgagaccgagtcgctcaagtcctacctggagcgggaggtgaggcccagcccggcctggtctgccgcagccagtcccgggccactgtttcctctacctatgacctctgctggcctgggcggcggagacgattttccctcctccctctaggcccaggctgttctggggggaagcggggattgcgtcctgactgtcacttccaggtgtcctggtgtgtggccgcccccaccctacgcgtccagagttgtgggccaggagcttggagctctttcctcttgccactgccacccagacagccagcgaggggaggtccccctggggagggtgtggctgaggcaggtgggggcaggggccacctgagtcttcgcaggagtcttggctggtctctcctgggcggtgggcagagtcctggtaggcccaccttgggggtcactgtgattatacggtgttaccaggtgattcttatctgggggtcacctgtgattatacggtgttaacctgccgtatagcatcccccaaggcgtgacaaccaaaaaatgtgtcccgacaatgccatacatccctggggagcagtgtcgcctgacggagagcggtggcactgaggctgctgtgagatccagcgaacgggagggttgggttttctgaggccacgtgggggcaaaagcgtctggagtgtgttggttccctggagtgcctgtcacagttgcggggcacacctgccaaggggcaggcgcatctccaggcctagggcttggcctcccacgggctctgctgccacctggctggagtcttgtgacctgaacacccccagcgtgtccagtcagctcagatgcaggttgctggatgcggcccccaccctgcccatcccaggggggctcatctctgtcgtggccatcggcgctctggcatgggctctgaaggatccaggatggccacggtgtgtcccaagctcagccctgcactacctctgtggccccggtccccattcccaccacacagcctggaaacaggcgtgaagggcgacagtggctcagctagggctgtggtcgtgccttagctcagagtcatgagcaggcagagaagagcaggcagggcttggcctggggtcgtaacacatgcgtggagcatgggcagggctcgaaccctctcaggctgccagaccagcttcccagaaggctgagccacaacatgctgggcgggagcagaggctgtgggggtcgctgtgaaggcttccactcaggaatgaggagtgcccttattgacagagccacacagagagggtgagactgcagaaatgtatctgtgggcacagaaaatgtttgttagcaaaaaaggcccgtgaggaagcagcaggtgcagtgacaagcctgtctgcactgtgtccgcccagaaacggccgggtccatgcttgccggggacaaaacaggctgctcaggcaccctgaaaccctcctgctgcacgat

SEQ ID NO: 25889 - DNA, 1438 bp, Artificial sequence
  DNA replication origin
atggcccctggtccctggcacctggggagcggtgtgcgtgggggaagtccgtgctgcccatggcccctggtccctggcacctggggagctgtgtgcctgggggaagtccgtgctgcccatggcccctggtccctggcacctggggagtggtgtgcctgggggaagtccgtgctgcccatggcccctggtccctggcacctggggagtggtgtgccttgggggagtccgtgctgcccgtggccgctggtccctggcgcctggggagcggtgtgcctgtggggagtccctgcttggccgacactgtggtcagcgcatctcctttccccagctctgtgggcaccttcgcacgggccctggactgcagcagctccgtccgacagcccagcctgcacatgagcgccgcagctgcctcccgagacatcaccctggtaagtgggcccagggcgggacaggtgagacctggggtggcccatggcccagagtggctgcgcccttcttcctaccagggcccagcacctgccccaggtattcaggacccctgcagaggtgctgtcccacctggactggcctttcctatccaccccaaactcggccagactgtgctgagggtgcagggagggttgtgctgctgggcctgcagtaggggatccttgaggtactgagggagggggtaccgtgccacaggtgcaggaaaagccaccttggcccgggtgaccctgctgtctcctgccgcagttccacgccatggatactctccacaagaacatctacgacatctccaaggccatctcggcgctggtgccgcagggcgggcccgtgctctgcagggacgagatggaggagtggtctgcatcagaggccaaccttttcgaggaagccctggaaaaatatgggaaggatttcacggacattcagcaagattttgtgagtaccgtgggtggcgatgggggagtggctggccatgcccatctccaggtaggctgcgggggtgtgggctccacatcccactctgccctgagggagcctgtcctgcaccctgattccctgtgcggagctgcatgagttctgtctcagctgcgctcggccgccatagtccttcctgtcacactggttcagcagacaggcatgggggcgctggtggggcctgggcatagagagccatgctcctgccaccattgcgtgatgaggataagggttggcccaggtgacggaggccagggtatcctcacggagactttcccttccttgctgccccctccagccccaggcttggttttgctttgtttttgactaagctgaacctcttgactcctcatgtccttgttttctgtctcacgtgagtttagcccagcagcaggcctagagagtcttcatggcgtggggtctcccttccctgtacctccacctcaggacccccaccctccaaccgtcagccctc

SEQ ID NO: 25890 - DNA, 1009 bp, Artificial sequence
  DNA replication origin
actctgccctgagggagcctgtcctgcaccctgattccctgtgcggagctgcatgagttctgtctcagctgcgctcggccgccatagtccttcctgtcacactggttcagcagacaggcatgggggcgctggtggggcctgggcatagagagccatgctcctgccaccattgcgtgatgaggataagggttggcccaggtgacggaggccagggtatcctcacggagactttcccttccttgctgccccctccagccccaggcttggttttgctttgtttttgactaagctgaacctcttgactcctcatgtccttgttttctgtctcacgtgagtttagcccagcagcaggcctagagagtcttcatggcgtggggtctcccttccctgtacctccacctcaggacccccaccctccaaccgtcagccctcctaaaatacttctaaattaatctgttagaagagcatccctatgtgggggtggtggggcccccaaccatcagccctggggaggtggagactgtggcagggcagggaggagccccaaaggggccgggacacagcggggtggctagtatctgatgaaagcaccatccgggcagcagcgcacaggccagcgcagcagaggctggagacgcatctggaattcggaagaaacaaacatggggttgggtagggtgcctagacctgaagaggaggagggacagcagccagctgtgaggctcctgaggacgcatctgctgggggcaggagtgcagctttgtgtgggggcctctggccaaggggagagcttggccgggcgggaggagtccctgactgtccctggggccagcggcctctccaaggcggatacggatctctccaggcttaaaaacaaaccaagatgagcagaacatgttcagacaagaggacgagggctagaaacaaaattcaccaactaggctcagaccagggcggaatttgagggagaccctgctgcacatggttccagcggaggagaccccagtgc

SEQ ID NO: 25891 - DNA, 1970 bp, Artificial sequence
  DNA replication origin
ggctgcggctgcggggccctgtccaggtgcggggatgggaggctgcagcttcggggctgtgtcgagggagcaggccccgctctccttcctgccagatgcagtggaccagactgaggaactatctgaacccttatttaataagacaggtttcttaaatccatgccacagcccgggcgcagtggctcatgcctgtaatcctagcactttgggaggccgaggcaggaggatcatgaggtcaggagatcaagaccatcctggccaacatggtgaaacgccatgtctactaaaaatacaaaaattagtcgggcatggtggcaggctcctgtagtcccagctactcgggagacagaggcaggagaatcacttgaacccccgggggtggaagttgctgtgagccgagatcgcaccactgcactccagcctgggcgacagtgcgagactctgtctcaaaaacaaaaatggctgagatggccgggcatggtggcttatgcctataatcccatttgggaggccgaagtgggtggaccacttgaggtcaggagttcgagaccggcctggccaacatggtgaaaccacgtctgtactaaaaatacaaaaattagccgggtgtgttgagaggtgcctgtagtcccagctactcaggagacagaggcaggagaattgcttgaacccgggaggcagaggttgcagcgagccgagattgtactactgcactccagcctgggtgacagagcgagactccgtctcaaaaacaaacaaaaaaaaggctgagatggaggctgggttgtcagtgccacctcggcaagatctcgaccttgaccttgtgccagctcctcttcccctggcgtcactgtgttttggcatctggcggggggacctgcttcatcagctgccctctgcacctgcctgccagcaggggcctggcctccgtgcaccaagcacacctcgccctctggcctcccgccccctctgtggccttctggccgcagccctgcccctgcctgcatggtgtgcctgcctcctgccccttcctgcttgtgtgacacgcctcctcccacccagctcccgtggaagtcgctgaccagcatcattgagtactactacatgtggaagaccaccgacagatacgtgcagcaggtgagcccgcccgccactcagtgcccggggtgtgccgcctccccgtcctgcgccccatcctctcccagcaggtgggcgtgcactgctgcagcaggaggggaaggaagactcctgagtccctggcccggctgtcctctccgtggtgctctcctctccgtagcctccagcctgtctgcactgcagccccaacctgggcctagcctgctgacctctgaccttctcttttgttttaagaaacgcttgaaagcagctgaagctgagagcaagttaaagcaagtttatattcccaactagtaagtgtgccctcacagccgtcgtcctcgtggccccgggggccagggagggtgggcacagggtgctggggccaggcgggtcccaaggaaactcaagctcagaggctgggaaagttggggcagcccccgggagggcggcccagggctggggggttctggctgcagacgcagtggccatgtctctgtcgtcctggcctcctggtcagtaagggggcattgggattccagcccacaccgccagggttcagtccctgagctgggctccatgctagggggagcacgggggcctggagaacggctcagacctcagcagtggctcccaggaactgaaaggggagaaaggaagatccctgccgaggccgaggggtgcgaggacgtggttctggacaaggggtggtcagccgcggtgcctgctgggcacatgggccctcgaggtttgtgctcctgcaactcctctcgtctctcctttccctctttaagtaacaagccaaatccgaaccaaatcagcgtcaacaacgtcaaggccggtgtggtgaacgg

SEQ ID NO: 25892 - DNA, 953 bp, Artificial sequence
  DNA replication origin
atgctagggggagcacgggggcctggagaacggctcagacctcagcagtggctcccaggaactgaaaggggagaaaggaagatccctgccgaggccgaggggtgcgaggacgtggttctggacaaggggtggtcagccgcggtgcctgctgggcacatgggccctcgaggtttgtgctcctgcaactcctctcgtctctcctttccctctttaagtaacaagccaaatccgaaccaaatcagcgtcaacaacgtcaaggccggtgtggtgaacggcacgggggcgccgggccagagccctggggctggccgggcctgcgagagctgttacagtaagtgccctggatggccgggggcacaccgcacgcccgcctgtgggccgtggtgcctgcgttggccctgagggctccagcatggcccagcctgcaaggggcccactgacgatgggggctgcgtcccaggggtgtggttgggagagcctcggggaacgtgtgggggtgcctggcgggtgggggcggccggcgtgggggtggcggggaatactctgacatcgctggttctgcttaagaatccgtctatttccaactttgttgtccgtagccacacagtcttaccagtggtattcttggggtccccctaacatgcagtgtcgtctctgcgcatcttgttggacatattggaagaaatatggtggcttgaaaatgccaacccggttagatggagagaggccaggaccaaaccgcagtaacatggtaaggggggggacacccgccctgcctgccatgagcctgtcggccacgcgggtcctcggcccccggtcatggcgctgtgttggggcggttgcgcccccttccgcagagtccccacggcctcccagcccggagcagcgggagccccaagtttgccatgaagaccaggcaggctttctatctgcacacgacgaagctgacgcgg

SEQ ID NO: 25893 - DNA, 2077 bp, Artificial sequence
  DNA replication origin
ccaagcaaccggcacagagcacctgagccagtcctccgacagaaggcacccatgtgtacaagctcagttgcccacggcccacacagacacccccgaccaccctccccactgtcccgcctggcaggcgcacggaaggattgcaggcacagcacgggcggccccacgagctgaggctggcagcatgcgggcagtcacagcgcgatggcagacagcgcaggcaggggcgccagggccacacgtgccaggacagtccactgacaggaggcggggccagggggccgagggccagatgcctgggctcggggggtcttcaccaagggaccagtgatgtcgggaggaatgtggggaactgggctgtggcctggctcacgtggactgccccaagcatgggccctgggccgcccgccgcggggacacagagcagcacagcacaggcatcacgggcggggccggcgcagcgcccgcccgcggctccaggccttacccctactgggcatcaagaggcgcttcttcatgttgcctggcagcgccggggtgggagagagggagagaagacagcgtcagcacgcacggcgggtgcccgggcggggacgggccggactcaccgggcggggagggccacactcaccgggcgggggggccactcaccgtccaccccgttgtgctgctcgtagctgcgcttgcccaggatggtgggggagccgttgttgatgacgggggccaccttggcgggcgtcaggctgctgagcacgctggacacgcttttcacggggtcaggcttgggggggcgggggtgggtctctgccgggaatgacacaggcagaacgagttgcctctgcccagcaggggaggggcaggcaggcccaggctccagccctcatggttccgggatacccccaggaactaagccccatgcggcccccacccgaggccccatcctgactgggctggaagtggggaggtcaccacagaaccagaagcccagaagccctcggcaaggcgtgtgcccgggccagtcccgcaccccagggcttccagagagcagggagaccacctggcgggggccaggcccctcagccccgggacaacaggatccatacacaggcccgtgagcacagcacgcctattaaacagcccccacgtccaggcccccggagctgctggtggagggctggctgctcgtcagacagcgaaccaaccatccagccagcctggccagggacacagctgctgaggaccagccctgacaccagccacctcttcccacaggacaggggccacaaccccaaacagggagcaatgccaaagccacttgaatctcagagcacacttggctcatgactctggaatgtccttctcaggacagtcaccctgtgtcgggagggcagatgcacaagcccactcgagcccagcaaatggaggaggccccccaccgccaccacaaatgtctggcccagccaccaagctgcttccagctgggccagggtagccggctgaggttctcgggtgtcctcagatgctcaaaggcaaaggaaccccctgccgcctgaggctgctcctccccctgccgagggcgtgcagaggcctgagtgctgcccctgtggagtgggcgtggctcaggaagtatactccctgcaggcagcaggtacgacgctgccttaatggtattacaggcaggggtgtgcaccacctaaaccccagaccctcaggccccagggacgatcagaacacagggaacagggtagcgagactggcagggaagcccccgggtgtgccttgaggaggctggccccgcagaagacagggcggccgctactccgcactgggccccatcacgaccccaggagcagggagcagcctgggtcccagtgggtctgcctgagcctggcacggtgcagagtaccccaaaaggacagttccaggccctggggggctgtccaggagctcccagctagagaaggctgggagcaccagtgcatgagcttgggtgagaagctgcctgcaggcagcattgggagccccccagcacgcctggctgctcaccaagataccgaagcacggcttccagcggcttgcg

SEQ ID NO: 25894 - DNA, 2695 bp, Artificial sequence
  DNA replication origin
gcctcgggtgggggccgcatggggcttagttcctgggggtatcccggaaccatgagggctggagcctgggcctgcctgcccctcccctgctgggcagaggcaactcgttctgcctgtgtcattcccggcagagacccacccccgcccccccaagcctgaccccgtgaaaagcgtgtccagcgtgctcagcagcctgacgcccgccaaggtggcccccgtcatcaacaacggctcccccaccatcctgggcaagcgcagctacgagcagcacaacggggtggacggtgagtggcccccccgcccggtgagtgtggccctccccgcccggtgagtccggcccgtccccgcccgggcacccgccgtgcgtgctgacgctgtcttctctccctctctcccaccccggcgctgccaggcaacatgaagaagcgcctcttgatgcccagtaggggtaaggcctggagccgcgggcgggcgctgcgccggccccgcccgtgatgcctgtgctgtgctgctctgtgtccccgcggcgggcggcccagggcccatgcttggggcagtccacgtgagccaggccacagcccagttccccacattcctcccgacatcactggtcccttggtgaagaccccccgagcccaggcatctggccctcggccccctggccccgcctcctgtcagtggactgtcctggcacgtgtggccctggcgcccctgcctgcgctgtctgccatcgcgctgtgactgcccgcatgctgccagcctcagctcgtggggccgcccgtgctgtgcctgcaatccttccgtgcgcctgccaggcgggacagtggggagggtggtcgggggtgtctgtgtgggccgtgggcaactgagcttgtacacatgggtgccttctgtcggaggactggctcaggtgctctgtgccggttgcttggagcaggggctgcgggaccccaggccccttggggaagagcagataggaccaagcctagcatgaggaggccaggtgtgtggggcccgggtgtgcaagtgctgggcctgccagtgtggatgtgcctggagccccttcgccaggcggctttcactgacggtgctggccagggcagcagggccggtttggcgacctggaggtggatatgggtagtggctgcccagcccagccaaccctgtccccttggggcattctctcgaggctgctgggtgtcctggcaggcacgtcctgtggggtcagcacgccggctgcagcgcagggtgggcctgagatcgggtgccgggccccccatctccacctgtctggacacgcacccctggcctgtccttgcagcttcctcccgacatcccttggcggtgtctgtgtctcggccccagccccagccctcctttcctggggcaccctcccagccatctggtattggggctgcccccattgcctagtcctgggcccagggccagcccactctgggctggctttacttgtctgttcctaatggcagggcgtcccaggaacagccccataagagctggtagaaacaggagggagtccttgtcagcaggcatcttcgagctttttgttttgttttgtaaaaagcggttaaccagcaagttacataaaagcttatttgttcccactgaattttccacacctcacacgtgagtcccagccatgcagtgcttgtgagggagcatcaccccttgccgcctggctgggcggggccctgggctcagaggggtcagccacagaggaagcgcctgtcctgacgtgtagcggccaggacctgggcgctggagaggggccagctgggtgaagacggctcccgggggcactggcgcacacgaggtggggtctctgtccagcctgggtaggcatgagctgagctcgagtgagggccctgcctgcccacagcacggggccccagcgctctaacccggccatttgcccgtgcagcctgttgcgctgtccccacctgcggggcctgcagatggctgcgtgtggctcactaacctaaagcatgtgtttcttccctctgctgtccaccgctctggtaggcacttacctgggtaagtagtttttgtgctactggccagccctgggcgctgggccttggcttgtggcaggtgccctgaggtatggctgttcctgcttgggagcgccgcagatcaggcacctgggcccccacctgaccctgcccggcagagctaagcaaactggcagggaaaggctgacccagggctccagggccccagttggcccccaggggagtgccccaagttaggaggcaactgcaggtggggaggggctggacaggctgcttctgttccttaagggatgggcctcagctaagcagcgtttctggagctggcaggttgctccgatgcccctgggccctggcacctgactgagttgagtatgacatcctgtcctctctgagctggtcctgctgggagccgagccatcctgggaccagctcccacatgcacacgcccacacctacacacagggcagtggggaagggcagtgagtgggggagggcagcggcggtcctgggcccagctgggggtgaccaggagcatggaccccgcttcttggcccaactcccgcagtgccccttgggctcctcaccctgcactgtgggaagtcagaggcctctggcaccccatccccaagcacatgccagggtggctggggcccagccagggc

SEQ ID NO: 25895 - DNA, 962 bp, Artificial sequence
  DNA replication origin
tgaaaagacaagggccaaccccgccaggcagctcggccggccgcggccgcacgatcctaacattccaggtgtaagttacagagctcaagttcatctacaaaaaaagtaataaaaataaaatttaaaatggcaccttcaacagaacacaacaaaaccttagggcccggcctccgggcaaaaggccccgcagcacaggggcacggggtggcccctcatctccgctccagccaaaaagtaaacacaaagctaaaaacgacaactcctcggcattctcggaataagttagccgcgcttcttcctctcctcccccagtgtccgccaaggagcgcgtttctctgcaggtgagggcgggaggtggggcactaccaaactgaggggcgggcggcgggctggctgggaaggggccgtgtgggcgggcgaggggcggggggcggccgcaggtgggggcggcccctagtcctcgatgacgatgggctcgtcgttgacgggcgcaggtggcggtggccgcggcggcagggcctggctctggcgcagggcgatgggcttgtagggccggcgggcagcacgcttggtttccgaggatgagagcagcttgcggatcttcctgtgggcagaggtggtggtgagggccgggacgctgtgcggagccctcccgcctgccctgggaaggccccacctggtctcctctgtggccatgtagaacacgtcatccggggcgtcgatccagttcatccgccgccgcttgactgggggcagggagcccccccggatcaggcgcactttggtggggtaggacttcccgttgagcaggaggttccggcttggtccctgcagagggggtgcacttcctgggcagccagccaagggccagctccacctcaacctgcagggctcccgctgggaggtgctgtgcctggccaaccccccaccaccccagtgagttacacggacccccagcctgg

SEQ ID NO: 25896 - DNA, 1003 bp, Artificial sequence
  DNA replication origin
cttgcagaaatctaagcagattctcactgtggagactgcacacctgcttgggggccagagctctgggcagaaaccctcaggcggctggggccaggctctacatggccaggaggttgggcctctggctggagcactccaaggcctcgctggcccagctgcactggctgccctggtgggaagccacagggtcttcggcagggccagctctgcctgccgggaggcagtccccggcccaccgctgccgcagacacagacgcacagacggtttcagcacagctctgctggggaagggggttgggccctgcaaccgcttgctgccccctggggagggcagagggcaccgcgccaggccccagcaggggaaggtctgtgggcaggtgggagagcaacagagcccagaggctggggtggctgtcctggctgaggtggcctccaggggcctccagctccacggcagagccacagcctagggccgcccgatgggggtggggggcccagggcctgagtcagggagagggactgggaacaaaagacacagggaaggaccggttggtttttttcctttttataagattttttttctttgtttttgtttaatatgaaaattacttgaaaagacaagggccaaccccgccaggcagctcggccggccgcggccgcacgatcctaacattccaggtgtaagttacagagctcaagttcatctacaaaaaaagtaataaaaataaaatttaaaatggcaccttcaacagaacacaacaaaaccttagggcccggcctccgggcaaaaggccccgcagcacaggggcacggggtggcccctcatctccgctccagccaaaaagtaaacacaaagctaaaaacgacaactcctcggcattctcggaataagttagccgcgcttcttcctctcctcccccagtgtccgccaaggagcgcgtttctctgcaggtgagggcgggaggtggggcactaccaaactgaggggcgggcggcgggctgg

SEQ ID NO: 25897 - DNA, 3318 bp, Artificial sequence
  DNA replication origin
gctctgttgctctcccacctgcccacagaccttcccctgctggggcctggcgcggtgccctctgccctccccagggggcagcaagcggttgcagggcccaacccccttccccagcagagctgtgctgaaaccgtctgtgcgtctgtgtctgcggcagcggtgggccggggactgcctcccggcaggcagagctggccctgccgaagaccctgtggcttcccaccagggcagccagtgcagctgggccagcgaggccttggagtgctccagccagaggcccaacctcctggccatgtagagcctggccccagccgcctgagggtttctgcccagagctctggcccccaagcaggtgtgcagtctccacagtgagaatctgcttagatttctgcaagcacattctcagaaatcctgcttggcccatcctccggccggggacaggacttgcaggccgggggacaggtacaggccgggccaccagaaggaggggtccggtggatagcctggctccagaccacccccctggccgtgctacctcagccggccaggaggggtccgcccaggcctcgctcagggagagtagctcctctgtctctccccagagctgtgcctttgctcccccagcccacccaggcgccctgtcatgtggaaatctcagccacggaattaaaatagaaaccacttctgctgtctcccaggagacaaagataagggggcgtcctggcctccgtgggagcctgtgctggggcccagcagtgacaggactaggtgtcagggactcggctgcagtgcacgtcccacccaccctccctgggctgtggcgcccccccacccaaccccagcccccaccagccaactctaatctgcagccagcatccgagtgaccccacagcctgaggacttgcctgtagtgcgtcatcagacggctgggaaatcaggcccctgacctcatgaaggacacagctccctctgaggccttttccaaccctgggggtctggagctcagtgaagaccccagctcccttgtctcccttccccaggcctcgggcttgcctcccagtgctggctgcagggttctggcctcagcagctcttccaccccccagggcctgtccttttctggagtcaacatgtgggctgtgaggtgtcctaggtcctgggctctatcccaagggcagggaggccctgaggagatgtggggccctttcccaccccagacaccctccccggccagacacccaggctgcagtgccctcacagggccaagctctggccaccggtgctgggtggggcctgggctgcttgtgggtctaaacctgggcttagaagtgagtgggtaccggctggggggagcattggccttggtgcccaggccatgaaggggtctcccagctttgctatgtcctcgttaggcccttccctgctgatgagacagcagcctgctttctgcaccagcaaccccacaggggccgcggctccccagggccaggggcatctcagggtggcaaggccatcatgctgtcatgcctggagacctgtcctgccagctccgctccaccctgctagggtcctctgtccaccactcagcccagcctggcttccctgcagtggagctgagtagcaggggcctgctatctgccagtgtcacaggatggcggaagggaccagaccactgcagcccaggggtgtgacccagccccatgcccagccatcagccctgccagctcccttcacacccgccgtgtcctgtgcccccctctccactcgggcccgtcccactgtgtcactgcccctgcctgtgacccaccgcagcctcagaggtggagaccaaggccactgctctgcacccattgatcctgacccctgcctgccaggcccagaatagccccgtcgcattagggagcttctggccgctgcccagggactgcggctggggtgagggcagtgcagcagctggcacactccttgtcccaccccaccctccgtgtgtctccagggcacctggccagtgccgaatgccattcctttgctgccaccctgggaggggcctgcctctacccccatccactcttctggcagggctggggaccttggggcaggtggtctccctccagaagagccctgtgttcagccagccctgtcctccagagcaagccccacaggtagcaagccccacaggtagcaaagtcagggagggtaatggcttagccccaggctcccaagctgggcagaacagggcagggagctggagagggtttggcagtgggcccatgaatccagcctgggcaaggccctgctgtgagggacccctagggacccctgggcctgccagggaggaagggctgcccagaaaaggtactgactgatgcctcctcaccatcttctgccttggctggcacaggtcccaagtgcagagggggagctggtcaggctggtcagtcgggcgggggggcggggggcatgtttctggcctgctgtcaccatggaaatggcagtggctgcagggtgtgtgtgcaagggaggagggtgctgccacagagagcccagccaggaccaccatgaaagccaggagcaccgagggcctctggttggctcacaaacatgcctggtgcaccaggcagagggaacaggtaggtctccgtgtccagcccacagcctccaagacacagggggaagggtgtccagagtcagctgcccccatagggcctgatcactgggcttctgggatctgcctgtctcccaggccgacgctcagctggggccagaaggctcagagaagggcccatggggacagagcaccaggaagcccgtgggtgcggaggttccccacctggggccaggctctacggggctctagggcggaggcactgtggtgaggcgtggtcaggcacgccctggttgggaggaggccagagtgggggtgtgggggtgcggtgactggcatgacccctcaatctcccgcctgacccctcgaggtcaggccctgggcccccaggcacgcagctggtcctgggcggtgcgggagaagggactggagtgtcagccccagcccggggcacagagggcacgcccactccttcccctccttcccttcctaactcctcaccgcctccccggccgccccctgggtggaagtgcttggggtggacgccttaagcgcggatccctcggcgctggtgcccgccgccccttccctgcctgggaggcagacgcagacctccccacaccccctaccagcagcttctcgagctgtttctggaggtggcggcgccttccttcctgagccctgccctccacccaaggagccttcagcaccaca

SEQ ID NO: 25898 - DNA, 1481 bp, Artificial sequence
  DNA replication origin
gccgggcaggcggggctgggcgcgggcggcggcggcccggaggagaacgggcggagggcgcgggccgaccgggcgcaccgaccatggcctccaaatgccccaagtgcgacaagaccgtgtacttcggtgagtgcgtgcccgctcccggcccgctcggtgcatcccgccgcccttcgcggccagtcccgcgccgcagagccgcggcgtaactcggggtgcgcccggccccggccccggaccgaggatgcgcgtcccggaggctggctggccgcgctgcccaagcggctaaagccaaagggtggggctgcgcgaaagcgggggcggtcacgcccgaaccccgaagcggcttgtgggggcggggcagggaccacccgggcggggcttgtggtgccccgggatgaggccagtgtttgggggagcgctcggggatccgcggacgcatcccggttcctcggacggcgccgggcggggcggggcagggcgtggctgtacgccccgggtgcgtcccgcgcgctcccgtgggcctgggccctttctcctggaccccctacacccgcttcccccgggaacaagtggccgggaacagtgacccccagctcccactccgggctccgctgagctgggctgggccaggtttggactctgtcgggattcagtccaagcgggggcgaccttggcctctgcctcctgcttgtcccgacgcattcccttggcgccagttcccccaggagtttcacacgggggtagggtgggggcgggtgtgacacgcgagttcccgcgaacgtgagagggaccttgtgctcaagcagcccaggtgtccaggatccctgcctcctcaaggtcagaacagccctggacaggatgcaggtggtggcgggaagagggatgtctcgcaaggcggccctcggtctagcccctccggcaggcgcgctccccccgtctgggcttactcactctctgggcctgggtgcgcccttcctacccccttcctcctggctgattcgctgcccagctttctccagggtggtaaggtccctgcccacctacccaccagctgctgcacgaaggggggcagacttagtgaagcagagaggagggccgggaccaacagggcgcctgccctggtcgccccatacccagaatgcggccaggctgcagggaaggccgccactgggcttccccggctcacaggctggagggggttgaggggaggttgtattttgcccgtcccagaggggagggaccggatttggcctggagtgcttctggcgtggctgggagccgaggggcttccggctgcctctcctggagcccgctcagccctcagtctctgtcccagcgagggctgtctctgtaaggcttagggtgggagacggtccccagggcccttctgcagtccaactgcccatgactttaccccaggccgggccaggccagcctggggctctccagggtctcggccaacagtcctgtggacagcc

SEQ ID NO: 25899 - DNA, 1313 bp, Artificial sequence
  DNA replication origin
cattccctcaaacacttctcttacactcacacacctgcctctgcagtgcacctgcttcaacacatgctgctctccctctcacacctgcctcgcactgacacgcccctgatccccaccaactgggccctgatggggctggcagcaccccgctgctgagtcaaaggtgcagccccagaacctccagctccctcatgggaaggccaggccccgtccccgtgggtcctccaggcgggaccctcatctgtctgtggattcctcgtcctaaaccctgagctctccccccgccgtaatgcccctggctgccactggcatggaagatctgagggcagctgctgagggtccgggaccctctgccactgcctcccacccccacactggggctactggactgcttcccagtggatggaagcaggggcctccctagggagccaggcaggaagaggtggggaggggcaggaagggcccagcagagccggaattctgaagggaaggggacaagctgcaggccctggggggagggagcatgcaggctgggcccaccctgcccggcagaatctggccaagcccctcaggtggccgaggaccagtggctctcccagctccctttctcagcaagtggcccagccccctttgtctggcagatatcggggaggggcatctggctagggcgaagcccactctgagaggcccaagggtgctgctcctggcagtgagatgggatcccccaggtggcctactaggtagagggctgtgaatactggctctccgtggccctggtacaaccctctgggcatggccagggccagcctccaggacaccagcccaaccacaaggctgcaccagcttagagccctctgaccagaaccactccactcaaggaagctgggacacaccagggcaggcaggggctggctgcacggtgggcaggcgtgtcccagcagcagcaaggaagtctcggtggctatcggccgtggcagctgcagcccagggctgccagcactgtgctctggccagctctgggacgtgggccaagtgggggcagggaactggccctcagacccactgggtgggtcaatggccacacattacgggtccgagttgggaacacagaatcgattgggtctaatggctcagaagaaaaccagctgcccaccctggctgcatgggctctggggtggcctcctcaatgtgctccgacatcccagcctgggttctactcaggtatgagctgcgggggcagcctggtgtgagggtgggcaggattctggaccctcgccctcacagtgcctcccaggcaggacagaagccagccg

SEQ ID NO: 25900 - DNA, 994 bp, Artificial sequence
  DNA replication origin
ggccatgcccagagggttgtaccagggccacggagagccagtattcacagccctctacctagtaggccacctgggggatcccatctcactgccaggagcagcacccttgggcctctcagagtgggcttcgccctagccagatgcccctccccgatatctgccagacaaagggggctgggccacttgctgagaaagggagctgggagagccactggtcctcggccacctgaggggcttggccagattctgccgggcagggtgggcccagcctgcatgctccctccccccagggcctgcagcttgtccccttcccttcagaattccggctctgctgggcccttcctgcccctccccacctcttcctgcctggctccctagggaggcccctgcttccatccactgggaagcagtccagtagccccagtgtgggggtgggaggcagtggcagagggtcccggaccctcagcagctgccctcagatcttccatgccagtggcagccaggggcattacggcggggggagagctcagggtttaggacgaggaatccacagacagatgagggtcccgcctggaggacccacggggacggggcctggccttcccatgagggagctggaggttctggggctgcacctttgactcagcagcggggtgctgccagccccatcagggcccagttggtggggatcaggggcgtgtcagtgcgaggcaggtgtgagagggagagcagcatgtgttgaagcaggtgcactgcagaggcaggtgtgtgagtgtaagagaagtgtttgagggaatgacaggtgggggagatgcatatgtgtggggggaggcaggtgtgtggggggaagcgggtgtgtgtctgaggaagcgggtgtgtgtggggggaagcgggtgtgtggaggcgggcgtgtgggggaggcgggtgtgtgtgtgagaggaaggtgtgtgggaggaggcagatttgtggggggaggcgggcgtgtgggggaggc

SEQ ID NO: 25901 - DNA, 862 bp, Artificial sequence
  DNA replication origin
gcaggtgagccacgtgagggtggcgagcgcttgcgaggcagtgtgggcaccaggcaggggatcccggagggaagccctctgccagggacatggtgagggcgtggccatcacccacgaagggagcataaataacactggcaggtgggtgggcagcaggagagggagagcggacagcgccacggggacacgcagggtcggcgggaaaatgctgggacagggtcacacggggattcggacacgcagacacagaagggatcatgggacgcccagaggatgccagagggggcagacacaccagagactcggggatgggcatggtgctctgcccgtggctgcccctcctccaatactcgccctgggcttgcaggcaggactgggcggctgagcactctcccagcagagccaagcaggggggcccctgcagggtctggggcgcaggtgagcccacatcatgagagccgctgtagcctagggctggaccttgccttcggggtcccggtcatagatgtagctgcccaccgcaccggtgttcactcctgtggagggaggccgctggggtgggtcgggggaacagtggagggaaggggagggcagggaagacatcgtggaccaccctggctacactcacccttgggtccgaagaggattccatagcagggcttgtggcagtagggctggccgtcgtgctggggcagaaggtgggtgctgagggaggagtccacagactcccccgacccatcacctggaggcttccagaacgtgcaggccggctcgccgtgggggagagggcagcgcagctcccagaagcaccaccccccatcccctctaggcgcgcctctcaccctcatccccccgaccccgc

SEQ ID NO: 25902 - DNA, 1726 bp, Artificial sequence
  DNA replication origin
ggctggagggcagctgtggtacggctggaccccggagccagcccaggccccgccaggacatggatggctgctctcgggacaatgggctcagcatccaggctcagctccgtctgagcccatgggctggagggtggccaggcagggagctgtgccaacggctgggagcagggaagaggcgtaaagccccggccaccctgtagcactggggacaggggcctggaggtggccaggtctgagtgcccctcactgaaggaagggccaaggcaacttcggtgtggtgccaggagcagaggagcataaaccaaggtgggaagtccagatggcgccaggacagggctcagccactggggaaggtctccacgtttctgctctgtgctgccagaatgggacagtgcgccctctagtgggcacccgaggagtggcgcacagcaaaggcggggcgcgggggaggggagagctccttggagccgccagcgcccctggctgaaagggcagagcctggaccatgaagacgccaggggcgagtcggtcatcactaaaaccttcaccagaacacttgggcagggattctgtccctgggccacacccaaggcaggcctgtccacaaaagcctgtccatcaccctatggacaaaagctggaaacagccacgctgagcctctccagtccttgctctgaccagagcccccaaaccctcctgcgcatcccagtccagtctggggctgccagagacctctgtcccacccgaccttcgccggcttccccattctctgcccaggacccctcctctggtccccggcccccttccctcctcagccacactctgctctcagggcggacccctcctgcgcttgccagggtccacacacccaggcagctccgggttctcaggcctgctgttggtattttcagggttctaggttcaacttttctccaaggctctgtcctccatggaccccaccctcacctgaccctggccaggaccctggccccggaatgcctcccaccttccttacctccccacagcctggcgttcttactgcctccccatctgggtgggcaccaccacccaaaccggagaccacgctccccgcccccatccctccctcctgctcagaaacatcccagggccccacctcccactatgacccccaggagaagagcccacccccactagcagccaggcccaggggtgttggctgggagcacgcatggaccggagaaagggaccctggtctgggatttgcatccatcccacaagcagagacaatcctgcaatcctcaaaccgtttattgacagcacaaggctcaacagcaggtgagccacgtgagggtggcgagcgcttgcgaggcagtgtgggcaccaggcaggggatcccggagggaagccctctgccagggacatggtgagggcgtggccatcacccacgaagggagcataaataacactggcaggtgggtgggcagcaggagagggagagcggacagcgccacggggacacgcagggtcggcgggaaaatgctgggacagggtcacacggggattcggacacgcagacacagaagggatcatgggacgcccagaggatgccagagggggcagacacaccagagactcggggatgggcatggtgctctgcccgtggctgcccctcctccaatactcgccctgggcttgcaggcaggactgggcggctgagcactctcccagcagagccaagcagggg

SEQ ID NO: 25903 - DNA, 1366 bp, Artificial sequence
  DNA replication origin
ttccacagactggccagatggggtgcccctgacctccctcccctctcttgaggctgggcctagtacccagcatcctacagccatagcccaggaattccagaggctggaattccagcctccccgcctggcagctggaccccacatccccaccggaagcccatcaggcgctgggaaaagtgctgcccatacctggccgtcctggtcctccagcctgcccttgcctgtgcccagccctccacggtccagagctaggggcccacggcactgggtgatttcctcacatccacctctcaggctaccgccggcccccaataagctggacccagggccgggagggaggtgtgccccaccaagtcctgtggagggtcagggtcaggggcgctagtcccagctgtgtggagtccgaaggggtccaggaattagggaagaccctgggagcaggggtacccagggccgatgctgcggtcactggctgggcagggcctggaggaagggtgctgggggtcccgggcaggggccagaagaagtggagacaggggtagctgcaggctgagctggccccacaaagatgcctggctgggggcaccagtgagggccccaccagcccaggttggagtgggggataccttggagggacctggccaggagacacgggaagactggacagtgggggtacagacggggagcggcacagctcggttcaacagagcgccggggtgtgagcttagccccatggggcaccagggccttgtggatccctggacttggttcccaggggttctgaaggggagggatggagcagatagcatttcagagccgcctcactggccaggcataggtccaagtagaagagagtgaaggttgagggcagagcagcccccaaggcagggacagagaagcaggcacgcccaaaggcagaagagcccattccagattcccctcccttttaggggatatctgggtctgtgggcacccaagggagcacctggctggcaggcggctgggagggcatagcttcctggagctggagacaccaagcgagccctgttagtgccgtgggcacccagccaaccccagcaacaccgcctagcgacgcagtccagacaaacagtagcaacaaccgccccggtttccatgacaatgacttggaaacaaacacggcaggcaggcgtcatcctcaaaccggccccgcaggaaatggtcctgccccagccagacctggggtcgggggtgctgctgtccctggcggggtcaggggctgatctctggaggagaccccttacccacatcatccccgcaaccgaccctggaaggtcttctggcacacaaatcccccaccgccgcccaggttttagagaagggcaca

SEQ ID NO: 25904 - DNA, 866 bp, Artificial sequence
  DNA replication origin
gctgcaggctgccgcaccccagcccctgtgggcttcagccagagggccagcaggagcaggccagggcgcagggatgtgtgcagagggcgggctgagcagacagaggcggcctccaagatgcacccggaacactgcagcagcccccgccacccccgggtctagggccctcttgctgtccaggtgcagggtggaatgttctgggcatagaggcagcctggggcgagcagctgcggagctccgagtccctgccccgaccactctgtcctctgtttgttcctgaaacaaatgccaccagcaccctgcagagtgggctgagaggtacaggggctggggtttccagccagcccagtgggcctgagtcaggctggccccatggacgaggtcagtgccctgtcctaggtgcatccccggccaggtgagagctgacaaagcctgaggcctagtgactgggctggggctggtcgggggcagtgtgtcccggaagccggcaggaccctgacctgctcagatggaggtgggcgttgggggtgggatggcctgaacacggagtgtgggtggagaaaggagctggaagctggggtcctgcagctgatgaggggtccccacccccagagcacagggtagatggggagcacaggagaaagggggtctgaggggcatgtcagtctgtggctgaagtttaggaagggttccagggatcgtgtgtatgtgactgtgtgtgtgtctctgtgttatgtctgtgtcagtgagggtgtgcgtgtgtatctgtgcatgtgtctgtgtgtatctgtgagtgtgggtgtctgagttgagtggaaaaactgctgtgagccaacacagaaggcgtggccccacggcgagggcat

SEQ ID NO: 25905 - DNA, 2700 bp, Artificial sequence
  DNA replication origin
ggaggtgggcgttgggggtgggatggcctgaacacggagtgtgggtggagaaaggagctggaagctggggtcctgcagctgatgaggggtccccacccccagagcacagggtagatggggagcacaggagaaagggggtctgaggggcatgtcagtctgtggctgaagtttaggaagggttccagggatcgtgtgtatgtgactgtgtgtgtgtctctgtgttatgtctgtgtcagtgagggtgtgcgtgtgtatctgtgcatgtgtctgtgtgtatctgtgagtgtgggtgtctgagttgagtggaaaaactgctgtgagccaacacagaaggcgtggccccacggcgagggcatcctgccccccaccccacccgtgaccatggtgacaggaagcaacagcagggaaggccaggaatggactcatcaccctggttttcaaggaggggctcctccatgggcagggtgggttggagtccagagtgtgggggaagggaccatccctgggggcgggtagaggggaggacaaggactgggtcattgtccctatctgccctggctaatgtccgtacatgagctgcaaggtaccgggccaggagctgggatgggctggggaggaggcttgacagaaatatgggcggacaactgcgagagggaccacacacatgctcgcggggaccccagagacccctgatggacacacccatacgggtatgtccacgggcaccaggcacacacgtgtgcatcaggcacttgccctgcacctctgcacccggagcacgtcatcctggtgggggtgtggacagcggtgctgggcaccctggggcttgggggcagcgcacgccccagggaaagtgcagtgacagagcccccggcctccccaatactgtccgggctcccctggcctctcccccttcttggtgcctctgcctctccctctgcttgtctgcaggtttgtcccacgatgccccacactcagtggagatggcaggtgggcccagacctcagagtgggtttcaaggctcatgggctggagagtgggggttccaagtttgcaggacaggagcgcacccctactctggaaaccttatctctgaggtctcagaatgggggatgaggagggctccaatgggcccctgtggaatgtcctatcagaccccaggacttagccccagtcgggggacagaactgtggccttagaggggcgccaggaggagggcaagcaggatgtggccttgggctgggtgtgctggtgtggggctctctggagtgtggcctctgtgccagacgcctgtgccttggccgtcctacagccctgctgcccctgccctctccccaagctggggactggtggcagacagggcagggcaggcggcttctcttcctctaagtgcaggcctcgaggtgccgacaggggtgcggtaggattcagggaaagtgaggttgggatcacaggtgcagttagggctcagggcccgacagcggtaggccagcggctcctggggcccaggaggatggtctccagcgcccccagcggggacagggccagcacaggcccagtggagatcgaggggagataaggacgctggttaacatggctgacaggagggatggtgggtggggaggaagggcagcaccgcccttgtgctgtgggagctcccagggagctccatgcagcatggaggtgaagggcctgcagagagagggctcccctgctcagtgacaggagagggggctgacagtgacctgggctcccttcctgaggctggccagtcagctagagggctgaccccaaagcccgaggccagcgcagcccccttggccctcctgaatctggggggcgggtgaggcgggacagactccgcctggcaccgggaccatcctccgcctcaactttgcagcgtacttggaccgctctggccgccctgggcgctacccgcagagataagggcccctccctgcgcccggtccgggcatctccgagccggcctgggggtggctgaactctcttttgccggccgaaaccccagcccccgcagcccccgcagccgatcggtcctcaagctacagctcccctctctgggagtccccgcttttgaattccccggggatgttcccgctgcggtccgatggacctcccagagcagcggaggtcaggggagctagcagaggcggggacgtcccttgggagtgaggggactgacaggggcggcctcgtaaccctgcgtgggatggaaggtcagagtgggttcctcggtggggggcaacagcgggggctctccggcaattgtccccgaccctccgtcctggggagggcaggatcagcgcgcgggctgctttgcatctctttgcattttagtgatgtttggtccagtcctggcccgggcagatctggggttcgggcgggtgccggtggggtagggctgggggtgggagcggcgtttcctgctgcgggtgagccttttgcctcggaactggacccgggagacatcacagcgctgggctaggggcgcggcttgaactcgcctaaagagctgcgccctctcagtaagtccccatggccccctgcccccccgcgctccgtcctcagtcaggcccgggtcctgcctgaaggcgggggtggaccagatgatctttcttgggccctgggcctagattcgaggtccccagggtccaagtcctgggttcagagggcggggcg

SEQ ID NO: 25906 - DNA, 2800 bp, Artificial sequence
  DNA replication origin
cgcgaggaggcgccgccgacggggcgacgaggctggggaccgctcaggaggaccgggggcgctgggtccctggggcggcgccccagcctgaaaacgcctcagcctggcccgccgcctgccccgggatgagggtggaggcccctgcgtccgagggccctggcgatctctgcctgctagtggtcttgctgtgctcggcgggctacctctggctctgagcctccccgtctctgggtcctacggtctctgccgtttcctctcaggcgcgccctgagtgggggacccgcagggctggaaggaacgcggggctggggccgcgccccccagcgctaagtggaaacagacgcggaaaccgacgcccggggcgcgatcccgggcgcccgcctccctgccccgcgcccgcgcgccccgaggggagggaggaagtgggaagtcacccctgtccccgccgagaagggctgtcgcaggctccacccttgccaccgcagaggcccggggctgaaagcaggcagccaggcccaggccctgctgacctaagccgcgacccctgaccctcggcctcgccctctagccccacccagccttcaggagcaagattcccggccgcacccgaaagtgccccggggaccagcgaccccgcgctttgtttagttgtattggctctggggattggagatgttcccctcatggagggtgctgagaccttagggtgggctgccaggctgggcggatgcgggctaagtgcacagggccttgggcagagctggctgcaagaggcgggtacgccagtggtgggtaggcgccgcgtcctgcagcgtctcaccggggcctgtctgtgcctctgcagccgagagggtgacctctctgggcaaggactggcatcggccctgcctgaagtgcgagaaatgtgggaagacgctgacctctgggggccacgctgaggtaggtgggacccaccctggtggcaggggccaggggtgatggcaccccctcacggcccttctctttgcagcacgaaggcaaaccctactgcaaccacccctgctacgcagccatgtttgggcctaaaggtatgctcccgtcatccccaccccaccccaccccacagcctcctccaccccagcctgttgactttttccaccttctctgcaggctttgggcggggcggagccgagagccacactttcaagtaaaccaggtaggtaggaccccaccccctatcctgcctcctggttccaccctcgggatggggatgccccctcccagggaggcctgaccactcgtgggccccaaaggaggccgtggacgctgcactcacgtctgtgcctgtctctctctgcacaggtggtggagaccccatccttggctgcttgcagggccactgtccaggcaaatgccaggccttgtccccagatgcccagggctcccttgttgcccctaatgctctcagtaaacctgaacacttggaaaacctgtgtgtgtacatgcgcgtgtgtgctggggagtgccaagggagctgcagtggggtcctggcagcaggctctgccaccggcgcctgctcttctgctgcccattgccctccccagggggccgttccagggtctcataggcgagggctccctgtgcagggtgagtccaggccaccctagacagcccgcacccagccctggcactctgagtccgcctcgacaactcccagatcctcagaagtgcctctgagccctcctggccttctgggagtggggaaggggggctttgcaggccaccagccaaaggctcagcaggccgagaggcctgggggcgggcgaggctggcctcgggtcagagggtgaatcagctcatgctggctccctttctgagaggctctgggggagttatgggaactcctggccttcctcctttccaccccccaaccctgtcctcattccccacccctccaggccaggcccagcttctgcaagggcctgatgaggctgctctgcccctgacccaggcaccactgccccatgtgcgtcctcatctgccatctaccctgtgcccagggacttacccagtggcccggcgtccagtggggaacttgagtaccggccgtgcacaggggctggggggccttctggaaactcccttgtcaactcagccagccgctgctgactggccaccttcagagaccctcttccccacactggctacttagataccggccttggcagaaggccacccctccggacacccactggtttaaaagagcccaggggtctggccctgccttagggctgtggtgggtgtgctgcaggctcagctcgacaggtgctgtgggggcagtctagggtggcccgcagggtggggtgtgtgggggtgattgggggattcctggaattccaagagctgggagccacagcacttttgatgggatgggggcagggggtgctgaggtgaggctggtttctggctggacggtggtgggtggagctgagggaactgagatctttgagacagcgacacctggtgcagagaaaaatccgcaagctcgggggttgggagagcgctgaacaaggccgcagagctgctccgccatctcccccacgcctcctgccaagttctgtggcgccgcggttccccacctcctgctcccatccccctggctcccgccgccctgtagctcggcaggtgcagtaggcgctccgaggaggaggccccttagcttcaagaaacccgcgtgggcggggtgaggagcgcagtcctcctactggcgccgtgaaggagatcgcgatgcgccggagggaaggaggctgcgggcggggaa

SEQ ID NO: 25907 - DNA, 883 bp, Artificial sequence
  DNA replication origin
atcgcgggaacagccccggtgacacgctgcccggggtcttcacgaatgcccggaggcgccgctggccagaagccagcccgaccttccatccccgcagacagccccacgttcctcccggcccgcgtctttcggggccgcccgtgcaggcgggcccggctcagcggcgcccgggcagcagctgcttccatgcgccggcttcctccggggctgctccgtggcggcggcagagggaagcgctgccgcgggcgggcgaggatcgggagcgcctgaggaggctgccgcgggctccggctgcgcgttcggggcgggggagctgcccgggacttcgcgccaggggccaggggccggccgcgctggggtctgcgctgtgcggcgcggcgggctctgggcgcctcctggcggcccagcctggaaggcggcgcgatggggcgaggctcgtccgctccgactgcgtaagcggccccacagggcgccttccggagtctgcgcgctcccgcccggcggttgctaggttgccaaggggcgtgaggcgctgatgggtggggtctgagcgaggcggggtgtcgggtgtcgtgacgattgagcctgcaagggcggactctgcggtgttctccatatcaacagccctgccaggagcccggaagtgggtccgcacgagacagaatagactacactcaaactccaggggaaccgttcattgggcttggacacgaaggcgggaccctgccgacgcagtgattggatgcatgtccggccagcgcggtgattgggtacaggtctcgggagcgcggtgattgggtacaggtctcggccagcgcggtgattgggcgcaggtcccagccggcgcggtgattgggcgctggacccggcccgtgccatgatt

SEQ ID NO: 25908 - DNA, 1398 bp, Artificial sequence
  DNA replication origin
gttcattgggcttggacacgaaggcgggaccctgccgacgcagtgattggatgcatgtccggccagcgcggtgattgggtacaggtctcgggagcgcggtgattgggtacaggtctcggccagcgcggtgattgggcgcaggtcccagccggcgcggtgattgggcgctggacccggcccgtgccatgattgggctcaggttccagccggagcggtaactgggcgcaggtcccagccgccgcactaaacccggcccgtgcggtgattggacgcaggccccgggccgcggcggaggcgggcgatccgaaagaggctggtgctggctgcatggggaggcggcggcagcgggtggaccccgcggctggggcccgggccggggccctgcctgaggccatcgccgcgttgagtcggtcgctgccctcgggacccagccccgagatcttccgccgcgccaagttcgaccgtccggaggcggtgacgctctcgcggagggcaggcgggccgggtggggtcccgggccctcgcagggagttgggccggctccgctgaccgcccgctttttattttccgcagacctccgcgctctggcagctcctcttccgtgtgctctcgccactccctgcgggcaacgccttggcatcgctcgccctgggtaagccccgctcctggccccgcccacccggtagcactggccccgcctactcctgtaaagccccgccttccccagtaagccccgccccggcaggctctagcccccacccaacactgaccccgcttgctcctcaaaactccgccttccccggtaagccacgccccctgatgggccctagctccacccccttgggtagcactggcttctgctcctacaaagccctggggacgtccctgttggcccctggtctcctcatcctggtctgagttctagctctcccactatcatctcttctgaactaggccttgagcttctgctcaagtgacctgtgggggtctctggagggatccaggtggtgtcacctccaggtgggtggtccccctaaggtggtggtcttctgtcctagaggtccaagcccgcttggtgaagtcagcactatgctcccagggctacccgaggctggcactggcacaactacctgaggatggctcgcagggcagtcgggagctgctgctggctctgtcctggctcttggcccgaggacctgtgcccgagcagatgctggcccaggcccgagtgcctctgggtgacgagatgactgtgtgccaggtgcgtgtgggtgagggtgagctgagccagccctggtctcaactcctggggccagagcaagggcaggcctgggtcagccccctctgtctgctttgctcctcagggcagtcccatgaagggttacccagctgcccagc

SEQ ID NO: 25909 - DNA, 1002 bp, Artificial sequence
  DNA replication origin
actgctgtgcctgtccagaggctgttcctcccccgatgctgctggggaagccagggcaccccactccaatcttgctgctgcttggaagctgggcggggtggggaggccatcagtgaaattgcctggcgcccccttgcaggagaccccagcggtgctgatggttgttctgcacccagcccagccccgccaacctcaggcaaggagtggctttctctgagccctctttcctcatctgggaggtgggctctgatggccgacctccctggactcatggagactcagcgttgggggaggtgcttgactgccactcagcctggggtctgcactacctgttttagatccacctgtacacacgcggctgccacagcgaccagagccttagccatctgtctgtcactgaagcagagatgctcagggacccagagggaggccagcaggtgagggcgggcaagctgctgcgggggggtgggggtgggctggggggcacagcagggggactgcccagggtgggaggggcctgggggcggggcagctcttgggcctccagcggtgggtgtctctgcatgtctgccactgatcattgccagcctgggtgacagacagcttctctgggcctctcctagcctcatgggccactcacccttcccttccacaaatcaagacgtggcacgggtgggggcccaggacgcaggagcctgggctgggcaggcagctggctaagggcaggctgttggaataaaggaacacagatctcaggtgtgagctggtggtgttggcatctcaagcaggtctcacttggtgtgtcagggggcacctaggggtgtggggggccagcccacactgggtgaagggttgggcacagggctgactgtgggaggggacaactgcccttcagaacccaaggccaggcccacatggggtgtgctggaccgagcctcccaagctggagccagctccataggccctggagacttgcagtcccgttctgcttgctacacccgg

SEQ ID NO: 25910 - DNA, 1440 bp, Artificial sequence
  DNA replication origin
gcagacctggctgctcacataccagccacagatcattccagaaggttctgggacccatcccaggagtgcagaaggagtgcaggcactttgggtaggccaggtccaggttttgggcagctcccgctccagaaaccttggaaggaagccagccatggccccagtccacctggccagtgccgcacacagcttcggggagagggcggggcctcacttccaggcccccccagcccaccacagagggtggtcccacagaggcactgggcaggagcagcctggggccagggcagcctctcctctgccccaacccaggggtcccaggggccagaagcctgggcttcgctgagccgcctctacaaggcaggtagggacaagggcagaccaggacgcccggatgctgcctcagcactgccaacgccagtgcaggctgactgggtgggcgccagcccggcttcagccagggacacaggtccagctggcaccaggggccaggcaggcgtcaggggttgggccctgtaagcccatgagtgaggcatgcaatcccccaggcttgggctgcagagctggaacccacaggcccttgctacgagcaggaagccccagcagacacaagactaggggccaggagccaggccatccgcctctgacccctaggtccccctgggcaggcctgggatgaggtacaggggccaagtctctgggattggagagggaagaggcagagaagggggactgggtctggaagaagaggtcacaccagccctgagcctctgccctcctgcccggccatatgcacctggagcaggacagtgccagcccgtcactcaggacagtacagagcccagcccaagtggttggctcacgcctgtaatcccagcactctgggaggtcgaggcaggtggatcaccagaggtcaggagttcgagaccagcctggccaacgtggcaaaaccccgtctctactaaaaatacaaaaaaattagccggacgtggtgacaggtgcctgtagtcccagctactcaggaggttgagataggaaaatcgcttgaacccaggagacggaggttgcagtgagccaagactgtgccactgcatgccagcctgggcgacacagcgagactctgtctcaaataaataaataaaataaattaaaagagtggcagccagccctgccctatcccctgaaaccaagccagccaagaggaagaagccagtgatgacgggcgggcagacccccagaaagaaggatgaggatggaaggccagcagcagggtgcgaggaagcggccatccctggggaagatgcctggggctaggtcaaccctaacacttgggtcagtgctccagcagccccagtcagaggaggatgctgtctccccaaggtcacacagccacctggggctcagaggcaggttttcctccaggtctatgctatccagggctca

SEQ ID NO: 25911 - DNA, 1677 bp, Artificial sequence
  DNA replication origin
gtattttcatttttagtagacgcagggtttcaccatgccgcccaggctggtcccaaactcctgggctcaagtgatctgcctgcctctacctcccaaagtgccgggattacaggcgtaggccaccgctcctggcaggagagaagtgtttctgagtggttcctgtttatctcatggggaccctgaccgctcagtccacactgcccttgtctaccccatggccttgggtgtggttgtggctggtggctctgaagtcctgcgcctgggctcagcctccagctgtctgtccctgcgtgtgagcctgcattggctctgcagccatccctgtcctcagagtggtcggagggtgtcctgcccggcctctcgctgccctgcctggctgtgctgggctggtccctcagtcattctacctgaagtcacgtggtgcccaatatgtgccattctgaggggccccatggccatgtcccagagggaagagcaaacaccatagaggaaagtgctcacagctggaggacatgggtgcccgccggggctcagccccaaggggggcacaagctgagagtaggcagggcccaggcttctgcccccatccgctggtggggaggttctgtggctcagaggaggtgggtttggaggacagctggactaggtgggttctggcccactggggcacaggattggccgctgtcttggttgcgggtgtgatgtagggagctgtggtggctgggcccatggtggtttgagaactgggcaggctggggtgggcactgctgcttggtagcccggctctgacctgctcacaatcttggcatcttagtgggtgtcaggtgggcagttggctgcgtgaacctggaatttggggctggagaatggaatgtgagaatgcagggtgtgggtgggctcagccggggtgggaggcagggcagggcagggcagggccccagggtgcggtgggcccggggctggtgaggggcccggggctggtgaggggcctggggctggtgaggggcctgggtctgaggcctgagcctgggcctgcacagtggtaggaagcacaggcagggcagaggggatggctggcaagtgggggtgcggtcaagttgggggtcttggtggccaagtaaagacagtgcttccggacggaggggcttatcacctgtgctgctgagggacagggccgggggctgaagatcacgcttggagtgggggctacacacctgacagagggggatgaggggggccacggaggaggacaccagggctgtgctctcaccaggtctccagggtcttgccataaactgcagcgaagacataggatgctggctgcagaggtttgggctgcagcctcctaaatgtggggcctgtatctttttaaaatgagcctaggatttgttgtaatcagggagggtaacacacagacgcaggaatgaccgtcttgtaggaagaaagttcttttatccacagagagtgggggctgctccacgcagctgggtggtcggggcacaggaatgggcaagacgtcagcatcaaaactacagaaaaagacgcgcttagtgaggtggtacaacagctaccacgacctcagctaataaaaaaatgtgggccttgaagtgggggacccatggcttgtcacgctggtgggaggcaccgggcttggggaggcactgggctggagggggc

SEQ ID NO: 25912 - DNA, 1560 bp, Artificial sequence
  DNA replication origin
atgctggctgcagaggtttgggctgcagcctcctaaatgtggggcctgtatctttttaaaatgagcctaggatttgttgtaatcagggagggtaacacacagacgcaggaatgaccgtcttgtaggaagaaagttcttttatccacagagagtgggggctgctccacgcagctgggtggtcggggcacaggaatgggcaagacgtcagcatcaaaactacagaaaaagacgcgcttagtgaggtggtacaacagctaccacgacctcagctaataaaaaaatgtgggccttgaagtgggggacccatggcttgtcacgctggtgggaggcaccgggcttggggaggcactgggctggagggggcgccgggctggtgggggcgccaggctggagaggacacccagctggcgggggtgccgggctggtgggggatgttgggcgggcagagccctgggctggtgggggcgctgggccggttggggtatcggaggggaccgccaggctggaggggggggcgccaggctggagggggcactgggctggtggggtgctggggtggaggagctctgggctggtgggggcgcctggctagaggggacgctgggctggtgatgccccgggctggtggagccctgggaggtgggggtgcctggctggaggggatgccaggctggtggggccctggcatgaagctggcattgtgatcagagtgtgctccagtgacttggaaagcagacacaccactgccagccctgtagtttcagggaagagggaggaaaaggcctggatgttactggcgagggccgtgtgcacctggccccacgtcgcccctaggagatgggctggggcgaggccttgccggcatgagagcagaaccaaagggcagtagagagggagggagttcggggccttgcctgtgggaaaaacctgctgctcctgagcccagagtacaggaagttcaagagccgtttagccacgaagtcctattaatttaacatccctccgttaactgaagggccaggaccttgctgtgaacgtcctcctagggcgtggctgtcgacagtgagggacagaactgctagatgagcagctaggtgggaggctgcggggcactggcgagatgcctacttttttttttgtttttttttgagacagagtctcgctctgtcgcccaggctggagtgcagtggcgtgatctcggctcactgcaacctccacctcctgggttcaaaggattctcctgcctcagcctcttgagtagctgggactacagatgcgtgccaccatgcccggctgctttttgtatttttaacagagacgggatttcaccgtgttagccaggctggtctcaatctcctgacctcgtgatccgcccgcctcgacctcccaaagtgctgggattacgggcgtgagccactgtgcctggccccactgctggtttttgatagaatcaagttgctaaagagacgtgagcctggctgcagaaggcctgggccccaggactgcaccagcaggaagagactttgggaaaagccagcccaggagggcggacaccctaac

SEQ ID NO: 25913 - DNA, 1178 bp, Artificial sequence
  DNA replication origin
ctcacatattgctgatggaaacgtaaaatgatctgaaaaagagtcgacgcttccccaaaatgttaaacacagagttaccgtatgacccggccattccacccctcgacggacacctaagagaaataaacacaggtccacataagagtttgtactgaagtgttcatagccacatccataatggccaaaaggtggaaacaaagccaaaagatgtccatcaactgataaagagataataagagcatggaatattatttggcaataaaaaggaaggaagtagtgatgcatgctgcaacatgaatgcgccttgaacacatttagcaaaataagccagtcacagatgaccgcatatggtatggtcccatttatatgaaacgtccagaaaaggcaaatctgtggagacagaaagtagattattggttgccaggggctgggaaaactggggagaaattgggtgtgaaaggggggcgaatgctactggctctgggtgggtgtgaaaggggggcgaatgctactggctctgggtgggtgtgaaaggggggcgaatgctactggctctgggtgggtgtgaaagggggcgaatgctactggctctgggtgggtgtgaaaggggggcgaatgctactggctctgggtgggtgtgaaagggggcgaatgctactggctctgggtgggtgtgaaaggggggcgaatgctactggctctgggtgggtgtgaaagggggcgaatgctactggctctgggtgggtgtgaaagggggcgaatgctactggctctgggtgggtgtgaaaggggggcgaatgctactggctctgggtgggtgtgaaaggggggcgaatgctactgggtctgggtgggtgtgaaagggggcgaatgctactgggtctgggtgggtgtgaaaggggggcgaatgctactgggtctgggtgggtgtgaaaggggggcgaatgctactgggtctgggtgggtgtgaaagggggcgaatgctactggctctgggtgggtgtgaaagggggcgaatgctactgggtctgggtgggtgtgaaagggggcgaatgctactggctctgggtgggtgtgaaaggggggcgaatgctactggctctgggtgggtgtgaaaggggggcgaatgctactggctctgggtgggtgtgaaaggggggcgaatgctactggctctg

SEQ ID NO: 25914 - DNA, 1337 bp, Artificial sequence
  DNA replication origin
gtcccgcccgcgcccgcgcctaccccgccgcccgcagatgctgcgccgctcccgggcccgcccgcccagcctctgccgccactgccggggccgcgccggctcctcccgccgcgcccctcccccgcccgcgcggcaccgcccccgacccagaggccccgccccgcgcccctcggcccgcgagccccgccggacctggggacctgggagcgcgggggtgccggtgccccgccccctccgcagcgccggttgccacggcgacagcaccgcgcggcggcgcgcaggactggtggctctggggagcggggcgccctcgcgcacccccaggcgcggagtcccgtctccaccctcctcacccaccgcccagaatcccagggtcccgcccagtgccccccgcgccctgaaactccgctgccgccccctagagcgaccccactcagccggacaggcgcccaccggcccaggagctgacagggatgtaggcgcggggctggcctggccgccggggccctccgcgccaccctctgtcctctttggggagaaacccagccttcccaggtttcttctcagggcagaggaaaggaatgatgagcggcccccaccttcttctccagcccgtccaggaggcaagctagggtttggggacttgggcttcattttgtcactgaggtggcactaagcccctccccccacatcctgtccatcccgtgtgagccagagaagaacccgagggcaccttctgcctgcctgccctccttcccagaactgctgtgacttccctctgacataggaggagactgagggtcagagaggtaaagggacaccagatttggtggaaagaccagaatttgaggcaccacccaactggtagtgaacttccagattctcttcccgtatccccgggcctggactcaacacggcctgaaagccagaagaggacagagagctccagaagttctctagtcctggcacaaggggaggaaagaaaaaggtcgcctaatgctcccagggtgcaggagaatgcccggggggatgttagggtttgggaggatggggttttttggtagtggttgtttttttactcttctccattctctgatgccccagcccctaggtatcccaccaaagccatgaccaaggcatagggtttacaagcacctaaaacgctgaggcagaagagccttcctttccagccccaggagatgtggtcccctgtcgctggagagatggtgggcagggagaagcagtagaaagcaatccatgggctgggcgtggtggctcacacctgtaattccagcactttgggaggccgatgtgggcggattacctgaggtcgggag

SEQ ID NO: 25915 - DNA, 1658 bp, Artificial sequence
  DNA replication origin
ggagcggcgcagcatctgcgggcggcggggtaggcgcgggcgcgggcgggactggctgggtgcgcggctgcgtccgcggagggggcggcgggcctgggcgaccctgcacctctgggccgtggggactgtggggtggggcgggggccgatgcggcaggggtgaggcctggggccggcggggtgacggggacccggccctgcgtggggaagcctcggggggacaagcagagacgcagcctgctgggagcggcccaagctctgcaccggcccgcggcgggagcacagcagccccctcccgcccctcctcccgggggctccgaggggtggttatggggcgagggtccttgcggggcccgggcagtgaagggcctggaggccccagagtctgtgccaggtctgagccgcggggcgtggggggaggaggggcctcggccggggcccaggagacccaggacaggtgggcctggggccaggtccctacggagaggtggccgggccgggctctggcttgccggggtaggggctccgctaggggctggagtccgtcccttcgccagcgcagagcccctcggcccgcatctgccaagtgactgaggatcgagcgacagcgtagtggggcggaggggctggaggcacggccggaaagggtgagcggcgccgtggctcccccgctatttatttggccccgccacgcgcggagagggaggaaattctcaggctgcggctgcagctaggggaggcccaggtgggcctggaatgggcccagagagggcttcctgggtcagacgtgtagatccagtggacgtgaaaaccgggtgagtgtcccggtgggacccagagcgcggggaggcttggaggcaggggcatgggctgaggaccctcaaggcaccctcctcgcgacctgtcagagctccgaggggtgggggtgtcctgtgtgtggctgtggggatcctgggcggcgggtgctgggtgggggcaggggtgggagtgcagagttcaacgctttcccggatcggtggggcctgcggtgtcaccagggcagtccgagcgcccgactgtcacggggacattaaattttatgcctttgtctagacacggcagtaaacggagccccaggcctggggctgtggagggggtgaggggctggctgggagtaagcctgtcagtgactttggggtgggtgcgggtgtgcgggcctccattgtcacccaggtgtgcacaggcccaggtgcggggactccgacagcacggccatgaggaccagtgccaggtgtgtgacagaggtgcaggggcctgtggaagcccgacgggccttggtggacgggcttcccgagattcgagggcagccacaggcatcgccctggcgcagaggagcaaagcagggtggctctgccggggcagagggtgggggacaacacctcgccaaggcaatgcggagccatggggagcagggcaggcagtggccacgcgcccaggatggtggacaggaggggagaccgagcctgcccgtgcagggaggaggggcgtgggggctgccgggcaggggcggggaggctcggagaggcttgtgggacggatgcatcgggacctgggtggctctcggtccgggatcagaaagcctgggagggccgaggcctccttgggtactccaagagcgga

SEQ ID NO: 25916 - DNA, 1479 bp, Artificial sequence
  DNA replication origin
cgcaactcccacagcccctcttctctctccatgccaggcctggggcctttccacggctgctcatcaccgcccctccccggccccccagcccccttgatcctgcagaccttccacttcccaacacgatcattagtggcctgggcacagcccagagcagggcgcctctgacctcctacccaggccagcgccccgtgcccacccacggcgctcggcgcttggaggggctgctggggatatgatcggaggccggggccaaggcacggttttagaggtgggcagagcgccggccacgtctgacctggacagcgaggtagtccccctgcccgggaccctgaggacagtggtcccgaggccagctgcctggaaggcaggcgactttcaaaggccagaccccaggtggcctggagctggggtatgaggactgtgtggggtcggggtgcggctggggctgccaccagccacgcccttaactgctgcagttgttgggaaatgcacttggggaggaccccacttgagcagccagctccactcccctcgatggttttagccctggctggctaaaccttgccacctttgggccgtggaaatgcgggaagcgaaggcccaggcagtgaactgtgccacatgagatgtgtgtgaccatcacccgctcatggagcgggcatcctcaaacaattcttttagcagcctcataaagggcccctccccagatgctacggaccttcccaggccaggtggatacccagggccacatcacaggtacagggtcccaggtggaaggcaggtgagagaccccttgcagatgggcttcagggcgggtgctgcctgtgccaggggctgccagctcccgtgctggggcaaggccaggatggtaaggtggggccaggctccgtgctgctcctggggctgcgacctggggctgccacatcaacttgggaacaccctgattccatctggctgtggctgtcctgggctggaggagcccacagggaaggtaggttccacggtgggggagaaggaaaccagggatgtgggagacactgtcatgcctgaggttgaggggagcaggggccaggacacctacggtgctgggggaagatgggggtcaaggtatcccaggaagataattgggaacaccgaagctggagtggaggagctgtccctgggacagagcggcagtggcccccaggagctcctgagagccccggaggaagtggagcggcccagcctcaccagcatccggcacttggacgccaccatctcccccgccctccacacacccctcctggctccccgcctcccagcctggctggtaaacacagggacacaggaacaggcaaagcagtgcggccttggatacaaaactgtaaacacgagtctttaaaatgacagaggcctccttggccccaaatctgagccagaggcccccaccgaaggagcagatctccgcccacactgccctcccttccaacccgggcg

SEQ ID NO: 25917 - DNA, 1564 bp, Artificial sequence
  DNA replication origin
gtggcacagttcactgcctgggccttcgcttcccgcatttccacggcccaaaggtggcaaggtttagccagccagggctaaaaccatcgaggggagtggagctggctgctcaagtggggtcctccccaagtgcatttcccaacaactgcagcagttaagggcgtggctggtggcagccccagccgcaccccgaccccacacagtcctcataccccagctccaggccacctggggtctggcctttgaaagtcgcctgccttccaggcagctggcctcgggaccactgtcctcagggtcccgggcagggggactacctcgctgtccaggtcagacgtggccggcgctctgcccacctctaaaaccgtgccttggccccggcctccgatcatatccccagcagcccctccaagcgccgagcgccgtgggtgggcacggggcgctggcctgggtaggaggtcagaggcgccctgctctgggctgtgcccaggccactaatgatcgtgttgggaagtggaaggtctgcaggatcaagggggctggggggccggggaggggcggtgatgagcagccgtggaaaggccccaggcctggcatggagagagaagaggggctgtgggagttgcgtgggccagtgggaggacctgggccttcttgggagggagtggtctggagtggggggtagtgggtgaggggcgagcttcattctgcctgtctgggctggagcctgtttcctcccctggctgaagccagtgccggccccatcctgccttaagggtctcctgggtgaagacgagcccacaatcatcttggctctggcacctgcagcaaatcccatgggaacagacaggcagcgtggccatgggtgaatggagctgaggggctctgggctcctgacatcctgctctgacccttcctgaaagcccatggtctcttccatgctggctgcagtctgggaggcgttgggcccagcttggcctgtgaaagctgaaagcccacaccccctagtcagaggctggtttagctactcccctagtttagctactcttggggcagtgaaggccctggggctcgaagacctccccaggcaaccttaccctgcacacaccccactcctcctggcctgttcaggggtggtccctggtctccgtgctccttggcacaggccagtgccctctacctctgccaccacatccctggcagtggaggtccaagtcctggctgtcccccctctcaccagtggggccagggatcctggctctacccgctatgacttggttcaatggcccatcgcctctgcaactgactctgagggcattggagcagacatcaagccccaccctgcccaggcccatgcctggcacctggtttccacgacgaggcgcagctgtggctccgactgtggcagggctgggaagcagggggcctttgtcaggctcacggcctgaggtttctggcctctgtgatctcccctgggaacaggacggggaccgggccgcactccagcctgcccttcgtgagtttcctgaggtgtcctgcaatggccagattcgacggagaagccagt

SEQ ID NO: 25918 - DNA, 769 bp, Artificial sequence
  DNA replication origin
ccaggcccatgcctggcacctggtttccacgacgaggcgcagctgtggctccgactgtggcagggctgggaagcagggggcctttgtcaggctcacggcctgaggtttctggcctctgtgatctcccctgggaacaggacggggaccgggccgcactccagcctgcccttcgtgagtttcctgaggtgtcctgcaatggccagattcgacggagaagccagtcagctcccttgtcccctcactgattcctggtgagtacgtgagtcctgatgcgtgtccactacccgctggccctgtgctggggcctggtgcccaacccaggcagagacgtctggggacagccacactttggggagttagggcctgggaggagcagggaggcctcctcagatgggcttgggttggacttgggagctggcctcgagggaggcccgcaggtgcagcagcctggaggcagagagctgggtgtgtcagtgcctgagagggccgtggtgggcagctcaccagcaaagggagcagaaagggcccgggggagaagtgggcagctcagagggaagaggcggggctgggatgctgagcagggtgtggacggagatgcagctgggtgcaccagtgtggtttggctgggaagggaggcgtgtgtgtgggggagagaaattgggcagtggaggtcctgtcctgagaaaggggctgtctgcaggcactctgctccctctcgtggcctagtctgcctctacaccagcagagacctccctgccctgcggccacc

SEQ ID NO: 25919 - DNA, 1250 bp, Artificial sequence
  DNA replication origin
gcttgttagtcccccgctgtgtgcccacactcctcagcccttggacggtcaatgggaccagacgcagtggagcagggggcagcgctcttccgggaggctcgggccaggccggagcccatgccggcgggtggcggtggggggcggcggggaggctcaggcatggcaagctgcaggtctcgagccctgccctacggcgaggcaggtaaggcccagtgagaaatggagcacagcgccggtgggccagcactgctggggaccccggcgcaccctccgcagctgctggcccgggtgctaagcccctcactgcccagggcaggcggggcctgccactccgagtgcggggcccgcggagcccacgcccacccagaactcgcgctggcccgcaagcgccgcgcacagccccggttcccacccgtgcctctcccttcacacctccctgcaagccgagggagccggctccggcctcggccagcccagacaagggctcccacggtgcagcggcgggctgaagggctcttcaagcgtggccagagtgggcgccaaggccgaggaggcaccgagagcgagtgagggctgccagcatgctgtcacctctcacgactatgacgagaacatcatccgcaaggtgagcggccagaagttggtctacaagtttgtgtcctatcctgaggtcgcagggtgctccactgagtgaggactgcccgccccacccagaggtgtcggttacttcaccatggcagttgtggcccctgctgctgcacatgccgccccagggggcactgcctcaggaaagccaggcacacccaagggtgcaggaatggcaggccctggcggtttggcgcgcaacagccggaacaagtacatgcgctcgggcctctgttccaccttcacatccagtctctgcagccgcagccaccccctcagcctcggcctgctgcggtgctccccaacgcagctcctgcagtccaagcccctgggaggcctgcctggaggctgaggaagccggcttccctctgcaggtcatcctgaccccgcccgaggccccaaacctgaaattggaagagccgaatgtggagccgggcttgcgccgccctttgcccccggaagtggaagtggaagggcccgaggaagagctggaattcgcgggggagagagggttcgtgccagaaaccgccaaggccgagcctgaagtccctccacaggagggcgtgccagcgtggctgccgaggtccttatggacaccgcagggc

SEQ ID NO: 25920 - DNA, 1066 bp, Artificial sequence
  DNA replication origin
gctggcagccctcactcgctctcggtgcctcctcggccttggcgcccactctggccacgcttgaagagcccttcagcccgccgctgcaccgtgggagcccttgtctgggctggccgaggccggagccggctccctcggcttgcagggaggtgtgaagggagaggcacgggtgggaaccggggctgtgcgcggcgcttgcgggccagcgcgagttctgggtgggcgtgggctccgcgggccccgcactcggagtggcaggccccgcctgccctgggcagtgaggggcttagcacccgggccagcagctgcggagggtgcgccggggtccccagcagtgctggcccaccggcgctgtgctccatttctcactgggccttacctgcctcgccgtagggcagggctcgagacctgcagcttgccatgcctgagcctccccgccgccccccaccgccacccgccggcatgggctccggcctggcccgagcctcccggaagagcgctgccccctgctccactgcgtctggtcccattgaccgtccaagggctgaggagtgtgggcacacagcgggggactaacaagcagctccacctatagcccaggtgcaagatacactgggtgaagccagcagggctcctgagtctagtggcgacttggagaacctttatgtctagctaagggattgtaaatacaccaatcagcaccctgtatctagctcaaggtttgtaaacacaccaatcagcaccctgtgcctagctcagggtttgtggatgcaccagttggcacgctgtatctagttaatctggtggggacttggagaacctgtatgtctagctaagggattgtaaatacaccaatcagcactctgtatctagctcaaggtttgtaaacccaccaatcagcaccctgtgtctagctcagggtttgcggatgcaccaatcggcactctgtatctagttaatctggtggggacttggagaatctttatgtctagctaagggattgtaaatacaccaatcagcactctgtatctagctcaagagttgtaaatgcaccaatcagcgctct

SEQ ID NO: 25921 - DNA, 1701 bp, Artificial sequence
  DNA replication origin
gggggctgtgcccggaagtgggtgggtgggagaagcctcctgagcacagaggacagcagccaggcccaggcccaggccctgcaggcccccaggggctccagagccccagagaggaggaaggcctccgtgtgctcacaatcagctcacaccccggggaggaacctcagagggtcgggacaaggaaaggaaggccccggcccaacatcggggtctgggcgctggtgggacagggcaggctcagccttggggccggtcagggccctgttggggttcgggtccccctgccaggtccgcgtctgcagccacagcccctcaaccccagcagggaccccagagaccggctcgggaccccctggtggccgtcttgtgccactgcagttctgctgctgagaggttcccggggttcccggggttcccggggtccctggcccggcagcctcctgggctcccaggcaggcgcgctctgccgtccgctcatgcggggacagcggacctcagaggcaagcctcaaagacgcgcccagatcaggatcccaggaacccagctcacatacaaatcagaaaagccctaaagaagcagaaacaagaatcagtgaaacaagaaactatagaataagaacccaaacaaaagcaaaatgtcggcgttatcagacatagaatatgcaatgtgtgcttaagagggtttttttgtttgttttgttttgagatggagtctcgctctgtcgcccaggctggagtacagtggtgcgatctcggctcactgcaacctccgcctcccgagttcaagcgattctcctgcctcagcctcctgaatagctgggactacaggtgcccgccaccacgcccgactaatttttttggatttttagtagacacggggtttcaccgtgttagccaggatggtctcgatctcctgacctcatgatcttcctgcctcagcctcccaaagtgctgggattacagcgtggccaccacgctcggccaagagattttttaaacttacttacagaagctattcaaatattactgcaaaatgggaaattactgcacattgcattttgaaatgacctgagagttttacgaagaacttctagaactgaaaaccgtaatagatgaggctaaaataagaatggatgggacaggcagcgcagaggacacgcaggagcaggagctggtaacaccgaagaaagagcaggagacgccacccagcccgagcgcagccccgcggaggctggaccgaggctcccacaagggcttcttctgcccaaaggagaaacagagtcgggggaggcagtggctgggaattttccaaaatcgctgaataacaggatgtgtcaggatcaaggccaagtcccaagcaggataaataaaagcaaaccgcgtccacaccttgacgcttgccgatggaactgccaacaccagagacaaagagactttagaagcatccaaaaggaggccgggcgtggtggctcacatctgtaatcccagcacttttcgaggcagaggtgggtgggtcacctgaggtcaggagttggagagaccagccaggccaacatggtgaaacccggtctctattaaaaacacaaaaattagctggacgtggtggcgggtgtctgtggtcccagctactcaggaggctgaggcaggagaatcgcttgagcccgggaggcggaggttgcagtgagctgccatcgcgccacta

SEQ ID NO: 25922 - DNA, 1107 bp, Artificial sequence
  DNA replication origin
ggccacagcgtccccaggtcacagcgtccccaggtcacagcgtccccacacccagggaatgcaggactttggcagaggctgggatcccagaccacagagccccacaagctgacgcctgttcgcggatgccacagccatctccgcggcaggcgctggggaggggaggggatcacagtgctggacacggaccgggccccagccctgagcccaaggcagagccgggatccggccccgagagcgcccctgcccctgcccctgcccctgcccctgcccctgcccgtgcccctgcccgtgcccctgcccctgccccgagcccgggaagcgccgcgtggtcggcggcgttcgatgctgctgtcggccacacgggggcagcagagcctcagcggctgccgcagcgggtccagtttccggccgccggggttgggctggcggtgcctgggggtcctccccagaggcccgcgtgtgaaacgtccgagtgcgctgggcgctggacacggagatgggtgcttgggccacgggcctgggggaccccacacggccggctaggcaggcccagacagcccagggtgggggttccatgggggcaggaggggagaagcctgggctgtggagcagctgggacgtccggggaagggcctgggggtcagaggggcggctcccgggacagggaggcacgtggaggggcggggtttgtggcagccccggagccgcctctgaagcttccatctgcagcctcctgtggggccgggtctgcttctcttgctgggcacccacatccacccccgaggggtgtgcgacaacccccattccagcccactcagatggtctctagcccctcccgtcacagtgaaccccggtgtcggtgcgagacgcctccgtgtattcccggacgtccctctgcaggcccatccccacctcacagacagtcacacccttccaggccttgccccatccgcagtccctggcctcaccatcgcattgcagggaggcgggcatatgcaacctccatgaaataaagccctaacggagaaggccagagtgggaacttcgtttccaccagcaggtggggcagacaccctggctagccccggggaaaaccagtaaaaa

SEQ ID NO: 25923 - DNA, 941 bp, Artificial sequence
  DNA replication origin
gaggcttggggaggcgctggaaccgcagggcgcgggcctggggggcccacacgccacctcgagggaccgcacctggggaccacagacgcaggcccactcgggctctggagggccctcctggggctgcctggccacgctctctctctcctggtcccagatcccctccacggcccctccccacccgtccatccagaagttgcccagggctggtcagaaggggccacatgacacccccaggacaggctggaagtggagggatcgtggtcccgcagttcaactcccacccggcactccccactcaacatcacttaggacagttatattgtttcgggttcttttttttctgtattaaaagcattaacttccaatactgcttttataaaacacacatgcactgtggtgaggacgttttgttaaaatgaaagggacaagccggggctggacggggaagccccctggtggggggacacgggaggggaaccctgcactcacagaaaagcccctccattctttgcacgtttcaaatgttgtattttcaaatataattaagcgacgtgggaggaagggcaccgcgtgctaggcaggagcagccccctcctgggagggagatggcagacaggggacagggtgggggacagggtgggggacagggtgggggacagtgaccaggtgaggaaagatgcgggtcagggactgggggtgcaaatggggaggtggtgggggacgaagcccctccaaacctgacgccccgccgcttcccgagcccggggttcagggcttcctgttttcctgtgtgattatgagctcctgctcctgccctcgccccacgcgcgagtctcccctggaaggatgtgcaagcttttcacaagcaccacagactcttacaacccgggaccacctgggaccccaggcggtcaggaccagggccaccccacacggca

SEQ ID NO: 25924 - DNA, 2746 bp, Artificial sequence
  DNA replication origin
cctcaggagcattgtgtgcccccaggcctgtccccagtggtccccaccgtgggcccaccacagctcctgctgtcaagggcagcctgggtctgagccccgtccccctgtgcagggcacgggtctgggggctggcttgtcccctgctgggcggtgggcggcctggggtgtctcccagacacgctgcctgcggccggctggtgtggactgggcctggtgggccaggagctgccctcactatggtgacaggatcgggctgccaggctcctgtgggggctcagcaggaggggatgggagacggcaatgctcacgcctgacctgctgcccttgggggagccgtggtgccacctggccggcctgcctgagagacccccacggctggtgtgggagcctgggggagccctgggcaggtggtggggcagtgggcagaggtggctgcagagggacagggcctggccaggacgtcaccctgaggccactggagaggtcagcaggggcccaaggagatgcagggattggcagctggggagcacaggggtactcctgagccgtggtacccaaaggtcatgagctgagaggggaaaggcccagagccgctggatggtggattctgggcacctgatccgcagggtgtggtggccctctgagggacccctctgacagactgcaggcaagctgtcaagggtgtgtgtgtctgagggtgagtgagtgtgtgtgtgagggtgtaagggtgtgtgtgagagtgtgggtgtggagtgtgtgacagtgtatgagggtgtgggtgtgagggtatgtgagggtgtgtgggtgtgtgtgtgtgagggtgagtgtgagaatgtgaagtctgagggctgtgtgatggtgtgtgagggtgtgtgtgagagagggtgtgagggggtgtgtgagggtgtgtgagggtgagtgggtgtgtcggtgtgagggtgtgtgggtgtgagaatgcatgaagtctgagggttgtgatggtgtgtgtgggtgtgtcagggtgtgtgtgtgggcatgtgagggtgtgagggtgtatgagggtgtgggtgtgtgagggtgagtgggtgtgtcggtgtgagggcacatgagggtgtgtgggtgagtgtgagagagaatgcgtgtgaagtcagtgtgtgatgggtgagggtgtgtgggtgtgtgagggtgtgtatgagggcatgtgagggtgtgtaagggtgtgagggggtgagggtgtgactgagagtgtaagggtgtggggatgtgtgaggatgtgtgtgtgaggatataagtgttaggggtgcatgagagtgtgagggtgtgagggcttgtaaatgtttgtgaaggtgtgggagtgtggagatatgcggaagtgtggggtgagtgtgagggttgtgagaatgtgtgggagggtgtgagtgtgggatgtatgaagttgggattgtgtcagcatgtgtgtgagaatgtgggtgtatgagggtgtaagggtgtgtgagaatgtgggtgtgtatggatgtgtgggtgtgtggatgtgtgtgggtgtgtgaagtgagaatgtgtgtgtgggtgtgtgtatgagggtgtgagggtgtgagggttgtggatgtggggtgtgtgagggtgtgagggagtgtgggtgtgtggtgtgtgagggtgtgtgtatgtgtgtgaggatgtgtgggatgtgtgtggatgtgtgggagtgtgagggatgtgtggggtgtgtggatgtgtgggagtgtgaggatgtgtgagggtgtgtggggatgtgagggtgtgtgtggatgtgtggggatgtgagggtgtgtgtggatgtgtggggtgtgtgtggatgtgtggggtgtgtggggtgtgtgtggatgtgtgggagtgtgaggatgtgtgggtgtgtgtggggtgtgtgtggatgtgtggggtgtgtggggtgtgtgtggatgtgtggggtgcttcagaatgtgtgtggatgtgtgggagtgtgaggatgtgtgagggtgtgtggggtgtgtggatgtgtgagggtgtgagggtgtgtgtgcacgtgtggggtgtggggtgtgtgtggatgtgtggggtgtgtggggtgtgtgtggatgtgtgaaggtgtgagtgtgagggtgtgtggatgtgtggggtgtgtgagggtgtgtgagggagtgggtgtgtggtgtgtgagggtgtgtgtatgtgtgtgaggatgtgtgtggatgtggggtgtggggtgtgtggggatgtgtgggagtgtgaggatatgtgagggtgtggggatgtgagggtgtgtgtggatgtgagggtgtgtgtggatgtgtggggtgtgtgtggatgtgtggggatgtgagagtgtgtgtgagtgtgagggtgtgagggtgtgtgtggggtgtggggtgtgtggatgtgtgggggtgtgtggggatgtgagggtgtgtgtggatgtgtggggtgtgtggggtgtggggtgtgagggtgtgtggggatgtgaggatgtgtggggtgtgtggggtgtgtgtggatgtgtggggtgtttgaggatgtgtgtggatgtgtgggagtgtggggatgtaagggtgtgagggcttgtggggatgtgtggtgtgtgtgagcggctgtgtgcactggccgagttgcctgctgctgtcctggcctggggccaggcgtgtgccagctcctgtgtttgttgtgtgcccggcgtgtgctgggtgcccgagtcgggctgggtgtgtctgggtgtggccctggggtgtccctttctggacgtgtgtctccgtgcaga

SEQ ID NO: 25925 - DNA, 1127 bp, Artificial sequence
  DNA replication origin
ggggtgtgtggggtgtgtgtggatgtgtggggtgtttgaggatgtgtgtggatgtgtgggagtgtggggatgtaagggtgtgagggcttgtggggatgtgtggtgtgtgtgagcggctgtgtgcactggccgagttgcctgctgctgtcctggcctggggccaggcgtgtgccagctcctgtgtttgttgtgtgcccggcgtgtgctgggtgcccgagtcgggctgggtgtgtctgggtgtggccctggggtgtccctttctggacgtgtgtctccgtgcagaacggaggtcctcgtgttcccagaaggaagcccccagccccaggcgggtgcctgagaatagacctggggcctgtgggcgtggcagggctgcccctcggctcctcatggaccccccggacaccagtcccaccctgtgtctgtgatgctcactctctgagccttccctgaccccatgtgccaaagcctggcccagcaatgccacgtgtgcatgtgtgagcgtgagcttggcagcgggtgggagaatgtgtgcgtcagtgtgtgagcgtgagcacggcctgtgcttgtctggctgtgggactgggggcctctgtgacgctgtgagcccttgtggacctgagtgtgggccgtgtgagctgtgtgcacgtggctgtggctgagtgtgagcctctgagtgtgtgtgtctgtgccgtgtacctctgtgtgtctatatgtgtctgtgtgcctctgactttatgtgtgtctgtatctatctctgtgtgtgtctctgcgtgtggtagcatgtctgtgcttgtgtacctgtgtctgcgtgtgtctttgtctctgtgtgtgcctatgcgtgtctgtgtgtggtagtgtgtctgtgcttgtgtttctgtgtctgtgtgtctctgactctgtgtgcctatgtgtgtctgtgtgtctctgtgtgtgtggtagtgtgtctgtgtgtctctgactctgtgtgtgcctatgtgtgtgtgtgtctctctctgtgtgtgttagtgtgtttgtgtgtattgtgtgtctttatgtctctgtatgtctatgtgtctgtgtgtctctgtgtgtttgtgtgttctgtgtgtctctgtggggtgtgcatgactatatttgtgggaggctgt

SEQ ID NO: 25926 - DNA, 1742 bp, Artificial sequence
  DNA replication origin
gaaggcccaggtgcccgtcctgagcgttatccagggccctgcctcaggcctcatgccggggccaagcccagggctggctggtggccacgcagagctgagaggggcggggaagtgaggctgggttggaggaaagctgaggggcccaggcctcccactccagcccccgaggcagaccctggcccacccagggaccccctcccatgcacacaagcacacacaacacatatatgggcatgcgtgtgcacacacactcgctgcagcccgcagcactggctggcccaggtgtcctcgggacgtggtccacgcggtgctgacacgagctggccctgagcgcgggctctgcggggtgccattcccaggccctgcaggggcacatgcggtgtcgtggggcagcaactgtgacctctgccccgcagacccggacatgccgccagagaggccaaggcgtacgctctccgagccttccctgaccccatgtgcccaagcctggcccagcaacgccatgtgtgcatgtgtgagtgtgagcttggcaacaggtgggagaatgtgtgtgttagtgcatgagtgtgagcatgagcgtgtgagatgcaagcgtgtgtgcagtgagtggtggatgagctggaggtgtgaggttgtgcgtgatgcggacaggtgtgtagtgtggacaggtgtgtggtgtggacaggtgtgtggggtggacaggtgtgtggtgtggacaggtgtgtggggtggacggggtgtagtgtggacaggtgtctggtgtggacaggtgtgtggtgcggacaggtgtgcggtgtggacaggtgtgtattgtgggcaggtgtgtggggtggatggggtgtagtgtggacaggtgtgcagtgtggacaggtgtgcagggtggacaggtgtgcggggtggacaggtgtgcggggtggacaggtgtgtggtatggacaggtgtgtggggtggacagggatgtggggtggatgggtgtagtgtggacaggtgtgtggtgtggacaggtgtgtggggtggacggggtgtagtgtggacaggtgtgtggtgtggacaggtgtgtggggtggacggggtgtagtgtggacaggtgtgtggtgtggacaggtgtgcggtgtggacaggtgtgtggtgtgggcaggtgtgtggggtggatggggtgtagtgtggacaggtgtgtagtgtggacaggggtgtagtgtggacaggtgtgtggggtggacaggtgtgtggtgtggacaggggaggcaggttcatgacacggggcaggacagtggccaggggctgcaagcgtgacctgcgggagggggtgcctgtgtgcgggcatgtctgtgtgtgtctttatgtgtctgtgtgtgtgtgtctctatgtgtgtcagtgtgtgtctgtgcatccacgtgcatgtgtgtgtgcatatccgtgtgtctgtgtctttatgtgtctgtgtgtgtatgtgtttgcctgtgtgtgtctctgtgtctgtgcatccatgtggatgtgtgtctatatgtgtgtctctgtgcacatatgtgtgtgtctgtgcatgtccgtgtgtgtctgtgcatttctgtgtgtgtctctgtgcatgtctgtgtgtgtctctgtgcatgtctgtgcatgtctctgtgtgtgtgtctctgtgcatgtctgtgtgtgtctgtgcgtttctgtgtgtgcatgtctgtgtgtgtctgtgtgtatgtgtgtgtgtctgtgcatgtctgcgtgtctgagtgtcaggggat

SEQ ID NO: 25927 - DNA, 2913 bp, Artificial sequence
  DNA replication origin
ctcctgggagacctgaggctgtcctgggcttcagcccccagggctggggtcgcagtgcgcagggtcccaggacctcctgctcctccctctgggatgttgttacccaccccagcctccccagcccgatgttcggggtcccgtgtgtatctgtgggtttccccgaggctcagagtcctgccccggccagcacagacggggaacagggcgagggctgggtggtggcccagtgacctcgggggccaggccttgtaggtgcaggtgggcccgtgctgccgtgcccctcacccacagacaggccccgactctggcccagcacccgctcggccgctcccagctgcaggctgagctctgcccatttgctcctgggccatgtgtgtttggagcctttcctgagccaggccttgggtgggccctgtttccccaggccaccgatgagcagagcactgtcggcttacagaggggacccccgaggggggtttggtgggcacacaccagtgagccctggagctggtggggggtgagtgtgtgagcgtgtgagcatgggtacaaatgtgacagtgacttagcgtcggggtttgagtgtgggtgggggtgtaagtgtgggtgagggtgtgagtgtggaagtgtgttagtgagtatatgaatgtgagggtgagtgtgagtgaggatgtgtgtataggcgtgtgggttgtgtgtataggaagtgtgtgtgttgtgtgtgtataggaggtatatgtgttgtgagtgtatgataggtgtatgtgttgtgtgtgtataggtgtatgagttgtgtgtgtggtgtataggttgtgtatgagtgggtggtgtgtgggttgtatgtatgtttcatgtatgtgttgtgtgtgtgtggtgtatgggttgtatgtgaatgtgtggtgtatgggttgtgtgtgtgcataggtgtatgtgttgtgtgtgtttgtggtatatgagttgtgtgtgtgagtgtgtgtataggtgtataggttgtgtgtgtgtggtgtatgggttctgtgtgggggtggtgtatgggtgtgtgtatgagtattatgtgtgtgtgtggtgtgtatgtgttgtgtgtgtggtgtatgggttgtatgtgtgtataggttgtgtgtgtttgtggtatatgggttgtgtgtgtgtgtgtataggtgtatgggttatgtgtgaatgtgtggtgtatgggttgtatgtgtaggtgtatggcttattagtgtgtatatatgtgtacgggttgtgtgtgtgtggttatggcttgtgtatgtggtctgtgcgttgtgtatgagtgtgtggtgtatgagttgtgtgtgtgtataggtgtatgtgttgagcgtgagtttgtggtatatggttgtgtgtgtatataggtgtatgggttgtgagtgtgtggtgtatgggttgtgtaggggtgtatggcttgtttatgagtgtgtgtataggtgtatgggtttgtgtgtggttatggcttgtgtgtgtttatggtctgtgggttgtgtgagtgtgtgctgtatgagttgcatgtgtgtgtataggtgtatgcgttgtgtgtgagtttgtggtatatggattgtgtgtgagtttgtgtatagatgtatgggctgtgtgtgtgtggtgtatgaattgagtgtgtgtataggtgtatgtgttgtgtgtgtagtgtatgggttgtgtgtgtgaatgtgtataggtatatgggctgtgtgtgtggttatgacttgtgtttgtgttctatgggttgtgtgtgtggtgtatgtgttgtgtgtgagtgtgtggtgtatgggttgtatgtgtggcatatgggtatgtgtatagatgtatggtttgtgtgtgagtgtgtggtatatgggttgtgtgtgagtgtgtggtatatgggtgtgtgtgtataactgtatgggttgtgtgtgtggtatacagattgtgagtgtgtgtggtgtataggttgtgtaagtgtgtatgggttgtgggattgtgtataggtgtatgggttgtgtgtgagtgtgtagcatatagtttgtgggtgtatgtggtgcatgggttgtgtgagtgtgtggtgtatgggcgtgtgtgtataggtatgtgggttgtgtgtgtggtatatgggttgtgtgtgtgctatatgagtgtatgagtgtgtgtaggtgtataggctgtgtgtgtatgggtggtgggtgtgtgtaggtgtaggagttgtgtgtgtgtggtgtatgtgtgtgtgtaggtgcacaggttgtgtgtgtggtatatgggtgtgtgtgtataggtgtatgggttatgtgtgagtgtgtggtatacagtttgtggtgtgattgtgtagtgtatgggctgtgtgtggtgtataggtgtgtgtgtataggtgtatgggttgtgtgtgtgtggtatattggttgtatgtggtatatgggtatgagtgtgtataggtgtatgggttgtgtgagtgtgtggtatatggtttgtgtgtgtggtgtatggttgtgtgtggtatatgggtgtgtgtgtataggtgtatgggttgtgtgtgagtgtgtagtatatagtttgtaggtgtgagtgtgtataggtgtatgggttgtgtgcgtgtggtgtatgggttgtgtgtgagtgtgtggtatatgggtgtgtgagtgtatataggtgtatggttggtgtgtgtgtggtatatagtttgtgagtgtgtgtggtgtatgggttgtgtaggtgtgtggtgtatgggttgggtgggagtgtgtgggacgtgactggataagttcgtgagtgtgagtgtgtggctgtgggtgtctgtgtgtctctgggtgtgtgtggatgggggtatgtgggtgtgagtgtgtgtgtgaggtgtgggtgtgggggtgcactgcgtgtcctccctgggggtggcccctgagagtcggggcctgagcccggatgtctccg

SEQ ID NO: 25928 - DNA, 869 bp, Artificial sequence
  DNA replication origin
gggggtcccctctgtaagccgacagtgctctgctcatcggtggcctggggaaacagggcccacccaaggcctggctcaggaaaggctccaaacacacatggcccaggagcaaatgggcagagctcagcctgcagctgggagcggccgagcgggtgctgggccagagtcggggcctgtctgtgggtgaggggcacggcagcacgggcccacctgcacctacaaggcctggcccccgaggtcactgggccaccacccagccctcgccctgttccccgtctgtgctggccggggcaggactctgagcctcggggaaacccacagatacacacgggaccccgaacatcgggctggggaggctggggtgggtaacaacatcccagagggaggagcaggaggtcctgggaccctgcgcactgcgaccccagccctgggggctgaagcccaggacagcctcaggtctcccaggagggactggatagtgggggatggtcagagaacaggacagccagcagggtgcagcccgaggacagggatggatgctgggaggtcaacaggacaggggcaggggcaggggctgtggagtgtgagaaggtcctggagggcctggagaacctgtgggtcagtgtctgtgggaaggaggccaggagcagccctgagtggccaggctggcagggatgaggaggtgggggcagtgaggtgagggtgaccgagacaggcctctggccagggaggggaccttggctgggctctgactgaacccagggctcctggagaaggggccccaggcggggatgaggatgtgggcatctgactccatcaacaatggggcttccaacacgcacagcctgggcctcggagacctgggccct

SEQ ID NO: 25929 - DNA, 1189 bp, Artificial sequence
  DNA replication origin
taatggtgccctcaaccgaccgactgctcccgaccggccgcagcccttggccccgcggcccacctctgcctgaccccggccctgctctcctcctggcagctcagggattcgccactgcctgggctcagccggagcaaagcccgtgtcccccggcaccccacacagccgagtcacccctccctcacggcccccacctcctcggccctgccggcccagccacgctgagctgctcctgggcccccttcccagagacatcgaagccctgcaggttctccaggccctccgcccactccactacccctgcccgctcccagctgcaggctgagctctgcccctttgctcctgggccatgtgtgtttgaggccttccctgagccaggccttgggtgggccctgtttcccccaggccagccatgaacagagcggagggcatgtgcccagctcatagaggagacccccaaggcggggtgtggtgggcacacaccggtgagccaggggctggtggcccagaggcttagacaggccgtaggccccatcggaagtgacagggcctgagggaagctcagtgtgtgtgtgtgagtgtgtgtgagtgagtgtgtgtgtgactgtgtgtgtgaggtgagtgtgagtgtgagtgtgtgtgaggtgtgtgtgtgtgagcaggtgagcgtgggtatgaatgtgacagtgactatctctgtctctgtctctctctgtttctgtgtatctttcttatctctgtgcctgtctctgtctctgtctttctctgttactctgtctctgtgtctctctctgtctctctatctctgttactctgtctctgtctctgtgtctctctatctctgttactctgtctctgtctctgtctctctctctctgcctctctgtctttctctgttactctgtctctgtctctctctgtctctctgcctttctctgttactctgtctctgtctgtgtctctctgtctctctgtctttctctgttactctgtctctgtctctgtgtctctgtctctctgtctttctctgttactctgtctctgtctctgtgtctctgtctctctgtctttctctgttactctgtctctgtgtctctgtctctctgcactgttttcctggtgaaggagaagccatgtaccttcctgcatgatctgtgctcagctcacaaccaccccatgattgaggaca

SEQ ID NO: 25930 - DNA, 790 bp, Artificial sequence
  DNA replication origin
tacggcctgtctaagcctctgggccaccagcccctggctcaccggtgtgtgcccaccacaccccgccttgggggtctcctctatgagctgggcacatgccctccgctctgttcatggctggcctgggggaaacagggcccacccaaggcctggctcagggaaggcctcaaacacacatggcccaggagcaaaggggcagagctcagcctgcagctgggagcgggcaggggtagtggagtgggcggagggcctggagaacctgcagggcttcgatgtctctgggaagggggcccaggagcagctcagcgtggctgggccggcagggccgaggaggtgggggccgtgagggaggggtgactcggctgtgtggggtgccgggggacacgggctttgctccggctgagcccaggcagtggcgaatccctgagctgccaggaggagagcagggccggggtcaggcagaggtgggccgcggggccaagggctgcggccggtcgggagcagtcggtcggttgagggcaccattacatggagggctgtgagacgggagaccccattcccttcattccttgtgcacgtgttagtgaggaagcttctagaaggagggcattgctcgtagtgggtgagtgtgagcacagatcatgcaggctggcgtgctgccgtgaagtgcctctctttactttccagacctcagcatggcaagcccgtcctgcgccccagggtctttctggagtacacgccgcgcggtcctggtgggcaccatacctggcacccacgctttggccgggcc

SEQ ID NO: 25931 - DNA, 1822 bp, Artificial sequence
  DNA replication origin
catacccacgctcacacactcacactgagcttccctcaagccctgtcacttcctatggggcccacggcatgtccaagcctctgggccaccagcctcatggctcactgctgtgtgcccaccacaccccgcctcagaggtcccctctgtgagctgggcacgtgccctacactctgctcatgggtggtctggggaaacagggcccacccaaggcctggctcaggaaaggccccaaacacacatggcccagcagcaaacgggcagagctcagcctgcagctgggagcggcggagcgggtgctgggccagagccggggcctgtctgtgggtggggggcacggcagcacgggcccacctgcaccccccaggcctggcccccaaggtcactgggccaccacccagccctcgccctgttccctgtctgtgctgaccggggcagggctctgagcctcggggaaacccacagacccacatgggatggagagacagagatagagagagacagggagagacagagagagatagagagacagagatagagacagagatacagagacacagagaaagacagagagagatagagacagagagatacagagagacagagaaagagatagagagacagagatagagacagaaagacagagatagagatagagatgaaagacagagatacagagagacagagaaagacagagagatagacatgagagagacagagatagagatacagagagacagaaagagagatagagacagagcgatagagataagagaaagacagagacaaagagatacagagagtgagagagacagagagagagataagaagagagactgagatagagacagagagacagagaaagacagagttagaaaggcagagaaagacagacaaagagagatagagagaggagaagagaaacagagacagacagcaacagaaagacagagaggtatatacagagaggaagagacagagacagagacagactcagaaagacaaaaagagacagagaaagaaacagggagagagaaagacagatataaggagagatagagagaggcagagctacagagaggaagagacacagacaaacagagagacatacaaaaacagagacaccaaatgacacagacaggcagagacagacagagatgaagagacagagagacagagacagaggcagagagacagagagacacacacaggaagagacagatgagagagacagatatagacagagatacagaaagagacagagagagacatacacagggacacgaacagacagacagagatacagaggcagagagacagagatatagacagagacatggaaagacagagaagagagagacacacacacagggacacaaagaggctgagatatagacagagatacagaaagagaagcagagagacagagagagacacacacagggacacgaagagacagacagagagacagaggcaaagaaagggacacagcaaagggacaggcacagagggagggatagacgggaagagagacggagggatagagacagacacgggggagagatggatggagaaaggaggcacagacggagacacacagaaagagagagaggccaagacaggcaagatggcgggacaaagcccagcagacgggcttgacagagatgagtcagagacaccgacaatgggacagagacagagattcgggcagggagataccttcagagaggcagagagacagggagacagaagggtggccagagacagggacagcgggaaagatggagctggaggctcagatggagacgggtgtgacagagctggg

SEQ ID NO: 25932 - DNA, 1367 bp, Artificial sequence
  DNA replication origin
tcagggacgcgtccaccacagcccgtgcacaggctcctcacggcactgagttcacccggggcgcgggccgtttgtcctcaggagtccggctgtgccctccgcccccagccctgtcctgctgaggctgcagctgggtcccggggcacagggcggccctgagcaccttgtcatgttggtccctgtcgggtgggctgctggctgtctgtggagctggcagagccgcggttcagccttggaggccggtcctggggcccagcagccgtggggagcactgcccagtcccgtgcccacagggaatcacctgggctgaggaagggcccacacgccgacgggatcggggtcaggcagcgcacgcctggcaccgagatcccacgtcccgaagtggggacacggcccaggggcactgttccgggagggtctcaagatggggtctcctatttcaatcttcactccttctgcacctgttagctgggaaccttctagaaggaggggtgtcctcaatcatggggtggttgtgagctgagcacagatcatgcaggaaggtacatggcttctccttcaccaggaaaacagtgcagagagacagagacacagagacagagacagagtaacagagaaagacagacgagagagagacacagagacacagacagagtaacagagaaagagagacagagagagacagagacagagacagagtaacagatagagtcacagagagacagagagagagacagagtaacagagaaagacagagacagagacagagacagagtcacagagagacagagacagagagagaaacagagacacagaaagagacatgcagacacagagacagagatgaggagttacagagagacagagagatagagacagagatagagagacagagacagagagaaagaaacagatacagaaagagacattgacagagacagagagaaaaacaaagacacagagacagacacacacagagacagaaaaagacagagataaagttacagagagacagagatacacagagacagagagacagataaagagagacagagatacagacagagacagagaaaaacagagatagaaacagagagacagagataaagttacagagagagagagcaagacagagataaagagagacagagacagagtgagagaaacagaagcagtaagagataaagagagttacagagacagagatagagagagatcaagaaagagagacagagatagaaagatacacacagagagatagagatacagagagacagagatagagagacatatagagagacagagatagaaagatacacacagagagacagagatacaaagagacagatagagagtcactgtcacat

SEQ ID NO: 25933 - DNA, 780 bp, Artificial sequence
  DNA replication origin
actaagtcactgtcacatccatacccacactcacacccaaacacacatggcccaggagcaaatggggagacctcagcctgcagctgggagcggctgagcgggtgctgggccagagtcggggcctgtctgtgggtggggggcacggcagcacgggcccacctgcacctacaaggcctggcccccgaggtcactgggccaccacccagccctcgccctgttccccgtctgtgctggacggggcaggcctctgagcctccaggaaacctgcagatccacacaggacctggaacatcgggctggggtgggtaacaacatgggagaggcgggagcaggaggtcccaggaccctgcgcactgcgaccccagccctgggggctgaagcccaggacagcctcaggtctcccaggagggactggacagtgggggatggtcagagaacaggacagccagcagggtgcagcccgaggacagggatggacgctgggaggtcaacaggacaggggcaggagctgtggagtgggcaaaggtcctggagggcctggagaacctgtgggtccgtgtttgtgggaaggaggccaggagcagcccagagtggccaggctggcaggggtgaggaggtgggggcagtgaggtgagggtgaccgagacagtgaggcctctggccagggaggggaccttggctgggctctgactgaacccagggctcctggagaaggggccccaggcggggatgaggatgtgggcatctgactccatcaacaatggggcttccaacacgcac

SEQ ID NO: 25934 - DNA, 1161 bp, Artificial sequence
  DNA replication origin
tgtgcccagcacaagcacggcccacaggaccacagaaggacctgcaccccacaccagggaaacaggggttctgggaaggggacattggaccaggggcccagagagacacagagacatagagagagacagggacagggagagacaagagacacagagacatagacagagacaaggatggggagagataagagacacagagacatagagacagggatggggagagagataagagatgaagagacatagagagagacagggatggggagagataagagacacagagacatagagagagagagacagggatggggagagacaagagacatagacagagaaagacaaggacaaggagagataagagacatagagacatagagagacagggatggggagagagataagagatgaagagacatagagagagacagggatggggagagataagagacacagagagagagagacagggatggggagagacacagagacatagacagagaaagacaaggacaaggagagataagagacacagagacatagagagacagggatggggagagataagagacacagagacatagagagagacagggatggagagagacacagagacgtagacagagaaagacaaggacaaggagagataagagacacagagacatagagagacagggatggggagagataagagacacagagacatagagagagacagggatggggagagacaagagacatagagacagggacaaagacagacacagagagagagatggggatggagagagataagagacagggacggggagggacagagacacaagagacagaaagagagagatgagatgagatagataagaaacagagacagagatgggagaaaaagggaggagatgggaacagggaaaaagagacatggagacagacatgcagagagaacacaacagaggcagagaacacacagggagagaaagaggcagcaagatgggcccaggaactcaggtgcaagcccctctcacacagtcatactcacaaacacacaccacgactattatacaacattcacacacaaacacacagaaacatacccatgctcacagccacacactaagtcactgtcacatccatacccacactcacacccaaacacacatggcccag

SEQ ID NO: 25935 - DNA, 888 bp, Artificial sequence
  DNA replication origin
agacagagatcaggcagacacatgggtagatcctaggacatataatgaatggatgggtggatggagggtgggtagatgaaggatggatgggtggtaaaatggatgggtgggtaaatggctggatggaggatggacggatggatatgtgatggatggatggatgaaggatgggtggatggaggatggatgagtggatgaaggatggaagatggatggactgatggatggatgatggatggatggatgatggatgggtgggtaggcggatggaggatggaagggtggatggaggatggaagatagatggaggggtgaatggaggatgggtggatggagggaggattgaggatagatgggtgggtgggtgggtagatctatggaggctaggtgtatggaagataattggatggagaattgctttatgaatggatgaatgaagagatggaaaatagctttatagatggatggatggatggatggatggatagatggaagaaggatgaatggatggaaaatagctttatagatatatgggtggatatttaagtgatagccttacattaatagatgaatggacgatgaatggatgggtgagtgggtaggagtgttactgatggaggggtggatatacggataatagctttatagatggatggatggatagatggacggaaggatagaaagacaggtgaatgactggatgtatcagcatatgacaagcaggtacagctgtacatgggaggtctatgccctgagaccctgaggaaaatgaggatgcccgtgctggtggccctcacctggccctcgcttgtaacccctcagccacattccctgggaaggcaacagaggcctctggtcttgcccattcaacctttggcacactgagtg

SEQ ID NO: 25936 - DNA, 1025 bp, Artificial sequence
  DNA replication origin
ggatttcgaggtgagggcgccctggattgtcaaggatttcgaggtgagggcgccctggattgtcaaggatttcgaggtgaaggaaccctggattgtcaaggatttcgaggtgaaggaaccctggattgtcaaggatttcgaggtgaaggaaccctggattgtcaaggatttcgaggtgagggcaccctggattgtcaaggatttcgaggtgagggcgccctggattgtcaaggatttcgaggtgagggaaccctggattgtcaaggatttcgaggtgagggcaccctggattgtcaaggatttcgaggtgagggcaccctggattgtcaaggatttcgaggtgagggcgccctggattgtcaaggatttcgaggtgagggcgccctggattgtcaaggatttcgaggtgagggcgccctggattgtcaaggatttcgaggtgaaggacaccctggattatcgagggggctaggtccgaggacaagtgtcctagctggagacagacgaggagacacagggatggggagaggcagaggcagacaggggtggtgctatggtctgagggtctgtgtctgcccgaaactcctgtgtgacagccgtcatcccagagtgagagcatgcagagctggggcctcagggaggtggttagggcctgagggggaacactcaaaaatgtgactcggtccctgatctcactagagacccaaaagaaaagggaccccagagagcagccctgccctctttccaccatgtgaggacgcagcgaaaagatgggggtctgtgaaccaggaatcggcccttcctggaacttgaccctgctgccatcctgaccttgaacttccagcttccctgagaaatgaatgttgctgctgaacccaccagtctatggtatttttgttattgcagccagaaatgactaagacgcagcagccacgtccccctggcgagggccgggggcatcccaaggttcataacaaaagctccagagcttccctgaaccgccaggtgtgtcttcccaggaccct

SEQ ID NO: 25937 - DNA, 965 bp, Artificial sequence
  DNA replication origin
tcctcctgcacgtcctcaggggtcctgcctcccgccagccactccagggccacacacacctcccacagagccctccggagacgtggggtttgtgaaaaggatctttactaagaaacccagagagaaagaagtatgactgctgaagccagaggctggacgaggtcatagggacgaggtcggcagctgctgtccctgcaggaaaccccttctctggctgtgggagcccctctacccactccaggggcccgaagccctcaactgtcctgtggcctggcctcagagggcttccctgtgccttcaggctgcagaaatgggggctgcaggtggatggcaggaggggtgggtgaagggatgggggctcaggtggatggcaggaggggtgggtgaagggatgggggctgaggatagatggcaggaggggtgggtgaagggatgggggctgtggatggatggcaggaggggtgggtgaagggatgggggctgaggatagatggcaggaggggtgggtgaagggatgggggctgtggatgggtggcaggaggggtgggtgaagggaaagaaggtctgggtgaggcttgggggacggggatgccagacacttggacctcagggctagaagggtcagaccgaggctggggagtgaggccgtgggctggtgttgggctggacgcagactcagctgtgtcctgggctgggtgccgggccctccttggcttttggtgattgtacagtcagaatgggagtgacccggagacccaggggcctgggatgagctcagaacggctagcagccacccctcctcgatgactctgttgaagggacagacacggttttcgggtgggggctgcgactggtggttctctcggcgcctgtaaccttgcggctgagccggcccctctgggctcaggttcactggccatcagcccacagtagtgaccttgtgcccccttttcttgtctgcttcc

SEQ ID NO: 25938 - DNA, 678 bp, Artificial sequence
  DNA replication origin
ccccagatccaaacgctccccccggtcatgcacaccaagggcacagcacccaccaaatccacacggaaacacgggcaccgggcaccccatgagcacaaagcccctccatgtctgaagacagtccctgcacaccgtcacagccatacattcagcttcactctcacgtcccagcccacctgcacccagctctgggcctggagcagcagaaagaggtgtgagggcccgaggcgggacctgcacctgctgatgacccgggaccagcaggcagctcacggtgttggggaagggagtggagggcacccagggcaggagccagagggaccaggctggtgggcggggccgggccggggtagggccaggaggcagctctggacacccacaggcctgggctcatagtccacaccaggacagcccctcagagcacccatgcagtgagtcccaggtcttgggagccaggccgcagagctcacgcatccttccgagggccctgagtgaggcggccactgctgtgccgaggggttgggtccttctctggggagggcgtggggtctagagaggcggagtggaggtaaccagaggtcaggagagaagccgtaaggaacagagggaaaatggggccagagtcggggcgcagggacgagaggtcaggagtggtcggcctggctctgggccgttgac

SEQ ID NO: 25939 - DNA, 1087 bp, Artificial sequence
  DNA replication origin
actcctgacctctcgtccctgcgccccgactctggccccattttccctctgttccttacggcttctctcctgacctctggttacctccactccgcctctctagaccccacgccctccccagagaaggacccaacccctcggcacagcagtggccgcctcactcagggccctcggaaggatgcgtgagctctgcggcctggctcccaagacctgggactcactgcatgggtgctctgaggggctgtcctggtgtggactatgagcccaggcctgtgggtgtccagagctgcctcctggccctaccccggcccggccccgcccaccagcctggtccctctggctcctgccctgggtgccctccactcccttccccaacaccgtgagctgcctgctggtcccgggtcatcagcaggtgcaggtcccgcctcgggccctcacacctctttctgctgctccaggcccagagctgggtgcaggtgggctgggacgtgagagtgaagctgaatgtatggctgtgacggtgtgcagggactgtcttcagacatggaggggctttgtgctcatggggtgcccggtgcccgtgtttccgtgtggatttggtgggtgctgtgcccttggtgtgcatgaccggggggagcgtttggatctggggtgtcagatgcacatgtgggtttgaggtctgtgaggggcacgtagcctgctctggggttccggtgtgggtgagtgggggatggagcccacgcatccatcctgtgtttggctgtggggtgctgctgctgacagggtgacagggagggttggactggaggacaccacgtgagggcctctccatttctctctgggatccagcggcccaggtatggctcagaggaagggcttggcagtagcctcgctggaggcagcgtgagaggcggagtgtgggccacgtgtgaccacgtgtggggtgtctatggcgccctggtggtggtacagggtgctgtggagttgctatggggcctagtgtgtgcacagctgtgccttgagtgaggcgtgagtgggcgagactgggtgtgtgaggctggcgatcccctgggggccgattcaggat

SEQ ID NO: 25940 - DNA, 1437 bp, Artificial sequence
  DNA replication origin
gggggatggagcccacgcatccatcctgtgtttggctgtggggtgctgctgctgacagggtgacagggagggttggactggaggacaccacgtgagggcctctccatttctctctgggatccagcggcccaggtatggctcagaggaagggcttggcagtagcctcgctggaggcagcgtgagaggcggagtgtgggccacgtgtgaccacgtgtggggtgtctatggcgccctggtggtggtacagggtgctgtggagttgctatggggcctagtgtgtgcacagctgtgccttgagtgaggcgtgagtgggcgagactgggtgtgtgaggctggcgatcccctgggggccgattcaggatggaccaaggggcggtggggggcagtaggagagggggcctggctgctgacctgggcctggtgtgcccacagggcagggtggcggaggctgcggggtgtgagtgggctcggctccaccggccccggtgctggggccaggactcggcaaggcgggacagggcagagaggcgaacgccagtggcacagacttgggcgagggctgtcgggtcgtgtgtgtctgtgtgggggtttcacttagggctgtttttccacctggaggggcctgtgtgcccatctatacctgggggtgcaggggctcctgtccaggggggtagaagccaagcccccaagagagagggctgtgggggctcccttgccccttccctgaggacctcccctgggtctttggactccttggagggggtagacccagagtgggggcagagagggcccggggtagctgtgatgagtccctgcagatatgctgtttgacaaataaccctgacacgaaggcagatggatgagtggcacctcagccctgcccacctcctcccaccgcctctcctggggggactcagccctgcccacctcctcccactgcccctcctggggggcccattcctctgtgccaagatgcacctgcccacagccctgcccgctcccaagaatgggtgtacctggggctctgagcaggcacagtttattgggggtagcttcctggggtcattgcaacagtggacagaaggtctggccagtcctccccactgcacagctggatggagccctgggagggagggaggcaggagtacgtcatttaccgggatttacagacaccgctcgctggacggtctgtgaggggcttgctgcctcatggactgcacggcagatgaactcatctttctgctcccattcggccctggtcacctccaggcggctgaagacgaagaagccggagcccttggtcttgcggggctgcgtcgtgctgtgccgggcgtccgggagctgcacctcgttgtgcagccactgcaccgagatgtcctcaggcatgaagttctggatcaggcaggcgagggtgcgcttgtcccggctccccggcca

SEQ ID NO: 25941 - DNA, 1276 bp, Artificial sequence
  DNA replication origin
ctgcactggtaggtctccccctcgatccagtctcgggtgcccaccggcagggtggacgtgacggttaacgtgccattgcgctgcttctcctcctttctggtggagtggttcacaggcttcccactggcccgggaccaggtcaggttcacggtccccttgctgggtgccaggtccaccaccagacaggtgatcgtgggcgacttgcggatgaacaggtcgaacgggctgggccggcttaggtaggcgctcacccctctcgggttggaatctgtggtacaccggagggctgtgtgaggcccacccgcccctcttctctggcctccgtggcggccaccagggcaggtgggaacgtacctgcacacttcttggtgctgtcctcaaaggtgtgaccttgataggtgacctggcaggtgtaggtgcggtctgacagccagtgcttctggctgagggtgagctcgctttgtgtggaggccagctcaccctcctgcgtggtagaggcggtggacaagtccacgtccatgacctgcccgtcctccagccaggtgatgttgatagtccctggggtgtacccagagacgaggcacaggagctggatggtcggggggaagtgcccgccgccgtcgcaggacgactgtaagatcttcacggtgggcggggtgaagtccctggagcagactgggggagagctggtggtcatgagggttgttggcctctctgagctctgtgtgccctcctcttgcccccgcgtcctggcccgggtccccaggcatgctgggtgttcccacgtttgagcccacccaccccctcaacccctgcccactctgccagccctcagcctggcactcctgggaactgtggtctctgagcttggccctctcttaccgctgaaggttttgttgtcgacccagtctgtggacgatggagtgtgtgccacacggcaggtgaacatctgcttggcccacgcacccgagacggtcagcaagctgatggtggcatagtgaccagagagcgtgagggtggtggctggtaaggtcatagttgtcccgttgagggagcctgtgtcccaggtcaccatcaccggctccgggaagtagcccgtggccaggcagcccagagtcacggaggtggcattggagggaatgtttttgcagcagcgggtcaaggggaagacggatgggctctgtgtggaggctgtgaggacagaacctagtcagtgccagcctcaggccagcgcccatcaggcctggggggcctggatgggggagctggggacccc

SEQ ID NO: 25942 - DNA, 1104 bp, Artificial sequence
  DNA replication origin
ctgggccaccctcacagcatcaaccaagcttcttggtcactgcgtggactctaggcatcccttccctgcatggggacacaggaaagctagaaacagcctaacgccgacctggagaaggcagggggctgggaatcttggctgggcccaagaccaagaaggtcagagaccccacgctgggcagggctaggctgggtgcagactgcctgccacccctaggacagggacagccaacccagagctgggagggagggtggggaggcggcagcagggagctgtcctgagctccactgcgcaactggctgatcttggcaagtctgagctgggcggactgaggggggcttggctgagtggactagactgagacgggcctaacagactgagctgaggcgagctgggtgggctgagagggctaccctgtcccttagaggacaggtggccaagctgggctgtcctgagccagggcgatcggggctggcccgggccaggcgggtttagctgagttgagtgagtggactgggtagagggaaatgagctaggctcagctgagctaggcttgagctgggttatcctaagccctaaggtggactgagctgggctgagctggacttatctggggggcagggcaaagtcaggctgagctgaggtggcctgccctgggtggtccaggattgagttaagctgaattaggctgacctggacttgactggacttggttgaaataagctgggccgacacaggagtagggacaagctacagttctctacttaggataaaatgggtgctcgtggactatccgggctgaaggagaccaagctggggtattacctgctgagcttacctgacctggcctgagttcagcagggctgcgctgagctggacagacctgagccaagcttagctggttgggctgagtaagctgggctgagctaaatgggattgagctgaggagggctaggctgggggagagacctgacgacggacagggttaaaagctggagtgagcaggccttaaattattgaactaaattgggctggggtgatctgaatttagctgggatgagctgggctgggctgaactgtgcccacgtgaactgggctaaacta

SEQ ID NO: 25943 - DNA, 800 bp, Artificial sequence
  DNA replication origin
aagaagcagatgcttcctgcagctcctgcccctgcagggcctggcgcctggaccaggttcccctagggaaattgggcccctccctgagccacccggggcccaccgccccctttccacctgggaccgagcatcctccagagggtcagccctcctgagggaacaccatgcccagccccaggaccctccctcaactctccagcaaggctgcactgtgggcggcccctgcacataccccagcagtccgtgctgtgatgtaacatgacatggtgtgacgtggtgtgatgtctctggtgtgacgtggatgtcatgtggcatgatgtgacaggacatggtgtgatgttgtatgatgtggtatgacagtgtgatatccgaggggtgatgtgatgtggtgtgacatgttgtaatgtccctggtgtgaggtggtgttgcacatggtgggatgtggtgtgacatggtgtaatgtccctggtgtgaggtggtgttgcacatggtgggatgtggtgtgacacagtgtgacatccctggtgtgatgtgctgtgacatagtgtgatgggtatgacatccctggtatgatgagctataatatgaaatgatgtggaatggtgtgacatgatgtgatgtgatgggacaaggtgtgacatccctggtgtgatgtggtgtgatgaagtgtaacaggctgtgacatactgtgatatggtgtggcatgtgacgtggtgtgacatgtgatgtggtgtgatggggtgtgacatccctggtgtgatggggtgtgaggtagtttgacgtggtgtgatgtaatgtga

SEQ ID NO: 25944 - DNA, 1636 bp, Artificial sequence
  DNA replication origin
cctgggatgccggttacctccttttgtgtgagcacctggtggtccagagggcagggacgtcctgctgaggggacacctggccctcagcgccctgcatgcaccaagcagcggaggtctggggtagacctgctatgcacagggtctggaaggggggcgtttcagggctcagagggcgactgcgaagccagagagccatggggttgagggcggtgaggtcagggggcaggtgtggcctgggtggtggctgagcatggcccacggctcgtgtgtggggtctgggcggccctggacaccccgcagagggtggccctaggccccctgccttatcatgttcctgtagtcggggacgatggtctgcttcaggtccaccactgaggagaagatccacttcacctgtaggcaaggcacagcacaggggtgagcgaggccacagccctgcccctgagccccacccacccctcaggccacccaggccacagccctgctcccaaggcccatctgcctttcaggccacccaggtaccggggctctacactgcctgcccccaggcctggacatggagagcagagccatggtagtgacagcatgtggataacacagaagacaacgtcagggacaggtggggacagcgtgggggacagggagaggtggggagattgggggacaggtggggacagcatgggggacagtgtcagggacaggtagggacagcgtgggtgacagggagaggtggggagagtgggggacaggtgcggacagcatgggggtcagtgtcagggacaggtagggacagcgtgggggacagggaaagctggggaaagtgggggacagcatgggggacagtgtcagggacaggtagggacagcgtgggggacggggacaggtgcggacagcatgggggacagtgtcagagacagggacagtgtggggggtgagtgggggacaggtggggacagcatgggggagtgtcagggacaggtggggacagtgttggggaaggtggggactgtggggtacagtgttggggaaggtggggacagcatgggggacagtatcaggaatgggggaccgcatgtgggacagcgtcagggacaggcggagactgggggacagtgtgggggaaaggtgggacagcatggcggacagtgttggggacaggctgggggagagcattggggacaggtacagcgtgggggacagaatcagggagaggtggggagaccgtggggcacagcatcaaggacaggtggggacagtgtgggggacagtgtcaggatgggggatagcatgggggacagtgtcggacatgtggagacagcctgggggacactgttggacaggtgtgtacagcatgggggacagtgtcagggacagtttgtggagagagtgggggacagtgtcagggacagtgtgtgacagcatgggggacaatgtcaaggacagctggggacaacgtgcggccgaccttgaagaaggtgacggtggcactgtagcacacgcttagcaggaagagtgtgatgaagatggtgatggtcgtccacagcccgtccagctccccgtcctgcgcctccgcacagctctcctccagttgcagctctggacaggaagggggtggtcagtgctgtgtccccctggg

SEQ ID NO: 25945 - DNA, 1162 bp, Artificial sequence
  DNA replication origin
tgggggacagtgtcaggatgggggatagcatgggggacagtgtcggacatgtggagacagcctgggggacactgttggacaggtgtgtacagcatgggggacagtgtcagggacagtttgtggagagagtgggggacagtgtcagggacagtgtgtgacagcatgggggacaatgtcaaggacagctggggacaacgtgcggccgaccttgaagaaggtgacggtggcactgtagcacacgcttagcaggaagagtgtgatgaagatggtgatggtcgtccacagcccgtccagctccccgtcctgcgcctccgcacagctctcctccagttgcagctctggacaggaagggggtggtcagtgctgtgtccccctgggcttgggcctctgggggtgattccctctgtggcggggcccaggatgtagggcccggccgggatgggccaacaatgtcctgaggtcagctcccggaagctgtccaccctgggcaccagctttggccctggggctcagccagacacccggccctagatagcgacctggccctcagcaggacccactccccgtctcccgtgtccctccctgagccccagagggcaggaggatggtgaaacccacccctcatgtgaccccagctgcagggaagggctgtattgggacgtgggccagtgccagggacgcgacgtggcgtgtgttcccctgtgtgtgtggcggctgcaggggcaccttgtgagaggagggctgggtttgtctgagctggtcagcatgtggagaagctgccgagcggctcgtgggccttgaggtgccgcgtggggctcgtgggggcctgtgtctgaggagtgttcacgtgtgcgaggaccttgctctggtctgggtgctgtgcggttcgcccgggtgaggctccgtgtgtgaggcgtgcacgtgtgtgtgtggtggccgtgtggccggccaacctcagtgcggggtttgttgaacgggtctgggctgagtgtgtgtgtgggcatctggaccagtccctccacagggcccgagagtgcatgtccccggagtcggttgtgtccccatgtgggttcgaggctgggcagggctgccaggggttagtgccgtgggggtagatgggtgagggagggcctgtccctacgcacatggactaggcatgccc

SEQ ID NO: 25946 - DNA, 2266 bp, Artificial sequence
  DNA replication origin
cctggggacctgggacctgagctgtgatttcctaggaagacaaatagcggctgacggcgggggcggggccgcccacatgtacctcgccagaacaggaagggttgagacccccacctcggtgagtggggtcagcacagggcaggggcacaggctcgggaggaggacagcctgggcgcagccgtcggcgctcctagacctgagctgctgaacaggctgcaagaggctggggagacgcgggcgcgaggccagccccacatggaagcccaagcggagccagcacgggggaggtgggcagccttcaggcactgatgcccacccagtgcgagacgacggggaccgtgggcaggggcttccaagccaacagggcaggacacaccagaggctgactgaggcctccaggacgaccgggctgggagcacgaggaacatgacgggatgcggcagaaccggctgtggggtgatgccaggatgggcacgaccgacctgagctcaggaggcagcagagcgagggaggaggagaggccccaggtgaacggaggggcttgtccaggccggcagcatcaccagagcccagggcagggtcagcagagctggccgtagggccctcctctcagccaggaccaaggacagcaggtgagccgggagcagagcagcgagggtgagtgtggcagcaggacagaagggtggaagccaaggagcccagaggcagaggcagggacaggggagggacaggggctgggctcagagccagctgatggggctggggcacctgctggcggggagcagggctgtggtcagcagcggagaggaggggagagctgtgctgagtgcacgggcgggaggagggaagagtccagggaggcccagaaaggcccagagtgcagcaggcctggggcgaggggaggggctgaggcccagcagagcagaggccactgaggagctgaggttccggagaggcttccagagcaggagcagtgcagggacgggaggatccgggagctcatccaggaggggcacataggcaaggggctctgttggggagacctgactggacactggggctgctccacagcatagggaacaagccaagtgctgcaaaaacaaaaatgaggccagaaaaacagcccaaacctggacagagggtgccaggacaggcaggggggcaacagtggcctgagtgacattgctgccccgggttgagggaggacagagtgagcagggggcaggcattggagttcagggtaccaggaccgagcagccacaggtgagcagggcaggtgggggtagaaggagcagggggcagctcctggaactcaggggaccagggcagagcagccacaggcaaacaggagaggggagggggggcaggaggagcagggggcagctcttggagctcaggggaccagggcagagacgccgcaggtgagcaggggcaggtgggggggcaggaggagcagggggcagctcttggagctcaggggaccagggcagagcagccacaggtgagcaggggcaggtggggggcagaaggagtagggggcagctcttggagctcagaggaccagggcagagcagccacaggggaggaggggcaggtgggaggcaggatgaacagggggcggctcctggaactcaggaaacaggggagagcatcagaaggtgagcagggccagtgggaggttgcagagcaggggacagctcctggagctcaggggaccagggcagagccgccgcaggtgagcaggggcaggtggggggcaggaggagcagggggcacctcctggagctcaggcgaccggggcagagcagcctcaggtgaaaagggccggtggggggcaggaggagcaaggggcagctcctggaggtcaggggaccagggcagagccgccgcaggtcagcagggccggtgggaggcaggacgagcaggggacaggcactagagctcagggcaaggcagccacaggtgagcagggctggtgggaggcatcactcagctcctagactttggcaggagctgggtagttgccggcagcagacagctgagagctggtgaaagtgcagtgcagcctcctggtgccgggaagggagtgtgagtccatcccactgagcagttggcaagggcgagctgggatggagaagggaaggcattccagggctcagggctgggctctcaggcaggggcaggtgtggctgcagggggaacgtgtgcttgagaccaggagggtcccagggctggccccagcggaccctgggcaggaaggcctctg

SEQ ID NO: 25947 - DNA, 1250 bp, Artificial sequence
  DNA replication origin
ggcctgggatgctggtcactacctccttttgtgtgagcacctggcgggccggagggcagggacgtcctgctgaggggacacttggcccccagcgccctgcatgcaccaagcagcggaggtctggggtagacctgctatgcacagggtctggaaggggggcgtgtcagggtcagagggcgactgcgaggccagagagccatggggttgagggcggtgaggtcgggggcaggtgtggcctgggtgatggctgagcatggcccacggctcctgtgtggggtctgggcggccctggacaccccacagagggtggccctaggccccctgcctgatcatgttcctgtagtcggggacgatggtctgcttcaggtccaccactgaggagaagatccacttcacctgtaggcaaggcacagcacaggggtgagcgaggccacagccctgcccccaaggcccgcccacccctcaggccacccaggtgccacggcctcaccactgcctgctctgaggcttgaacttggagaacagagccaggtcaccaacagtatgtggacagcacagacgacagcatcagggacaggtggggacagtgtgggggacagtgtcagggacaggtggagacagtgggggagagtgttggggacaggtgaggacagcatggaggaaagtgtgagggacaggggacagcatggggacagtgacagggagaggtggggacagtgtggaggacagcatcagggacaggtggggacagcatgggggagagtgtcagggacaggtggagagagtgtgggggagagtgttggggacaggtgaggacagcttggaggaaagtgttgggacaggtgggggcagcatgggcgacagtgacagggagaggtggggacagtgtggaggacagtgtcggggataggggacaggaggaaactgtgggggacattgttggggatggggggatagcgtgggggacagtgttgggcacaggtcaagacagcgcggaggagagtgtccgggacaggtggggacagcatgggggacagtgtcagggacatgtggggacagcatggggacagtgtgtgacagcatgggggacaatgtcaaggacagctggggacaacgtgcggccaaccttgaagaaggtgatggtggcactgtagcacacgcttagcaggaagagtgtgatgaagatggtgatggtggtccacagcccgtccagctccccgtcctgcgcctccgcacagctctcctccagt

SEQ ID NO: 25948 - DNA, 1086 bp, Artificial sequence
  DNA replication origin
ggggacagcatggggacagtgtgtgacagcatgggggacaatgtcaaggacagctggggacaacgtgcggccaaccttgaagaaggtgatggtggcactgtagcacacgcttagcaggaagagtgtgatgaagatggtgatggtggtccacagcccgtccagctccccgtcctgcgcctccgcacagctctcctccagttgcagctctggacaggaagtgggtggtcaatactgtgtcctgctgggctcgggcctctgggggtgattccctctgtggcaggacccaggatgtagggcccggccgggatgggccaacagtgtcctgaggtcagctccccacagctgcctgccctgggcaccagctttggccccgggactcagccagacacccagccctagatagcgacctggccctcagcaggacccgctccccatctcctgtgtccctccctgaggcccagagggcaggaggatggtgaagcccacacctcatgtgacctcagctgcagggaagggcggcattgggaagtgggccagtgccagggacgcgacgtggcgtgtgttcccctgtgtgtgggggcctgtgtgtgtgtggcggctgcaggggcaccttgtgagaggagggctgggtttgtctgagcaggtcagcatgtggagaagctgccgagcggctcgtgggccttgaggtgccgcgtggggctcgtgggggcctgtgtctgaggagtgttcacgtgtgcgaggaccttgctctggtctgggtgctgtgcggttcgcccgggtgaggctccgtgtgtgaggcgtgcacgtgtgtgtgtggtggccgtgtggccggccaacctcagcgcggggtttgttgaacgggtctgggctgagtgtgtgtgtgggcatctggaccagtccctccacagggcccgagagtgcatgtccccggagtcggttgtgtccccatgcgggtgcgaggctgggcagggcagccaggggttagtgccgtgggggtagatgggtgagggagggcctgtccctacgcacatggactaggcatgcccccgagtgggcatggaggtcggaggacagggcgctcacagg

SEQ ID NO: 25949 - DNA, 2447 bp, Artificial sequence
  DNA replication origin
tgtctggactcccccttaccctgtgacacagaaaccaccagaagaaaagggaacttcaggaagtaagcggtgccgccggtttcaatcctgttcttagtctttgcagcgtggagttcacacccctggggacctgagggccgagctgtgatttcctaggaagacaaatagcagctgacggcgtgggcaagtctgcccacatgtaccgcgccaaaacaggaagggctgagacccccacctcggtgagtagggtcagcacagggcaagggcacaggctcgggaggagaaggacagagcctgggtgcagccgtgggcgctcctggacctcagctgctgaacaggctacaagaggctggggagacgtgggggcaaggccagccccacatggagacccaagcggagccagcacgggggaggtgggcagccttcaggcaccaacgcccacccagtgcaagatgacggggaccgtgggcaggggcttccaagccaacagggcaggacacaccagaggctgactgaggcctccatgacgaccaggctgggagcacgaggaacctgacgggatgcggcagagccggccgtggggtgatgccagcatgggcaggacccacctgagctgaggaggcagtagaacgagggaggaggagaggccccaggtgaacggaggggcttgtccaggccagcagcatcactggagcccagggcagggtcagcagtgctggccgtggggccctctctcagccaggaccaaggacagcaggtgagccgggagcagagcagggagggtgagtgtggcagcaggacaggagggtggaagccaaggagcccagaggcagaggcagggacaggggaggcacaggggctaggctcagagccacctgatggcgctggggcacctgctggcggggagcagggctgtggtcagcagcggagtggaggggagagctgtgctgagtgcacagatgggaggagggaagagtccagggaggcccagaaaggcccagagtgcagcaggcctggggcgaggggaggggtgaggctccgtgcgttcagggagctgacccagcagagcagaggccactgaggagctgaggttctggagaggcttccagagcaggagcagtgcagggacgggaggatctgggagctcacccaggaggggcacatgggcaagggcaaggggctctgttggggagacctgactggacactggggctgctccacagcatagggaacaagccaagtgctgcaaaaacaaaaatgaggccagaaaaacagcccaaacctggacagagggtgccaggacaggcaggggggcaacagtgacctgagtgacattgctgcccgggttgagggagggcagagtgagcagggggcaggcattggagttcagggtaccaggaccgagcagccacaggtgagcagggcaggtgggggcagaaggagcagggggcacctcctggagctcagcagaccagggcagagcaactgaaggtgaacaagggcaggtgggaggcaggatgagcagggggaagaccctggagctcaggggaccagggcagagcagcctcaggtgcctcaggtgagcaggggctggtgggtggcaggacgagtaggggacagctcctggagctcaggggaccaggacagagcatcaagagctgagcatggctagtgggaggtgggcgaacagggtgcagcccctggaactcgggaccagggcagagcagcggcaggtgagcacgggctggtgggaggcaggaggaacagggggcagctctgggacttcaggggaccaggggagggcatctgaaggtgaacaggggctggtgggggcaggaagagcagggggaagcccctggagctcaggggaccagggcagagcagccacaggtgagcaggggctggtaggaagcaggaggagcaggggacagcccctggagctcagagcaccagggcagagcaccctcaggtaagcaggggcaggtaggaggcaggacgagcaggggacagcccctggagctcaggggacagaggagagcatcagaaggtgagcaggactgaggcttagcctcagggaatcagagcagagcagccacaggtgagcagggccggtgggaggcaggacgagcaggggacaggcactagagctcagggcaaggcaaccacaggtgagcagggccggtgggaggcatcactcagctcctagattttggcaggagctgggtagttgctggcagcagacagctgagggctggtgaaagtgcagtgcagcctcctggtgccaggaagggagtgtgagcccatcccactgagcagttggcaagggtgagctgggatggagaagggaaggcattccagggctcggggctgagctctcaggcaggggcaggtgtggctgcagggggaatgtgtgcttgagaccaggagggtcccagggctggccccag

SEQ ID NO: 25950 - DNA, 861 bp, Artificial sequence
  DNA replication origin
gagctcacaggcaggggcaggtctggctgcagggagaatgtgtgtgcttgagaccaggagggtcccagggctggccgagtggaccctgcacaggaaggcttctgaggctggtgctccagaaggaacaagatgggctgccaggagccagggccaccagctgtgctcctgggggccgaggggacgtgggacaggtggatgaacacactgaagctgagtggaggtggtgcagggcagtgtagcagcagaggggagccagaggggcccattcagagcctgggcagagttggccagagcctgtggtgcaggtgaggggaaggggtagggggcagggccctggggctgagcagaggggatggcctctgcttagcttagggcacttagcttcctcagaggcgaggggcacacccgagttgcagtggcactccagggccactggactacaagcagagagagaaatggggcctccctggggcctgggggatgctggcatcatgcagggtggggaggtccaagggcaggtgcaagtctcctacctgtgctgggggagcctggactgagatcaggagggaccttgccaggccgaagctctagagagagggaggagctgaggaaggacgaacgtggaagtgggaggtaaggggggatggtatgaggccagagggactgggcagaccaaaagcccgaggaggtgtcgcacaggaagtgtccagaatggaataggaagtgtccggaatggaaaaggaagcatccagcatggaacaggaagcatccagagtggaacaagaaaggtccagcatggaaaaggaagcatccagagtggaatgggaagcgtccagagtggaacaggaagcatccagaatg

SEQ ID NO: 25951 - DNA, 1779 bp, Artificial sequence
  DNA replication origin
ggaaggaggagtggttggattcgtttgtgtggcatcgagcagctggagctgcaccagagttgggggtgaaatccccagagcccggaccctgctgtgccgtgggagggctcgccgctggagggtgggcttcagggtgcctggcctgaactgggtgctgaagcccagccctttaactctcaggacacgctgctgcagccccgcggggggtgagggagagagcacctggggtgcagggcgggcagcagctgcatcaccggctctatcccaagcccaaggatggcccctccctgaagcacccaggccccacctccccctttccacctggaaccgagcatcctccagagggccagtcctcctgcaggaacaccacgcccagccccaggaccctccctcaactctccagcaaggctgcctccacgcaccccctagcagtccatgctgtgatgtaacatgacatggtgtgatgtggtgtgatatccatggtgtgccagggtgtaatgtgtgatgtgacaggacatggtgtgatgtggtatgacagagtgtgacatccctggtgtgacatggtgtgatgtggtgtgatgtgatgtgacatggttggacatggtgtgatgtggtgtgacatagtgggatggggcatgacatccctagtatgataggatatgatatggtgtgatgtggtatggtgtgacatggtgggacatcctgtgacagagtgtgacacccctggtgtgatgtggtgtgacgtagtgtgatgtgatatgacctgatgtgatgcggtgtgacatccctggtgtgatggggtatgatatcatttaacgggtgtgatgtgatgtgatgtgatggagtgtgacatctctggtgtgacatgtgtgatgtggtgtgacagagtgtcacatcgttggtgtgatgtaatgcagtgtgacatggtgtgatgtggcatgatggggtgtgacagggttcgacctccctcatgtgatgaggagttgcatggtgtgatgtggtatgacatggtgtaatgtcccttctgtgatgtggtgttgggctacaaggttggacatggtgtgatgtggtgttacatccctggtgtgatgcagtgtgacatagtattatatggtatgacatccctggtatgatggggcataatatggtttgatgtggaatggtgtgacatgatgtgatgtaatgggacaaggtgtgacatccctagtgtgatgtggtgtgatgaagtgtaacaggctgtgacatagtgtggtgtggtgtggtgtgacatgatgtgatgtggtttggcataatgtgacgtgttctgatggggcgtgacgcccctggtgtgatggggtgtgatgttgtgtggcattatgtgaagtggtgtgatgacgggtgacatccacggtgtgatggggtgtgatgtggtgtgatgtggcatgacataaggtgatgtggcataacatccctggtgtgatggggtgtgatgtggtgtgacacaatttgatgtggtgtattgtggtgtgacataatgtgatgtggcataacatccctggggtaatggggtatgatgtagtttgacatggcgtgacgtaatgtgatgtggtgtgatggggtgtgacaactctggtggggtggggtgtgatgaagtgtggtgtgacatgatgtgatgtctgatgtgctgtgtcagggtgtcacatacttggtgtgatgtgatgcggtgtgacacagtgtgatgtggcatgatggggtgtgacctggtacgacatccccagtgtgatgaggagttacatagtg

SEQ ID NO: 25952 - DNA, 3445 bp, Artificial sequence
  DNA replication origin
cgggactggacgccagcctctgtgatgagttctggctgtgtccacgctcctggctctcccggtgtccctccacctctctccccgatgctcctgggcctcctctgtcctcaggccccaccaaggctgagtcttgcccgcctgggacctggtcaccagccttctctgggaggcctgtctgggcagatgcccagcccttccttgggctatcctcacccttgcactgtggggctcctgcagcggccacatggcccaggctcttctctgagtgatctcggtggactggagtgggtgggaggtggcagtgtcctgggcctggccccttctctccccagtgcggactctggggctggctgtccctgcgggtcgagttccacccgagaatccagcagtgtgggcaggcagccaaggggtggtgctggcaccgagactgttctcaggagccagagagcagcgttctttgcttgaaatcagaacaacctcattcctcatgtcaggagttcacgggagtgcccggaatggaggctggctggctgcgggctgggaggaaggccgtctgagtgagccttcgcagctcttggaagcctccccaacagggcctgatggtgctgtggcttccctaccttggcggctgattttcccactcaccaactggaaaccacgcctgtgttcaggaggctggtgtggacggggttggctccagggcgaggtcctgcctgggtgggggcctgggatgccggtcactgactccttttgtgtgagcacctggtggtctggagggcagggacgtcctgctgaggggacacctggcccccagcgccctgcatgcatcaagcagcggaggtctggggtagacctgctatgcacagggtctggaaggggggcgtgtcaggggtcagaaggtgacttcgaggccagagagccatggggttcagggcggtgaggtcgggggcaggtgtggcctgggtggtggctgagcatggcccacggctcgtgtgtggggtctgggcggccctggacaccccgcagagggtggccctaggccccctgcccgatcatgttcctgtagtcggggacgatggtctgcttcaggtccaccaccgaggagaagatccacttcacctgtaggcaaggcacagcacaggggtgagcgaggccacagccctgtccccgagccccacccacccctcagggcactgagggccacatctcttcccccaaggtccacccacccctcatgccacccaggccacagccctgcccctgaggcccatccgcccttcagtccacccaggtgccagggcctcaccactgcctgctctgaggcctggacatggagagcagagccagggcaccaacagcatgtgggcagtacagaagacagcgtcagggacaggtggagacagtgtgggggatagtgttggggacaggtggggacagagtgggggacagtgtcagggacaggaggagacagagtggtggacagtgttggggacaggaggaaacagtgtgggggacatttttggggacaggaggggacagtgtgggggacagtgttggggacaggtggggaaagcatggtgtacagtgttggggactggtggggacagcgtgggggaaagtgttggggacaggaggggacagcgtgggggacagtgttagggagaggtgggaacagtgtaggggacagtgtcagggggaggtggggacagcgtgggggacagtgtcagggaaaggtggggacagtgtgggggacagtgtcagggagaggggacagtgtgggggacagcgtcagggagaggtggggacagcatgggggacagtgtcagggagaggtgcggacagcatggacagtgtcgggacaggtggggacagtgtgaggacattgttgggacaggtggggacagtgtgggggacagtgtcggggacaggtgggaacagcgtgggggacagtgtcagggacaggtggggacagcattggggagagtgtcagggacagatggggacagtgtgggggacagcatcagggacaggtggggacagcatgggggacagtgtcaaggacaggtggggacagcatggggtacagtgtcggagatgggtggggacagcatgagagacagtgtcggggacagtgtcagggacaggtggggacagcatgtgggacagtgggacaggtggggacagcatgggggacagtgtcagggacaggaggagacagcatgggggacagtgttgcatacaggaggggaaagcatggggacagtgtcagggactgtaggggacagagtgggggacagtgtcagagacaggaggagacagcatggggacagtgttggggacaggaggggacagcgtgggggacagtgtcggggacaggtggggacagtatgggggacagtgtcggggacaggtggtgacagcgtgggggacagtgtcagggacaggaggagacaggagaagacagcatgggggacagtgtgaggtacaggaggaaactgtgggggacattgttggggacaggaggggacagcgtgggggacagtgtcagggataggaggagacgagaagacagtgtaggggacagtgtcgggacaggaggggacaggaggaaacagcatgggggacattcagggacaggaggggactgtgggggacagtgttggggacaggtggggatagcatggggtacagtgttggggactggtggggacagtgtggggaatagtgtccgggacaggtggggatagtgtgggggacagcgtcagggacaggtggggatagtgtgggggacagcgtcagggacaggtggggatagtgtgggggacactgtcagtgacagtttgtgacagcacaggggacagtgtcagggacagggaacgtgtgggggacagtgtcagggacagtttgtgacagtgtgggggacagtgtcagggacaggtgggtgcagcattggggatagtgtcaggcacatgtggagacagtctgggggacactgttggacaggtgggtacagcgttggggagtgtcagggacaggtggcgacagcgttggggatagtgtcagggacatgtggagacagtctgggggacactgttggacaggtgggtacagagtgagggacagtttgtgagagcgtgggggacagcgtcagggacaggtggggacagcctggggacagtgtcagggacagtgtgtgacagcatgggggcaatgtcaaggacagctggggacaacgtgcggccgaccttgaagaaggtgacggtggcactgtagcacacgcttagcaggaagagtgtgatgaagatggtgatggtcgtccacagcccgtccagctccccgtcctgcgcctccgcacagctctcctccagttgcagctctggacaggaagggggtggtcagtgctgtgtccccctgggcttgggcctctgggggtgattccctctgt

SEQ ID NO: 25953 - DNA, 1024 bp, Artificial sequence
  DNA replication origin
acagcctggggacagtgtcagggacagtgtgtgacagcatgggggcaatgtcaaggacagctggggacaacgtgcggccgaccttgaagaaggtgacggtggcactgtagcacacgcttagcaggaagagtgtgatgaagatggtgatggtcgtccacagcccgtccagctccccgtcctgcgcctccgcacagctctcctccagttgcagctctggacaggaagggggtggtcagtgctgtgtccccctgggcttgggcctctgggggtgattccctctgtggcggggcctaggatgtagggcccggcctcgatggcccaacagtgtcctgaggtcagctcccggaagctgtccatcctgggcaccggctttggccctggggctcagccagacacccggccctaaatagcgacctggccctcagcaggacccgctccccgtctcccgtgtccctccctgagccccagagggcaggagatatgaagcccacccctcatgtgaccccaggagcagggaagggctgtattgggaagtgggccagggccagggacgtgacgtggtgtgtgatcccctgtgtgtgtgtggcggctgcaggggcactttgtgagaggaggactgggtttgtctgagctggtcagcaagtggagaagctgccgagaggctcgtgggccttgaggtgccgcatggggcttgtaggggcctgtgtccgaggagtgttcacgtgtgcgaggaccttgctctggtctgggtgctgtgcagttcgcccgggtgaggctccgtgtgtgaggcgtgcacgtgtgtgtgtggtggccgtgtggccggccaacctcagtgcggggtttgttgaacgggtctgggctgagtgtgtgtgtgggcatctggaccagtccctccatagggcccgagagtgcatgtccccggagtcggttgtgtccccatgcgggtgcgaggctgggcagggctgccaggggttagtgccgtgggggtagatgggtgagggagggcctgtccctacgcacatgg

SEQ ID NO: 25954 - DNA, 1257 bp, Artificial sequence
  DNA replication origin
ctgggtgtcagcagcgccggggtcaacgtgtgcgtaggaagcagggacagggtcagcgccggcctcggcgcctggaggccggagccagttcccgatcctggggtccgttcgggtcccggcgcacctagcaggctcgggctgagtggaagctctaggtcccggggcttccggcccttctgcggctgggagatctgagggctggaagccgcgtggccgcccgcctgccctgcggtgtccataaggacctcggcagccacgctggcacgccctcctgtggagggacttcaggctcggccttggcggtttctggcacgaaccctctctcccccgcgaattccagctcttcctcgggcccttccacttccacttccgggggcaaagggcggcgcaagcccggctccacattcggctcttccagtttcgggtttggggcctcgggcggggtcaggatgacctgcagagggaagccggcttcctcagcctccaggcaggcctcccaggggcttggactgcaggagctgcgttggggagcaccgctgcaggccgaggctgagggggtggctgcggctgcagagactggatggtgaaggtggaacagaggcccgagcgcatgtacttgttccggctgttgcgcgccaaaccgccagggcctgccattcctgcacccttgggtgtgcctggctttcctgaggcagtgccccctggggcggcatgtgcagcagcaggggccacaactgccatggtgaagtaaccgacacctctgggtggggcgggcagtcctcactcagtggagcaccctgcgacctcaggataggacacaaacttgtagacttaatgccatgtcaaatttgttctctatcttgagcggggatccagaatcgaatagtaaaagaacattaactccagaggccacgaaagaaattgaattagttgaagaaaaaattcagccagcacaagtaaatagaatagaccacttagccccactccgacttttgatttttgctactgcacattctccaacaggcatcattgttcaaaacacagatcttgtggagtggtccttccttcctcacagtacgattaagacttttacattgcacttggatcaaacggctacattaattagtcaggcaaaattacgaataataaaattgtgtggaattgacccagataaaatcattgttcctgtaaacaaggaacaggttagacaagcctttataaattctggtgcatggcagatgggtcttgctgattttg

SEQ ID NO: 25955 - DNA, 1662 bp, Artificial sequence
  DNA replication origin
aagtgggtgggtgggagaagccctcctgagcacagaggacagcagccaggcccaggcccaggccctgcaggcccccaggggctccagagccccagagaggaggaaggcctccgtgtgctcagaatcagctcacaccccggggacgaacctcagagggccgggacaaggaaaggaaggccccggcccaacatcggggtctgggcgctggtgggacagggcaggctcagccttggggccggtcagggccctgttggggttcgggtccccctgccaggtccgcgtctgcagccacagcccctcaaccccagcagggaccccagagaccggctcgggaccccctggtggccgtcttgtgccactgcagttctgctgctgagaggttcccggggttcccggggttcccggggtccctggcccggcagcctcctgggctcccaggcaggcgcgctctgccgtccgctcatgcggggacagcggacctcagaggcaagcctaaaagacgcgcccagatcaggatcccaggaacccagctcacatacaaatcagaaaagccctaaagaagcagaaacaagaatcagtgaaacaagaaactatagaataagaacccaaacaaaagcaaaatgtcggcgttatcagacatagaatatgcaatgtgtgcttcagagggtttttttgtttgttttgttttgagatggagtctcgctctgtcgcccaggctggagtacagtggtgcgatctcggctcactgcaacctccgcctcccgagttcaagcgattctcctgcctcagcctcctgaatagctgggactacaggtgcccgccaccacgcccgactaatttttttggatttttagtagacacggggtttcaccgtgttagccaggatggtctcgatctcctgacctcatgatcttcctgcctcagcctcccaaagtactgggattacagcgtggccaccacgctcggccaagagattttttaaacttacttacagaagctattcaaatattactgcaaaatgggaaattactgcacattgcattttgaaatgacctgagagttttacgaagaacttctagaattgaaaaccgtaatagatgaggctaaaataagaatggatgggacaggcagcgcagaggacacgcaggagcgggagctggtaacaccgaagaaagagcaggagacgccacccagcccgagcgcagccccgcggaggctggacggaggctcccacaagggcttcttctgcccaaaggagaaacagagtcgggggaggcagtggctgggaattttccaaaatcgctgaataacaggacgcgtcaggatcaaggccaagtcccaagcaggataaataaaagcaaactccacgtccacaccttgacgcttgccgatggagctgccaacaccagaggcaaagagactttagaagcatccaaaaggaggccgggcgtggtggctcacatctgtaatcccagcacttttcgaggcagaggtgggtgggtcacctgaggtcaggagttggagagaccagccaggccaacatggtgaaacccggtctctattaaaaacacaaaaattagctggacgtggtggcgggtgtctgtggtcccagctactcgggaggctgaggcaggagaatcgcttgagcccgggaggcggagg

SEQ ID NO: 25956 - DNA, 1132 bp, Artificial sequence
  DNA replication origin
ctgccccaggtgcagccttgcaaggcccccaggccacagcgtccccaggtcacagcgtccccacacccagggaatgcaggactttggcagaggctgggatcccagaccacagagccccacaagctgatgcctgttcgcggatgccacagccacctccgcggcaggcgctggggaggggaggggatcacagtgctggacacggaccgggccccagccctgagcccaaggcagagccgggatccggccccgagagcacgcctggccctgcccctggccctggccctgcccctgcccctgcccctgcccctgcccctgcccgtgcccctgcccctgcccctgccccgagcccgggaagcgccgcgtggtcggcggcgttcgatgctgctgtcggccacacgggggcagcagagcctcagcggctgccgcagcgggtccagtttccggccgccggggttgggctggcggtgcctgggggtcctccccagaggcccgcgtgtgaaacgtccgagtgcgctgggcgctggacacggagatgggtgcttgggccacgggcctgggggaccccacacggccggctaggcaggcccagacagcccagggtgggggttccatgggggcaggaggggagaagcctgggctgtggagcagctgggacgtccggggaagggcctgggggtcagaggggcggctcccgggacagggaggcacgtggaggggcggggtttgtggcagccccggagccgcctctgaagcttccatctgcagcctcctgtggggccgggtctgcttctcttgctgggcacccacatccacccccgaggggtgtgcgacaacccccattccagcccactcagatggtctctagcccctcccgtcacagtgaaccccggtgtcggtgcgagacgcctccgtgtattcccggacgtccctctgcaggcccatccccacctcacagacagtcacacccttccaggccttgccccatccccagtccctggcctcaccatcgcattgcagggaggcgggcatatgcaacctccatgaaataaagccctaacggagaaggccagagtgggaacttcgtttccaccagcaggtggggcagacaccctggctagccccggggaaaacc

SEQ ID NO: 25957 - DNA, 1619 bp, Artificial sequence
  DNA replication origin
cagggtgacgtcctggccaggccctgtccctctgcagccacctctgcccactgccccaccacctgcccagggctcccccaggctcccacaccagccgtgggggtctctcaggcaggccggccaggtggcaccacggctcccccaagggcagcaggtcaggcgtgagcattgccgtctcccatcccctcctgctgagcccccacaggagcctggcagcccgatcctgtcgccatagtgagggcagctcctggcccaccaggcccagtccacaccagccggccgcaggcagcgtgtctgggagacaccccaggccgcccaccgcccagcaggggacaagccagcccccagacccgtgccctgcacagggggacggggctcagacccaggctgcccttgacagcaggagctgtggtgggcccacggtggggaccactggggacaggcctgggggcacacaatgctcctgaggggcctcaggctgcgtcctgggttggggcactgttctgtgagtaggtgacatgtcaccttgaaagggcttctatttcactaagagaaaaggtggaggctttcctgggggagggcggtgcggtgttgtgtgggacagtgagagagggaccaccagcacagacaaaggagaggaaagtgcagggggggtgggggctgcagggacagaggcttggggaggcgctggaaccgcagggcgcgggcctggggggcccacacgccacctcgagggaccgcacctggggaccacagacgcaggcccactcgggctctggagggccctcctggggctgcctggccacgctctctctctcctggtcccagatcccctccacggcccctccccacccgtccatccagaggttgcccagggctggtcagaaggggtcacatgacacccccaggaccggctggaagtggagggatcgtggtcccgcaattcaactcccacccggcactccccactcaacatcacttaggacagttatattgtttcgggttttttttttcttctgtattaaaagcattaacttccaatactgcttttataaaacacacatgcactgtggtgaggacgttttgttaaaatgaaagggacaagccggggctggacggggaagccccctggtggggggacacgggaggggcaccctgcactcacagaaaagcccctccattctttgcacgtttcaaatgttgtattttcaaatataattaagcgacgtgggaggaagggcaccgcgtgctaggcaggagcagccccctcctgggagggagatggcagacaggggacagggtgggggacagggtgggggacagggtgggggacagtgaccaggtgaggaaagatgcgggtcagggactgggggtgcaaatggggaggtggtgggagacgaagcccctccaaacctgacgccccgccgcttcccgagcccggggttcagggcttcctgttttcctgtgtgattatgagctcctgctcctgccctcgccccacgcgcgagtctcccctggaaggatgtgcaagcttttcacaagcaccacagactcttacaacccgggaccacctgggaccccaggcggtcaggaccagggccaccccacacggcaggcac

SEQ ID NO: 25958 - DNA, 1855 bp, Artificial sequence
  DNA replication origin
ctgctgtcaagggcagcctgggtctgagccccgtccccctgtgcagggcacgggtctgggggctggcttgtcccctgctgggcggtgggcggcctggggtgtctcccagacacgctgcctgcggccggctggtgtggactgggcctggtgggccaggagctgccctcactatggcgacaggatcgggctgccaggctcctgtgggggctcagcaggaggggatgggagacggcaatgctcacgcctgacctgctgcccttgggggagccgtggtgccacctggccggcctgcctgagagacccccacggctggtgtgggagcctgggggagccctgggcaggtggtggggcagtgggcagaggtggctgcagagggacagggcctggccaggacgtcaccctgaggccactggagaggtcagcaggggcccaaggagatgcagggattggcagctggggagcacaggggtacccctgagccgtggtacccaaaggtcatgagctgagaggggaaaggcccagagccgctggatggtggattctgggcacctgatccgcagggcgtggtggccctctgagggacccctctgacagactgcaggcaagctgtcaagggtgtgtatgtgtgagggtgtgtgagagtgtgtgggtgtgtgagagtgagggtgtaagggtgtgtgtgagagagtgtgtgagggtatgtgtggagtgtgtgacggtgtgtgagggtgtgtgggtgtgtgagggtgtgagggtgtgtgaagttttcagactgtgagggtgtgagggtgtgtgagagtgtgtgagtgagggtgtgagagtgggggggtgtgagagtgtgggggtgtgagggagtgtgagggtgtgagggtgtgtgtggatgtgtgggatgtgtggggtgtgtgtgcatgtgtgtggatgtgagggtgtgtgtggatgtgtggggtgtggggtgtgtgtggatgtgtgggagtgtgaggatgtgtgagggtgtgtttggtgtgtggggtgtgtgtggatgtgaggatgtgtggggtgtgtggggtgtggggtgtgtgtggatgtgtggggatgtgagggtgtgtgtgcacgtgtggggtgtggggtgtgtgtggatgtgtgaaggtgtgagagtgtgagggtgtgtggatgtgtggggtgtgtgagggtgtgtgagggagtgggtgtgtggtgtgtgagggtgtgtgtatgtgtgtgaggatgtgtgtggatgtgtgtggatgtggggtgtggggatgtgtggggatgtgtgggagtgtgaggatatgtgagggtgtggggatgtgagggtgtgtgtgggtgtgtggggtgtgtgtggatgtgtggggatgtgagggtgtgtgtggatgtgtgggagtgtgaggatgtgtgagggtgtgagggtgtgtgtggggtgtggggtgtgtgtggatgtgtgggggtgtgtggggatgtgagggtgtgtgtggatgtgtgggggtgtgtggggtgtggggtgtgtgagggtgtggggatgtgagggtgtgtgtggatgtgtggggtgtgtggggtgtgtgtggatgtgtggggtgtttgaggatgtgtgtggatgtgtgggagtgtgaggatctgtgagggtgtgtggggatgtgagggtgtgagggcttgtggggatgtgtggtgtgtgtgagcggctgtgtgcactggccgagttgcctgctgctgtcctggcctggggccaggcgtgtgccagctcctgtgtttgttgtgtgcctggcgtgtgctgggtgcccgagtcgggctgggtgtgtctgggtgtggccctggggtgtccctttctggacgtgtgtctccgtgcagaacggaggtcctcgag

SEQ ID NO: 25959 - DNA, 1470 bp, Artificial sequence
  DNA replication origin
gagggtgtgtgtggatgtgtggggtgtgtggggtgtgtgtggatgtgtggggtgtttgaggatgtgtgtggatgtgtgggagtgtgaggatctgtgagggtgtgtggggatgtgagggtgtgagggcttgtggggatgtgtggtgtgtgtgagcggctgtgtgcactggccgagttgcctgctgctgtcctggcctggggccaggcgtgtgccagctcctgtgtttgttgtgtgcctggcgtgtgctgggtgcccgagtcgggctgggtgtgtctgggtgtggccctggggtgtccctttctggacgtgtgtctccgtgcagaacggaggtcctcgagttcccagaaggaagcccccagccccaggcgggtgcctgagaatagacctggggcctgtgggcgtggcagggctgcccctcggctgctcatggaccccccggacaccagtcccaccctgtgtctgtgatgctcactctctgagccttccctgaccccatgtgccaaagcctggcccagcaatgccacgtgtgcatgtgtgagcgtgagcttggcagcgggtgggagaatgtgtgcgtcagtgtgtgagcgtgagcacggcctgtgcttgtctggctgtgggactgggggcctctgtgacgctgtgagcccttgtggacctgagtgtgggccgtgtgagctgtgtgcacgtggctgtggctgagtgtgagcctctgagtgtgtgtgtctgtgccgtgtacctctgtgtgtctgtatgtgtctgtgtgtgcctctgactttatgtgtgtctgtatctatctctgtgtgtgtctctgcgtgtggtagcgtgtctgtgcttgtgtacctgtgtctgcgtgtgtctctgtctctgtgtgtgcctatgcgtgtctgtgtgtggtagtgtgtctgtgcttgtgtttctgtgtctgtgtgtctctgactctgtgtgtgcctatgtgtgtctgtgtgtctctgtgtgtgtggtagtgtgtctgtgcttgtgtttctgtgtctgtgtgtgtctctgtctctgtatatgtgtctatgtgtctgtgtgcctgtatgtgtgtggtagtgtgtctgtgcttgtgtgtctgtgtgtttgtgtgtgtctctgtctttgtatgtgtgtccgtgtgtgtgtgtgtgaggtatatctgtgtttgtgtgtctctgtgtctgtgtgtgtctctgtctctgtgtgtgtctatgtgtatctgtgtgtcgtgtgtgtgtggtatgtgtgcttgtgtttctgtgtgtttgtgtgtgtctgtctctgtatgtgtgtctaggtgtctgtgtgtgtgttagtgtgtctgtgtgtattgtgtgtctttatgtctctaagtctgtctatgtgtctgtgtctctgtgtgtttgtgtgttctgtgtgtctctgtggggtgtgcatgactatatttgtgggaggctgtatgtgcaggaagggccccctgagccctgtcacccgggc

SEQ ID NO: 25960 - DNA, 1383 bp, Artificial sequence
  DNA replication origin
tcctgagcgttatccagggccctgcctcaggcctcatgccggggccaagcccagggctggctggtggccacgcagaggtgagaggggcggggaagtgaggctgggttggaggaaagctgaggggcccaggcctcccactccagcccccgaggcagaccctggcccacccagggaccccctcccatgcacacaagcacacacaacacgtatatgggcatgcgtgtgcacacacactcgctgcagcccgcagcactggctggcccaggtgtcctcgggacgtggtccacgcggtgctgacacgagctggccctgagtgcgggctctgcggggtgccattcccaggccctgcaggggcacatgcggtgtcgtggggcagcaactgtgacctctgccccgcagacccggacatgccgccagagaggccaaggcgtacgctctccgagccttccctgaccccatgtgccaaagcctggcccagcaacgccatgtgtgcacgtgtgtgagcttggcaacaggtgggagaatgtgtgtgttagtgcatgagtgtgagcatgagcgtgtgagatgcaagcgtgtgtgcagtgagtggtggatgagctggaggtgtgcggttgtgcgtgatgcggacgggtgtgtagtgtggacaggtgtgtggggtggacaggtgtgtggggtggacaggtgtgtggggtggacaggtgtgtggtgtggacaagtgtgcagtgggcctggctcattgtcaccgccaggacaaggcctttgtccgcactgatagggctgagcaggtggtccaggctgtggtcaggcagcaatgtcctggcgtggagcaacaggggaggcaggttcatgacacggggcaggacagtggccaggggctgcaagcgtgacctgcgggagggggtgcctgtgtgcgggcatgtctgtgtgtgtctttatgtgtctgtgtgtgtgtgtgtctctatgtgtgtcggtgtgtgtctgtgcatccacgtgcatgtgtgtctgtatgtgtgtgtgcatatccgtgtgtctgtgtctttatgtgtctgtgtgtgtatgtgtttgcctgtgtgtgtctctgtgtgtctgtgcatccatgtggatgtgtgtctatatgtgtgtctctgtgcacatatgtgtgtgtctgtgcatgtccgtgtgtgtctgtgcatttctgtgcgtgtgtgtctctgtgcatgtctgtgtgtctgtgtgtgtgtgtgtctgtgcatgtctgtgcatgactctgtgtgtgtgtctctgtgcatgtctgtgtgtgtctgtgcgtttctgtgtgtgcatgtctgtgtgtctgtgcgtttctgtgtgtgcatgtctgtgtgtctgtgcgtatgtgtatgtgtctgtgcacgtctctgcgtg

SEQ ID NO: 25961 - DNA, 1148 bp, Artificial sequence
  DNA replication origin
ggtgtatggtctgtgtgtgagtgtgtagcatatagtttgtgggtgtatgtggtgtagttgtgtgaatgtgtggtgtatgggcgtgtgagtgtgtataggtatatgggctgtgtgagagtgtggtatatgggttgtgtgtgtgtgctctatgagtgtgtgtaagtgtatgctctgtgtgtgtatggggggtgtgtgtgtgtatatataggggtaggggttgtgagtgttttgtgtatgggtgtgtatgtatgtacacggggtgtgtgtgtgggacatgggtgtgtgtgtatatgtgtatgtgttatatatgtgagtgtggtatatatagtgtggtgtgtatatagtgtatgcgctgtgtgtggtgtatgtgtgtgtgtgtatatatgtatgggttgtgtgtgtggtatgtgttgtatgtgggaaataggtgtgtgagtgtatatgtgcgcgcgctgtgtgtgtgtgtgttatatatgtgtgtgtatatgtgtatgggttatgtgtgagtgtgtgctacatagtttgtggtgtgagtgtgtactgtatgggctgtgtgtgtggtgtgtgggtgtgtgcgtataggtgtatgggttgtgtgtgtgtggtgtatgggttgtatgtggtatatgggtgtgagtgtgtataggtgtatgggttgtgtgagtgtgtataggtgtatgggttgtgtgtgagtgtctgatgtatgggttgtgtgtatgtggtatatgggtatgtgagtgtgtggtatatagtttgtgagtgtgagtgtgtggtgtatgagctgtgtgtgtgtggtatatgggtgtgtgagtgtatataggtgtatggttggtgtgtgactgtgtggtacatagtttgtgagtgtgagtgtgtggtgtatgggttgtgcgtgtttggtatatgggtgtgtgagtgtgtggtatatagtttgtgagtgtgagtgtgtggtgtatgagttgtgtaggtgtgtggtgtatgggttgggtgggagtgtgtgggacgtgactggataagttcgtgagtgtgagtgtgtggctgtgggtgtctgtgtgtctctgggtgtgtgtggatgggggtatgtgggtgtgagtgtgtgtgtgaggtgtgggtgtgggggtgcactgcgtgtcctccctgggggtggcccc

SEQ ID NO: 25962 - DNA, 826 bp, Artificial sequence
  DNA replication origin
aagctgacagcgctctgctcatcggtggcctggggaaacagggcccacccaaagcctggctcaggaaaggctccaaacacacatgcacatggcccagaaacagatgggcagagctcagcctgcagctgggagcggcggagcgggtgctgggccagagtcggggcctgtctgtgggtggggggcacggcagcacgggcccacctgcacaccccaggcctggcccccgaggtcactgggccaccacccagccctcgccctgttccccgtctgtgctggccggggcaggactctgagcctcggggaaacccacagatacacacgggaccccgaacatcgggctggggaggttggggtgggtaacagcatgccagaggcaggagcaggaggtccaggaccctgcgcactgcgaccccagccctgggggctgaagcccaggacagcctcaggtctcccaggagggactggacagtgggggatggtcagagaacaggacagccagcagggtgcagcctgaggacagggatggacgctgggaggtcaacaggacaggggcaggggctgtggagtgtgagaaggtcctggagggcctggagaacctgtgggtcagtgtctgtgggaaggaggccaggagcagccctgagtggccaggctggcaggggtgaggaggtgggggcagtgaggttagggtgaccgagacagtgaggcctctggccagggaggggaccttggctgggctctgactgaacccagggctcctggagaaggggccccaggcggggatgaggatgtgggcatctgactccatcaacaatggggcttccgacac

SEQ ID NO: 25963 - DNA, 2048 bp, Artificial sequence
  DNA replication origin
cacacagggtctcagggacgcgtccaccacagcccgtgcacaggctcctcacggcactgagttcacccggggcgcgggccgtttgtcctcaggagtccggctgtgccctccgcccccagccctgtcctgctgaggctgcagctgggtcccggggcacagggcggccctgagcaccttgtcatgttggtccctgtcgggtgggctgctggctgtctgtggagctggcagagccgcggttcagccttggaggccggtcctggggcccagcagccgtggggagcactgcccagtcccgtgcccacagggaatcacctgggctgaggaagggcccacacgccgacgggatcggggtcaggcagcgcacgcctggcaccgagatcccacgtcccgaagtggggacacggcccaggggcactgttccgggagggtctcaagatggggtctcctatttcaatcttcactccttctgcacctgttagctgggaaccttctagaaggaggggtgtcctcaatcatggggtggttgtgagctgagcacagatcatgcaggaaggtacatggcttctccttcaccaggaaaacagtgcagagagacagagacacagagacagagacagagtaacagagaaagacagacgagagagagacacagagacacagacagagtaacagagaaagagagacagagagacacagagacagagacagagtaacagatagagtcacagagagacagagagagagacagagtaacggagaaagacagagacagagagagacacagagacagagacagagtaacagagaaagacagagagacagagacacagagacagagacagagtaacagagaaagacagagagacagagagagacagagacagagtaacagagaaagagagacagagagagacacagagacagagacagagtaacagagaaagacagagagacagagacacagagacagagacagagtaacagagaaagacagagagacagagagagacagagacagagtaacagagaaagagagacagagagagacacagagacagagacagagtaacagagaaagacagagagacagagagagacacagagacagagacagagtaacagagaaagacagacagagagacacagagacagagacagagtaacagagagagacagagagagacagagacagagtaacagagaaagacagagaggcagagagagacacacagagacagagacagagtaacagagaaagacagagagacagagacagagagagaaagagagacagagaaatagagacacagagatacagacagagacaaagacacagagacagagacagagaaacagagagacagagacagagagaaacagagacacagaaagagacatgcagacacaaatagagacagagatgaggagttacagagagacagagacacagagacagaaacagagtaacagagaaagagagagacagagacagagagagacagagaaatagaaacacagagatacagacagagacagagagaaagacacagagacagagaaacaaagagacagaaacagagagagaaacagagacacagaaagagacatgcagacacaaatagagacagagatgagttacagagagacagatagatagagacagagatggagagacagagacagagagaaagaaacacagatccagaaagagacattgacagagacagagagagaaaaataggcagagagagagagagagaaaaacagagacacagagacagacacacagacacagagacagaaaaagacagagataaagttacagagagacagagatacacagagacagagagacagataaagagagacagagatataggcagagacagacagagaaaaacagagatagaaacagagagacagagataaagttacagagagacagagaccaagacagagataaagaaagacagagacagagtgagagaaacagaggcagtaagagataaagagagttacagagacagagatacagagagatacagaga

SEQ ID NO: 25964 - DNA, 1473 bp, Artificial sequence
  DNA replication origin
atgagttacagagagacagatagatagagacagagatggagagacagagacagagagaaagaaacacagatccagaaagagacattgacagagacagagagagaaaaataggcagagagagagagagagaaaaacagagacacagagacagacacacagacacagagacagaaaaagacagagataaagttacagagagacagagatacacagagacagagagacagataaagagagacagagatataggcagagacagacagagaaaaacagagatagaaacagagagacagagataaagttacagagagacagagaccaagacagagataaagaaagacagagacagagtgagagaaacagaggcagtaagagataaagagagttacagagacagagatacagagagatacagagagacagaaagagagatagagacagagatagagatgagagagacagagatagagacagagcaatagagataagagaaagacagatacagagagtgagagacagagagagatagagacagagataagaagagagactgagatagagacagagagacagagaaagagagttagaaaggcagagaaagacagagacaaagagagacagagagggctgaagagaaacagagacagacagcaacagaaagacagagatatatagaggggaagagacagagacagagagacagagaaagacaaaaagagacagagaaagaaacagagagagagaaagagaggtataaggagagacagagagagggagagctacagagaggaagagacacagacagagagacatagagaaacacacacaaaatgacacagaggcagagacagagatgaagagacagagagagagagacagaggcagagagacagagagacacacacaggaagagacagatgagagagacagatatagacagagatacagaaagagaccgagagagacatacacagggacacgaacagacagacagagatacagaggcagagagacagagatatagacagaggcatggaaagacagagaagagagagacacacacacagggacacaaagaggctgagatatagacagagatacagaaagacagagatagaagcagagagacagagagagacacacagggacacgaagagacagacagagagacagaggcaaagaaagggacacagcaaagggacaggcacagagggagggatagacgggaagagagacggagggatagagacagacacgggggagagatggatggagaaaggaggcaccgacggagacacacagaaagagagagaggccaagacaggcaagatggcgggacaaagcccagcagacgggcttgacagagatgagtcagagacaccgacaatgggacagagacagagattcgggcagggagataccttcagagaggcagagagacagggagacagaagggtagccagagacagggac

SEQ ID NO: 25965 - DNA, 762 bp, Artificial sequence
  DNA replication origin
gatggggcctacggcctgtctaagcctctgggccaccagcccctggctcaccggtgtgtgcccaccacaccccgccttgggggtcccctctatgagctgggcacatgccctccgctctgttcatggctggcctgggggaaacagggcccacccaaggcctggctcagggaaggcctcaaacacacatggcccaggagcaaaggggcagagctcagcctgcagctgggagcgggcaggggtagtggagtgggcagagggcctggagaacctgcagggctccgatgtctctgggaagggggcccaggagcagctcagcgtggctgggccggcaggggcgaggaggtgggggccgtgagggaggggtgactcggctgtgtggggtgccgggggacacgggctttgctccggctgagcccaggcagtggcgaatccctgagctgccaggaggagagcagggccggggtcaggcagaggtgggccgcggggccgagggctgcggccggtcgggagcagtcggtcggttgagggcaccattacatggagggctgtgagacgggagaccccattcccttcattccttgtgcacgtgttagtgaggaaacttctagaaggagggcattgctcgtagtgggtgagtgtgagcacagatcatgcaggctggcgtgctgccgtgaagtgcctctctttactttccagacctcagcatggcaagcccgtcctgcgccccagggtctttctggagtacacgccgcgcggtcctgg

SEQ ID NO: 25966 - DNA, 1141 bp, Artificial sequence
  DNA replication origin
aaccgaccgactgctcccgaccggccgcagccctcggccccgcggcccacctctgcctgaccccggccctgctctcctcctggcagctcagggattcgccactgcctgggctcagccggagcaaagcccgtgtcccccggcaccccacacagccgagtcacccctccctcacggcccccacctcctcgcccctgccggcccagccacgctgagctgctcctgggcccccttcccagagacatcggagccctgcaggttctccaggccctctgcccactccactacccctgcccgctcccagctgcaggctgagctctgcccctttgctcctgggccatgtgtgtttgaggccttccctgagccaggccttgggtgggccctgtttcccccaggccagccatgaacagagcggagggcatgtgcccagctcatagaggggacccccaaggcggggtgtggtgggcacacaccggtgagccaggggctggtggcccagaggcttagacaggccgtaggccccatcggaagtgacagggcctgagggaagctcagtgtgtgtgtgagagtgtgtgtgagtgtgtgagtgtgtttgtgagtgtgtgtgtgactgtgtgtgtgtgactgtgtgtgagtgtaagtgactgtgagtgtgagagtgtgtgtgagtgtgaggtgagtgtgtgagtgtgtgagcaggtgagcgtgggtatgaatgtgacagtgactatctatctctgtctctctctgtttctgtgtatctttcttatctctgtgcctgcctctgtctctatctctctctctgtctctctatctctgttactctgtctctgtctctttctgtctctctgttactctgtctctgtctctgtctctctgtctttctctgttactctgtctctgtgtctctctctgtctctctatctctgttactctgtctctgtctctgtgtctctctgtctatctctgttactctgtctctgtctctgtgtctctctctgtctctctttctctgttactctgtctctgtctctgtgtctctgtctctctgcactgttttcctggtgaaggagaagccatgtaccttcctgcatgatctgtgctcagctcacaaccaccccatgattgaggacacccctccttc

SEQ ID NO: 25967 - DNA, 837 bp, Artificial sequence
  DNA replication origin
acagaaacatacccacgctcacagccacacactaagtcactgtcacatccatacccacactcacacccaaacacacatggcccaggagcaaatggggagacctcagcctgcagctgggagcggccgagcgggcgctgggccagagtcggggcctgtctgtgggtggggggcacggcagcacgggcccacctgcacctacaaggcctggcccccgaggtcactgggccaccacccagccctcgccctgttccccgtctgtgctggccggggcaggactctgagcctccaggaaacctgcagatccacacaggacccggaacatcgggctggggtgggtaacaacatgggagaggcgggagcaggaggtcccaggaccctgcgcactgcgaccccagccctgggggctgaagcccaggacagcctcaggtctcccaggagggactggacagtgggggatggtcagagaacaggagagccagcagggtgcagcccgaggacagggatggacgctgggaggtcaacaggacaggggcaggggccgtggagtgggcgaaggtcctggagggcctagagaacctgtgggtccgtgtttgtgggaaggaggccaggagcagcccagagtggccaggctggcaggggtgaggaggtgggggcagtgaggtgagggtgaccgagccagtgaggcctctggccagggaggggaccttggctgggctctgactgaacccagggctcctggagaaggggccccaggcggggatgaggatgtgggcatctgactccatcaacaatggggcttccaacacgcacagcctgggcctcggagacctgggccct

SEQ ID NO: 25968 - DNA, 979 bp, Artificial sequence
  DNA replication origin
taggccccaggaggacttggtggcgagaagaccagcccaggccctgtgagctacacccagccccagcccctaaggggtcgccaggtctcgacttagcactggggagggggtacagtacaggagtggggacaggaaggtgaggggaggccatgccgtttgtattctcttgcttttctctctctcctgaagcctcttgaatagacctgcagaaatacccaaaatagccctgtggggtggctgagtcattgtgaacacagcccaggtcaggtgttccagccagagaactgctgttctgagaaacatgccccaaaaccgagacctggccaggtgtgcctggggcctgagcgaggggctgcagccacaggtaggcccagccccaaccagcccagggtcagctagggctttccaggtccagggttaggcagaggtcagccagggtcaaccatggtctatctgaggggagagacaagagacacagagacatagagagagagagagacagggatggggagagacaagagagacaggaaaggagagacaaagacagacacagagagagagatggggatggagagagataagagacagggacagggagggacagaggcgaggccagtgacagagacagagttacaagagacagaaagagagagagatgagatgagagagataagaagaaacggagacagagatgggagaaaaagagaggagatgggaacagggaaaaagagacatggagacagacatgcagagagaacacaacagaggcagagaacacacagggagagaaagaggcagcaagatgggcccaggaactcagctgcaagcccctctcacacagtcactctcacaaacacacaccacgactattatacaacattcacacacaaacacacagaaacatacccacgctcacagccacacactaagtcactgtcacatccatacccacactcacacccaaacacacatggcccag

SEQ ID NO: 25969 - DNA, 960 bp, Artificial sequence
  DNA replication origin
ggacctggcccaggggaggggcttttaaagagagggggaaagagggagaatcaacagatgaggggctgaaccagcagacagagatcaggcagacacatgggtagatcctaggacatataatgaatggatgggtggatggaggattggtagacggaggatggatgggtgggtaaatggctggatggaggatggacagatggatatatgatggatggatgaaggacgggtggatggaggatggatgagtggatgaatgaaggatggaagatggatggatggatgggtggatggactgatggatgatggatggatggatggatggatgatggatggatgggtaggcggatggaggatggaagggtggatggaggatggaagatagatggaggggtgaatggaggatgggtggactgacggaggattgaggatactggggtgggtgggtgggtagatctatggaggataggtgtatggaagataattggatggagaattgctttatgaatggatgaatgaagagatggaaaatagctttatagatggatgggtgaatggatggatggatagatggaagaaggatgaatggatggaaaatagctttatagatatatgggtggatatttaagtgatagccttacattaatagatgaatggaggatgaatggttgggtgagtgggtaggagtgttactgatggaggggtggatatacggataatagctttatagatggatggatggatagatggatggaaggatagaaagacaggtgaatgactggatgtatcagcatatgacaagcaggtacagctgtacatgggaggtctatgccctgagaccctgaggaaaatgaggatgcccgtgctggtggccctcacctggccctcgcttgtaacccctcagccacattccctgggaaggcaacagaggcctctggtcttgcccattcaacctttggcaca

SEQ ID NO: 25970 - DNA, 2195 bp, Artificial sequence
  DNA replication origin
tgggccgggccgagccgggccgggccgggctgagcgggtctgagctgggctgagctgagctgggctgagctagaccaggctcgggtgagctaggccaggctgggctgggctgggctgggctgggctgagctgtgctgggctgggctgggctgggctgagctgtgctgggctgggctgggacaagctgggctgggctgggctgggacgagctgggctgggctgggctgggatgagctgggctgggctgagctgagctagggtgggctgagctgagctgggttgagctagaccaggctggggtgagctaggctgggctgggctgggccgggttgggctgggccgggctgggccgggatgggatgggctgggctgggctgggctgggctgggctgggacgggctgggctgggctgggctgggacgagctgggctggcctgggttgagctgagctgagctgagctgagctgggctggcctgagctgggctgggctaggctgggctgggctgggctgggcttggacgagctgggctgccctgggttgagctgagctgagctgagctgggctggggtgagctgggctgggctgggttgggctgagctagactgggctgggctgggctgggctgagctgggctaagctggactgggctgggctgggttgggctgaactgggctgggctgagttgggctgagctgggctgagctgagttgggctgagctgggctgagctgagttgggctgggctgagctgggctaagctggacctggctggggtgagctaggctgggctgcgctgagctgggctgggctgggctgggctgagctgggctgggctgagctgagctgggctgacctgggctgggctgacctgggctgggctaagctggactgatctgggctaggctgggctgggctgacctaagctgagccagactgggctgagctgggtgagcttaggtggattgagctggactgggctgagctgagctgggctgagctggactgggctaggctgagctgagcttggttgggttgacctgggctgagctgagctgaattgggttgacctgggctgagctgggttcggctgggctaggctgacctgggctgggctgagctgagctaggcttggatgagctgagctgggctgggttggactgcgctgggctgggttggactggtctgggctgacctgagctgtactgagctggtctgacctgtgctgagctgggctgggctaggctgagctgggctgacctgtgttgggctgggctgggctaagctgggctaggctgggctgagctggacggagctgacctgggtgagcttaagtggactgagctgagctggactgacctgggctaagctaagctgggctgacctgtgctgggctgggctggactaggctgggctgagctggactgagctgagctagactgagctgagctgggtgagcttaggtggactgagctgggctgggctgagctgagctggactgggctgggccgaactgagctagactgggctgagctgggctgagctggggtgggctgagctaggctgagctggggtgggctgagctgggctgagctaggctgagctgagctgggtttggttgacatggactgagctgtgttgagctgggctaggctaagctaggctgggcggagctgagctgggttgggctgagctgaactgggctggactgggctggactgggctgggctgggctgggctgggctgagctgagctgagctgtactgagctggcctgggccaggctgagctgggctgggctgagctgtactaagctggcctgggctgggctgagctgtactgagctggcctgggctgggttgacctgggctgagctggactaagctgggctgacctgggctgggatgggatgggctaggatgacttgggctggactgggcgggactgagctggactggcctgggctgagctgggctgggctggactgagctggactggcctgggctgggctgggcgggatgggctgaggtggctgctaatgtgggaaagaggccgtgggttgagtgtgattccacctgcagagccctgagcccagctgtgttcttaggggttctgagggccacgcagctctgttgcaccatgattctgtcttctctcttgcccactgcctgaaggaaatttggagtgggctgggccca

SEQ ID NO: 25971 - DNA, 1363 bp, Artificial sequence
  DNA replication origin
agggaaccctggattgtcaaggatttcgaggtgaaggaaccctggattgtcaaggatttcgaggtgagggcaccctggattgtcaaggatttcgaggtgagggaaacctggattgtcaaggatttcgaggtgagggaaacctggattgtcaaggatttcgagatgagggaaccctggattgtcaaggatttcgaggtgagggcaccctggattgtcaaggatttcgaggtgagggcaccctggattgtcaaggatttcgaggtgagggaaccctggattgtcaaggatttcgaggtgagggaaccctggattgtcaaggatttcgaggtgagggcaccctggattgtcaaggatttcgaggtgagggcaccctggattgtcaaggatttcgaggtgagggaaccctggattgtcaaggatttcgaggtgagggcaccctggattgtcaaggatttcaaggtgagggcgccctggattgtcaaggatttcaaggtgaaggacaccctggattatcgagggggctaggtccaaggacaagtgtcctagctggagacagacgaggagacacagggatggggagaggcagaggcagacaggggtggtgctatggtctgagggtctgtgtctgcccgaaactcctgtgtgacagccgtcatcccagagtgagagcatgcagagctggggcctcagggaggtggttagggcctgagggggaaccctcaaaaatgtgattcggtccctaatctcactagagaccctaaagaaaagggaccccagagagcagccctgccctctttccaccacgtgaggacgcagtgaaaagatgggggtctgtgaaccaggaatcgacccttcctggaacttgaccctgctgccatcctgaccttgaacttccagcttcgagaaccgtgagaaatgaatgttgctgctgaacccaccagtctatggtatttttgttattgcagccagaaatgactaagatgcagcagccacgtccccctggcgagggccgggggcatcccaaggttcataacaaaagctccagagcttccctgaaccgccaggtgtgtcttcccaggaccctggggcagccccaggctacctccctcctcctctgaccccacctgccctgatccggcctcactgtcactccctggatttcacccgacagcctccgccggggtggcccggccccatggccagggcatcttccattcacgcccacgctttccaggactccgctgcagcagctcctctgtgaagcgcctctggcctcccattgccggtgccacccgagcccccagacatagctggcctcccccgactccagggccagcatcgctggcgggatctctccaacgca

SEQ ID NO: 25972 - DNA, 962 bp, Artificial sequence
  DNA replication origin
caggaggggtgggtgaagggatgggggctgtggatggatggcaggaggggtgggtgaagggatgggggctgaggatagatggcaggaggggtgggtgaagggatgggggctgtggatggatggcaggaggggtgggtgaagggatgggggctgaggatagatggcaggaggggtgggtgaagggatgggggctgtggatggatggcaggaggggtgggtgaagggatgggggctgaggatagatggcaggaggggtgggtgaagggatgggggctgtggatggatggcaggaggggtgggtgaagggatgggggctgaggatagatggcaggaggggtgggtgaagggatgggggctgtggatggatggcaggaggggtgggtgaagggatgggggctgaggatagatggcaggaggggtgggtgaagggatgggggctgtggatggatggcaggaggggtgggtgaagggatgggggctgaggatagatggcaggaggggtgggtgaagggatgggggctgtggatgggtggcaggaggggtgggtgaagggaaagaaggtctgggtgaggcttgggggacggggatgccaggcacttggatctcagggctagaagggtcagaccgaggctggggagtgaggccgtgggctggtgttgggctggacgcagactcagctgtgtcctgggctgggtgctgggccctccttggcttttggtgattgtacagtcagaatgggagtgacccggagacccaggggcctgggatgagctcagaacggctagcagccacccctcctcgatgactctgttgaagggacagacacggttttcgggtgggggctgcgactggtggttctctcggcgcctttaaccttgcggctgagccggccccctctgggctcaggttcactggccatcagcccacagtagtgaccttgtgcccccttttcttgtctgctt

SEQ ID NO: 25973 - DNA, 1104 bp, Artificial sequence
  DNA replication origin
tcctgacctctcgtccctgggcccccactctggccccattttccctctgttccttacggcttctctcctgacctctggttacctccactccgcctctctagaccccacgccctccccagagaaggacccaacccctcggcacaggagtggccgcctcactcagggccctcggaaggatgcgtgagctctgcggcctggctcccaagacctgggactcactgcatgggtgctctgaggggctgtcctggtgtggactatgagcccaggcctgtgggtgtccagagctgcctcctggccctaccccggcccggccccgcccaccagcctggtccctctggctcctgccctgagtcccctccactcccttccccaacaccgtgagctgcctgctggtcccgggtcatcagcaggtgcaggtccggcctcgggccctcacacctctttctgctgctccaggcccagagctgggtgcaggtgggctgggacgtgagagtgaagctgaatgtatggctgtgacggtgtgcagggactgtcttcagacatggaggggctttgtgctcatggggtgcccggtgcccgtgtttccgtgtggatttggtgggtgctgtgcccttggtgtgcatgaccggggggagcgtttggatctggggtgtcagatgcacatgtgggtttgaggtctgtgaggggcacgtagcctgctctggggttccggtgtgggtgagtgggggatggagcccacgcatccatcctgtgtttggctgtggggtgctgctgacagggtgacagggagggttggactggaggacaccacgtgagggcctctccatttctctctgggatccagcggcccaggtatggctcagaggaagggcttggcagtagcctcgctggaggcagggtgggaggcggagtgtgggccacgtgtgaccacgtgtggggtgtctatggcgccctggtggtggtacagggtgctgtggagttgctatggggcctagtgtgtgcacagctgtgccttgagtgaggcgtgagtgggcgagactgggtgtgtgaggctggcgatcccctggaggccgattcaggatggaccaaggggcggtggggggc

SEQ ID NO: 25974 - DNA, 1368 bp, Artificial sequence
  DNA replication origin
ggactggaggacaccacgtgagggcctctccatttctctctgggatccagcggcccaggtatggctcagaggaagggcttggcagtagcctcgctggaggcagggtgggaggcggagtgtgggccacgtgtgaccacgtgtggggtgtctatggcgccctggtggtggtacagggtgctgtggagttgctatggggcctagtgtgtgcacagctgtgccttgagtgaggcgtgagtgggcgagactgggtgtgtgaggctggcgatcccctggaggccgattcaggatggaccaaggggcggtggggggcagtaggagagggggcctggctgctgacctgggcctggtgtgcccacagggcggggtggcggaggctgcggggtgtgagtgggctcggctccactggccccggtgctggggccaggactcggcaaggtgggacagggcagagaggcgaacgccagtggcacagacttgggcgagggctgtcgggtcgtgtgtgtctgtgtgggggtttcacttagggctgtttttctacctggaggggcctgtgtgcccatctatacctgggggtgcaggggctcctgtccaggggggtagaagccaagcccccaagagagagggctgtcggggctcccttgccccttccctgaggacctcccctgggtctttggactccttggagggggtagaccgagagtgggggcagagagggcccggggtagctgtgatgagtccctgcagatacgctgtttgacaaataaccctgacacgaaggcagatggatgagtggcacctcagccctgcccacctcctcccaccacctctcctggggggactcagccctgcccacctcctcccactgcccctcctggggggcccattcctctgtgccaagatgcacctgcccacagccctgcccgctcccaagaacgggtgtaccctgggctctgagcaggcactgtttattgggggtagcttcctggggtcgttgcaacagtggacagaaggtctggccagccctccccactgcacagctggacggagccctgggagggagggaggcaggagtacgtcatttaccgggatttacagacaccgctcgctggacggtctgtgaggggctcgctgcctcatggactgcacggcagatgaactcatctttctgctcccactcggccctggtcacctccaggcggctgaagatgaagaagccggagcccttggtcttgcggggctgcgtcgtgctgtgccgggcgtccgggagctgcacctcgttgtgcagccactgcaccgagatgtcctcaggcatgaagttctggatcaggcaggtgagggtgcgcttgtcccggctccccagccactccg

SEQ ID NO: 25975 - DNA, 1187 bp, Artificial sequence
  DNA replication origin
catggactccagacgtcccttccctgcatggggacacaggaaagctagaaacagcctaacgccgacctggagaaggcagggggctgggaatcttggctgggcccaagactaagaaggtcagaggccccatgctgggcagggctaggctgggtgcagactgcctgtcacccccaggacagggacagccaacccagagccgggagggagggtggggaggcggcagcagggagctgtcctgagctccactgcgcaactggctgatcttggcaagtccgagctgggtggactgaggggggcttggctgagtggactagactgagacgggcctaacagactgagctgaggcgagctgggtgggctgagagggctaccctgtcccttagaggacaggtggccaagctgggctgtcctgagccagggcgatcggggctggcccgggccaggcgggtttagctgagttgagtgagtggactgggtagagggaaatgagctaggctcagctgagctaggcttgagctgggttatcctaagccctaaggtggactgagctgggctgagctggacttatctggggagcagggcaaagtcaggctgagctgaggtggcctgccctgggtggtccaggattgagttaagctgaattaggctgacctggacttgactggacttggttgaaataagctgggccgacacaggagtagggacaagctacagttctctacttaggataaaatgggtgctcgtggactatccgggctgaaggagaccaagctggggtattacctgctgagcttacctgacctggcctgagttcagcagggctgcgctgagctggacagacctgagccaagcttagctggttgggctgagtaagctgggctgagctaaatgggattgagctgaggagggctaggctgggggagagacctgacgacggacagggttaaaagctggagtgagcaggccttaaattattgaactaaattgggctggggtgatctgaatttagctgggatgagctgggctgggctgaactgtgcccacgtgaactgggctaaactaggctcgcctgagtggactcagctgggttggtctcaactgggttcagctgagctgggctcggctagactacactgggttcagctgacactacactgggttcaacccgagaggggtgagcgcctacc

SEQ ID NO: 25976 - DNA, 926 bp, Artificial sequence
  DNA replication origin
ctccgggtgccctggtggggtgggctccagtccactgtctgaggatggacggcctggccaggataaggaaaggagacccaggacggtgccgggctccgggtcattccgtgcactgagcaggctgagttgggaagaagcagatgcttcctgcagctcctgcccctgcagggcctggcgcctggaccaggttcccctggggaaattgggcccctccctgagccacccggggcccacctcccactttctacctgggaccgagcatcctccagagggtcagccctcctgcgggaacaccatgcccagccccaggaccctccctcaactctccagcaaggctgcccctgcacgcccccagcagcccatgctgtgatgtagcatgacatcatgtgatgtggtgtgatgtcctatgacagggtgacatccctggtgtgatgtggtgtgatgtggcgtgatgtcctttgtgtgatgtggtgttggactacatggttggacatagtgtgatgtggtgtgaccgagtgtgacatccctggtgagatgtggtgtgacatggtgtgaggtgttgtgacatggtgtaatgtccctggtgtgaggtggtatgacatggtgtgaggtgttgtgacatggtataatgtccctggtgtgaggtggtgttggacatgatgtgatgtggtgtgacagagtgtgatgggtatgacatccctggtatgatgcggtatgagattatgtggtatggtgtgacatgatgtgatgtggcgtaacatccttggggtaatggggtatgatgtcgtttgacgggtgtggtggtgtggggtgtgatgaggtgtggtgtgacatgatgtgacctgtgacgtgctgtgtcagggtgccacatccttgctgtgatgtgatgcggtgtgacacggtgtgatgtggcatgatggggtgtg

SEQ ID NO: 25977 - DNA, 904 bp, Artificial sequence
  DNA replication origin
ctcttctctgagtgatctcggtggactggagtgggtgggaggtggcagtgtcctgggcctggccccttctctccccagtgcggactctggggctggctgtccctgcgggtccagttccacccgagaatccagcagtgtgggcaggcagccaaggggtggtgctggcactgagactgttcccaggagccagagagcagcgttctttgcttgaaatcagaacaacctcattcctcatgtcaggagttcacgggagtgcccggaatggaggctggctggctgcgggctgggaggaaggccgtctgagtgagccttcgcagctctcggaagcctccccaacagggcctgatggtgctgtggcttccctaccttggcggctgacgctcccactcaccatctggaaaccacgcctgtgttcaggaggctggcgtggacggggttggctccagggcgaggtcctgcctgggtgggggcctgggataccggtcactgcctccttttgtgtgagcaccttgtggtccggagggcaaggacgtcctgctgaggggacacctggcccccagtgccctgcatgcaccaagcagcggaggtctggggtagacctgctatgcacagggtctggaaggggggcgtgtcaggtgtgtcagggtcagagggcaactgcgaggccagagagtcatggggttgagggcggtgaggtcgggggcaggtgtggcctgggtggtggctgagcatggcccatggctggtgtgtggggtctgggcggccctggacaccccgcagagggtggccctaggccccctgtccgatcatgttcctgtagtcggggatgatggtctgcttcaggtccaccaccgaggagaagatccacttcacctgtaggcaaggcacagcacaggggtgagcg

SEQ ID NO: 25978 - DNA, 2660 bp, Artificial sequence
  DNA replication origin
ggtctggaaggggggcgtgtcaggtgtgtcagggtcagagggcaactgcgaggccagagagtcatggggttgagggcggtgaggtcgggggcaggtgtggcctgggtggtggctgagcatggcccatggctggtgtgtggggtctgggcggccctggacaccccgcagagggtggccctaggccccctgtccgatcatgttcctgtagtcggggatgatggtctgcttcaggtccaccaccgaggagaagatccacttcacctgtaggcaaggcacagcacaggggtgagcgaggccacagccctgcccccgagccccacccacccctcagggcactgaggccacctctctgcccccaaggcccacccacccgtcagtccacgcaggccacagccctgcccctgaggcccatccggcccctcatgccacccaggtgccatggcctcaccactgcctgctctgaggcttggtgatagagagcagagccagggcaccaacagcatgtggacagcacagaagacagcgtcagggacaggtggggacagcgtgggggacagtgtcagacacaggtgaggacagtgtgggggacagtgtcagggacaggtggagacagagtgtggaagagtgttggggacagttaaggacagcatggaggagagtgttggggagagatggggacagtgtcagggagaggtggggactgtgtggaggacagcatcagggacaggtggggacagcatgggggacagtggtgcatacaggaggggacggtgtgggggacagtgtcagggattataggggacagagtgggagacagtgtcagggaccggtggagaccatgtgggggacaggtggggacagcatgggggacagtgtcagggataggaggggacaggaaacagtggggacattgtcagggacaggggagatagcatgggggacagtgttggggacatgggggacagcatggaggacagtgttggggactggtggggacagcatgggggacagtgtaggagacaggttgggacaggatggaggatagtgttggggacaggtggggacagtgtgggggacagtgtcagggacaggaggggagagcgtggagaacagtgtccgggacaggtggggacagcatgggggacagtatcagggacaggtggggagagtgtgggggacagtgttggactggtaggtacagcccgggggacagcatcggggacaggtggggactgcatgggggacaatatcagggacaggtggggacatggaggagagtgttggggacaggtggggacagcatgggggactgtgttgaggacaggtggggacagcttgggggacagtggtgcatacgggaggggacggcgtgggggacagtgtcagggattataggggacagagtgggagacagtgtcagggacaggtggggacagcatggcggacagtgtcagggataggagggaacaggaggaaacagtggggacattgtcggggacaggggggatagcgtgggggacagtgttggggacaggtggggacagtgtggaggaaagttttggggactggtggggacagcatgggggacagtgtaggggacaggtggggacaggaggggacagcatggaggatagtgttggggacaggtggggacagtgtgggggacagtgtcggggacaggaggggacagcgtgggggacagtgtcagggacaggtggggacagcatgggggacagtgttgtactggtaggtacagcctgggggacagcattggggacaggtggagactgcatgggggacaatatcagggacaggtggggacagcatggaggagagtgttggggacaggtggggacagcatgggggacagtgttgaggacaggtggggacaacgtggggtacagtgtcggagatgggtggggacagcatggaggaaagtgtcgggtttaggtaagaacaacgtggaggagagtgtcggggacaggtggggacagtgtgggggatattgtcacggacaggtggggacagcatgtgggacagggtttcatacaggaggggacagcatgggggacagtgccaggtactgtaggggacagcgtgggggacagggccaggaactataggggacagagtgggggatggtgtcagggacaggtggggaaagcatgggggacagtgtcagggacaggtggaaactgtgggggacagtgttggggacaaagggggacagggtgggggacagtgttggggacagatggggacagcatgggggacagtgtcggggacatgtggggagagcctgggggacactgttggacaggtgggggcagcattggggacaatgtcagggacagtttgtgagagcatgggggacagcgtcagggacaggtggggacagcctgtgggacagtgtcagagacagtttgtgacagcatgggggacaatgtcaaggacagctggggacaacgtgcggccgaccttgaagaaggtgacggtggcactgtagcacacgcttaacaggaagagtgtgatgaagatggtgatggtcgtccacagcccgtccagctccccgtcctgcgcctccgcacagctctcctccagttgcagctctggacaggaagggggtggtcagtgctgtgtccccctgggcttgggcctct

SEQ ID NO: 25979 - DNA, 979 bp, Artificial sequence
  DNA replication origin
gggacaatgtcaaggacagctggggacaacgtgcggccgaccttgaagaaggtgacggtggcactgtagcacacgcttaacaggaagagtgtgatgaagatggtgatggtcgtccacagcccgtccagctccccgtcctgcgcctccgcacagctctcctccagttgcagctctggacaggaagggggtggtcagtgctgtgtccccctgggcttgggcctctgggggtgattccctctgtggcaggacccaggatgtagggcccggccgggatgggccaacaatgtcctgaggtcagctccccacagctgcccgccctgggcaccagctttggccccggggctcagccagacacccggccctagatagcgacctggccctcagcaggacccgctccccgtctcccgtgtccctccctgaggcccagagggcaggaggatggtgaagcccacacctcatgtgaccccagctgcagggaagggcggcactgggaagtgggccagggccagggacgtgacgtggtgtgtgatcccctgtgtgtgtgtggcggctgcaggggcaccttgtgagaggagggctgggtttgtctgagcaggtcagcatgtggagaagctgccgagcggctcgtgggccttgaggtgccgcgtggggctcgtgggggcctgtgtccgaggagtgttcacgtgtgcgaggaccttgctctggtctgggtgctgtgcggttcgcccgggtgaggctccgtgtgtgaggcgtgcacgtgtgtgtgtggtggccgtgtggccggccaacctcagtgcggggtttgttgaacgggtctgggctgagtgtgtgtgtgggcatctggaccagtctctccacagggcccgagagtgcatgtccccggagtcggttgtgtccccatgcgggtgcgaggctgggcagggctgccaggggttagtgccgtgggggtagatgggtgagggagggcctgtccctacgc

SEQ ID NO: 25980 - DNA, 3964 bp, Artificial sequence
  DNA replication origin
tggggacctgggggccgagctgtgatttcctaggaagacaaatagcggctgacggcaggggcggggctgcccacatgtacctcgccagaacaggaagggctgagacccccacctcggtgagtggggtcagcacagggcaggggcacaggctcgggaggaggacagagcctgggggcagccgtgggcgctcctggacctgagatgctgaacaggctccaagaggctggggagacatggggtcgaggccggccccacatggaggcccaagcggagccagcacgggggaggtgggcagccttcaggcaccgatgcccacccagtgcgagacgacggggaccgtgggcaggggcttccaagccaacagggcaggacacaccagaggctgactgaggcctccaggacgaccgggctgggagcacgaggaacatgactggatgcggcagagccggccgtggggtgatgccaggatgggcacgaccgacctgagctcaggaggcagcagagcgagggaggaggagaggccccaggtgaacggaggggcttgtccaggccggcagcatcaccggagcccagggcagggtcagcagtgctggccgtggggccctcctctcagccaggaccaaggacagcaggtgagccgggagcagagcagggagggtgagtgtggcagcaggacaggagggtggaagccaaggagcccagaggcagaggcagggacaggggaggcacaggggctgggctcagagccagctgatggggttggggcacctgctggcggggagcagggctgtggtcagcagtggagaggaggggagagctgtgctgagtgcacgggcgggagaagggaagagtccagggaggcccagaaaggcccagagtgcagcaggcctggggcgaggggaagggctgaggctccgtgcgttcagggaactgacccagcagagcagaggccactgaggagctgaggttccagagaggcttccagagcaggagcagtgcagggacaggaggatccgggagctcattcaggaggggcacatgggcaagggcaaggggctctgttggggagacctgactggacactggggctgctccacagcatagggaacacgccaagtgctgcaaaatcaaaaatgagggcagaaaaacagcccaaacctggacagagggtgccaggacaggcaggggggcaacagtgacctgagtgacattgctgcccgggttgagggagggcagagtgagcagggagcaggcattggagctcagggaccaggaccaagcagccacaggtgagcagggcaggtgggggcagaaggagcagggggcacctcctggagctcaggggaccagggcagagcagcctcaggtgagcaggggctggtgggcggcaggatgagcagggggaagaccctggagctcaggggaccagggcagagcatcagaaggtgagcatggctagtgggagatgggcaagcagggggcagcccctggagctcaggggaccaggacagagcatcaggaggtgagcatggctagtgggaggtgggcgagcagggggcagcccctggaactcaggggaccagggcagagcagccgcaggtgagcacgggctggtgggaggcgggaggaacagggggcagctcctggacttcaggggaccagggagggcatctgaaggtgaacaggggccagtggggggcaggatgagcagggggaagctcctggagctcagggagccaaggcagagcagccgcaggtcagcaggggcaggtgggaagcatggggagcaggtgggcagcccctggagctcagagagccagggcagatcatccacaggagagcaggggctggtaggaagcaggaggagcaagtgggcagcttttggagctcagagcaccagggcagaagagcctcaggtgagaaggggcaggtgggaggcagaataagcaggggacagcccctggacctcaggagaccagggcagagcatcacaacgtcagcatggctggtgggaggtgggcgagcagggggcagcccctggacctcagagagccagggcagatctgcaggtgagcaggggcaggtgggaggcaggaagagcaggaggcagctcctggagctcaggggatcagggcagagcagccacaggtgagcaggggcaggtaggaagcagaaagatcaggggtcagcccctggagctcaggggacaaggggagagcatcagaaggtgagcaggactgaggctcagcctcagggagccagggcagagcagctgcaggtgagcagggccggtgggaagcaggaggagcaggtgggcagcccctggagctcagagagccagggaagatcatccgcaggtgagcaggggctggtgggaagcaggaggagcaaggggcagctcctggagctcaggggaccagggcagagcagtcgcaggtgaacaggggcaggtggggggcaggaggagcaaggagcagctcctggagctcaggggaccagggcagagcagtcgcaggtgaacaggggcaggaggagcaaggggcagctcctggagctcaggggaccagggcagagcagccgcaggtgagcaggtgcaggtggggggcaggaggagcagggggcagctcctggagctcaggggaccagggcagagcagccgcaggtgagcaggggcaggtggggtgcaggaggagcagggggcaggcactggagctcaggggaccagggcagagcagtcgcaggtgaacaggggcaggtggggggcaggagtagcaaggggcagctcctggagctcaggggaccagggcagagcagtcgcaggtgaacaggggcaggtggggggcaggaggagcagggggcagctcctggagctcaggggaccagggcagagcagccgcaggtgagcaggtgcaggtggggggcaggaggagcaggggtcaggcactggagctcaggggaccagggcagagcagccgcaggtgagcaggggcaggtggggggcaggaggagcagggggcaggcactggagctcaggggaccagggcagagcagccgcaggtgagcaggggcaggtggggggcaggaggagcagggggcaggcactggagctcaggggaccagggcagagcagccgcaggtgagcaggggcaggtggggggcaggaggagcagggggcaggcactggagctcaggggaccagggcagagcagccgcaggtcagcagggccggtgggaggcaggacgagcaggggacaggcactagagctcagggcaaggcagccacaggtgagcagggctggtgggaggcatcactcagctcctagactttggcaggagctgggtagttgctggcaacagacagctgagggctggtgaaagtgcagtgcagcctcctggtgccgggaagggagtgtgagtccatcccactgagcagttggcaagggcgagctgggatggagaagggaaggcgttccagggctcagggctgagctctcaggcaggggcaggtgtggctgcagggggaacgtgtgcttgagaccaggagggtcccacggctggtcccagcggaccctgggcaggaaggcctctgaggctggcgccccagaaggagcaagatgggctgccaggagccagggccaccagcacaatgaagctgagtggaggtggtgcagggcagtgtagcagcagagggcagccagaggggcccattcagggcctgggcagagtcagccagagcctgtggtgcaggtgaggggaaggggtggtgagcggggccctggggctgagcagaggggatggcctggctgagggcagggcgcttagcctcctcagaggtcaggggcacaccccacctgcagtgggactccagggccactgggccagcggcagagagaaatggggcctccctgtggcctgggggtcctggcaccatgcagggtggggagggccaagggcaggtgcaagg

SEQ ID NO: 25981 - DNA, 2279 bp, Artificial sequence
  DNA replication origin
acatcctgctgaggggacacctggtccccagctccctgcatgcaccaagcagcggaggtctggggtagacctgctatgcacagggtctggaaggggggcgtgtcagggctcagagggcgactgcaaagacagagagccatggggttgagggcggtgaggtcgggggcagttgtggcctgggtggtggctgagcatggcccacggctcgtgtgtgggatctgggtggccctggacaccccgcagagggtggccctaggccccctgcccaatcatgttcctatagtcggggatgatggtctgcttcaggtccaccaccgaggagaagatccacttcacctgtaggcaaggcacagcacaggggtgagcgaggccacagccctgcccccgaggcctgctcacccctcaggccacccaggccacagccctgcccctgaggcctatccggcccctcatgccacccatgtgccagggcctcaccactgcctgctctgaggcctggacatggagagcagagccagggcagcaacagcatgtggacagcacagaagatagtgtcaggtggggacagcacgggggacagtgtcagagacaggtgaggacagcatgggggacagtgtcagggacaggtgaggacagcatgggggacagtgtcagggacaggttgagacagtgtggggggagagtgttggggacaggtgaggacagtgtggaggagagtgttggggacaggtgaggacagcatgggggacagtgtcagggataggtggggacagcgtggaggacagtgtcagggacaggtggagacagtgtgggggagagtgttggggacaggtgagaacagcgtggaggagagtgtcaggggcaggtggggacagcatgggtgacagtgtcagggagaggtggggacatcatggaggacagcatcagggacaggtggggacagtatgtgtacagtgtcagagatgggtgaggacagcatgggggacagtgtcagggacaggtggagactgtgtgggggacagtgttggagacacgtgggaacagcatgggagaaagtgtcggggacaggtagggacagtgtgggggacagtgttaggaaccggtggggacagcataggggacagtgtcagggaggagtggggacagtgtgggggacagcatcagggacaggtggagacagcgtaggggatagtgttggctacaggtggggacagagtgggggacagtgtcagggaaaggaggaaacagagtggcggacagtgttggggacaggaggaaacagcatgggggacattgttggggacaggaggggacagcatgggggacagtgttggggacaggtgggaaaagcatggtgtacagtgttggggactggtggggacagcatgggggaaagtgttggggacaggaggggacagtgtgtgggacagtgttagggagaggtggggacagtgtgggggacagtgtcagggggaggtggggacagtgtgggggacagcgtcagggacaggtggggacagtgtgggggacagcatcagggacagctggggacaccatagggacattgtcgggacagatggggatggcatgggggacagtgtcagggacaggtggggacagtgtgggggacagcatcagggacaagtggggaccacgtgggggacagcgtcagggagaggtggggacagtgtgggggacagcatcagggacagctggggacaccctggggacattgtcgggacagatggggatggcatgggggacagtgtcagggacaggtggggacagcgtgggggagagtggtggggacagattgggacagtgtgggggacagcatcagggacaggtggggacagcatgggggacattgttgaggacaagtggggacagcgtggggtacagtgtcgcagatgagtggggacagcatgagagacagtgtcagggacagtgtcagggacaggtggggatagcatgggggacagtgtcagtgacagtttgtgacagcatgggggacagtgtgagggacagtttgtgagagcgtgggggacagtgtcagggacaggtggggacagcctggggacagtgtcagggacagtgtgtgacagcatggaggacaatgtcaaggacagctggggacaacgtgcggccgaccttgaagaaggtgacggtggcactgtagcacacgcttaacaggaagagtgtgatgaagatggtgatggtcgtccacagcccgtccagctccccgtcctgcgcctccgcacagctctcctccagttgca

SEQ ID NO: 25982 - DNA, 1092 bp, Artificial sequence
  DNA replication origin
gtcagggacaggtggggacagcctggggacagtgtcagggacagtgtgtgacagcatggaggacaatgtcaaggacagctggggacaacgtgcggccgaccttgaagaaggtgacggtggcactgtagcacacgcttaacaggaagagtgtgatgaagatggtgatggtcgtccacagcccgtccagctccccgtcctgcgcctccgcacagctctcctccagttgcagctctggacaggaagagggtggtcagtgctgtgtcctgctgggctcgggcctctgggggtgattccctctgtggcaggacccaggatgtagggcccggccgggatgggccaacagtgtcctgaggtcagctccccacagctgcccgccctgggcaccagctttggccccgggactcagccacacacccggccctagatagcgacctggccctcagcaggacccactccccgtctcccgtgtccctccctgaggcccagagggcaggaggatggtgaagcccacacctcatgtgaccccagctgcagggaagggctgtattgggaagtgggccagtgccagggacgcgacgtggcgtgtgttcccctgtgtgtgggggcctgtgtgtgtgtggcggctgcaggggcaccttgtgagaggagggctgggtttgtctgagctggtcagcatgtggagaagctgccgagcggctcgtgggccttgaggtgccgcgtggggctcgtgggggcctgtgtccgaggagtgttcacgtgtgcgaggaccttgctctggtctgggtgctgtgcggttcgcccgggtgaggctccgtgtgtgaggcgtgcacgtgtgtgtgtggtggccgtgtggccggccaacctcagtgcggggtttgttgaacgggtctgggctgagtgtgtgtgtgggcatctggaccagtctctccacagggcccgagagtgcatgtccccggagtcggttgtgtccccatgcgggtgcgaggctgggcagggctgccaggggttagtgccgtgggggtagatgggtgagggagggcctgtccctacgcacatggactaggcatgcccccgagtgggcatgcgggtcgg

SEQ ID NO: 25983 - DNA, 3312 bp, Artificial sequence
  DNA replication origin
agtaagtggtgccgccggtttcaatcctgttcttagtgtttgcagcgtggagttcacacccctggggacctgggggccgagctgtgatttcctaggaagacaagtggcagctgacagcgtgggcaaggctgcccacatgtacctcgccacaacaggaagggctgagacccccacctcggtgagtggggtcagcacagggcaggagcacaggctcaggagaaggacagagcctgggcgcagccatcggcgcttctggacctgagctgctgaacaggctgcaagaggctggggagaggctggggcgaggccagccccacatggaagcctaagcggagccagcacaggggaggtgggcagccttcaggcaccgatgcccacccagtgcgagacgacagggaccgtgggcaggggcttccaagccaacagggcaggacacaccagaggctgactgaggcctccaggacgaccgggctgggagtgtgaggaacatgacgggatggggcagagccagccatggggtgatgccaggatgggcatgaccgacctgagctcaggaggcagcagagagagggaggaggagaggccccaggtgaaccgaggggcttgtccaggccggcagcatcaccggagcccagggcagggtcagcagagctggccgtagggccctcctctcagccaggaccaaggacagcaggtgagctgggagcagagcagggagggtgagtgtggcagcaggacaggagggtggaagccaaggagcccagaggcagaggcagggacaggggaggcacaggggctgggctcagagccagctgatggggttggggcacctgctggccgggagcagggctgtggtcagcagcggagaggaggggagagctgtgctgagtgcacgggcgggaggagggaagagtccagggaggcccagaaaggcccagagtgcagcaggcctggggcgaggggaggggctgaggctccgtgcgttcagggaactgacccagcagagcagaggccactgaggagctgaggttctggagaggcttccagagcaggagcagtgcagggacgggaggatccgggagctcatccaggaggggcacatgggcaagggcaaggggctctgttggggagacctgactggacactggggctgctccacagcatagggaacacgccaagtgctgcaaaaacaaaaatgaggcaagaaaaacagcctaaacctggacagagggtgccaggacaggcaggggggcaacagtggaccgagtgacgttgctgccccaggttgagggagggcagagtgagcagggggcaggcattggagttcaggggaccaggaccaagcagccacaggtgcacagggcaggtgggaggcaggaagaacagggggcagctcctggagctcaggggaccacgggagagcatctgaaggtgaacaggagccggtggaggggcaggatgagcaggaggaagaccctggagctcaggggaccagggcagagcagccacaggtgaggaggcagccacaggtgcgcagggcaggtgggaggcaggaccagcagggggcagcccctggagctcatagagccagggcagagcagttgcaggtgagcagggctcagtggaagatgggcaagcagggggcagctcctggagctcagggcaccagggcagtgtagccacaggtgagcaggggctggtgggaggcaggacaagcaggcggcagctcccggagctcagggaaccagggcagtgtagctgcaggtgagcaggggctggtggaaggcaggacaagcaggtggcagctcctggagctcagggaaccagggcagtgtagctgcaggtgagcaggggctggtgggaggcaggacgagcagggggcagcccctggagctcaggggaccaggggagggcatcagaaggtgagcaggggctggtgggaggcaggatgagtaaggggcagcccctttagctcaggggaccagggcagagcagcctcaggtgagcaggggcaggtgaggggcaggacgagcagggggcagtcctggagctcaggggatcagggcagagcatcagaaggtgagcatggctggtgggaggtgggcgagcagggggcagcccctggagctcaggggaccagggcagagcagtcgcaggtgagcacgggttggtgggaggtagaacgagtagggggcagctcctggagctcagggaacaggggagaacatcagaagatgagaagggccggtgggaggttgcagagcagggggcagcttctgcagctctgccagccagggcagagcagctgcaggtaagcagggctggtgggaagcaggggtagcaggtgggcagcccctggagctcagagagccggggaagatcatcggtaggtgagcaggggctggtggaaagcaggaggagcaaggggcagctcatggagctcagaggaccagggaagagcagccacaggtgaacaggggcaggtgggcggcagaatgagcaggggcagctcctggagctcaggggacaagggcagagcagccataggcaaacaggagcagggtcaggggacaggaggagcagggggcagctcttggagctcaggggaccagggcagagccgctgcaggtgagcaggggcaggtggggggcaggaggagcagggggcatctcctggagctcagagcaccagggcagagcagccacaggtgagcagggacggtgggaggcagcacgcagctcctagactttggcaggagctgggtagttgccggcagcagacagctgagggctggtgaaagtgcagtgcagcctcctggtgccgggaagggagtgtgagtccatcccactgagcagttggcaagggcgagctgggatggagaagggaaggcgttccagggctcggggctgagctctcaggcaggggcaggtgtggctgcagggggaacgtgtgcttgagaccaggagggtcccagggctggccccagcggaccctgggcaggaaggcctctgaggctggtgccccagaaggagcaagatgggctgccaggagccaggaccatcagcacaatgaagctgagtggaggtggtgcagggcagtgtagcagcagagggcagccagaggggcccattcagggcctgggcagagtcagccagagcctgtggtgcaggtgaggggaaggggtggtgagcggggccctggggctgagcagaggggatggcctggctgagggcagggcgcttagcttcctcagaggtcaggggcacaccccacctgcagtgggactccagggccactgggccagcagcagag

SEQ ID NO: 25984 - DNA, 1866 bp, Artificial sequence
  DNA replication origin
agggtggctgagggacagtcattctgcctgttggtccagcccacctcactgctgcttctcctaacagcttcctgccctactcagagaaagtcaggcacgtacccgagttctcccgaacactgaacccgtccccccggccacatggacatctcaggcaggtcagagtcacaagcctcagacttctcagataaagttcttggtgagggccctctttcccctgccattctgaggtggcaggcagggtgagggtgagaagcaggctggccaccaagatccaacacttggagagagccaggctggggcgggcgggaggcgagggtcacggggaggggctgctgcggcccaagtgacctgtgagtctgcaagccggactgcctcggcagggtggctctatgtgaggctgcgctgagagcccatgcctcagctcagcgaggcagagctgggtccatgggccagggagccggcccaggtctgctctgggagtctgctggttgtttggcatctgctggcccccagactggggctggctggcagtaggtgtttgttagaggtccgttcagtgtccctctccttaccaaagtgtgacttggagactcagacaaggagttatgaagggctgcctggaggaggcggctgaggaatgagcaggtgggtgggggtggagtgtgcagggaaggggcttctcacctgtgttacgggtggtggctggggctgtggttgccttggcgaggctgccctctgcttggggttgtgcagtgggcactgaggaggcctgtgcctttggagactctgaaatccaaggaaaagtgcaggtgaggctgagggcagagggcatggatgtaccagaggctgggttgtggacaggcaggtggggggcacaggcagccaagcaggaagaagggaggggccgcagcatggggtgggagcttggctgtgggaagcccactagacagtcacctttgctgggcaagctgcctccgtgcacactgagggaagggtctggaaggaaagtgatctgggtattgggagatgggcctcagagagagggagcggagggactgagatggggagggtccggaggggtggatacagggtgaagggggaggaacgtgctctgagggggaggtgggggttgcctcacagcccagcccttgcttctgtctttgtggtcaggccctgagtggaaggtgctgggggtcctggggggcccttctgggtgatctccggtgcgacctacctggccagcggaagatctccttcttactcttgctggcggtgtgctggaccacgcatttgtactcgccttggcgccactgctggaggggggtggagagctggctgcttgtcatgtagtagctgtcccgtctttgtatctcagggaaggttctctggggctggctctgtgtccccatgtaccaggtgacagtcacggacgttgggtggtacccagttatcaagcatgccaggaccacagggctgttatcctttgggtgtctgcaccctgatatgatggggaacacatccggagccttggtgggtgctggaagacagacacagtgggagtctgaggctggaggctctgaggacaaggggcagggcagggcagaggaccctggcagcagggtgacagggaaggcagggaaaaggggcccaggaggagtgcccagggtgagcggggctgaccaagtggcccgtgaacacgaatgcccctgctgccgctcctgtgttgtgagtcagaataaccgagtgggacctgtggctttgtggaccctgggctcttgttgccgagagctcctggaagggaggggtcttccctccagaggctttggtgcccctctgggcattcctgggacctccaccttccct

SEQ ID NO: 25985 - DNA, 1196 bp, Artificial sequence
  DNA replication origin
ggcagagatgacccagtggggtggtgtgggggcctccgggctagacgtccagcccaggctgctccctgggccccacactcgccctgcaccctcctccctgtgccacagccgtgctaccttgaacaaggtgacggtggtactgtagaagaggctcaggaggaagaggacgatgaaggtggaggcggtggcccacaggttctcaaagccctcctcgtcggcgctcacctccccctctgcaggagacacagcacgggggaatagggtcaggctggggtggcacccagcaaagcccccccggggcccatcctctaggcccacccttggcccctaggctgtgctgcacccaggggtggggagagcaagtgcaggggggctcgggcactgcccagggcatgggctgggcccctgaaagcctgatgcagcgggggcacaggccgagactgggcagggctgggactctgaggtcttttcctcagagtcctggggtggcagagagagcgtgggggatgcagcacacagaccaaggtgggggctggagggcggggccccagcggagcagcggccagcatgtcctgactctcctggagggggaagcagggggtgtggccctgccctgtgctgtgggggctggcaggtgggaggactgagctggggggaacccgatcctgactccctcaccaaggccctgactctccagctccctcttggagcagagtctgcatggggacatcctggcggacttgtcctaccctgccaggacccagggagcagacagagacctgagctccacagtgggatgaggacattcggggggttgcatcccctgcacagatgggcccttgggagacacctggagcccaggactccaaagggccaagagtgtggcggggactcggaggtggccccagttagagacagcactgtgcgttgggtgtggagacctcactcgggccctgccttccctgctggggctcggtccttcccgggctgctgctgtctgacctcgcctgctccctgctgtgggttggggagcaggtggtatttgcaggggcagacttgctctagctcatctcctgaggcctcctgctaagaggagcagctgcccagggcagccactctgccctctgggcccatatgcttagtcactgcctgctctcagcacatggcacaggctctggttctgctcaccggtgggt

SEQ ID NO: 25986 - DNA, 1304 bp, Artificial sequence
  DNA replication origin
gacttgttttcccagcagcagagaggcccgggtggcggtggccaggggagcctcctcgcctggagggccatggcccccgccagggctcctcgctggcctgcaggggcaggaagcctttcctgctctgatcccgtctgtggggcccggcgggggttgcctggttggttccacctgttcaccgtcgtcccactgaacgggaggcctcagtgggtggcactgggcctcactcaccacggcgccctggcgtgggctccctgcgtgtccaccagtgctgggtcccttctctgagcctcagctggtcctcagtgagtctcagctcttcccatggtgggtgccagggaaggtgcaaggtggtctaaggagagcccctccccaggcctgcactggctgccttccgccgagtctgggtgaggggctttgcacgcaccactggccagacgcgggctgggtggggccctcagggaggctgaggcctgcggccaggtgtgagcatgggggtgtgcctggtgagggcctctgctggggatgaactgacgggcacagggtgtctgggggcaggggaggtgcccctgcgggcttgctggggagggtctgtgtcggggcagagttccagggagaggaacaggcaaggcaaaggctgggaggctgggacctgtcgttggaggacacaggtggtttcctgaggctgggtggaaagggggcctgtgtgccttgaaggggccgaagggtgctgggggcttgcttaggcgctgcccaagaaggccccctcaggcaccgtgcgggcagggatgaggggtctgggagggaagcctggatgtggggagagggttggggctcctgtaggggtgtggacagaatggcggcggtttgtggagtttcctacagggttccaggcaggacgggggaccctgaggtgctgtctgggacagtggatctctctagacatggttgaacagctgccagcatggggatggagccttaggctgggaatggtgagagaacccacctccagccacgaggggccgagaacccatttgtttaggggtggttgggccctgatggcctgggaggcacctgtgagggggtgaggtgggggagtgaggaagagggtggtctggcgctgggggagtggctctctggcctgaggaccctctgcccccacctgccacaagcacacaccagggaaagcacacgagtgtcacaggcgtggcggctggatcctacaatgggtggccagggcagggcccacaggccaggtcgagttggtcccccagcctctcccaacagctggcatctcctggggc

SEQ ID NO: 25987 - DNA, 804 bp, Artificial sequence
  DNA replication origin
ggactgggcagggggtaggtgtgtgtgtgcaggtgtggggggatgaggaggggtgggctccagcctctgggaatcctgccaagggcttgggcactgcagggttgctggacccgggctgcctggtgtggccatggtggctgcatccccagagccgggatggaggcgcagtggggaccggcgccagggagttgcctagtggtggctgcatggaggacctgccctgcatgatgcccctatcttggggggcatggggtccacatgagaggaaggggcacaaaccccctcctgggggtcttcctgagaccacctcagtcagggctctgtgcttggtgactttccagaaggtcctccctgcacagaccccaaagtctgtgttgccccagggcaggaaagaaaaatctgtgtcctggtcgaggttgggccccacaatggtggcccctaaacctgagtctgctccaaagcacccgcccctcagcaggccctgagtgagggacagagacagcggtggggtctttgatccaggtggacacgggggtggatcccagtgggaagtcaccagggccagggtcccccagggtattggggtgtctgtgttcctggtgtcggctctggatttggggtttgtgcctgtgctgcctgggggtgatgttgggaggtgcagatggccccggcccccgtcctcaccatccaatggggacactgtggagctccaagtgctgggggtcatgagggctgggaaggtcgtatgttcgggcggctggtcccttctctggctgggcctccagcagtggccgggagacagtt

SEQ ID NO: 25988 - DNA, 1400 bp, Artificial sequence
  DNA replication origin
aaggtggatcctagacccaggggaggggggcctcttcactgacctccccttcctccattcctccctccccaaagctgccctggcggcccccctgcaccccagcctctgtctgcactggctctgccggctctggtgtaggtgggactcaggatggtgtggacgacgtgtggccagggtggagaggaggtgggcgggtcggtgggtgagagggatgggctcatccaagatggagcacctgcagggacctgagccctcccccacaccgtccctggtccttccccgcagcctgccacggtgggagccccaggcagggtggaccataccctctaggaggctggcacttccctgggttcacgaagacggagcctcctgcccggtggtgcagcggccccgcttcctccttcagcccttcctgatggcttcctggggattctggattcccatggagtgatgagaggagagcagaggggaggaggggcagggctgggtcctgggtaagggggtgctcgggctggggtccctggagagaagttctgggttcctgggggccaattaggcaggcgtcctttctgtccacaccccaagggtcccggcaggagccaggtgggggaaccataaggagagggcctgtgtcctgtccccccaagtcctctagacagggtgggggctgaggggtcctccccagggcagggccaggcagtgactctggtgttgggttgttggtcgtcatgggctgacctggggagtgggggttgcagagtagaaaggggcggacttaggtagggcatggcacagtcatccctgtgttcaggccatttcctgtcctgggtgcctgcactgaacctcggcaaggacaggggtggcctcccagcctacagcctgcctgggatctgctctggccctagaactggggacagaagccatcctggaggtcagcagcctcctaggacagcaggaggagaccaggccagcccctagcaggggaggcagtggggattttggtagggtctgcgttgagagccagtacccagtagtcacagagcaagatgccccagcaatatgtcctatctgcagccgtctgcccaccctgtcttagccagggcaagggagggtactgtgcccctggcaggcccagcctttggccttccttggagggatgagggcctgggaagccgagctgttggtggcgctgggaagaggttcccaggacagggggatggagcttaatcaagcggcctggttggggttgggtccttctgcaggctggccactcagtgatggggatctccgggtggtccctgcacctagtgccaggatacacacagtgctctgggcccactgtctgggctccccgccttgtttccagggggctgggtggttctccaaggctcagtttcccc

SEQ ID NO: 25989 - DNA, 1279 bp, Artificial sequence
  DNA replication origin
cctgttccaggtgggactgtgggtctgttctctttccacggggtgttctggggccgccagtgaggggctcgggatgttagcggctggtctctgtccctatggtatgggctccggttcactgctcccctgccctccaggtcggtcactgactcggttactatccagcgacctccgtggctgttcagtggtggctgcaggtctcttcccaggagaggcctgcgagagggctgggctgtctgggagccctgcattctcccgtgatgttgctgcctggatccctcatctttagagggagtgcggagcctccctgcaggtgcaggcagtgagagacacaggcggacgtgtgtcaaggcactggaggccgatttctttcagtgccttctgcctgtggaagagctgagctccctgcttctgcgcacaggaggctcccgtgtaaccaggcagtgagggcaagggcctgcatggggaagacttgggtgagcctttgtcctggaaataccagggccgggtctgagagggaggggagcggggtcagagtgtccaggaggaaggtgatggcatgggcagtgtgtgggtgggagtgtagggtcagtgccatggctcaagggctccaggagaggaagaactcaagttgtgggcaggaggggttagggggtgggcacaggtaggaaaacctgaggctcttgtggcagaagagcggagggcctgcaggtgcagagttggcctgggaggggtgtttagagggagggacaggggtctggttgcagatcagggtgaggactgcagggtcacgtacccagggttgtttgggtgggcggcaagtgcagcaggtagaaaaggcccgaggcagggtggggtctccccagcgtgtgggctgcagggaggggctgcacagggtgttccccagaaggagggagcacagaggcactgggagggaatggagagggaaatggcagtgaccctagtgccaggcagtcccggtttggggttgatctgtgtgggaacagctccctggcctgtgtgtaagtggtggcaggaaggcaggtcccgccctggggtctggagcttatcttcttcctgtgagctgtgtgtgggtggctcctgtgggctgtgccctggacctgtggtctggtggagcccaggcttcccaggaacggcagtgctgtctgggctggagcagccttagatgccaggtcagggtggccctggggccactgcctccagctgtgtctagtgctgcagggatctgggcatgaggccccttctcccaggaggggag

SEQ ID NO: 25990 - DNA, 1280 bp, Artificial sequence
  DNA replication origin
cagcgtgtgggctgcagggaggggctgcacagggtgttccccagaaggagggagcacagaggcactgggagggaatggagagggaaatggcagtgaccctagtgccaggcagtcccggtttggggttgatctgtgtgggaacagctccctggcctgtgtgtaagtggtggcaggaaggcaggtcccgccctggggtctggagcttatcttcttcctgtgagctgtgtgtgggtggctcctgtgggctgtgccctggacctgtggtctggtggagcccaggcttcccaggaacggcagtgctgtctgggctggagcagccttagatgccaggtcagggtggccctggggccactgcctccagctgtgtctagtgctgcagggatctgggcatgaggccccttctcccaggaggggaggcacgtgagtgagaccctaagtccataccccatggtggcttggccctcctgcagagggtctgggcagtggtaggtggctgtgtgcagatggggggtggggggtggggaggttagcccctcccagacgcaccctgctctgctccagagtgtgggcttgcccactgcagggtggctgggcctgggcttcctggtgtgcttgtggtggctgcattcccagagcagggactgaggtccagtggggtcccgggaggagtctgaagggggctccatggaggacctgccttggatggcacccctatcttggggaggacctggggtccagctgggaggaagtggagtggccacctcctgagggccttcttggggccacctcggcctgggggctctgtgattggccaccagccagtagttcttccctgcccagaccccaaagtctgtgctgccccaggaaaggaaggaagggtcagtggcctcatcaaagttggggcccacagtggtgtcccctaagaccgagtctgctcccaagcgctcgccctgcaggaggccctgagtgagggacagagacagggcagggcctttggtcctggtagactctggggcggattccagtggggagttatcacggttggggtcccccagagtgttggggtgtctctgctcctggagttggctctggatgtggggtttgtgtctgtgctgcctggggttgatattgggaggtgccggtgatccctgtctttctgaggacacttgtcagaagggtcaactccagccagaggcaatggggccacagcagaaggatgtgatcaagtccctgccgcaaaccaccggagcccccagcccttgtcctcattatccaacggg

SEQ ID NO: 25991 - DNA, 784 bp, Artificial sequence
  DNA replication origin
gcagaaggatgtgatcaagtccctgccgcaaaccaccggagcccccagcccttgtcctcattatccaacggggacaccgtggggctctgggtgctgggggtcatgggaaccggcaggacatgggttcaggccggctgctcccctctctggcggggcctccgactgctgccaggagtcagttttggacacagtttttctcacggtggtcgttccagttatacccactgtgactcggggctgttcagaatccgaccaggcgccctgagctctggggcctcctgggtgggggcaggggctgggctgctgggcggggaatgcttagggggctctggaggctggggctcgctttaggtgtggggtgagcactgggggccccagctagcggaacacccacagagactggggcctgcacacattccgccccggtgtgtggggtgggcccaggcccgtctgggcaggtcagcctcaatggggacggtgctcgggtcctgcctggctcctccttggggtagaggggacctatcgcctggccctggaccccctcaggccgcccctattcttgaagaaacgcaggacggtggagggtgccctggaggggagacgtctgctgccctgggtgtcaggtgcggcctcagatcctaaacgtgtcctccctgctctctctgcttccgctgacttgggacggggtttctggcctggcgagtgtcactgtggtaccagccactgctataccccactgtgatacagacagcttcagaaacctcctcgtctgtttgggagcctt

SEQ ID NO: 25992 - DNA, 1128 bp, Artificial sequence
  DNA replication origin
atgtttcctaggtgtgttatggggccaccattgaggagctcgggatgtcagcggctggtctctgtccctatggtatgggctccggctcactgctcccctgccctccaggtcggtcattgactcagttactatccagcagcctctgtggctgtttggtggtggctgcaggtctcttcccaggagaggcctgtgagaggactgggatgtctgggagccctgcattctcccgtgatgctgctgcctggatcccttgtctttagagggagtgcggagcctccctgcaggtgcgggcagtgagagacacggggggacgtgtgtcaaggtgctggaggccgatttctttcagtgccttctgcctgtggaagggctgagctccctgcttctgtgcacaggaggctcccgtgtaaccgggaagtgagggcaagagcccaggcctgcctgggaaagacttgggtgagcctttgtcctggaaataccagggcttggcctgagagggggcggggtcggagtggccaggaggaaggtgagggcatgggctgtgggtggtgggagggcagggtcaatgccatggctcaggggctccaggagaagaagagttagagttgtgggcaggaggaggtagggtgtgggcacaggggggagaaactgaggctctagcgacagaagaggacagggcctgcaggtgcagggttggcctgggaggggtgtctggagtgatacacaggggtctgggtggagaccagggtagggactgcagggacaggaccccagagttttctgggtgggcagtaagagcagcagggttggaagggccccaggcagggttgggtctccccagggtgtgggctgcagggactggctgcacaggctgttcccccgaaggaggaaccagggaggacagaggcgctgggagcaaatggagaaggaaatggcagccacctgagtgccaggcggtcctggtttggggttgttctgtgtgggaacagcttcctggcctgtgtgtaagtggacgggggagggcgcccaggtctggggcaggaagcagtagcaggaaggcaggttctggccctgggggtctggagcttatcttcttcctgtgagctgtgtgtgggtggctcctgcacccgg

SEQ ID NO: 25993 - DNA, 1177 bp, Artificial sequence
  DNA replication origin
ggttgttctgtgtgggaacagcttcctggcctgtgtgtaagtggacgggggagggcgcccaggtctggggcaggaagcagtagcaggaaggcaggttctggccctgggggtctggagcttatcttcttcctgtgagctgtgtgtgggtggctcctgcacccggtgccctggacctgtggtctggtggagcccaggcctcccagggacagcagggcagcctgggctgcaggaacctcagggaccaggtcagggtggccctcgggcctctgcctccacttgcgacaggcgctgctgtgggaacctgggcttgaggccccttcactcatgatgggagccacgtgagtgagaccctaagtccataccccatgtggggctctgaccctcctgcagagccgctgggcaggggtgggtggggtgtgcaggtgggggtggggtggggagctcagcccctcccagaggcaccctgctctgctccagagtgtgtgcttgggcactgcagggtggctgggcctgggctgcctggtgtgcttgtggtggcttcatccccagagctgggactgaggcccagtggggtccagggaggagtctgaatggggctccaaggagcacctgccttggatggcacccttatcttggggaggacatggggtccagctgggaggaaggggagtggccacctcctggaggtctttccagggccacctcagcctgtggcctctgtgcttggcgacctgccagaagttcctcctggcccagaccccaaagtctgtgctgccccaggaaaggaaggaaaggtctgcgtcctggtcaaggtcggggtcacactggtgtcccctaagcccaagtctgctcccaaggcctcgcccggcagcaggtcctgagtgagggacagaggcagaggcagggtctttggtcctggtggactctacggcgaattccagtgggaagtcatcagggtcggggtcccccagggtattggggtgtctctgctcctggagttggctctggatgtggggtttgtgcctgtgctgcctggggttgatgttgggaggcgccggtgatgcctgtctctctgaggacacttgtcagaagggtcaactccagccaggggcactggagccacggcagaaggatgcgatcaagcccctgccccgacccgccggaatccccagctctt

SEQ ID NO: 25994 - DNA, 1160 bp, Artificial sequence
  DNA replication origin
ccatggggtgttgtgggaccaccagtgagtggcttgggatgtcagtggctgtcctctggccctatggtgtgggctcgggctcactgctcccctgcctccaggtctggcaatgactccgttactacccatcggcctccagggaggtttggtgttagactccgttgactgggcgtcttcaggtctcttcccaggagaggcctgtgagaggactgggatgtctggtagccctgcattctcctgtgatgctgctgcctggatccctcgtctttagagggagtgccgagcctccctgcaggtgcgggcagtgagagacacaggcagacgtgtgtcaaggcgctggaggccgatttctttcagtgccttctgcctgtggaagggctgagctccctgcttctgtgcacaggaggctgccctgtaaccgggcagtgagggtaagggcccaggcctgcatgggaaagacttgggtaaggctttgtcccagaaataccagagccaggcctgagaggggagtggggctggagtggccaggaggaatgtgagggcatgggcagtgtgtgggtgcgagggcacggtcaatgccatccctcaggggccctaggagaggaagagctcgagctgtgggcaggaggagcacgggggtgggcacaggcaggagaaactgagggtctttggcagtggaggggagggcctgcaggtgtagggttggcctgggagaggtgtttagagggaggaagacgggtctaggtagagaactgggtgggggctgtagggacaggaccccagggctgtcttggtgggtggcaagagcagcgggggagaaagggctggaggagggtcaggtctccccagggtgtgggctgcagggtcgggtctccccagggtgtggactgcagggaggagctgcacagggtgctcccccgaaggaaggaggagggaggaagcacagaggcattggaagtgaatggagaaggaaatggcagtgacctgagtgccaggtggtccccgtctggggttggtctgtgtgggaacagcttcctggcctgtgtgtaagtggacgggggagggcaacgaggtctggggcaggaagtcgtagcagcaaggcaggtcccgggcctgggggtctggagcttatcttcttcctgtgagctgtgtgtgggcgg

SEQ ID NO: 25995 - DNA, 1056 bp, Artificial sequence
  DNA replication origin
gaggtctggggcaggaagtcgtagcagcaaggcaggtcccgggcctgggggtctggagcttatcttcttcctgtgagctgtgtgtgggcggccccagtgtgggcggtgccctagacctgtggtctggtggagcccaggcctcccagggacagcagggcagccagggctagaggagcctgaggggccaggtcagggtggccctggggccactgcctctacctgtgaccagcgctgctggggggatctgggcatgagaccccttctcccaggaggggaggtgcgtgagtgagaccctaagtccatatcccatgggggctctgaccctcctgcagggggcccgggcaagggtgggtggggtgtgcaggtgggggtgggggtggggagcccagcccctcccagacgcaccctgctctcctccagggtgtgggcttgggcactgcagggtggctgggcctgggctgcctggtgtgcccgtggtggctgcattcctagagtggggactgaggcccagtggggtctggagaggagcctgaagggggctccatggaggacctgccttggatggcacccctatcttggggaagacatggggtccagctgggaggaagggtagtgggccacctgctggggttccccctggggccacctcagcctgggggctctgtgcttggtgacctgccagaagttcctccctgcccagaccccaaagtctgtgctgcaccagggcaggagggaagggtctgtggcctgctcgaggtcaggcccacagtggtgtcccctaagcctgagtttgctcccaagtgctcgccccgcagcaggccccaagtgagggacagagatgggacgggagtcatcagggttggggtcccccagggtattggggtgtctctgttcctggagttggccctggatgtggggtttgtgcctgggctgcgtggggttgatgttgggaggtgccactgatccctgactctctgaggacacttgtcagaagggtcaactccagccaggggcactggagccacggcagaaggaagccatcaagcccctgccccg

SEQ ID NO: 25996 - DNA, 1027 bp, Artificial sequence
  DNA replication origin
gagggacagagatgggacgggagtcatcagggttggggtcccccagggtattggggtgtctctgttcctggagttggccctggatgtggggtttgtgcctgggctgcgtggggttgatgttgggaggtgccactgatccctgactctctgaggacacttgtcagaagggtcaactccagccaggggcactggagccacggcagaaggaagccatcaagcccctgccccgacccgccggagcccccggcccttgtcctcccatccagtggggacactgtggggctccaggtgcacggggtcatgggagccggcagaacatgggtttggggtggctgctcccctctctggcggggcctccgactgtggccaggagaccgttttggacgaagcttttctcacagtggtagttccagttatacccactgtgactcggggctgttcagaatccgacggggcgccctgtgctctggggcctcctgggtgggggctgggcttgtgggcggggtctccttcaggggctctgaggctgtggctcgttttaggtgtggggtgagcactgtgagccccagctagcggaacacccacagagaccgaggcctgcacacattccgccccggtgtgtggggtgggcccaggaccctctgggcaggtcagcctcaatggggagggggcttgtgtcctgcctggctccttctctgggtagaggggacccatctcctggtcctggacccccttcagcctgcccttgttcttccagaaatgcaggacatggcagggtgccatggacaggagacgtctgctggcctgggtgtcaggtgcggcctcagatcctaaacatgtcctccctgctctctctgcattccgctgacttgggatggggtttctggcctggcgagtgtcactgtgggacgagctgctatactccactgtgacacagacaccttcagaaacttcctggtttgtttggggaccttcccttgctgggctcagcacaacttggtcttttctggccttgacggggcgtcct

SEQ ID NO: 25997 - DNA, 1286 bp, Artificial sequence
  DNA replication origin
ccaggtgggaatgtgggtctgttctgtttccacgcggtgttctggggccgccagtgaggggctcgggatgtcagcggctggtctctgtccctatggtctgggctccggttcactgctcccctgccctccaggtcggtcactgactcagttactatccagcgggctccgtggctgttcagtggtggctgcaggtctcttcccaggagaggcctgcgagagggctgggctgtctgggagccctgcattctcccatgatgttgctgcctggatccctcgtctttacagggagtgccgagcctccctgcaggtgcgggcagtgagagacacaggcggacgtgcatcagggtgctggaggccgatttctttcagtgccttctgcctgtggaagggctgagctccctgcttctgtgcacaggaggctgccgtgtaaccgggcagtgagggcaagggcctgcatggggaagacttgggtgagcctttgtcctggaaataccagggctgggtccaagaggggagcagggtcagagtgtccaggaggaaggtgagggcatgggcagtgtgggggtgggagtgcacggtcagtgccatggctcaggggccccaggagaggaagagctcgagttgtgggcaggaggaggcagggggtaggcacagagggtagaaactgaggctctggcagcagaaaaggggagggcctgcatgtgcagggttggcctgggaggggtgtctggagggagagacaggggtctgggtggagaccagggtgtaggctgcagggatgggaccccagggttgtctggatgggcaggaagagcagcgggggagaaagggctggaggcagggttgggcctccccagggtgtggggtgcagggaggggctgcacaggctgttcccctgaaggagggaggagggagggagcacagaggtgctgggagcaaatggagagggaagtggcagcggcccgagtgccaggcggtcccggtttggggttgatctttgtggaacagctccctggcccgtgtgtaagtggtcgggggaggcacggaggtctggagctacaagcggtggcaggaaggcaggtcccagtcttgggggtctggagcttatcttcttcctgtgaactgagtgtgggcagcacctatgggcggtgccctggacctgtggtctggtggagtccaggcctcccagggacagcagggcagccagggctagaggagcctgagggtccaggtcagggtggccctggggccactgcctccacctttgaccagctctgctgtgggga

SEQ ID NO: 25998 - DNA, 860 bp, Artificial sequence
  DNA replication origin
cacccaggaggggagccgcgtgagtgagaccctaagtccataccccatggggggctctgaccctcctgcatagggcctggacaggggtgggtggggtgtgcggggggcggtggggagcccagactctcccagacacagcctgctctgctccagaatgtgggcttgggcactgcaggctggctgggtctgggctgcctggtgtgcctgtggtggctgcattcccacagccgggactgaggcctagtgaggaccagggaggagcctgaagggagctccatggaggacctgcctcggatgacacccctatcttaagaaggtcatggtgggttccagctgggaggaagggaagtgggccacctcctgggggtcttccacccccaccacctcagcctggggcctctgtgattcctctctgcacagaccccaaagtctgtgctgccgcagggcaggaaggaagggcctgtggcctggtcgaggttggggccacagtggtgttccctaagcccgagtctggtctcatggcccgccccgcagcaggtcctgagtgagggacagagaccggggcggggtctttggtcctggtggactctggggtggattccagtggggagtcatcagggtcggtgtcccccagggtactggggtgtctctgctcctggagtcggctctggatgtggggtttatgcctgtgctgcctggggttgatgctgggaggtgccagtgacccccgtttccctgagggactcttgtcggtggtagggtcagttctggccaggagcactgggaccatagcagtaggatggggtccagccccttccatgaccccctggagccctggtccccgtcctcaccattcagtg

SEQ ID NO: 25999 - DNA, 1074 bp, Artificial sequence
  DNA replication origin
agttctggccaggagcactgggaccatagcagtaggatggggtccagccccttccatgaccccctggagccctggtccccgtcctcaccattcagtggggttcagtggggactccactgtgctctggctgctgggggtcgtgtgagctgagcaggacctaggttcggggcggctgctcccctctctggcgcggcctccagcaggggccaggagagagttttggacacagtttttctcacggtggtcgttccagttgtacccaccgtgactcggggctgttcagaatctgccccggcgccctgagctctggggcctcctggatgggggctgggcttgtgggcggcatctccttcgggggctctggaggctggggctcgctttagttgtggggtgagcactgggagccccagttagcggaacacccacagagaccggggcctgtacacattccgccccggtgtgtggggtgggcccaggcccctctgggcaggtcagcttcaacggggagggtgcttgggtcctgttagttttcctctgggttaataggattcatctcctggccccagatcctcataggctgcccctgtccctccagcaatgcaggacatggcaggtcaccctggagggaggcatgttctggcctgggcgtcaggtgtggcacctcagatcctccatgcgtgctgtgggctgagcaggacagcagacgaccccgggcccccaccctgtctatggacattttttgctgcagcagctgtgggagctgacagtgttcacagccacaccaaggtcatcattgtagtcaaggctttctaaaagtttcattgtgaggaagcctcctattaaacggcgcctgggccctgcttcctgagggttactgctgagtcccggatttcccgtagaggcgacgagaggagagcagagggaggaggagggggatgagctgggccctgcagaagggggtgcttgggttggggtctgtggagtgaagatctgggctcctaggggccacccagacaaccatcctccctgttcacaccttgagggtcccagcaggagccaggtggggagactgtg

SEQ ID NO: 26000 - DNA, 1533 bp, Artificial sequence
  DNA replication origin
taagaggcaaagtggcagagtttaactggcacataatcttcctctaggaacactctaatagtaagagaaggacacctcaaatgagcatgtgcacatttcattaaacccactgtgtatgcagcccctcccaagtgctggcaggccactgtacatgtgggcagcccactccaagggaagaatcaagggagaagaaatacaaatcccagaaccatgtcaatgtataaaaccccaagtcaagggccggacagagcacttagatctctcaagtcgcccacttagccctcttccaagtgtactttacttcctttagttcccactttaaaactttaataaacatttactcctgctctaaaacttgcttgggtctctcactcttctgtatgccccttggccaaattctttcctccaaggaggcgagaatcaagttgctgcagacctgtatggattcgctcctgctaacagatagctggatgggtggacagatgcatgaattagtggatggacgtttggatgtgtgggtgggtgggtggattgtgggatggctggatgaatgcatggctggatgggtggacacatgcatgaattagtggatggatgtttggatgtgtgggtgggtgggtggattgtgggatggctggatgaatgcatggctggatgggtggacagatgcatgaattcgtggatggacgtttggatgtgtgggtgggtgggtggattgtgggatggctggatgaatgcatggctggatgggtggacagatgcatgaattcgtggatggacgtttggatgtgtgggtgggtgggtggattgtgggatggctggatgaatgcatggctggatgggtggacagatgcatgaattcgtggatggacgtttggatgtgtgggtgggtgggtggattgtgggatggctggatgaatgcatggctgggtgggtggatggatgcatggataagtggtggacggatggacgggtgagtggatgggtggatgtgtgtgtggatgggtggataggaaagccctctaattgattacagggctcagtgtgtgcttcaacatcatgatggcatcatcacattggtccctgtatgaagcagtgggggaggagagtgtaccaggggagcaggaatgacttttctccagaatcgacctctcccaccctgcagcctgggctgtgcaggccacattggagaaggtgcggtcgactactcctaaatgttgttgtgtccaatggcttgttgacgttgatgtaggaatgagcctacatctccaccatagatggaactgtttgggtccccaaagcagaaagcctcttctgttgcaggtgctgaagtttccatcttcttctgcttatacggaagctcacgcatcccttgggtggcaggcgtcaggttcctgtgcgcactgagttccccccttacatgctttggacagaagtgtgagacacacaagattgctgcaggaagtccacctgtggggatgctgcgacttctccagcaagaacacgagtctgctcattgaccatcaccacaca

SEQ ID NO: 26001 - DNA, 1433 bp, Artificial sequence
  DNA replication origin
acaataattcaaatagaagttctcagtgggactctccttgagtaaaaagatgattaacaatcctcaaatacactcagttcaggagattctcttttaagatgattaacctgagagctcaggaaaagtccgtgtattactttgagggacacagtgaggggacatctgtgtgaactcagacaccaacctccctgcagggagacaggaggggactgcctggtagatgcttctcagaaccaccagggggtgctcaggacatcagggggcactcagaaccatcaggggatgctcaggacaccagagggcactcaggacactggggggcggggggtcactcagaaccaccagggggcgctcaggacactgggggggggggggtcactcagaaccaccagggggcgctcaggacactatgagggggggtggtcactcagaaccaccagggggcactccggacacggtggtgaggggtagctcaggatagcaggggtgctcagaaccaccagggggcgctcaggacactgagggggggtcactcagaaccaccaggggacactcgagacaccagggagccctcaggacactagggggagctcagaaacaccaaagggcaatcaagacaccagggggatctcagaaccaccaggaggtgctcaggacaccaggggtctctgaaccactagggggagattaggaccccagggggctcagaaccactagggggttttcaggagaccagggggcgctcaggacaccagggggcgatagggacaccaggtggttcagaaccactagagtgtgctgagaaccaccaggggtgctcagaaccccagggggctgctaaggacaatagggagtgctgagaaccaccagtgggcgctcaggacaccagggggatctcagaatcaccaggctgtgctcaggacaccggggggtgctcaggacctccaggagcacacacgacacaaaggatagctcaggacctacagggggcgatcagaacgccagggtgcgttgaggacaacaaggggctcacaggacacaacgatgtgcttagtaaaccgggggacactcacaaccaccagggggtactcaggacaccagggggtgcccaggaaaccagggagcactgaggacaccaccgctcccttaggaggcagatccacatcaggtccctgagtgggagcagggaggagggttcctcttgtatcttgtcactaacatgttgggagtttttctgcttcctttgtggtttcaattattggctgattcttcggtataaagcagagcaagtataaagctctgctttcttggattatgtcatgtttttggctttggatgctaccagaattacattgtactttgagaggattcattcatggtgtgtgcaatagtgaatgaaacctgtaattttaggggtggctttgaaagctatg

SEQ ID NO: 26002 - DNA, 1088 bp, Artificial sequence
  DNA replication origin
acgcctttgtgcagtggtggctgaatacagtgacactgggcgcgtggtgagaagcggggcaaggtcagttcactggaccctccgccctgagcctcagatgagtcgggggtccccagacaggcccggcctctgccctgcggcggacactggagcctttgctgtggccgccaccgaggagccttgacctcaaagcagcgggaacctctctacccacctcggaaacctgaaggcagcggcggcctctcccagccaggacctcgccggcctccgcgtctccaggcccaaccctgtaccacataaaggaagtccgcgctgagctaccgggacacagcgccgttgggtgggcgggcgcggcgcggcgggaagcaccggggcagctgccacagagatgcgcggggactgtcgggaagtgggcggtccgggaggcgcggggctgatgggacgtgggcggtccggggacgcgcgggggatggcgggacgtcggcgatccggagatgccagggggcagctgggacgtgggcggtctggagaggcgcgggggcagctgagatgcaggtggtccgggacgcgcgggggctggcgggttgtgggaggtccagggatgcgagggggcagctgggacgtgggagttccggggacgcgtggggtcgccaggaagcggggtctaggacttagatccgccttctcttcaggccatgcagccccgaagctccgaatcctgggatgactcctgtccatgttggaagggaccctgccagtcctggcaaggttcaacggccttagggcaagaaatgttagtagagtcctggaagacgatgtggggaacgggtagcggccaccggatggtgatcgttcttctacaagaccttgacatggatggggagaaacagagaagaaccttccaagtttgtcccactggacatgcccaccacactttaccagccctttctagaaggcctgtgcgtaacacatgaaaaagctgctctcgacctttccctgaccttttaaaagaaaacatttgctgcatctaatccgcctagatgtaaggaggttcccaaatgtatgacagagtcagacaattacatgtc

SEQ ID NO: 26003 - DNA, 1152 bp, Artificial sequence
  DNA replication origin
ctcagatgagtcgggggtccccagacaggcccggcctctgccctgcggcggacactggagcctttgctgtggctgccaccgaggagccttgacctcaaagcagcgggaacctctctacccacctcggaaacctgaaggcagcggcggcctctcccagccaggacctcgccggcatccgggtctccaggcccaaccctgtaccacataaaggaagtccccgctgagctaccggcgggacacagcgccgttgggtgggcgggcgcggcggggcgggaagcacggagcagctgccacagagatgcgcgggggctgtcgggaagtgggcggtccgggaggcgcggggctgatgggacgtgggcggtccggggacgcgcgggggatggcgggacgtcggcgatcggagatgccagggggcagctgggacgtgggcggtctggagaggcgcgggggcagctgagatgcaggtggtccgggacgcgcgggggctggcgggttgtgggcggtccagggatgcgagggggcagctgggacgtgggagttccggggacgcgtggggtcgccaggaagcggggtctaggacttagatccgctttctcttcaggccatgcagccccgaagctccgaatcctgggatgactcctgtccatgttggaagggaccctgccagtcctggcaaggttcaaaggccttagggcaagaaatgttagtagagtcctggaagacgatgtggggaacgggtagcggccaccggatggtgatcgttcttctacaagaccttgacatggatggggagaaacagagaagaaccttccaagtttgtcccactggacatgcccaccacactttaccagccctttctagaaggcctgtgcgtaacacatgaaaaagctccgctcgacctttccctgaccttttaaaagaaaacatttgctgcatctaatccgcctagatataaggaggttcccaaatgtatgacagagtcagaaaattacatgtcttgtaagttaccatgtgcttgtcttttgttttccgttttttttcgtttttttgttttttgtttttgagacggagtctcactctgtcgcccaggctggagtgcagtggcaggatcttggctcactgcaacctctgcttcctgagtttcaacaattg

SEQ ID NO: 26004 - DNA, 1248 bp, Artificial sequence
  DNA replication origin
aggacagcagagggtgctcagcagagcagggtgcgctcaggacatggtgtgtgttgtagggggcattgctcaggatcaccagggggctctcagaaccaccaagggtcactcaggaaaccagggggcgctctggacaccagggggagctcagaaccaccaggtggtactcaggacaccagggggcgctcatgaccagcagggcatgcttgggactctatgaggcatgcaggagaagcaggccgtgctcagggcaacagggggctcacagaaccacctgggggtgctcagaaccactaggggtcactcaggacagcagcaggcattcgggacaccatggggccctcaggacctgcagggggcgctcagaacaccaggggaaggtcagaaagacctgggggcacttggaaccaccagggggcactcaggacagcagggggcgctcaggaccactagggggcgctcaggaccagcagggggtgctcaggacaccatggggcatgcaggagcagcaggctgttctcagggtaacagggggctctcagaacaacctgggggtgctcagaaccaccagggggcacccaggacatcatgcggccctcagaacctgcagggggcgctcaggacaccaggggaagctcagaatgacctgggggcactcagaaccaccaggtggcactcaggacagcagggggcgctcagtaccacggggtgcactcaggacagcagggggcgctcaagacacagtgggatgctcaggaccagcaagaggcactcaggaccaccagggggcactcgggggagcaggaggcactcaggacaccagaagaggatcagaaccactcgggggcactcagaaccaccagggggcgctcaggacactgggggcattcagaaccaccagcaggttctcaggacacccagggacactcaggacagcaggggcgctcaggacaccagggagggtgctcaggacaccagggggctctcagaaacacctgggggtgaccaggactagcaggggcatgcaggacaccagggaaggggctcaggacaccagggggtgctcaggacagcagggggcacagaatcacgagggtgcattccagaccaccaagaaatactcaggaccaggggtaacagaaacacctaaagacacacaagaccaccaggaggcactcacgactgctcagagtgctgaggacaccagagcttcaggacgaacagggggtgctcaggccaccatggggg

SEQ ID NO: 26005 - DNA, 909 bp, Artificial sequence
  DNA replication origin
tcacacatcaaaaagcagtttctcagaaaccttctttctagcttttctgtgaagatatttcctttttcaccataggcttcaaagcgctcacaaatatctttttgcagatactacaaaaagactgtgaccaaactgctcaatcaatagaatggttcaactatgtgagatgaatgcacacaccacaaaaaagtttcccagaaagtttctgtctagttttcatgtgaagatcggattgcagtgaaatggaatggaatggaatggaatggaatggaatggaatggaatggaatggaatggaatggagtggaatggaatggaatggaatggaatggagtggaacggaatggaagggaatggaatggattggagaggtaaagaatggaatggaatggagtggagtggagtggagtgaattggattggactggagtgcagtggagaggagtggaatggaatggagtggatttgaaaggaatggaatggaatgcggtggagtggaatggaatggagaggaatggaaaggagtggagtggaatggaatggagtggagtggagtggaatggaatggaatggagtggagtggagtggattggagtggagtggagttgaaaggagtggaatggtatggaatggaattgaatggaatggagtggaacggaatggaatggagtggagtagagtggagaggagaagagtggaatggagtggaatggagtgaaatggagtggagtggaatcgagtggagtggaattaaatggagtagaaaggaacagaacggaatggaactgaatggaatggaatggaacgcagtggaatggagtggagtgcagtggagttgagtagagtggattgcaatgcagtggaatggaatggaatggaatggagtggagtgcagtggattagagtggagt

SEQ ID NO: 26006 - DNA, 898 bp, Artificial sequence
  DNA replication origin
ggagtggagtggagtggaatggaatggaatggagtggagtggagtggattggagtggagtggagttgaaaggagtggaatggtatggaatggaattgaatggaatggagtggaacggaatggaatggagtggagtagagtggagaggagaagagtggaatggagtggaatggagtgaaatggagtggagtggaatcgagtggagtggaattaaatggagtagaaaggaacagaacggaatggaactgaatggaatggaatggaacgcagtggaatggagtggagtgcagtggagttgagtagagtggattgcaatgcagtggaatggaatggaatggaatggagtggagtgcagtggattagagtggagtgcagtggagaggaatggagtggaatgtcatagagtggagtagaatggaatggaatggaacggaatggaatggaagggtaaggaatggaatgcaatggtacagaacagaaagaagtacagtggagtggagttgagtggagaggatcggagtgcagtggaatggaatggagtagagtgcaatggagtggactggagtggaatggaatggaatggagtggaatggaatggaatggaattgagtggagtggaatggaatggagtggaacggagtggaaaagagtggaatggaatggagtggagtggaatagagtggagtggagtgaaatagaatggattagaatggaatggaagggtgtggagaggagtggagtggattggagtgaggtggaatgcaatggagtagaatggaatggagtggagtggagttgagtggagtggatcggagtgcagtggaaaggaatggaatggagtggagtggagaggaatttaatggaatggagtggattggaatgcagtggattggaaagga

SEQ ID NO: 26007 - DNA, 1854 bp, Artificial sequence
  DNA replication origin
  misc_feature (1819)..(1854): n is a, c, g, or t
gaatggcatgtaatggaatggaatggaatggaacggaatggagtggagaggagtgcagtggagttgagtcaattggatatgagagcagtggaatggaatgcagtggaatagaatggaattgaatggaatggaatggaatggagttgaatggcatggaatggaatggaatggaatggtgaaatgaaatgtaagctaagattatgccactgcactccagtctgggtgacagagtgagatccatttgaaataaatgaatggaatggaatgtagtagaatggaatggaatggagtggagtggagtgcaatggagtggagtggaacggaggggaatggaatgcagtggagtggaatggaatggaatgcaatggaatagaatggaacataatggaatggaatggaacggaatgaagtggaatggagtggagtacagttgagtggagtgaatcggagtggagtggaatggaatggaatgaaatggaatggcaaggaatagagtggagtggaatggaatggattggagtggagtggagtggagtggaatggaaaggaatggaatggaatgcaatggaatggaatggaatggtgaaatgtaatgtgagctaagattgtgtcactgcactacagtctgcgtgacagagtgacatccaatagaaataaaggaatgaaatgtaatagagtagagtggaatggaatggagtgcagtggaatggaatggagtggaatggagaggagtggagtggaatggagtgcagtggaatggagtggagtggaaaggagtggaatgcaatgaaatggaatagagaggaattgaatggaatggaatgaagtggaatggaggataatagagtagagtggagtagaatggagtggagtggaatggagtgtagtggaatggagtggaatggaatggaaaggaatggaatggaatggagtgaaatggagtggaatggagtggagtggaatggaatggggaggaatggaacggaatggtacagaacggaatgcaatggaatggaatggagtgtagtgtagtatagtggagttgagaggagtggatcggagtgcagtggaatggaatggaattgagtggagtggagtggagcggagtggaatggagtagaatagagtggagtggaatggagaggaatggaatggaatggaattcaactgaatggaagggaaaggagtggagaggagaggagtggagtggagttgagtggagtggatcggagtgcagtggaatggagtggagtggagtggaatggaatggagtggaatggaatggagtggagtagagtggagtggagtggatcggagtgcagtggaatggaatggaatgggatggaagggagtagagtggaatggaatggagtggagtgtaatggaatggagcggaagggaatggagtggagtggagtggagtgaagtagatcagagtgcagtggaagggaatggaatggagtggagtggaggggagtggaatggagtggaatggaatgttttgaaatggaatggaacgaaatgtaatggaacggaatggaaaggagtggagtggagtgtaggtgagtggagtggatcggagagcactggactggaatggaatggaatagaatggagtggaatggaatggaatttaatagaatggagtggattggagaggagtggactttagtggagtgcagtggaatggaatggagtggagtgaagtggagcggaggggcgtggagttgagtggaatggaatgaaatggagtgcagtggagtggagtggaatggaatggaatggaatggaatgcagtgggatggaatggaatggaatnnnnnnnnnnnnnnnnnnnnnnnnnnnnnnnnnnnn

SEQ ID NO: 26008 - DNA, 1053 bp, Artificial sequence
  DNA replication origin
aaagtcgcggcggcggcggcggcggcggcggcgggccaaaaaaccgtggcggggaaaaagccaaggcggggtgggggcaaaaagctgcgggggcagggtgtaaaaagccacggcggggaaagcggcggcggggggcaaaaagccgcggcgggggggcaaaagcctgagcgggcaaaaagtcgcggcggcggggggcgaaaagccgcggcggctgaaaagccgcggaggcaaaaagccgcggccgcgggggggttgggggggggcgggcagaaagccgcggcggcgacgggggcacaaacccgcagcgggcaaaaagcctagtcagggtgggagcaaaaagccgcggcggcggtggggcaaaaagccactggtggcggcgggtaaaaagtcgcggcggcggggggcaaaaagccgtggcgggtaagaagccgcggcaggggggaaaaagccacggcggggggggcggggggcaaaaagctgcggcggcaaaattcgcagcggcgaggggtcaaaaagccgtggcgggcaaaaagccgaggcggggtgggggcaaaatgccgcggcgggtagaaagccgcggcggcggcggacaaaatagtggagatgggatagaaggctggcacagcttggcattgctggagtgtgatgtgatgggaaatgtgcagccaaagacaaaaaaaagatgtaagtaggcttgactcattgcagctaagaacccagatgttatcttgagggtattaactaataagcagtttaaatcagaatggcacattctgatttgttttttgtatgttcacatttggcaggcatagatactgtttgaagaaagaaaagtcagtagagagacgtaacaaacttcaatatgtgtcaagtctagaaacaagagaccagggggttaaggacctttcaaaataaaatgcaagatttgaaaactgattggctgggggatgaggaaaaggcaggtctttaaggtcaatccctgttttgctttaagttgttagggggtggttttatcacatattgtagaatatgtcatttcagttttgaacatct

SEQ ID NO: 26009 - DNA, 1393 bp, Artificial sequence
  DNA replication origin
gctcggggctcagcagtctctgccctggtccagctgggaatgtgggtccgtcctgtttccatgagttttctggggccaccagtgaggggctcgggatgtcagcggctggtctcggtccctatggtctgggctccggctcactgctcccctgccctccaggtcagtcactgactcagttactatgcagcgggctccatggctgtttggtggtggctgcaggtctcttcccaggagaggcctgcaagagggttgggatgtctgggagccctgcattctcccgtgatgttgctgcctggatccctcatctttaaagggagtgccgagcctccctgcaggtgtgggcagtgagagacacaggcggatgtgcatcagggcgctggaggccgatttctttcattgccttctgcctgtggaagagctgagctccctgcttctgtgcacaggagatttccctgtaaatggggagtgagggcaagggtctgtgtggggaagacttgggtgagccttcgtcctggaaataccagggccatgtccaagaggggagtggagccaaagtgtccaggaggaaggtgaaggcagtgtgtgggtgggagtgcacggtcagtgccatggctcagaggccccaggagaggaagagctcaagttgtgggcaggaggaggcagtgggtaggcacaggggggagaaactgaggctctggcagcagaagaggggagggcctgcatgtgcagggttggcctgggaggggtgtctggagggagagacaggggtctgggtggagaccagggtggtgactgcagggacaggaccccaggattgtctgggtgggcggcaagagcagcagggcagaaagggcccaaggcagggtccagtcttctcagggtgtgggctgcagggatgggaccccagggttgtctggatgggcaggaagagcagcggggtagaaagggctggaggcagggttgggcgtccccagggtgtggggtgcagggaggggctgcacaggctgtccccctgaaggagggaggagggaaggagcacagaggtgctgggagcaaatggagagggaagtggcagcgacccgcatgccaggcggtcccggtttggggttgatctgtgtggaatagctccctggcccatgtgtaagtggtcaggggagacatggaggtctggagctacaagcggtggcaggaaggcaagtcctggtcttgggggtctggagcttatcttcttcctgtgaactgagtgtgggcggcacctatgggtggtgccctggacctgtggtctggtggagtccaggcctcccagggatagcagggcagccagggctagaggagcctgaggggccaggtcagggtagccctggggacactgcctccacctttgaccagtgct

SEQ ID NO: 26010 - DNA, 852 bp, Artificial sequence
  DNA replication origin
ccgtaccctatggggggctctgaccctcctgcatagggcctggacaggggtgggtggctgtgtgcaggtggggagtggggagcccagactctcccagacacagcctgctctgctccagaatgtgggcttggggactgcaggctggctgggtctgggctgcctggtgtgcctgtggtggctgcattcccatatctgggactgaggcctagtgagtaccaggaggagcctgaagggagctccatggaggacctgcctcggatgacacccctattttaagaaggacatggtgtgttccagctgggaggaagggaagtgggccacctcctgggggtcttccacccccaccacctcagcctggggcttctgtgcttcctccctgcgcagaccccaaagtctgtgccgccacagggcaggaaggaagggcctgtgtcctggtcgaggttggggccacagtggtgttccctaagccccagtctgctctcagggcccgccccgcagcaggtcctgagtgagggacagagacggggaggggtttctgatcctggtggactctggggtggactccagtggggagtcatcagggtcggtgtcccccagggtattggggtgaatgtgctcctggagtctgctctggatgtggggtttatgcctgtgctgcctggggttgatgttggggggtgccagtgacccgtttccctgagggactcttgtcggtggtagggtcagttctggccaggggcacggggccatagcagtaggatggggtccagccccttccatgaccccctggagccctggtccccatcctcaccattcagtggggactccgttgtgctctggctgctgggggtc

SEQ ID NO: 26011 - DNA, 1783 bp, Artificial sequence
  DNA replication origin
gtgtgtgttacagcatatggtgagtgcatgggtgttcgtatctgtggggtacaggtatcatgcacgtgtgttcatctgtgtggggtgtgggtatacgtggaccgtggcctgaggctcccccacaggacactgctccctgccgcctccccaggggctaacaggaccctgctcctcttgctaaagccagtttgggagcagccccacccaggcagccccaagccaaccaggctcgcctctgaccagatggctgaaggagcaggtagagcaggaagtgtgagccagtgacccaggttcccctggtggccaggcttggtggcccatgtccatggagtcccccacctgccaatgacctccagccatgtctcctgggtaccaggccacccatgggtgggggtgggggtaactccctgctgactcactgctcagctggcaccaatgaggtctccacctcagccctgggctgagtgtccagtgctgagtccttcctacaggcaggtgagcttgggaggcagggaccctgtggacttggggagcgggctcagggtctggaggccagaggccttgtccccaggcccggcatcccatcagcaagagcccaggaggctctcagggcagcactcctctagcaatctcaggggcagcgtcctcccaggagtcacatccagatcaccatacgtacctgctggcccctagcatgtcccataagtggagaggggttggcctgtggaggcaggggtggccagaatatgtgccggaaccccatctacaggctgacacctaaacccaaatggcacaggggagcctgagcatgaagtggctggcctctccctcgcgggggcccagcaactgctgactccatgtgccaagccccgcctgcccgctggaaagcctcaacagactgctccctgtggtgacaccaccactcgggtcggcttggctgaggccagcggagcatctcccctctaggtccattcacatccatcttccctggacaaatgaacactccccaaacactcacttgccactttgaccccagaccaaacacacagccactcctggagtgccggtgactgagggtggctgggcccttctgtgcccacaaagcagggcctgggctatacctgtggggctgcacgactgtgccaggacagccttacctttgctgggggcttcgtgccctcccagctgcgtgtgtccatggacgaggggacctggtagatgtcatgccccatcccggcagaaggtggcacctggtaaatatcctgggcagggcctccaggccctggggacacctggtacaggtctgtggccgggctgggaaacgggtgatggggcgtctgcttcgagaaggtggatgtctgcttggctgggggcgactggaactgagggctgggacccgggacttggtagaggccttgctgagccttgctgggagtgggcaccaggtagacgctgtcgggctggggctggtaggtgttggggagcatgggcgtgtactgggaggccggaggcactggggcatggaggccaggctgaggctgggccggggtggcgggagggccggggccaggccctgctggcttcttatcatacatacccaccaagatcttgaggtggttcccaggcacgatgccctggcgcccgtgcagcgagcagagccaccagccatccaggccctgcgtgtcctgctccagcaccgtcatgatgtcgcccttgcggaaggagagctcatccggggactcggccacattgacatagagggctttggccagcacattcaggt

SEQ ID NO: 26012 - DNA, 1837 bp, Artificial sequence
  DNA replication origin
ctggcttggctggctggctggcttggctggcttggctagcttgcctggcttggctggcttggctggcttggctggctgggtggctggctggcttggccagctgggtgtcttggctggcttggctggcttgggtgtcttggctggctaggctggctggctggcttggctggcttggatggctggctggcttggctggtttgggtggcttggctggctagctggcttggctggatgggtggcttggctgggttggtgggctggctggcttggctggcttggctggcttggatggctggctggcttggcttgcttggctgtctgggtggcttggctggctggctggcttggttggcttcgctggctgactggcttggctggcttcgctggcttgactgtttgggtggcttggccggcttggatggctgggtggcttggccggcttggttggctggctggcttggctgcctcggtggctggctggcttggctggctgggtggctggctggcttggctggctgggtggcttgactggcttggctggctggctgtcttggctttctagctggcatggctggcttggctggctgactgggtgcctggctggcttggctggcttgggtggcttggctggctaggctgggtggctgtctggcttggctggcaggttggcttggctggcttggctggcttgggtggcttggctggctagggtggctggctggcttggctggcttggggggctggctggcttggctggcttggctggctaggctgggtggctgggtggcttggctggcttggctggcttgggtggcttggctggctaggctgggtggctgggtggcttggctggcttgggtggcttgggtggcttggctggctagggtggctggctgggtggcttggctggcttggctggcttgggtggcttggctggctagggtggctggctgggtggcttagggggctggctggcttggctggcttggctggcttggctggctaggctgggtggctgggtggcttggctggcttggctggcttgggtggctttgctggctagggtggctggctggcttggctggcttggggggctggctggcttggctggctttgctggctgggtggctggctggcttggctggcttggctggctggctggcttggctggcttggctggcttggatggctggctggcttggcttgcttggctggctggttggcttggctggctggcttggctggcttggctggctggctggcttggctggctgactggcatggttggcttcgctggcttggctggctggcttggctggcttggctggctggctggcttgtctggcttggctggctggcttggctggcttggctggcttggctggcttggccggctggcaggcttgcctggcttttctggcttactggcttggctggcttggtcggcttggctggctggcttgggtggcttggctggcttggctggctggcaggcttggctggcttggctgggttggctggctggctgtcttggccggcttggcttgcttggctgcctgtgctggctggctggctgggctgtctggctggttggctggcttgtctggcttagctgcctgtgctggctggctggctgggctgtctggctggttggctggcttggctggcttggctggcttgactgaccggcttggctggctttgctctcttggctggcttggctgggaggctggctttgctgggtggctggctggcttggctggtggtctggtttggctggctgactggctgggctggctgggctcgctggctggcttgcccggcttggctggctggg

SEQ ID NO: 26013 - DNA, 2842 bp, Artificial sequence
  DNA replication origin
tggctggctggcaggcttggctggcttggctgggttggctggctggctgtcttggccggcttggctggctggctggcatggcttgcttggctgcctgtgctggctggctggctgggctgtctggctggttggctggcttgtctggcttagctgcctgtgctggctggctggctgggctgtctggctggttggctggcttggctggcttggctggcttgactgaccggcttggctggctttgctctcttggctggcttggctgggtggctggctttgctgggtggctggctggcttggctggtggtctggtttggctggctgactggctgggctggctgggctcgctggctggcttgcccggctgggctggctgggctggctgggctcgctggctggcttgcccggcttggctggctggctggctgggctggcttggctgccttggctggcttggctggctggctggcttggctggctttgctggctggctggctgggccggcttggctggcttggctggctgggtggcttggctggctggctggtttgcctagcttggctggctggcttggttggctgagtgggttggctgccttggctggctggctgtcttggctttctagctggcatggctggcttggctgactgggtgcctggctggcttggctggctgggtggcttggctggcttggctggcttgggtggctgggtggcttggctggattggctggccggctgggctggtttacacggctggctggcttggctggcttggctggctggctgtcttgtgtggctggctggcatggctggcttggctgactgggtggctggcgggcttggctgtctgggtggtttggctggcttggctggctgggtggctggctggcttggctggctgggtggcttggctggctgcgtggcttggcaggcttggctggctgggtggctggctggcttggctggctgggtggcttggctggcttggctggctgggtggcttcgctggcttggctggctaggtggcttggctggcttggctgtctgggtggcttggctggcttggctggctgggtggcttcgctggcttggctggctaggtggcttggctggcttggctggcttgggtggctgggtggcttggctggattggctggccggctgggctggcttacacggctggctggcttggctggcttggctggctggctgtcttgtgtggctggctggcatggctggcttggctgactgggtggctggcgggcttggctgtctgggtggtttggctggcttggctggctgggtggctggctggcttggctggctgggtggcttggctggctgcgtggcttggcaggcttggctggctgggtggctggctggcttggctggctgggtggcttggctggcttggctggctgggtggcttcgctggcttggctggctaggtggcttggctggcttggctgtctgggtggcttggctggcttggctggctggctgccttggctggcttggctggctgggtggcttgactggcttggctggctgggtggctgtctggctttgctggctgggtggcttggctggcttggctggcttgggtggcttggctggctaggctgggtggctgtctggcttggctggctgggtggcttggctggcttggctggcttgggtggcttggctggctagggtggctggctggcttggctggcttggggggctggctggcttggctggcttggctggctaggctgggtggctgggtggcttggctggcttggctggctttggtggcttggctggctagggtggctggctggcttggctggcttggggggctggctggcttggctggctttgctggctgtgtggctggctggcttggctggcttggctgggtggctggcttggctggcttggctggcttgactggcttggatggctggctggcttggcttgcttggctggctggttggcttggctgggttgcttggctggcttggctggctggctggcttggctggctgactggcatggttggcttcgctggcttgactgtttgggtggcttggccagcttggctggctgagtggcttggctggctttgctggctgggtggcttggctggcttggctggctgggcggtccactggcttggctgcctgactggctggctggctggctggctggcttggctggctgggtggcttggttggcttggctggctggctgtcttggctggctggctggcatggctggcttggctgactgggtggctggcaggcttggctggctgggtgtcttggctggctgtgtggcttggctggcttggctggctgggtggcttggctggcttggctggctaggtggcttggctggcctggctggctggctggcttggcttgcttgattggcttggctggcttggctggctggctggctcgctttgctggctggctggctgggctggcttggctggcttggctgacctgcctggctgagtggcttggctggcttggctgactggcttggctggctttgctggctggttttcctgtcttggctggctggctgggctttcttggctggttgggctggttggctggctggggcggctgggcctgctggctggcttggctggctggctggctttgctggcttggctggctggcaggcttggctggctggttggcttggctggcttggctggctggaagcttggctgggttggctggcttggctggctttcctggctggctggcttggctggtttttctggctggctggctggcttggctggcttggctggctggctagcttgctaacttggctggctt

SEQ ID NO: 26014 - DNA, 964 bp, Artificial sequence
  DNA replication origin
gcccttaattacataggaataaacatttgttacactgagaaaaatctaatagagctaaaaataaaaattaatttggaaaggtcattagatactcatacattcttacgtttatacattctttcatatattcatatattcttttaacagtatcaatggtttggagttatgtgtacaaaaccatgacctatatgtaatacaactaataacaagcacttacaattcaaggcatattatatacaaagctttaacttcctatcaaaatattttggtttttttctttctgttttggcagatactatgaacacaacattcaactcacagacactatggagcccttactaagcataaagtactgtgaaaggccagggctaggagagaactgagacagggccagggataggacagaactggggcagggtcatggccagagaaaaaccaggggcagggtcatagccagggacatgagaggaccaaggccagggccagaagcagggcagaaccagggccagggcagggacatggcagggccagggccatggcaggatcagggtcagcagaaggccagggcagggctagggtagcacagggccaaggcaggacagggtcagtgtagagcaagaatgggccagagtatggcagggcagggacagggaggtccagggccagagtcaggtccaggacatggacagggcagggccagaaacatggcaggacaagaaaggggacagggcaagggcaaggccagagaaggaccatggaaaaaacacggccagggagggtccagggtaagggcaaggccagggcagaaccagagccagagcaggccaaaggcagggccagggcagggcaaagccagggtaggccagggccagtgtagggtgagggtagggccagggcgagttcagggccagggcaggactaagatagcacagggccaaggcagggccagggcagggccaaaagg

SEQ ID NO: 26015 - DNA, 943 bp, Artificial sequence
  DNA replication origin
ggttaaaagtttgtcaattttgtttagctttccagaaaaccaacttttcgtttaatcttgtgaggtttttatttcaattttgtttctgctacgatcttatttattttcttattttcggtttagtttgttctttactagttctttaagatgtattgtttacttgaagtttttcttttgtttggatggtaggcacttatagctgtaaatctctgcctttgtactgctttctgcataacaagttttggtatactgtgtgttcattaccctttgtttcatgaaatttttgaatttctgtcttagtatcttcattgacccgctagtcatttattcaggagggtagtgtttaacttccatgtgattgtattatttccaaaattacttttcttattgatacctatttttattcctttgtagtgaaagaagatggccacagagacagacagcagcgtggtcagagtggtaggagccggccatcagcgagagctgctccatgcctggctgctgggtgctagagtctgcggcccactggcttgcctcactgtggttggtggtggcggtgacagagactgcagcatgaccagagtggtaggacaggggctatccagggctgcacctttcgcagtgtggggtgggttgggggcgctatccagggtgtcattgcctgcattaggggtactagttggtagcactgtacagggctgcactgcccacggcagggaaggtgggttatgggtgctttctggggctgcaatgcccatggaggagaacaggttagggcactatcaggtatacgctactggcggcattgggggacagaggtggggggtgctattgagggcaggactagccgtggagtgggggacgagttcggtgctatcaggctgcactgctggtggcggtcaacagagttggcatccaaggaaggagtggttctcctctccct

SEQ ID NO: 26016 - DNA, 1860 bp, Artificial sequence
  DNA replication origin
gtccgcctctccgccgcgccgccgctgtccgcctctccgccgctgtccgcccctccgccgcgccgccgctgtccgcccctccgccgctgtccgcccctccgccgtgccgccgctgtccgcctctgcgccgctgtccgcctctccgtcgctgtccgcctctccgccgctgtccgcctctccgccgcgccgccgctgtccgcctctccgccgctgtccgcctctccgccgcgccgccgctgtccgcctctccgccgctgtccgcccctccgccgtgccgccgctgtccgcctctgcgccgctgtccgcctctccgtcgctgtctgcctctccgccgtgccgctgctgtccgcctctccgccacgcccgcgccggcgctgtgtgcctttgcgagggcggagctgcgttctcctcagcacagacttcggagatacagcgaaggcggagcagtgttcacctcagcacagacccgggcgggcgggcgggccggtggcaccgcgagggcggagctgcgttctgctctgcacagaccttggggcactgcctcgctttgggacaactcggggccgcatcgacggtgaataaaatacttcctgtttgcagccctgtttgtggttggtggcagcgatggacactgcagccagccagagcgtagaaaggcatcggggtaagtgcactatccaggctgcactgcgggtggcctgggacgggttgggagccctatctcaggcgtcactgcccgtcttgggtggctggttgggtgtgctatctggggctgtgctgcctgcaccggggggtggtttgggggcccaaaccggggctgcactgcctttggcggggagccggttgggggcactatcccagactgtattgctggcaacagtgaggtgggctaagtgtgctatccagggctgcactgtgcggctgtggggggtggtgtggcggtttcgggttgagggcgctatggggtgctgtaatgcccatggtgcagggaggcggggcggtttgcctacgttgggtgtgctattggggggggggcgacactgctggtggtagggggcagggtgggttgggggccatatcaggggctgcactgattgctttagctaggatttctggtactatgttaaacaacagtggtgacagggggcatccttatcatgttccagatcttagaggaaaagctttccatttttccccattccatatgattctagctgtgggtgtctttcctgtagtttttattatgttgcggtatgtttcttctgtgcccgtttctttgaggatttatagcatgaagggatgttgaatttcatcaaatgctttttcggtttcagttgacgtgatgatactgtttttgtcgtttatttggttgatatgatgtatcacattgtatgttgagtgacccttgatcccagggatacattgcacttgatcatgatgaattatctttttaatgtattactgaatttgattcagtggtattttgttgaggatttttgcatcaatattagagatcctggcctgtagtttccttctttgatgcttttgtctgattttggtatcacagtaataatggtctcatagaataagtttggaagtattccctcctgtttttcaaaatagtttgagcaggatttgtactaggtctttaaattgtttggtgtgaagccatcagcagtgaagacatcagttcctgggcttttctttactgggagactttttctgatggcttcaatctcattacttgttaccaatctgttctggtcttggatgttttcgttgtttaacctaagtaggttgtatgcatctaggaatttgccaatttctactaggctttccaatttattggcatataatagc

SEQ ID NO: 26017 - DNA, 1794 bp, Artificial sequence
  DNA replication origin
agaggcggacagcagcggcacggcggagaggcagacagcgacggagaggcggacagcggcgcagaggcggacagcggcggcacggcggaggggcggacagcggcggagaggcggacagcggcggcgcggcggagaggcggacagcggcggagaggcggacagcggcggcgcggcggagaggcggacagcggcggagaggcggacagcgacggagaggcggacagcggcgcagaggcggacagcggcggcacggcggaggggcggacagcggcggaggggcggacagcggcggcgcggcggaggggcggacagcggcggagaggcggacagcggcggcgcggcggagaggcggacagcggcggagaggcgcacagtgccggcgctggcgcggagaggcgcaggcccaggctccactccccagctgtgaaagggtaagaactgagggtggctgagactcggggttgttcagggcggggtgggctctggacccagcaggcctggcacccaggtcagggctccaggggaggccaggtgggcgaaggccaagaaggggctggggctggtcaggaagggctcctggtgaccagagcactttgcgtgagccagcgtgggaggaaggtgggctggatgagccagggaggcgccgggaggggccttggcagaggcgaccccctccgtcagcccccaggccactgaaccctgggtagcgagaaccgacaggggagactgcagacagaggagtggaggctccccggctttgggggctctgagtggaagcatctagggggtccctcaagaggcccccaaacgcttccccatggtgaaaaaagaaggcgcagagaggggcacggcgccggcgccgacgcagaggggcgcacagtgagatttgctgtgatttcttttattgccccaaatgtacttcatcttggtagatttctattggctttaaaaatgtgtgtgttttgctgttggggagtggggtattatacggatgtcagattttgctggttgactgttcagatcttttgtaaatccttgctccttttctgcctagtttcactctgtcacttacactagagtgcggtggcacgaacatgactcactgcagccttgacttcctagggtcaagtacttcccctggcttaacctcctgactagctggtactataggtgtgtgccgccacacctgactaaatttaaaattttttggagagatgaggccttgctatgttgcccaggctcgaactcctggcctcaagctatcctttgtctttgcctcccagagttctgggattacaggcatgagccactgtgcccggcctctgcctagttttaacagttgctaagaggaggatgttgaagtagatgtcttcttggtgggtcaatccttttgtcattaagcagttgttatggtcacttccttttcaccccattggtgaaggaggggtccctgccctaaagtgtaggagatggctgaacacgacacctggcgtggatggatgagattgacagcagtgttttagtcacatatacccacagctcagaggaggacactgcatgccacacagggtcagatgggcaccgcactctgtagcggagtgagggctgcaggctgaggaagcaggcaggcttgatagtaacaagagcacacaatgaccaatggttcccgagggggaatgcaattggcttgtttgaataaattcatgggctggcagacaggtgaagtgaaacttcttaggctgaggtgcaactgttctggctgataaaagaactagccaggtggggagcctttcc

SEQ ID NO: 26018 - DNA, 772 bp, Artificial sequence
  DNA replication origin
cttcccagctgccatcctgtctaggaagtgaggagcatctctgcccggctgcccatcgtctgagatgtggggagcgcctctgccccgccgccccgtctgggatgtgaggagcgcctctgcccggccgcgaccccgtctgggaggtgaggagcgtctctgcccggccgccctgtctgagaagtgaggagcccgtccgcccggcagctgccccgtctgagaagtgaggagcccctccgcccagcagccgccccgtctgagaagtgaggagcccctccgcccggcagccaccccatctgggaggtggggggcagcccccgcccggccagccaccccgcccgggagggaggtagggggcagcccccacccggccagccgccccgtccgggagggaggtgggggggcgcctctgcccggccgccccttctggaaggtgaggagcccctctgcccagctgccgccctgtctgggaggtgtgcccagtggctcattgagagcgggccatgatgatgatggcggttctgtcaaatggagaggggggaaatgtggggaaaggatggagaaatcagattgttgctgtgtctgtgtagagggaagtggacatgggagactccattttgttctgtactgggaaaggttcttctgccttgggatgctgttgatctgtgaccttacccccaacccagtggtctctgaaacatgtgctgtgtccactcagggttaaatggattaagggtggtgcaagatgtgctttgttaaacagatgcttgaaggc

SEQ ID NO: 26019 - DNA, 1215 bp, Artificial sequence
  DNA replication origin
ctcaatgagccactgggcacacctcccagacagggcggcagctgggcagaggggctcctcaccttccagaaggggcggccgggcagaggcgcccccccacctccctcccggacggggcggctggccgggtgggggctgccccctacctccctcccgggcggggtggctggccgggcgggggctgccccccacctcccagatggggtggctgccgggcggaggggctcctcacttctcagacggggcggctgctgggcggaggggctcctcacttctcagacggggcagctgccgggcggacgggctcctcacttctcagacagggcggccgggcagagacgctcctcacctcccagacggggtcgcggccgggcagaggcgctcctcacatcccagacggggcggcggggcagaggcgctccccacatctcagacgatgggcagccgggcagagatgctcctcacttcctagacaggatggcagctgggaagaggcgctcctcacttcccagactgggcagccgggcagaggggctcctcacatcccagacaatgggcggccaggcagagatgctcctcacttcccagatggggtggcggctgggcagaggctgcaatctcggcactttgggaggccaaggcaggtggctgggaggtggaggttgtagctagccgagatcacgccactgcactccagcctgggcaacattgagcactgagtgaacaagactccgtctgcaatcccggcacctcgggaggccgaggctggcagatcactcgtggttaggagctggagaccagcccggcaaatatcagcaactgggaagcccataaatagcagcagaggacaaataggatgactcagtaagccctctgagtcagactggcagagactggccttccttcataattatggggcattaaacccgtcatctgtgaagtcacctccaagtctcatctcaccaatatcatgcatctagtttcctttgaagatgtgcaatcttcctccttgtagctactaagaaattaaagtgcttgggctgagagggctcctgtaagctaatagtctatgtcttcagcaattaacccctttctgagattggctggtgttcatgcttttagctggtcctagtcctggcttgggtacccttgagcgtgagtcctcagataagtcacttcatctcactgaacttctttcatctaagatgagataat

SEQ ID NO: 26020 - DNA, 761 bp, Artificial sequence
  DNA replication origin
acaagaaaaggggaggagaggggaggggatgaggggagaggggaggggatgaggggagaggggaagggtgaggggagaggaggaaggatgagaggagaggggaggggagaggaggagaaaggggagtgaaggggaggtgggagaggggaggagaggagaggaggggaaggatgggaagggaggggaggggagaaagggaagggaggggaggagagggaggaggggaggagaggagagggaggaggggaggagaggggaggggaggagaggggggaggagagggaggaggagaggagagggaggacagaggagagaggagagggaggacggtggagagaggagagcaggggaggggagaagagaggggagagaaggggagaggaggggaggggagggtaacagaggggagggaagaggaggggagagaacgggacaggaggggaggggaggggagcagaggggagaggaggggaaagaggaggaaagaaaagaagagtggagagtgagtccaaggtttctggcctgagcacctagaggggtgggagttgccatcactgagacggggaagctgcgtatgtgtgcgtgggggcagattagggtggtggaggtgaggtctgcacatgggaagagatagtcacactgagacatggcagagaccaaaccaggacacttcattaccagtcattaggtgttcttggtaattcagccatgcataaagaaatcaacaaacgtttccttccctgttagcatgatacaggcca

SEQ ID NO: 26021 - DNA, 884 bp, Artificial sequence
  DNA replication origin
cctggcctcaagcaattgtcctgccttggcctccccaaagtgttggcattacaggcatgagccacggtgcctggccagggatttttgatctaatgagtactaatccaggcagcctcctgaggaattaaaaagacagcctctggagccagacttcctgggttcatatctcagctctgccatgaatgagctgtattaccttgggcaagttacttagctgtcctctgcctcgattttctcatctgtaaaatgggtatatggagagactctacctcacaggctgtcatgaaaatgaagggcctgtatgcaaagctcaataatgctttatatgctgtaggttctctgaaagtgtgagccaccactcctagtactatacagtctattaggtgagacaagatgtggaaacaaatagaaataccatatagtgccttggtgattgctgcagagacacaaatgcagcagaaggtggactccatggtgcagtcattgatggcttctcagaggcggtgacatttgagttcaacttttccatctgcacaggagggcagggtcagcctagagggagtaaagtgtctgagcacaggaatagaggccgagggtgctggggaagtggagagtggttttgtgaggtttgagagcaggatatgcaccagggagggtgtggttgaagcaggaaggggctgtgctgcaggtgtgcaggcctgcagaggggtgcaggcctgcagaggggtgcaggccaggcatgacagggtctgggctatgctaggaggttctgtgtggtgggtgagtcagaggaggtagcgtgtgggggctcagggtcaaattatgaacctcaccgggtgtggtggttcacacctacaatcccagcactttgggaggccgagctg

SEQ ID NO: 26022 - DNA, 1509 bp, Artificial sequence
  DNA replication origin
cctgtcgcctgacggctcgcggctgggatcgaacccggactgcgagacaccctccgcctcgcaggcgctcctcagtcgctgaggcccggcccggctcccaccgccggagtttgacaaagaaagtctcccggcccgagtccctcacgcactcaccggcgccgactcggtctcccgccgccttcagctccttgcgggggtcggcccttgggccggctcgggcgccggcggcggccactgctccatatccacggggtccgggccgcgtccgcctcgagctaacggtcccaccagctaggcgcgtgcgccggttccgcgcgccatgttcccgccgtgctgcgcgccgccgcggcgaccctcactgccccccaaccgcgcacgcccccgcaggcccacacacgaaccgcgcacgcgcgcgttcgacgcgccccgctcccgcgcgcccggcctcgggccctctgcagctggccgctgttcccagtgtctcacccacccgcgccggaaccgtccgactgggcgggtgagcgcgcggttcccgactcagcaccgccgcctgcctctctgcagaccacccctgacccgacctctcggccatttccccacactgcccctttcacttcccccatggcgcggggcctaggacgagggtctgggccaagaagaacttccccgcaagaagtgccgagctaaggacgctactaagggggtgggatcgccaccgtggaggtgtgcaagcacgtgcctgcgtcccggtgacagccagactcaacggagaagctgagttcaagtcccacatctccactaacccttgcgtgttagggtcagggcttcgggacttgtttctcctaaatcttttttttttttttttgagacagtctcgctctgtcacccaggctggagtgctgtggcgtgatctcggctcactgcaagctccgcctcccgggttcacgccattctcctgcctcagtctcccgagcagctgagactacaggcgcccaccaccacgcctgctaatttttgtatttttagtagagatggggtttcacagtgttagccaggatggtctccatctcctgacctcatgatcctcctgcctcggcctcccaaagtgctgagattacaggcgtgagtcagcgcgctcggcctgtttctcctaaatctaaagactcaatataataatcaagagaacgcctcagcaccgcgcctagcacttagtaggtagtgatcgagagagaagacctcttaagtggttttaatggttaaggaccacaggttctcaagaaagggaaatctcaattcgagtcccacctccatctcttgaaaactgagaaacctggaacaagtcactcagaggagccaaagatccttgatttctacatgtgcaaaaggggagtgtggcagtagcactgcacagggctgactgagctttcagggagatgatgactgtacgatcatgcctctcttaatcacgggatggttctgagaaatgcctccttaggtgattgcatcatt

SEQ ID NO: 26023 - DNA, 1843 bp, Artificial sequence
  DNA replication origin
cgccatgggggaagtgaaaggggcagtgtggggaaatggccgagaggtcgggtcaggggtggtctgcagagaggcaggcggcggtgctgagtcgggaaccgcgcgctcacccgcccagtcggacggttccggcgcgggtgggtgagacactgggaacagcggccagctgcagagggcccgaggccgggcgcgcgggagcggggcgcgtcgaacgcgcgcgtgcgcggttcgtgtgtgggcctgcgggggcgtgcgcggttggggggcagtgagggtcgccgcggcggcgcgcagcacggcgggaacatggcgcgcggaaccggcgcacgcgcctagctggtgggaccgttagctcgaggcggacgcggcccggaccccgtggatatggagcagtggccgccgccggcgcccgagccggcccaagggccgacccccgcaaggagctgaaggcggcgggagaccgagtcggcgccggtgagtgcgtgagggactcgggccgggagactttctttgtcaaactccggcggtgggagccgggccgggcctcagcgactgaggagcgcctgcgaggcggagggtgtctcgcagtccgggttcgatcccagccgcgagccgtcaggcgacaggacatggtcggccgcctgcctgcctcagtttccgcgagagtgtgtgtgggtgtgtgtgggtgtgtatgggtgttggcctgcacacaccgggggtggggggttcggtatacagtcggcgcctaatgcgcgcggtgcctcccccctccccccagtccccgtggggcggaagctggggactggagtccaccagagcagtaggcggcacccgcggggagacaggtgtcggcgcagcccgggaggatcaggtgctacctctcccgggtggggtttgtgaggagtgagctcttcgtccccagtggcgagcaagtctgtcggtggctcatcacagagcactgttttggaaagcgttccacccacctcagcttcgtgctgtgtttgggccactagtcagggggaaggatgctgagcgacatggactttagaggtggggctcccgctggacgggatggctctgggctctcgagcttacccccacccttgtctcctaaacccgttagagtgtaggaatcattgggagcacctgataaaaatgccacggattgtggctcaccaaagcagggaagccgatttggaacttaaacaagctcccaagttgtgatcagtcgagcttggcaagcactgttttagagagtaggcttcctgcaagcaggagctgtttttgtgtatacctcaccatggcatcttggtacctggcatggtgcctggcacacggtagatgatcagaaaatatctgtagaaagtctaaattattagggagagtgcaacataggagttcttgagacattttcaggagcttcttgagattaatatctgtcagatttgttttacagtatatgatttttctcagctcccaacttttgtgattgtttttaatgccatgttttcagtatgttctaggcaaaagcagggtatatgttgcttagtatacactatccactaggccgggtgcggtggctcactcctgtaatctcagcactttgggaggcagattgcttgagcccagaggcttgaggctgtagtgagccaaggagttagagacaggtgtgggaaacatagcgagactcgtctccgcaaaaattagctgggtgtggtagcgtgcacttgcagtcccagctaccctggaggctgaggtgggaggatcgcttgagctcaggaagtacaagttgcagtgagccaaggttgtgccactgcattccagtctggataatacagcgaaa

SEQ ID NO: 26024 - DNA, 762 bp, Artificial sequence
  DNA replication origin
ggtgtcaccaaatgtatccagagaccgcttgtaaacctggagggtgtgctaacgtcagtggggtgtcctggagaggcaggaacctgggtttccaaggtgcagatcctactgaagcaaatggacgtcgcaaccgcgggcagagctggctgtggtgtccccccttctgcctggggtgtcaccagatttcaccgagagaccccttctaaacctggggagtgtgctgacctcagtggggtgtcctggagaggcaggaaccagggtttacaggatgcagatcctactgaagcaaatggacgtggcatccttgggcagagctggctgtggctggccttccggcctagacgtctcccccactgcctggggtgtcaccagatgtacccagagacctctcatctgaaagctcatgcatgggaagcctccaggtctcctcggcaggcagcatcacgtctgattcaactgcgttatcaggtaatgcaggcctgttctgcctgtgtgcgtgagtgcgtgggtgccatgtgggattgtgtgtgttgatgtgggtgtgggtgtgtgcttgcgtggctgtgtgtgcctctttatgtgatgatgactgtgtctgtgagtctgtaagacgtgtgtttccatgtgtgtttctgtgtgagcgtgcattcctgtgttttatggaagtgtgtttttgtgatggtgtttgtgtgtgcccctgcatttattgtatttgtgtgtttgtgaatatgagtgtatgtgtgtgaatctgtatgccaatgt

SEQ ID NO: 26025 - DNA, 1126 bp, Artificial sequence
  DNA replication origin
gtggctggctggcttggctggcttgggtggcttgctggcttggctggattgggaggccggctggcttgactggcttcgctggctggctggcttggctggctgggtggcttggcgggcttggctggctggctggcttggctggctggcttagctcgttggctggctgggtggcttggctggcttggacggctgggtggcttggctggcttggctggctggctgtcttgggtggcttggctggctggctggcttggctgttggctggctgggtggcttggctggcttggctggctgggtgtcttgcctagcttgggtggctggctgacttggctgccttggctctctggccacttggctggctggtaggccggctggcttggctggctggctggcttggctggcttgcctggcttggctggctggctggcttggctggcttggccggctggctggctggcctagctggctggcttggctgccttggctggctggctggctgggtggcctggctggcttggctggctttgctggctggctggcttggctggcttggctggctggctggcttggctggcttggctggcttggcttgctgggtggcttggctggcttcgctggcggggttgcttggttggcttttctggctggctggcttggctggcttggctggctgggtgactggctagctgtcttggctggcttggctcgctggcttccttggctggattggctggcttggctggcttgactgggttggctttctggctggctgggtggcttggccggcctgactggctgggtggcctggctgacttggctggctggctggcttggctggcttggctggctgggtggcttggctggctggctggcttggctggttggctggctgggtggcttgtctggcttagatggctggctggcttggccggcttgggtgacaggctggcgtggccggcttggtgactgcctcgctggcttggctggcttggctcgctggcttccttgcctggcttggatggcttggctgggttggctgtctggctggctgggtggcttggcttgctggctggcttggccgtcttggctggcttcgctggcttggctggctggctggcttggccgg

SEQ ID NO: 26026 - DNA, 1399 bp, Artificial sequence
  DNA replication origin
tggcgtggttggcttggctggctgtgtggcttggctggcttgcccggctgggtggcttggctggcttggctggcttggctggctggctcacttggctggctgcctggcttggctggcttggctgtctggctggcttgtctggcttggctggctggctggccggttggcttggctggcttgctggcttggctggcttggcttgctggctggcttggctggcttggctggcaggctttcttggctggcttggctggaagggtggcttggctggctgggtggctgggctggcttggctggctgagtggcttggctggctgggtggctgggctggctgggctggcttggctggctgagtggcttggctgtcttggccagctggctggcttggctggctggctcacgtggctggctgcctggcttggctggcttggctgtctggctggcttggctggcttggctggctggcttgacaggctgggttggctggctggctggctggctggcttggccggctggctggcttggctggctggctgtcttggctggcttggctggctggctggcttggctggctggctgtcttggctggcttggctggcttggctggctggctgtcttggctggctggctgtcttggctggcttggctggcttggctggctggctggcttggctggcttggctggcttggctgtcttggctggctggctggcttggctggcttggctggcttcactggctggctggcttggctggcttggctgtctggctggctgggtggcctggctggcttggctggcttggctggctggctggctggctggctggcctggctggctgggtggctggctggcttggttggctgggtggctttgctggcttggctgtttgggcagcttggctgccttgggtggctgggtggcttggctggcttggctggctggctggcttggctgccttgcctggctgcctggcttgacaggcttggctggatggctgtctggcttacttgtctggctggctggcttggctggcttaggtggctggctggcttggctggcttgggtggcttgctggcttggctggattgggaggccggctggcttgactggcttcgctggctggctggcttggctggctgggtggcttggcgggcttggctggctggctggcttggctggctggcttagctcgttggctggctgggtggcttggctggcttggacggctgggtggcttggctggcttggctggctggctgtcttgggtggcttggctggctggctggcttggctgttggctggctgggtggcttggctggcttggctggctgggtgtcttgcctagcttgggtggctggctgacttggctgccttggctctctggccacttggctggct

SEQ ID NO: 26027 - DNA, 1477 bp, Artificial sequence
  DNA replication origin
tagctgggtggctggctgccttggctggctgcgtggcttggctagcttggctggctgggtggcttggctggcttggctggctgggtggcttggctggctgggtggcttggctggcttggctggctggctggcttgtgtggcttggctggctggctggcttgggtggcttggctggctggctggcttgggtggcttggctggctggctggctggcttgggtggcttggctggctggctggcttgggtggcttggttggctggctggctggctggcttggcttggtggctggcttggttgcctttggctggctggctggtttggctggtttggctggcttggctggctggctggcttggctggctgggctggcttggcttgccgggtggcttggctggcttggctcgccgggtggcttggctggcttggctggcttcattggcgggctggcttagctggcttggctggcttggctgacttggctggcttggttggctggctggcttggctggcttggctcgcttggctggttggctggcttggctggcttggctggctgggtggcttggctggcttcagtggctggctggcttggctggcttggctggctgggtggcttggctggcttggctggctggctggctgggtggcttggctggcttgtctggctggctgggtgacttggctggcttggcttgctggctggtttggctggcttcgctggctggctggctgggtggcctggctggcttggttggcttggctgtctggctggcttggctggcttggctggcttgctggcttggctggcttggctggttggctggcttggctggcttgtctggctggctggcttggctggcttgagtggctggctggcttggctggcttggctggctggctggcttggctggcttgagtggctggctggcttggctggcttaggtggctggctgacttggctggcttgactcgctggcttctttggctggcttggctggcttggctgtctgggtggcttggctggcttgcctggctgggtgacttggctggctttggtgactggctagcttggctggcttgggtgactggctggcttggctggcttgactcgctggcttctttggctggcttggctggcttggctgtctgggtggcttggctggcttgcctggctgagtggcttggctggcttggctggctggctggctgggtggcttggctggcttgggtggctggctggattggctggctggctggctggctggcttggctggcttggctggctggctgacttggctggcttggctggcatgactggctggcttgcttggctgtctaggctggattggctggctctctgggttggctggcttggctgggtggcttgcttggctggcttggttggctggctggcttggctggcttggcttgctggctggcgtggttggcttggctggctgtgtggcttggctggct

SEQ ID NO: 26028 - DNA, 1042 bp, Artificial sequence
  DNA replication origin
ccggggaaaggccactgcaggcaaagcacgctgacaccagagccttcggcagaggagggggaaattgtttatgtcttgcgctccttcttaccgtgggcctcctgggggctcctggccctgggtgagcaggacggacccggacccgagatgcctcagagggaagcttcttgggcaggaggacagcacaggccatggagtcccagggggagggggagggctgtcccactgggccccagtgggtcctctgcagcaggacagtctagcctgcccctggccatgctgagccacatggctctcctctccgagaccctgtggtgacaggcaagggcacaggggtggtggggcagaggcactgttgaaaaacctgcccaagggcctgcccttggcatctcctggacccaccctcatcttccctgaggctgtccgagtgctttcccgggtagtctgtcctcagtgggaatgccgcaagcctcctccttgtgcctggcacagccctacatgctgggggaggggacactaatgatcatccccagctcacaggcacaggagggaggcctggggcaggggtagcccagggtcgtggctgagccactgagaaaagctcagatccccaaccccctcagctcttcctcccccaggttcctaaccacggcccgacctccctggtccagtgaacgtcccactccgcattgtgtgctacccactgggttcctccaaggttctcagagtccaagcctggtgatcaccaacaaaaatctctgcaaacagcagattcctacacagatggccctgccttattaggatggctccaccgacgggccccgactccacgatggtaagaatgtggccagaactcagtagcaacggcacttaagtcccacacaaccatgttcactttcagtacagtattcgacaaattgcacaagaaaatcaacacctgattagaaaactagcttcatgagctggggacagtggttcacgcctgtaatcccagcattttaggagaccaaagcaggaggatggcttgagcccaggagttcaa

SEQ ID NO: 26029 - DNA, 1717 bp, Artificial sequence
  DNA replication origin
catctctactaaaaatacaaaaaattagcagggcctggttgtgggcgcctgtaatctcagctactcaggagtctgaggcaggagaatcacttgaacccacgaggcagaggctgcagtgagccgaggttgtgccattgcactccagcctgggcaacagagcaagactccgtctcaaaaaaaaagaaaccaaccaaacaaaacccaaaaaaacttgctgttgtccactagagttattgagttaccctgaaatatagtttaaaagggaaattcttaattcttttcttttaattgacaatgttccgaatagagagttggagccttgtttttccagtggactaccgatgggttttggtttggtttctctctttaaatctatttatagcttttgtgtattcattgtgtattcagcaattacacacaatgaatacacaaaaaattacacaaccaatacacaaaaggtataggcagatttaaaaagcaagataccaaggcttgattttaggctcgatttgtcccctctttagccagggatttctaatttttttcacctcaaaagtggtaggccagggtgctgtcccatcagtggtgggaggaaaggttggttgccccggacagtgggtgaatgccggggtgccagtgtcagggaggggaggggctggtgggtgaatgccagaatgccagtgtcagggatggaggggctggtgggtgaatgccagggtgccagtgtcagggacagaggggctgctgggtgaatgccttggtgccagtgtcagggacggaggggcttgttgaagagaaactctttcttcagggccattgatttccctgccttgtttgaagtgcctggattgggctctctgaaaaccaacaccatcttattagaagacaagggcttcttctcttttctttctttctttcttttttttttgagacagagtttcactcttgttgcccaggctggagtgcaatggcgtgatctcggctcactgcaacttctgcctccccggttcaagcggttctcctgcctcagcctcctaagtacctgggattacaggcgcccgccaccacacctggctaacttttgtattttttagtagagacggggtttctccatgttggtcaggctggtctggaactcccgacctcaggtaatccgcctgcctcagcctcccaaagtgtcaggattacaggcgtgagctactgtgcccggccttttcttctctttctttagagacagggtctctctctgtcaccctaactggagtgcggtggcatgatcacgactcactgcagcctcgacctcctgggttcaagcgatcctcccatctcagcgtcctgaatatctgggacgaccgcacctcactaatatgtgtgtgtgtgtgtgtgtgtgtgtgtgtgtgtgtgtgtgtgtgtgtgtgtgttttgcagagatgaggtctccccatgttgcacaggcctggcaggtgtttctgatagtcacaaagcccctgctactggggaaagggaaaggaagccccagctaagacccaattaagaaaatcccagaaccaagaacgaatcgactgttcggctttggtaatctccaatgtgtccaccaggtggtgctgtccagccacaaatctcccaggtttgatctcgggcttctgccgagggcacctccagggctggggtctcatcgtgttgtccccactttattccaacgtccaccccaggcctg

SEQ ID NO: 26030 - DNA, 944 bp, Artificial sequence
  DNA replication origin
tggggaaagggaaaggaagccccagctaagacccaattaagaaaatcccagaaccaagaacgaatcgactgttcggctttggtaatctccaatgtgtccaccaggtggtgctgtccagccacaaatctcccaggtttgatctcgggcttctgccgagggcacctccagggctggggtctcatcgtgttgtccccactttattccaacgtccaccccaggcctgggggagcccagggaggaccgagtttcctgggccccgcagggtgcacagaggtgagtttggtagtgcggtcccgacctcgacaagcatcccagcgaagcaggctgagcgcccggctggctccctcaggacccctcctccgggccttcgccctgttgatttgggtgttttaatgcaagaaagtaggacactggttgtcacctgcctgctcctacaaggaaaatgcatgtttgtgtggttatccgtggccacccccaccagggcctgcggggggtccagtgcagtggaggtggggaggcgactcatgggctccaggatccgtggagagtgagtgtcagcgggagggtgtcccctgacctcggtcaatggaagctgctcttcctgggggtcccacgggaggcccgtgatgggggtgggggaggaggggtaaacgccaggccctgattggccgcctgtccttgggtcttggctggtcctaagagggaacggggagcacagctggggtcacagcctcagccgggactcctgccctccagcccctcagcatcctccctgcgtgtgctctcctgggggctgctcagggcaggtggcgagtaggggagctgtgggaccagagagagggggtggacgtgcccagggcctgccctcttggcctgccgtggagacccacccaggcatacctgggggctgaccctcccctgcagagagcagggtgaaccccagc

SEQ ID NO: 26031 - DNA, 1207 bp, Artificial sequence
  DNA replication origin
ccgtggagagtgagtgtcagcgggagggtgtcccctgacctcggtcaatggaagctgctcttcctgggggtcccacgggaggcccgtgatgggggtgggggaggaggggtaaacgccaggccctgattggccgcctgtccttgggtcttggctggtcctaagagggaacggggagcacagctggggtcacagcctcagccgggactcctgccctccagcccctcagcatcctccctgcgtgtgctctcctgggggctgctcagggcaggtggcgagtaggggagctgtgggaccagagagagggggtggacgtgcccagggcctgccctcttggcctgccgtggagacccacccaggcatacctgggggctgaccctcccctgcagagagcagggtgaaccccagccctgccctcgcctaagagccaggttcgaggggagtgtaatttataatgaaccccactcctccccccaacacccaccacagggaggagccagcctctctcctggcaccaaagtcacgctcctgaccctgcaggccacaggatgaggaggacccagagaggcagcggggttggggcatttcataagccggcgagagctgcccgtgtgcatcctcaggcctcacagtggagtgaggggcgggggccgcctgcgtcctccacaggagctcctgtcattccacctctgggggtgcacttgccgacttgccccagacctggactcaggctgcgctgctgtctgcccagggcctggcgattgctgcgcccatggtgggtcccacaggcaggccctgccctcccatcgctggcttctgagcaggggctttggggctgctggaccttggaggcagatcgggggcttctggtgtccctatgtcttgggggcctggtgtcctgagggccagcgccccccggcctgcactgggaccctccatggaagcaactcctctttcatctcaggcactgggtgtcccagggccagggaaggggctgcgcagcacctcaggagcccagaagagctgccagccaaggaggaggagctggggggagcagaggcctggaccagctgggatgttcccatccgcgtgtccctcccgcccaggccacatgggcaggggaggaagaggggaggaggaggggaggggcccttgtcctcccagagcctctcccttcctctcccttcctctcctccctctccctctgctc

SEQ ID NO: 26032 - DNA, 1365 bp, Artificial sequence
  DNA replication origin
ggaccctccatggaagcaactcctctttcatctcaggcactgggtgtcccagggccagggaaggggctgcgcagcacctcaggagcccagaagagctgccagccaaggaggaggagctggggggagcagaggcctggaccagctgggatgttcccatccgcgtgtccctcccgcccaggccacatgggcaggggaggaagaggggaggaggaggggaggggcccttgtcctcccagagcctctcccttcctctcccttcctctcctccctctccctctgctcatctcatcatgagacagctggcgaggcccttcggctgccctggagtgcccctgccctggccaagctcttgctgcccccttctcctggaggtgccagatggggcgggcccaaagcagcagaggtctgggccctggctccagctctgtcccctcccgagggccctggaggagctaggaggagggcctagcagggccgggcagatcgtgggccgggagaaggggttgcctggggagacggaccgactagcaggacagatggtgggccaggcaggggtccggagcccgccccatctgctccagtccctggtgggacttttcttgtccacctcgggctgaactgggatgggctgcgtgggtggctgtggcccaggccggattctgtcacactgggtcctctgtccctggggcacggccagccgggtgctcatctggggtcttgaagccccctcctggcagctggcacgtggctggaggtcatcatgtttcgggggctcctgagggtctgcgggccatgcctgagcagagcctggggcgcgtcccgggaacgaagccgccgctgcagatgaggggctttgtaggtgggtgggcgactgaagccccctggaggggcttcctggggtccaacgccgagagggtccgggacaagaagatgctcagtcacgtgtttgtgctgcaggtgcacccccagcccaggcgacatcaacggccagccccatacgcgtgaggattgcggcaccaggggcgctcaggattgggccgggctgcttctcagaagaggggacattgagcccaagcaggctgcactcctgcttggacggaaggtgcatgggtggggagggtaatcacaccaatagagacatggatggacttgtgcagaacataaatactctctttgcttatgtctatgttactcaaaggaaccatggaaataacaaattcccaattacaatgcagtaaactttaagaggagcagagtgagcttcgctcttttatggttggtgtatttccaaaaaacactttcttcttctttcccaattctttttctagtttctcctaaattggtgtttctttagatggaagccgt

SEQ ID NO: 26033 - DNA, 927 bp, Artificial sequence
  DNA replication origin
gtgagctgagggagtggggtgagtgtgcatgtgactgagagtgagcacatgtgagtgtgggtgggtatgtgggcgtcctccagtgtgtgtgagagcatgcgtgtattagtggtgtgctggagcgtccgcacatattgatgagagtgagtgtgttagcggtcgatgggcaagtggctgagcgtttgtgttgcaagtgtgatggtgtgtttgtagcatgtggttgtgtgggtgtgtgtatgtccatgagagcatgtgagtgggcaggtgactacattcaggtgaagtgggagtgaaagcgtcggtgcattgagccaatgtgtgtgtgtgagggtgagcacgagggaggcatgagtgtgagtgtgaggggattactgggtgtgcaaatgagacacccagtgtaagtgtaagtcagtgagggttggtgagtgtgaggaagtatgagtgggtggcaggcacaagtgtaagtgtgcgattgagtgtgagcatttgtgtaaatgtatgagtgccttgtgtcagtgtgagcacgagtgatgttattgtgaatgcgtgtgagtgaatgtgagcattttgcttgtgtcagtgaatgggaggttataacagtataggtgtgagtgtaaagtgagaaagtgtgtgggtaaaggtgtgagtgggtgagtaatcggtcattactagtgttgaggagtgtgagtgcatatgtgagtttttgtatgcattgggaggggtaagtgtatgtgagagtgcatgggagtgtgtgtcagcttgcatctgtttgtgcatacgtgtgactgggattgtgtgtgtgtgattgcgacagtggtgtgagtgcacctgaaagtgtgagggtgggtgtatgagtgcccatgagtgtgtctgaataacttagtatcagtgtgagtgtgaggatgcatatgagggtgtgagagtgag

SEQ ID NO: 26034 - DNA, 860 bp, Artificial sequence
  DNA replication origin
aattctgaattcaacccgtaacactggcttcaaacaacaaatttgttctctcagagttctggagaccagaagtcccaaatccaggtgcgggcagggccatgcttcttccacaggctctaggggaaggtccttccttactttgtccagcttctgggagctccaggcttccttggtgttgggacgcattgtgccagtctctgcctgcgtcttcacatggcccctgcccctgtgttctgcatgtccttttctgtctctgaaaggactctttcattgagtttctttgactctaatccaacatgatgtcacctaaattcttaccttaatgacgtctacagagacctcattaaataagatcatattctgaggttccgaatgtatgtgaagttggaggacaggcacagtttaatccataaagtgtttgtgtgtgtggagagtaagtatgagaaatgtgagctgagggagtggggtgagtgtgcatgtgactgagagtgagcacatgtgagtgtgggtgggtatgtgggcgtcctccagtgtgtgtgagagcatgcgtgtattagtggtgtgctggagcgtccgcacatattgatgagagtgagtgtgttagcggtcgatgggcaagtggctgagcgtttgtgttgcaagtgtgatggtgtgtttgtagcatgtggttgtgtgggtgtgtgtatgtccatgagagcatgtgagtgggcaggtgactacattcaggtgaagtgggagtgaaagcgtcggtgcattgagccaatgtgtgtgtgtgagggtgagcacgagggaggcatgagtgtgagtgtgaggggattactgggtgtgcaaatgagacacccagtgtaagtgtaagtcag

SEQ ID NO: 26035 - DNA, 830 bp, Artificial sequence
  DNA replication origin
ctccgggccaagcagtctcccgtgggagtgcgggagtgcgtgcgtgcggcggaaatcccgccttccggcgcccgctgttggccttggccgcagccagggcgctccaagtaggaagataagcgggattgctggaagcgggagagtcgggaggagcggcgaagggctcctcttccccattggctgcgcccacggagcagcctcgttgcgattggccgtacgcggggggcggcagtcccgcgtcggcccgcccctcgggccgcgagaggcgccgggatcgcgggcgccggctgagccagcggctcttgggaggctgcgtccgcgcgccggcggggcggggcggccgggccctgcgcgtcaggtcctggcctggggcacctgggcggccggtggcgggggcggtacgggcgcggggctggcgggcggccgagcccgggaggcgggcgtgggcgcggcggccgcaccggggcctgcgcggaccacccgcggggcagcctcgggcctctctccatctcttaagtggtggtggctgtgggtttttctgcaggcgatccttttgagtaatttgtttcacgcacgcgccctgctgtggggtaaagcggcagattcatgctgctgtcatttgtcgttaaaacgatgggctccctgttatgtgtgtgtacttcttggatttgagggcagggggatgacattgtaacttggcttcctgtgaccgtccattctcaaggtctcgtcagcgtggtgcagaaactcggcacaccctgcctaccttggaaggaggctttcccttccccacctccctctctctccatctcttccctctttccctctct

SEQ ID NO: 26036 - DNA, 1916 bp, Artificial sequence
  DNA replication origin
taaaggatcatggatgaaaaccattattttatagattacatttatttatttatttatttatttatttatttatttgagaagtagtctcactctgtcacccaggccagagtgcagtggcgcaatctcggctcactgcaagctccaccccccggcttcacgccattctcctgcctcagcctcccaagtagctgggactacaggtgcccaccaccacacccagctaattttttgtatttttagtagagacggggtttcactgtgttaaccaggatggtctcgatctcctgacctcgtgatccgcccacctcggcctcccaaagtgctgggattacaggcgtgagccaccgcacccagcctatagattacatttatgtggctagctcatgattctgcttccttctgaggttcaaaaaaacactttcactattccagcagcagctgcaggcggaggctgaccacctgggtaaggagctgcagagtgtgtcagcaaagctccaagcccaggtggaagagaacgagttgtggaaccgcctgaaccagcaacaggaggagaagatgtggaggcaggaggagaagatacaggagtgggaggagaagatacaggagcaggaggagaagatacgggagcaggaggagaagatacgggagcaggaggagaagatgcggaggcaggaggagatgatgtgggagaaggaggagaagatgcggaggcaggaggagatgatgtgggagaaggaggagaagatgcggaggcaggaggagatgatgtgggagaaggaggagaagatacgggagctggaagagaagatgcacgagcaggagaagatacgggagcaggaagagaagaggcaggaggaggagaagatacgcgagcaggagaagaggcaggagcaggaggcgaagatgtggaggcaggaggagaagatacgggagcaggaagagaagatacgggagcaggagaaaaagatgtggaggcaggaggagaagattcatgagcaggagaagatacgggaggaggagaagaggcaggagcaggaggagatgtggaggcaggaggagaagataagggagcaggaggagatatggaggcaaaaggagaagatgcacgagcaggaggagaagatacggaagcaggaggagaaggtgtggaggcaggaggagaagatacgggagcaggaggagaagatacgggagcaggaggagaagatgtggaggcaggaggagaagatacgggagcaggaggagatgtggagggaggaagagaagatgcatgagcaggagaagatatgggaggaggagaagaggcaggagcaggaggataagatgtggaggcaggaggagaagatacgggagcaggaggagaaggtgtggaggcaggaggagaagatacgggagcaggaggaaaagaggcaggagcaggaggagaagatgtggaagcaggaggagaagataagggagcaggaggagaagatacgggagcaggaggagaagatacgggagcaggaggagaagatacgagagcaggaggagatgacgcaggaacaggaagagaagatgggggagcaggaggagaagatgtgtgagcaggaagagaagatgcaagaacaggaggagacgatgtggaggcaggaggagaagataagggagcaggagaagaagatacgggagcaggaggagaagatacgagagcaggaggagatgatgcaggaacaggaagagaagatgtgggagcaggaggagaagatgtgtgagcaggaagagaagatgcaagaacaggaggagaagatgcggaggcaggaggagaagatgtgggagcaggaagtgaggctgcggcagcaggaggagaagatgcaggaacactaggtgaggctgcaggagctggaggagaggctggggaagctggggcagaaggccga

SEQ ID NO: 26037 - DNA, 1292 bp, Artificial sequence
  DNA replication origin
agtgaggatcctggaggagggtggttcctgccttgctgtagtccggggagcagggggcaggggttctctcttgtcagagtctctggtgcgatgggggtgggctgggggttttcctatgtgatagcccactgggcggtgaagccgggtcctcccgtgcctttgtccagggtgcaggggggcgagggtcttcagtggtggagtccgtggagcagcagggcgggggtcctgcagtgccatattccaggccgctgcggagtgggggacctgtcctgcagtggtccagggcatgcgggaatggtggtcctcctgtgccatagtccaacgcgcagcggggcggggggtcacctcgtcctgcggtccaccaaccacgaggcccgggtgctgctgtgcctcagtccagtgcgcggtgggacggcggtcctgctgtgctgtagtgcaggacgcggtggcgcaggggtagtccagagagcgccgtggcagggggtcctccagtgctggaatccagtgcaaggcgggtcaggggtcttaccgtgccgaagtcggtggcaggggtcctcccgtgccatagtctagggggcgacggggcagggttctctagtgcaggtgtccagggtgtggcagggcaggagtcctctggtgcaggagtccagaacctagccgaggagtcctccaatgccagagtccagggctctgcggggccgggttcccccatgccagagtgtagggcgtgttcaggcgagggtcttggcgtgcagtagtccagggtgcggtggggcaggggtagtccagacctccatggcgggggtccctctgtgcaggagcccagtgcccggcggatcgggggtccttccgtgctgtagtccggggcacggcaaggtgtgggtcctctggtgccctagttcgggggcggcgagtcagaggttctcccgtgtcttggtctagggcgtggaaggactggggtcctggagtccacgcggtagcacaagttgccccaggaccaggtcctctggaaccacagtccagggcgctgaggggcaggagtagttcagggcgagccggggccaaggtcctcgggagccagagtccagggtgtggaagggtgggggttctgcagtgcacagtccaggacaccgcggggcggggcagggcggggatcctccggtgccttagtccagggctgagccgcggtagaggtccttcagtagcatagtctagcgcacggcgttgcaggtgtcctccagtgcctgagaccacggcaggtcgcgggtcccactgtgctctagttcaggatg

SEQ ID NO: 26038 - DNA, 1049 bp, Artificial sequence
  DNA replication origin
gaggccacgcgcatttccactgccaaagcaatgacacaggagatggaaagaaattcttggccaggcgcggtggctcacgcctgtagtcccagcactttgggaggccaaggcgggcagatcacgaggtcaggagatcgagaccatcctggctagcaaggtgaaaccccgtctgtattaaaaacacccaaaaggtggccgggcttggtggcgggctcctgtagtcccagctactcgggaggctgaggcgggagagtggcgtgaacccgggaggcggagcttacagtgagccgagattgcaccactgcagtccagcctgggggacagagcgagactacgcctcaggaaaaaaaaaaattattttgccttcactatatgcctaagtaatttctctattagagcccagagtcgtggggcccacaccgccagctgacacatgaaagtgtggcaacgatgtggtggtgtctctgtgtggcagcgtggtggtgtgtctgtgtggtggtgtgtccgcatttctgtgtggtggtgtgtccgtgtggcagagtgtctgtgtggtgctatgtccatgtggtggtgtgttcatgtatctgcatggtgatgtctccgtgtgacagtgtgtttgtgtatccgtgtgacagtgtctgtgtgtccttgtttccacatggcagtgtctgtgtggtggtgtctgacagtgtggaggtgtgtccatgtgacagtgaggcggtgtgtgtgtgtgtggcagtgtccatgtggcagtgtgtttttgtgttcgtgtgagtgtgatggtgtgtccatgtgacagtgtagtgatgtctcttgtgtgtgtccctgtgatagtgtggtggtgtgtccatgtggtgacgtctccgtgtgtctgtgtgtccctgtgatagtgtggtggtgtgtccgtgtggatttctccgtatgtctgtgtgtccgtccatgtgaatgtgccagtgtgtccatgtgacggtgtctccgtgtggtaatgtctccgtgtgtctgtacatgtgacagtgtggtggtgtgtgcgtgtaacaatgtggcggtgt

SEQ ID NO: 26039 - DNA, 1004 bp, Artificial sequence
  DNA replication origin
cgtcccggcgctggtggcagggtggactcggatcccgcgagggtgtcgcgctagtcgcgggggctgcttgaggccgggggacttcgagccgctgctgcaccactcgctcccagcacaggaggaaggcgccggctggcgttgcgctctgctcggactcacggcaggagcgggggaggtctgcgaaagccgggagcgagccggggagggccagcgaactggagaggctcggcgcgccgctgcggacgcggcggatggccgaccacgggtgccaggggaggcccaggctgcggcgccgcaggagcccccgcgcccacctgcccctgcgcgccggccctggcgagcctctgtggaggtcaggggaccgtagcctctcctggggttcctgcctagcgactgaggggcggcaggaggcgcagctccggtttcccgcatgcagcgctgcgtgctcgccgcctggttttgtccgggtcaggcagaccagccccaggacgcgcccagccgacccacgcatggcaacctgcccttcttggcaggagtcgcagagggctttggcttctgaggtggaagtacctgttatgtctcctaattccggagtttgcgggggtttgggctggcgggggggctcattgggaaaatgcttttcaaagcattctgtttggctgccgtgagcacctatttgccttatgtgcatattgagaaatgtgtgcttctactaaggttagtcgctgagcccagggacagtgtaggcctggatttcaaatgcattaattagggtccagcacccagcctagagacttccacaaatgcagtagttatttcgtcacggggactgaatgcggagaaagtagccacaccgttataggcaattgttatacccttgtgatcctgcagaaaacctgtttcttaaatgtgcttcccccctctttctttctatgtactttcagtgccttgcagaactaggagtagcgtgctgactttgaacacgtggtagatatttcagaaag

SEQ ID NO: 26040 - DNA, 2240 bp, Artificial sequence
  DNA replication origin
tgtgttaacctgtacttctgccgcagagtttggagaaagcggcagcagattgtgctgccgcaggctggagcctggaacctggagccctggagccttgaatggtgtgtggtggcaatggagagaggcagctggcagtgacagctgctccgtgcttggctacaggaaggaaagaaggagaaagcacctaccataggctggaggctagagcctgcaggactgcggctggcctcgctggctcgcctccctggctggcctcgctgtggttggtggcagcgacggatactgcagctggccagagtgtagaaaggcaatggggtaggtaagctatccagggctgcccgcggcgggggctggttggggtattattccaggtgtcactactttgggtgtactagagtgttattttgggcgtcactgcttttaggtgtgctatccggggctgcactgccctcagcagcgggtggggggggggttggtggggggcgggttggggtcactatcttgggctgtattgatggcagcagtagggctggttgggggcgctattgggtgctgcactgcccgcgacaggggccgggttggggctgctattgtggttgcactgccggcggcatggtggtgggagggctggttagggtgcggactggtgggggtgcttactggtcgggcttcattgccgacagcggggtggggatgctatctggggctgcactgcccatggtgggggcttgttgggggcgctatgtggggttgcaatgtccatggcaggggagaggttagaggcagtatcaggtgctacactgctggtggtggggcggggcagcggtgggtgcgggtaggtgcttggagggtgcggtttcgggcgctatcgggccagactgcccatgatagagggcaggtttgggtgcgctactaggggatacactcctcacagcaaggggcggtttgggggtgatacccggccggtggcaggcggggtggtggggtgggttgtgggcaccgttcgggggctgcactgtggtcagtggcggtggggcgagttaggtgctctatcagctgctgcactgtttgtggtgggggctgggttggtgtgctatcggggaccatatttttggcagcggtatacaggttaggggtgctgtcggaggctgcactgcccatggcggggtgcgggtggggtgcactatccagggcatcattccccctgggtgggggacagttgggggtgctatctgctatgtagggctgcactgctcgtcgtggggagggggttggggaccttaaggatccatggctgcactattgacggcatggagcaggtggccgtgctctccggggcatcactgcccgcagccgggggttagttggaggtcctatcggtggctgcatggccgacggcagacggtaggatgggggagttatctggtgctgcgacgtccgaggcagggatgggttgggggcgctattgggttttacattgcagcggcgaggggcggtgttgggggcgctatcccagagccaacatcaggcagcggattaggggcgccatcaggggctgccttgctggtggcggcagagcttgcagcaacagggtctccaaggaaggagccttcttcctctttctggatttcagactctaaaaggcgatctcctcctgctcctgctagagcgcagcgagcgcacggcgtttccgcagtaatcctgagcacggcaaggaccccttacccgccggggttcccggggccatgcccttttcgctctgtgttgcggagaccacctggcacccctaggcacgctggacacggagtggcggggacaccacggggagacagggctctgtgggtggaggcattgggatggggaaccggcatttgggtgggagggctggctgtgtctgagttcctgctgattttgttccccaaggagcgcagtcctggtgggcccagcggttcctgtggattggagccaggcagtgtgatgttaccagtcaccactccaggtcccagttcctggcccgcttgagccaaaaggagaggctggactttggagggtggatatgagtgccttcactgagactggcccctgccacccagtggccaggatgacaaggtgaggctctaacgctatcagtctctgcattctcctctaggcttttttggctgtgtgtgtccagctgttccatgccaggaggaggaggagttacatgctggaagcttgcagatagcctggggctgctgctc

SEQ ID NO: 26041 - DNA, 1405 bp, Artificial sequence
  DNA replication origin
gtctccgccctggtccagctgggaatgtgggtccgtcctgtttccatgagttttctggggccaccagtgaggggctcgggatgtcagcggctggtctcggtccctatggtctgggctccggctcactgctcccctgccctccaggtcagtcactgactcagttactatgcagcgggctccatggctgtttggtggtggctgcaggtctcttcccaggagaggcctgcaagagggttgggatgtctgggagccctgcattctcccgtgatgttgctgcctggatccctcatctttaaagggagtgccgagcctccctgcaggtgtgggcagtgagagacacaggcggatgtgcatcagggcgctggaggccgatttctttcattgccttctgcctgtggaagagctgagctccctgcttctgtgcacaggagatttccctgtaaatggggagtgagggcaagggtctgtgtggggaagacttgggtgagccttcgtcctggaaataccagggccatgtccaagaggggagtggagccaaagtgtccaggaggaaggtgagggcagtgtgtgggtgggagtgcacggtcagtgccatggctcagaggccccaggagaggaagagctcaagttgtgggcaggaggaggcagtgggtaggcacaggggggagaaactgaggctctggcagcagaagaggggagggcctgcatgtgcagggttggcctgggaggggtgtctggagggagagacaggggtctgggtggagaccagggtggtgactgcagggacaggaccccaggattgtctgggtgggcggcaagagcagcagggcagaaagggcccaaggcagggtccagtcttctcagggtgtgggctgcagggatgggaccccagggttgtctggatgggcaggaagagcagcggggtagaaagggctggaggcagggttgggcgtccccagggtgtggggtgcagggaggggctgcacaggctgtccccctgaaggagggaggagggaaggagcacagaggtgctgggagcaaatggagagggaagtggcagcgacctgcatgccaggcggtcccggtttggggttgatctgtgtggaatagctccctggcccatgtgtaagtggtcaggggagacatggaggtctggagctacaagcggtggcaggaaggcaagtcctggtcttgggggtctggagcttatcttcttcctgtgaactgagtgtgggcggcacctatgggtggtgccctggacctgtggtctggtggagtccaggcctcccagggatagcagggcagccagggctagaggagcctgaggggccaggtcagggtagccctggggacactgcctccacctttgaccagcgctgctgcggggatctggtcatgagacccc

SEQ ID NO: 26042 - DNA, 824 bp, Artificial sequence
  DNA replication origin
tctgtaccctatggggggctctgaccctcctgcatagggcctggacaggggtgggtggctgtgtgcaggtggggagtggggagcccagactctcccagacacagcctgctctgctccagaatgtgggcttggggactgcaggctggctgggtctgggctgcctggtgtgcctgtggtggctgcattcccatatctgggactgaggcctagtgagtaccaggaggagcctgaagggagctccatggaggacctgcctcggatgacacccctattttaggaaggacatggtgtgttccagctgggaggaagggaagtgggccacctcctgggggtcttccacccccaccacctcagcctggggcttctgtgcttcctccctgcgcagaccccaaagtctgtgccgccacagggcaggaaggaagggcctgtgtcctggtcgaggttggggccacagtggtgttccctaagccccagtctgctctcagggcccgccccgcagcaggtcctgagtgagggacagagacggggaggggtttctgatcctggtggactctggggtggattccagtggggagtcatcagggtcggtgtcccccagggtattggggtgaatgtgctcctggagtctgctctggatgtggggtttatgcctgtgctgcctggggttgatgttgggaggtgccagtgacccgtttccctgagggactcttgtcggtggtagggtcagttctggccaggggcactggcgccatagcagtaggatggggtccagccccttccatgaccccctggagccctggtccccatcctcaccattcaatggg

SEQ ID NO: 26043 - DNA, 1756 bp, Artificial sequence
  DNA replication origin
gtagcgcatgtgtgtgttacagcatatggtgagtgcatgggtgttcgtatctgtggggtacaggtatcatgcacgtgtgttcatctgtgtggggtgtgggtatacgtggaccgtggcctgaggctcccccacaggacactgctccctgccgcctccccaggggctaacaggaccctgctcctcttgctaaagccagtttgggagcagccccacccaggcagccccaagccaaccaggctcgcctctgaccagatggctgaaggagcaggtagagcaggaagtgtgagccagtgacccaggttcccctggtggccaggcttggtggcccatgtccatggagtcccccacctgccaatgacctccagccatgtctcctgggtaccaggccacccatgggtgggggtgggggtaactccctgctgactcactgctcagctggcaccaatgaggtctccacctcagccctgggctgagtgtccagtgctgagtccttcctacaggcaggtgagcttgggaggcagggaccctgtggacttggggagcgggctcagggtctggaggccagaggccttgtccccaggcccggcatcccatcagcaagagcccaggaggctctcagggcagcactcctctagcaatctcaggggcagcgtcctcccaggagtcacatccagatcaccatacgtacctgctggcccctagcatgtcccataagtggagaggggttggcctgtggaggcaggggtggccagaatatgtgccggaaccccatctacaggctgacacctaaacccaaatggcacaggggagcctgagcatgaagtggctggcctctccctcgcgggggcccagcaactgctgactccatgtgccaagccccgcctgcccgctggaaagcctcaacagactgctccctgtggtgacaccaccactcgggtcggcttggctgaggccagcggagcatctcccctctaggtccattcacatccatcttccctggacaaatgaacactccccaaacactcacttgccactttgaccccagaccaaacacacagccactcctggagtgccggtgactgagggtggctgggcccttctgtgcccacaaagcagggcctgggctatacctgtggggctgcacgactgtgccaggacagccttacctttgctgggggcttcgtgccctcccagctgcgtgtgtccatggacgaggggacctggtagatgtcatgccccatcccggcagaaggtggcacctggtaaatatcctgggcagggcctccaggccctggggacacctggtacaggtctgtggccgggctgggaaacgggtgatggggcgtctgcttcgagaaggtggatgtctgcttggctgggggcgactggaactgagggctgggacccgggacttggtagaggccttgctgagccttgctgggagtgggcaccaggtagacgctgtcgggctggggctggtaggtgttggggagcatgggcgtgtactgggaggccggaggcactggggcatggaggccaggctgaggctgggccggggtggcgggagggccggggccaggccctgctggcttcttatcatacatacccaccaagatcttgaggtggttcccaggcatgatgccctggcgcccgtgcagcgagcagagccaccagccatccaggccctgcgtgtcctgctccagcaccgtcatgatgtcgcccttgcggaaggagagctcatccggggactcggcca

SEQ ID NO: 26044 - DNA, 1573 bp, Artificial sequence
  DNA replication origin
gtggctaggctggcttggctggctggctggcttggctggcttggctagcttgcctggcttggctggcttggctggcttggctggctgggtggctggctggcttggccagctgggtgtcttggctggcttggctggcttgggtgtcttggctggctaggctggctggctggcttggctggcttggatggctggctggcttggctggtttgggtggcttggctggctagctggcttggctggatgggtggcttggctgggttggtgggctggctggcttggctggcttggctggcttggatggctggctggcttggcttgcttggctgtctgggtggcttggctggctggctggcttggttggcttcgctggctgactggcttggctggcttcgctggcttgactgtttgggtggcttggccggcttggatggctgggtggcttggccggcttggttggctggctggcttggctgcctcggtggctggctggcttggctggctgggtggctggctggcttggctggctgggtggcttgactggcttggctggctggctgtcttggctttctagctggcatggctggcttggctggctgactgggtgcctggctggcttggctggcttgggtggcttggctggctaggctgggtggctgtctggcttggctggcaggttggcttggctggcttggctggcttgggtggcttggctggctagggtggctggctggcttggctggcttggggggctggctggcttggctggcttggctggctaggctgggtggctgggtggcttggctggcttggctggcttgggtggcttggctggctaggctgggtggctgggtggcttggctggcttgggtggcttgggtggcttggctggctagggtggctggctgggtggcttggctggcttggctggcttgggtggcttggctggctagggtggctggctgggtggcttagggggctggctggcttggctggcttggctggcttggctggctggctggcttggctggctgactggcatggttggcttcgctggcttggctggctggcttggctggcttggctggctggctggcttgtctggcttggctggctggcttggctggcttggctggcttggctggcttggccggctggcaggcttgcctggcttttctggcttactggcttggctggcttggtcggcttggctggctggcttgggtggcttggctggcttggctggctggcaggcttggctggcttggctgggttggctggctggctgtcttggccggcttggcttgcttggctgcctgtgctggctggctggctgggctgtctggctggttggctggcttgtctggcttagctgcctgtgctggctggctggctgggctgtctggctggttggctggcttggctggcttggctggcttgactgaccggcttggctggctttgctctcttggctggcttggctgggtggctggctttgctgggtggctggctggcttggctggtggtctggtttggctggctgactggctgggctggctgggctcgctggctggct

SEQ ID NO: 26045 - DNA, 1738 bp, Artificial sequence
  DNA replication origin
cttggccggctggcaggcttgcctggcttttctggcttactggcttggctggcttggtcggcttggctggctggcttgggtggcttggctggcttggctggctggcaggcttggctggcttggctgggttggctggctggctgtcttggccggcttggcttgcttggctgcctgtgctggctggctggctgggctgtctggctggttggctggcttgtctggcttagctgcctgtgctggctggctggctgggctgtctggctggttggctggcttggctggcttggctggcttgactgaccggcttggctggctttgctctcttggctggcttggctgggtggctggctttgctgggtggctggctggcttggctggtggtctggtttggctggctgactggctgggctggctgggctcgctggctggcttgcccagcttggctggctgggctggctgggctcgctggctggcttgcccggctttgctggctggctggctgggctggcttggctggcttggctggctgggtggcttggctggctggctggtttgcctagcttggctggctggcttggctggctgggtgggttggctgccttggctggctggctgtcttggctttctagctggcatggctggcttggctgactgggtgcctggctggcttggctggctgggtggcttggctggcttggctggcttgggtggctgggtggcttggctggctggcttggccggctgggctggctggctggcttggctggctgactggcatggttggcttcgctggcttgactgtttgggtggcttggccagcttggctggctgagtggcttggctggctttgctggctgggtggcttggctggcttggctggctgggcggcccactggcttggctgcctgactggctggctggctggctggctggctggcttggctggctgggtggcttggttggcttggctggctggctgtcttggctggctggctggcatggctggcttggctgactgggtggctggcgggcttggctggctgggtgtcttggctggctgtgtggcttggctggcttggctggctgggtggcttggctggcttggctggctaggtggcttggctggcctggctggctggctggcttggcttgcttgattggcttggctggcttggctggctggctggctggcttggctggctgggtggcttggctggcttggccagcagggtggcttggccggctgggtggcttggctggcttgcctggctgggtggcttggctggcttggctggctggctggcttggctggcttggctggcttactggcttggctggcttggtcggcttggctggctggcttgggtggcttggctggcttggctggctggcaggcttggctggcttggctgggttggctggctggctgtcttggccggcttggctggctggctggcatggcttgcttggctgcctgtgctggctggctggctgggctgtctggctggttggctggcttgtctggcttagctgcctgtgctgtctggctggctgggctgtctggctggttggctggcttggctggcttggctggcttgactgaccggcttggctggctttgctctcttggctggcttggctgggtggctggctttgctgggtggctggctggcttggctggtggtctggtttggctggctgactggctgggctggctgggctcgctggctggcttgcc

SEQ ID NO: 26046 - DNA, 2180 bp, Artificial sequence
  DNA replication origin
gtcggcttggctggctggcttgggtggcttggctggcttggctggctggcaggcttggctggcttggctgggttggctggctggctgtcttggccggcttggctggctggctggcatggcttgcttggctgcctgtgctggctggctggctgggctgtctggctggttggctggcttgtctggcttagctgcctgtgctgtctggctggctgggctgtctggctggttggctggcttggctggcttggctggcttgactgaccggcttggctggctttgctctcttggctggcttggctgggtggctggctttgctgggtggctggctggcttggctggtggtctggtttggctggctgactggctgggctggctgggctcgctggctggcttgcccggctgggctggctgggctggctgggctcgctggctggcttgcccggcttggctggctggctggctgggctggcttggctgccttggctggcttggctggctggctggcttggctggctttgctggctggctggctgggctggcttggctggcttggctggctgggtggcttggctggctggctggtttgcctagcttggctggctggcttggttggctgagtgggttggctgccttggctggctggctgtcttggctttctagctggcatggctggcttggctgactgggtgcctggctggcttggctggctgggtggcttggctggcttggctggcttgggtggctgggtggcttggctggattggctggccggctgggctggtttacacggctggctggcttggctggcttggctggctggctgtcttgtgtggctggctggcatggctggcttggctgactgggtggctggcgggcttggctgtctgggtggtttggctggcttggctggctgggtggctggctggcttggctggctgggtggcttggctggctgcgtggcttggcaggcttggctggctgggtggctggctggcttggctggctgggtggcttggctggcttggctggctgggtggcttcgctggcttggctggctaggtggcttggctggcttggctgtctgggtggcttggctggcttggctggctaggtggcttggctggcttggctggcttgggtggcttggctggcttgcctggcttcgctggcttggctgtctgggtggcttggctggcttggctgtctgggtggcttggctggcttggctggctggcttccttggctggcttggctggctgggtggcttggctggcttggctggctgggtggctgtctggcttggctggctgggtggcttggctggcttggctggcttgggtggcttggctggctaggctgggtggctgtctggcttggctggctgggtggcttggctggcttggctggcttgggtggcttggctcgctagggtggctggctggcttggctggctttgggggctggctggcttggctggcttggctggctaggctgggtggctgggtggcttggctggcttggctggcttgggtggcttggctggctagggtggctggctggcttggctggcttggggggctggctggcttggctggcttggctggctaggctgggtggctgggtggcttggctggcttggctggcttgggtggcttggctggctaggctgggtggctgggtggcttggctggcttggctggtttaggtggcttggctggctagggtggccggctgggtggcttgtctggcttggctggcttgggtggcttggctggctagggtggctggctgggtggcttggggggcttggcttgcttggctggctggttggcttggctgggttgcttggctggcttggctggctggctggcttggctggctgactggcatggttggcttcgctggcttgactgtttgggtggcttggccagcttggctggctgagtggcttggctggctttgctggctgggtggcttggctggcttggctggctgggcggcccactggcttggctgcctgactggctggctggctggctggctggctggcttggctggctgggtggcttggttggcttggctggctggctgtcttggctggctggctggcatggcgggcttggctggctgggtgtcttggctggctgtgtggcttggctggcttggctggctgggtggct

SEQ ID NO: 26047 - DNA, 1162 bp, Artificial sequence
  DNA replication origin
ctgtacaggaaatacgcccttaattacataggaataaacatttgttacactgagaaaaatctaatagagctaaaaataaaaattaatttggaaaggtcattagatactcatacattcttacgtttatacattctttcatatattcatatattcttttaacagtatcaatggtttggagttatgtgtacaaaaccatgacctatatgtaatacaactaataacaagcacttacaattcaaggcatattatatacaaagctttaacttcctatcaaaatattttggtttttttctttctgttttggcagatactatgaacacaacattcaactcacagacactatggagcccttactaagcataaagtactgtgaaaggccagggctaggagagaactgagacagggccagggataggacagaactggggcagggtcatggccagagaaaaaccaggggcagggtcatagccagggacatgagaggaccaaggccagggccagaagcagggcagaaccagggccagggcagggacatggcagggccagggccatggcaggatcagggtcagcagaaggccagggcagggctagggtagcacagggccaaggcaggacagggtcagtgtagagcaagaatgggccagagtatggcagggcagggacagggaggtccagggccagagtcaggtccaggacatggacagggcagggccagaaacatggcaggacaagaaaggggacagggcaagggcaaggccagagaaggaccatggaaaaaacacggccagggagggtccagggtaagggcaaggccagggcagaaccagagccagagcaggccaaaggcagggccagggcagggcaaagccagggtaggccagggccagtgtagggtgagggtagggccagggcgagttcagggccagggcaggactaagatagcacagggccaaggcagggccagggcagggccaaaaggaggggccagggccaagcatagccagtgtcagacctggggattgtcagggccagggtcagggtcaaggctgggccagggacagggccagagcaaggacagggccagggagaaggcagaaccagagaggatccagagcaaggccagggtcagggcagaaccaggaccaggataaggcaaagccaa

SEQ ID NO: 26048 - DNA, 853 bp, Artificial sequence
  DNA replication origin
gaatcttgtctctttacttagcctggttaaaagtttgtcaattttgtttagctttccagaaaaccaacttttcgtttaatcttgtgaggtttttatttcaattttgtttctgctacgatcttatttattttcttattttcggtttagtttgttctttactagttctttaagatgtattgtttacttgaagtttttcttttgtttggatggtaggcacttatagctgtaaatctctgcctttgtactgctttctgcataacaagttttggtatactgtgtgttcattaccctttgtttcatgaaatttttgaatttctgtcttagtatcttcattgacccgctagtcatttattcaggagggtagtgtttaacttccatgtgattgtattatttccaaaattacttttcttattgatacctatttttattcctttgtagtgaaagaagatggccacagagacagacagcagcgtggtcagagtggtaggagccggccatcagcgagagctgctccatgcctggctgctgggtgctagagtctgcggcccactggcttgcctcactgtggttggtggtggcggtgacagagactgcagcatgaccagagtggtaggacaggggctatccagggctgcacctttcgcagtgtggggtgggttgggggcgctatccagggtgtcattgcctgcattaggggtactagttggtagcactgtacagggctgcactgcccacggcagggaaggtgggttatgggtgctttctggggctgcaatgcccatggaggagaacaggttagggcactatcgggtatacgctactggcggcattgggggacagaggtggggggtgc

SEQ ID NO: 26049 - DNA, 1861 bp, Artificial sequence
  DNA replication origin
tccgcctctccgccgcgccgccgctgtccgcctctccgccgcgccgccgctgtccgcccctccgccgctgtccgcccctccgccgtgccgccgctgtccgcctctgcgccgctgtccgcctctccgccgctgtccgcctctccgccgcgccgccgctgtccgcctctccgccgctgtccgcctctccgccgcgccgccgctgtccgccgcgccgccgctgtccgcctctccgccgctgtccgcccctccgccgtgccgccgctgtccgcctctgcgccgctgtccgcctctccgtcgctgtctgcctctccgccgtgccgctgctgtccgcctctccgccacgcccgcgccggcgctgtgtgcctttgcgagggcggagctgcgttctcctcagcacagacttcggagatacagcgaaggcggagcagtgttcacctcagcacagacccgggcgggcgggcgggccggtggcaccgcgagggcggagctgcgttctgctctgcacagaccttggggcactgcctcgctttgggacaactcggggccgcatcgacggtgaataaaatccttcctgtttgcagccctgtttgtggttggtggcagcgatggacactgcagccagccagagcgtagaaaggcatcggggtaagtgcactatccaggctgcactgcgggtggcctgggacgggttgggagccctatctcaggcgtcactgcccgtcttgggtggctggttgggtgtgctatctggggctgtgctgcctgcaccggggggtggtttgggggcccaaaccggggctgcactgcctttggcggggagccggttgggggcactatcccagactgtattgctggcaacagtgaggtgggctaagtgtgctatccagggctgcactgtgcggctgtggggggtggtgtggcggtttcgggttgagggcgctatggggtgctgtaatgcccatggtgcagggaggcggggcggtttgcctacgttgggtgtgctattgggggggggtgacactgctggtggtagggggcagggtgggttgggggccatatcaggggctgcactgattgctttagctaggatttctggtactatgttaaacaacagtggtgacagggggcatccttatcatgttccagatcttagaggaaaagctttccatttttccccattccatatgattctagctgtgggtgtctttcctgtagtttttattatgttgcggtatgtttcttctgtgcccgtttctttgaggatttatagcatgaagggatgttgaatttcatcaaatgctttttcggtttcagttgacgtgatgatactgtttttgtcgtttatttggttgatatgatgtatcacattgtatgttgagtgacccttgatcccagggatacattgcacttgatcatgatgaattatctttttaatgtattactgaatttgattcagtggtattttgttgaggatttttgcatcaatattagagatcctggcctgtagtttccttctttgatgcttttgtctgattttggtatcacagtaataatggtctcatagaataagtttggaagtattccctcctgtttttcaaaatagtttgagcaggatttgtactaggtctttaaattgtttggtgtgaagccatcagcagtgaagacatcagttcctgggcttttctttactgggagactttttctgatggcttcaatctcattacttgttaccaatctgttctggtcttggatgttttcgttgtttaacctaagtaggttgtatgcatctaggaatttgccaatttctactaggctttccaatttattggcatataatagccagttatgatcctttgaattt

SEQ ID NO: 26050 - DNA, 1509 bp, Artificial sequence
  DNA replication origin
agcgccggcgcgggcgtggcggagaggcggacagcagcggcacggcggagaggcagacagcgacggagaggcggacagcggcgcagaggcggacagcggcggcacggcggaggggcggacagcggcggagaggcggacagcggcggcgcggcggacagcggcggcgcggcggagaggcggacagcggcggagaggcggacagcggcggcgcggcggagaggcggacagcggcggagaggcggacagcggcgcagaggcggacagcggcggcacggcggaggggcggacagcggcggaggggcggacagcggcggcgcggcggagaggcggacagcggcggcgcggcggagaggcggacagcggcggagaggcgcacagtgccggcgctggcgcggagaggcgcaggcccaggctccactccccagctgtgaaagggtaagaactgagggtggctgagactcggggttgttcagggcggggtgggctctggacccagcaggcctggcacccaggtcagggctccaggggaggccaggtgggcgaaggccaagaaggggctggggctggtcaggaagggctcctggtgaccagagcactttgcgtgagccagcgtgggaggaaggtgggctggatgagccagggaggcgccgggaggggccttggcagaggcgaccccctccgtcagcccccaggccactgaaccctgggtagcgagaaccgacaggggagactgcagacagaggagtggaggctccccggctttgggggctctgagtggaagcatctagggggtccctcaagaggcccccaaacgcttccccatggtgaaaaaagaaggcgcagagaggggcacggcgccggcgccgacacagaggggcgcacagtgagatttgctgtgatttcttttattgccccaaatgtacttcatcttggtagatttctattggctttaaaaatgtgtgtgttttgctgttggggagtggggtattatacggatgtcagattttgctggttgactgttcagatcttttgtaaatccttgctccttttctgcctagtttcactctgtcacttacactagagtgcggtggcacgaacatgactcactgcagccttgacttcctagggtcaagtacttcccctggcttaacctcctgactagctggtactataggtgtgtgccgccacacctgactaaatttaaaattttttggagagatgaggccttgctatgttgcccaggctcgaactcctggcctcaagctatcctttgtctttgcctcccagagttctgggattacaggcatgagccactgtgcccggcctctgcctagttttaacagttgctaagaggaggatgttgaagtagatgtcttcttggtgggtcaatccttttgtcattaagcagttgttatggtcacttccttttcaccccattggtgaaggaggggtccctgccctaaagtgtaggagatggctgaacacgacacctggcgtggatggatgaga

SEQ ID NO: 26051 - DNA, 2101 bp, Artificial sequence
  DNA replication origin
ggcctagaggttttttctctcatccaatcagaacatgtagtccaggaaacgcatttgcataacctcggtatataaagcatgctgaggtcgtatcaggtcatttcaagctcttctgtgtctagaggaagagctaccccgtgaccggcttagagaactggaagaggccgcaacctttctcctgcttgaagctggaggatggatggagtctggagccctggagcgtgggacactgtttcgctgtggttggtggtggcgacagagcagtaggagagcgcccggcagcgggagcttctcctgctgggctggaggactaggagaaggaagaggcactgccacatgctggaggctggaacctgtgccaccgtggctggcctggctctggttggttcgcctcgctgtggttggtggtgacgtcggagactgcagctcggtcacagtggtagaaatgtgatggggtaggtgagtttcccggggctgccctgcacgcctctgggggcaagggttgggtgtcctactggggctcactgctagaggctaccctgcctgtggcagtggtctggttgggggcactctccggggtggcattgctggtggtggggcaggttggctggctatctggggctatactgcctgcggtggcaggggtggtcggggaaagcagattgtgtacactagcgtatactgccggtggctggggaaggattaggggcgctatcttctgctgcactgccagcggcagggggtgggttgggtggagttatccagggctacaatgctggcagtcgggggtggtttagggacgttgttggatgctgcactgcctggggcgttgttgggtgctgactcggggtggtgcgccatcaagagctgaactgtccgtggcggggtgggaggaggtgggtttgggatggtatctagtgcagcaactcccgtggctgggtcagatttggggcactgttgggtggtacactccctgcagtgtggggggagtgctttgggggaggtattggggttacattgcctgaaactagggtgtgttggatgtgctatccgggggctacactgctagtggcaggggtcagattaggggtgctgtgggggctacactgccagcggtgttggcgagctgaggtggcggcagcggcagcgacagtagtggccgcctctttccttctggtggtctccaggtaagggatcgttcttctattcccggactccagactctagaaggcgatcttctcctgctcgtgctagattgcacggcagggctcccacacccactgtggtttcccggcacgccctcatgctctgtgttgcggagaccacctgggactaccaggcagggagtaataggcacccacgggggaagcaggggacagggcactgtgggtggaggcgtcaggaatgggaaccagcccttgggtggggagggctggctggttctgagtttctcctactcgggctccctgaggagggcagccctggtgggcccagcaattcctggtcagctggagttggccaggggccggtttcagtgaaggcattcactcccaccccagaccccagttcctggccagcttttgccagaaggagaggctggactttggaaggtggatgtgagtgccttcaatgaaactgatgcctgccacccagtcaccagcgtgacaaggtgaggctctaacggttccactgtctgaatcctgatttgggcttttctggctttgcctgcccagctactccaagccaggctgaaggaggagaaggcgaggagtcgcctgtggtagggtcgagcctgcagatgacgtggttctgcagcttgcctcatgcggttggtggtggcgatggagaccacagatcgaccggagcgggaggagggcacccacgggggccaggtggtaggagctggtagggtgggctggtacattgagggcgacagtggttgtattggcattggcgctagtggtggtagcagtaggaagtctgggggccgggaagggggaataggagcactgcagggcccatcccactctggggtggggaggaacctgtgggtgctgtaacacaggcttcggtggcagtggtggtgatatacctagggcaa

SEQ ID NO: 26052 - DNA, 1790 bp, Artificial sequence
  DNA replication origin
gttccacagttgccatagtgaggatcctggaggagggtggttcctgccttgctgtagtccggggagcagggggcaggggttctctcttgtcagagtctctggcgcgatgggggtgggctgggggttttcctatgtgatagcccactgggcggtgaagccgggtcctcccgtgcctttgtccagggtgcaggggggcgagggtcttcagtggtggagtccgtggagcagcagggcgggggtcctgcagtgccatattccaggccgctgcggagtgggggacctgtcctgcagtggtccagggcatgcgggaatggtggtcctcctgtgccatagtccaacgcgcagcggggcggggggtcacctcgtcctgcagtccaccaaccacgaggcccgggtgctgctgtgcctcagtccagtgcgcggtgggacggcggtcctgctgtgctgtagtgcaggacgcggtggcgcaggggtagtccagagagcgccgtggcagggggtcctccagtgctggaatccagtgcaaggcgggtcaggggtcttaccgtgccgaagtcggtggcaggggtcctcccgtgccatagtctagggggcgacggggcagggttctctagtgcaggtgtccagggtgtggcagggcaggagtcctctggtgcaggagtccagaacctagccgaggagtcctccaatgccagagtccagggctctgcggggccgggttcccccatgccagagtgtagggcgtgttcaggcgagggtcttggcgtgcagtagtccagggtgcggtggggcaggggtagtccagacctccatggcgggggtccctctgtgcaggagcccagtgcccggcggatcgggggtccttccgtgctgtagtccggggcacggcaaggtgtgggtcctctggtgccctaggtcgggggcggcgagtcagaggttctcccgtgccttggtctagggcgtggaaggactggggtcctggagtccacgcggtagcacaagttgccccaggaccaggtcctctggaaccacagtccagggcgctgaggggcaggagtagttcagggcgagccggggccaaggtcctcgggagccagagtccagggtgtggaagggtgggggttctgcagtgcacagtccaggacaccgcggggcggggcagggcggggatcctccggtgccttagtccagggctgagccgcggtagaggtccttcagtagcatagtctagcgcacggcgttgcaggtgtcctccagtgcctgagaccacggcaggtcgcgggtcccactgtgctctagttcaggatggagcaggtctgaggtcttctgttgcctcagtctagggcgctggagagcggggatcctctggtgccagagtcaatggatccaccggtcggggtcctcccatgtcttagccccgggaggggagaggcgggggtcctcctttgccctagtccaaggcattgtgaggccccgctcctgcattcttaactgtctgtgcctctgccgccgcgggggaaaactgcaccatctcaggcaagcctaacagagcagctgtccttaaaagattcccagttgagtgtggttcggagcaggcctcagaagtgtgcccttagatggcttcaagggctctgggcaatgtttaaggaatccagctgacctcagttactccgagcccttttccactcagcagaacttctggccaccgggtcctctatctgcggagcccttctatcatcccagatccccacagggtggactccgtctcatcctcacaatctcagctcagg

SEQ ID NO: 26053 - DNA, 1079 bp, Artificial sequence
  DNA replication origin
tgggacccactctagaggccacgcgcatttccactgccaaagcaatgacacaggagatggaaagaaattcttggccaggcgcggtggctcacgcctgtagtcccagcactttgggaggccaaggcgggcagatcacgaggtcaggagatcgagaccatcctggctagcaaggtgaaaccccgtctgtattaaaaacacccaaaaggtggccgggcttggtggcgggctcctgtagtcccagctactcgggaggctgaggcgggagagtggcgtgaacccgggaggcggagcttacagtgagccgagattgcaccactgcagtccagcctgggggacagagcgagactacgcctcaggaaaaaaaaaaattattttgccttcactatatgcctaagtaatttctctattagagcccagagtcgtggggcccacaccgccagctgacacatgaaagtgtggcaacgatgtggtggtgtctctgtgtggcagcgtggtggtgtgtctgtgtggtggtgtgtccgcatttctgtgtggtggtgtgtccgtgtggcagagtgtctgtgtggtgctatgtccatgtggtggtgtgttcatgtatctgcatggtgatgtctccgtgtgacagtgtgtttgtgtatccgtgtgacagtgtctgtgtgtccttgtttccacatggcagtgtctgtgtggtggtgtctgacagtgtggaggtgtgtccatgtgacagtgaggcggtgtgtgtgtgtgtggcagtgtccatgtggcagtgtgtttttgtgttcgtgtgagtgtgatggtgtgtccatgtgacagtgtagtgatgtctcttgtgtgtgtccctgtgatagtgtggtggtgtgtccatgtggtgacgtctccgtgtgtctgtgtgtccctgtgatagtgtggtggtgtgtccgtgtggatttctccgtatgtctgtgtgtccgtccatgtgaatgtgccagtgtgtccatgtgacggtgtgtccgtgtggtaatgtctccgtgtgtctgtacatgtgacagtgtggtggtgtgtgcgtgtaacaatgtggcggtgttcccttcccggcttgc

SEQ ID NO: 26054 - DNA, 996 bp, Artificial sequence
  DNA replication origin
gctggtggcagggtggactcggatcccgcgagggtgtcgcgctagtcgcgggggctgcttgaggccgggggacttcgagctgccgctgcaccactcgctcccagcccaggaggaaggcgccggctggcgttgcgctctgctcggactcagggcaggagccggggaggtctgcaaaagccgggagcgagccggggagggcccgcgaactggagaggctcggcgcgccgctgcggacgcggcggatggccgaccacgggtgccaggggaggcccaggctgcggcgccgcagggcagcccccgcgcccacctgcccctgcgcgccggccctggcgagcctctgtggaggtcaggggaccgtagcctctcctggggttcctgcctagcgactgaggggcggcaggaggcgcagctccggtttcccgcatgcagcgccgcgtgctcgccgcctggttttgtccgggtcaggcagaccagccccaggacgcgcccagccgacccacgcatggcaacctgcccttcttggcaggagtcgcagagggctttggcttctgaggtggaagtacctgttatgtctcctaattccggagtttgcgggggtttgggctggcggggggctcattgggaaaatgcttttcaaagcattctgtttggctgccgtgagcacctatttgccttatgtgcatattgagaaatgtgtgcttctactaaggttagtcgctgagcccagggacagtgtaggcctggatttcaaatgcattaattagggtccagcacccagcctagagacttccacaaatgcagtagttatttagtcacggggactgaatgcggagaaagtagccacaccgttataggcaattgttatacccttgtgatcctgcagaaaacctgtttcttaaatgtgcttcccccctctttctttctatgtactttcagtgccttgcagaactaggagtagcgtgctgactttgaacacgtggtagatatttcagaaag

SEQ ID NO: 26055 - DNA, 1662 bp, Artificial sequence
  DNA replication origin
cagagtttggagaaagcggcagcagagtgtgctgccgcaggctggagcctggaacctggagccctggagccttgaatggtgtgtggtggcaatggagagaggcagctggcagtgacagctgctccgtgcttggctacaggaaggaaagaaggagaaggcacctaccataggctgtaggctagagcctgcaggactgcggctggcctcgctggctcgcctccctggctggcctcgctgtggttggtggcagcgacggatactgcagctggccagagtgtagaaaggcaatggggtaggtaagctatccagggctgcccgcggcgggggctggttggggtattattccgggtgtcactactttgggtgtactagagtgttattttgggcgtcactgcttttaggtgtgctatccggggctgcactgccctcagcagcgggtggggggggggttggtggggggcgggttggggtcactatcttgggctgtattgatggcagcagtagggctggttgggggcgctattgggtgctgcactgcccgcgacaggggccgggttggggctgctattgtggttgcactgccggcggcatggtggtgggagggctggttagggtgcggactggtgggggtgcttactggtcgggcttcattgctgacagcggtgtggggatgctatctggggctgcactgcccatggtgggggcttgttgggggcgctatgtggggctgcaatgtccatggcaggggagaggttagaggcagtatcaggtgctacactgctggtggtggggcggggcagcggtgggtgcgggtaggtgcttggagggtgcggtttcgggcactatcgggccagactgcccatgatagagggcaggtttgggtgcgctactaggggatacactcctcacagcaaggggcggtttgggggtgatacccggccggtggcaggcggggtggtggggtgggttgtgggcaccgttcgggggctgcactgtggtcagtggcggtggggcgagttaggtgctctatcagctgctgcactgtttgtggtgggggctgggtttggtgtgctatcggggaccatatttttggcagcggtatacaggttaggggtgctgtcggaggctgcactgcccatggcggggtgcgggtggggtgcactatccagggcatcattccccctgagtgggggatagttgggggtgctatctgctatgtagggctgcactgctcgtcgtggggagggggttggggaccttaaggatccatggctgcactattgacggcatggagcaggtggccgtgctctccggggcatcactgcccgcagccgggggttagttggaggtcctatccgtggctgcatggccgacggcagacggtaggatgggggagttatctggtgctgcgacgtccgaggcagggatgggttgggggcgctattgggttttacattgcagcggcgaggggcggtgttgggggcgctatcccagagccaacatcaggcagcggattaggggcgccatcaggggctgccttgctggtggcggcagagcttgcagcaacagggtctccaaggaaggagccttcttcctctttctggatttcagactctaaaaggcgatctcctcctgctcctgctagagcgcagcgagcgcacg

SEQ ID NO: 26056 - DNA, 1326 bp, Artificial sequence
  DNA replication origin
gccaacagtgagcgatcaagtatgaattctcagggttactctccatgaatacaaataaattaacaatctcaagcaacaccctttcaagtgcagtctgccttacaatgaccaatctgaaagccaaggacaaggccatgtattactgtgagtgacacagtgagggaaaccctgtgtgagcccagacacaaagctcactgcagggagacaggaggggactatgcggtagatgctgctcagaaccaccagggggcactcagaaccatcagggagggtgcacagaaccaccaggaggggctcaggacaccagggggtgctcagcaccaccagggggcactcaggaccatcaggtagggtgcacagaactgccaggaggagctcaggacaccagggggtgctcagaaccaccagggggcactcagaacaattgggggtgctatgaaccaccagggggcgctcagaaccactagctggtgctgaggacaccagggggcgctcaggaccacaaaggggccctcaggacaccagagggtgctcagaaccaccaggaggcgctcaggacaccagggggcgctcagaacactaggaggtgctatgaatcactagggggcgctcaggacacaagggagcactcagaaccaccagggatagctcaggacaccagggggcactcggaaccgccagggggtgctcaggacaccaggaggcactcagaaccaccagggggtgctcaggacaccagggggcgctcagaaccaccagggggtgctcaggacaccaggaggcactcagaaccaccagggggccctaaggaacctaggagctgctcagaaccactaaggggtgttgacaccagggggcaggcagaatcaccagggggagcccaggacaccagcaggcgctcaggaaacaccaggaggtgctcaggacaccagggggcgctcagaactgccagggagcgctcagaagaagcagggggtgctcagaacaccagagggtgctcagaagcaccagggggcgctcaggacaccagggggcgctcatgagactgtggtgggggggtgctgagaaccacaggatgtgaccaagacaccaaggggtactcagaactgccagggggtgctcaggacaccagaggattctcagaaccaccagggagtgctcaggacaccaggggatgctaaggaaaccagcgggtgctcagaacgaccagaggacactcagaaaaccaggggaagctcaggaaccaccagggggcgctcatgacaccagcgggcggtcagaaccaccagggcatgctcagaaccaccagggggcgctcaggacacc

SEQ ID NO: 26057 - DNA, 1170 bp, Artificial sequence
  DNA replication origin
ctgtggggtaccccaatcctttaggactgtgaggtgccctgaacatcagggatgtggggtaccccaaccatttaggactataggctgccctgaaatgacggccagggggtaccctgaccttttagggctgtgggacacactgacttcttaagactacggctggtgcctacaggagtccaagggataccaggcctatgtggggagggggcagaggtagaaaagcaatgggggaggtgcggggcatcggctgtccctgccctggagaggatggggccagccaggtaggtgtgcagccaggaccactcaaggactcaagggagagatgcggtcggggagagaggagtgggggacggggagagaggagggggggatggggagagaggagggggggacggggggtggggagagaggaaggggtgccggggagagaggaaggggtgccggggagagaggaaggggtgtctgggagagaggaaggggtgttggggaaagaggggaaaggggacagagggggcggggacaggagccggaaccggggtcacacgtggaaggccaggaccctgggtcaggagtgggagccaagacccggggtcacatgtggggctggccacctgactggagtgtggtcttcagtcatgctgtcaccaggctgtgggacctcagggatgcagtgagggagccaggcctcgggggcccagcctggattctgccgactcccatccctcagcctcaccaagaggccactgacttcgtcactgcacagagatcccatcctggggttctggggcctgtgcaggagaaacacaggtgcagggccacgtgcccacaccgctggcatctgtgctccacaaccaaactcctagagccatcatcatctctgggctgcagtgcccgccggtgacaactccctgaccacctcgctgtggtcacactcctgtccccgtgggtagaaaatccagtgatgcgtgtagacaaagagccctctgcacacctggaaccccagcgccttgggaggcccaggtggggggatcacctgagctcaggagtttgagaccagcctgggcaacatggcaaaacctcatctctaggaaaaatttaaccatcagacggacacggtggtgcacacctgtaatcccagctactaggaaggctgaggcaggagaatcgctt

SEQ ID NO: 26058 - DNA, 1040 bp, Artificial sequence
  DNA replication origin
cagtcagctccgcgccgtccccagcagagcccccggcgcaccagcgcctgcttttccttccccgagcgcctcaagcagtctctgggccgcaggaacagccctctgaagaggcgcttgggtagaggccaccagacactcagcaaacgcgccctcggccccgctcggctgagcgggagggcgcagggcccgcggctggacctgcaaggggagttccggttctgctgaagtttctttagggccttcagcagcgtcttcggcgcctcctgtagtcgccgctgtcctcttgtagtgcagggatgggagggcagggtcaggagcccggcaacagaggccagtttcaagagctttgctcccctagggccggccccccctccctgcccaggcctgggtccctcccgggtgctctgaggcacccccggacatgcgcatgtcttagtcgctcctgaaagaaattggcttgttgtgggcactcttttcatctcattcatagacaggagtgcattgctgccggacggaaagccagggtcacatgggactccattagaatgaaacccttacctaatgcagtatatatttgggggttttctgaagttccatttcttagcaagaagcctcggtgacaacgggaaagggccaggggccaggggccgcaggtccgagagcaggtctggggtggcgcatctggggtggcggggcgggatttccctagcagggcttccacgccacgttgggcactgcctcattagccacgcacatggggtcttactatggtcattacataggtgtcttgtccgtccgagtgatgcagttcctgggaggtgagggtggcgttaatgacagctgggtggcagcagggccccttcaaacaacacaagcaagatggggccaaagcagcacagcccatcgtctcggggtttcggggtcttgcttcctcaggaggtgggggcctctcgactgtaacacccagtggaaaacgttcaagacttacaggaaagccaccagaacatgatggggaggtttatttacaccactgtcccctt

SEQ ID NO: 26059 - DNA, 915 bp, Artificial sequence
  DNA replication origin
cgggggctgcttgaggccgggggacttcgagccgctgctgcaccactcgctcccagcccaggaggaaggcgccggctggcgttgcgctctgctcggactcagggcaggagcgggggaggtctgcgaaagccgggagcgagccggggagggcccgcgaactggagaggctcggcgcgccgctgcggacgcggcggatggccgaccacgggtgccaggggaggcccaggctgcggcgccgcagggcagcccccgcgcccacctgcccctgcgcgccggccctggcgagcctctgtggaggtcaggggaccgtagcctctcctggggttcctgcctagcgactgaggggcggcaggaggcgcagctccggtttcccgcatgcagcgccgcgtgctcgccgcctggttttgtccgggtcaggcagaccagccccaggacgcgcccagccgacccacgcatggcaacctgcccttcttggcaggagtcgcagagggctttggcttctgaggtggaagtacctgttatgtctcctaattccggagtttgcgggggtttgggctggcggggggctcattgggaaaatgcttttcaaagcattctgtttggctgccgtgagcacctatttgccttatgtgcatattgagaaatgtgtgcttctactaaggttagtcgctgagcccagggacagtgtaggcctggatttcaaatgcattaattagggtccagcacccagcctagagacttccacaaatgcagtagttatttcgtcacggggactgaatgcggagaaagtagccacaccgttataggcaattgttatacccttgtgatcctgcagaaaacctgtttcttaaatgtgcttcccccctctttctttctatgtactttcagtgccttgcagaactaggagtaacgtgc

SEQ ID NO: 26060 - DNA, 1672 bp, Artificial sequence
  DNA replication origin
ttctcccgcagagtttggagaaagcggcagcagagtgtgctgccgcaggctggagcctggaacctggagccctggagccttgaatggtgtgtggtggcaatggagagaggcagctggcagtgacagctgctccgtgcttggctacaggaaggaaagaaggagaaggcacctaccataggctgtaggctagagcctgcaggactgcggctggcctcgctggctcgcctccctggctggcctcgctgtggttggtggcagcgacggatactgcagctggccagagtgtagaaaggcaatggggtaggtaagctatccagggctgcccgcggcgggggctggttggggtattattccgggtgtcactactttgggtgtactagagtgttattttgggcgtcactgcttttaggtgtgctatccggggctgcactgccctcagcagcgggtggggggggggttggtggggggcgggttggggtcactatcttgggctgtattgatggcagcagtagggctggttgggggcgctattgggtgctgcactgcccgcgacaggggccgggttggggctgctattgtggttgcactgccggcggcatggtggtgggagggctggttagggtgcggactggtgggggtgcttactggtcgggcttcattgctgacagcggggtggggatgctatctggggctgcactgcccatggtgggggcttgttgggggcgctatgtggggctgcaatgtccatggcaggggagaggttagaggcagtatcaggtgctacactgctggtggtggggcggggcagcggtgggtgcgggtaggtgcttggagggtgcggtttcgggcgctatcgggccagactgcccatgatagagggcaggtttgggtgcgctactaggggatacactcctcacagcaaggggcggtttgggggtgatacccggccggtggcaggcggggtggtggggtgggttgtgggcaccgttcgggggctgcactgtggtcagtggcggtggggcgagttaggtgctctatcagctgctgcactgtttgtggtgggggctgggtttggtgtgctatcggggaccatatttttggcagcggtatacaggttaggggtgctgtcggaggctgcactgcccatggcggggtgcgggtggggtgcactatccagggcatcattccccctgggtgggggatagttgggggtgctatctgctatgtagggctgcactgctcgtcgtggggagggggttggggaccttaaggatccatggctgcactattgacggcatggagcaggtggccgtgctctccggggcatcactgcccacagccgggggttagttggaggtcctatccgtggctgcatggccgacggcagacggtaggatgggggagttatctggtgctgcgacgtccgaggcagggatgggttgggggcgctattgggttttacattgcagcggcgaggggcggtgttgggggcgctatcccagagccaacatcaggcagcggattaggggcgccatcaggggctgccttgctggtggcggcagagcttgcagcaacagggtctccaaggaaggagccttcttcctctttctggatttcagactctaaaaggcgatctcctcctgctcctgctagagcgcagcgagcgcacggc

SEQ ID NO: 26061 - DNA, 1162 bp, Artificial sequence
  DNA replication origin
atcctttaggactgtgaggtgccctgaacatcagggatgtggggtaccccaaccatttaggactataggctgccctgaaatgacggccagggggtaccctgaccttttagggctgtgggacacactgacttcttaagactacggctggtgcctacaggagtccaagggataccaggcctatgtggggagggggcagaggtagaaaagcaatgggggaggtgcggggcatcggctgtccctgccctggagaggatggggccagccaggtaggtgtgcagccaggaccactcaaggactcaagggagagatgcggtcggggagagaggagtgggggacggggagagaggagggggggatggggagagaggagggggggacggggggtggggagagaggaaggggtgccggggagagaggaaggggtgccggggagagaggaaggggtgtctgggagagaggaaggggtgttggggaaagaggggaaaggggacagagggggcggggacaggagccggaaccggggtcacacgtggaaggccaggaccctgggtcaggagtgggagccaagacccggggtcacatgtggggctggccacctgactggagtgtggtcttcagtcatgctgtcaccaggctgtgggacctcagggatgcagtgagggagccaggcctcgggggcccagcctggattctgccgactcccatccctcagcctcaccaagaggccactgacttcgtcactgcacagagatcccatcctggggttctggggcctgtgcaggagaaacacaggtgcagggccacgtgcccacaccgctggcatctgtgctccacaaccaaactcctagagccatcatcatctctgggctgcagtgcccgccggtgacaactccctgaccacctcgctgtggtcacactcctgtccccgtgggtagaaaatccagtgatgcgtgtagacaaagagccctctgcacacctggaaccccagcgccttgggaggcccaggtggggggatcacctgagctcaggagtttgagaccagcctgggcaacatggcaaaacctcatctctaggaaaaatttaaccatcagacggacacggtggtgcacacctgtaatcccagctactaggaaggctgaggcaggagaatcgcttgaacccg

SEQ ID NO: 26062 - DNA, 1686 bp, Artificial sequence
  DNA replication origin
cgtggtggtgggggcctgtggtcccagctactttggaggctgaggtggaaggatcacctgagcccaggaggtggaggctgcagtaagcttagattgcagcactgcggtccagcctgggtgacagagtgagaccccatctcaaaccagaagcaccaaaaggtgtctgaggtcaggcacggtggctcacgcctgtaattccagcactttgggaggctgaggtgggtggatcacctgaggtcaggagttcgaaaccagcctggccaacatggagaaacaccgactctactaaatatgcaaaaattagctgggtgtggtggcacacacctgtagtcctagctactgcagaggctgaggtaggagaatcgcttgaacctgggaggtggaggttgcagtgagctgagattgcaccactgcactccagcatgggtgacagagtgagaccttgacgggggcggggtgggggtgggatggaccttctggggatggacctaagatggtggtaggagcctctacaagtggaattgtgatgtgcacagcctgggtaaatggggttggctatatttagactttagtggggacatagcctattattttttaacaccattgaactcagaatcgggacccagatttgccaggacagcgcgggacagagacctctcctgggctctgtgtcccctgttaatagactgagagacagaatgagagcttcgaagatgctgtgggaggagtgctggacgtctccaggtggtgagctcaggaacgtgtgtgtgtgagtgtagccatcaatcctgggctctgtctgccctgttaacagactgagagatggaatgagagcatccccaggtggtgagctcaggaaggtgtgtgtgtgtgtgtgtgtgtgtgtgtgtgtgtagccatcaatcctgggctccgtctgccctgttaatagactgagagatggaatgagagcgtccccaggtggtgaactcagagacgtgtgtgtgtgtgtctgtgtgtgcatgtgtgtagccgtcagtctcccgggctccgtcttccctgttaatagactgagagacacaatgaaggcatccccaggtggtgagctcagggacgtgtgtgtgtgtgtgtgtgtgtgtgtgtgtgtgtggccaccaatctcctgggctctgtctgccctgttaatagagatggaatgagtgcatccccaggtggtgagctcagggacacgtgtgtgtgtgtgtgtagccgtcaatctcctgggctctgtctgccgttaatatactgagagacggaatgagagcatccccaggtggtgaactcagggacgtgtgtgtgcttgtgtgtgtgtgtgtgtagctgtctcctgggctcctgggctccatctcccctgttaatagactgagagacagaatgagggcgtccccaggtggtgaactcagggacgtgtgtgtgtgtgtgtgtgtgtgtgtgtgtgtgtgtgtgtggccaccaatctcctgggctctgtctgccctgttaatagagatggaatgagtgcatccccaggtggtgagctcagggacacgtgtgtgtgtgtgtgtagccgtcaatctcctgggctctgtctgccgttaatatactgagagacggaatgagagcatccccaggtggtgaactcagggacgtgtgtgtgcttgtgtgtgtgtgtgtgtagctgtctcctgg

SEQ ID NO: 26063 - DNA, 1393 bp, Artificial sequence
  DNA replication origin
ggcggcggctgctcctcgtcgttgtcgtcgtcgtcgcccggaaggcggccgcccccatctccccccgcgccgcagggtctgtcactgcgggccccaggccggccgttacccagggccgcgggcgcggcgtcgcagcctagggagcgatgggggccgcggccgcggaacgggcgctggagggggagggacgcaaggcggcagtcgcggagggatcctgccgggacttgccggccttgctgctcccgcgcggcggacgggcggcggacgggcggcggcggcgacggcgacgacggcagagcaggcaccggccgaggagcagagggatcgtcgcgctcgcggctgacgggcggccgggaccagcagaagtgggcggggtggccgcctctccgggcagcccgggccggccgggcccaccctcccccctccctagctgattggctcaggcggcccgttctccgcccgtgattgtgccgggtccccaatcccattcgcccatgccgcggccacgccgccctggggggctatggatcatattggagccaccgcctctagtctctcggcggccgtcaggacgcgattggtccgcggagagcagagaggcggaaaacccgggctggatttctggtggcttttgttcccgcaaatttacgtggagcattgtttttgggcgaaaacggggccttcggccttcctgctttattcctgagcggtgtaagagggaggtagtgggtatcttcgagaaacggccgccgcggggtccggagccccgggttccaatcccgggtcggccactgctaagctgtgtgaccttgggtgagtcacttggcctctctgagccccaggcgcctccccgggaaaatgagggtaatagtaaccgctcccgggggtttgtgcgaaggtgttcagctcacagagggccggcaccggcacttttgaggcggctgacttgccctgggggtgtgatgggaggtgcaagctttctccaaaagcctcctccaaatggagcctttaaatccgccttctttccgcggctactccaccagctcgccaaaccgagaaaatgcaaacacaggggcgggggcaagggagctgacctggctggaagtaaacagaaacgccacccctcccctggcacttgcattggcaccggaggattgcaggtgggggaagggcctctgcacccaaccacctttaaatcccaccacttacacacaggcaaagaagcagagccgtggcggctggacgctcattcctcccctgcccttcccctagagcgctgctttgaatgtctgttgatctagaacggggtctgttcattcatgggttccaggtcccaagcgcccgggggcagctgagagcaaagctggcgccctccctaccccgtggagctcac

SEQ ID NO: 26064 - DNA, 1620 bp, Artificial sequence
  DNA replication origin
caaacactttgcgttttcagttctgaaacacttagacaaaagttcacatcgctaagtggatggccaggatgcccttccggttcaatttggagacgggagatctttaacctaacctaacattctttaaggcaccagtgccctcctactcaaacgtcagcctgggttttgtttctaagggtcgccaataaataggtttcatgggcatttaaggctctaggagtctttttctgtctgttacaggtagcccggctcttaaaaacgatcacacacaacgctcacaggcatgtgcacattcataaatacacacgtgtgcacacatacatacccacatgcgacacacgcgtacatcatacagcatgcacgtgtccataaatgagctcacacggacagccacgtcccgcgcgcaggcccccagcaacacaggccccaagcagggcctccacctgtatggagtgagcagctcagaaggcgaaggccggtgccttgcaatgttcacctcacccgcggcttctggcatggccacggctccttccttttctagtaataaataccagatttggggaaaccaaggcgccgcaatgtgtgttatctgtcacccaagggtcccattaaggggacaaaggccttatcgcgtttgcagccggctaagtgaaaggagggcacttgggactgtgagctctgaccgcggacgtctcccgcaccgctcccgcggatcctcggacccagggcccctgcagccgctcctgcccaaggggcgcgaggcggagatctggaggctttggggcacgcagaggagactgagggtgtgggctcagggccgcggtgcggtcttggggcttgaagtgcagacttagggtgaggagtgcgggcttaggatgggggcttgggacacggggtggggacttcggatgtacggtggaggcttggagaggtggggcacacatttgggatgcgacacagaggcttaggatggggcttgggacacgggctgggggctcgtggtgcaggctggaggcgtgggtgggggggtcgcggcgcaggcttggaggcctgggtgggggctcgcggtgcaggctggaggcttcgcatacagagttggggatgcagggttggggtacagagcagaactcggggcgggcacgcaccttgtggcaggccaggcaggtggcccccgccgccgttcaggctgctctggatctgcgtgagctcctggcacagcacctgcttctggtggaagctgaaggcgcggtggttggaggacatggtgaacggcagcaggaactcatcgcccgtgcggccctcgttgagctgcagcccgtagttgtggatgatggagtcacgtgcgtgagcttgcggtagagcacgcccgccgcctcgctctgctccgagcccagcagcgccagcgacaccagcagcttgctgcgcaccacctcgtccgtcaggttggtgaggctgcccaggtcggccgggttgttggccttgatctccgagtcgcgcagcgagtggtagtccttgcgggccaggtcctccaggcacgagccgaagaagcggacctcgagcggcatgcacaggtccagcaggccgcataggaactccacgcgctgaggcgacggcagctcc

SEQ ID NO: 26065 - DNA, 1429 bp, Artificial sequence
  DNA replication origin
actccacccggacacaaatagatactcacagaacttgcacgccacctctgggagattctcctgactccaggttcctggtagagtatctttcatatgtgagaactcaggctattttccagtcggttcctgccttcactgcaccccgactcccgggccttttttctattcttttcctcgattctgtttcttttccaccactgatcagtttcgcctattctaaaacttcatttaagcagaatcatggaattcctgttggctgcgtgattttagtggctggtctagggatgacagtgtagattctgaactttccacattgcattgtgccacacgtcgtgcagtgtgtcatttctcaaagcacttatatgtgtgggttgttttttaaataggtggaaggcttttaaaccagcataccattaatattgtattgaggaagttaatttatcaatgttatttttccttttacaattgctaataaagatatgaggtgaggagcagcaggctacagagaggagtgatgcctgggggcgtgtcagtgttttaggcacctgcagtgatcggcagcagacttgggagcaatgcggtggaggcgtgtcattgttccccaggtgtgatgcgatgaggggcagcaggctcggggatgcggtggaggcatgtcggtgttacccaggtgtgatgtggtgaggggcagcagtctcagggggatgcggtgggggcgtgtcggtgttacctaggtgtgatggggtgaggggcagcaggctcagggggatgcgatggaggcgtgtcattgttccccaggtgtgatgcggtgaggggcagcaggctcagggggatgcggtgggggcatgtcggtgttacccaggtgtgatgcggtgaggggcagcaggctcagggggatgcggtgggggcgtgtcagtgttctgcaggtgtgtgcggtgaggggcagcaggctcagggggatgcggtgggggcatgtcggtgttccccaggtgtgatgcggtgaggggcagcaggctcagggggatgcggtgggggcgtgtcagtgttcttcaggtgtgtgcggtgaggggcagcagactcaggggagccatgtggtggaggcatgtgagtgttccccaggtgtgtgtggtgaggggcagcaggctgcagggggatgcggtgggggtgtgtcggtgttccccaggtgcaggaggctgctctgagggtgtcgcatgtatttcatttaatcctcataacagctccatgagttaggttctatttttgtccccattttagcaataagaaaacagacacagagaggttaagtataaataatttgacaaagatgacatcagtgagtggctatttttattatgtgaagttaaaattgtttatgtgttgacttcatcatttaaagtgagaggaagaacctgaggaatatgaaatgagacga

SEQ ID NO: 26066 - DNA, 1261 bp, Artificial sequence
  DNA replication origin
tggagagtagaagcctgggagaaaaccaaaccaaacccattctcccattgccacccagagacactgtcaacgtgttgagctcatgggggaggtgtaggcttttcacactgtcaaggtctgtggtaaggaagtcaggcagcctgaaacctctctcttctaggtcccacagtccccattccccttccagctggaaacctgtgctgcaaccagaggaaacagaagtgggcaagaacacttaggggactgggtcctaagaccaaaggccggtcttgtggtagtaatgacagtttgtagcgggactgtgacatcactacattctactcctcggtggagttgttgggggggacacatgagtgcaatgcccaagttgccgctttgagactggggagggggtcacaaaattgggagccaggtccttggagacgtgaccccaaagagccccgggaggtcaggcttggggcggcaggaggtgagggccaattaaggagcaaggagctccaggagtcacatccccaaagtcaccctgtggcaactggtgagggcaggttctggggcacccaggtccttggagatgtgagctcaaggagcccagggaggtcgggtttggggtagcaggaggtaagggcggagtatggagttggaagccccaggagtcacctgctcaaagtcaccctggtgtgccgggcagagcaggggcaggacttatgagggggttgggctggctgacaagattttggtgtggggagcccagaggcactggggtggggggcccagcctggtgtccctcaggagtggcacagactctggcagcagttcggctgtcagagggggcctcgggttgggttggggtgttggtgcgtttacctgttccttggcctcggccaatttgctctgtctggtttctttggacatcataggatgggtagggaggtggggatgggtagggaggtggggatgggtagggaggtggggatgggtagggaggtggggatgggtagggaggtggggatgggtagggaggtggggttggggccacatcagcatgatccaggtgaggacaagtatatacctccagtcacctctacgtcgctgtgtgactgagccagaggaggcgtaaccagggctgcactagaatgcagaataggggtgtggccttcatgcttgaagcccattggtcaatgagaaagatgaaaggaaaaggaggtgtggccagacagcagcgtgtcatcaaggacctgtgttgtcacaaggaaagctgcct

SEQ ID NO: 26067 - DNA, 2480 bp, Artificial sequence
  DNA replication origin
caagagttagggcttaaaaatatttttttaaaggatcatggatgaaaaccattattttatagattacatttatttatttatttatttatttatttatttatttgagaagtagtctcactctgtcacccaggccagagtgcagtggcgcaatctcggctcactgcaagctccaaccccggcttcacgccattctcctgcctcagcctcccaagtagctgggactacaggtgcccaccaccacacccagctaattttttgtatttttagtagagacggggtttcactgtgttaaccaggatggtctcgatctcctgacctcgtgatccgcccacctcggcctcccaaagtgctgggattacaggcgtgagccaccgcgcccagcctatagattacatttatgtggctagctcatgattctgcttccttctgaggttcaaaaaaacactttcactattccagcagcagctgcaggcggaggctgaccacctgggtaaggagctgcagagtgtgtcagcaaagctccaagcccaggtggaagagaacgagttgtggaaccgcctgaaccagcaacaggaggagaagatgtggaggcaggaggagaagatacaggagtgggaggagaagatacaggagcaggaggagaagatacgggagcaggaggagaagatacgggagcaggaggagaagatgcggaggcaggaggagatgatgtgggagaaggaggagaagatgcggaggcaggaggagatgatgtgggagaaggaggagaagatacgggagctggaagagaagatgcacgagcaggagaagatacgggagcaggaagagaagaggcaggaggaggagaagatacgcgagcaggagaagaggcaggagcaggaggcgaagatgtggaggcaggaggagaagatacgggagcaggaagagaagatacgggagcaggagaaaaagatgtggaggcaggaggagaagattcacgagcaggagaagatacgggaggaggagaagaggcaggagcaggaggagatgtggaggcaggaggagaagataagggagcaggaggagatatggaggcaaaaggagaagatgcacgagcaggaggagaagatacggaagcaggaggagaaggtgtggaggcaggaggagaagatgcacgaccaggaggagaagatacgggagcaggaggagaaggtgtggaggcaggaggagaagatacgggagcaggagaagaaacgggagcaggaggagaagatgtggaggcaggaggagaagatacgggagcaggaggagaagatacgggagcaggaggagatgtggagggaggaagagaagatgcatgagcaggagaagatatgggaggaggagaagaggcaggagcaggaggataagatgtggaggcaggaggagaagatacgggagcaggaggagaaggtgtggaggcaggaggagaagatacgggagcaggaggaaaagaggcaggagcaggaggagaagatgtggaagcaggaggagaagataagggagcaggaggagaagatacgggagcaggaggagaagatacgggagcaggaggagaagatacgagagcaggaggagatgatgcaggaacaggaagagaagatgggggagcaggaagagaagatgcaagaacaggagaagatgcggaggcaggaggagaagataagggagcaggaggagaagatacgggagcagaaggagaagatacgagagcaggaggagaagatatgggagcaggaggagaagatacgagagcaggaggagatgatgcaggaacaggaagagaagatgggggagcaggaggagaagatttgggagcaggaagagaagatgcaagaacaggaggagaagatgcggaggcaggaggagaagataagggagcaggagaagaagatacgggagcaggaggagaagatacgagagcaggaggagatgatgcaggaacaggaagagaagatgggggagcaggaagagaagatgcaagaacaggaggagaagatgcggaggcaggaggagaagataagggagcaggagaagaagatacgggagcaggaggagaagatacgagagcaggaggagatgatgcaggaacaggaagagaagatgtgggagcaggaggagaagatgtgtgagcaggaagagaagatgcaagaacaggaggagaagatgcggaggcaggaggagaagatgtgggagcaggaagtgaggctgcggcagcaggaggagaagatgcaggaacactaggtgaggctgcaggagctggaggagaggctggggaagctggggcagaaggccgagctcttggggggagcaggcggaggtgtgtgcaaaccctggagatcatacagaacgacctcaccacaacttagcagatggtggttggctccctctgcttttccaccagtctgtggcctacagtttaaatggtgggaagaagggtgtgagatttgaggctggggagg

SEQ ID NO: 26068 - DNA, 786 bp, Artificial sequence
  DNA replication origin
tgcgtgcggcggaaatccagccttccggcgcccgctgttggccttggccgcagccacggcgctccaagtaggaagataagcgggattgctggaagcgggagagtcgggaggagcggcgaagggctcctcttccccattggctgcgcccacggagcagcctcgttgcgattggccgtacgcggggggcggcagtcccgcgtcggcccgcccctcgggccgcgagaggcgccgggatcgcgggcgccggctgagccagcggctcttgggaggctgcgtccgcgcgccggcggggcgaggcggccgggccctgcgcgtcaggtcctggcctggggcacctgggcggccggtggcgggggcggtacgggcgcggggctggcgggcggccgagcccgggaggcgggcgtgggcgcggcggccgcaccggggcctgcgcggaccacccgcggggcagcctcgggcctctctccatctcttaagtggtggtggctgtgggtttttctgcaggcgatccttttgagtaatttgtttcacgcacgcgccctgctgtggggtaaagcggcagattcatgctgctgtcatttgtcgttaaaacgatgggctccctgttatgtgtgtgtacttcttggatttgagggcagggggatgacattgtaacttggcttcctgtgaccgtccattctcaaggtctcgtcagcgtggtgcagaaactcggcacaccctgcctaccttggaagcaggctttcccttccccacctccctctctctccatctcttccctctttccct

SEQ ID NO: 26069 - DNA, 1426 bp, Artificial sequence
  DNA replication origin
ggttagggcttcaacatacgaattttgcaattctgaattcaacccgtaacactggcttcaaacaacaaatttgttctctcagagttctggagaccagaagtcccaaatccaggtgcgggcagggccatgcttcttccacaggctctaggggaaggtccttccttactttgtccagcttctgggagctccaggcttccttggtgttgggacgcattgtgccagtctctgcctgcgtcttcacatggcccctgcccctgtgttctgcatgtccttttctgtctctgaaaggactctttcattgagtttctttgactctaatccaacatgatgtcacctaaattcttaccttaatgacgtctacagagacctcattaaataagatcatattctgaggttccgaatgtatgtgaagttggaggacaggcacagtttaatccataaagtgtttgtgtgtgtggagagtaagtatgagaaatgtgagctgagggagtggggtgagtgtgcatgtgactgagagtgagcacgtgtgagtgtgggtgggtatgtgggcgtcctccagtgtgtgtgagagcatgcgtgtattagtggtgtgctggagcgtccgcacatattgatgagagtgagtgtgttagcggtcgatgggcaagtggctgagcgtttgtgttgcaagtgtgatggtgtgtttgtagcatgtggttgtgtgggtgtgtgtatgtccatgagagcatgtgagtgggcaggtgactacattcaggtgaagtgggagtgaaagcgtcggtgcattgagccaatgtgtgtgtgtgagggtgagcacgagggaggcatgagtgtgagtgtgaggggattactgggtgtgcgaatgagacacccagtgtaagtgtaagtcagtgagggttggtgagtgtgaggaagtatgagtgggtggcaggcacaagtgtaagtgtgcgattgagtgtgagcatttgtgtaaatgtgtatgagtgccttgtgtcagtgtgagcacgagtgatgttattgtgaatgcgtgtgagtgaatgtgagcattttgcttgtgtcagtgaatgggaggttataacagtataggtgtgagtgtaaagtgagaaagtgtgtgggtaaaggtgtgagtgggtgagtaatcggtcattactagtgttgaggagtgtgagtgcatatgtgagtttttgtatgcattgggaggggtaagtgtatgtgagagtgcatgggagtgtgtgtcagcttgcatctgtttgtgcatacgtgtgactgggattgtgtgtgtgttagtgattgcgacagtggtgtgagtgcacctgaaagtgtgagggtgggtgtatgagtgcccatgagtgtgtctgaataacttagtatcagtgtgagtgtgaggatgcatatgagggtgtgagagtgagtgtgtgtgtgtgtgtga

SEQ ID NO: 26070 - DNA, 954 bp, Artificial sequence
  DNA replication origin
tccagctggaaatttgtcctgtgaccagaggaaccagaaacggggtgagaacgcttaggggactgggtcataagatcaaaggccagtcttgcagtaacggcagttactaggtgggctgtgacatcacaacattccaatcctcctggtcagggggagggaccgtgtcagcaccatgtctaagtcgccgctccacgatgggggagggaagcacagggttgggacccagctccttggagacgccagcacaaagaacccagggaggtcgaccttgaggcagcaggaggggagggcagagtctgcagcagggagtcccaggagtcaccagcccaaagtcacccagggatgattggcgagggtggggcctggctccttggagatgagagcccaaagagcccagggagatcaagcttggggcggcaggagatgagggcccagtaacggagcgggaagtcccaggagtcacccacccaaagtcaccctggggtgattggcgagggcaaggactgggctgctttctgaaggggtggggctgactgacaaaactttgatgggggtagcccaaggcaccggggttggggggaacagtccagtgtgcctcaggagtcgtatagactctggcaggggtcttgtcatcagaggggatctgtggctgggttgaggggctatgacctagtgcgtttttacctttttcttggctgcagccaatttgttgtgttgagtttcttctgccatcgcagggtggggagggaggcagggttggggccacagcagcaaaatcgcaatgagaaccgatcaaggcctccagtcaccttccaggcagctgtgtgactgagccagaggaggcgtaaccagggccccagtagaatgcggaataggggcgtggccttaatgctccaagcccattggtcaatgagaaagatgaaagggaaagggggcgtggccagacagcagcgt

SEQ ID NO: 26071 - DNA, 1049 bp, Artificial sequence
  DNA replication origin
cctctggaacactgcttcccacggctgccgccggagctggacgtgggcggcggcggggcctgaggtctggggctcgggcggtgggcgctgctgtggccggcgcgcgtgggccccggcgaggcggcactgcaggagctttgcgggcagctggagcgctacctgggcgcggcggcccacggctgtggctgcgccaccgtgcgcgacgctctcttcgcggctaacggccgcgcggccgactgcgagagcccgcgcgagtttcgggagcgggccctgcgcgcctgatgggtcgaggcggacgcgcggctgcgtcaggtaagcgaggccgggccgccggcgtttgaccgcgcttgggtggcctgggacccggtgggaggcttccccggcgccgagagccctggctgacggctgatggggaggagccggcgggcggagaaggccacgggctccccagtaccctcacctgcgcgggatcgctgcgggaaaccagcgggagcttcggcagggcctgcagagaggacaagcgaagttagagcctagtgtacttgccgctgggagctgggctaggcccccaacctttgccctgaagatgctggcagagcaggatgttgtaacgggaaatgccagaaatactgcaagcaaaactgaaaacaacccatccatgtaggaaagaataacacggactacacgtaagcaattccaagtctgtgtctgcggggacgtcgcaagtgggataaaatggtttaaaggaagaaatggcttttaggagttagggtgttttgttttaagtaatacagacttggtcaaatggaaagccggtagaaagtgagctttattcatcagtttagaataaccgcattagtgcccttttaagcttgaaagaggtagtttgagagagtaattatttgagtggtaaacttactgaacttaaggggacggggaagtacatgttcatagaagggtttaggagaaagtatgccttctaaatccacacctacagtttactaagcagagccaggctggagtctcggctcactgctcttattaacctg

SEQ ID NO: 26072 - DNA, 4594 bp, Artificial sequence
  DNA replication origin
atttcctcctccttatctgtgcccctacccccaaccaaaagaatgggtttagagaatcagatatacctgggtgttgaaatcccagctctaagtgatcttaggcaagcacttaacctttaataccccatgttcttcatctacacaatagaggtgataatgataactgtctcctgtggtggctgtgaggattaaatgggattgttagcatagtgcctggtgaagcactcaagaaaggttccaacagtggtagtaataacagtaataacaatagcaatattatctgatcgctctgggcccgttagccagctatcaattcagtctctttccctgtgccttccacccttactgagttctctgaaaaacaagtgagagccaggtgcagtggcacatgcctgtaatcccagctacttaggaggctgaggcagaagaatcgcttgaagccgggaggcggaggttgcggtggggtgagatcgcgccattgcactccagcctgggcaacaagagcgaaactccatctcaaaaaaaaaaaaaaaaaaagaaaggaaaaacaaatgagaccatgggtttggaaacgccttgagaacatgtcgggtgtgactgagagggagcaagtgttactgtggagtatcagtgtagctgtcgttactggtcgtccagctgctcctctgcctgctgtatcctgacttgacctttctctatttgcagtacatcgaggagttaacaaaggagagggaagccatgagtctggaactgtacaggaacacgtaggatgggggaaggtgggatgggaggtctgggggcccttagcgtgggtggtgtgctgggaggtggggggtacaggtgagcatggtagggggtcatacaggtttacatgtgtgtgcagggaagctccagtgacggctgtgccactgactcatggggtagcctcaggcaactcatgtcttctctctggcctgccacctgggacttttaattcctggggtcccttccaatgccacggttctgtggttgtggggcgagggtagagggtcgatcaccaaagcggtcctttctgttcttcgttcattcctttctctactgcctccggccatagcataaccaatgaggagctgaaggagaaaaatgccgaactacaagaagaacttcaactggtagaaactgaaaagtctgagatccagctccacatcaaggagctaaaaaggaaactggagacggacaaaatcccgctgccacaggtgagcggctgcagccccgggggtgtgggagccgcatccggctgggacatggtctagggatcatgcagggtgtggggaggctccagccaagagctggaaaatttgagtccttgttctggtcccaccatagaatcctctagagtgtgctaaaaatctacaatttgggaccatgcctgggaaatcagaacctcagggttagggcttaaaatttctttttaaagaatcatagacgaaaaccgttattttatagattacatttatatacctagcttatgactctatttccttttgaggttcaaaccaacactttgcaggagaagatgtggaggcagaaggaggagctacaggatcaggagaagctacggaagcacaaggagaagatgtggtgacaggagcagaggctgcgggaccaggagaaggagctgtgggagcaggagcagcaaatgcaggagcaggagcagcagatgcgggagcaggaggagcagatgcgggagcaggaggggcaggtgcgggagcaggaggggcaggtgcgggagcaggaggggcaggtgcgggagcaggaggggcaggtgcgggagcaggaggggcaggtgcgggagcaggaggggcaggtgcgggagcaggaggggcaggtgcgggagcaggaggggcaggtgcgggagcaggaggggcaggtgcgggagcaggaggggcaggtgcgggagcaggaggggcaggtgcgggagcaggaggggcaggtgcgggagcaggaggggcaggtgcgggagcaggaggggcaggtgcgggagcaggaggggcaggtgcgggagcaggaggggcaggtgcgggagcaggaggggcaggtgcgggagcaggaggggcaggtgcgggagcaggaggggcaggtgcgggagcaggaggggcaggtgcgggagcaggaggggcaggtgcgggagcaggaggggcaggtgcgggagcaggaggggcaggtgcgggagcaggaggggcaggtgcgggagcaggaggggcaggtgcgggagcaggaggggcagatgggggagcaggaggggcagatgggggagcaggaggagcagatgggggagcaggaggagcagatgcaggagcaggaggagcagatgggggagcagaaggagcagatgcggaagcaggaggagcaaatgggggagcaggaggagcaggtgcagaagcaggaggagcaggtgcaaaagcaggaggagcagatgcggaagcaggaggagcagatgcgggagcaggaggagcagatgcgggagcaggaggagcagatgctgaagcagaaggagcagacagagcaggaggagcagacgggggagcaggaggagcagatgcgggagcaggaggagcagatgcgggagcaggaggagcagatgcgggagcaggaggagcagatggggaagcaggaggaacagatgtgggagcagaaggagcaaatgtgggagcagaaggagcagatgcggaagcaggaggagcaaatgggggagcaggaggagcagatgcagaagcaggaggagcaggtgcgaaagcaggaggagcaggtgcgaaagcaggaggagcagatgcggaagcaggaggagcagatgcggaagcaggaggagcagatgcggaagcaggaggagcagatgcggaagcaggaggagcaaatgggggagcaggaggagcaaatgggggagcaggaggagcaaatgggggagcagaaggagcagatgcggaagcaagaggagcagatgggggagcagaaggagcagatgcggaagcaggaggagcagatgcggaagcaggaggagcagatgcggaagcaggaggagcagatgcggaagcaggaggagcagatgcggaagcaggaggagcagatgggggagcaggaggagcaggtgcgggagcaggaggagcagatgggggagcaggaggagcagatgcggaagcaggagaagcagatgctgaagcagaaggagcagatgggggagcaggaggagcagatgggggagcaggaggagcagatgcggaagcaggaggagcagatgcagaagcaggaggagcaaatgggggagcagaaggagcagatgcggaagcaggaggagcaaatgggggagcaggaggagcaaatgggggagcaggaggagcagatgcggaagcaggaggagcaggtgcaaaagcaggaggagcagatgcggaagcaggaggagcagatggagcaggaggagcaggtgcgggagcaagaggagcaggtgggggagcaggaggagcagatgagggagcaggaggagcagatgggggagcaggaggagcagatgcagaagcaggaggagcagatgggggagaaggaggagcagatgggggagcaggaggagcagatgggggagcaggaggagcagatgcggaagcaggaggagcagatgggggagcaggaggagcagatgctgaagcaggaggagcagatgctgaagcaggaggagcagatgcggaagcaggaggagcagatgcggaagcaggaggagcagatgggggagcaggaggagcagatgggggagcaggaggagcagatgcggaagcaggaggagcagatgggggagcaggaggagcagatgctgaagcaggaggagcagatgcggaagcaggaggagcagatgcggaagcaggaggagcaggtgggggagcaggaggagcagatgcgggagcaggaggagcagatgcggaagcaggaggagcagatgggggagcaggaggagcagatgaggaagcaggaggagcagatgggggagcaggaggagcagatggggaagcaggaggagcagatgggggagcaggaggagcagatgggggagcaggaggagcagatgtgggagcaggaggagcagatgcggaagcaggaggagcagatgggggagcaggaggagcagatgaggaatcaggaggagcagatgggggaggaggaggagcagatgcggaagcaggaggagcagatgggggagcaggaggagcagatgaggaagcaggaggagcagatgggggagcaggaggagcagatgcggaagcaggtcgagaggctgcgattcaaggaggagaggctgtgggatgagtatgagaagatgcaggaggaggaggagaagatccgggggcaggtggagaagatgggggagaagaaggagaggatgggagagcaggaggagaagatgcaggaggagcggtgctcagagccctgcctccctccctccaaatatccttgtgatatgagccaccctggcagcctggagcctgcacgagaagccgggaagggttattcccatgaccaccacactgcacagcagatcatgcagctgccccctggaatgaagaacgcccag

SEQ ID NO: 26073 - DNA, 1626 bp, Artificial sequence
  DNA replication origin
caagcggcgaggtagggcgggcggcaggcggcaggcggcgggcgggtgggggaggcgggcggcggagaaggcggtcgcaggtgggggcgcccgggtcggggcaggggacggggtcggggcccgggcccaggttgggggaaggctgcgcgggcgggtgctccccgcggcgtgcccaggctgccgccgcgtcctggcgctcgggcccgggagcggcccaggaatcacaggtgcgtcctgagcgtccggcgcttcgccgacgccacggcttttctccgttctcagcggctggagcggcttgctttggtgtgcgggcttccccggctgactttttccctcggtccaagacctgccccgcgccgcccggcagccctcgccgtggcccgcaacccgcggccgggagcctcctgcggacgcggtgctggggtgctcgagcccagcgcccgcctggaagcgccgcttcagccgatgcgcggcccgctcctagggtacgctcggtagagcaagacctgggatttccagtcccccgcaggggcctcgctggtgcaaaaggaagacccgggcgggctctcagggctgtgcgttcctggggtgctcttacggagcccgctgcgccttagacctgcaccaaatgaatacaagtgatcttcagtttggagaacacgcgcggcagatccaaaaccaagccctggacgggccaaggccacttcccaggtggatgtgccgcagcaccgcactccgtagtgctctgcggggtagagctctctgtcagtgtcgtttgtgctgggaggccccggacgggaccggtttgccaatgcaggatatggcaggctgtgaaacagtccgtttccattgcttccagagggactgagaaagtcttgtggttcttggccatactcttagaagaagaatattaagagctctctgggaaggatgtggcccccgactcttgggttgtgagagaaagtgaactcgtaatttacatggcggaatgcaggtgaaactttctctgagtgagccaggcgttggcttcagagaagagataaagggcccgacagtctcgaatgaaaatataaaatcatggataatttaaggaatttagctttaaagtgaaagcatagtggtctcccatacaatttaaatagaattaaataaaaccaagtatgattttccaaggatgcagatgtgtctgtctctaaggcacacagatacacacacaccgcagccacacttcagggagcatctgtccgtgtgacaggccccaggactgggtgagatggtcaacgcgcgtgaccttataaataggatggcctgagaaagcacctcacctccccaatccacggccctagcgtaagcatgaggaaaacaccacacaaaccggagtagaagaacatcttgcggccgggcgcggtggctggtgcctgtagtcccagcactttgggaggccgaggcgggcgggtcacaaggtcaggagatctagaccatcctggctaacacgacgaaaccccatctctactaaaaatacaaaaaattatcccggtgtggtggcacgcacctgtagtaccagctactcgagaggctgaggcaggagagtctcttgaacccgggagacagaggttgcagtgagcc

SEQ ID NO: 26074 - DNA, 1057 bp, Artificial sequence
  DNA replication origin
aggagcgccgggaggaagaggccgagccgggagagcccccgccccgggaggaaggggaggaggccgagtgtttcctggcgcattcccggccagcccgagtgactcactcggccaaggaaactcccagggcccgcccaggacccccaagccgccgcggacgcaggtgaggaaccccgctcgcccgcgcctgccctgcggcctccgcggggtccgggtccccctcggaacctgggccggccagggcggcggcggggccgggacggacccccccctcccccccaaccccggcggcgcggcctccccggcggcgcggcctccgggatcgtcctggtccccgcgtcccccaggtcccggccccgggctcccgcgcctcccgggctccaggtccccgcactccctgcactggcttcccggtccctgcgcccccggcctttcggcctcggccccgagctccccgcccccgcgttcaccgcctcgcgcccccggatcccggattccgcgccccggcacatggcacagctccagtggcgaaggaataccttagtgtttgacgtttttgttggaaagtaaggagcaggcagattgttaatgttgcactaaggtcgcgcagcaagatctgaacccgtttttgtttcgtgcccctgtgaggagcggagggagcctggtccgcggagccattccgggcattcttggagagaggagttttgggctttgttaaggaggcgcgatcgttacggaggcagcactgtttcgcacaagcatctgaattgtgtattttaaggctgaaatgcgtgagcttaatttgcagcacattgtgggtgtgacaagaagggtgcaagaataatcgggaaacggggttgatggaacgtgttttaagctgagaggggcgtctggacggtgtcagctccgctattaagtccagtcagggagcggctgctgattgagcccagcgccgcgtggtcgccgctggggactgaggctcgggagcgtttgttttctggcggcggagggcaccgtggctgcgccgggagcggtggtgtttcttgcagtcgtccgt

SEQ ID NO: 26075 - DNA, 1656 bp, Artificial sequence
  DNA replication origin
cctccccttcctcccggggcgggggctctcccggctcggcctcttcctcccggcgctcctccctcccggccgcggccccggccgctccctcctcctggcggggcatccccggccgggcggcccctttccccacgccagccgccgaaggtgtcctcccaggcagagagcccctggctacctgccggcctgggtcaccgcagcctgcgcgggacggcggggtcggagcggagcgggcgtggggtcctcctgcgggtccgtccggttcggagcgcgaaggaacggggtccgcaccctgtcccggggctccaccgggtcagggcgggggttggcctgagctgcggaaggagctcagggggacacccaggacgcccgtgtggcgccgccccacttggcaggaggcgctcacctgcgctcgtcgggagggttccaggcgcgggtcccagctgcaggtcggcgcgcagagcccgctggggacccccccggccggcccctgcggccccattgcctgcgggaaccagggacaaatccgtgcgcagacctgcgggaacggcggacggaagaaaacctgatttgagctcgtgccaaaaaacaatcttgaaaggccggtgaagaaacatacctcacacggaaacgctgagtggagtcagctggtcacaggcgtgtttaggaaaactgccctaaacgccccgctcagccgcagcaacctcactccccattcatccgcgacccctggttcttacggagaacagtaaggatgggcatcagatattctagtctggtctctagattatgaaggtttggttacccccgcttgtgctctgcggtaaggcaaaaagcagcaaatgaatcctgaccagcggattgagacaatctaccagttgactcaatattcggatatcactttctcacattcctgcaaaacaggggctttggataacattctggttcccagtccacacattttcaaatcagcagattactccttttctgtgcctagggtggagtctcaaaattagattccaaaggtttttacattgtagatgacatgatagaacccaaattcaagttatactgtgataatttaaaatattgtaatcccggccgagcgcagtggctcacgcctgtaatcgcagcattttgggagtccgaggcgggcggatcacctgaggtcaggcgttcgagaccacactggccaacatggtgaagaccccgtctctactaaaaatacaaaaattagtcgggcatggtggtgtgggcttgtaatcccagctactcgggaggccgaggcaggagaatcgcttgaacccaggaagtggaggttgcagtgagccaagatcgtgtcgctgcactccggcctgggcgacagagcaagactccgtcttaaaataataaaatattgtaatccctagagcaattaataaaaaataatacagctaaaaatccaagaaaagagataaaatagaatacaaaaatatgcttgatccaaaagaaagcaggaaggaaggagcaaaaagcacataaggcaaagacaaagagcaagcagttagacttcaaccacattagtaatcacattgaatgtaaatggactaaacatgtaatccgtttactaactgtaaatggattaaaacacagaaattgtcacattggattaaaaac

SEQ ID NO: 26076 - DNA, 1589 bp, Artificial sequence
  DNA replication origin
aggatcatggatgaaaaccattattttatagattacatttatttatttatttatttatttatttatttatttatttgagaagtagtctcactctgtcacccaggccagagtgcagtggcgcaatctcggctcactgcaagctccaccccccggcttcacgccattctcctgcctcagcctcccaagtagctgggactacaggtgcccaccaccacacccggctaatttttttgtatttttagtagagacggggtttcactgtgttaaccaggatggtctcgatctcctgacctcgtgatccgcccacctcggcctcccaaagtgctgggattacaggcgtgagccaccgctcccagcctatagattacatttatgtggctagctcatgattctgcttccttctgaggttcaaaaaaacactttcactattccagcagcagctgcaggcggaggctgaccacctgggtaaggagctgcagagtgtgtcagcaaagctccaagcccaggtggaagagaacgagttgtggaaccgcctgaaccagcaacaggaggagaagatgtggaggcaggaggagaagatacaggagtgggaggagaagatacaggagcaggaggagaagatacgggagcaggaggagaagatacgggagcaggaggagaagatgcggaggcaggaggagatgatgtgggagaaggaggagaagatgcggaggcaggaggagatgatgtgggagaaggaggagaagatgcggaggctggaggagatgatgtgggagaaggaggagaagatacgggagctggaagagaagatgcacgagcaggagaagatacgggagcaggaagagaagaggcaggaggaggagaagatacgcgagcaggagaagaggcaggagcaggaggcgaagatgtggaggcaggaggagaagatacgggagcaggaagagaagatacgggagcaggagaaaaagatgtggaggcaggaggagaagattcacgagcaggagaagatacgggaggaggagaagaggcaggagcaggaggagatgtggaggcaggaggagaagataagggagcaggaggagatatggaggcaaaaggagaagatgcacgagcaggagaagatacggaagcaggaggagaaggtgtggaggcaggaggagaagatgcacgaccaggaggagaagatacgggagcaggaggagaagatgtggaggcaggaggagaagataagggagcaggaggagaagatacgggagcaggaggagaagatacgagagcaggaggagatgatgcaggaacaggaagagaagatgggggagcaggaagagaagatgcaagaacaggagaagatgcggaggcaggaggagaagataagggagcaggaggagaagatacgggagcagaaggagaagatacgagagcaggaggagaagatatgggagcaggaggagaagatacgagagcaggaggagatgatgcaggaacaggaagagaagatgtgggagcaggaggagaagatgtgtgagcaggaagagaagatgcaagaacaggaggagaagatgcggaggcaggaggagaagatgtgggag

SEQ ID NO: 26077 - DNA, 1332 bp, Artificial sequence
  DNA replication origin
tctttcctttcttctatacttattttgggtctggtttattcttgcttttctagttcttttaagatgtatcggcgccacgggccccgcagagccagggcggctcctgccggtagcctgtgtgtgggccccggccagccgcgcccccagtccatatcgcccttcactgccccgaggctggcgcggctatggggcgcggggccggcgctgctctggggcgttggagccgcgcgccgctggaggagctgctgccggggcgggggtctgggcggctcggggggccacgcgggcctcggacggctcccggggctgtgggcttgggcccggcagctgcaggtgcggggctcttgccggccgggcgctcctcggctcccgcgcgccgggttcccgggcggtcccaccgccactgcctgggcaggggaggaggcctggcggagcgggcgggcggcgccttcccgggacgaccagcggctacgacccatggcgcccggactctcggaggccgggaagctcctggggctggagttccctgagcgccagaggctggcagctgcggttggatttctccgatgtccggtgttatctccatgtctgcccctttcttcctggggaagatcatcgatgccatctataccaaccccactgtggactacagcgacaacctgacccgcctctgccttggcctcagtggcgtgtttctgtgtggtgctgccgccaatgccattcgtgtctacctcatgcaaacttcacgtcagcgcgttgtgaagaggctgagaacttcgttattctcctccattctggggcaggaggttgctttctctgacaaggctggcacaggggaattgattaaccgcctctcatcggacactgcactcctggggcgctcagtgactgaaaacctctcagatgggctcagggccggggcccgggcttctgtaggcatcaggacgatgttttgtgtctcacctaatcgggccacctttgttgtgagtgtggtgcctctagtgtcaatcattgatgtaatttatggacgatatctacggaaactgaccaaagtcacccaggattcgctggcacaagccactcaggaggaacgtattggaaatgttaagaactgttcgagcttttgggaaagaaatgactgaaatagaaaaataggccagcaaagtggaccatgtgatgtagtcagcaaggaaagcggcattcgctcaggctggcttctttggagaactaggctgtccggaaacctgattgtgctttctgtcctgtacaaaggggggctgctgatgggcagtgcccacatgaccatgggtgaactctcttccttcctatgta

SEQ ID NO: 26078 - DNA, 894 bp, Artificial sequence
  DNA replication origin
tgcgtgcggcggaaatcccgccttccggcgcccgctgttggccttggccgcagccagggcgctccaagtaggaagataagcgggattgctggaagcgggagagtcgggaggagcggcgaagggctcctcttccccattggctgcgcccacggagcagcctcgttgcgattggccgtacgcggggggcggcagtcccgcgtcggcccgcccctcgggccgcgagaggcgccgggatcgcgggcgccggctgagccagcggctcttgggaggctgcgtccgcacgccggcggggcgaggcggcccggccctgcgcgtcaggtcctggcctggggcacctgggcggccggtggcgggggcggtacgggcgtggggctggcgggcggccgagcccgggaggcgggcgtgggcgcggccgcaccggggcctgcgcggaccacccgcggggcagcctcgggcctctctccatctcttaagtggtggtggctgtgggtttttctgcaggcgatccttttgagtaatttgtttcacgcacgcgccctgctgtggggtaaagcggcagattcatgctgctgtcatttgtcgttaaaacgatgggctccctgttatgtgtgtacttcttggatttgagggcagggggatgacattgtgacttggcttcctgtgaccgtccattctcaaggtctcgtcagcgtggtgcagaaactcggcacaccctgcctaccttggaaggaggctttcccttccccacctccctctccctccatctcttccctgtttccctctctccccttctctcccctccaccagctcttctctcccccctttctgttctctctctcttttttcctttctgcattgaacctttcgggagtgtctttgtaaactattaaaaag

SEQ ID NO: 26079 - DNA, 1726 bp, Artificial sequence
  DNA replication origin
taaaggatcatggatgaaaaccattattttatagattacatttatttatttatttatttatttatttatttatttgagaagtagtctcactctgtcacccaggccagagtgcagtggcgcaatctcggctcactgcaagctccaccccccggcttcacgccattctcctgcctcagcctcccaagtagctgggactacaggtgcccaccaccacacccggctaatttttttgtatttttagtagagacggggtttcactgtgttaaccaggatggtctcgatctcctgacctcgtgatccgcccacctcggcctcccaaagtgctgggattacaggcgtgagccaccgctcccagcctatagattacatttatgtggctagctcatgattctgcttccttctgaggttcaaaaaaacactttcactattccagcagcagctgcaggcggaggctgaccacctgggtaaggagctgcagagtgtgtcagcaaagctccaagcccaggtggaagagaacgagttgtggaaccgcctgaaccagcaacaggaggagaagatgtggaggcaggaggagaagatacaggagtgggaggagaagatacaggagcaggaggagaagatacgggagcaggaggagaagatacgggagcaggaggagaagatgcggaggcaggaggagatgatgtgggagaaggaggagaagatgcggaggcaggaggagatgatgtgggagaaggaggagaagatgcggaggctggaggagatgatgtgggagaaggaggagaagatacgggagctggaagagaagatgcacgagcaggagaagatacgggagcaggaagagaagaggcaggaggaggagaagatacgcgagcaggagaagaggcaggagcaggaggcgaagatgtggaggcaggaggagaagatacgggagcaggaagagaagatacgggagcaggagaaaaagatgtggaggcaggaggagaagattcacgagcaggagaagatacgggaggaggagaagaggcaggagcaggaggagatgtggaggcaggaggagaagataagggagcaggaggagatatggaggcaaaaggagaagatgcacgagcaggagaagatacggaagcaggaggagaaggtgtggaggcaggaggagaagatgcacgaccaggaggagaagatacgggagcaggaggagaagatgtggaggcaggaggagaagataagggagcaggaggagaagatacgggagcaggaggagaagatacgggagcaggaggagaagatacgagagcaggaggagatgatgcaggaacaggaagagaagatgggggagcaggaagagaagatgcaagaacaggagaagatgcggaggcaggaggagaagataagggagcaggaggagaagatacgggagcagaaggagaagatacgagagcaggaggagaagatatgggagcaggaggagaagatacgagagcaggaggagatgatgcaggaacaggaagagaagatgtgggagcaggaggagaagatgtgtgagcaggaagagaagatgcaagaacaggaggagaagatgcggaggcaggaggagaagatgtgggagcaggaagtgaggctgcggcagcaggaggagaagatgcaggaacaccaggtgaggctgcaggagctggaggagaggctggggaagctggggcagaaggccgagctcttggggggagca

SEQ ID NO: 26080 - DNA, 2719 bp, Artificial sequence
  DNA replication origin
tagagggttgatcaccaaagcagtcctttctgttcttcgttcattcctttctctactgcctcgggccatagcataaccaatgaggagctgaagaagaaaaatgccgaactacaagaaaaacttcgacttgcagaatctgaaaagtctgagatccagctcaacgtgaaggagctaaaaaggaaactggagagggccaagttcctgctgccacaggtgagcggctgcagccccaggggttgtgggagacccatccagctaggaccatggtctagggatcatgcaaggtatggggagggtccagccaagagctggaaaatttgggtccttgttctggtcccaccatagaatcctctagagtgtgctaaaaatctacaaatttggggccctgcctgggaaatcagaacctcagtgttaaggcttaaaaattttttttaaagaatcatagatgaaaactgttattttatagattacatttatatagctagttcataagtctatttccttttgaggttcaaaccaacactttgcaggaggagatgtggaggcaggaggaggagctacgggagcaggaaaagaagatacggaagcaggaggagaagatgtggagacaggaggagagactgcgggagcaggaggggaagatgcgggagcaggaggagaagatgcggagacaggagaagaggctgcgagagcaggagaaggagctgcgggagcaggagaaggagctgcgggagcagaagaagctgcgggagcaggaggagcagatgcaggagcaggaggagaagatgtgggagcaggaggagaagatgcgggagcaggaagagaagatgtggagacaggaggagaggctgtgggagcaggagaagcagatgcgggagcaggagcagaagatgcgggaccaagaggagaggatgtgggagcaggacgagaggctacgggagaaggaggagaggatgcgggagcaggagaagatgtgggagcaggtggagaagatgcgggaggagaagaagatgcaggagcaggagaagaagacgcgggaccaggaggagaagatgcaagaggaggagaggatacgggagcgggagaagaagatgcgggaagaggaggagacgatgcgggagcaggaggagaagatgcagaagcaggaggagaatatgtgggagcaggaagagaaggagtggcagcagcagaggctgccggaacagaaggagaagctgtgggaacaggagaagatgcaggagcaggaggagaagatatgggagcaggaggagaagatacgggaccaggaggagatgtgggggcaggagaagaagatgtggcggcaggagaagatgcgggagcaggaagatgtggagacaggaggagaggctgcaggagcaggagaagcagatgtgggagcaggaggagaagatgcgggatcaggagcagaagatgtgggaccaggaggagaggatgtgggagcaggacgagaggctgcgggagaaggaggagagaatgcgggagcagaagaagatgtggcagcaggaggagaagatgcgggaggagaagaagacgcaggagcaggagaagaagacatgggaccaggaggagaagatgcgagaggaggagaggatgcgggagcgggagaagaagatgcgggaggaggaggagatgatgcgggagcaggaggagaagatgcaggagcaggaagagaagatgcgggagcaggaggagaagatgtgggagcaggaagagaagatgcaggagcaggaggagaagatgtgggagcaggaggagaagatgtgggagcaggaagaagaagatgtgggagcagcagaggctgccggaacagaaggagaagctgtgggaacacgagaagatgcaggagcaggagatcaggagcagaagatgtgggaccagaaggagaggatgtgggagcaggacgagaggctgcgggagaaggaggagagaatgcgggagcagaagatgtggcagcaggtggagaagatgcgggagaagaagaagacgcaggaggagaagatgcaggagcagcaagagaagatgcaggagcaggaggagatgatgtgggagcaggaagagaagatgcaggagcaggaggagaagatgtgggagcaggaggagaagatgcgggagcaggaggagaagatgcgggagcaggaggagaagatgcagggccaggaggagaagatgcgggagcaggaggagaagatgcagggccaggaggagaagatgcgggagcaggaggagaagatgcggggccaggaggagaagatgtggggccaggaggagaagatgtgggggcaggaggagaagatgtgggggcaggaggagatgcgagagaaggaggagaggatacgagatcagaaagagaagatgcaggagaggctgccagagcacgaggagcggtgctcagagccctgcctccctccctccaaagttctttgtaatatgagccacactggcagtgtggagcctgcaggaggagaggctggggagggttctccgcaggacaaccccactgcacaggagatcatgcagctgttttgtgggatgaagaacgcccagcagtgcccaggattaggcagtacctcctgcatcccattcttctaccgaggagacaagagaaagatgaagatcatcaatatctaaaagttggcactgtcaacaaggcctacagaagcataagccgccatgtcactgtgtgaatatagtctgagca

SEQ ID NO: 26081 - DNA, 1176 bp, Artificial sequence
  DNA replication origin
agaaaactgttaaagtctctctggagagtagaagcctgggagaaaaccaaaccaaacccgttctcccatttccaccaagagacaatgtcaacattttgagttcacagggggaggtgtaggcttttcaaactgtcaatgtctgtgttaagggagtaaggcagcctgaaacttctcgctgctaggtcacatggtccctactccccttccagctggaaatctgtgatgcaaccagaggaagcagaaacagggtgagaacacttaggggacgggtcctaagatcaaaggccagtcttgcagcagtaatgacagttcctagagggactgtgacaccactacatttcactcctctgtggggtggtggagggccagggacacatcagtgctatgcccaagttgcctctttgaggttggggaggggttcgcagggttgggacccaggtccttggagacgtgagcccaaagagcccagggaggtagggcttggggcgacgggaggtgagggccaagtatggagcggggagccccaggagtcacctgcccaaagtcaccctggggcgactggtgagggcaggtgctgggacacacaggtccttggagacacaatcccaaagggcccagggaggtcagttttggggtaataggaggtgagggcggagtacggagtggagagccccagggttcaccggctcagtcaccctggggtcactggcaagggccggggcaggactgctgagggggtggggctggctgagaagattttgattgggggagcccagcggcactgggggggacccagcccagtgtgcctctggaatggcatggactctggcagatgttctgccatgggagggggcctggggctgggttggggttggggtgccgcaacccagtgagttttacctttttcttggcctcagccaatttgttctgtctggttttttctgacatcatggggtggggagggaggtggggttggggccacatcagcgtgattcagacgaggacaaggatacacctccagtcacgtaccacgcagctatgtgactgagccagaggaggtgtaaccagggctgcactagaatgcagaataggggcgtggccttaatgcttcaagcccattggtcagtgagaaagatgaaagggaaaggaggcggggccaggcagccacgtgtcatg

SEQ ID NO: 26082 - DNA, 2527 bp, Artificial sequence
  DNA replication origin
cctgcggggcctgccgcagtggaggtgggggtggcagggcctgccagagcggtggctgggtggccaggacctgtggggcaggtcggatgggcggcggcgcctggcggatcagcggcggggcctggcggatcacaggtggagcctggcggatcacaggtggggcctggcggatcacaggtggggcctggcggatcacagcgggggcctggcggatcacgggtggggcctggcggatcacgggtggggcctggcggatcaccggtggggcctggcggatcagcggtggggcctgtcgcaccggtggtgggccagggcggatgggtggtgggccagggcggatgggcgggggcccctggcgcatgggcggcggcacctgccaggtaacggctggtgcctgccaggtgacctgcgtggtctgccaagtcaggggagtggcctgccagccttgctgcgtggcctgccatcctggcgaggtcgcctgccagcccgggggtgtggctagctgcgctgggggtgcctgcgggccctggggaacctgcggaggagcccttataacttgagactggatttgcaggatcagaggctgagcctgcggggcccaagaagccatcggctgtgcaggtggggccatcggctgtgcaggtggggccgccggctgtgccatcggtgctcctgaagctggaggctgggtcatcggagctctcgcacctggaggatgaatcatcaggactcctggacctggaggcttggccatcggtgctcctgaaggctgaggctgggtcatcatggctgctggaggcggctggaccatcggtgctcccggagcagcaggctggaccatcaggactcccggagtcagaggctgggccatcaggactcccggagctggaggctgggccatcggtgtacccggagggggaggatgagccatcggtgtccccggaggtggaggatgagccatcggtgtccccggagggggaggatgagccatcggtgtccccggagggggaggatgagccatcggggtccccggaggaggaggatgcaccatcggggtccccggaggaggaggatgggccatcggggtccccggaggaggaggatgggccattggggtccccggagggggagggtgggacattggggtccccggaggaggaggatgggccatgggagctccgggagctgaaggatgcaccatcaggactcccggggtcggaggctgggccatcggggctcccggaggtggaggatgcaccatcaggaccccgggagtcggaggcttacccatcgggccccccagcgggggagccgggactatcgggccccctagggcaggaggctgggtcatcggaaccaccggggcgggcagctggccctgtggggcctcccaggcaggctgaggtgcctgccaagcggccaatgaagcctgcaagtcaattggaggtggatcccaagggactggcggagcccgggaggaagcgggcggggcccgcatcagaaccgtagggcggctatagacaggcggcttcggggcctccgccggaggactcgagtcacccagattcttacttagctgcgacatgtccctttgctgacagctggtgggtcttttcctcggacagctgctgggccttttcctccagagagaagagaatgcctacgtggctgttcagaggctccctccctgctgaatgctgaataggaagtgagtgctgctcgctccgcagctttccgcagtaaggaggaggggggaagggggctcaatcccgccccttccccgcccccgaccaccacaagtggatattgcataggggcgtctaccggagtcctggctgacacaggatcccttctcactctgtccagtccccaaatgcagaccagtcagactccacatggatgacttttcacaggggagtgacaggaacccatccatgttttagaaaaatcactgtactgcagtgtggagtgggagcagaccactggaaacatggaaggtatccaagacggcggggggagatggtgtggtctgggctaagatgtgaggcggagaatgaaaaaagcgcatttacataagagagttccaggagttatagcagacagatacctgtattataattgaataaaggagtcaaagacatggaaaaggcacacaagtccctgcctggagaaagtgggaagttgcagggactgttactctcttagggtcccaggagaggcacacgggaagagaggctgatgagtattggcagacacagggcatttgcggtgctgtgggactgccaaggagagataccctgtaggcactcctgtatgatgtcttgggagtcctgcttggctattcctcatgaaaatagagttgtgggagggaatgtggttgcactgggtcttgaagaacacaggcatgttagagacacatggagaaaagggacagcagcgagtagagagagaggaaaagaagtcacggaactgagacatgccacacatcagtggaagacagcatttttagtatgggaaaactgcctgt

SEQ ID NO: 26083 - DNA, 1152 bp, Artificial sequence
  DNA replication origin
gcggtgccgggcccggctgggccgcgctcggggcctggtgggcgcggccctcctccgcagcctgctgcagggccttcgggtcgccctcgtcgttcggggcctggggaggcggcgcggcctgcggagcggccgtcgggcctagaggagggctctgcggctctgccagggtcgcggacggaggaaccccctccgaaaccccagggctgctgtgcacctcggagttgggggcctcggctgcaaagttagggtcgctcagatccttactttgttctgacatgtctgcgccgtctggcaagggcagggcctctgcgtccaggagctcttcgagcctgcgctccctccgcggattcctggagaggaagtgcgcgttgctgcgcgcggcgccttccgcagcgacgggcagggcggggcggcggcgggacgcggcactgcgcctgcgcgaccgcggccttggccagcggctgggggcgggcggggcagcgcggggccccgacggggagggtccatggcgaggcttcacctgctgggagagcgatcccggggtttcctgtttgggctgagaagatctagggcaggagagaagtgagatggatgcgtactggagaaggggccagtttaagggaaagataccttaagtttttgggatgttggggtcaagtttcttgggaaacgcttacctgggtatatccagaattaagttaaatatgagagtcccagagaaaggtctgggcggctttgtaaacatgagctttatgcgaaccagtgagaggaacagtcgggcttgtccaagaaaatgtgtaaactgtaaagtggatgtctgaggttggaatcctgagaaattccaataaaaaatgatcgactccctaccaaatcagataggctataagaaaaggggaaatgcagtgtgtcgttaacgtaatttcctatcaacccatgtgaactatgaactttttaagtaggcagtggacttagagcatcattaatgctttaacgggcataaatttgggttttacacttcctttgggtaactttgattccattttatttttttccatacttagtccatagcagaaggattgctatatcttttagcacaaacttgtatgataatgtcttttccctctgcccagcaccctcattcttcaattcacc

SEQ ID NO: 26084 - DNA, 956 bp, Artificial sequence
  DNA replication origin
tgtgccagcactcctcagcccttgggtggtcgatgggactgggcgccctggagcaggcggcggcgctcatctgggagactcgggccccacaggagcccacggagcgggtgggaggctcgggcatggcgggctgcaggtcccgagccctgtcccgcgggaaggcagctaaggcccggtgagaaatcgagagcagcgccggtgggctggcactgctgggggacccagtacaccctccacagtcgctggcctgggtgctaagcccctcattgcctggggcccgcaccgccggccggctgctccaagtgcggggcccgccaagcccatgcccacccggaactccagctggcccgcaagcgccgcccgcaccccggttcccgctcgtgcctctccctccacacctccctgcaagctgagggagccggctctgaccttggtcagcccagaaggggggctcccacagtgcagcagtggactgaagggctcctcaagtgcccctaaagtgggagcccaggcagaggaggcgccgagagcgagcgagggctgtgaagactgccagcacgctgtcacctctcactaggcttccccagagtctctgagcagcacagtcactagggcagaagtgacagttacaggaagggatgataggtgttggagcctgatatactttgattctgtgtccccgcccaagtctcatgtcgaattttaatcctcagtgtgggatgggaagcttggtggaggtgattgcatcaagggggcagtttctcatcaactgttcagcaccattgcccttggtattgtcattgcgatagtgaacgcgttcataggagatttggttgttaaaagtgtgtggcacctcctgctttgctgtcttgctcctgctccaccatgtaagatgcgcctgctttcccttcaccctccaccatgattggaagcttcctgaggcctccccagaagca

SEQ ID NO: 26085 - DNA, 853 bp, Artificial sequence
  DNA replication origin
cctgaaatttatagatactggcttgaatgtctgattccttctacatagtatttgtaaacgtctgcaaggcatttccttatacttatggctcataatataggtgtgtattcttctcttactctttgatgagtaaataccaaaattgcttcttcagtaaaaaaaaaaaaagccactccgaaaatttgtgcatacaactccacacagcaaatgttttccgattatcgtctgtagaaaagaagtgggaacttcaatttattttctttcatcagataataatattttaaaagtgatttatacttttatagattaccagagaattttcagagttgctttttgtccaggacatgtgtggggctcagagacaccatagacaaagttgccatgttctgtgatgcttctgtccaatagggtttcagaaaacttgacaaaaattaaactgtaaggtggaagagctgcccttgggaactgagaggacaggtttcaggcctggggtgggatggacaggggaagcctccaggaggaggaacattggaggagatgctggagagtgaggcgcagtgggtccaggagacaggggagggaaagcgaggaggaaaacgtgtgtgcctggcacaggccaggccatgagaagaggacggtggattttctaggaccactgggatgagtaattggtgaggacgcaggagcaggaagggcagaccatggagggactgggcaggggaggcagggagggctgatccctgaggactgcgctctgtggggagggattcgaatgtcggtttggttccctgagatgttaccccagcccatgagctcagcctatgggaaggacattgaggagtgagtgggccct

SEQ ID NO: 26086 - DNA, 1246 bp, Artificial sequence
  DNA replication origin
gactgcaagatgacagccttggaaggaggagtggtatgcatagcattggtttcaatgggaggtttggatgatgatgctgtagaggcactgttcactaaagtggaggtgtctggaggaggaatgatgggaaggctcaggaaaacacaggcactggggagagaagctttctgcggctgcccatcaggagcctcaaatttgggctgaggggtggcttcttttccaaagagttggttaaaacttggggtggtattgtggaatataaatggaagtggggatgtgtagactgatgtctttcccgggtgcctctgctctgcactgcaatgtatttgggaatttgggagagagctcactctggagcttagggaagatgtgaaaataacaacctgagatggggcagtagtatccatattaactacttcagggtctaccgcagtctgtgaggttaggtgggcagatgcgtttgttgtgacagtggaaatgactgacgtggaattcataggcttgctggtgataactgaggtcccggtggaagggactggaagaagagtcaggaaggaaagaggaggaggggaatccacacacatagatattggggactcccttgtgacgggaggcttgaaggagggtgtggagctaggaggtgttggggggtcagaagtgagaggcgctgctcctacgactgaattataagagcctcctttctcattagactgatcacccaaaatgggaacaaggtcagcaggaagagccagaggagagttagggattgtgaatgctattttctcatccatttttggtgtggtggaaagtggagggataggcaggatgaggggtccagtagccaggtcagccaagtcagggatgggcaaaggagctgagacctgggaagtgtaagtggtcaggggcagggagtctgtggtctgcacaggttgggagaaagaaggggcaggctgggtgatgctgctgtttgtcatggtctctgttttatcctccaagattctgctattccttttatactcagggctcttctccaaggtgtgtaggtctccctcaacagacaggcaggggagcttagcaggtgggggaagctcacctcgatcccacagcaatggcagtgaagggggcagcggcagcagcaatggaatcgacattttccttttgcagggcctgttgcgggcagctctgggaggagcagcgctccttggaggaatacagaaaggcttctcatcaggcatcctctttccgg

SEQ ID NO: 26087 - DNA, 1728 bp, Artificial sequence
  DNA replication origin
atttgcattgattgtggttatggcgcatttaacttttccaaaccagcttttttgtaccgcacataggaagacctgagggtgagtgtaaattaggattgtttggccagtggtgtgtgcaaaaatttattgtagaaccaagaattatttctttagtattttacacattttaaaaaacaggtagacatgtccattgatcccaggttgcttatggtttctagaggccccctctcattgcaacagtgctgtggggccctaggggtccagtagccccctccccccaggtcattccggtgagggagggagctgggacccctgcactgcggcaaacaagcacgcctgcgcggccgcagaggcaggctggcgcgcatgctcaggcggggatgtgtgcgaagcctgccgctgctgcagcgagtctggcgcagagtggagcggccgccggagatgcctgacgcatctgtctgaggagcggtcagtgacgcgatggagcgggcaaggtcagctgtgccggtggcttctctcaagagacagcctggggagcggccacttttattcatcagatattccaagtttttaggacttggagtactgaataaacggaatttgggccctaaagtcctttgttctggagaaccagatccggaatgttcagaggcttgctgttgtgccgttctgccccgatggtatcctgtccgctcgcattggggcgcgtcccccatccgcccccaactgtggtgtcgcgacaggtcctattgcgggtgtctgcggtgggaagggcggtggtgactgggagcatgcggggtaaccgcagtgggcaagggacatgggtggaggtgggtacatcagggtgattgcagttccgtgtggcgagggtacgtggggggaccagtgcatagggattttaggcggaggtaggtatattggagtgattgtggcggggcgaaggtacgtgaagtgatcggtatttagggggtgttgagcgcaggtaggtgtataatagtgaccactgcgtggtggagcagggtacgtggggcgactggggggggaattcgtcgcagtgaccgaggcgaggaggctatggcagtggaccagggggatgagtcggtgtgacagtggtgggggttgtgttggtggtcgcggcgcggggagagtccgtaggaagtggctgggaggtagggggaaggcggcgacagtgggtattggcggcggtgggcattggcagcgggtaggcatggcggtggtggactttggcggcggtaggcatggcggcggtgggcatggcatggaggcggtgggcatggcggccgcggggcctgtcgctgtccggagtgactaagggacgctgaatgattgctgtgtagaggagggggcatcagaaggggcagtagcacagtccgcagcctttaattttcctgtgacctgcgatggtcatctggtttgcctactgtggtggtggtgcttttttattaaaactgcgcaatgcctacactgccgcaggggctgcagaaatgcgtggaatccttgcgtaccctttaggaaccctcgctttagaggctatggcataagaagactggaatgatgtgcagaacttgcatttacagatcttttgactgataggccaggtgatgcctgggggttacttttttttcattgtttctctctgttgggaaccaggtcttggaaggctatgtcgaaataacctgggggtctgtgttgcgtcactgccattgt

SEQ ID NO: 26088 - DNA, 968 bp, Artificial sequence
  DNA replication origin
ctcggaatagctcgcggcctgtagcccctggcaggagggcccctcagccccccggtgtggacaggcagcggcggctggcgacgaacgccgggatttcggcggccccggcgctccctttcccggcctcgttttccggataaggaagcgcgggtcccgcatgagccccggcggtggcggcagcgaaagagaacgaggcggtggcgggcggaggcggcgggcgagggcgactacgaccagtgaggcggccgccgcagcccaggcgcgggggcgacgacaggtcagtgttgccgcggcctgcgccaggcggcgctggctcccctccgtcactcggccggccttcggggcccgctgtggcgaggtcgacaccccccttccccgccccccgccgccgaggcgagtgtttgggggcgcgtggtccgaaggggctggtgccagaagtaggcccctggtggccgcggctgctgcagccgtaactgtcagtcctggctgagcgacggcgggagggttttgtcgcccgaggggacgcgagcgggcccggggcggggcgggacgtgcgaggcgtcgagatttgggcctcctaggagccaggctcttcgagccagccggggccccagacagggaagggcaggccctttccttcaaaggggagccctttctcggcgttttcaaggtttttggctctcttggggaagacatatttagccgtgtgcttggtgggttggggttttgggggtggattgatgggaagggagggcggatgaagtggtatgtcaagcccaagggttgtgcgcacaggttactctgtgttaccggccaccaggatttctgaagttgaacgtgagttattggctttgccagagactgctgtgttatatgcagacctgtatgcaagcagttggccttttttccccccccttttcagtgtagaaaatgaaaaggatgctttcctcatcttggtggtaaaggct

SEQ ID NO: 26089 - DNA, 1077 bp, Artificial sequence
  DNA replication origin
agccgagcgcgccgggtcggcagaggtgaagcgtaagtaggcggcggatggcgggcgcccgcgctggcggatggctacgcggcggaggggtgcgcgagcgagcgaagcctggtgtgtcgggtcctggcgaagggaaaaggccccgtcgtctcctgtagtcaccccgagcccagcgccaccatcttgggagacacacggatctcgcggccgcggcgcaagacgggaggactggctgggcgggccgagtatcccggcaggcagcgcgcgccgcccggccgggcgagggctccaggccgggacgcggggacgtggggcggggccaagacgcgcgggagggcgccgcgctccgcccctccttccttcgccggccccgcctccctcccgcttgccgtcgccgccggcgcacgggccattgggaagaggaggtggcctgcggcccctcggagtcccaccaggctcggtcgccatcttgcgactggacagaaagggtaatccctctttttagtttctgctgtctgtgacccgaaagaataaacctgggacttccggaagccctctgggcacccccccccccaggagggttgcagagccccttggtgtacccagcagaggaacgcctcagactttgttgggaaacgaatggctctgaaagttagctgaagccgctggaatagccccccagccccgaggcggggcaggtgcctgccgttattggcttttcgaccccaacccttttctatctggagctgcctttgtagatgttgcaggggtgccccgagagtgcaggccagattttagaggaccaaggtcatctacttaggcctcttgccaacacaggatgtgtcaactagtttaccagagacgaaggtaaagtcccgtctcctgcagttgttgacgttcagtaggtcgtcggttaagaaaagtggctccctggttgaccccagctggatagaggctaattttgatccatatgacagctgaacgtagttaaagccattaaaattaaatccatttaaagtcatatttggtaccagggtcaccattttaaaaggtgtgtgtgtgtatgtgtgtgtgtgt

SEQ ID NO: 26090 - DNA, 1660 bp, Artificial sequence
  DNA replication origin
tatatagagatataccccctatttgcagtattgattggaagaagcctacacatataagaattctgatcaatactattttgtgcaattcttatcaaaaaggaaaaaccaaaccacctggtttatgatcctcaccgcgtgtgtttctaagagacagagacattttgttttgactgttgcctgtggtgattgactcctgggctcacgattctcaagtctgatgatgattaggcctgaacatctcactgcccacacatttctgttgccatgattcatggcttagaggagggtagaggattcctgctggcagaactggtttcaaaatcactcagtaaatccagccttggtgctttacatttcagtttaggttataggggtgtttggcatctattccattttctttagctgaaactatgacaaaagcataacccttgaacaccctattacaaaaacttgtggaaccatgtatcttcatctatttttcttttaatgcaatcaagattatatcaagtattgcaggccttgcacccctgagctgcacccctgaaacaaaagcccctagagagcaccctgatttgcccctggcctcgctgatgtttttgttgtcactgctttggactgtggcccccctgttgtcattggatttccatctgcttctaatctcgcaccaccttcgtggtgacaccctttcccaacaggtatgaagaggtttcctgcatcacacaacttactggatttcaggttttctttgcaatcgcacaagttgaaatatttggatggtggtgacagtggaggtgatagtatcagtggttgagaggttggtgaaggtggtatttgaggtggtggtggtggtaggggtcgtggaggtggacactgtggaggtggaggtggtggagttggtggagggacagggtgggtggaggtggtggagtcagtggaggggcagtgatggcggaggtggtggagtcagtggaaggacagtgatgctggaggtggtggagtcggtggaaggacagtgatggtggaggtggtggagtcggtggagggacagtgatggtggaggtggtggagtcggtggatggacagtgatggtggaggtggtggagtcggtggagggacagtgatggcggaggtggtggagtcggtggagggacagtgatggcggaggtggtggagtcggtggagggacagtgatggtggaggtggtggagtcggtggagggacagtgagggtggaggtggtggagtcggtggagggacagtgatggcggaggtggtggagttggtggagggacagtgatggtggaggtggtggagttggtggagggacagtgcgggtggagtcgttgggtgaccagcaggggtagtggtgtgggtggtggaggtgaaacctgtaaggctgtgccagagcaaacccaaggccctcatctgcatcctctgtgctccagagtatggactttcacagaccacagcctccactgaagacgagctcccagggaaaacaactctgagcagaaaacacaaaagggagtttgcatcccaaggcccagactgaagctctaaaagagaccttggaaagagaggagagagatcatctagagaaacctcccaaaaataaggcataccatccctctgatggttgaaacacacttagttctgggcag

SEQ ID NO: 26091 - DNA, 1596 bp, Artificial sequence
  DNA replication origin
tttcttcctatagctatataaattgaatataaatatagatctatgtatatccaatgggccttctctggagagctctaatatactgagagacatcaatgatttctcagtcagggcaggctagataatgctgagtaacagacaaccctaaggttaccatggcttaaggcagcaaggtggacgtatctctcacgctcacgtcatctttattggcagtgggctctgctcccaggctgatggaaccaccatctatggcatcgctgtctccttggtctgggagaacccagtgaatcacatgctcttcaaagcttctctgcagaagccacacatgtccctttcgctcacatcttagtagccaaagcaagtaacatggtcacacctaacttcaagggcatggggtcgtgccatcctgccatatatccagaatgagaggaaacgctatagatgaaagcctcgaagcatattgacccttcatggcgggtcagaagtggcaggggtgaatggaagcaggctggtgagattgtgaagtgccctgacaggctccatagttcagaccctggagctgtggaaggcctctcataaacagactcagacacacaaggtatgtttaagcttcccaaagaggatgctggtggtggggtggagaaggtctcagcaaccagggacagggaggaagattctgcattgactgtgggacaaagtggaggagaggtgatgaatttgagaggtatttctgaggtaaaatcagtgggatttggtgaaagacttgctctgtcaagagaggaatttaagacagggtggagggttttcagttgggagctgaggccattgattttatgactaagagcaaaggttaagcagaaacagaggctcaaggggagacaagctggatctgggacgcttggggtttgagattcctggggcatccaagacatcgcgtctccttgacacgcaaggcagaagccccaggcgctaggttgagagttatcttcggaggctgctgaagggctggcggtgggtgggcaccccgagacagagggcacatagtgagagggaggctctggctggaagtcgggcacacacaggtggagatgcagggggcagccagcgggccgcgcgtgaacaccgaggggaggaagcttccacggagcagcttcagcttcagggacagccctggcggacgcgggggagccgggggagccatgaactcgaaaaggagacatccgtgggatactcagaaatcattggcgatatttgagagagcaattgcagtgcagctgtgggggcagacaccgccaaaggtggaaggcccttcttcaaagggcttcacacaagctctttcctcagctcagaaattccctggcttccggctgagggtggtggctcacgcctgaatcccagcactttgggaggccgaggtgggcgggtcatgaggtcaggagttcgagaccagcctggctaacctggcgaaaccctgtctcactaaaaatacaaaaattagcccggcgtggtggcacgcacctgtaatcctagctacttgggaggctgaggcaggagaatcgcttgagtggaagttgctgtgaacctagatcgcgccac

SEQ ID NO: 26092 - DNA, 1131 bp, Artificial sequence
  DNA replication origin
tgctcgactaattttcttaaaaactttgtgtagacataggaactcaccatattgcccaggctgatctcgaactcttggtctcaagcaatccgcccaccttggcctccagaagtgctgggattacaggcctgagccaccacacctggcccacagttttctattaagggcagagcaatgctccaagaaaaccttgttctaacacagaggctcaaactcctccctcccatcagtgtacttttcatactaatgctcagttttttaaaaacttaaattttctaattttagtcaatctgatcacacataaaattattttcatgagattaatcttgcacaaacctacatcttgcttaaaccttccattttgtcctatgccttctacctgaggataaaaatttacttgccttttccctttatcattttgttatatatattgttatatataaagttttggtgccacaaaagaaatagcactcgaatataaaatgttccttttaattctcagcaaggcaagttacttctatatagaagggtgcgcccttacagatggaacaatggcgagtgcacatttggacaaaggaggggaaggggttcttatccctgacgcacgtggcccctggtgctgtgtcggtcccccattggctagggttagatcgcacaggctaaactacttccaatgggctaatttaaagagactgacagggtaagtgctttggcgggagtcaggggagagcagatagcaggtgatcagaatgagttagggtggagcaggtgatcagaatgagtaagggtggagcaggtggtcggaatgagggtggagcaggtgatcggaatgagttagggtggagcaggtggtcggaatgagttagggtggagcaggtggtcggaatgagttagggtggagcaggtgatcggaatgagttagggtggagcaggtggtcggaatgagggtggagcaggtgatcggaatgagttagggtggagcaggtggtcggaatgagttagggtggagcaggtggtcggaatgagttagggtggagcaggtggtcggaatgagttagggtggagcaggtgatcggaatgagttagggtggagcaggtggtcggaatgagttagggtggagcaggtggtcg

SEQ ID NO: 26093 - DNA, 1588 bp, Artificial sequence
  DNA replication origin
gacggcggcgcgggtgtgcccagcacctggccgacaaccggctcaagactaccaagtacacgctgctgtccttcctgcccaagaacctgttcgagcagttccaccgcccggccaacgtgtactttgtcttcatcgcgctgctcaacttcgtgccggcggtgaacgccttccagcccggcctggcactggcgccggtgctcttcatcctggccatcacggccttcagggacctgtgggaggactacagccgccaccgctccgaccacaagatcaaccacctgggctgcctggtcttcagcaggtgagttgggcgggcgggcgagcgagcgcgcggtggcgcagggcagggcgccccgggaacttggtgttgggcacagtgattggcaggggctgggtgcttagaaggcagctccactcagggtggagggcccggctgcgcgggacccggtgccgaccgaagccacagcgccgccaaggcctctctgtgcctccgccgcagctaaaggggcgccctggatgcggggacgcgtggggatcccctgtcactccgtgtcggggccagaatgatcccaaggctagaaaccgacggccgctggacatcctcatccacagccgctcccacctgaagtgaaaggcaggaaaagccagcctggccccctggcctgaagtccctgcctcagtcttcggccaggcacagtggtctctgaacagccggcacaggacagtaaagctcagtctgctaacagctcggctcaggacagcagcaaagtgaaactgccgccaagtgctgatatgtctggcacggcccaggtaccagggcaggggaaataacagcagtgtccatcctccactgtgagccatgagccgcgagccaggcaccgcccggtagctgcctgcctaattttcttcatcttaacctgcttcctgggggaaagaggctgtggggtgtttgtgagccctgccacgggcagtaccaggggtgaccctgcgatggaccactcctgctctttttccctccctgagttttagagtctccggcggacctgtccagaggcctgcggccttttcatcctttatgctctccaccccaggagagccccttggtagatccatcttggagctgtgtccagcagcctggaccacctcaaggccctgtccctgagaaaggtgggtcgtcttagctttcctccaaagctcagcccatcgttacctcctgcctcaccttgcttgaccccggaacagggactgagatgggcttctgaatagaacattagcggtatctggcttccattatgcatggggagactctaggaagccctatgctctcttagtggcagattgttcccctaaaagaggagggtcagagtggctcctgcctcttaaacgtaggcattcacgaatgccttagacacaggcactcatagcttggatgaagccatggatgcgtgcctctgtagttgagtacctttcaccctcccagcaacactgcagtggttatgctccatatttttgtaaacagagtaaacgggttcagagaggttaagtaaacctgcccagtgtcacacagcagcaaggtcgtggtactggg

SEQ ID NO: 26094 - DNA, 1306 bp, Artificial sequence
  DNA replication origin
aggaaaacacggagccatgggatgtgaggcctcaagactgcaggcgctgtgggccttcatttgcagttgatgctccgtttgggtttctgctggttgactgtgagacctgactcctttccccaacaatgcagacttcagccaaacctttccctgatctgggcctctacatgtcaaaagcccacccctgtgactgggggatgggattattttcttcacacctgtcaccactctaccttctaacactgggttctgggcaacattgtggatggtggcaaaactgggcagagatgtaagaatgtcataactggagccgggtaagccagggtgctggaggggagggcctccccaagccagggtcctggcgaagacgtgatttgagtccatccagggcagtgccttgttagcaggcacccccaggaagagcctggggccacggccaaccgcccagccacggcctcctgggcaagaaataactgcttctcatctctgtacttcttgagtgggaggcaaacagtcacagccatgaaacatctgtggggtctcactgcggacgtgggggactcccagctcctttttccatgccgtgcttattctcccaccccttctcggatgccccatgatgtggaggggagcccttcgccccacacttctgggacaccctcctgacgctcccctctcctccccacaaccatcctcgcctccccacaaccatcctcgcctcccccgccgtccgggccatgacagccacctcagagctacagcgcacaaggagcgtttcggtcctcatgatttcccagggagggaaacagacactcaaatacctgcaaaccaaattctgtctttgctatagcgatatatttctcctttccatgaagaaagaacagaaaaaagaaaaagaatttatttaggagaggaaggaaaggcagtaatgatgatggtggaaaggaaacggtctagttcgcccaacaacggaatctgaaagtggtgggggctgggaagtggggtaggaaagaagttcttagaggcaacgcggaatcgcccttcccagggctccccaggagcagaggtcctgcgtaaaaaagacttaaaaattggagcactggatgccatggatcctttggattttgattccagttgatccctggagtaaggtcctaaccggggtctcccgaggtcgtttcgccgtccaggatggagcaggtctggcccctggaagggcgcgcgggctgcttggggacgggggcgccttttctcgcgcttcgcggtttcctctctcctactgcaggcagcgcgcgtttgcagcgtt

SEQ ID NO: 26095 - DNA, 1424 bp, Artificial sequence
  DNA replication origin
ttctcactcatatgttgaagctaaaaactttgatctcatagaagttaaaaaaaagtaaaatagaagatactagaagctgggaggggagatgggggagatttgtgaaagaatacaaaattatagatagatgggaggagtaaattctagtattctacagcaccgtaagatggctatagccaacaatagtatattatatagtttcaaacagcaagaaggaggatattgaattattccaacccaaagaaataataaatgttttagatggtggatatgccaattatcctgatgtgatcaccatacattatatgcattgcaacctcattatgtatccatgaatatgcacaattatatgtgagtttaaaaatatttttaaaatgttgttttaaaaagaacaagattgattgcactgaatggaacacagaaggctgataacacagaacctcaaatctacatgctggcatggtggcacatgggcattcattgctaaccccagcaaaagtggcatcagttgagtggggagggcagagctaatgtggggtgagttgaaagatgataagacatcaaataggtgagacttgggtttacactgccgttgagaagtgtggctctgagacaaggtggagacagagctcaaaagaaggatgcggagttgtggaaattcttttaaagatgtgaaagactgcagcccaataagaatacccaggagaggaaccattagaaacagagttaccaatcccggatccagttcatgccacttccttgtgatgttgggcccccatatggctaattttagatcagaagaaagaaatgctgaagcaaggtcctacaggagcagaggtggcaggattggagatggagggtttggaggtggtgggattggagatggagggattggagatggagagattggaggtggcgggattggaggtggcgggattgaaggtggcggaattggaggtggagggattggaggtggtgggatgggaggtggaaggatgggaggtggcgggatgggaggtggaggggcttgcctttgaacaggagaacacctctctgggaagctggagactggctgatgaggatgaatgtggatgtagagaagtttgcaactggtgggaagttagaatgaggccagttgagggaattaacatctatctattttttttttttatttagtttatttggaattagaagaccttgtcctctgctaagatttgggtatggtgagatggcaattaagtcggggattgcagagcacagtgagggttttatatagctgaggagagagtggggttggggatctcaacgagaacaagaaacagagacagcagctcaggctagacaccatgaattcattctccagaacactctggctgtagcagtgagcgaaggcaggcagaaataataggtaagaactggacttg

SEQ ID NO: 26096 - DNA, 1384 bp, Artificial sequence
  DNA replication origin
cccggccacgcagcctgccgctcaggcgccccgaggagaagggtgcggaccgagccggggcggccggtcctcttccccgctcgcgtcctcttaccccactgccccggcccagcgcgcccagggctcaccctgcgcgccggccccgggaggcgagccgtcggtgaggatgcatcctccttctcctccgcctgctctcgcccggctggcaggcgcggaaggccggtgcggcgtcaccgccccatgctgccagcgcgaacttccccggcactcccggcggagcggctcttgcgccccgcgctcccgccgccgccctgcagctccgctccgcgccgcgccccgggccgcgcgccgcccgccgcagagccccccagcgcccccggcgcactcgcgcccgctctcacctcgcccgagcgccacatgtcgtctctgggctggaggatcggccctctgcagaggtgctccggtagaggccgccagacgctcagcaaatgcgcccttggccgagctgggcggagggggagggcgcagggcccccggctcggcctgcaaggggagaggccctgttctgctgaagtttctccagggccctcaacagcatcttcggcgcctcgtgtagtcaccaccgcccgcttgtagagcagggatgggagggcagtgtcagcagtcgggtgatagaggcctggactccgacagctttgctccctagagccggccccaacgcctccctgcccaggcctgggtccttcccgggtgctccatggcaccccttacatgcgcatctcttaggcgcttctgaaagaagctggcctgtggacattcttttcatctcactcatagacaggaatgcataactacgggagggaaagccagggtcacattggactcgattagaatgaaatccttacctaacgcagtgtatatctgggggttttctgaagttccatttcttgacaacaagccgcagtggcaaacgggaaagggccaggagccctgggggctgcaggtcggagagcgcctctggggtgacggggcgggatctccccagcagggcttccgagccacgtcgggtcactgcctcattagccacgtacatggggtcttactatggtcattacgtcggtgtgtcgtccgtcctagtggtgcagttcctgggaggtgagggtggcattaatgacaactgcgcggcagcagggccccttcaaacaacacaagtaagagcgcatcgtcttgggtttgccaggtcttgcttcctcaggaggtgggggactctcgactataacacccagtggaaaacgttcaagactcaaaggaaagccactgaaaacgtgatggggaggtttacttacaccattgtcccattccttttgtgaaactgcattattca

SEQ ID NO: 26097 - DNA, 1083 bp, Artificial sequence
  DNA replication origin
cgcgcgggctgctcgaggccaggggacttggagtcgctgctgcaccgcgcgctcccagcccaggaggaaggcgctgcctggcggagcgcttggctcgtacccggggcaggagcaggggaagtctgcgaaagccgggagcgagccggggagggccggggagctggagaccctcggcgtgccgctgcggaccgcgcgggtggcgaccgcgggtgccagggcgacccaggctgcggctccgcagtgcagcccccgcgcccacctgccctggcgcgccggccctggtgagcctctgtgggggtccggagggtcgtgggagcgcagcctctcctgggggtccctggctcggggctgaggggcggcgggaggcgccgcccgggtttcccgcatgcagcgccgcgtgctcgccgcctggctctggcccgggccccgcgacgagccccccggacgcgcccaggcgaccaccgcatggcaccctgcccttcttggcaggagtcgcagaaggccttcgcttccgaggtggaagtacctgttgtgtctcccaattccggagtttgcgggggatgggggttgggggggcttcttgggaaaatgcttcttttcgaagcatactgttcggatgcctgtgagcacctatttgcgttatgcgcatactgagaaatgcgtgttttcaggaaggttagtcgttgagcccagggacaatgtctgcctggatctcaaatacattaattagggtccagcattgagtggagagacttccacagatgcagtgcttaagttatgtagtcacggggaccgaatgccgggaaagtagccacactcttttataggcagttgtcacagtattgtgatcctgcagaaaacctgtttcttaaatgtgcttttccccacttctttccacgtactttctcagtgccttgcagagagaggagtagcttgctggctttgaacgcgtggcgtggcagatatttcagaaaggtaaaattactacacttgtggatttgacggatacaaaatacagtcgctcagataactacagcgtttattttaataattggactaatggtttatttgataacatgctaa

SEQ ID NO: 26098 - DNA, 1183 bp, Artificial sequence
  DNA replication origin
ccggctgtgaacggtggcttccgcgctggcgggcagtgtggacggcggcgtcacccagccccggggaaatgcagccccgtggcagccccaggctcccttctccgggccctacccagcccgcgccccgggggcccagcagtgggggggctgccttccccggccgcgcgcacatgacctgcgagtccgcggacacagggaagctttaaaatatttcaaggcaagttagagtatttatgctacaatcttttaacggaggcgatttttctagagcattttagaagtttgaatgatcaaataaactatgacatctagcaggaaactaatacccattgctaatctaaagttttattattgaaattagctttcttctcagtaggatctcaagttttttgcattgcttcaagcaatattaataaggtccgagcagaggggctgttactttccgttagcattcacatggagaagaagaggatcgtgggatggaatcagctgaagggccccttggggcaggagaggtctgggcggcttccggaggcttctctgagcaagttgtgcggggaggatggagcagtgtgtgggtgtgtatgggtatgtgtggtgtgtgtgtgtatgaggttgtgtgtgcgtgatgtgtgtatggatgcgtgtgtgtagtgtgtgtatggtgtgtggtgcgcgtggggggtgtatagagtgtggcgtgtgtgtgtagtgtgttgtgtttatggtgcgtttgtatgtatggagtgtggtgtgtctgttgtgtgtgtacgctgtgtggcgtgtttgggggtgtatggtgtgtggcatgtgtgtgtctagtgcgtgtgtatggcgtgtttctaagtgtatggtgtgtggcgtgtgtggggtgtgtatgtggtgtgtggtgtgtgtgtgtatagtgtgttgggtgtgtatggtgtgagcgtatggtgtgtggcgtgagtgtatatggtgtgttgtgtgtgtatggtgtgtgtgtatggcatatggcgtgtgtgtatatggtgtgttgtgtgtatatggcgtgttgtgtgtctatggagtgtcgtgtgtgtgtatggtgtgtagcgtgtggcgggactatatggagtatgtgtatggtgtgttgtgtgtgttgtgtgtgtatggtgtgtggcgtgtgtgtgactgcccctactcaggtccctatgtgaagtta

SEQ ID NO: 26099 - DNA, 1364 bp, Artificial sequence
  DNA replication origin
gcggctccaggcggggtgggcggcgccgcgccagggggtccccggcgcccattgctcccgccgcccggttgcgcggaccggcgctagtgcgcgggtgggggcggcgcgccgcggtggcccggcgtcccgtgtgcgtccagtgtgcgccccgcgggggcgcggccagcgccagagtagatacctgtcccgcccgccgcggccagcagcctcggaggaagccagggcaaagagggccggcggagaccaggtccgcgccggaggaagccgcgcccggccgaggccccggaccctgcgccccgagctccacggcaccatggccccgaagctgctgctcctcctctgcctgttctcgggcttgcacgcgcggtaagtggcgcgggggccgcatccccggaggccccgagctgggcgacagggcggcggggggcgctgtctgctggagtccctggcgcgccagccgtcggctgggctgcggcacggcgggccgggaggggactgggaagtcggtctgcacctcacctgtcccagctcccttggacacggtcatctgctttttcctctgcagccgggagtgtggggactcagattaatgggctcgtctcctgacgcttttaggatctggtggttttaaggggttttgagaaccaggttcagggggcaggggccatttctggctccttaccgacccctaattcccacctcagctgtttcaggggctcacacacacacacactttggctgacattctctgtcatttccatcactctgaaatttccaagaacccgggaaccgtggttctaactgcctagtttagaccgggctggaaagagctaatgcattggaggcaggcgcggggggattggaaccaggtgggcagaagaaagccctgcttgtctgggaggactcccctcccaggtcctgcaaacacacacacacaccttccacatcagccactttcacacagaggaacacacgcactcccacccccataaagcacgcatgtcgaaatggataataaggcttctgcctggtaatgtaagaaatcatctcaccataaattccgcaaccttcctcccagtacaccaaccggctaatgggagcttagaatcactctagaagagatgaagagggcgcatgaggatacaaggacagtgggacccaaagggttaaatcctgttgctgtaaacacaactggagattctgggtttagtttctttaattctgtctctctggctggatttctggctagagcttgcagactgtcctgttatttgaaaattggagcagtgtctggcctttacctctttccccaccctaggaagctcagcgtgcccctatcccccaaaccctcttgttttgacgct

SEQ ID NO: 26100 - DNA, 908 bp, Artificial sequence
  DNA replication origin
caccccgtctgggaagtgaggagcctctccgcccggcagccaccccgtccgggagggaggtgggggggtcagccccccgcccggccagccgccccgtccgggagggaggtaggggggtcagccccccgccgggtcagccgccccgtccgggagggagttgggggttcagccccccgcccggacagccgccccgtccgggagggaggtggggggtcagccccccgcccggccagccgccccgtccaggaggtgaggggcgcctctgcccggccgcccctactgggaagtgaggagcccctctgcccggccagccgccccgtctgggagggaggtgggggggtcagccccccccgcccggccagccaccccgtcctggaggtgaggggcgcctctgcccagccgcccctactgggaagtgaggagcccctctgccaggccaccaccccgtctgggaggtgtacccaacagctcattgagaacgggccatgatgacaatggcggttttgtggaatagaaaggggggaaaggtggggaaaagattgagaaatcggatggttgccatgtctgtgtagaaagaagtatacatggcagacttttcattttgttctgtactaagaaaaattcttctgccttgggatcctgttgatctgtgaccttacccccagccctgtgctctctgaaacatgtgctgtgtccactcagggttaaatggattaagggcggtgcaagatgtgctttgttaaacagatgcttgaaggcagcatgctcgttaagagtcatcaccactccctaatctcaagtacccagggacacaaacactgcggaaggccgcagggacctctgcctaggaaaaccagagacctttgttcacttgtttatctgctgaccttccctccactattgtccta

SEQ ID NO: 26101 - DNA, 1035 bp, Artificial sequence
  DNA replication origin
gccattgtcatcatggcccgttctcaatgagctgttgggtacacctcccagacggggtggtggcctggcagaggggctcctcacttcccagtaggggcggctgggcagaggcgcccctcacctccaggacggggtggctggccgggcggggggggctgacccccccacctccctcccagacggggcggctggccgggcagaggggctcctcacttcccagtaggggcggccgggcagaggcgcccctcacctcctggacggggcggctggccgggcggggggctgaccccccacctccctcccggacggggcggctgtccgggcggggggctgaacccccaactccctcccggacggggcggctgacccggcggggggctgacccccctacctccctcccggacggggcggctggccgggcggggggctgacccccccacctccctcccggacggggtggctgccgggcggagaggctcctcacttcccagacggggtggctgccgggcggaggggctcctcacttctcagatggggcagttgccaggcagaaggtctcctcacttctcagacggggcggccgggcagagacgctcctcacatcccagacggggtggcggggcagaggcggtccccacatctcagacaatgggcggccgggcagagacgctcctcacttcctggatgtgatggcggccgggaagaggcgctcctcacttcctagatgggatggcggccgggcagagacgctccccactttccggactgggcagccaggcagaggggctcctcacatcccagacgatgggcggtcaggcagagacactcctcacttcccagacggggtggcggccgggcagaggctgcaatcttggcattttgggaggccaaggcaggcggctgggaggtggaggttgtagccagccgagatcacgccactgcactccagcctgggcaccattgagcactccatgaaatagtttttaaactgcatcttgattgttttatgtttcccagttgtcggacatttatttg

SEQ ID NO: 26102 - DNA, 1966 bp, Artificial sequence
  DNA replication origin
agaaccccccttcatctgtgagcagcctgctcctactggggacagagcaggtcagagttctgcgcatttacaaaggcagcatgggttgtgggggaggtgcagttccagatccatgtctgtgtcactcgggcacgtctctgagcttagactgggaagtccaactttatctctgaaaatgagcgctgtagttactaccctgcctcccctgccagaatgtattgaaaatccaaagaataatatgtatgacagcacttttcaaattggaaagtcctatacaatggaaagttgtcaaaactgtaattaatgtcaacatggaaaggaaattgaacaaaaatgaagttattgtattcaaagctttataacatacatttaggttagttccacaagcattttttcaatgggcggtttatttgaattgctgctgcttaggtaaagcatgcaaaaaacattcaggtttgcctggatttgctgatttatttctgtcagattgaaaatgttttgtttgtagcagtttctggtggggagagttttgagttctggaggctctctctgaggtgctgtcctggcttctctgaggcctgctgggtgaagcacttgccttcaggtcgtccttgtgggccactgtgtctgtggttctttccatagctggatgcaggacaagggcagggacagggaaaggaacccctctggggagcccagacttccgtttccagaaagtgtctgcaggccaaagaaaacacgcagtgcccaaatcacatctttgagttcttgcttcatgagccatcacagtaacaggttgcacggggccagcccccgtgcttggctggactgactggagactgagagatgggtgacgtgacctgagaggccccttccagtctgcgtcttcagcagcgagggagtttgagctgatcgaaaccacacttgacatcgagcgaggctgctgctcagtgaggtgcagcgggcatgtctatgccatgccagggcatgggagccttgacctctggggacttggtgccagggcaggggcctgagtggaatcccggcctgcatgcttcacctcggggtccacagttcgtgttcttctgagctctgtaggatgagtggctcactgagcatttattgacagcctacttgtgtcagaccgccttggggtgctggcagcacagtggttcacagaacagtatctgtgcactcacagagctgacacttgaaagtgtgggccaagatgacttttaaaaaggacatgtgaacatgccacatggtgataaagtctttgtggaaaagtaaagcaggaaaaggaagtaaggagggcctgaggtgtgtgcatgtcagggtgaatgtgtgtatgcatgtatgcaaatgtgtgagattgtatgtgctgtgcatgcatctgtgtgtgcatatgtggtgtgctgtggaatgtatgagtgggggtgtgtacatgtatgtgtgtggtatgtacatgtacttgtgtgtctggtgtgctgtagtgtgtggtgtgtgtatatgtaggcacatgtgtgtatgaatgtgatgtgtgtatatgagtgtgattatgtgtggtgtgtgtgcatgtgtatgtgtgtgtaatgtgctgtggggtgtgtgtggtgtgctatggggtgtgtgtgtgcatgtgtgagtgtggtgtgctgtggtgtgtgtgtgatgtgctgtggtgtgtggtgtgtgctgtggagtgtgtgtgtgcatgtgcgtgtctctgtgtgtgatgtgccatggttgtgtgtgtgcatgtgtatatgagtgtgtgatatgctgtggtgtttgtgtgtggtgtgctgcagtgtgtgtgtgagtgtgtgtgatgtgccgtggttgtgtgtgtgtgtgtgtgtgtgcacgcatgtgtgtggagaggcctgaagcagctgagggtgtgagtgggcctggaaaggcagccttgcaggcgggctcacgtttgttagatgggcgccgcggt

SEQ ID NO: 26103 - DNA, 2050 bp, Artificial sequence
  DNA replication origin
atgtgtggtgtgtgtgcatgtgtatgtgtgtgtaatgtgctgtggggtgtgtgtggtgtgctatggggtgtgtgtgtgcatgtgtgagtgtggtgtgctgtggtgtgtgtgtgatgtgctgtggtgtgtggtgtgtgctgtggagtgtgtgtgtgcatgtgcgtgtctctgtgtgtgatgtgccatggttgtgtgtgtgcatgtgtatatgagtgtgtgatatgctgtggtgtttgtgtgtggtgtgctgcagtgtgtgtgtgagtgtgtgtgatgtgccgtggttgtgtgtgtgtgtgtgtgtgtgcacgcatgtgtgtggagaggcctgaagcagctgagggtgtgagtgggcctggaaaggcagccttgcaggcgggctcacgtttgttagatgggcgccgcggtgcgttctgggagtgctcggggcgggcgcgggggcgggcgcgggggcgggcgcgggccaggagtgggaagtggtggctaaaggtggggtcctcgtcctggcgcctccagggctctggggaagccccaggagaaggaaagggtgcgctattcagagggcaggcgctcgtgggaggcagggctgggagtctgcagccccaggggctttactctggccaactggggaggctgtgtgccgggcaggctgcgggtgaacactgcctgtattagtccagttctcacactgctgtgaagaactatctgagactgggcaacttttgaagaaaagaggtttcattggctcccagttccgcaggcctaacagcctgactgggaggcctcggaaactcacaatcctggtggaaggcgagggggaagcgggcttcttcgtcacgtggccaggagagagcgagcacctgaggaggtaaacaaccagagctcctgagaactcactatggagagcagcatgggggaaaccgtccccaaaatccagtcacctcccaccaggcccctcacaattggaggtgagatttgggtggggacgcagagccaagccatgtgagtgcccgaggaagcggtgctgcactttgcagtagaggactctgaagggagacggggtgagccatgggggagatgcatggggaggatcacagccttggctgggaaggaggggaatggggctgtgccgggtccagggcattgaagcccgatgaacacgggagagcctgggggtgtcaggctggctggcgccgggctctggagccctgagcagggcgtctgagagcagaatgtcggttcttaaggcctgggcaatgaccaggcacatcctctggaagataagagctggggccatagggcaggaaggaccgtggaaggaccagacttgtgggtgcaaagaatggacaggaagcagggccttggggtcaggaggagccgcagggaaggcagaacggtggccaagcattggggaatcagctgcggaatccacagagcgcgacattcccttggattggagaggacagctcgtctgcaggcaactgggaggagcgaggtggacctgctgcctgcagtccccatggtatagacactttgggaggagggtgcaggctgcagtgtcctctgtggggagcacaccagaggcttcttgtccacattctaagtctagtctctagggcaggctggcattagtatggttcagtcacctccccaggtgactctagggtacatccggggtccatagccctggaaccagactcagagttgaaaggcagttcggagacaagcatgtgtttgcacaggactctaccgtgtgtgaccatagtagcagcccctgccaggcctcagggtaggcgggggagagaggctcttggattggagacccccgagcacagggcacagtggcagatcatgcaggaaggctgtggtcatgcgaagggaggacatcttgccaggacggcaaacactcatctgctttctgcctctgtgcatttgttcgttctgaatattgcatgtgaatgaaatcatatgccatgtggcctccctcttgtgactggcttctttcactcagcatcatgttttcaaggttcatccatgctgcaccccgtgt

SEQ ID NO: 26104 - DNA, 1181 bp, Artificial sequence
  DNA replication origin
ggaaggaaggagggaaggagggaaggagggagggagggagggaaggagggaaagagggagggaggggaagaaaggaaggaaaggaaggagggagggtaaggaaggaaggaaggaaggaaagggaggagggagggaggaaaggaaggaaggaaggaaaggtgggagggagggtaaggaaggaaggaaggaaaggagggaggaaagggagggagggaaaagaaggaaggaaggaaaggagggagggagggtaaggaaggaaggaagaaaggaaggaaggaaggaaaggagggagggagggtaaggaaggaaggaaggaaaggaggaaggaaggaaagggaggagggagggaggaaaggaaggaaggaaaggagggagggagggtaaggaaggaaggaagaaaagaaggaaggaaagggagggagggaaaagaaggaaggaaggaaaggtgggagggagggtaaggaaggaaggaagaaaggaaggaaggaaggaaaggagggagggaggggaaggaaggaaggggataagatgcaaacgcagaattgttttggctgtgattcaaacattgctgttggatttgcagcacaggaaaggctaagaaggctcatttttaacaaggtttcagaaaagccattcagtaccattgatagcattctccaggagcaggaccacagaatcggtccttggcaatgtttaggaaaagtcactcaaagagctgtggggtgctgggatggtagatgattggctgtgttatcttaccccacaatgcattaaaacaggtctgttaatgacctgtctgcagtagaagtgtgtggagtgagtccagacagactcagcggagagtgcaccaactaaataccatgggccccaagaaacagatcaatgcacaaaatagaaaaccttctggagagtctgcctgtgagttaagaccccatggaagaagaagagctaagaaatgaaggtggagagaggaagagagagagacagagagacagagagagacctgaatttttcctcgccttaacccatgcctggttctgattttgctagttacacaatccaatatattagcttttattttctgcataagtttaatttacatttgattgtatgacttgtaactgaaagtatcctaacacataatgttcctgctgaacagagcagtcccacaaatcgatacc

SEQ ID NO: 26105 - DNA, 1440 bp, Artificial sequence
  DNA replication origin
accccccccccccccccagaggcccacagctgcctcctctcactggccctaaaggattgcaccatccctggctgcagtcacttgcacttacccaatgtgggcagacacctatttccagccagttctctggctgctgcgctagggaaatggaatcaaagagccaggcagtgctgaggtcctgtctgatgcttgagatcttcatttaaaaataaaaccagccatccctgtgggatgattcacctcagcaacattgaggggcagtaaaggtagcatggggccagtttgttggttgacttttaaattttagagcataaacaaacaactaagctacgagggagttgacaggggaatttaaaatgtcctaggccaatgaacgagaggttccagcaggggcaagttttgttttagagggtaacctggggtaaatgactggaagtgttggagcgtcagagaaagaccacagagatgaaggaccctaggcaggtcctggagacccagggtgggtgtaacacggaggggagtgggagaagggggtgggggcagagaaatcagaactgtggggcatgaataggaacctcgggggaggctgggggtatgagcaagagggagaaatgagcccggagctaatggtttttaagaatgagaagggatgggccgggcacggtggctcatgcctgtaattccagcactttgggaggccgagtcgggtggatcacgaggtcaggagatcgagaccatcctggctaacacagtgaaaccccgtgtctactaaaaatacaaaaacaaaattagccaggcgtggtggcgggtgcatgtagtcccagctactcgggaggctgaggcaggagaatggcgtgaacccgggaggcggagctggcagtgagctgagatcgcaccactacactccagcctgggcaactgagcgagactccatctcaaaaagaaaaaagaaaagaaagaaagaaagaaagaaaaaagaatgagaaggcatgactgaagagtagagagaggcaccaacgaggagaggcagtgggtgggagatggggcctgagcattgtaggggatgacgtgttaaaggatgaaagagcagatgggagctgagctggaaggagccggacatgagggagcccagtgctgtccccagccatcctgatgtgggatagaagaggaaacagtgcttttcagtgaccggctcagggatatccaggtccagtgagaccaagcaaagtacgggcagcacgggagtggccagaagaacccttccctggacaggctgtggcaggggctcctccgggatatccagtcagctgcacgtgtctcaaggcttctgtgtgacgttgtccaacactgcattttaaaataaactacggttgcacgtcagctttgctgtcaaggaattcaaagggcatataaacactcccaacctttcagggaagaact

SEQ ID NO: 26106 - DNA, 944 bp, Artificial sequence
  DNA replication origin
ttcactgaagctatatgagtggaaaaccagcacacaaaaagatgcctcacatcactagccattagggaagtgggcaatgatgcggctgctgtgagtggttgcgatgccggtgtgatggagatgtccctggctatggtagggcccttcctgtggggagacaggcagcagatgcccagggcacagctggctgggaggcaggcaccctcctgggaagcagggctgctgggctgggaggagactgtgcctcagggagaaggtgaggttgccctggtactgggtgggagtgagtggtgagggcctggccaaatgtaggtgacaggacagcctctgtgtccatttaacaaggcagagtttcagacagggtgtgaggcagccagagagacatttaatattcactgagcttcaggagagctgatcaccccaggccaaggccaacactgcccagtgtcctcactaagaaacccctcaggacacaggttccaacccagccactgaggggtgggggtttggggagtggagagagacagagagagaggtaggagggaagggagagggagagatagacagagggagaaatggaaggcactgagaaacagaagggacaggggagagagacagaaggaaaaagggagagggatcagagagggatacagaaagagggaggagggagacggggagagagaaagaaggagggacagaggcaaggagaggggaagagagagaggggaaaatagaggggagaaaggagaggcaggagggggaggagattggcatcaaatgccagctctagtattttatatcctggcttcatcatctgcttgcagggttaccatgagccagcaaagaataacactcacactgaaaggcattttgcacatgccacaagatccctgaaagagcccttatctcataaagatgcacacagcagggcttccatgaatgaa

SEQ ID NO: 26107 - DNA, 1290 bp, Artificial sequence
  DNA replication origin
aggagcgggaaagagctccctggtggagagggccgaagccaccgctgtccatcttggattcagaggccacgggagcggccgggttctgaggagggaagtgggtaaggacacgggaggccaagggcagctgcgctgggcaccgtgcgcgcccatcggggaccttccccggcggcgagggaggaaggaagggcgagcccggcggcctgcggggagggtcctggagccgggaggtggtcgcttctccagggcagccggtgtggatgccggttctcagggagagcagacaggcggcaatgagcctcttctgccggcggagacggggacagcgccacacacggctggaggtctgagaaaccgggcgcactgaaagcctcgcccggccccgcgttgcccgtccctggcccctcccggcttggggtccgcgcagtgtctccgtggccccgcgcgcgaccaggaggcctgcggaccccgcggagcccccgccctgaacgccccttccctccgcccgcctggaaacgctcttgctttgtgtggcaaataacgaggatgagctttgtttccagggaccgagactttgttatggaaccgagttgggatattgtatttccatgcttggtggtgctgggggtggggggcactgcaggccctgcaaaaaagggggtccctgccccatctcagcttctagcctttcctcataaaaggagttagctaaggactattaccctgggagacccaggagatggggtatgaggctgttcagatgggggctgaggatgagcctggtcctgaggcccagaggggccgcgcacaggccgaggcgctgcacacaggccgaggcgctgcacacaggccgaggtgctggggagggcaggcctcaaggggtccactggcacagaaaagggacagcctccgtgcccgggcggcttgctcgtgcatcctccatgggccttcggaagtagaagcagttcttccttctgctcagaatcatgtgttacctttgtagaagggcgacagccaaatggctttttgtttaaaaaccatagttatggtttgttattaaagcctttttttttatttcaataggttttagggggaacaggtggtgtctggttccatggataagttcttaggtggtgattcctgagattttggtgcacccctcaccttagcagtgtgccctgcacccaatgtgtagtcttttggaaaggaaacataaacaggaagaatggtttcagtctgagactcaagtaggagacttcattagcagacacttcttttggaagccaggct

SEQ ID NO: 26108 - DNA, 1210 bp, Artificial sequence
  DNA replication origin
agtacaggtagagttttagcgtcaagaaagagaatgggaaagcaaaaattaacaaaattaagtatttaaaaagggaatacagtagcagaggtaaagaagattaaagtcagacgattacatgctgataaaaaaaatacagatttcacacaatgggtgattttctggaaaaacatgtattattaaaattctagaaactagtggaaccaatggatactgtctttgggatctcccacgcccattctcctctctttgccattaaattcttcctcgctgtggaacacaagtctcaaagtcacccctgcagccacctcagctggactcggcccgcggccacggagcaccccccagctgggcgctgcctggagaacccacgcctctgcggagcacacggaggggcggcccattgatttccgtgcgcggctgtattttttttttttttttttaggcttctctctcccccggggcctctcgcaggcagggcccgtcctctctatagcgccgccctttctccgagctggggccgtggagtggcagtagcgctgtgaccttggcgggaccgcggtggagagtggggcgatttgctgtgagcaggaggacctgggggtgtttatgggcctcagaaggtgtgaggggacctgatggaggcgttctaggaggaggccaagggggtgtcgctgcaaggggagggaaggaagggagggaaggaaagaaggaagaaggaagcaaaaaatggagggagaaaagagggagggaggaagggagggaagaaaggaaggaaaggaaggaaaagagggagggagggaaggaaagaagaaaagaagggaaggaaggaagggaaggaagaaagaaggaaaggaagggagggaggaaggaaagatggaagcaaggaaggaagaaaggaaaagagggagggaggagggaaggaaggaaaaggagatgggaaggagcaaaggaaggagggaaggaaggaagaaaggaaggaaggaaaagagggaggaaggaagaatggaagggaggaaggaaggaaaagagggagggaggaaggaaggatggaagggagggagggagagaggaaggaaggaaggaaaagaggaagggagggaagtaagaaaggagcgggaaagagctccctggtggagagggccgaagccaccgctgtccatcttggattcagaggccacgggagcggccgggttctgaggagggaagt

SEQ ID NO: 26109 - DNA, 1305 bp, Artificial sequence
  DNA replication origin
ctcaatctcttccccacctttcccgcctttctattccacaaagccgccattgtcatcctggcccgttctcaatgagctgttgggcacacctcccagacggggtggtggccgggcagaggggctcctcacttcccagtaggggcggccgggcagaggcgcccctcacctcccagacggggcggctggccgggcggagggctgacccccccacctccctcccggacggggcggctggccaggcggggggctgacccccccacctccctcccggactgggcggctggccgggtgggggggctgacccccccatctccctcccggacggggtggctggccgggctgaggggctcctcacttcccagtaggggcggccgggcagaggtgcccctcacctcccggacggggcggctggccgggcggggggctgacccccccccacctccctcccggacggggtggctgccgggcggagacgctcctcacttcccagatggggtggctgccgggcggagaggctcctcacttctcagacggggcagctgctgggcggaggggctcctcacttctcagacggggtggttgccaggcagagggtctcctcacttctcagacggggcggccgggcagagacgctcctcacctcccagacggggtctcggccgggcagaggtgctcctcacatcccagatggggcggcggggcagaggcgctccccacatctcagacgatgggtggccgggcagagacgctcctcacttcctagatgtgatggcggctgggaagaggcgctcctcacttcctagatgggatggcggccgggcggagatgctccttactttccagactgggcagccaggcagaggggctcctcacatcccagacgatgggcggccaggcagagacactcctcacttcccagacggggtggcggccgggcagaggctgcaatctcggcactttgggaggccaaggcaggcggctgggaggtgtaggttgtagtgagctgagatcacgccactgcactccagcctgggcaccattgagcactgagtgaacgagactccgtctgcaatcccggcacctcgggaggccgaggttggcagatcactcgcggttaggggctggagaccggcccggccaacacagcgaaaccccgtctccaccaaaaccagtcaggcgtggcggcgcgtgcctgcaatcgcaggcattcggcagactgaggcaggagaatcaggcagggaggttgcagtgagccgagatggcagcagtacagtccagcttcggccccgcatgagagggagaccg

SEQ ID NO: 26110 - DNA, 880 bp, Artificial sequence
  DNA replication origin
ctgagaagtgaggagcccctccgcccagcagctgccccgtctgagaagtgaggagcctctccgcccggcagccaccccatctgggaagtgaggagcgtctccgcccggcagccaccccgtccgggagggaggtgggggggggtcagccccccgcccggccagccgccccgtccgggaggtgaggggcacctctgcccggccgcccctactgggaagtgaggagcccctcagcccggccagccaccccgtccgggagggagatgggggggtcagcccccccacccggccagccgcccagtccgggagggaggtgggggggtcagccccccgcctggccagccgccccgtccgggagggaggtgggggggtcagccctccgcccggccagccgccccgtctgggaggtgaggggcgcctctgcccggccgcccctactgggaagtgaggagcccctctgcccggccaccaccccgtctgggaggtgtgcccaacagctcattgagaacgggccaggatgacaatggcggctttgtggaatagaaaggcgggaaaggtggggaagagattgagaaatcggatggttgccgtgtctgtgtagaaagaagtagacatgggagacttttcattttgttctgcactaagaaaaattcctctgccttgggatcctgttgatctgtgaccttacccccaaccctgtgctctctgaaacatgtgctgtgtccactcagggttaaatggattaagggcggtacaagatgtgctttgttaaacagatgcttgaaggcagcatgctcgttaagagtcatcaccaatccctaatctcaagtaatcagggacacaaacactgcggaaggccgcagggtcctctgcctaggaaaac

SEQ ID NO: 26111 - DNA, 1084 bp, Artificial sequence
  DNA replication origin
ggcgttgagggcctcggagagaacggtgctggcagcaggggcggcaggaggggcccgggcccacccccacctcgcagggcccgagttcgggggcacggttgcaggcagaaagagcgcagagccggagagagggccggcagtagcccacacgaacgatttggggttgagtgtgaggactggaaggttccaccgactctgaaccatctattttttttttctaaaaataagccacaactatctattttttctttctaaaatttggtgacttcggtgtgagtcttgcttggaaggagggtcctgggcgccatcgcggggaggacctggaggggtgggttggggctgtggcatactccgccctgtgccgccggcttacagctcccctacccctctcccgccagctgcaggtgtccctacgggcgggagctctgcccagggtggccctgccctaggcaagtcaagcgcatggggcccaataaagcaaagccaggctgaagctgtggttcccgtgagagtgcagccacgggctggggtgaagggagggtcaccccagaggacgggctgtgtgctagtgtgttggggtcccccagaggtaggctgtgtgctagggtgttggggtcccctaggagacaggctgtgtgctagggtgttggggtcccctaagggacaggctgtgggattggagtgctccatcatctgcatgagaggcgatgaccaggtgggactaggaggagttaggatgtgtttggaagaactggatgaggaatgtgtgagaaagagggagagttctgggtgagcagaggcctctgtctcccagggaagaggcaggaagtgaggtggaacgagagcccctactcaaccccggacaaccactaacctgttccccattgatataactttgccgtttcaagaatgttgtagtcatggaatcagagtaaatagtctgttggaacttgctttttttcactgaggattttcactctggattcctctacgttgctgtgtatgaattgtctgttccttttgattgtggcgtggtcttcccggcatgcatgcaccgcagcctatttcacactcccctacggac

SEQ ID NO: 26112 - DNA, 923 bp, Artificial sequence
  DNA replication origin
gcctgtaatcccagctactcgggaggctgaggcaggagaaccgcttgaaccagggaggtggaggtgacggtgagccgagatggcgccattgcactccagcctggacaacaagaacgaaactgtctcaaaaaaaaaaaaaaaagaacattgttcttcgagttctttaaatatctgacataataccggcaaggaacgagaagcaccaggtttaggcgctgaggtgaaaatttggctgttgaaaggcagtccctctgcagccaactcccctctggtggacagtgtctaacatccagagaaaacacccgtcactgaacgctcccctccccacaaagcgctgcttggccccaaatcgtccctaatgcgctgctcagccccaaggcgtccctctgagcgagaaaccgcccctggctatgcttgcaggggcctggctgggtccacagggcatggctgtgtctctcggagcacggcccttctctccgggggcctggctgcgtctgcaaaggcgtcaatgtgtctccgggggcgtagcttgtctccggggcgtggtcgtgtctccgggaggtggctggtctcgggggcgtggcttgtctccaaggcgtggccgtgtctctgggggcatggcttgtctccggggcgtggttgtgtctcctggggcgtggtcgtgtctctggggcttggtagtgtctccgggggcatggcctgtctccgaggtgtggtcgtgtctccgggggcgtggcttttcgttggaggtggtctgtctgtgtcgggcgtgactgtgagccggaggcgtagccgtgtctcgggagcctggcggtgtccgcaggagcgatgctgtgaccgttgcatttgaagcattccttctagttcccggatcccagggagggggcaggagaagccctgcggccaagaaggcctgaagaagc

SEQ ID NO: 26113 - DNA, 1161 bp, Artificial sequence
  DNA replication origin
gggcagctgctgtctacctaaaccagctgcggtttgcttgcttggtgagcctgagcttcgcggggcgggcatggcatctgccatccaggaccctgggacggggcctgccagggcaaggagctgagcattgaacgcatctggggataactatctctcatagaagaactaatgaggattgaacctgaacacagagatgaaagagctgagtagactgcaaagaattgcacaaaaactgcttgttctgcaaatttagtttacaacaatttgagtgcagttcacattggtgtaatgtgatttaggatcataagtccctaaagtttcattacactgatgaaaagcaaatgcctatactgttcttgttttatgagaagaacgcaacctccagcccctggagcagctgagatctgaggatatcaggaataccaggaatggggaggtcctggctgtccctggaaacccagcggcatgacacctgtgtcacctgggtccccgtttctatgctggagtggcaggcagcaaggaaatattttgagtttgaggccatatgcattttggaaagatcactgtggctggggggttgggagcagctggggagttgaagaaagccactgccaaggccttcccactgagtgtggttgccaggccggggcagggaagcactggtgagctgcaggggggattcccagttggtgatgggtgatggatggtgggatcagtgggcccctgggaaaggccaggtgtggcttcagcactctgggagttttgggtacctttatgtctagggacacaaagaggtagatggacacagtggtttgagctgcagaagagagttgggcggccacctgtccacaggtgaggatgaggtttcttgggagagtagagagaaaggggaggcttttaactgttagtagtggaaagatggcttgcaatggagataaaggctaccacagaggggaggaaagcccagagcctggaggccagggggcaggatctggggcaggggctgacccagtgtggcattctccatatgctggaaatgtgagaagagactccacaagccggagctccctcagctccttggggccgctggctctaccagctcactcgctggttgttgggtttccgcagtttccatttggggttctgtcactgacctgcagg

SEQ ID NO: 26114 - DNA, 1370 bp, Artificial sequence
  DNA replication origin
tatctctgtatctgtgtgtgtgtctgtgtgtatctgtgtgtgtctgtgtatctgtgtgtgtctgtgtatctcgtgtgtgtgtctgtgctgcaggaggggctgtcggcaagtgtaaccttggcgtcctagctggagggcctctcagtgcccgctgggagagctctgaagggaacagaatgttcactgagcatttccccgttcttgttcatagggaaaagcctgtccgcagtcctgggccgcctctttagaggtaaagctggaaactatccccgcggagagcgctgtcggggacgccggggcggcgtggccttagacggagctgctctcagcccgcgccgccgggggctggggagctgaggggccgggggtgcggagcgggcgagctgtgggcggggccatgtgggcagctttgtgggcgtggccgggaggggcgtgctacgggcgtggccgcactgtgggcggggccgagtggggagtgctgtgggcggggccgggccgggggcgtgcctgggtgggggacccgctgcgggagcgccgagctccctctgagttcttacttcgaaggctgtgctccgctcaccatccagagcggaggtgcggaccttaaactcactcctggagaaagatctgcaagtgcgcaggtaaagtgcacgtgctccgcggtcgggaggaaggaggcgaggagccagactagcctgggaacaggcagggagggtttacacagccccggctgagtcgcggcttaggaagcaaggcaagttcccctaaaggttagtgtgcacagacgggtgcgacggagccgacctagcgcggctgagtccgcctgggcctgcagcagctgccccctgagcaccccctccggctctctgccaggcgacccaggaaaaagtcgccccctggtgggccatgaggtcatgggtggggggagtttggaaaggttcagacagcaaatgttccacttgaactccagggcagcatctggcactgcggggcctcctagccatgagccgtggtcaggcgtttccttagaatggaatgcactggagtgaaaacactaaatccctcaaagctgcttctctttactgtggtcacacacagtgaaatcaatgggcattagtgcagctagctcttttcaaggacacaatgttaagcacaggaagcctggtatgtggacgctctgggtttgcagaaccaggcaggggccaggggctcaggacaagtgcccggtgctcccttcccattgggcgaatcagagcctggggcccggcggtgaagctccccaggtgactctaatgtgcagtgcactttgaggagcactacttagaccaatgtgacagtctacaatgtgtagatttagggtgagtgattct

SEQ ID NO: 26115 - DNA, 900 bp, Artificial sequence
  DNA replication origin
cctggccactgcagctgtgtgtgtgtctgtagctgtgttgtctccatgtgtttgtgcgtgtatctgtgtgtgtgtctgtatctgtgtgtgtatctgtgtgtgtctgtgcgtatatctgtgtttgtatatctgtatatgtgtatctgcgtgtgtgtctgtgcatgtatctgtgtgtgtgtctgtatgtgtctatgtatctgtgtatctctgtgtctgcgtatctgtgtgtctgtgtatctctgtgtgtagatctctgtatctgtgtgtatctgtgcatgtgtgtatctgtgtgtctgtatctgtgtgcctgtgtatatctgtgtctgtgtatctctgtgtgtgtccgtgtgtgtatctgtgtgtgtctctgtatctctgtatctgtatgtatctctgtatctgtatctgtgtgtctgtacctgtgtctgtgtatctgtgtctgagtatctgtatatatttgtgtgtgtctgtgtatctgtgtctgtgtgtatatctgtgtatctgtgtgtatctctgtgcctgtgtgtgtgtctctgtgtatctgtgcatgtgtctgtgtgtatctgtgtatgtgtgtctgtgtatctgcatgtgtccttgtgtgtcatctgtgtatctgtgtcctgtatctgtgtgtctgtgtattgctgtgtctctgtgtgtgtctctgtgtatgtgtatctgtgtatctgtgtctgtgtatatcgtgtctatctctgtatctgtgtgtgtgtctgtgtgtatctgtgtgtgtctgtgtatctgtgtgtgtctgtgtatctcgtgtgtgtgtctgtgctgcaggaggggctgtcggcaagtgtaaccttggcgtcctagctggagggcctctcagtgcccgctgggagagctctgaagggaacagaatgttcactgagc

SEQ ID NO: 26116 - DNA, 2250 bp, Artificial sequence
  DNA replication origin
gcccaggaggtcctgcagacaaaagcctcccaccctgtggagctggcctccatgcagaatggacccattcgaagacctttttaaaacgatcttttgtattttcttgttttagaaacggggtccctctgtgcagcccaggctgcagggaggggcatggtcatagctcactgtagccctgagcgattccctgtttgaagtgttgactatcttgactatcggggaggagtgaggtctgcgcgattcggcctggaggaccctgagtaggactcactcgccagactggctgccagtgggcctggcccttcctgacatggtgagccatcatggcatgtccctggcagtgacaaggaatgtcctcaggccccgaccctcctgtccaggccacccagggcaggcctgtcaggggccttccttgttccaatttttcagaggcccagcgctctccttccgcatcctgcccacctgcccagctgcaggcagcatggggagggggatggggtggggagagggtagggaagacggtgtgtgtgagggtgagtgtatgtgaaggggccaagatttatgtgtttaggaggtgtgtatgtctgtggggggtgtgtgtgacgggctgtatgtaagggatgtatgtgtgtggggggtatatgtgtatgtgtatagggtgtacgtgtgtttggggttggtgtacgtgtgggtgtgtgggtgtgttttggtgtatttgtgtctggggtgtggggggagggtgtacgcatgggtgtgtgtgtacatgtgtgtggtgggtgtgtgttcatctgtgtggggtgtgtgcatgtgtggggtatgggagtgtgtgcgcatgcgtgtgcctggtgtgtgtggggtgtgtgtgcatgtgtgtgtctggtgtttgagtggggtgtgtgcatgtatgtctggtgtgtgtggggtgtgtgcatgtgtgtctggtgtgtggggtgtgtgtgcgtgtgtggtgtgtgtggggtgtgcgcatgtgtgtctggtgtttatgtggggtgtgtgcatgtgtctggtgtgtgtggggtatgtgtgtgggggggtgtatggggggtgtgtgcatgtgtgtctggagtgtgtgggttatgtgcgcatgtgtgtgcatgtgtgggtgtgggggtgcatgtgtgtagtgtgtgtggtgtgggggtgtggtgtgggtgtgtgtgtggtgtgggggtgtgtgatgtgggtgtgtgggtgtggtgtgtgtatggtgcggtgtgtgtgtggtgtggggtgtgtgtgtgcatgtgtgtctggggtgtttggggtgtgtgcatgtgtgtgggatgtgggggtgtgtgtggtggggtgtgtgcgcgcatgtgtggggtgtgtgtgcgtgtgtggggtgtgtgtgcatgtgtgtccggggtgtggggtgtgtgtgcatgtgtgtaggttgtgtgtatgtacgtgtgctgtgggggtgtgtgtggtgtgggggtgtggtgtgtgtatggtgtgaggatgtgtgtggtgtgtgtgtggtgtgggggtgtgtggtgcgtcgggtgtgtgtgcatgtgtgtctggggtgtgtgtgtgcatgtgtgtggtgtgtgcatgtgtggtgtgtggggtgtgtgtgcatgtgtggtgtgtggggtgtgtgtgcatgtgtcgggtgtggggggtgtgcatgtgtgtggtgtgtgtgcatgtgtgtctggggtgtggggtgtgtgtgcatatgtgtttgggatgtggggtgtgtgtgcatgtgtctgggatgtggagtgtgtgtgcatgtgtggggtgtgggtgtgtgtgtgcatgtctgtgatgtgtgtgtgcatgtgtgtctggggtgtgtgtgcatgtggggtgtgagaagtgtatgtgtgtgtgcatgtgtgtggggagttctgtggggtgtgttcacgtgtgtgaggtttgtaggggtgtgtgtacgtgcctcgggtgtgtgtgtgcgcatgtgtgtggggtgtgtgtatgtatgtgtctggggtggtgtgtgtgcgtgtgtgggtgtgtgtgcatgtgtgtgtggggtgtgtgtgtgcatgtgtcgggggtgtgtgtgcgtgtggggtgtgtgtgtgcgcgcgcgtgtgtgcatgtgttgggggtgtgtgtgtatgcatgtgtgtgggtgtgtgtgcgcgtctggggtgcggggagcatgcgtgtggtgggggttctgcctctcactccctcacccaggaggaggctgtacccaaggcagtgttgccagactgggccaagccagga

SEQ ID NO: 26117 - DNA, 1447 bp, Artificial sequence
  DNA replication origin
aaacaaggtcacctgccgaggtacgataggggttagggcttcaacatacgaattttgcaattctgaattcaacccataacactggcctcaaacaacaaatttgttctctcagagttctggagaccagaagtcccaaatccaggtgcgggcagggccatgcttcttccacaggctctaggggaaggtccttccttactttgtccagcttctgggagctccaggcttccttggtgttgggacgcattgtgccagtctctgcctgcgtcttcacatggcccctgcccctgtgttctgcatgtccttttctgtctctgaaaggactctttgagtttctttgactctaatccaacatgatgtcacctaaattcttaccttaatgacgtctacagagacctcattaaataagatcatattctgaggttccgaatgtatgtgaagttgggggacaggcacagtttaatccataaagtgtttgtgtggagagtaagtatgagaaatgtgagctgagggagtggggtgagtgtgcatgtgactgcgagtgagcacatgtgagtgtgggtgggtatgtgggcgtcctccagtgtgtgtgagagcatgcgtgtattagtggtgtgctggagcgtccgcacatattgatgagagtgagtgtgttagcggtcgatgggcaagtggctgagcgtttgtgttgcaagtgtgatggtgtgttggtagcatgtggttgtgtgggtgtgtgtccatgagagcatgtaagtgggcaggtgactacattcaggtgaagtgggagtgaaagcgtcagtgcattgagccagtgtgtgtgtgagggtgagcatgagggaggcatgagtgagtgtgaggggattactgggtgtgcgaatgagacacccagtgtaagtgtaagtcagtgtaagtcagtgagggttggtgagtgtgaggaagtatgagtgggtggcagcacaagtgtgtaagtgtgcgattgagtgcgagcatttgtgtaaatgtgtatgagtgccttgtgtcagtgtgagcacgagtgatgttattgtgaatgcgtgtgagtgaatgtgagcattttgcttgtgtcagtgaatgggaggttataacagtataggtgtgagtgcaaagtgagaaagtgtgtgggtaaaggtgtgagtgggtgagtaatcggtcgttactagtgttgaggagtgtgagtgcatatgtgagtttttgtatgcattgggaggggtaagtgtatgtgagagtgcatgggagtgtgtgtcagcttgcatctgtttgtgcatacgtgtgactgggattgtgtgtgtgttagtgattgcgacagtggtgtgagtgcacctgaaagtgtgagggtgggtgtatgagtgcccatgagtgtgtctgaataacttagtatcagtgtgagtgtgaggatgcatatgagggtgtgagagtgagtgtgtgtgtgtga

SEQ ID NO: 26118 - DNA, 822 bp, Artificial sequence
  DNA replication origin
tctcccgtgggagtgcgggagtgcgtgcgtgtggcggaaatcccgccttccggcgcccgctgttggccttggccgcagccagggcgctccaagtaggaagataagcgggattgctggaagcgggagagtcgggaggagcggcgaagggctcctcttccccattggctgcgcccacggagcagcctcgttgcgattggccgtacgcggggggcggcagtcccgcgtcggcccgcccctcgggccgcgagaggcgccgggatcgcgggcgccggctgagccagcggctcttgggaggctgcgtccgcgcgccggcgaggcgaggcggccgggccctgcgcgtcaggtcctggcctggggcacctgggcggccggtggcgggggcggtacgggcgcggggctggcgggcggccgagcccgggaggcgggcgtgggcgcggcggccgcaccggggcctgcgcggaccacccgcggggcagcctcgggcctctctccatctcttaagtggtggtggctgtgggtttttctgcaggcgatccttttgagtaattttttgtttcacgcacgcgccctgctgtggggtaaagcggcagattcatgctgctgtcatttgtcgttaaaacgatgggctccctgttatgtgtgtgtacttcttggatttgagggcagggggatgacattgtgacttggcttcctgtgaccgtccattctcaaggtctcgtcagcgtggtgcagaaactcggcacaccctgcttaccttggaaggaggctttcccttccccacctccctctccctccatctcttccctctttccctctctcccc

SEQ ID NO: 26119 - DNA, 2279 bp, Artificial sequence
  DNA replication origin
aaggatcatggatgaaaaccattattttatagattacatttatttatttatttatttatttatttatttatttgagaagtagtctcactctgtcacccaggccagagtgcagtggcgcaatctcggctcactgcaagctccaccccccggcttcacgccattctcctgcctcagcctcccaagtagctgggactacaggtgcccaccaccacacccagctaattttttgtatttttagtagagacggggtttcactgtgttaaccaggatggtctcgatctcctgacctcgtgatccgcccacctcggcctcccaaagtgctgggattacaggcgtgagccaccgcgcccagcctatagattacatttatgtggctagctcatgattctgcttccttctgaggttcaaaaaaacactttcactattccagcagcagctgcaggcggaggctgaccacctgggtaaggagctgcagagtgtgtcagcaaagctccaagcccaggtggaagagaacgagttgtggaaccgcctgaaccagcaacaggaggagaagatgtggaggcaggaggagaagatacaggagcgggaggagaagatacaggagcaggaggagaagatacgggagcaggaggagaagatgcggaggcaggaggagatgatgtgggagaaggaggagaagatgcggaggcaggaggagatgatgtgggagaaggaggagaagatacgggagctggaagagaagatgcacgagcaggagaagatacgggagcaggaagagaagaggcaggaggaggagaagatacgcgagcaggagaagaggcaggagcaggaggcgaagatgtggaggcaggaggagaagatacgggagcaggaagagaagatacgggagcaggagaaaaagatgtggaggcaggaggagaagattcacgagcaggagaagatacgggaggaggagaagaggcaggagcaggaggagatgtggaggcaggaggagaagataagggagcaggaggagatatggaggcaaaaggagaagatgcacgagcaggaggagaagatacggaagcaggaggagaaggtgtggaggcaggaggagaagatgcacgaccaggaggagaagatacgggagcaggaggagaaggtgtggaggcaggaggagaagatacgggagcaggaggagaagatgtggaggcaggaggagaagatacgggagcaggaggagatgtggagggaggaagagaagatgcatgagcaggagaagatatgggaggaggagaagaggcaggagcaggaggataagatgtggaggcaggaggagaagatacgggagcaggaggagaaggtgtggaggcaggaggagaagatacgggagcaggaggaaaagaggcaggagcaggaggagaagatgtggaagcaggaggagaagataagggagcaggaggagaagacacgggagcaggagaagatacgggagcaggaggagaagatacgagagcaggaggagatgatgcaggaacaggaagagaagatgggggagcaggaagagaagatgcaagaacaggagaagatgcggaggcaggaggagaagataagggagcaggaggagaagatacgggagcagaaggagaagatacgggagcaggaggagaagatatgggagcaggaggagaagatacgagagcaggaggagatgatgcaggaacaggaagagaagatgggggagcaggaggagaagatgtgggagcaggaagaggagatgcaagaacaggaggagaagatgcggaggcaggaggagaagataagggagcaggagaagaagatacgggagcaggaggagaagatacgagagcaggaggagatgatgcaggaacaggaagagaagatgggggagcaggaggggaagatgtgtgagcaggaagcgaagatgcaagaacaggaggagaagatgcggaggcaggaggagaagataagggagcaggagaagaagatacgggagcaggaggagaagatacgagagcaggaggagatgatgcaggaacaggaagagaagatgtgggagcaggaggagaagatgtgtgagcaggaagagaagatgcaagaacaggaggagaagatgcggaggcaggaggagaagatgcgggagcaggaagtgaggctgcggcagcaggaggagaagatgcaggaacactaggtgaggctgcaggagctggaggagaggctggggaagctggggcagaaggccgagctcttggggggagcaggcggaggtgtgtgcaaac

SEQ ID NO: 26120 - DNA, 1330 bp, Artificial sequence
  DNA replication origin
tctttattctttcctttcttctatacttattttgggtctggtttattcttgcttttctagttcttttaagatgtatcggcgccacgggccccgcagagccagggcggctcccgccggtagcctgtgtgtgggccccggccagccgcgcccccagtccatatcgcccttcactgccccgaggctggcgcggctatggggcgcggggccggcgctgctctggggcgttggagccgcgcgccgctggaggagctgctgccggggcgggggtctgggcggctcggggggccacgcgggcctcggacggctcccggggctgtgggcttgggcccggcagctgcaggtgcggggctcttgccggccgggcgctcctcggctcccgagcgccgggttcccgggcggtcccaccgccactgcctcggcaggggaggaggcctggcggcgcgggcgggcggcgccttcccgggacgaccagcggctacgacccatggcgcccggactctcggaggccgggaagctcctggggctggagtaccctgagcgccagaggctggcagctgcggttggatttctccgatgtccggtgttatctccatgtctgcccctttctttctggggaagatcatcgatgccatctataccaaccccactgtggactacagcgacaacctgacccgcctctgccttggcctcagtggcgtgtttctatgtggtgctgccgccaatgccattcgtgtctacctcatgcaaacttcacgtcagcgcgttgtgaagaggctgagaacttcgttattctcctccattctggggcaggaggttgctttctttgacaaggctggcacaggggaattgattaaccgcctctcatcggacactgcactcctggggcgctcagtgactgaaaacctctcagatgggctcagggccggggcccgggcttctgtaggcatcaggatgatgttttgtgtctcacctaatcgggccacctttgttgtgagtgtggtgcgtctagtgtcaatcattgatgtaatttatggacgatatctacggaaactgaccaaagtcacccaggattcgctggcacaagccactcaggaggaacgtattggaaatgttaagaactgttcgagcttttgggaaagaaatgactgaaatagaaaaataggccagcaaagtggaccatgtgatgtagtcagcaaggaaagaggcattcgctcgggctggcttctttggagaactaggctgtccggaaacctgattgtgctttctgtcctgtacaaaggggggctgctgatgggcagtgcccacatgaccatgggtgaactctcttcct

SEQ ID NO: 26121 - DNA, 2224 bp, Artificial sequence
  DNA replication origin
caacgcgtggacctgggccagatgagcagcttctacattggcctgtgttcccgcctccactgcaacatcttctcctacgactactccggctacggtgccagctcgggcaggccctccgagacgaacctctacgccgacatcgacgccgcccggcaggccctgcgcaccaggtgagggcgaccccgggggcagctcagcctgggcacaccggagaggggaccaggccgggggccggggggaagggcgggcttccctgggaggaaggtgggcggccctgcaggagaggagccacagtggacgcatgcggccagagagccggaaaggtgagctcaggcgtgcgggtgccgcctccacatggctgaggtgtggccaggtccccccacaccctggcctgtggagccaggctctctgggatcccctggcctgaggacaggaaggggctgagcttgtcacaggggcgtggacgccacccggcgggagggggtgggtggtgtctggggggggtctgtgcacgtgtggctgggagcccaatggccgaggcagcacttggggccaggtgaggcgaggctgctgcatcgaggtcccgaggcctggcccatgaggccctgtggctgtggagctcggccatcccggggcagggcctgctgggtcaggtgcagacccccagcacacacctgaggtctgggccagcctccattccagatccagccctcctaaacatccagctccccagccctgcgctttcctgggcccttcactggtgtttgagcaccgcccaccgcccgggccagtgctgctctggatcagaagacccgcgtgggcctctggaggcctttcctgcttgccacccgctggggctgtctcgtcctggccctgccccccactggtctgccccgctcctgcaggggccaggcgcagctctgagaagtcagaggccctggggaggtggggtcctcgatgccttggcgatatcccaggcagtcccttctgtgggcctgggagctgggtcccctggcaccaccctggctctgggggcctcctggcagtgtgggcgcagaaaccaagcaccacttcatgcagcttcctcggccccctcctgtctctactgcccagggcactggcagagtcacacccgccatggccagctctgagctctgtctgctcggccatctgtcctgctgctgctttgtcctgcaggaacctcggcccagagccatgagggggaggccagatcgcgctcagggcctccactgaggatgtgtcttgtttgattgtctgagtggtgacatccaggtggcagctgggggtcctgcctggagcaggtgacagggctgggctggctcagcacactactggccttggctgccagggagcaggccaaggaggctgaggcagagctggggccacaggcaccagccaggcagcatcctttggggcatgggtgaacagtgagctgtggagtgctgccaggaggctgggattccaggccaaggaggggtacagccctgctggtggagtccgaatgccaggcagatgggacgcacacctgcccatgctcctgcctcgcaggagggcatctgcctgggatcagagcctggagcgtgtgggaggagagttctggggttgcggcatcgacagggtggcaggtgggtcccgcgtggttgggactgggcacgaggaggccttggtactggtgctggaccagctgggccaggggccgcacaccagtgacctggcggtgggggtggccctgggtgggagctggtggtgctgaggtggccgaggacttgtccactcccaagggaaggcgctggtgggaggaggtgctgcccccgcagccgccaccctcgatgttgacctgggttgggctggcacctcattgagcatgggactccgagagtccaaaattgggtggagacatgtggggacacagctgcctgaattcctcatggccaagggggtgggcaagggctgcagggaggaagagtgtaccctgttccggccagtgcaccaggaacggctttctaacctgggcaggaaggcatgaagcattcaggatgtgggggggcacacagttcccagtgtgcgcccagggatgaccaggagaaggagaggcgccagggcttcccctaccctagcccgagggggactccctagccaggatccagcagatcctggctaggaaacgccagtgaaccatagcgccagggaacaggaccaggcc

SEQ ID NO: 26122 - DNA, 1032 bp, Artificial sequence
  DNA replication origin
gggtctgcacctgacccagcaggccctgccccgggatggccgagctccacagccacagggcctcatgggccaggcctcgggacctcgatgcagcagcctcgcctcacctggccccaagtgctgcctcggccattgggctcccagccacacgtgcacagaccccccccagacaccacccaccccctcccgccgggtggcgtccacgcccctgtgacaagctcagccccttcctgtcctcaggccaggggatcccagagagcctggctccacaggccagggtgtggggggacctggccacacctcagccatgtggaggcggcacccgcacgcctgagctcacctttccggctctctggccgcatgcgtccactgtggctcctctcctgcagggccgcccaccttcctcccagggaagcccgcccttccccccggcccccggcctggtcccctctccggtgtgcccaggctgagctgcccccggggtcgccctcacctggtgcgcagggcctgccgggcggcgtcgatgtcggcgtagaggttcgtctcggagggcctgcccgagctggcaccgtagccggagtagtcgtaggagaagatgttgcagtggaggcgggaacacaggccaatgtagaagctgctcatctggcccaggtccacgcgttgccttccttgttcatgcaccgctggtcagacgcaattcagctgatgtaggctgggcttggctagcattggcttgaagctgcagctggtgtccagatctgttccatgtatttgtgatcctcctcagccctcccgggtacttgaagcatgttattgttgtggccaaagtcaggagtgcaacctgcctgtgcaaaaacatgccaggcttctgttgccttaaatcctctaagatacccctttggcttaagcagagtcacacagcaaggatcaaagtcaaggagtggggaattatatctgtcccttagagatggagataggagagagtgtgaacaaatgcaggaaaatgatctcatctaccagagtgtccttaaa

SEQ ID NO: 26123 - DNA, 1376 bp, Artificial sequence
  DNA replication origin
tattctttcctttcttctatacttattttgggtctggtttattcttgcttttctagttcttttaagatgtatcggcgccacgggccccgcagagccagggcggctcccgccggtagcctgtgtgtgggccccggccagccgcgcccccagtccatatcgcccttcactgccccgaggctggcgcggctatggggcgcggggccggagctgctctggggcgttggagccgcgcgccgctggaggagctgctgccggggcgggggtctgggcggctcggggggccacgcgggcctcggacggctcccggggctgtgggcttgggcccggcagctgcaggtgcggggctcttgccggccgggcgctcctcggctcccgcgcaccgggttcccgggcggtcccaccgccactgcctcggcaggggaggaggcctggcggcgcgggcgggcggcgccttcccgggacgaccagcggctacgacccatggcgcccggactctcggaggccgggaagctcctggggctggagtaccctgagcgccagaggctggcagctgcggttggatttctccgatgtccggtgttatctccatgtctgcccctttctttctggggaagatcatcgatgccatctataccaaccccactgtggactacagcgacaacctgacccgcctctgccttggcctcagtggcgtgtttctatgtggtgctgccgccaatgccattcgtgtctacctcatgcaaacttcacgtcagcgcgttgtgaagaggctgagaacttcgttattctcctccattctggggcaggaggttgctttctttgacaaggctggcacaggggaattgattaaccgcctctcatcggacactgcactcctggggcgctcagtgactgaaaacctctcagatgggctcagggccggggcccgggcttctgtaggcatcaggatgatgttttgtgtctcacctaatcgggccacctttgttgtgagtgtggtgcgtctagtgtcaatcattgatgtaatttatggacgatatctacggaaactgaccaaagtcacccaggattcgctggcacaagccactcaggaggaacgtattggaaatgttaagaactgttcgagcttttgggaaagaaatgactgaaatagaaaaataggccagcaaagtggaccatgtgatgtagtcagcaaggaaagaggcattcgctcgggctggcttctttggagaactaggctgtccggaaacctgattgtgctttctgtcctgtacaaaggggggctgctgatgggcagtgcccacatgaccatgggtgaactctcttccttcctatgtatgctttcggggttggaataagcattggaggtctgagctctt

SEQ ID NO: 26124 - DNA, 1113 bp, Artificial sequence
  DNA replication origin
actgtcaaggtctgtggtaaggaagtcaggcagcctgaaacctctctcttctaggtcccacagtccccattccccttccagctggaaacctgtgctgcaaccagaggaaacagaagtgggcaagaacacttaggggactgggtcctaagaccaaaggccggtcttgtggtagtaatgacagtttgtagcgggactgtgacatcactacattctactcctcggtggagtggttgggggggacacatgagtgcaatgcccaagttgccgctttgagactggggagggggtcacaaaattgggagccaggtccttggagacgtgaccccaaagagccccgggaggtcaggcttggggcggcaggaggtgagggccaattaaggagcaaggagctccaggagtcacatccccaaagtcaccctgtggcaactggtgagggcaggttctggggcacccaggtccttggagctgtgagctcaaggagcccagggaggtcgggtttggggtagcaggaggtaagggcggagtatggagttggaagccccaggagtcacctgctcaaagtcaccctggtgtgccgggcagagcaggggcaggacttatgagggggttgggctggctgacaagattttggtgtggggagcccagaggcactggggtggggggcccagcctggtgtccctcaggagtggcacagactctggcagcagttcggctgtcagagggggcctcgggttgggttggggtgttggtgcgtttacctgttccttggcctcggccaatttgctctgtctggtttctttggacatcataggatgggtagggaggtggggatgggtagggaggtggggatgggtagggaggtggggatgggtagggaggtggggttggggccacatcagcatgatccaggtgaggacaagtatatacctccagtcacctctacgtcgctgtgtgactgagccagaggaggcgtaaccagggctgcactagaatgcagaataggggtgtggccttcatgcttgaagcccattggtcaatgagaaagatgaaaggaaaaggaggtgtggccagacagcagcgtgtcatcaaggacctgtgttgtcacaaggaaag

SEQ ID NO: 26125 - DNA, 2362 bp, Artificial sequence
  DNA replication origin
ctgcctggggaatcagaatctcaagagttagggcttaaaaatatttttttaaaggatcatggatgaaaaccattattttatagattacatttatttatttatttatttatttatttatttatttatttgagaagtagtctcactctgtcacccaggccagagtgcagtggcgcaatctcggctcactgcaagctccaccccccggcttcacgccattctcctgcctcagcctcccaagtagctgggactacaggtgcccaccaccacacccagctaattttttgtatttttagtagagacggggtttcactgtgttaaccaggatggtctcgatctcctgacctcgtgatccgcccacctcggcctcccaaagtgctgggattacaggcgtgagccaccgcgcccagcctatagattacatttatgtggctagctcatgattctgcttccttctgaggttcaaaaaaacactttcactattccagcagcagctgcaggcggaggctgaccacctgggtaaggagctgcagagtgtgtcagcaaagctccaagcccaggtggaagagaacgagttgtggaaccgcctgaaccagcaacaggaggagaagatgtggaggcaggaggagaagatacaggagcgggaggagaagatacaggagcaggaggagaagatacgggagcaggaggagaagatgcggaggcaggaggagatgatgtgggagaaggaggagaagatgcggaggcaggaggagatgatgtgggagaaggaggagaagatacgggagctggaagagaagatgcacgagcaggagaagatacgggagcaggaagagaagaggcaggaggaggagaagatacgcgagcaggagaagaggcaggagcaggaggcgaagatgtggaggcaggaggagaagatacgggagcaggaagagaagatacgggagcaggagaaaaagatgtggaggcaggaggagaagattcacgagcaggagaagatacgggaggaggagaagaggcaggagcaggaggagatgtggaggcaggaggagaagataagggagcaggaggagatatggaggcaaaaggagaagatgcacgagcaggaggagaagatacggaagcaggaggagaaggtgtggaggcaggaggagaagatgcacgaccaggaggagaagatacgggagcaggaggagaaggtgtggaggcaggaggagaagatacgggagcaggaggagaagatgtggaggcaggaggagaagatacgggagcaggaggagatgtggagggaggaagagaagatgcatgagcaggagaagatatgggaggaggagaagaggcaggagcaggaggataagatgtggaggcaggaggagaagatacgggagcaggaggagaaggtgtggaggcaggaggagaagatacgggagcaggaggaaaagaggcaggagcaggaggagaagatgtggaagcaggaggagaagataagggagcaggaggagaagatacgggagcaggagaagatacgggagcaggaggagaagatacgagagcaggaggagatgatgcaggaacaggaagagaagatgggggagcaggaagagaagatgcaagaacaggagaagatgcggaggcaggaggagaagataagggagcaggaggagaagatacgggagcagaaggagaagatacgggagcaggaggagaagatatgggagcaggaggagaagatacgagagcaggaggagatgatgcaggaacaggaagagaagatgggggagcaggaggagaagatgtgggagcaggaagaggagatgcaagaacaggaggagaagatgcggaggcaggaggagaagataagggagcaggagaagaagatacgggagcaggaggagaagatacgagagcaggaggagatgatgcaggaacaggaagagaagatgggggagcaggaggggaagatgtgtgagcaggaagcgaagatgcaagaacaggaggagaagatgcggaggcaggaggagaagataagggagcaggagaagaagatacgggagcaggaggagaagatacgagagcaggaggagatgatgcaggaacaggaagagaagatgtgggagcaggaggagaagatgtgtgagcaggaagagaagatgcaagaacaggaggagaagatgcggaggcaggaggagaagatgcgggagcaggaagtgaggctgcggcagcaggaggagaagatgcaggaacactaggtgaggctgcaggagctggaggagaggctggggaagctggggcagaaggccgagctcttggggggagcaggcggaggtgtgtgcaaaccctggagatcatacagaacgacctcacc

SEQ ID NO: 26126 - DNA, 1408 bp, Artificial sequence
  DNA replication origin
ataggggttagggcttcaacatacgaattttgcaattctgaattcaacccgtaacactggcttcaaacaacaaatttgttctctcagagttctggagaccagaagtcccaaatccaggtgcgggcagggccatgcttcttccacaggctctaggggaaggtccttccttactttgtccagcttctgggagctccaggcttccttggtgttgggacgcattgtgccagtctctgcctgcgtcttcacatggcccctgcccctgtgttctgcatgtccttttctgtctctgaaaggactctttcattgagtttctttgactctaatccaacatgatgtcacctaaattcttaccttaatgacgtctacagagacctcattaaataagatcatattctgaggttccgaatgtatgtgaagttggaggacaggcacagtttaatccataaagtgtttgtgtgtgtggagagtaagtatgagaaatgtgagctgagggagtggggtgagtgtgcatgtgactgcgagtgagcacatgtgagtgtgggtgggtatgtgggcgtcctccagtgtgtgtgtgagagcatgcgtgtattagtggtgtgctggagcgtccgcacatattgatgagagtgagtgtgttagtggtcgatgggcaagtggctgagcgtttgtgttgcaagtgtgatggtgtgtttgtagcatgtggttgtgtgggtgtgtgtccatgagagcatgtgagtgggcaggtgactacattcaggtgaagtgggagtgaaagcgtcagtgcattgagccagtgtgtgtgtgagggtgagcacgagggaggcatgagtgtgagtgtgaggggattactgggtgtgcgaatgagacacccagtgtaagtgtaagtcagtgagggttggtgagtgtgaggaagtatgagtgggtggcaggcacaagtgtaagtgtgcgattgagtgcgagcatttgtgtaaatgtgtatgagtgccttgtgtcagtgtgagcacgagtgatgttattgtgaatgcgtgtgagtgaatgtgagcattttgcttgtgtcagtgaatgggaggttataacagtataggtgtgagtgtaaagtgagaaagtgtgtgggtaaaggtgtgagtgggtgagtaatcggtcgttactagtgttgaggagtgtgagtgcatatgtgagtttttgtatgcattgggaggggtaagtgtatgtgagagtgcatgggagtgtgtgtcagcttgcatctgtttgtgcatacgtgtgactgggattgtgtgtgtgttagtgattgcgacagtggtgtgagtgcacctgaaagtgtgagggtgggtgtatgagtgcccatgagtgtgtctgaataacttagtatcagtgtgagtgtgaggatgcatatgagggtgtgagagtg

SEQ ID NO: 26127 - DNA, 952 bp, Artificial sequence
  DNA replication origin
gctggaaatttgtcctgtgaccagaggaaccagaaacgaggtgagaacgcttaggggactgggtcataagatcaaaggccagtcttgcagtaacggcagttactaggtgggctgtgacatcacaacattccactcctcctggtcggggggagggaccatgtcagcaccatgtctaagtcgctgctccacgatgggggagggaagcacagggttgggacccagctccttggagacgccagcacaaagaacccagggaggtcgaccttgaggcagcaggaggggagggcagagtctgcagcagggagccccaggagtcaccagcccaaagtcacccagggatgattggcgagggtggggcctggctcctcagagatgagagcccaaagagcccagggagatcaagcttggggcggcaggagatgagggcccagtaacggagcgggaagccccaggagtcacccacccaaagtcaccctggggtgattggcgagggcaaggactgggctgctttctgaaggggtggggctgactgacaaaactttgatgggggtagcccaaggcaccggggttggggggaccagtccagtgtgcctcaggagtcgtatagactctggcaggggtcttgtcatcagaggggatctgtggctgggttgaggggctatgacctagtgcgtttttacctttttcttggctgcagccaatttgttgtgttgagtttcttctgccatcgcagggtggggagggaggcagggttggggccacagcagcaaaatcgcaatgagaaccgatcaaggcctccagtcaccttccaggcagctgtgtgactgagccagaggaggcgtaaccagggccccagtagaatgcggaataggggtgtggccttaatgctccaagcccattggtcaatgagaaagatgaaagggaaagggggcgtggccagacagcagcgtgt

SEQ ID NO: 26128 - DNA, 1198 bp, Artificial sequence
  DNA replication origin
gggtgctgggcctgcaggggcgcgggggggagggcgacgctaggacctgcggggccgggcgggagagagggctgccgggaccggccctagacactgagccgcggtgggatccccgccggctctgcgaggccctgcgagcgccagggaggcgcctcgagggagccgggcagccgccggccacttcaggggggcccgccacttcagggcggtcgaaagagccttgggggcacatctcggggtgcggtgacccgcccggcgcatttcgggggtcggggcgcatttgccaggggacatctggagcccggccctgcttctgtcgggctccagggtacccctggatggctgcgctgtgccctcgccggcggcccgggcgccacagcggctgagttcgccgggatcgccgggccgccgccgcccttgccaccggctgcatgctcggcgcccgggtcgcggcccacctggacgcactgggccccctggtcccctacgtgccgccgccgctgctgccctctatgttctacgtgggcctgttcttcgtcaatgtgctgatcctgtactacgccttcctcatggagtacatcgtcctcaacgtgggcctcgtcttcctgttcgaggacatggaccaggcgctcgtggacctcggcgtgctctccgaccccggctcgggcctttacgatgctgactcggagctcgacgtctttgatgggtacttggagtagggtctcgactgccgttcccctcttccctccacgatccgcaacccacgccctggaccagccgcccagatcatggcgccgcagcagctggttgggggcaccatctggacggggatggttccccaggaggagaccctcccctgcctccgaggcctgcctgctaccctcaaaagcttcgtgccaacagagaggttcctgtttggacccaggagagtggaagagagattgggactgagtgctgagattgggaaggcacctgctcccacagaagggggaacgcaaggggcgtcccaagacctcatctgcctgcagcgtcacaccgatggcctggcctcggcttctcattatttgcaactgccatggatgtttacaggaacccagccagagtttgcctccctgcacttcatcccagagcgcacctgcttcctccacttcaccttcggagaggacacttcaaactgcggacacacgcaaaagcaact

SEQ ID NO: 26129 - DNA, 1656 bp, Artificial sequence
  DNA replication origin
ccacctgggacttttaattcctggggtcccttccagtgccacggttctgtggttgtggggcgagggtagagggtcgatcaccaaagcggtcctttctgttcttcgttcattcctttctctactgcctccggccatagcataaccaataaggagctgaaggagaaaaatgccgaactacaagaaaaacttcgactggtagaaactgaaaagtctgagatccagctccacatcaaggagctaaaaaggaaactggagacggacaaaatcccgctgccacaggtgagcggcggcagccccgggggtgtgggagccgcatccggctgggacatggtctagggatcatgcagggtgtggggaggctccagccaagagctggaaaatttgggtccttgttctggtcccaccacagaatcctctagagtgtgctaaaaatctacaaattgggaccatgcctgggaaatcagaacctcagggttacggcttaaaatttctttttaaagaatcatagacgaaaaccgttattttatagattacatttatatacctagcttatgactctatttccttttgaggttcaaaccaacactttgcaggagaagatgtggaggcaggaggaggagctacgggatcaggaggagctacgggatcaggagaagctacggaagcacgaggagaagatgtggagacaggagcagaggctgcgggaccaggagaaggagctgcgggagcaggagcagcagatgcaggagcaggaggagcagatgcggaagcaggaggagcagatgcggaagcaggaggagcagatgcggaagcaggaggagcagatgcggaagcaggaggagcagatgcggaagcaggaggagcagatgcggaagcaggaggagcagatggggaagcaggaggagcagatgggggagcaggaggagcagatgcggaagcaggagaagcagatgctgaagcagaaggagcagatgcggaagcaggaggagcagatgtggaagcaggaggagcagataggggagcaggaggagcagatgcggaagcaggaggagcagatgtggaagcaggaggagcagataggggagcaggaggagcagatgcgaaagcaggaggagcagatgtggaagcaggaggagcagatgggggagcagatgaggaagcaggaggagcagatgggggagcaggaggagcagatccggaagcaggaggagcagatgggggagcaggaggagcagatgcggaagcaggaggagcagatgggggagcaggaggagcagatgcggaagcaggaggagcagatgggggagcaggaggagcagatgaggaagcaggaggagcagatgggggagcaggaggagcagatgggggagcaggaggagcagatgcggaagcaggtggagaggctgcaattcaaggaggagaggctgtgggatgagtatgagaagatgcaggaggaggaggagaagatccggaggcaggtggagaagaggcgggagaagaaggagaggatgggagagcaggagaagacgcaggaggagcggtgctcagagccctgcctccctccctccaaatatccttctgatatgagccaccctggcagcctggagcctgcacgagaggccgggaagggttattcccatgacaaccgcactgcac

SEQ ID NO: 26130 - DNA, 1342 bp, Artificial sequence
  DNA replication origin
acctgggtgttgaaatcccagctctaagtgatcttaggcaagcacttaacctttaataccccatgtttttcatctacacaatagaggtgataatgataactgtctcctgtggtggctgtgaggattaaatgggattgttagcatagtgcctggtgaagcactcaagaaaggttccaacagtggtaataataacagtaatagcaataacaatattatctgatcgctctgggcccctgttagccagctatcaattcagtctctttctctgtgccttccacccttactgagttctccgaaaaacaagtgagagccaggtgcagtggcacatgcctgtaatcccagctacttaggaggctgaggcagaagaatcgcttgaagccgggaggcggaggttgcggtggggtgagatcgcgccattgcactccagcctgggcaacaagagcgaaactccatctcaaaaaaaaaaaaaaaaagaaaagaaaaacaaatgacaccacgggtttggaaacgccttgagaacatgtcgggtgtgacggagaggagcaagtgttactgtggagtatcagtgtagctgtcgttactggtcgtccagctgctcctctgcctgctgtatcctgacttgacctttctctgtttgcagtacatcaaggagttaacaaaggagagggaagccatgagtctggagctgttcaggaacatgtaggataggggagggggggatgggaggtctgagagcccttagcgtgggtggtgtgctgggaggtggggggtacaggtgagcatggtagggggtcatacaggtttacatgtgtgtgcagggaagctccagtgccggctgtgccactgactcatggggtagcctcaggcaactcatgtcttctctctggcctgccacctgggacttttaattcctggggtcccttccagtgccacggttctgtggttgtggggcgagggtagagggtcgatcaccaaagcggtcctttctgttcttcgttcattcctttctctactgcctccggccatagcataaccaataaggagctgaaggagaaaaatgccgaactacaagaaaaacttcgactggtagaaactgaaaagtctgagatccagctccacatcaaggagctaaaaaggaaactggagacggacaaaatcccgctgccacaggtgagcggcggcagccccgggggtgtgggagccgcatccggctgggacatggtctagggatcatgcagggtgtggggaggctccagccaagagctggaaaatttgggtccttgttctggtcccaccacagaatcctctagagtgtgctaaaaatctacaaattgggaccatg

SEQ ID NO: 26131 - DNA, 891 bp, Artificial sequence
  DNA replication origin
tgagaagtgaggagaccctccgcctggcaaccgccccatctgagaagtgaggagcccctccacccggcagccgccccgtcagagaagtgaggagcccctccgcccggcagccaccccgtctgggaagtgaggagcgtctccgcccggcagccaccccgtccgggagggaggtgggggtcaacccccgcccggccagccgccccgtccgggagggaggtgggggggtcagccccccgcctggccagccgccccgtccgggaggtgaggggcgcctctgcccggccgcccctactgggaagtgaggagcccctctgcccggccagccaccccgtccgggagggaggtgggggggtcagccccccgcccagccagtcgccccgtccgggaggtgaggggcgcctctgcccggctgcccctactgggaagtgaggagcccctctgcctggccgccaccccgtctgggaggtgtgcccagcagctcattgagaatgggccatgatgacaatggcggttttgtagaatagaaaggggggaaaggtggggaaaagattgagaggttggatggttgccgtgtctgtgtagagggaggtagacatgggagacttctcattttgttctgtactaagaaaaattattctgccttgggatcctgttgatctgtgaccttacccccaaccctgtgctctctgaaacatgtgctgtgtccactcagggttaaatggattaagggcggtgcaagatgtgctttgttaaacagatgtttgaaggcagcatgctcgttaaaagtcatcaccactctctaatctcaagtaccccgggacacaaacactgcagaaggccgtagggtcctctgcctaggaaaaccagagacctttgttcacttgtttatct

SEQ ID NO: 26132 - DNA, 1166 bp, Artificial sequence
  DNA replication origin
cagacacggcaaccatccaacctctcaatcttttccccacctttcccccctttctattctacaaaaccgccattgtcatcatggcccattctcaatgagctgctgggcacacctcccagacggggtggcggccaggcagaggggctcctcacttcccagtaggggcagccgggcagaggcgcccctcacctcccggacggggcgactggctgggcggggggctgacccccccacctccctcccggacggggtggctggccgggcagaggggctcctcacttcccagtaggggcggccgggcagaggcgcccctcacctcccggacggggcggctggccaggcggggggctgacccccccacctccctcccggacggggcggctggccgggcgggggttgacccccacctccctcccggacggggtggctgccgggcggagacgctcctcacttcccagacggggtggctgccgggcggaggggctcctcacttctctgacggggcggctgccgggtggaggggctcctcacttctcagatggggcggttgccaggcggagggtctcctcacttctcagacggggcggccgggcagagacgctcctcaccttccaggcggggtcgcggccgggtagaggcgctcctcacatcccagacggggtggcggggcagaggcgctccccacatctcagacgatgggcggccgggcagaggcgctcctcacttcctagatgggatggcggccgggaagaggcgctcctcattttccagactgggcagccaggcagaggggctcctcacatcccagacgatgggcagccaggcagagacgctcctcacttcccagacgatgggcggccaggcagagacgctcctcacttcccagacggggtggcagccgggcagaggctgcaatctcggcactttggggggccaaggcaggcggctgggaggtggaggttgtagcgagccgagatcacgccactgcactccagcctgggcaccattgagcgctgagtgaaccagactccgtctgcaatcccggcacctcgggaggccgaggctggcagatcactcgcggttaggagctggagaccagcccggccaacacagcgaaaccccgtctccaccaaaaaaatacgaaaaccagtcaggcgtggcggcgc

SEQ ID NO: 26133 - DNA, 1749 bp, Artificial sequence
  DNA replication origin
atagcttcccgaatagcggcgggcgcgccccggacgcagcgtacggcacgcagggccgcctctgccgggcgcacgcggcgcggctgcggggcgcatcccgcaccggcctgcggctgccgggcctgcgcccccgccccggccgcttccgcctcacccgcgccgggcacactggggccggaaaacgattcccggctagatcgcgcgccgtgaagagagggaagacaaagatgcgtccgtgccgggcgtgcgcgaggtcctgcgccccctggccccggcgctgggacagtctgcagggcaggagggtgcactcgggaccccgggtccccccgggccggtctccgggatcggggctgggacccaggcgctggaaggcgcggcgccccgaacgccccgggccctggggagcacacagattcccgggcgtgccccggccgtgctggctggggagctgcaggggtctggtcccgcaggtagagccagtgaacgcgaggctccgcaggtagagccggtgaacgcgaggctccgcaccttgccccggccgccgcgccctgcttgctcggccccgcgcagctgtaatgggggaccctagagcgaagaaccctcgagcgaagaactctcggggatcgcggcctccgaaggccccatccggcagaggaggccccctgctgcctccccaccgcagctcccctaggcgcatgctggactcccaagtcttccctggcggtccccggtaaccatcccagcaccccgtttctgatactctgtgctgctttagcccccagccccagggcctcactccagggctttctctccttgctgtcctaaatggagagaaccctgacctccgcggggccctggggagcgtacactcctagacactcacatgcatccccaggggagccagtcttccgcccctacagcgcgagaaatgccctggaggccctcgaaggtcgtgctggagactccggtgtcacctttggccctctggccctttcactgagtcccaggcagatgtgatgagccatgggagatgcacaggatgccttgtctgggcagagcgggggctcaggggcctccctccccccaaatcgtggtgatttgccctcgttttcttttctcctgtggctggattaggcgaagctgtggcatgggaagttctgcccaggtcagaaggcacagaagggcagggggacttgggagtgaggacagcgcatcttcctgctgccctgagggcccgagctgagaccctaaggagaaggggctgggggaagccgaatcctgagatggactagggttagatacactgtggacttggcctctccacaccctgcccccaccaaacattcacaggtttccagggccagagccgccagtgggggctgctcctggtaggggagctttgtagccacagggccaaacaaaggggcaaaggccagggcaggccaacgaggttcctgacctatgcccctccgtactcagatgagcacaccttcactgtctactttccacctgcatagacattctgcttacctggctaacacaaagttcatccagcctcctgtggcccagcctttcaccaatgccaatagtgggaagcaacaattaagaagaagtgattctgagaagataaatgcagtcatcttcttgccttactgttatgtggtcacatcccataggaaaccagacacctgtgcctgaagctgatccacacaacaccccccacctcctcaaacccccacccccatctgt

SEQ ID NO: 26134 - DNA, 1168 bp, Artificial sequence
  DNA replication origin
gggatatgggggtacagcccggcggccccactcctctctgaccggccgcttccccctcccacgacgggtgggcgggcggggcggggaccaggcggcggctctcgcatcccgcgcggggggcaccgcggcaaggggccacccggcgcggacaagaggcgctgtgtggcggggctgtccgctcgactcctgccgggctggccgggctgcttggcaccggcatcaagtccccgtgccgggcggcaactactgagtttggggtcgcctctgggttcgctgcccccagagaacccaagcccagatcttcgcccccttccctttccctttataataaggcccagaggggaaaacttatcaattcaaaaccccacaccccgttgctcctgggctgcaggtgcccggttgggggcacggcgcggacctgcccctcggcctggccccttccccatggcaggcactgcctggcaaggctgctggcgggagatctggctgcagatggtgaaggagaacatcgaggcccccggtccccaagcagggcgccatgggccgggcagcgggcctcggtgtgcccaggcggggagggggcgaacttcctttctccgacgcctgccgaggaccgccgtggagagcagagccttagaggggcctgctagtcttaacttcgtatttactggcagaaggaaggcttaatttttcagatctattcagatacgacctggcaggcaccagacataaatctgtggttgagtgcagtcagctcctaaatgggcatgtggagggtgaggcaccccgaactcggcatcttgcgtctggcactgtttttgggctaaactgcctctggcctcttcaacctcctgtgcctctttctgtttttgtttttgttttatttttctgttttccttcctctttgagaaaggacagtgattttagaaataatgacccgagagctttgcaggttgaagtgggacgagttttcctaaggtgcaggttggcaggtgccaggagcctgcaggtggctttttctcaggcctctgggtcagggtccctccaatgaggtgaggcaggggtttctcctgtgtgtcgccactacgcaggggacaggatctgggtttcccagtccagggcgtccaggatgccctgccctctgtgctgattcctgggtgaccgtggg

SEQ ID NO: 26135 - DNA, 892 bp, Artificial sequence
  DNA replication origin
cgtctggcactgtttttgggctaaactgcctctggcctcttcaacctcctgtgcctctttctgtttttgtttttgttttatttttctgttttccttcctctttgagaaaggacagtgattttagaaataatgacccgagagctttgcaggttgaagtgggacgagttttcctaaggtgcaggttggcaggtgccaggagcctgcaggtggctttttctcaggcctctgggtcagggtccctccaatgaggtgaggcaggggtttctcctgtgtgtcgccactacgcaggggacaggatctgggtttcccagtccagggcgtccaggatgccctgccctctgtgctgattcctgggtgaccgtgggggctgcttccccctgcagcctgggctggagagggtctcctgagcttaggatctgccaggcaggagggccagggtgacacggacctggaacgctggggctccaggcaatgtccagggcgtgagtgggtaaagctggagcttgtggctgtgtgccggcagccttccctcggtgggctctagcagcactgtcaggggggcccttggagtgggctccatggctgggctgggactgggtgatggcattagcgatggggcaccgagtcttccctcttatttattaggaagtgtggtctgtgcccctccctactgccggtctcctgggctcctgggatgggaggagctgcaggctgagtcccacggggtgtgagtgtgtgtgagcaggagagttgggtgggcgctggaaggaggtgaaactggtgaccgtcagctcctcattctcttccaccttgcatgttttctctgacaccctagactcaagttgtggcctgctagttaacttgtttacaaaacctttttaagtagttctaa

SEQ ID NO: 26136 - DNA, 1639 bp, Artificial sequence
  DNA replication origin
ggggaggggagcggggagagaggtgggagagggagacaggtgggagcagagggggcctggacattttactttattaaagatatgtgtactggttgagtgtttcaccaaaatgcatctaatattcagcagcaatataatcaaacccacctgtgtgcctttgaaggtctcctcttctagctggggagatgtcggcactgagacaaaacgacctgtggggaagggtagactgcaaggggaggaagcaggacttcccaaacgggccgccactctgggcatcaggagaggtggcgaacaggctggtctcccccaggaaggcacccacgggagcagaggagccagcctcccacaagaccaggacgtaagcacgccccagggcacagccagagacacccaaaacacaggaggcggtgctgacccaaaggagggcaggaccagggaatgtgccggccaggacagccgggggtgcgcaggcgggggcagtattaatttggggaaaacaatcattcagtttcattcgatgagtagtttacgtgcaaatgtgtgtggcgggggtgtgtgctgtgtgcgtcagatacagagtatgtgatgtggtgggtagtgagtgtgtggtgtgtatgtggtaactgtgtagtatggtgtgggtgtgtggtgcatgtgtgtatggtggggggtgtcctggagggtgtggtgtgtggtgtgtgctatgtatggtgtgtggtatgtggtgtgtgtgatgtgaatgtgttgtgtgtgtggtgtgtgtgtggagtgtaatgtagtgtggaagagttgagtgtgtgtgttttgtgtgcatggtgtagtgtgtgtggtatatggtatgtatggggtgtgtggtgtgtatgggatgtgcatggtgtgtgtatatatgctattgtgtggtatgtgtatagtgtgtgtggtgtgtataagatgtctgtgtggaatgcggtgtgtggtatgggtgctgtgatatgtatatagagtatggtgtgatgtgtgtatggtgtctatggggtgtgtgtggtgtgtggtatgtatggaggggtgtggtgtgtatggggtgtgtatgtatggtattatgtggtgtgtgtggtatgtatacggtgtgtatggtatgtgtgtggtgtgtatagggtgaatgtgtggtgtgtgaggtgggcatggtgtgtgtgaggtgtgtgtggtatgtgtggcatgtgtttggtgtgtatgggatatgtgtatggtgtgtggtgtgtggtgtatatggggtatgtgtgtggtgtgtggtgtgtatgggctatgtgtgtggtgtgtggtatatatggggtatgtgtggtatgtggtgtgtatgcgctatgtgtgtggtgtgtggtatatatggggtatgtatgtggtgtgtggtgtgtatgggtatgtgtgtggtatatatgggttaagtgtgtggtgtgtgtgaggtgggtatggtatgtttgtggtgtgtggtgtatatggggtatgtgtgtggtgtgtgtgaggtaggcatggtatgtgtgtggtgtgtgtggtgtgtgtgaggtgggtatgatatgtgtgtggcgtgtatggggtatgcgtgtggtgtgtgtgaggtgggcatggtatgtgtgtggtgtgtattatgcacacacatgcacacctg

SEQ ID NO: 26137 - DNA, 795 bp, Artificial sequence
  DNA replication origin
ccgacaggttgcgtgcttggcctgtggagcagttttctccagagcacctctatcccctctgccttgtgccaggcccagcagggactgagggtagaataatgacaggcacagctcctcccctcaaagagtccactatctggggtttgatgctggagcgcaaggaggggctgcccacatgggcggagcagagggcctggggaagttccaggaagaagtgactgtgtgccgaggctgcaggagtagaggcagcccaggagaaaggggggcatgggctggaggtgggggtggttccaggcagagagagcagcttgcacacgggaaaacaaggcatggagtgggcagctccttccgcctggtctctaaacctgtgaagagggggctggggagaagagacgggggtggaggagagcaggactcacaggccagccagccctccacagccttgggaacagagtgaagagcttggactgtgtcctatgtcctggggccggtgccactgcaggctttggagccaggagggactcagtggagcttgctgtgtatgattgtgagtgtggggaatggtttggggtgggaggcaggacaagcagctgtggactcctgtctgcaggtgagtgccagggctcagtgtgggttctgattgggctaagtaggtgcccatctgcctggagtccagctgtccttgtgtggtctgtagaccttgttgtcaaggtctggcagctcaacgctggtctttctgagataatgaaaagggaaaactttagaggcaggacgaagaccttgtagtgaccagtg

SEQ ID NO: 26138 - DNA, 2480 bp, Artificial sequence
  DNA replication origin
cttgaaaaataaaatcctacgggtgtgcattgacgtttcaatcctggctggctccgcatgagcttctgaacttgatgttcagaagctcagggcccatttgctgagtcagcacagctgccttctttgatttgtatgaagccttttgatgttttgatgacatgtcaccatgggtggctgttattttcagggagcagtttatctatcaggatctgggattgcttcgggtacttttaaaatctaggtaaagccggggtttctaaaacattgttctaaaacattgtcagggcagagcatgtaaagctctcccactaccactaatagtgatctaaaaagtgcctctcccctcaaacacaccctagtcctcggggagaaagcagagtgcggtggttaggaatgctggagccacagtcaggaagccggcatcccacccggctgcagcagcttggggcccgggaacattctggatgggccacctgtgccagcagccccccatctcgtggggctgtggggaggggagttgatctgggtcagtgtctgtatgggtggggaggggagttgatctggtcagtgtctgtatgggtggggaggggagttgatctgggtcagtgtctgtatgggtggggaggggagttgatctggtcagtgtctgtatgggtggggaggggagttgatctggtcagtgtctgtatgggtggtgcggggagttgatctcggtcagtgtctgtatgggtggggaggggagttgatctggtcagtgtctgtatgggtggtgcggggagttgatctggtcagtgtctgtatgggtggggaggggagttgatctgggtcagtgtctgtatgggtagggagggaagttgatctggtcagtgtctgtatgggtggggaggggagttgatctggtcagtgtctgtatgggtgatgcggggagttgatctggtcagtgtctgtatgggtggtgcagggagttgatctggtcagtgtctgtatgggtggtgcggggagttgatctggtcagtgtctgtatgggtggggaggggagttgatctggtcagtgtctgtatgggtggggaggggagttgatctgggtcagtgtctgtatgggttgggagggaagttgatctggtcagtgtctgtatgggtggtgcggggagttgatctggtcagtgtctgtatgggtggggaggggagttgatctggtcagtgtctgtatgggtggtgcggggagttgatctggtcagtgtctgtatgggtggggaggggagttgatctgggtcagtgtctgtatggatggtgcggggcatggagtgcttgtgcagatgatgatgatgatgatgagttttcagtccatgggaagctcatcgggtctgggggaggtgggtgggcaagtccctgcacccagtttgggtacaggccatgctgggcaggggtgaggacactagtggacctgtcctcgggagtgacacaaaggaggtggtgagccctgcttgtgagataggatgagaggaggaccaggactggtcagggccacactggagctgctgggggtgaggtcgggtaagggcctcccaaggtgcccccacgctgtcccctctgcagggccctcctgaatgtggcttgtgccctgctggagaagttctcacatgcctctttctactccagagtcactgatttgggagatggggcaacagctgcacagccccaagggctgccctgattttctcacaccgaatatctaataggaagttagctgagaagcccacacacctcttcttccaggtaggcaagctgggcctgggactacctgtctctcaccgactccaaatgatagccaagcctctcttaaccttgggcaccttttttccagtttccaccccgaattcacactcttcaaagccagctcctcctgctgggctgctcctgatgtggggggccggccctccctgcaaatctctggcatggcccttgcaaattggcacctgccacgtggttggcactgggactgcaaaggtgaaagtggcattatcctgcatttgaaactcattctagagggagacggatacatgagactctccccgcccccatccaggtgtggccaggctccagacgagttccaggcaggcttccaggacaggctccagagttagggacaggcggagaggctctgtgactttgagaggggctttgggaagtcagccgacaaggtggggatgaacatagaggtgtgtgggtgtcctcagcatggaaggggctggaatcgtgatgtggctttgagcctgaaacaagacaaagggaaggcgagggacatgggttgggggatggtgatgagagagagacagagggttccactgggggcatggaggggagccaggagagaactggggagctgaggggagggacattaggaaggccagatgtagcagggcagttaggagatatcttactggggaagaaagcacccgttggcggtggccacctgttgg

SEQ ID NO: 26139 - DNA, 1057 bp, Artificial sequence
  DNA replication origin
cgggggcagcgcccgcgcaggagagggtcgggcctttgggaagagcggagggcggcccccaggcctctgcttctgtctccgcctgacgaggccacctggctgggaaggacggcctgagagccctggagccccggaggcccggctccaccacccacggccctcggactccacttgggctccctcgggccaccgccattcttcctccccttggacgacatcctccgcccccgcggaagctccaagcccggggagccggctccgcggggctgcgcctccttccggtgtcatctgggccgctggtgtgccgccagccgccgcctccccgtcactccacgccgggtaccggctgcctcctgggaggtgtggggttcagggggctctctctgcggctggcgcttcagagaaggggtcgccctgccggccccaactcgcagccaagcctgtgggcgttcactgctgtgagtccaggagcccagcccaggccccacctcagggctcaagcggcctcctgcaagtgggctgtgggcagagcctgcaggcgctggagaggtggggaagaggaggctgctgttgctggcaggaccaccctgcggcctcatctacccaatacggcataccctggctttaaccctccgcatcggctgcacctgggggctctcagtgccccttggaaactctcaccagctgactgccacccttcgccaccgggcctgctcctggcctcattccgccagtacctgtggcccatccccaagccaggtctctcacacatcctcggccctcagtcacacagaaatacccatccaggtttcgaagggtctccgtgtagcggtggaaggaatgtgtgagtgcgctgttgaaatgctctctccctcctgtaaatctgccattgcgccgaagcacttcaagtggacccaagttcttaggaagaagatgactgcgccagccaaaggtttgaaccctgtcttcagtttccatgctgtatgtcaggatcatgacaatatggggacccttccctattgcccaggtccctgagacagcctcaagtccttatgtg

SEQ ID NO: 26140 - DNA, 1426 bp, Artificial sequence
  DNA replication origin
accttgatgatgccttggcaggtggcgaggggcagccccaccaggctggtgccattgatggacatgatctggtccccgatgctcagcttccccgagcgggcagccgggccgccattcatcatgttggccaggatcaccgtgggcaggatggagccccagcccgactccaccaccaccacgcccaggatctcgcccttgtgcttctccagctgcagctgcaaagggatcagcagtgtgagaggggctggcggcaaggaccgaggcctctgccaaggacccacaggaggatgaggctgaccctgtcctggcacatcccgccctgccctgggatccaaggctggctcatctcagccaggagaggtcttgggctgggagccctgcccacccacccccagcctcaccccagtctggctcccacaccttcctggggtccacccagcaatcctgggaacctggaagcacagaccccctatccccacccgtgcctggcattgaccccaaccccacccgtgcccaacactgaccttcccaccccaagcagggctccagtgtcctggttcctgctccttccacacccacagaggccagaggaatgttctcaggctcccatacccatatcctgcccccggccttcactcttgttggaaaagtccttctacttttatttcctctcaaaggtcactgtctcagaaactgcctggaatgtcttcagcaagaaaccaggatcatgcattcacccattcaacaagcagcagagaccatccactcatccacagcagacacaatcattcagccatttaacaaacagtccaggtatgggccatccccagggaatttgctcctctgcccataagaactttccaaagtcccctgggggaagccactgggaccagctaaggcctctgctactggtggcttccagcctcctctgccagagcccccaggctccctttagagatgccacatgcttttcagaaatatctcctgggtgctgagtgctggttgatgataatagcagcattaaaaggcgcattttcgaggtcattaaagctgactgtaatcagcttctttgttacaaacacctcatttcacacccaagtgctcagctggaaggcaggagcgaggtgcacattccgggccccactggagtctgataggaaggcaagggtgtgcgtgaggaccccgggaaggctcgctctgcaggagctcagggagcagaagctggcaaatgtggcctccctgaggctggtgggtgtggcttacctccttgcagttctccgagtttgagaagtggatgaggtcgtcgttgtacatctcctgggtgttgatgatgtcgctgtattccttctggctcaagtcttcggggttgatgccattggctcgcaggaactcctggtaggccacgctgaaggcctggccgatagac

SEQ ID NO: 26141 - DNA, 1085 bp, Artificial sequence
  DNA replication origin
ggagaggtaaggagggactttgagtgtgcctctgcatgccggttcccacgtgctcccgcctgccctccatgagcctcccccgctccagaggacacagggcatctgaaggtcagccaggctgtgtctcccatcggggctgctgtgacaagggtgaatggagcggcaggtgatgcggagccatcccggtctggctctaactgagcaaccgggagggcacaggctgctgggggtgctccctggacactacttttgggactggacctgtatgtccagttcagaagctctgcagggcacacagctctggccaccctggcaggcttgcctctctgcccttgctggccatcccctcccacagccaggctgcttgccctgtcccacttcactggctgaaccccccacagtccagttctttctggcatcgcttccacggcagtgtgaggatggtgtgggggaggtgcaggttttcctccagagctcacaaggaggcaggatcattgggaggggggatggtgctggggaggtggcacatacaccgggggaggcctggccagtgcgcagcgggtgtgcgtgtgtgtgtgtgtgtagtgtgagcgagtgtgggtgtgtgcatgtggatgtgtgagagcatgggtgtgtgtgggatgtgatgtatgagtgtgggtaagtgtgggtaggtgtgggaaatgagtgtgtgcgtgcacgtgggtgtataggggtgcatgagtggatgggtgtgggtgtgtggctgtgtgaatgtacctgagtgtgcgtgtggaggagtgtgtgtgtgtgggtgagtgtatgcggatgtacgtgtgtgtgtgagagcatggggtgtgtaggagtgcgagtgtgggtgtgtgcaggggtgtgtggctgtgggtgtgtgtgagcatggggtgtcaagcatgagtgtgtatgtgtgcacggctgtggctgtgggtctgtgagtgggtgtgaggcatggggtgtgaggagagtgtgagtgggtgtgtctgtgtgtgtgtaggggtgtgtgaaggggtgttcagcacaaaggggctgcaggctctctgggaagcgtggtggccgcacgaggcgggagg

SEQ ID NO: 26142 - DNA, 768 bp, Artificial sequence
  DNA replication origin
ccagcagccccacacctgtgaggaaatccacccgtggaggagcgggcgggagaacggggaagaggcaggaggcggccggggcgttggaatcctttcagccctgccgaggttatggtgcctgtttccagcagctctgagcccacgcggaacatgagtcgctgataaacaaggcttgcagttgcgaggggcctcggggtgggtttctggttgaggaacgccggggaatggctgatggaggaagcccctgccgggagcaggagcagcggaaacctacatcggccacacagatcccggcgggggagggagggcaacgctcagaagcagagctgcgcgatgtgcctttctgggctgctcagcccagggcccgagacctgcttgcctgaggaggggcagatgcacggcggctgcaccccgtggggaggccagcatgcctgcggcagctgaccctggcagtgcgagggccccccatccggaggccgcagcctagcacagtcccgggcaggacaggggagagcgtcgtgctcaggagaggagaagtgggcagtagagctccctttccgttcttgaagcagacgtttagagtctgctccttcccagtgtccgcaaagaaggattacaaggcgcgccacccacacggttggtctccctggggcggtctgaggccttgcttgtatacccagctcctttggagtcagggctcgaggccaggccccaaagggtcatttgctcaccgatccccaaaggctaagaacttgaggtgccctgggc

SEQ ID NO: 26143 - DNA, 1076 bp, Artificial sequence
  DNA replication origin
caagagggggcggcctccacgagggtgggctccgtgagcactcgcatgggtgacgggccgtgcacacttcccttccggcttaggtcagatgccattctctttcctgtggtttgaggctgtactcttcagccagtgttcaaggagtgagtttcttttgatagcaggaaagtgattgagaaattaccagtttgatcttcttgtctgggtggcaagcgtatggttcaggggccactgacgacggtggccctccagaggatgtaggacagaatccccctgtcgtggcactctcgcactctcacatggagaccggacagacacgaactcctttgaggcttctgcagaggaatcgggcctggtgatctgggtgggctggggtgcgtgtagagggggaggtgatatgggggggcttgtcgggctggggtgtgtgaaggagggggaggtggtgcaggtgaaggtcacagcaccagctaaggcgcatggcaggacagcctggagcctggctgtgggagcttcagcaccccagggctgaaatcatttgggcagatattttatggctttggatgtcaaactgtagaagtgcccttgaggagtttggcgtcttgggtgcgacccagtgatgctttaggagtttaatttggtggcagcatgccaggtggaagggaacctgagtgcgagacaaggagttgtgagaagggagagggaccagcagagtccaggagcagcaccaggtcctgacacttacgatccacataaaatctgttagcaaagtgtcttcaaagtttgccttgagccaccagcctaaaattttaactcacattttccataatcgctggaattgccccaaacgaagagctcttcataaatctgtttctaatggttggcctcacccaggagtgggaaactacagaatggggcagaatttccatgcaagtgtcttagcttcatacaatttgaattatttgttgaaaagccaacttattttccagttacgatgactgttcagaatagcacatctgcaaaccagtaagacccaggtgaagtgattcccacagcgtctcctgtcaacagccctctcc

SEQ ID NO: 26144 - DNA, 981 bp, Artificial sequence
  DNA replication origin
tcagaactgcggtgagaacagctgaaaggtcagaggctgatctcgaattagcatgtgttggctcggagacccccagctcccagtgctggcaggggcacagcacgaccgcctgcagggcctgtccctgggcgcccgcctggcagcagggcagcatctggtgatgaaggggccgctagagccctcgggcccactgtctttgaccccatggcctgggagcacttttcaattcacggccgtgtctgggagtctggaagtcaaagaaacccattaccgtccacagagggaaggccgtgccgccagctgcaccaccagctgtcccctccccaggcagcaaggcccctctgactagacagcaaggagcaccccttcacagcacgaccccgcagcccgggcgaggcagggtcagtagtgctcctccttgttaggacaaatggcgtagaaagtgccctcggcctcagtttggataaagagaggaggctgcagaaggcgggctctgtcggggaggagctgactctggggcggggcagggggtgtgctggggaagaggtttaacccaagagggggcggcctccacgagggtgggctccgtgagcactcgcatgggtgacgggccgtgcacacttcccttccggcttaggtcagatgccattctctttcctgtggtttgaggctgtactcttcagccagtgttcaaggagtgagtttcttttgatagcaggaaagtgattgagaaattaccagtttgatcttcttgtctgggtggcaagcgtatggttcaggggccactgacgacggtggccctccagaggatgtaggacagaatccccctgtcgtggcactctcgcactctcacatggagaccggacagacacgaactcctttgaggcttctgcagaggaatcgggcctggtgatctgggtgggctggggtgcgtgtagagggggaggtgatatgggggggcttgtcgggctggggtgtgtg

SEQ ID NO: 26145 - DNA, 678 bp, Artificial sequence
  DNA replication origin
acagccccttttttgccctccacctccaggtgcagagttgagctttatacctggcagtcaacatgcaggtgaggctgcagagcctggagcttgggtgggatgggggaggggtggctgcccactggcttttcagggtcacaggcatttccgctggtcctgaaggtgactgggaggcgccaggtgaaagggaggtggggagctgggaagaaggaacaatacgtgtttgatagtagggattagagctggtttgttcaaagagcggggagtttgggggcgctgggttaggaagctggaaaccagatggagttcagtgagccagggtctcattaaagtcttttcaactgcagtgacctcatcagattgatttaaaaacagctgtggtagcaggatggcgaccaaattacagagacagaaaatcaaggcagagaggcacacaggttagaagctcctgcgaggaggaggtggacaggggctgagtggagttgccccgcaaggaggcgtctgcccgtctcctctgcagaagtttactgagtacccgctgtgtgcgattgtgagacgggtacagaggtgggtaaaatagatgtgccccagatggtcaggaaaagaaattgcccttaggatttcaacacagttacggggagcaggttacttgggtgtggaaggctgaaggaacagaag

SEQ ID NO: 26146 - DNA, 979 bp, Artificial sequence
  DNA replication origin
ctatacttttattctatgtcttccctcatgaggatgtaagcttcatgaggcaggtatattttgtctaattttattcattgctgtatccccagagcctagtatataataaagcacacaaacattagctgttgattaaatggatgggtaggtagatggatgagtaggtgggggatggatggatggatgaatggatgggtggatgggtaggtgaatggatgagtaggtgggtgggtgggtagatggatgggtgggtggatgaatggatggatggatggctaggtgggtgggtggatggatggatgtgtggatggatgtatgggtgaatgggtagatagatggatagatgaatgggtaggtgggtggacagatggatgggtaaatgaatggatgggtgggtgagtggataaatggatgaatgggtaggtgagtaaatggatggataatggatggatggatggatggatggatggatggatggatgggtaggtaggtgggtgggtgggtgtacagatggataagtggatggagaaatggatggatggatggatggacggatgaatgggtagacagatgaatcggtaggtgggtagatggatggatggatggatggatggatggatggatgatggatggatgggtgggagggtgggtaaatgcatggatggatggatggatagatagatggataaatggatggatggatggatggatggatggatggatgagtggatgggatggatggatgttgaggcatggcatcaccaatggtagataatcactgggttaaaatggaatatatgttgctattaggaagaatgaattaaaactctatgtgttgttatgaacaattaccaagatttattatgagaaggaagcgaggtacagaacatagtcttttttttcttttgagatggagtctcgctctgtcagccaggccggagtgcagtggtgcgatctcggctcactgcaacctccacct

SEQ ID NO: 26147 - DNA, 1280 bp, Artificial sequence
  DNA replication origin
gctggagtgcaatggtgcaatcttggctcactgcaacctccacctcccaggttcaaacgattcacctgcctcagcctcctgagtagctgggattacaggcatatgccaccatgcctggctaatttttatagttttagtagaggcagggtttcaccatgttggccaggctggtctcgaactcctgacctcaggtgatctgcccgcctcggcctcccaaagtgctgggattacaggtgtgagccaccacgcccagccaggtttgcattttaaaaagatgattctgcagtgtggaaaacaggttagaagtgaccaggagtccaggcagggagggctttgtagggctcttacagtagctctcctgccaggtggcagccaggtaccaggtggagggaggaactgggggccggggcccagggtgagctggtcagtagatgtccctgatttggatggatttgagagtgagattgggtgggggagggacgtggggtatctgggaccctgacaggcacatctgggtgagtggggcctcctgtggaggtagggcaggctccaggagcactggctgtattgagttaggctgctggggaggcatccgtcatgtttccatcaggccagtgggtggacacagggatctgggaggaagagaggctgagagaggcttagggtaccctggaggatggagccagggagggaacaggctctcccaggatagatactgcgaggaggggaggggaggtatggggagatgatgggccgagggagcccttactaacgagcagctggggagtgtgagtgggggaggaagcaagggggcggccaaggcaggagggtgttccttctgcaaagcaggagtaagatcagtgtcagcctgctgggtgctgaagggggttcctgggactcagcgacccagaactgaccagacaggggagttctgcctgtgccagtgaggggaaaggggagcaggactggggagtggagacggctattacaagggtgctgggaccacttagtcagatgggggggttcccttcatgtcaccagcatggcacgagttgtccatatccctactgtgtttggggatcctagaagtgtctaaacccagggatggacataggtgatgagtgaggggcatagactgagtccctttcccagggtgtgtcttttcaccggggctatcatcagcgggagtgggcggcactggatgtactcctgtgcccttgcaggaatccagcctcgtgcccccttcctcccctgtcctggtggccctctgcctcctctca

SEQ ID NO: 26148 - DNA, 952 bp, Artificial sequence
  DNA replication origin
atgagagggcagtggtgtgattgagacctgtttgtgctgggattcagttgtaaaaaagatgcctcttatgctcatggagaactttacccaggggagccttacaccatgataaagacctgcagatggaggtgggcgtgcgatgagcaggtagagaataggtgattatacccggtgcctgttgggggtagatgcccaggagtgaggctggaggcaggagccagggctggaccagcagtggagccggccaactccaggcctgcagggagagctgagggctcctcacagctgcgtggatctcagggtctggggaggctgcagcagggagctgggggaggaggggaggggtgaagctatgctgggacagaggtgtctgccaggccctgtaggtgtgggctgccatgctgtttctagccactggtcaggggcactgccctgggcatgggctcctgcagcctgagtcaccagctgcagccggattcccccagtgtgcactggggacccagggtcctgatcccagcaaagcttacagtgttggggagagggtctgatgggaacagcactaaccagccagagtaagatgatcaaacatggtgcaaatgtggggaagaagacatcagagcagttcttcaggccaagccactgggaggagatgacgtttaagcccaggccaggatggtgacgaggcatccgtgatgtggaaacctggtgaagagcctcctaggcagtacagacccatgctcaagagctcagacatggcaggcgtgcggggcagacagagggcctgggagtctgagcctggtgtctggggcagaggtgggtgagaccaaagcccagggctgtaggtgggatttatttgaattgcagaaaattggaattgaggttataaacaagaaggaacaggcattgtctgaagtgagcagaagtcttttgaattagaattagactccatgag

SEQ ID NO: 26149 - DNA, 855 bp, Artificial sequence
  DNA replication origin
atgctgcagcccccaggggagagcccaggggaggatgctgcagcccccagggtagggcccaggggaggatgctgcagcccccaggggagggcccaggggaggatgctgcagcccccaggggagggcccggggaggatgctgatggccccaggggagggcccaggggtggatgctgcagcccccaggggagggcccaggagaggacgctgcagcccccaggagagggcccaggagaggacgctgcagcccccaggggagggcccaggggaggatgctgcagcccccaggggagggcccaggggaggatgctgcagcccccagggaagggcccaggggaagatgctgcagcccccagggtagggcccaggggaggatgctgcagcccccaggggagggcccaggggaggatgctgcagcccccaggggagggcccggggaggatgctgatggccccaggggagggcccaggggtggatgctgatggccccaggggagggcccaggggaggatgctgatggccccaggggagggcccaggggaggatgctgcagcccccaagtaaaactggagctcctccagaggaacagcagcaggggtggagggagggaatccagcctgggtgtgtcctgcggcaaagcgatgggcagggctaaaggaaaaggagaaatcgagatgcctctcaggctattggagtgaacaatggacaagaaaggaagccatgttttaaagatgtgcttaggtagtgttccacccaaagttcaaatccaagtcactgccaaaatgcaaaatgcaaactgccagacttgtggtctgttcatctatcagtaaacagggatgaataaaggcagaacatgc

SEQ ID NO: 26150 - DNA, 1780 bp, Artificial sequence
  DNA replication origin
tgaggggaacaggcgtggcttccacactgtttagatccaagggccccctctggtgagtgctggtgggtgggtacagtcatctgtatgtgaaactgtaactggatcgatcacaagaactaatgagtgcttactttttttgccagacgcgattctaacagtgtttcatatcaacttatttaagcctagcagtaaaccctggggaatgggtactacgtcttgtcctcattttgtacagctgacccttgaacagtacacggttaggggcactgactccctctgcagttgaaaatccacgtgtaacttttgactcctccaaaacgtaactactaatagcctcatattgactggaaatgtaaatagatgattaatacatcttttgtatatgcgttatatgctgtattcttaccataaagtaagctggaggaaagaaaatatcattaagaaaatcatagggaagagaaaatgtatttactattcattaagtggaggtggatcatcataaagatcttcatctttgtcgtcttcccactgagtgggctgaggaggaggaggaagaggaggacttagttttgctgtgtcagggtggcagagaaggaagaggtggaggaggtggattttcaactgcagagggagtcaggagaggctggcacacttggtgtaactttgactgaaaaaaatccatgtataaatgcacctatacaattcaaacctgggtttttcagggtcagccgtagattggagattgcctgggaagccccacctgggtgaagggtttgaggggaggttggggagggatgtgtgcagaagatgggtgaccggccgggctggtctgggaggtcgtgaagagggcgggcatgtactgagcctgggtgctgcgggccagcttcgggcctgtgccatggtctgcagagattaagcatgtttggaagtccatgtagcatcactcatcctacctggtgggctaggatgctggagtgggagagggagaccccaggcgtgggaaacagcagagccattctcccgtggggtggcttcagaggcctgctaggcagcgtgggcagtgttcacatgatgacaggctgctcctctctgagtgccctcacacctctttctctcctttttcccttgtttccaggagcaagaaaccccacccccagatctctggggaggggagtattttatgaggggcaggtatccgctggcacaggtgggtgttgaagaaaagtttgtagaatgattgaagaatgactgcctaattccttaacctctctgagcctcatttgatcatttgtgaaaagggggattgacttattgctgtttccaaaccatattgcactgtggtttaggagagctagagaaaattgtcactttacccattgcagttatccaggtatctgatagtgtgatgctccaagataggcatgagcggttggcacaggtttctgggaataatgttgggggacaattcctgagagttcccagtgaggggaaacagaggaacttggtaagggcaggctgagctcgaaggggagaacgggcacctccctaaagatccaggtggtgaaacaaggtcccactaggtatttttacaacacagtttctgtaaacaagttgtcatttattcctttttggccccagatgagtgctacacagtgcctgctagggcaaacatgaagtgggtgtgggtatgaagcagtcccaccacttctcccctcccgtgtctccgatggggacccacatcatccagataactagcttcttggttccagcagcggtctct

SEQ ID NO: 26151 - DNA, 1668 bp, Artificial sequence
  DNA replication origin
ggcggccgcgcgccgggagcgggccgggccgggcggggagccgggcgcccgcagcccccgccggtgcccgcgcccatgccgccgccgccgcgccgcccgcccgccggccgcgccgcgctgcgccctcccccgcccgccccgcgcgctccccggcccgagcgcgggcgcgagccgccgccgctgctgccgtaccgggcgcgagccgctgccgtccccgggcgcgagccccgccgccgtgcgctgggccccagctggggcgggagcgggagccgggacccgggagccgggagaggggcggggaaggcgcaggtgcggtcctggcgtcccagcctccgcgctcacgcctcgcgccctggcggctgcaggtctgcggaaggagagcgggggcggcagcgcatcaagggcaacggcatcagcctccgcggcggagccctgggtcggctgcgcggaggggcccgatagcggcagcgggccagccgagccttcagagcctggggacggctcgggatgggcgcgcggggcgctgaggacggggagacgggctgggagcagacaggagggaaattccgagcgctgggccgcaggtgtggcgaacaggagcctcttgaatgcaaaaatccaagatccaagatgctgcttttctgcagttcgagaatctcccaagccatccgctgagagaactcagctctggaggacattccgagaacattgccaggacacacacgatgtcccttacccacctttggtttgcatgcttttgatacaagttaaaagtttgggctttaaaaaaaaattgcacaaaacgaatttaaatgcgcaatatcattaataaccgattaaaccatctccactccctcttgccaacatagagtttaaaatatctaagtactggctcccttggaataccgggaaatcctgcaagttttgattgccataattcctttgtggccctgttgatgagccaactttaagactctgcttgtgttgaaaagggctgcattgacagattaagagatcaccagcgttagggagtctgaagggaccagacgtgaaaaggcaaagttcagagtaataaagggaaacggccggtcatttcctgagaccattcttccgtgtctttctagcagaccttactgttggatgagaaacgctagagagtgtagtcccaaaatatctcggttgctggtgcttgaaatttcaccgttagagatattgattcctttggggcttgacgatcctctattaaaatgcaaattccccttgaaggggctatagctcaagcctttatcagccaacactttagcagggatgggatttattttccaatttaacgagatggccaagggatgaacagggggtagggaattccacagatagagtgactgatctcaaaatgctggcccgtggccaaacgctgccttctcccccagttcttatctttaacaggactaagcctctggccggcattgtttaaagcactccagtacaaattccaatttcctggagacattttctgcctagaagttcgcagtgcagcactttttaagagcttgaaacaatacaaggcatgaccctggactggcaggaagttatgttcgcatttgatcatctcccccattcattcattcattcattcatccgttcattcattcctccaacaaaagttca

SEQ ID NO: 26152 - DNA, 886 bp, Artificial sequence
  DNA replication origin
atagggaggcggctggcacccagggaggccgaggcgggaggatcgctggagcccaggagttcgagacctgccttggcaacatagtaagacgcccccccaccccccgcccaccatctctacaataaatttaagaattagcctggcatagtggcgcgcgcctgtggtcccagcacttcggggaggctgaggtgggaagatcacctgcgcccaggacggtcgaggctgcagtaagccgagatcgcgccactgcactccagcctgggcgacagagcccagaccccgtaacaaagcaaaaatgaaggaggcggcggtttacttctggaataactgcagaagatcatcaagtgcagggagctgtggaactcccgggcgcccagccctcggcgcccctgcaccctcagccgtagagctggggtgttccggcccggagggataggggtttgcagggtgcgtgagcgccgaggctgcccgcgaggcgagagaattgcggggggaggcagggaggccgacggggagggcctgggaggctgcacgcgcagcggggacccggctttgtcccgagcagtttccaggtaagagctgagaggaggggagggagggagaggaggagaaccaggcccggattttcccgcctggggtcaaaccaaagcaaacaaaccaaagtggtgtgtccaaagtgatgcgcctcacaggtgccttgcttctgcccctgccggagttgaggtttggaggaagggcactgtgctgagtcccagcgggggttttgtaaatgctgcggtattggtctctcacggttcacggagcaatcaccacacttgcttgacctcctggaaagccttactctctttttataattaaaaacaattttttttggccgggtgcggtg

SEQ ID NO: 26153 - DNA, 1158 bp, Artificial sequence
  DNA replication origin
gagggaggtgccggtcgggcgcgccccgtggagaagacccgggcggggcgggcgcttcccggacttttgtccgagttgaattccctccccctgggccgggcccttccggccgcccccgcccgtgccccgctcgctctcgggagatgtttatttgggctgtggcgtgaggagcgggcgggccagcgccgcggagtttcgggtccgaggagcctcgcgcggcgctggagagagacaagatgtccgccagagctgcggccgccaaggtgagcgcctccgcggccgccagggccagaccgggccgaccgtcgccgcccgcccaccggcatctggcccgcgtcccgccctccctcgctggcggctgtctgggccccggggcggcggggtgggcagggctggcgcggggccgcgggccgcgggccgcgggccgcggggagcccctcgggcgggggcggcgcgggccgcactgggggcggccggggagggggctgcgggcgcccggccgccgtactgggcaggtgcatagctgccggcgcctgtgcctggctgcggctcgctgagggcggggacacgcaacaggtccctcgcggagaaactcggctccagtgagggttcgggggctggaagccggctctcagcgggtcggggcttggggtgccacctcctgctggccgggagctgctgtctttggaggagtggttggtccccggcgaaaccctgtagtttcgatctgatgtcactccctgcggtatgcgcacgccagcgataaggctttgagactgcaaaacactccactcagcctgtgaggcgtagtaggtcgggttttctttcatgctgtattacttatttaaggtaactttgaaaataacctctttaacatttaataatttaacttgaattaaactttcacaagtaatacaaagtattcctacgaatggacaataagatgagcacttaaaaattagtaaaggccggtgagttcagccgaaaaaagtaacgtttttcctgttacttttcctatgtgctctgaaatattattgcattttcccattgctttgaaactaacttgtgtattacattaaaaagccaaagttcctgaaaaacagctaggatgctcctcccattttgtatattaattttttcatcataaaatagtacttg

SEQ ID NO: 26154 - DNA, 1312 bp, Artificial sequence
  DNA replication origin
tcccgagagcgagcggggcacgggcgggggcggccggaagggcccggcccagggggagggaattcaactcggacaaaagtccgggaagcgcccgccccgcccgggtcttctccacggggcgcgcccgaccggcacctccctccgagcgcggccacccactcggcctcccgcagctttcgcagcccggccacgtcggcctcgcccggtcgcccgcccgtcagcagcacccgtggcctcccggcgtctcctcggaagccggcttcgccacgtaacttcccgggaaccggcggccgccaaggaacgcggcgtccgctggctcagccggcgccggcaactcagcggccacgcaaacctgccggcccggcccactgagcatgcccggcccggcgggggcggggctggacgaggcgaggcgaggcgaggcggggagggggcggggccgcggcgggggagggggcgggacgagcggccggggtcccgaccccaagcgcggaaggaaaagccgggtaacccaagtaacttggaagacagtttccgctgccgtgcgagtcttcctgtttgtttttatccaaggtctggcagaattcgcccccaaggagaaagcgcctgtgcaccaaagctttccttaagagacttgtccacttgctcctcgacaagccacgcacatcatggggtgagccccatgcatgagtgcggctggaaaggccggcagagccgatacccgacagttgtttccttcactgggcaaacagcatggtcacggctgtcaccgcgtgcctcggcgttgttcccacggaaggcggaatgcattttctgcaaggcgcgtcatggctttcatctccgaggagctccggcagggtcagaagcgttgctctcgttcaccggcgccgactgccaaggctgaaactggtgatgaggtcatgggcacccggaggcagcagcctgagaaacaccctagagacctgtgacatctcggcccacaccccacattagacctcaagatatatccaaagtctctttcccgcccatctagacaggaatcttgaaaagtttatttttggccatcaagattgctgaaattcttgttgaccgaacgggtcaagctgccctgcattccaatgctgtccctccaactcaaagttgggcagaaaagggtgtaaacacgtgcagtccatggtccagtttaatcagccactacacaaacttcccacaatgttgacggctttgctaaacaccaaggaacatggtaagaaaccaatcctagactcactaatctacacttgtaaatgtaaaggtcttcaaaaaatgccag

SEQ ID NO: 26155 - DNA, 867 bp, Artificial sequence
  DNA replication origin
ctcttgagcggcaggaggctgccgcggttggagggggtgacgccgatggccatctgcagcaccgtcaggtatttctggtacttcatcttgtccccgctccgctcgcgggcagggccccgccgcctccgccgccgccgcagacacagcccctccaggcgccgcatagatcagctctgggccatccgccgccaccacagctcccaccgctcccgcgcccgccgcacccgcagctgcggccgtgcgtggcccgggctcccgctcccgccgccgccgtcgccgtgcgtgcccggccgctcccgccgccgccgccgtgcgtggcccgcagctcccgccgccgccgccccttccacccctgcaggccgtggcccggcggcgcgctccggtgggcgggtgcgggtctcgcgggaggccgggctggcttggcccccgctccggagccgctgggcgaggccgggccacctgcgcgccggccgccctgcccaggccctgcgcccgcgtgccgcggtgttttcagcggctggcaggagctccttctcaaccgttagcacccaaagagaatcccaacagcacacttccagcgcggattaaaacaaacaaacaaacaacaacaacaacaaaaacgagacgctgcctgttggtttgtaactatcaattgatgtgttctatcccaaagtggttgacttcacattgacatataatgcatatggcgaatacgtactacacgcgcatgcagtcctcgcttgcacggtaattctggacgctggaaatgactgaaccatgcaaaactaccttaataatcactgggaaaaattaagattgtttcacgactttaaacagtttttctcaaaacattcaaagcagtccggg

SEQ ID NO: 26156 - DNA, 921 bp, Artificial sequence
  DNA replication origin
ggggtgagaacgcttaggggactgggtcgtaagatcaaaggccagtcttgcagtaacagcagttactaggtggactgtgacatcacaacattccactcctcctggtcggggggagggaccatgtcagcaccatgtccaagtcgctgctccacgatgggggagggaagcacagggttgggacccagctccttggagacgccagcacaaagaacccagggaggtcgaccttgaggcagcaggaggggagggcacagtctgcagcagggagtcccaggagtcaccagtccaaagtcacccagggatgactggcgagggtggggcctggctccttggagatgagagcccaaagagcccagggagatcaagcttggggcggcaggagatgagggcccagtaatggagcgggaagccccaggactcacccacccaaagtcaccctggggtgattggcgagggcaaggactgggctgcttgctgaaggggtggggctgactgacaaaactttggtgggggtagcccagaggcaccggggtaggggggaccagtccagtgtgcctcaggagtcgtatagactctggcaggggtcttgtcatcagaggggatctgtggctgggttgaggggctatgacctagtgcgtttttacctttttcttggctgcagccaatttgttgtgttgagtttcttctgccatcgcagggtggggagggaggcagggttggggtcacagcagcaaaatctcaatgagaaccgatcaaggcctccagtcacctaccaggcagctgtgtgactgagccagaggaggcgtaaccagggccccagtagaatgcggaataggggcgtggccttaatgctccaagcccattggtcaatgagaaagatgaaaaggaaagggggcgtggccagaaagcagtgtgtccaga

SEQ ID NO: 26157 - DNA, 696 bp, Artificial sequence
  DNA replication origin
gactggattaagaaaatgtggcacatatacaccatggaatactatgcagccataaaaaatgatgagttcatgtcctttgcagggacatggatgaaattggaaatcatcattctcagttaactatcgcaagaacaaaaaaccaaacaccgcatattctcactcataggtgggaattgaacaatgagaacacatggacacaggaaggggaacatcacactctggggactgttgtggggtggggggaggggggagggatagcattgggagatatacccaatgctagatgacgatttagtgggtgcagcgcaccagcatggcacatgtatacatatgtaactaacctgcacattgtcacatgtaccctaaaacttaaagtataataataataataaaaaaaaagcgagcagagagctggtgaggcaagtgcagagcacaggtgtgccacagcagctgtgggagggccaaggagtaaagggtgcacgtgcgggtgtggcaaggttcctggaaaagaggggctggaagggaaaggggaggaagacagagggaggagccggagtttcacaggtagtgcctgggggctgtggcagccctccccaccccacacgtgctggcctcttccacggcacccagtgcacccactgttaagactgatgctcagcccctttgggcttccctcttctctgggcaccgtgtctt

SEQ ID NO: 26158 - DNA, 945 bp, Artificial sequence
  DNA replication origin
cagaaacggggtgagaacgcttaggggactgggtcgtaagatcaaaggccagtcttgcagtaacagcagttactaggtggactgtgacatcacaacattccactcctcctggtcggggggagggaccatgtcagcaccatgtccaagtcgctgctccacgatgggggagggaagcacagggttgggacccagctccttggagacgccagcacaaagaacccagggaggtcgaccttgaggcagcaggaggggagggcacagtctgcagcagggagtcccaggagtcaccagtccaaagtcacccagggatgactggcgagggtggggcctggctccttggagatgagagcccaaagagcccagggagatcaagcttggggcggcaggagatgagggcccagtaatggagcgggaagccccaggactcacccacccaaagtcaccctggggtgattggcgagggcaaggactgggctgcttgctgaaggggtggggctgactgacaaaactttggtgggggtagcccagaggcaccggggtaggggggaccagtccagtgtgcctcaggagtcgtatagactctggcaggggtcttgtcatcagaggggatctgtggctgggttgaggggctatgacctagtgcgtttttacctttttcttggctgcagccaatttgttgtgttgagtttcttctgccatcgcagggtggggagggaggcagggttggggtcacagcagcaaaatctcaatgagaaccgatcaaggcctccagtcacctaccaggcagctgtgtgactgagccagaggaggcgtaaccagggccccagtagaatgcggaataggggcgtggccttaatgctccaagcccattggtcaatgagaaagatgaaaaggaaagggggcgtggccagaaagcagtgtgtccagagggacctgtggctcaca

SEQ ID NO: 26159 - DNA, 1445 bp, Artificial sequence
  DNA replication origin
atgagtgattgagtggggacagatggaggcttggggaccagtgggccctgggctgcctggtgtaggatacggaaagtgtgtgtgtgtgggggtgcacccgtgggccccaggaggtctgttgtgcgcatgctctgagtgtgagggaggacgggtaggaccgtgggggtctgccctggtcgtgctcccaagagaggcactgctttctgcagagcgcgtgggcaactgtcagctggggaagcgctcaccaggggaaaggggagctctctgtggcttagcagtgattaacccacacaatcaatggatcctccagccacagtgtgagcagctctgcctcatgtgaggcacacagcaccttccagcacagtcccgatatctttcatgccagatgcacatcttcaatttcagctacaaaccattacaaattgatgcattttctttctgactaaatgttacaaggtttgaacatactatctctgccgatcaccgcccctctaagggatgggtttagaggtttggcacgaaagcaaaagccttttaataggagtgcgtgagtgtggtggtgtgtgtgtgatgtgagtgtgcatatgtggtgtgtgtacgtgtgtggtgggtaggggtatacgtggtggtgtgtgtgtgtaggatgtgtgtgctgtatgtgtagtgtgtaatgtgggctctagggtgtgggggacagtggggtgtgtgtatatggtgtgtgtgtgtgatgtagggggtggtgtgggttaggggtggaggctctagtggggtgtcagggggtatgtgggtagtggtgggtagtggcatatgtgtggtgtgtacatatgtgtggtatgggggtatagtgagtttgtgtgggatgtgtgtgtcagtgcatctgtggtgtgtgtaatatgtgtatgtgttgtgtgttgtgtgtagtgaggtatgtgtgcagtgtgtagtagggtgtgtgtggtgtgtgtgtggtgtgtgttgtgtggtgcatgtagtgtgtagtagggtgtgtatgtgtggtgtgtgcatgtggtgtgtgtggtgtgtagtaaggtgtgtacggtgtgtctgtgtggtgtgtagtagagtgtggatgtgtgtgtggtgtgtgtggtgtttagtagtatgtggggtgtgtagtggggtgtgtgtgatgtgtgtggtgtgtgtgtggcatgtagtagggtgtgtgtgtggtgtgtgtctgtgtggtgtgtgtggcatgtagtagggtgtgtgtgtgatgtgtgtggtgtgtgtgtggcatgtagtagggtgtgtgtgtggtgtgtgtctgtgtggtgtgtgtggcatgtagtagggtgtgtgatgtttgtggtgtgtggtatgtgtgtggtgtgtgtctgtgtggtgtgtgtggtgtgtagtagggtgtgtgtgtggcgtggactgggggtgtaaggggagggggtgttgccagtgtgcgg

SEQ ID NO: 26160 - DNA, 882 bp, Artificial sequence
  DNA replication origin
aggtgtgtgcgggacggactaggctggggcagaggggtttaaactggcgcggtcctacagaagtttgaggagggcggggccggctccgagcccccggagccctacgggactcccccgattctactgaggagtccccgccagctccgtgcactcctgcaacactccccaccccacccgccagctccgagtttacagcctctcgggtccggggattggctgggggaggggacgggggggaggggaccccctggctgtagggaacggcgtgcgggcgggggtgggagggaaacgatttgcttcaggagatagggatgaaggttttcctgagtcaagggagggagaagagaggtggaacaaaaggcagatgctggaggggaaggggagctggggagctcgccccgagggctccggcagcccgcggtcccctgcctcagtctgtcccagagggtgaggtcaaggctggtgccagggctcttcaccggccacctggagaggggagaaagagggatgcaggggtacggggttggggcagaggaggaagagcgtctgctggcacaggaccctctgcctgctctcagataggaacccagcagaagggctctgccatggacccaacacctcccacctccgcagatctgctttctcccacttgggaaaagcgaggctgacacccactgtgagcaccaggaggggcaggaagaaccgagagcctgggcagcactcctgtgcctcagtctcatccttgggcctcaccctcaacccccaacctcacccgataagacctcggggccccagctcgccaggtggaatttctgctgctgtctggccattaactgcccctgaccttcccagctccacctcaccctcgccctctcccctcag

SEQ ID NO: 26161 - DNA, 2084 bp, Artificial sequence
  DNA replication origin
cggagtcctgggggtccaggccgctggcggcgccgggtgaggcggagtccctgcgatccgggctgggcgcggcggcccgggcagcgggcgtgggtcccagaagcggtgtggagctgctggccgggcgtgtggaggccgctgggacgggcgttccgtggggcagcgagggctgcgaggcggacagtgggcgcaacgcgcggctcaggcggcgcgagggcagggcggtcccagcaaggggggcggcgggcaagctgccgtagggcgaggtccgcggtgcccgggggctggcgggcgcgcccagggggctggcggggggcgggggcccgggtgaggcggcggcaggtgcgggccccgggggcgggcggcgcacgaggcgcggcgagccgagcgccagcggccccacgagcggccgcgccacctgcgggcagaagctcatgaccacggcctgctgcagcgtggcgatggccgaggtgacctgcggcggcggcggcggcgggaagaggcccaggcgctgacccagctcggcctgctgcaccatctcgccgtcgtacttgacgatctcctggatgatggcgttctactggttgttgaatacgcccgagttaaggtcatgctgcaccttgtgcaggaggatggaattcttcttgccgatgcggtccaggcggtcgatggccaccgtctcgaaggcgcgccgcatcatggggtactcctccagcacctcgttgaagttgtccacgctcagcgaaaggaggcggcaataggtgttggcccgcacgctcgccatgcggtggccccgggtgagcaggcagatctctccgaagtaggagccatcgaacagcttcatctccttgttgcccttagcgagcacgctgaccacgccgtgctgaatgaagtacatcttcccgatggtgccttcgcggatgaggtagtcacccggctggaagacctcgaacttgagcttggtcagcatggccgtgacgaagttggggtcagcattggcgaacagcggcatggaggtcaccagcttccggcagttgaagttgacaatctcctcccgcaggggcccgttgagctcgcccaggatgctgtcctcgtcgaacatcttgccctggtaacggtgctcgtagtagtcgtggatcttctggcggaagtcggccggcagcttgtggaaggacatgtactgctccacctgcttgtacttctggtattggcgccgcgaggagtccagcgactggatgagggcagtggcgtggccgatgaacatggcgtagcaggtgtcactcacaatcatgctgagcatggtcagccagatgtccgtcatgctctcgggcgcctgccggccatacccaatgcacagcatgtggctcatggccttgaagagtgcgaaggaatacagttcgctccaccagtggttcaccatgccattgatggacacccagcagttgcacgggaagtcctgcagcatggccaccaggaactgcaggcagccatcccagtggcagagcagcagcatcatactgatgaggttgcagaaccgcatcaccgcgctggccaggtcataggtcatgtggaagatctcctcccactggtggatgtagcggatcaggcgcgagaggcgcagcagccgcaggaggctgaggatcttggtgaagcgcacgatccgcagggcgcacgccgtcttgtagacctcggagtcgatgcccttctccacgatgaggaagatgtagtccacggggatggaggacacgaagtccaccatgaaccacgtgcgcacgtacttcttgatcttctcttggtccaggatgatctccgtgttgtcctcgatcacaatgccggtgcggaagttcaacaccaggtccatgaggcagaaggtgtccgagaccacgttgaacacgatccacagggcagtggtctcgtccttgaagaaggtgatgcccactgggatgatgatgaggtttcccaccatgaacagcagcatggtgaagtcccagtagaacctgaagtcgctgtacgggtggatgatccaggaccccgctgactggacgcgctcctgctcgcgctccacggccttctggctgccgaac

SEQ ID NO: 26162 - DNA, 656 bp, Artificial sequence
  DNA replication origin
agactcccatttttaaaaccatcagatctcgtgagacttattcactatcacgagaacagcacggaaaagatctgcctccatgagtcaattacctccaccggttccctttcacaatatatgggaattcgagatgagattcaggtggggacacagccaaaccatatcaggaaggaagggtgaaatggggccagactttctccttcaagcccttttataatgatatcaatttgaagaaacctaaacatctctcaaaatgccccatgtcccaacactgttgtattgggcattacgtttacaacatatgaattttgggggacatattcagaccacagcagtggagaatgtctaattcatttttacaaagagaacgataagatggcaaatttacttgtatttcattccattttgtgttcccataaaggaatacctagggctgggtaatttataaagaaaagcagtttctttggctcatggttctgtaggctgtacaagaagcatggtgtcagcatttgcttctggtgagggcttcaggctgcttccaccaccagtggaaggtgaaggggagcaggtttatgttgtggtgagagagagagcgagagagggtgagagagagagcgagagagagggtgagagagggtgagagagagggcgagaga

SEQ ID NO: 26163 - DNA, 771 bp, Artificial sequence
  DNA replication origin
tattcacaatagcaaagacttggaaccaacccaaatgtccaacaatgatagactggattaagaaaatgtggcacatatacaccatggaatactatgcagccataaaaaatgatgagttcatgtcctttgcagggacatggatgaaattggaaatcatcattctcagttaactatcgcaagaacaaaaaaccaaacaccgcatattctcactcataggtgggaattgaacaatgagaacacatggacacaggaaggggaacatcacactctggggactgttgtggggtggggggaggggggagggatagcattgggagatatacccaatgctagatgacgagttagtgggtgcagcgcaccagcatggcacatgtatacatatgtaactaacctgcgcattgtcacatgtaccctaaaacttaaagtataataataataataaaaaaaaaaagcgagcagagagctggtgaggcaagtgcagagcacaggtgtgccacagcagctgtgggagggccaaggagtaaagggtgcacgtgcgggtgtggcaaggttcctggaaaagaggggctggaagggaaaggggaggaagacagagggaggagccggagtttcacaggtagtgcctgggggctgtggcagccctccccaccccacacgtgctggcctcttccacggcacccagtgcacccactgttaagactgatgctcagcccctttgggcttccctcttctctggtcaccgtgtcttccaacccacttgtccagggccac

SEQ ID NO: 26164 - DNA, 928 bp, Artificial sequence
  DNA replication origin
ttccagctggaaatttgtgctgtgaccagaggaaccagaaacggggtgagaacgcttaggggactgggtcgtaaggtcaaaggccagtcttgcagtaacggcagttactaggtggactgtgacatcacaacattccactcctcctggtcggggggagggaccatgtcagcaccatgtccaagtcgctgctccacgatgggggagggaagcacagggttgggacccagctccttggagacgccagcacaaagaacccagggaggtcgaccttgaggcagcaggaggggagggcacagtctgcagcagggagtcccaggagtcaccagcccaaagtcacccaaggatgactggcgagggtggggcctggctccttggagatgagagcccaaagagcccacggagatcaagcttggggcggcaggagatgagggcccagtaatggagcgggaagccccaggagtcacccacccaaagtcaccctggggtgattggcgagggcaaggactgggctgcttgctgaaggggtggggctgactgacaaaactttggtgggggtagcccaaggcaccggggttggggggaccagtccagtgtgcctcaggagtcatatagactctggcaggggtcttgtcatcagaggggatctgtggctgggttgaggggctatgacctagtgcgtttttacctttttcttggctgcagccaatttgttgtgttgagtttcttctgccattgcagggtggggagggaggaagggttggggccacagcagcaaaatcccaataagaaccgatcaaggcctccagtcacctaccaggcagctgtgtgactgagccagaggaggcgtaaccagggacccagtagaatgcggaataggggcgtggccttaatgctccaagcccattggtcaatgagaaagatgaaaggg

SEQ ID NO: 26165 - DNA, 972 bp, Artificial sequence
  DNA replication origin
ggccgcggggttccgcggcgcgcgctggcagctagcggcgctgtggccgcctctggaacgctgctccccgcagctggacgtgggcggcggcggggcctggagtctggggctcgggctgtgggcgctgctctggcaggcgcgcgcgggccccggcgaggtggcgctgcaggagctttgcgggcagctggagcgctacctgggcgcggcggcccacggctgcggcggcgccaccgtgcgccacgctgttttcgcggctaaaggccgcgcggctgactgcgagagcccgcgcgagtttcgagagcgggccctgcgcgcctgatgggtcgaggcggacgcgcggctgcgtcaggtaagcgaggccgggccgccggcgtttgaccgcgcttgggtggcctgggaccctgtgggaggcttccccggcgccgagagccctggctgacggctgatggggaggagccggcgggcggagaaggccacgggctccccagtaccctcacctgcgcgggatcgctgcgggaaaccagggggagcttcggcagggcctgcagagaggacaagcgaagttaagagcctagtgtacttgccgctgggagctgggctaggcccccaacctttgccctgaagatgctggcagagcaggatgttgtaacgggaaatgtcagaaatactgcaagcaaactgaaaacaacccatccatgtaggaaagaataacacggactacacgtaagcaattccaagtctgtgtctgcggggacgtcgcaagtgggataaaatggtttaaaggaagaaatggcttttaggagttagggtgttttgttttaagtaatacagacttggtcaaatggaaagccggtagaaagtgagctttattcatcagtttaaccgcattagtgctcttttaagcttgaaagaggtagtttgagagagtaattgagtggtaaacttactgaacttaggggacggggaagtaca

SEQ ID NO: 26166 - DNA, 1450 bp, Artificial sequence
  DNA replication origin
aaaagtctgagatccagctcaacgtaaaggaccttaaaaggaagctggaaagggcccagctcctgctgccacaggcgagcagctgcagccccgggggttgtgggagccccatccggctggggccatggtctagggatcatgtagggtgtggggaggctccagccaagagctggaaaatttgggtccttgttctggtcccaccatagaatcctctggagtgtgctaaaaatatacaaattggggccctgcctggggaatcagaatctcagagtttgggcttaaaaaaatatttttcaaaggatcatagatgaaaaccattattttatagattacatttatatggctagctcatgagtctgtttccttctgaggtttgaaccaacactttcactattccagcagcagctgcaggtggaggctgaccgcctgggtaaggagctacagagtgtgtcagcaaagctccaagcccaggtggaagagaacgagttgtggaacctcctgaaccagcaacaagaggagaagatgtggaggcaggaggagaagatacaggagcaggaagagaagatgtgtgagcaggagctgaagataagggagcaggaggagaagatgtggaggcaggaggagaagatgcatgagcaggaagagaagatacgggagcaggaggacaagatgtggaggcaggaggagaagatacgggagcaggaagagaagatacgggagcaggaggagaagatgtggaggcaggaggagaagatacgggagcaggatgagaagatacaggagcaggaggaggagatgtggaggcaggaggagaagatacgggagcaggaggagaagaggcaggagaagatgtggaggcaggagaagaagatgcgcgagcaggatgagaagatacgggagcaggaggaggagatgtggaggcaggaggagaagatacgggagctggaggagatgatgcaagatcaggaggagaagctgcgggaggtggaggagaaaatgcaggaggaggaggaaaagatgcaggagcaggaggagaagatacagaggcaggaggagaagatccaggagcaggaggagaagacgtggaggcaggagaagctgctcaagcaggaagagaagatatgggagcaggaggagaagatgtggaggcaggaggagaagatgtgggaacaggaggagaagatgcaggaacaggaggagaagatgcagaggcaggaggagaagatgcgggagcaggaagtgaggctgtggcagcaggaggagaagatgcaggaacaggaggtgaggctgcaggagctggaggagaggctggggaagctggggcagaaggcggagctcttggggggagcaggcagaggtgtgtgcaaaccctggagatcatacagaacgacctcaccacaacttagcagatggtggttggctccctctgcttttccaccagtctgcggcc

SEQ ID NO: 26167 - DNA, 918 bp, Artificial sequence
  DNA replication origin
gtgagaacgcttaggggactgggtcgtaaggtcaaaggccagtcttgcagtaacggcagttactaggtggactgtgacatcacaacattccactcctcctggtcggggggagggaccatgtcagcaccatgtccaagtcgctgctccacgatgggggagggaagcacagggttgggacccagctccttggagacgccagcacaaagaacccagggaggtcgaccttgaggcagcaggaggggagggcacagtctgcagcagggagtcccaggagtcaccagcccaaagtcacccaaggatgactggcgagggtggggcctggctccttggagatgagagcccaaagagcccacggagatcaagcttggggcggcaggagatgagggcccagtaatggagcgggaagccccaggagtcacccacccaaagtcaccctggggtgattggcgagggcaaggactgggctgcttgctgaaggggtggggctgactgacaaaactttggtgggggtagcccaaggcaccggggttggggggaccagtccagtgtgcctcaggagtcatatagactctggcaggggtcttgtcatcagaggggatctgtggctgggttgaggggctatgacctagtgcgtttttacctttttcttggctgcagccaatttgttgtgttgagtttcttctgccattgcagggtggggagggaggaagggttggggccacagcagcaaaatcccaataagaaccgatcaaggcctccagtcacctaccaggcagctgtgtgactgagccagaggaggcgtaaccagggccccagtagaatgcggaataggggcgtggccttaatgctccaagcccattggtcaatgagaaagatgaaagggaaagggggcgtggccagacagcagcgtgtccagag

SEQ ID NO: 26168 - DNA, 752 bp, Artificial sequence
  DNA replication origin
ttcacaatagcaaagacttggaaccaacccaaatgtccaacaatgatagactggattaagaaaatgtggcacatatacaccatggaatactatgcagccataaaaaatgatgagttcatgtcctttgcagggacatggatgaaattggaaatcatcattctcagttaactatcgcaagaacaaaaaaccaaacaccgcatattctcactcataggtgggaattgaacaatgagaacacatggacacaggaaggggaacatcacactctggggactgttgtggggtggggggaggggggagggatagcattgggagatatacccaatgctagatgacgatttagtgggtgcagcgcaccagcatggcacatgtatacatatgtaactaacctgcacattgtcacatgtaccctaaaacttaaagcataataataataataaaaaaaaaaagcgagcagagagctggtgaggcaagtgcagagcacaggtgtgccacagcagctgtgggagggccaaggagtaaagggtgcacgtgcgggtgtggcaaggttcctggaaaagaggggctggaagggaaaggggaggaagacagagggaggagccggagtttcacaggtagtgcctgggggctgtggcagccctccccaccccacacgtgctggcctcttccacggcacccagtgcacccactgttaagactgatgctcagcccctttgggcttccctcttctctggtcaccgtgtcttccaacc

SEQ ID NO: 26169 - DNA, 900 bp, Artificial sequence
  DNA replication origin
cttaggggactgggtcgtaagatcaaaggccagtcttgcagtaacagcagttactaggtggactgtgacatcacaacattccactcctcctggtcggggggagggaccatgtcagcaccatgtccaagtcgctgctccacgatgggggagggaagcacagggttgggacccagctccttggagacgccagcacaaagaacccagggaggtcgaccttgaggcagcaggaggggagggcacagtctgcagcagggagtcccaggagtcaccagtccaaagtcacccagggatgactggcgagggtggggcctggctccttggagatgagagcccaaagagcccagggagatcaagcttggggcggcaggagatgagggcccagtaatggagcgggaagccccaggactcacccacccaaagtcaccctggggtgattggcgagggcaaggactgggctgcttgctgaaggggtggggctgactgacaaaactttgatgggggtagcccagaggcaccggggtaggggggaccagtccagtgtgcctcaggagtcgtatagactctggcaggggtcttgtcatcagaggggatctgtggctgggttgagggtctatgacctagtgcgtttttacctttttcttggctgcagccaatttgttgtgttgagtttcttctgccatcgcagggtggggagggaggcagggttggggtcacagcagcaaaatctcaatgagaaccaatcaaggcctccagtcacctaccaggcagctgtgtgagtgagccagaggaggcgtaaccagggccccagtagaatgcggaataggggcgtggccttaatgctccaagcccattggtcaatgagaaagatgaaaaggaaagggggcgtggccagaaagcagt

SEQ ID NO: 26170 - DNA, 956 bp, Artificial sequence
  DNA replication origin
gaagtgtaggcttttcccactgtcagtgtctatgttaagggagtaaggcagcctgaaacctcttgctcctaggtcccataatctccattccctttgcagctggaaatttgtgctgtgaccagaggaatcagaaatggggtgacaacgcttaggggactgggtcataagatcaaaggctggtcttgcagtaatgacagttcccaggtggattgtgacatcactacattccacccttctggtcatggggagggacatcagcacgatgtctgagttgctgctccatgatgggggagggaaacacagggttgggacccagctccttggagacgccagcgcaaagagcccagggaggtcgaccttgaggcagcaggaggggagggcagagtctgcagcagggagcctcaggagtcaccagcccaaagtcacccagggatgactggcgagggcggggcctggggctgggggaccaaggtccttggagatgtgagcccaaagagcccagggaggttgagtttggggcggtaggaggtgagggcccagtaatggagtgggaatccccaagagtcacccacccaaagtcaccatggggtgattggagagggcagggactgggctgcttgctgaaggggcagggctgactgacaagactttggtgggtggagcccagaggcagtccggtgtgcctcaggagtggtatggactctggcagcggtcttgtcatcagaggggatctgtggctgggttggggggtgatgacctggaatttttacctttgtattggctacagccaatttgctctgtcgagtttcttctgctattgtggggtgggtagggaggcagggttggggccacgtcagcgaaatcccagtgagcactatcaatgcatccagtcacctaccaggcagccgtgtgactgagccagaggaggcgtaaccagggctccagtagaatgcaga

SEQ ID NO: 26171 - DNA, 1661 bp, Artificial sequence
  DNA replication origin
caaggggcctcagatgccagcagcaaggggctgtctgccctcgcaatgcgcctttccagacgcccaaatccttcccatttgaccaccctttgcagccaccactttctcaaagtagatttactttcaatctccatttgctaaatctcttccctctaaaccttttggggatggagggattaagcctgattacagatgttgggggtggtagcaggagtcgggcaggaggggccaccaaaagccagcacatgctcctcctaggctgaaccagcctccggccggcctcgccccaggatctcggccccctcgcccagtgcgtggggctgccgccgagtgtggggctgccgccgagtgtgtggctccgctcctgcccacccagggagggcagcccctgtgccactggcctggccacccgagggagtcagcagggtggctcacaggctcactgagagagatgagctccttcaagcggggctcgctcaagagctccacatcagggtcgcagaaggtgagtgagctttgccagtggcctgcgggcagctgggcggaagggcagagggacactggtctccagctctgtcatctcagagtgctggcccagcgggtcctgtcctcccaaactgtgctgggtgggcatggggcatggggtgttcagagctctcacgtcagggtcccttctcagaaggtgccctatgtttcctgccacggtgtccaacgcctgtggtctcagttgctcccaccttcgagtggctgtggcaaacccgggaggcgtctgagtggcacaaatcctttcaccattccagagtcagcagttgcggagttttgcatctcttgctttccccacgagggtggtgccccttagttctctctgctggactcaagctcaccctctgttctgcatcagatgtttgtgtgggccatggggacccagggatgactcaggcttgggcctcgcccttaggggatggggtctggcagaggaaagcaggcagcagcatctaacaggagggagggccagaggggccctaagtgagaacctgggagggcaagaggctcccaggactaggcaccagctgtggggaacggcctctcccaggaaccccagacaggacctcccacagcacatgctgatttgaatcttaggtgtgcttttcctaggtgactctgagccagcctgggaactgagcacccagggctgccttaaaggaccacttgagcccaaggagactgggcaggccaccacctcaccctaactccctgactgcccctcgcatgcagtgggaggcaagcccagaccacaccggaagcctctggacaccacttgcatgccctgagggctcagtggggatctctgcttcttccagggggctgcccattgtgcacagaagggtggggggaggcagcaagggagctggcagagcggcagtaggtgcagcccttgtgtgggctggggaggatacagccccccagctggcacttactgagcacccacgacatgcccaccagtaccccagagctgggaacggagccgctgaagcagtgtgagccaggtgaccacactcagagaggttatttatctgggctaaaaacagagccctaggcgggaactgcttcccatccatacccagctcaccaggctgcagtctccccgtccataaaatggg

SEQ ID NO: 26172 - DNA, 1198 bp, Artificial sequence
  DNA replication origin
tcaggggcccatcctctccgcctcccgcgcgccccgcccgacggctcgcacctgcttggcggcggccgctggattctcggcctcgggctgaggaggcaggagggaaagtgggtcagcgcggggccgcggcagggctgctgttgtgcttggaaaggggcccggggtgccggaggcctctcccaggcgcggcggcaggagcgcccgcgcgtgacactccaggcacaaaggggccgggccgccgcctgcactggggctcgggcgtgcggggagaggctgtcgggcgccgcacgcatggactgtgttccccttcccggccacggctcggggcggcgggggcccggggctctcctgtccccgagcgatgtccccaaggcctaacaccgcgagccggagctagcaggcgcccaccacgcccgctcttcgttcgccccacccgggctaggtctgggcggctccctcctccggacgctgtccccgccgccccgccctgccccctggtgtcagccacaggcctcagcagcctggcgtcctcctcctgggagcatttttctgacacctctgggggacccggtcccctgacccctacgctcatgcggtctgcccaggtcttgggggggcgttggctctgtttccgggaaacctccgaggctgatacctggcagcagccctgcggaggactgcccagccactcacctcccgaccaccgtgcaccccagcagctctgggacgccgggctctgtgggtgggctgggtcgggctgcagacatgggtcactgtcctagagcaaggactggctgcgagagcaaggaggggaccaggcctttgagatgtcagtccccaagctcccctctgctgtcccctgcacaggagcagaagggcatggcctgagggtcagggtgcctcagctggcttcctgcactgccgcacaccttgtcctgtgccccccgccccccgcgtgctaggacctcaccgtcctaacatgcccagaactctggctactgctggagctgggcctccttcctggagagcctatcccctgggtcacctgatgaatgtttcaccctgttccagaagctttccaaatctctcgccagaatgcctctccagcccttggctcctgttgcacaatctgcatccttctgtgcccacgcctggtgcaggcctcttctcaggctctgggaggctggcctctgtgaac

SEQ ID NO: 26173 - DNA, 2138 bp, Artificial sequence
  DNA replication origin
gagccccgggcccccgccgccccgagccgtggccgggaaggggaacacagtccatgcgtgcggcgcccgacagcctctccccgcacgcccgagccccagtgcaggcggcggcccggcccctttgtgcctggagtgtcacgcgcgggcgctcctgccgccgcgcctgggagaggcctccggcaccccgggcccctttccaagcacaacagcagccctgccgcggccccgcgctgacccactttccctcctgcctcctcagcccgaggccgagaatccagcggccgccgccaagcaggtgcgagccgtcgggcggggcgcgcgggaggcggagaggatgggcccctgaaccaccccgcgcgccccacctcagcctcccggggcgagccaggtttccggggcgggggccgcgaggaggaggaggagggcaaggcgggggaacgggagggagaggacccggggagggggagggggaggcggaggggaagggggaggcggagggggaggggcagaagaagggggcaaggagggcagagagatgagcgagaaagaaaggaggggtgcgggaaaggaggagaggaaggagcggtgggaggaggaggaggggtgcgggagagaagggctgagggagaggcggagggaaaccgcacccctgcctctttcctgggccgaggccagccggggaggaaatgttgaaatgggcgaagtgcacatccgcctccaggcctaaggggtgtaggggtcaggccgcaccgaccccgcccttcccagcccttcctgccagacctctgcctccgatgggcgagcccggttgctgggaggcggttcgctgtggagcctggaccctctccacagttcagcccgccggaggcgtgtgcgcttccagatgagagcacttgttcactgaatgaccgtgcgtacttggggggacatctggccccagaacctccaggagcagggtggctaatgctgagtgccgtggcctggcactgggaagcgccggtcctcagtccctttccctgctcctgggcatcccaggccccttggggcgttcttacactgcctgagttagacctggaagagtcccctgtgccagggcaggggctttgcctgcttggtccttgttcacccctgtgtatagctactacctattacctacccacctgtccacaagtgtcagtgcctgatgtaggaagttacagtaattcacaaataaatctatcacaaagggacatggatactcacacttccttcttacccctacttccaggcagccattgttaatgggtgcgtgtgtacagttctgggcacataccaacatgcacggatgcatgttaacctgctttgtatggaagaaacggggtcaggatatcataaaaagaattaatgggtaatcagtattcatcaaatgccaagatctagttctgagcactttgcaaatattaatttaatcaccacgaacctcagtaaagtttattactattactcgcatttttcagatgaggcgcctaaggcacagagaggttaagtagcctgcccaggatcacacagctactaagtacagaagtcagaatttgagcctgactccagagctcataaggttaacaacgaggcctcccacttttatatgcgtattattccatgaattactgtttacactaagaatatgttcttttctgcaaccaatggaagattcctagaagaggaactactggctatgtggcattgagatttttcttttttctttttttttctgagatggagtctagctctgtcgcccaggctggagtgcagtggcacgatctcagctcactgcaacctccgcctcctgggttcaagcggttctcctgcctcagcctcccaaatatctgggattacaggcctgccactatgcccagctgatttttgtattttaagtagagatagggtttcactgtgttggccaggctggtcttgaactcctcacattgtgatccacccgcctcggcctcccaaagttctgggattacaagcgtgagccaccgcgcctggccgtgtgtttgagattcctagagacattagtaaaaccctccaaaagagtggggaccttacaccagcctgccggttcaagctccatactggacctccacctccccaacccc

SEQ ID NO: 26174 - DNA, 874 bp, Artificial sequence
  DNA replication origin
ggaccccgcccaccgcgccccacccgcccgctgtctgggcctcccggaggaaatgctcggctgcgcccagcccgcgcctcccagcccgggctgggccaccttgcccttgactctcacggtaacccctaccccagcccgcggccccagccattctccaggcctgggccgtcctcggagacgccggtgaataacttcccaccgccgcggaaccgggctcagcaaaccccctactgcctcgccccgttgcattgtgcttaatggacgttcgaaggagtcagccacccttgctgtgttctgagaggagcctggagaatgaaggagcccgggcactcaccctcagtggaccctcgcagtgggaggggggtgtcattcttctctcagaattaaggttaatagccgagttcgagttctcaccaaattaatttggggttggagctcagtaagactggttttcaggtaaccgacgagggaccgaaacggccattctgggttgcgtgttacggtgaacagcaaactgcatggatgtttgagcaccctcagtatctgtaactaaaaccctgaaatgcggtctcgctgattgagttgctaccctctggggagactaaaggtgctggactgggtctggtccctttaggagggtctgtgcttggtagaaagtaatcgtgtttcttccaggcagattgtgttgatgacatttaataagagacgtgtgtcctgaccaagtaatgattcggaatgttcctctattcccaccacatgtcacaattagtcacttcttaaggaaggagtggtcctacaccagcttatcagccacccataccctcctggcccctttccagccagcagaattctccccaatcttcaaggtgccacg

SEQ ID NO: 26175 - DNA, 1901 bp, Artificial sequence
  DNA replication origin
gcctgcccacctctcacctgccctgggccggtgcggggcgggcggcacctgcaccagggcgggcgctgagcctccagcctggggatcaccgcccgcccccgccagcccagcggcaacagttcccacgcgcggcccgatactttgtagttgattcatctgtggcggttccctcccccctttttgtttcgtttttaacataaagatgaaaatattttaatggacggcaatccttccccattttggtgtaaagaattgtatgcttcctctgagctcacgtgagttcttctgtgacactcacctcttctaccttgggggcaggctcaaaacccgtctactgaatactgttgtcttgtgaccaagggtggtggtctctcatttgtaaaatagttcacatagtgattaaaaggcataaaaagaagctgcagccttggataccctagagctgaaggccccttttttttaccatttggaactgaaagggcccaaggtctgcaggtgaggctttcagatctcggactaactttccccagggaggcttttgtggccgctccaaaccacgtggcaggtgatggggtagagggtgagagcggggccatttctaggcattcggggtcagttaagggtgtgggggctcaggttgggggtgggagtcagtgtgggctcagagttcagctcgggacgcggctgcagggtgggtgtggccctgggggaggggccaggctaggctcagctcggctccaggtggatcctgagtatcgggtgggggcagcgattggggcgtggctggggttgagatccgctttgggggatgatgcccgtgctgggcaggatacttaatgtttgggaaatttttctacggcctctgtcagggtggcctgccactcggcagcaccggtagcggggaattgaggaggggggtggccgaggggaggggctcgccgtcgtgggcggggccggcttgtcagggcctcagccttgggatgtcttcctggtgggttcatctcccgcttcaggctctggccccgcgcgagcctcttgactagaatattggcgcaggggctctggagacccgggcctcccgctgtaggtggggccagtttcctcggagcgcctggaaaccgaaggcaggcaaaagagcacgggaccaaccctttgagtgtctgcagtgtgctacagtgctcgttcttgaagcagagaaactattccacccttcaggtgtgcagacatcagaagtcctacctccagggtggaagccggcctccaagttggaagtgcacagggctccggcagcggggtggcggggagttgggaagaatgcagatttccgggcccctgatgccgacctagtacacacagttccagcgtgcagttgggagtgcatgttaccggtaccccaggtgacccattatgagagttgaactgcccagaaacctgcctctggagggagtctggttcagcatctggtggagggcacccctgggaagcccatttccagccccttcccaggtgtgcagagcataagtaactggtgttcctcaagggagaagaggagcttgctgttgggggagaaaagagcatcttgcagaagggagaaacccaggcaggcctcagggatgactgagaaggcagggcacaaggtgatggctttgctgcagccgtgggctctgaggtgtccgtggtttgtgggcctctagcagcattgtggggtctctgcagtcagtgactgaggtcatgccgggccccgtactccattaggctcgggaaggtgcccccgccccacttcccgcatttccaggatccacagtaatttcatggcagagggtgaatatcacaaccaggaaggtggccagctgctctgtgctgttcctctatgtgaccagggaccggttcccagatctccc

SEQ ID NO: 26176 - DNA, 1010 bp, Artificial sequence
  DNA replication origin
tctggctggcaagggctccaggggaggtggcaggggtgccaggaatccccagccacccagacatttgccaagcttggctcctcagtgccttggctggtggcctttgggggtgacttcaccctactgtcatggctggcccatggcgaaagggttcacctgctgcttaggagctgagactgggctgggccaggccaggggccctgtttctcttctggactgtgggggtttgggccagtggggagggagagcttccccaagggaccattacagaatttgctgtaagaatgtggagaaggagttctggtccttgggtttacagatttttattctaaacctaatggaacctttcttttaacaaaatctcctggaatccagtgcagaaaagagctgggaggattgctgggtggggcaggatgagggtgggaggggttttgactttgtcctgaggctgtgcgggatcctccctgggtcccccaaggaagccgcctgagtggggagggaggggccgcaagtaaccaggagcaggccaaggttccagggttcagcccaggacagccagtctaggtgcaagccaaccctgggggctggccagggagtgtgagctgttgcagtttggggcaggtgccttccaggctctgtgggtcagggttctctcctggcccttctgagggtgccaccctggcctccccgcctttgagcaggtgggggttgggtctgggttccatagggctgggcaggaggaggcagctgtgagatcccaggcagagccaggagaggagcaggacagatggcatgcaggcgtgctgcatcgggctgggattgtggggtgccagcagacaggggtggagtggggacttgggcattcctcactcattgcctgagtgtcatgaggggcctggctttggctggtgtttctgtcccttgagggcgtggtgtctgagggcagggcctgtggctccaccctgtgtgctgctctgggggcctggaggcctgtgcccccgcctcagcct

SEQ ID NO: 26177 - DNA, 1204 bp, Artificial sequence
  DNA replication origin
cttttgggagaatgaggcaaacagtgctattgttatgaaaacagttttgatctcatggcccctctgaagggtctgaggcacctgcgagtgtcctcaagcttcactctaaaaactgctgttatggggacagactccaggcggggctgcgtgcagccgagtacagtgagcacaggggggcacacagtgaggtgaggggccagccaggcccggcccttcagggagtgagcccgcctcccattctaaggcaaagggagcccaatggcctaaacaaatccaagcaccctccttgctgggctcaaaccctgcatctgcctccacccgggcatggggtacacagacagcaacagcaagacagggactcaccaggacaggagctccctctagctccaaaatgacaagagaaccagtaggagattccagactcctgcagaggagctcctagccttcctgccggatctcagagtcactccagctccccaggtgggagggccccaggggttctggctatgtgtgcctgtgcctgtgcatggggtgggggccgtgggacaaggcggggttaggccttgtgagaagacttggtgagaggaagggggctggggtcaagcctggaggggcactaggtgccctggagccctgaagggaggctgtaggagggttgggggaactgtggggagctgggagaggggctaagccatgctggggtttgggggtcctacaggtgccaagcagaggggggactcttcgggtaccaggctgcatggccgggtgatgcagggtaggggaccgcatgcagttgcggggagagtggggtgggtggggattggagtatggttgggcggggcagctgctcagggctgcgcgttacataaatgttccctggcgccacagcgaggccgcgagcggagcagcgccccgagtgagagcaattgcctcatcttatcaggaacacagcgtcccacatgctgctcttgcccaagccgcaggcccaggcggggacaacgtgttctctcagagagccagccggaaggggggcgcaggggctctctctccttcagctgagcccccaatccgcctcaacacccaagtcccaggccctcccctctcccccacagcagccacatgcaaatgcagccagctcaggagtgtgcgtgctccagctcaaagcctgagctcagactcgggctgtggcatggactccactctg

SEQ ID NO: 26178 - DNA, 1778 bp, Artificial sequence
  DNA replication origin
gtgcaaatctatgtacagagtaaggcggcaggaaggggtgtcctcactgacctcgtgaaacgtgtccatccctgagaaagggggttcaacaacgctgaatctcaactttgtgggtgtatctattgtgcaatttggtgggtggtgttttttgaaatttttgtgttttttttgtttttttaacaaatttactttgacacctgaggtgaaaaaaattgttttttcgtggactttgcatcaagttctctctcttctttcttattacaaaaggaaaggccagggactcacgagggggtgggagcggctgctcatggctgtggcgggctcagggcgagctggccgggctgatggtggggctgctggcgtcggagcggctgtagtcgctgagggagccggtccgcgagcccccgccgcgccgctgcagcattcccgggtggaagttggcgtggcggcgcgcgtgcttggtcaggtggtcgctgcgcatgaagcgcttctcgcagatggggcagctgaacttcttctcgcccgtgtgtgtgcggtagtgccgcgccagctcgtcggagcgcgcgaacttcttgttgcagtcctgccagctgcaggcgaagggcctctcacctgtgggcacaggggcagagcatcagtatccgcacctggccccgccttcacaccctctctggggaagggcccgcaacacccaacaccctggtctctcaacacccctcccacatgccccacctccaagagcttctgtgacaaatccatcaaggcagagatgaaggtgggcccctgccctcccgcccacgcctgggatggaggcagaggacacggcctaggataaaacagcatttcaggtgctgaagctgcagggcccatgggtaggtacaggtcagggccccaggctcctggcagtggaccccctaagtacaccacaaagcaggctgcactacacacccatgccgggccagtggtctccaacgcctgggggttgcaggcccatgccctggcttcacaggcctcccggagtccagccgcccatgctgctccatgggagccacactctgcacccctgcagggcaggaaggcaattcccattctgaccctcctcagtctagtctgtcacatgagagggtcagcgtaggtgagttccggggcctggaattctacaaccagtctgctgctccttctctcacaaaagtcccaaagtgaccaaccagggacggctggcagagcaggagaatgaaacagcctcttgcagacccaagtgtggtgacagacaagggcagcaacccagagcaccccattataggggcctgtgccggtagggaggaggcagaacacagtggggtgggaggtaatgaaggttggctacggtcaggatgctgctccctccttcccatccctcactcggagcgggagacaggccagcatttacccaggcaaactcaacacacaaaactctgaatcacaaaaatgacatcaactgctcaggaagaaccagggtggggggctctggcaccccagaaacgagcccttcttgtattaggggtggccgcagggctgcccttcctacacggtctcatcccctctcacccccatacagaccctaaagtgactgccagtcactgaagctggtctacccatgttcaacagaggaaacccactcacccacccaccttaaacacaagcagatacccagggatggccagacagccagggagaaccagcagcatggaaaagaaaggccaagcgcaatgcaaccaccaactctagaggaaaagagt

SEQ ID NO: 26179 - DNA, 1417 bp, Artificial sequence
  DNA replication origin
actccttgtccctgagtgggagcacagccccggactccctttaccaccctctggtggatcactcaagagtcaatcccaggtctttctcttagctttctttctcactttgctggaatacatcctcaagtaactatccaagaaaggatgcatgggacgatgggtttctgcttttttgagtccttggaggtctaacagtatcttttttctaccccatgcttgattcataatttggcctagtatagaaaacaaggttcaaaattacttgccaatcatcttcttacaaccattgctactgatggggatctgatgcactgcagttctcagcctttgccgtgaacattttatttttaccatcttcgaaatctgtcaaccaatcttactccctgttgctctgcacttttgttcagatatttttagaggcaggtcattttttccttgatcctgcattccacggagcactccatctgcagacccatgtctccttaggtctgttccttaggtctgcaacgctttcctctaatcttgtattgttaattgccctccctctacattcttttcttttggaattcctattagttgaaggtggatttactgaatcaggcttctgtgtcccttatctctgtgttcggcattatccctgtgtttattttccttcttttcttctggtctgctccctgagctgaaacaggcttccttactcaaatctcattcatcccctaagacccagaccacaggtcatgtctggtgggagcctttctggccatccctgtccccaaacagtgttcatggcactcttggccatggcattttgtcctgacccttactaggctgttgagtcaggaaaggatgtacattctcaactgcatggggcttctctatggggtggagggctgtggggactatggcgggggtggataatgtgggggagtgtgggggggctgtgtggggctgagggggctgtgagggtctctggggaactctgtagggctgagggggttgtgtgggcctctgggggtgctctgtggtcctgtgggggggctgggtatagggctgaggaggctgtgggggtgggtgctgggtgttgggctgtggggggctgaagggggctgggtgtggaactgtgtaggctgtgtggggctgtgggtgtcggggttgtggggctgtgcggggctgagtgcggggacctgggtgtggggtctgtgggggctgggtttgtggggctgtagggctgtggaggggggatctctgttggggggctgtgctccaaatttccaaaactccacgttttggaaattcagtggagtctgctcgccgcattttaacaatgggggccctgcaccggcccaagacaagggtcagctcggggctgggccaggagccccatctggggccccacacccatttctgggattgcccc

SEQ ID NO: 26180 - DNA, 706 bp, Artificial sequence
  DNA replication origin
ggtccgaaacggctctaggtgcactgttggggggctgtgtgggggctctgtaggggggctgtggggggctgtgtggggctgtgtgggctgggtgttactgcgctcctcaggcagtcaggagccctcgaggagtccgcggagttgggttgggggaggcggagcccggcgggaggcgcttcccgggcttcccaggctctagtaagttcctggaattcgtgaactgccggcccgggggaggatctgtgaaggccccgggaaggcagaggattcctgcgcggactgccgcgttcggagggcagccgggacggctgggccggaggcgggggagccctcggctgggcgggcgccgagcccggccgggccattcactgcctccgaagcgagcggccagacccgccagctgcccactcgcccccgacccccgggtcgcggtctccatccccctcggaccccggccagccccaggccctcgcggccgccgcagtacgtcgtctccacttcgcagcgccctctgcccactgcgattcccccagcccacggcgagctcagatgacacaaggatgatgctgtggtccgggagagaacgataaggattgtcactgtgctttgcactctgtcattctaagtttcttctcctcacgtgagctcatgtaccgcgggcagcgactatcagtgagactggggtagacgccacctctttggccgc

SEQ ID NO: 26181 - DNA, 2149 bp, Artificial sequence
  DNA replication origin
ctgcccactcgcccccgacccccgggtcgcggtctccatccccctcggaccccggccagccccaggccctcgcggccgccgcagtacgtcgtctccacttcgcagcgccctctgcccactgcgattcccccagcccacggcgagctcagatgacacaaggatgatgctgtggtccgggagagaacgataaggattgtcactgtgctttgcactctgtcattctaagtttcttctcctcacgtgagctcatgtaccgcgggcagcgactatcagtgagactggggtagacgccacctctttggccgcgggctggggcgccgagtcacgggtcgcggggacggggcggcggtgctgagcctcgagccgcccaggccacgcccctcctgatgtggccccgccctgctctcccagctctcacccgcgtccttttcccccgggtcccctgcgctcctcaggaccctgacggcgcatcctgggtcctctacgcgcgcgactgtcccgcccctgaaggggcctgcagggtgtccacgggactcggctcttcctccctgacccctcaggcctgtcctgggggtccgccctagaaatagctcggaggaaggagccagtgacttgggtgacgttttggaaattcagtagagtctgctcgcggtattttaacaatgggggtcctgcaccggcccaagacaagggtcagctcggggctgggccaggagccccatctggggccccacacccatttctgtgattgccccccaccccgcccccgcccccgcccccgcccgcgacgcttccgggaggtctaggcggctgccgtgagccggtccgaaacggctctaggtgcactgtccggctccagccaggtccgctacgcctggagagcatggaggcaagttctgccggctccacctgcaaagcagagcccctttccacgactgtgcagcaccgctcgctccagccccaccatacccgcctggacggagaccgaccgcagcctgggagagcctccaagcctggaggcgggcgcgcgagccctttccaaggagaacccacagcggcttcccctcttgctccaggggcctctagatcccaccccacctggcacctgcgtctctcccagaactcggcctgcccctaccttcccgccagcccccaccctgctggggctactgggacctcctagcggcatgcagcgttcagtaagcagccgccgggcccggccttcggcctttgcatttcccggtccagatatggaggtgacggaggtgtgctgcgcactccctgcacgcctctcctccactgctcccccatgagaggccttccctaaacccggctaaagagtacctaccccgtcacccccggcccgtcccccccccgtccccctcagacctaggatgcacccacccgccagggggtttcagagccagggcagggtgccggccatccagccccatcccagcacccttgtccctcggtcctcccactactcgtctagtactccctacacgccactccgcagggctcaacccccgctgtgctctgcggtcgcagctgcagccgcttcggtgctccaagaccagagaggaagcaaagacagagctttcccagccaggcatcgctgctttggccttgaaggtgaggtgggtgatgatgagagttcccactgagatcatgttcattatggcccaggcatcgttctgagtgctggacctgtatccatcctcccgtctcattactaccacagccctgttcacagagcaaacagaggcctctatggagagtcaaggacatgctgcctggctggagggcaccgggtcgggcttctgtctgcgagggtggtgggtggagaggtggggggacaggcagcggcatctgccaagcctggactgcctttgcccttgcatctcagggggctcccacagggatcacctggacagacaggaagcaacttgcaggcaaggttgttcctgggggcgcggtccatgaggctaacatctccacagagaagcgctgtgcactggccaaagagagatgctgacagcgctggggtgcaatgttaagttaaaggaaaaaaaaggaaggtgccaagcagtacatggaagacaatcctacctgagtaagaatgtagggagtattttggccgggcgcg

SEQ ID NO: 26182 - DNA, 1047 bp, Artificial sequence
  DNA replication origin
aggactttctttgcatcctggtgtccagccagtttcccgatttaaatctaggttctggagaagctgacgccgggtgggttgcggggggaggtgcggcgcagcgcggaggccgcgtggacagggtcccgggcgcgggcaccgggcgtctctggagcgggtctgcaggcgccgcccacgctcgcgggtcaccctgacctcgaaaccgcgcgactctgactcgcgctttccgctggctccgctggggcggtgcccggacagcgaagggcccgcgggtcagcgcggaccactctctcctgctgcccgcccggcagccacatcggccacaggagcggggactgcgcagaggcccccggtactccggcccttcccccaccctcccacccccagccaaagactggggcggggcatcctagtccgcgtgactcggatgggtggcctgaagcttccacagttccgccaacgcgggacccgagcgcagatgagaatccacaggcgtggggggtggggctggacccctgacctgccctccaggagccctcagtccacaaccaggccggcaagcgcgaagcgattccaagagacctgcaagaaaggagccagctgccagagcccaggcttggggtctggacgctgggaaagtccacgaggaatttgatcctgccttgaaggatggccgtagtgcacctgtgcacccgggagcaaggcccacgcagggagcaggacagcgcaggcccaggagaggaccccggaggaagctcaaggggctaggttaagcctaaaggaaggtttggtgggaaataaggctaaccaatagcataacacgattaacccacatcagccattaagaacttagctggtagggggagcggggaaggggttccagatgttggtcaaaggatacgaaatttcggccgggcgcggtggctaacgcctgttatcccaacactttgggaggccaagacgggcggatcacctgagatcgggagttcgagaccagcctgaccaacatggagaaaccccgtctctactaaaactacaaaattagcc

SEQ ID NO: 26183 - DNA, 1114 bp, Artificial sequence
  DNA replication origin
cgccagcgcgccagagcgtcatccacgtgcaggcgtcgggcgcgcgggacgaggcgtgcgcgccggccgtgggggcgctgcggccgtgcgccacgtacccgcagcagaaccgctcgctgtcgtcgcagagctacagcccggcgcgcgccgccgccctgcgcaccgtcaacacggtcgagtcgctggcgcgcgcggtgcccggggccctaccgggcgcggcggggacggcgggggcggccgagcacaagtcgcagacctacaccaacggcttcggcgccctgcgcgacggcctggagttcgccgacgccgacgcgccgaccgcgcgctcgaacggtgagtgcggccgtggcggcccggggccggtgcagcggcgctgccagcgcgagaactgtgcgttctacgggcgcgccgagaccgagcactactgctcctactgctaccgcgaggagctgcggcggcggcgcgaggcgcgcggggcccggccctgagcggcgcggcgcggcgcgggcggcgaggttctaccttcgaggatttcttttccattgtgtcggtgtcttttttacatgccctggtccaccggaaggccggcgcctcctctgtcagtgccgtgtacgtgtttggtcaaacgttcctaatggtgcctgaacctacactgacgccactcaggtagtagacggataggaaacaagtcatactgttggaagtgggtgtgctagcctagcatctgcctcgtacctgtggaaactcaatagccattgcaagagtatttttgttcctcagtaagagaaataaagaaattcgcagccctttgttttaagaagggagtgttttacatgctttttttgcttttttttttttctcctaccctagcgatgacctcttccaggtagcggtcccttgtgcgcggttggtagtacccagggcttagagcgagcgcgcacccggggctgcggtggaggctcctctgtgagctctacctgcctcccatcccgaggcctaggagaaggcgggtacctggccgccagctgacgccctggtggtcactgtggccctttagaaacacacagctccatttcataagcaaaacctcctcccccagccccggctcaagcac

SEQ ID NO: 26184 - DNA, 2194 bp, Artificial sequence
  DNA replication origin
gcgcagggcggcggcgcgcgccgggctgtagctctgcgacgacagcgagcggttctgctgcgggtacgtggcgcacggccgcagcgcccccacggccggcgcgcacgcctcgtcccgcgcgcccgacgcctgcacgtggatgacgctctggcgcgctggcgccggggggctgcggccaggcactggtccgctggcgctcgcacgccgcgcgcctccccccggggaggccgtgccgcccgccgccgcccgcgccgcacgccctgccgcgggcccggggctcggccgctccttgagcttgagcaccagctgcgtgggtgggcccggagaggcgcgctccgggaccggcacgccctccgtctccggtctgcgcggcggccgcttggccgtggcggcggcggcggcggcggcagcggcggccgcagtagcggcgtcgcggcgccgctgctcctgctcggcgctgaagcgctcctgcgcgctcgtcaggtagtagccgatcatctcctcgtggaactggtgccggtggctggtgagcagcaggccggcgaagatgaacttgcgctccccctgcatggcggcgcgcaggatgttgaggctcagcttcacatccgtgctgtacttccaggcgtcgccccgcggcccaccgcccttctccgccggcgacgcgcccgctgccttgtctgtgggcgacggcgtggtcttttccgacggcgacgtgctggccgacgcaccagactcctccttgctgcccttgcgcgacttggccttcttctccttgccccgctcggccgagtccccgttcttgccattggcggagttggcgcggcccatcttgccgtgcaccaggccgccgaggccgcccatgtttttcttcagcttgatgcccagcgtcttgctgaagctgcccagcttgttggccacggagtcggcgcgcgtcttgtccttctccttgcgctgcttctccttctccttgtccttgccgttcttgccgttattgctgttagaattgctgcacaccgaatcgcggtccgagtccagcgagtcggccagggactgcacgtcctcccctgccgaggccgtgggagactccggctgtgccaggggcgcctgtgtggagagggagggccggatcgaaggtggttagagaagagctgtccacgcgccagcgaggaagacacaccttgcccctgtgttgccgaggctagggccctggaccttcactgtcccagtccccactgtcgctctggtgactgtgacatccggatgggcggtgctgaaggagcggataggagtgggctctgatctgctgcggtagtaaaaggatgtagggacctcttaactgcgtgtgtcttctggccagggaagctggggtgtactcattctttctctctgggggacctcaggtacttggtaccctggaaccctgagtagggtattgcagcagggtgcagataccctacttggtcttggtccccagagccttgtcacaatttagaacggtcaggttcagactctggccttcccccactggcaaggccgcctgcttgaccagacacaggtcccaggctggcctctgtaaggatggaggccttcaggtggggaggacactgggcctgcacaaaagtgcctcctctgaaaagatgtctcacctcacgccaggcatgggacagaaaccttgcactcaacctcattcatcggatcttggatcaaacacccccttgattcagggatgccaaatcgcttcaggagttcctttctcactcagtttggcaaggtggaatgctaaattgaggaggattctgaaataggcctgcgctcagcaaaaaagatgttcccattcccagaaaagtccccctgggtggggtggggtgacgctggggagcacttcttggatgagacccactgatgaggtcaaccagtctgaggggggcacgaccatatctggggtggggggaccctgagaaaagaggtgggagagcagagaggcaggcagcacctactactactctgtagggacctccctgggtgaggagagaattctgaccgagtgtcattggacgagaggcagggcccatcatgctggccgctgggtgctgcaggaactggtgctcatacctgaacaggcgtccctggcttccaggggatgagcctgggagaaggcccattgctctcccacttaatttttgtccccccctca

SEQ ID NO: 26185 - DNA, 1526 bp, Artificial sequence
  DNA replication origin
ccctgggtcactgagcaggtttcagttgctcacatggctcccatgctcaacaccaaaactggaatggagaaaggctgctctgctccagctgtcctccatcacctctcaactgggcccgccatcctatcattgctgctgaaataaaatggccctgccttaagttagccatgaaaagaatgccatgccagtacaatggtgcctaatacttaacctttgcaccgttgttaccttggaggccctcttgcatagctactcaaataccagagtgttctgccaggaggctccatgctgggcatggtccaactccatgcctttgccctagcacagaacttgaaggacgggtagatgaatggacagacaagtaggtgcttgggcagatagatggttgaatggaagaattgaaggatgagtacatggatggatgcgtgcgtaggtgggtgggtggatggatggatggatggatggatagaggtacatgtgggtggatggacaggtggatgggtgggtgggtggacaggtgtatgggtgggtggatggcatggatggatgaatggatggacagatggatggatggatggatagatggacatgtgggtggatggacaggtggatgggtggttgggtggacagttgtgtgggtgggtgggtggatggcatgaatggatggacagatggatgcacagacagcagatggatggatggatggatggacaagtggatgggtggatcaatagatggatggatgaagagagagagggagggaaggaagagagatgggtgggtgggtgggtagatggatagatggatgaatggatggatagatagataggaagaaggatggataggttggtagatgttacatgaaggcagagttctctgagggcctctgcagtgcctttcacagcaccagtgtatagtaagtgctcaatgaatatttattggttttttggttggaaatatgatggccctgctttaagttttgcatgaggagaatgctgtgccagtacaaaggtgcccaatactgagccttcacgctgttgttaccatgggggtcctcctgtgtagctgctcagatcccagagtgttctgccaggaagtgaagatgggactcagaacccaggcctgagagggctaccattcaccttgctctgcccgcttctcagtattagtacctgactcaagagcagctcctctctttccagcactgccccctccattccttgaattagggaaggaacagtgctccacatttctagctggggtatttctctctccaagtatgcaggttttaactccatattctctccccctgtgctgttcattatgttgttcaaccattcactcgccggcactcaacgcatactaggtgacagggacaaacaagcaacttccaaaagcacttgaccccccaggcactgcagcttggctttcaggtgtggctgggcaggctaatcacctgcagtgtttcaaaatgcacacccaggagcactgcatttagacctggcataaaatatatgtgtgtgtat

SEQ ID NO: 26186 - DNA, 1114 bp, Artificial sequence
  DNA replication origin
ggcccgcggaccaggcaggtgcgctctccgggcgcggggccggcgccgtctccttcccgagctccgtggcgaggcaggtgggcgttgaggccgggcgaccgcggggccggggcgcggggacgcggggggcgcgggccccggctgggctcgccggcgcgtctgcattgcgggctccgctccggaccccgcgggctcccgggccaccggctccggcccggcgtggcgcgcctctctcgggcagggcgcggcgctaccgctgggtcggggctgctgcctccgctcagccctttggctgtccgcactggaacgtgatgccaggcgtggggcgaccgacccctcggtccgtgcgcgcgcgtcgggggtcccgcggctcttgcagacggccgggcagggcccggccccgagccgcgcgcgaggccgctcgccgggcaccggagctgtgactgcgtgggtccccgcggcccggcgcaccgccgtcccgctcgctctgctgggtctcgctggacagcaggcaaaccattaaggcaatttggctgtgaacccagaggccttccctagtatctcctcactggaggggaaaaaattgcatctgcggtgctttaagtgctcctttaaatttgggagatgtcagtgatgtcatcattaactaaaactttccttcattggacacaaccgctcaagtgtaccctcctccctcccggtgaagctattgcagccctttgagaatctctgtaataaaatggatttgcctctgctctgtaaactcagctacctcacacaagtgcaaatgacttttatttctgtctattggcttgagaatgtatagatttaagagtagctgaagggaaacttgtgagaccccgatcagggaaacgcttcatccacagcacaaggatccaggggaaagtcatgtatgacatgcacatggttaccgccaggtgatacctttgtaaatggaagtgggctgtaagaggaacaatttttaaaaatatgatgaggcagataatgtgtccaggaaaaggttgacagcggggcctaaatctttacaggtcttaattgcttcaggaaaatctgcaggtgtccttcaccatcctcctcctcctcctccagggtg

SEQ ID NO: 26187 - DNA, 947 bp, Artificial sequence
  DNA replication origin
cccgccgcccgccggcagcaccgcggccagcgccgtcttacctgccgcgccgcgccgctccgctccgccagcccgcagcgccgcagtcgccgctacccgacttccattttctctcgctttaaaggaaaaccagatcagctgttttgctcccgctcgggctccgcggccccctccccagctgccgctcgcggtcccggtggcctctcctcccccgcctcctcccgcgctccgctccgcccctcgcgcccctccgctccgcccgcggccgcgcacaacgcccgcctcccggctccgcctgctgcctccgggcgcgcgccctcctctgacgtcaccggtcgcgttcgcgccccgcccccgccccgcgcggacgtgcgcgcgccgcgcctgtgccccgcccccgcccctccggggccgggcacggagagcgcgtgctcgcggccgcgagccgaggaggggacgtacagcgcccgcgcgcccgcgagcccgctccggctctcccatgcttgcccctcggggtgctccttctgcgctctccgcctggactgcaggaaaaggctgcttaaacagcctgccttttcctgctgcctgactcgcgccatctgcggccacctgtctcgtttcttccccctggctggcgcacccttccttcctaaacatcccaaactttctcccacccaggctgtccaggctgcagtttctacgccctgcgctggggcctgtgcatcacgcctaatccaaagctggtccttttacctcccaaaaaggttctctgaccttttcccattttttgccttcctctaaagactttttcacgccaccccttcagatggttcccctccctgatggcaagacctgctcgctgctctgggcccttctcacgtcaccctgtagatgtagtcacgcttccttatcccaaacaggacgttatattgcagatgacccatacc

SEQ ID NO: 26188 - DNA, 2152 bp, Artificial sequence
  DNA replication origin
cccagtaacccaggaaaccttgccaaagatactctagcaagaaatacgagtcgggtttacacgtgccacaccctacggaattttttgttatcgtaagagactcagagcgattcacatgtgcatcagagagggcactgatggaagcaaacctcgtgcatcccacagagttacagccagcagcgctcaggctgtgtggctgccgcaagtgcccctgagccccctgagccccagtggctggcgacagccccgctccatgtcgccttcatccaagatctgcgccgcggggcggccgccatctggagcacggctggccacggtcagccctaagctggtgggtgacactgcgtctgcgcacacttcgttgctcaaagccaactgtatgtgctgactgggtgtgccttctagtgtcctgtgttcctgctgagtgcctagcatgcatacttcctttgtgcgcccagtgttgtgtgcctgtcactgtgtgtccagtattgagttatgtgcatggtgttatgcaccaggcatggtgtgtctgactttgtttgcccagtgtcgcgtagccagcatctgtgtccagcctgtgttcttgccatgtgcctggccctgcatgcctagtgtggcacctggctgtgcatactccgcattgtatgccgggtttgtttgctcccgtctgtgagccttgcagtgtaatcctggagcgtatgccctgtgttgtttgccaactgtgtgtgcaggtactgtgtgtacctggcgctgtgttcctgcttgtttgtgcctagtgggcatgcccagtattgcatgcctggtgttgtgtacctggtcctgtgtgcccagtattgagatcccagagtgtctgcccggcctgggtgcctgcgttgtgtgtccggccctgtgtgctcaggtttgtgcatccagcttggtgggcccagagtgtgcctggcatacgggcttagtgctttctccctggcattttgtgcctggcatgtttgcccagcactgtgtgccctgcatggtgtcccagaggctgcgcctactatggtgtgtctggctttgtgtgtctggcattgcatgctcattgttgtatacttactgtgtgtgtccagcatggggcgcctgcattgttttcctggccctgtggttccagagttctgtttctgcactgcatgcctggtgttgtgtgggtggaattacatggctggtgtgtacatggctggtatgtgacccagcgttgtgagctcagtgtggtgctcctggagtgcctggcccggagtgcctgctggtgtgtgtgtggtatgtgtttggcatcatctgtctgaggttttgtgcatagtgttgtgttcccacagtgtgtgctggcattagtgcctggacttgtgtgtgcctggcattgcaccctggcttctgtgcccagcatggtgtgtcccagtgttttgtgccctacagtgaagctcagcattgcgtttggtgtgtgtgttcaacatgtgttacaagcatgggttcttgccgtgtgtgcattgtgtatgtgatgctgtgtccctagagtgtgtgtagcatctgtgcctggtgtgtgcccgatgttgtgttcctgcagcgtctggtgttgtccccagtgtgtgccagtgtgtattcccagtgggtgtgccagcttgtcggtcatggtatgcctgaccttgtatgcccagagttgtgtgtccagtgtgtccccagcttcagtgtctgtggctggagagtgtgtctttccttctgtgtctggtgttgtgacccagcatggtttgtgtggctgtgtatgcttggcaagcgtgcccactcctgtgtgcctggtgctgcgtgactggcacgtgtacctcgaattgtttggctgacagtgtgtgcccagaattttgtgcccactgtgtgggcctgtgttgtgtcctgtgctgtgtgctctgttgttagccctgtgtgtgtgctctgtgtgtcttgtgctgtgtgtcctatgctgtgtggcctgtgctgtgtcctgtgtggtgtgccgtgcactgtgtgccctgtagtgtgtgtcctgtgctgtgtcctgtgtggtgtgccgtgtgctgtgtgtcttgtgctgtgtgtcctgtgctgtgcgccctgtgttgtgtacccagtacttctgtgtgtcctgggctgtgtgtcc

SEQ ID NO: 26189 - DNA, 1111 bp, Artificial sequence
  DNA replication origin
gctgcagttccctgggtggccgccgagacgctggcccgggctggagggatgggggggcggggacgggggcgggggcggggctcgtcacgtggagaggcgcgcgggggcgggcggggcgggggcgcgcgcccggctccttaaaggcgcgcgagccgagcggcgaggtgcctctgtggccgcaggcgcaggcccgggcgacagccgagacgtggagcgcgccggctcgctgcagctccgggactcaacatgcgctgctcgccgggaggcgtctggctggcgctggccgcgtcgctcctgcacggtaaagccactgcctccccgccctccactcctccgtgggatcccgggcacatcccgggcgcctctgtgcgccccgcgcctgggccaggtttgggatctccccgccgccggggaggggcagcgggggcgctgcgggggctgcttgtctgggctgcaccgggtgggcggcgggggacgccggcaggagggagtcgggggtacccccgccggcctgccctgagccccctgcccgggtcttctctccttaagtgtccctgcaaggcgagttccagaggaagctttacaaggagctggtcaagaactacaatcccttggagaggcccgtggccaatgactcgcaaccactcaccgtctacttctccctgagcctcctgcagatcatggacgtggtgagtcccgcctggctacagggctgccctctccccttcctgggctccgaggggctttttagacagcgtcgggcggccaggcggtggagctcggctggggcactctagttggccccaagctaggcagggccatgctctgagtctgtccccagcctgccctctcctgagtgtctcatttctcggtttcccctccagccaaggagggacctggtaaagcttattccatcaccctggccacctgtgcatggttacttgggtcccacctttctctcaggttagaaactcaagcatcctgagctgggactcagtagcaagaacaggtgaagttcactttttaatctcccttatggtgtaagtgttgacttgcattccagcattgtcaatttagccacttctagacttttctgccgcctatggtatgt

SEQ ID NO: 26190 - DNA, 2093 bp, Artificial sequence
  DNA replication origin
ggtccaggccgctggcggcgccgggtgaggcggagtccctgcgatccgggctgggcgcggcggcccgggcagcgggcgtgggtcccaggcgcggtgtggagctgctggccgggcgtgtggaggccgctgggacgggcgttccgtggggcagcgagggctgcgaggcggacagtgggcgcaacgcgcggctcaggcggcgcgagggcagggcggtcccagcaaggggggcggcgggcaagctgccgtagggcgaagtccgcggtgcccgggggctggcgggcgcgcccagggggctggcggggggcgggggcccgggtgaggcggcggcaggtgcgggccccgggggcgggcggcgcacgaggcgcagcgagccgagcgccagcggccccacgagcggccgcgccacctgcgggcagaagctcatgaccacggcctgctgcagcgtggcgatggccgaggtgacctgcggcggcggcggcggcgggaagaggcccaggcgccgacccagctcggcctgctgcaccatctcgccgtcgtacttgacgatctcctggatgatggcgttctactggttgttgaatacgcccgagttaaggtcatgctgcaccttgtgcaggaggatggaattcttcttgccgatgcggtccaggcggtcgatggccaccgtctcgaaggcgcgccgcatcatggggtactcctccagcacctcgttgaagttgtccacgctcagcgaaaggaggcggcaataggtgttggcccgcacgctcgccatgcggtggccccgggtgagcaggcagatctccccgaagtaggagccatcgaacagcttcatctccttgttgcccttagcgagcacgctgaccacgccgtgctggatgaagtacatcttcccgatggtgccttcgcggatgaggtagtcacccggctggaagacctcgaacttgagcttggtcagcatggccgtgacgaagttggggtcagcattggcgaacagcggcatggaggtcaccagcttccggcagttgaagttgacaatctcctcccgcaggggcccgttgagctcgcccaggatgctgtcctcgtcgaacatcttgccctggtaacggtgctcgtagtagtcgtggatcttctggcggaagtcggccggcagcttgtggaaggacatgtactgctccacctgcttgtacgtctagtactggcgccgcgaggagtccagcgactggatgagggcagtggcgtggccgatgaacatggcgtagcaggtggcactcacaatcatgctgagcatggtcagccagatgtccgtcatgctctcgggcgcctgccggccatacccaatgcacagcatgtggctcatggccttgaagagtgcgaaggaatacagttcgctccaccagtggttcaccatgccattgatggacacccagcagttgcacgggaagtcctgcagcatggccaccaggaactgcaggcagccatcccagtggcagagcagcagcatcatactgatgaggttgcagaaccgcatcaccgcgctggccaggtcataggtcatgtggaagatctcctcccactggtggatgtagcggatcaggcgcgagaggcgcagcagccgcaggaggctgaggatcttggtgaagcgcacgatccgcagggcgcacgccgtcttgtagacctcggagtcgatgcccttctccacgatgaggaagatgtagtccacggggatggaggacacgaagtccaccatgaaccacgtgcgcacgtacttcttgatcttctcttggtccaggatgatctccgtgttgtcctcgatcacaatgccggtgcggaagttcaacaccaggtccatgaggaagaaggtgtccgagaccacgttgaacacgatccacagggcggtggtctcgtccttgaagaaggtgatgcccactgggatgatgatgaggtttcccaccatgaacagcagcatggtgaagtcccagtagaacctgaagtcgctgtacgggtggatgatccaggaccccgctgactggacgcgctcctgctcgcgctccacggccttctggctgccgaacatccgcagcgagaacttgttg

SEQ ID NO: 26191 - DNA, 815 bp, Artificial sequence
  DNA replication origin
aggtatgcagatgcacactcccccacaggaggagccgcccggaaatccctgaatcagcttttctgccgtccagggtctgtgacaagcgagctgctgcccttctgaagagaggctccatgccggccaggagccgcggctgctgcagcactgcagtccccggcttctggagtaaggtctctgtcttggggcgggggatgcctggaggaggggaggaagggggattcactgcgggtattgggaatttcccagttccccagactctgtggggatgagaagccctggaaagccctgaatgactgcccctcccccccaacacacatgcacacaggatttttgtgtgtgtgggttggggggtgaggaatgtcacttcctgggtcaaacaccaaactcgagtcctggtcctgagtgtgcagagcagaaggcaaacagaaagcagctgcatggagggtgaaggagaggctgaggggagagggcgagggtgaggtggagctgggaaggtcaggggcagttaatggccagacagcagcagaaattccacctggcgagctggggccccgaggtcttatcgggtgaggttgggggttgagggtgaggcccaaggatgagactgaggcacaggagtgctgcccaggctctcggttcttcctgcccctcctggtgctcatagtgggtgtcagcctcgcttttcccaagtgggagaaagcagatctgcggaggtgggaggtgttgggtccatggcagagcccttctgctgggttcctatctgagagcaggcagagggtcctgtgccagcagacgctcttcctcctctgccc

SEQ ID NO: 26192 - DNA, 1131 bp, Artificial sequence
  DNA replication origin
agcacgccaggaagggtgggggaccccgaatgagtgattgagtggggacagatggaggcttggggaccagtgggccctgggctgcctggtgtaggatacggaaagtgtgtgtgtgtgggggtgcacccgtgggccccaggaggtctgttgtgcgcatgctctgagtgtgagggaggacgggtaggaccgtgggggtctgccctggtcgtgctcccaagagaggcactgctttctgcagagcgcgtgggcaactgtcagctggggaagcgctcaccaggggaaaggggagctctctgtggcttagcagtgattaacccacacaatcaatggatcctccagccacagtgtgagcagctctgcctcatgtgaggcacacagcaccttccagcacagtcccgatatctttcatgccagatgcacatcttcaatttcagctacaaaccattacaaattgatgcattttctttctgactaaatgttacaaggtttgaacatactatctctgccgatcaccgcccctctaagggatgggtttagaggtttggcacgaaagcaaaagccttttaataggagtgcgtgagtgtggtggtgtgtgtgtgatgtgagtgtgcatatgtggtgtgtgtacgtgtgtggtgggtaggggtatacgtggtggtgtgtgtgtgtaggatgtgtgtgctgtatgtgtagtgtgtaatgtgggctctagggtgtgggggacagtggggtgtgtgtatatggtgtgtgtgtgtgatgtagggggtggtgtgggttaggggtggaggctctagtggggtgtcagggggtatgtgggtagtggtgggtagtggcatatgtgtggtgtgtacatatgtgtggtatgggggtatagtgagtttgtgtgggatgtgtgtgtcagtgcatctgtggtgtgtgtaataagtgtatgtgttgtgtgttgtgtgtagtgaggtatgtgtgcagtgtgtagtagggtgtgtgtggtgtgtgtgtggtgtgtgttgtgtggtgcatgtagtgtgtagtagggtgtgtatgtgtgtggtatgtgtgtggtgtgtgtctgtgtggtgtgtgtggtgtgtagtagggtgtgtgtgtggcgtggactgggggtgtaaggggagg

SEQ ID NO: 26193 - DNA, 961 bp, Artificial sequence
  DNA replication origin
gctgtgaccagaggaaccagaaacggggtgagaacgcttaggggactgggtcgtaagatcaaaggccagtcttgcagtaacggcagttactaggtggactgtgacatcacaacattccactcctcctggtcggggggagggaccatgtcagcaccatgtccaagtcgctgctccacgatgggggagggaagcacagggttgggacccagctccttggagacgccagcacaaagaacccagggaggtcgaccttgaggcagcaggaggggagggcacagtctgcagcagggagtcccaggagtcaccagtccaaagtcacccagggatgactggcgagggtggggcctggctccttggagatgagagcccaaagagcccagggagatcaagcttggggcggcaggagatgagggcccagtaatggagcgggaagccccaggactcacccacccaaagtcaccctggggtgattggcgagggcaaggactgggctgcttgctgaaggggtggggctgactgacaaaactttggtgggggtagcccagaggcaccggggtaggggggacgagtccagtgtgcctcaggagtcgtatagactctggcaggggtcttgtcatcagaggggatctgtggctgggttgaggggctatgacctagtgcgtttttacctttttcttggctgcagccaatttgttgtgttgagtttcttctgccatcgcagggtggggagggaggcagggttggggtcacagcagcaaaatctcaatgagaaccgatcaaggcctccagtcacctaccaggcagctgtgtgactgagccagaggaggcgtaaccagggccccagtagaatgcggaataggggcgtggccttaatgctccaagcccattggtcaatgagaaagatgaaaaggaaagggggcgtggccagaaagcagtgtgtccagagggacctgtggctcac

SEQ ID NO: 26194 - DNA, 765 bp, Artificial sequence
  DNA replication origin
acaatagcaaagacttggaaccaacccaaatgtccaacaatgatagactggattaagaaaatgtggcacatatacaccatggaatactatgcagccataaaaaatgatgagttcatgtcctttgcagggacatggatgaaattggaaatcatcattctcagttaactatcgcaagaacaaaaaaccaaacaccgcatattctcactcataggtgggaattgaacaatgagagcacatggacacaggaaggggaacatcacactctggggactgttgtggggtggggggaggggggagggatagcattgggagatatacccaatgctagatgacgatttagtgggtgcagcgcaccagcatggcacatgtatacatatgtaactaacctgcacattgtcacatgtaccctaaaacttaaagtataataataataataaaaaaaaagcgagcagagagctggtgaggcaagtgcagagcacaggtgtgccacagcagctgtgggagggccaaggagtaaagggtgcacgtgcgggtgtggcaaggttcctggaaaagaggggctggaagggaaaggggaggaagacagagggaggagccggagtttcacatgtagtgcctgggggctgtggcagccctccccaccccacacgtgctggcctcttccacggcacccagtgcacccactgttaagactgatgctcagcccctttgggcttccctcttctctggtcaccgtgtcttccaacccacttgtccagggccacc

SEQ ID NO: 26195 - DNA, 928 bp, Artificial sequence
  DNA replication origin
ggaaccagaaacggggtgagaacgcttaggggactgggtcgtaaggtcaaaggccagtcttgcagtaacggcagttactaggtggactgtgacatcacaacattccactcctcctggtcggggggagggaccatgtcagcaccatgtccaagtcgctgctccacgatgggggagggaagcacagggttgggacccagctccttggagacgccagcacaaagaacccagggaggtcgaccttgaggcagcaggaggggagggcacagtctgcagcagggagtcccaggagtcaccagcccaaagtcacccaaggatgactggcgagggtggggcctggctccttggagatgagagcccaaagagcccacggagatcaagcttggggcggcaggagatgacagcccagtaatggagcgggaagccccaggagtcacccacccaaagtcaccctggggtgattggcgagggcaaggactgggctgctttctgaaggggtggggctgactgacaaaactttggtgggggtagcccaaggcaccggggttggggggaccagtccagtgtgcctcaggagtcatatagactctggcaggggtcttgtcatcagaggggatctgtggctgggttgaggggctatgacctagtgcgtttttacctttttcttggctgcagccaatttgttgtgttgagtttcttctgccattgcagggtggggagggaggaagggttggggccacagcagcaaaatcccaataagaaccgatcaaggcctccagtcacctaccaggcagctgtgtgactgagccagaggaggcgtaaccagggccccagtagaatgcggaataggggcgtggccttaatgctccaagcccattggtcaatgagaaagatgaaagggaaagggggcgtggccagacagcagcgtgtc

SEQ ID NO: 26196 - DNA, 1398 bp, Artificial sequence
  DNA replication origin
acttgtagaatctgaaaagtctgagatccagctcaacgtaaaggaccttaaaaggaagctggaaagggcccagctcctgctgccacaggcgagcagctgcagccccgggggttgtgggagccccatccggctggggccatggtctagggatcatgtagggtgtggggaggctccagccaagagctggaaaatttgggtccttgttctggtcccaccatagaatcctctggagtgtgctaaaaatatacaaattggggccctgcctggggaatcagaatctcagagtttgggcttaaaaaaatatttttcaaaggatcatagatgaaaaccattattttatagattacatttatatggctagctcatgagtctgtttccttctgaggtttgaaccaacactttcactattccagcagcagctgcaggtggaggctgaccgcctgggtaaggagctacagagtgtgtcagcaaagctccaagcccaggtggaagagaacgagttgtggaacctcctgaaccagcaacaagaggagaagatgtggaggcaggaggagaagatacaggagcaggaagagaagatgtgtgagcaggagctgaagataagggagcaggaggagaagatgtggaggcaggaggagaagatgcatgagcaggaagagaagatacgggagcaggaggacaagatgtggaggcaggaggagaagatacgggagcaggaagagaagatacgggagcaggaggagaagatgtggaggcaggaggagaagatacgggagcaggatgagaagatacaggagcaggaggaggagatgtggaggcaggaggagaagatacgggagcaggaggagaagaggcaggagaagatgtggaggcaggagaagaagatgcgcgagcaggatgagaagatacgggagcaggaggaggagatgtggaggcaggaggagaagatacgggagctggaggagatgatgcaagatcaggaggagaagctgcgggaggtggaggagaaaatgcaggaggaggaggaaaagatgcaggagcaggaggagaagatacagaggcaggaggagaagatccaggagcaggaggagaagacgtggaggcaggagaagctgctcaagcaggaagagaagatatgggagcaggaggagaagatgtggaggcaggaggagaagatgtgggaacaggaggagaagatgcaggaacaggaggagaagatgcagaggcaggaggagaagatgcgggagcaggaagtgaggctgtggcagcaggaggagaagatgcaggaacaggaggtgaggctgcaggagctggaggagaggctggggaagctggggcagaaggcggagctcttggggggagcaggcagaggtgtgtgcaaaccctggagatcataca

SEQ ID NO: 26197 - DNA, 1041 bp, Artificial sequence
  DNA replication origin
tgccgtgttcccgcccaactgggccggccggttctcggccgcggggttccgcggcgcgcgctggcagctagcggcgctgtggccgcctctggaacgctgctccccgcagctggacgtgggcggcggcggggcctggagtctggggctcgggctgtgggcgctgctctggcaggcgcgcgcgggccccggcgaggtggcgctgcaggagctatgcgggcagctggagcgctacctgggcgcggcggcccacggctgcggcggcgccaccgtgcgccacgctgttttcgcggctaaaggccgcgcggctgactgcgagagcccgcgcgagtttcgagagcgggccctgcgcgcctgatgggtcgaggcggacgcgcggctgcgtcaggtaagcgaggccgggccgccggcgtttgaccgcgcttgggtggcctgggaccctgtgggaggcttccccggcgccgagagccctggctgacggctgatggggaggagccggcgggcggagaaggccacgggctccccagtaccctcacctgcgcgggatcgctgcgggaaaccagggggagcttcggcagggcctgcagagaggacaagcgaagttaagagcctagtgtacttgccgctgggagctgggctaggcccccaacctttgccctgaagatgctggcagagcaggatgttgtaacgggaaatgtcagaaatactgcaagcaaactgaaaacaacccatccatgtaggaaagaataacacggactacacgtaagcaattccaagtctgtgtctgcggggacgtcgcaagtgggataaaatggtttaaaggaagaaatggcttttaggagttagggtgttttgttttaagtaatacagacttggtcaaatggaaagccggtagaaagtgagctttattcatcagtttaaccgcattagtgctcttttaagcttgaaagaggtagtttgagagagtaattgagtggtaaacttactgaacttaggggacggggaagtacatgttcatagaagggtttaggagaaagtatgcct

SEQ ID NO: 26198 - DNA, 927 bp, Artificial sequence
  DNA replication origin
gaaccagaaacggggtgagaacgcttaggggactgggtcgtaaggtcaaaggccagtcttgcagtaacggcagttactaggtggactgtgacatcacaacattccactcctcctggtcggggggagggaccatgtcagcaccatgtccaagtcgctgctccacgatgggggagggaagcacagggttgggacccagctccttggagacgccagcacaaagaacccagggaggtcgaccttgaggcagcaggaggggagggcacagtctgcagcagggagtcccaggagtcaccagcccaaagtcacccaaggatgactggcgagggtggggcctggctccttggagatgagagcccaaagagcccacggagatcaagcttggggcggcaggagatgacggcccagtaatggagcgggaagccccaggagtcacccacccaaagtcaccctggggtgattggcgagggcaaggactgggctgctttctgaaggggtggggctgactgacaaaactttggtgggggtagcccaaggcaccggggttggggggaccagtccagtgtgcctcaggagtcgtatagactctggcaggggtcttgtcatcagaggggatctgtggctgggttgaggggctatgacctagtgcgtttttacctttttcttggctgcagccaatttgttgtgttgagtttcttctgccatcgcagggtggggagggaggaagggttggggccacagcagcaaaatcccaataagaaccgatcaaggcctccagtcacctaccaggcagctgtgtgactgagccagaggaggcgtaaccagggccccagtagaatgcggaataggggcgtggccttaatgctccaagcccattggtcaatgagaaagatgaaagggaaagggcgtggccagacagcagcgtgtcca

SEQ ID NO: 26199 - DNA, 1143 bp, Artificial sequence
  DNA replication origin
tgcgctctccacggagcgggcggccgcagcgcacttggctggggcgagaggcgagaggggtgggcggactgcttggttggcgttggcgctctgcagtgcagtggagtgttagcccagctccctatatggtcggggattagcttggcgctgctgaggctgaggctgagccaggagctggaggaggaggtggaggacgaggacgaaaaggaggaggagaaagagcgcagcagcagtcagcgcacgccgagcggctgccgggggaagcagaggcgccggaggctggggcaccgccgacgcctcgggagccatggccgaagggggagaaggaggcgaggacgagatccagtttctgaggactgtgagtctccgcggcgggggcgaggccgtgggcaggtggggaggagcgcggagcgcggcgaggaggggctggctgcgctgcgccgcggtgccgggtgcccggtgccgggcgctttctccgcacccgcgggctgcagaggcggaccggccacctacccgcggggccgcgaggggctgcgtgggaaggggcaccatctcctgcctctcccttgttcccctaccgccacccctgccccaggccctccacctaggaccgctcgctctccaggcaacttgctacttggtctgaaacccttgatgcccaaacttcagccggggtttgttcgcggttgtcctgacccataagatcggcgttggaagccctcgccccggggtcggccctctgacacctccatactccaccccagccccattcctcttccagggcgcccccacgcacaggggaacctccgggaaggagccagcggggcaggggggagtgtggggagccgggtcggagaagcgggcgcaggcgcttggtcctagccctgggatcgctcggaggggaattcacccagcgctgcccctctcgtgttaagccccacgccggcaactgctgctggagcctgacttgactgactgcctgtcgtgtgttcgagagctgtggcttctgctcctggctcccgcgagccccgcaggacagggaaaccccagtcagtggctccgcgtcactcaggtcccctccttgacacctgagggcgctgctccgtcccagatttgggggtgagggggcgaagtctgttgcag

SEQ ID NO: 26200 - DNA, 1315 bp, Artificial sequence
  DNA replication origin
aatgccaggctctagcgggaatgtaattgaacattgtataatgaaaattaccaataacttgtcaacagctatgttcaagtcactcgatttcctgtgcttcagtttcatcacctatttccttcccagtgagctaaaaacaaagatgttaaggtgcctcatagggtgaagaaatgaggaacacaccttaaaaaatacataaggtgataactagaaggaaaagaaccaataacgccacatttggagtcactgcccccatggttaccaccatcactcgctctaagccataaccggtatgcagttctctgcaacaggggctctgaacctgggtccttgaaccccacaggctgtcatgggtgtactttaaaagaggtctgccagctctgatctctagggcaggaagcccaggacacaaaacttaagaaccactactatagtaaaccttggctacaggtgtaccaaaaacaaacaaaaacaaaaaacacttacaatgccagatggagaggaaaagtcagggaagatggctcagaagccaagagaaaagcataaggatctcacaacaactaccaccttcctaagcctcaactccctgggacatctattcaacactgaccctgtctgaagataattttttcaagcaataacgcctagaagatcattaataataaggagaagaaatgactgatcatggaggacacaaggcagaaaaaacctgagctgccacccatccactactaaagacacctgtcagagggacaaccaaaggatttgatggagctttgaggggagcaggcagctttataacaatagggttgtcatgagttgcaactgtggggccatcttgtgtgcagtgtgagagatgagaatggagtctgggtctgcaggtcagacgaaggatgaagagatgaatactctagcctctcagtagtaccagcagggcgataggtacttccataccccccccaaataagacccaagtcccagctttgacaaaagaaccatgtttggaagagaaactgaagtaaattggaaggaagcgcttcaacaggaggagagtggttcaaaagatggacaagaggtaagttgtgatcttcgaagaccaggtcatggagaagggggcacccttaaagggaagtgagagagggaaagaaagaatttcattctaattcctgagagcaaggcagcgcatataaaattacctaagatttacagagcgatttgccgtttacaaaacattatgacattcacgataacgtttaatccttatcaccctgaaacgctggttacattttattttacacatgaggaaactgaggct

SEQ ID NO: 26201 - DNA, 964 bp, Artificial sequence
  DNA replication origin
cggcctggcggagatcgccacagcgagcggcccggagccgcagcggcggtagccagaggcggcggcggaggcggcggcggggacggaggcggacgccggggccgtggccgtggccggggcttccgcggcgctcgcggaggccgaggaggaggaggcgccccgcgaggcagccgccgggagccgggaggctggggcgcaggggccagcgcgccggtaagaggcgacggctggtggggctgggaccgcgtgtaactggggcaagtggggccgaggccgccagtcaagagccgcaagagagcgtgccaggcgcgcgccagacgggcggcggcgccggcgcctgcgcgggacgggcggatggtggcgcgggggcgcgcctggtggcgggggcgcgcctgggtatgcgcttggccctcgtggcctcctggccgggctggcgcgagacagtgggggtaggagggcttcccagcctgccccagggtccgggttaggaacccagaggccaaggccgtgtgtcagggctgcaagtctcggcggcccgtgggccggctgggctgtctgtacgagtaccactatgggacggaggcgcggccacgacgtggtccctcggcagcctttacgggcacgctcctgttattaggagggaaaggattttttggtctgttttgttaactgtctgtgcaatgcctagtacacagtaggcgcataataaaaagtttgttgagtgaaagaatgacccctacgactggactctagtatttgggggcgggaccagatgcatagttctttgtaatagcgtagttctcttttattatgcctgtatgtgtagaaatcagcgagcactgggctttgtcgttttgaattttcaatttataaatgagcagtcaagttctgagttttaatagcaatatcatcagtcttattgacacattcatagaaggaagtttttggagattggagcagggga

SEQ ID NO: 26202 - DNA, 2633 bp, Artificial sequence
  DNA replication origin
ggcgcgctggcccctgcgccccagcctcccggctcccggcggctgcctcgcggggcgcctcctcctcctcggcctccgcgagcgccgcggaagccccggccacggccacggccccggcgtccgcctccgtccccgccgccgcctccgccgccgcctctggctaccgccgctgcggctccgggccgctcgctgtggcgatctccgccaggccggccgcggcctggccgccgcccacggcctccccgagctcctcgctccgcctgcatctggccgccgctggcggtgctgagcgcgcgggagccgagctgcggcggagacgccctggccccaccggaagcgggccgcacggaggagccgcgagcgaaaggcgcccggtagcagcgaggcgcggggtgcggggctagggatcgaggccggccgcagcggagcggggcggggcggggcggccggcgtcccgcaggtggggccggaaccgggaccgcgggaaggccggaccgctgggagctggaagtggtgggggtctgcagcggggcggggggattctcaaggcatcagagataggttgggggagagaccgtgctaagtgcaaggacgagtcataaaataaaatttgtatgatgtgaactctcggaaaaaaaaagtttaaacgtatgtatttgcataagaaaaggtctaaacaaatacatactaaaatgttagtggttaactgctgagatttgaagtgagttaattttttttcctccgtttaatctaattttcagcaacgaatgtgtatcattttaaaactataccgaagtcagggttcaggaggtgtggatgtaaagacaagagtttgtgtctggtgagaggtggactgcagcacgtgggagagagaacagtgcgaaactgggagatggctagaaagggcgtcaaagtcctcagcagaatttctgtagaaatgactactacagctgacatttattgagcacatgagtatttcattctcataacagctctatgaggtagggatgactgtcatccttattctgcagtgaggtaacagccttggaaaggttaaaaaaaacttgactaaagtgaataactaggtagtggtggaactggcattctaaggcggtctcactccagtcccttctttcaaccaaggagaaaacaggaaggggaacagttggttacacagatgcatgaaagcagtttttaacttgggactgaaaccacctgaaaataatgaaagcaagggctaaaatgtcagcctagcagaataagtgttttcttccccctcagtactttctggttctttcctatatccatacatagttaatacttttcattgcttctaattgcctactctgcatcaggcacagtgctatgtcctgaaattaaaaacaaaaacaaaaaaaaaaccttgcccctgccctcaagtagctcactgcccacaaggaagataatctagtcgtgtgaatagatgattacagtaccgtgttgctgagtgcagtgagagattcaagatcaaggtccaaagaagaaaagttaaattatatttaaacgggttacccaaggcttcatgagaaatagacccctgagctaaagcctaatggttgagtaggagtttgcctggttggtaaatgggagtaggggcgccttccagacagggggaactattgaaggattgtcaactccagagaaacagtcttaaaaatagtaacacttgtagagcacttatatgcaccaaacactattctacatacttctcatatcacttcatttgggactaatagctggcctacgaggtaagctagtgttgtctccattttacagatcaggaatctaaaacagatgttaagtaacttccaagattacacagttacaggccaggtgtgtggttcgtgcctgtaatcccagcattttgggaggctgtggcgggtggattgcctgagacatgagttcaagatcagcctgggcaacatggtgaaaccccatttctacaaaaattagctgggcatggtggtatatgcctatagtcccactacttgggaggctaagatagagaatcatttgagcccaggaggttgaggctgtagtgagctgtgattgtacatgggcaacagaaggagactgtctaaaaaaaaaaaaaagatttcaacatgaattttgagggagatgaacatttagaccatagcagtggggaaggggcatggaagaatatggttaaatatctaccagcatatcactggtctggcctctcaccaagttgaagatccacacattaatctcaaactagacatttgcacaaatcggagtttctcaatgttggcaaatttagggctgggtaacattttgtggcggtagcttatcctgtgcattgtagaatatttaatagcatccctggcctctacccactagatgccagaatgaacccctctccccctcattaagacaaccaaaaacatctccagacattgccaaatgttccctgagaggcaatcaccctggatgagaaccactagcacagatagattggtgcaaaaggtacgttttagtatctaaggagctaccgatgtaatttatccaaaaatttatccagccttaaatttgccaacattgagaaaccctgatttgggcaaatgtctggtatg

SEQ ID NO: 26203 - DNA, 1037 bp, Artificial sequence
  DNA replication origin
cccctcttcacgcgggtcgggccgtgccctggactacagctcccgtcgtgcccctggccactcgtattcggccccgccccgcctgccgtgtcccgcggcgagcgcaggcgcgctgcactcggtcaccgcgggctgcggcggctgggcggggctttcgggcgcccgcgggacggttccgccctctcactgcacccccgggcttctcttcgcaaggttcacctcgaatgaggaacaagcggggagggaagggaagggctgcggcggcgcgggcgcaccccgtcgggcccggggctgggggaggccaggtcacgtaactgctgctctggcgtcgggccggggagggggcgccagccccggcagcgcgaaccctgcgcgcgccgcggctctgaaacagttaccggctagtaaacaacagctgcgcgcgcacccgcatcagctggcgccgggatactgcacctgcgacctccttctccctcaccctgctgcccagtcaggccagcctgcgtggccgtctcctcctctactgggaccctgaggaagaacgacgagggggtgacctgcgccggggcgggggtaggggagaacgcgcctccggcaaagggggtggctcgtcctgtcacacgcaggagaaacctagcgagcggaccgtggctcagtggactagctacgacttgccacgactctgagctgcagtccgaggtgtcttgatccgctaacctcctcccagaccccgaggacctttctgctaggagaagagcgggcgcgccacccccaccgacctctcggagacaggaatccgctctgcccctgcatcctcctctgctcacccttctctcagtagtgtgggttatttttcccgttatgcatgtgcacctttcccaccagacccaagtggattgtcgacatcaaaaacaccgggtggctttgcatacacctccccccagccagacctgtggggtattcacctgatacacaacaggtggccgggtgtacaccttttagcaatctgatccacgctatagtcgcctgataaaggt

SEQ ID NO: 26204 - DNA, 1872 bp, Artificial sequence
  DNA replication origin
aggctcgctggccacgaacgcgaatccggaggaagcccagcaggaaaaacagcaggcggctcaggcctagcaccccgttgtggcacacagtcctgccagggcaaggctgggtatcagcggaagcagtggttctaaccctcacccgcccccaggttcagacaccgggaaagtagggcacccctcttttacccttaaataggatgtgaccaaggggccaaggtctctggccactttgggacctatcagggcacattacttagaggtgaggtctgggaaccacgtctgagcttggctgactcatctcatctacccaagctagacagaatagtttcagaatgctctcttttcttcttctcaaagagggagccgaatagacagcagggaagagaagtagggtctctgggggctgatccctcacttacttcctccatcctgtaattggctcctgaagctgctcctcactaagaccggccacttgaagccaggcaaagggccagaggagaaagaggacgataaaggccagaagcactcggatgggggccagcaatgcccccaggaggcagaactgcaaagggtgggagagaatgccactttagagcttggatatgctccctccacagcatccttcttccacaaagcatagacccaggagcagacagccatcatcccttgcatgtgacaggtggtgtgggaacaggagaggggactgggacccaaggtgggatgaagataccaatgagggcaagaggataaaagattaatggcatcaagggccttattttcctgtctttcagttggtccctaccccatttataaaaccgaaagccataaaaagcatctagcacttagaggatttaataagaatgcatgcgaaagtgcagggcgctgtgcttgatgtacagtaggttagagacaggtcctcctcccccacatcttattccataaatagctcctatgcccaacagaaaccaggtgcacagatctttccactttgggcctaggaggcagagggctgtaaacagccagaggtccagttttcagacccgaggtcattttctgacactgctcaacagcaatcttagagtaccgggggatatgggagacaagagctcggccccactctgcaagggagagaggctgccaggagccaggatgactccataggctgccttggggaagaagcaggtaagcaaacctagcccctggagcctgcctccggggaggtgatgacagcagaaaccttggacactccctccccacaccacctcccagctcccctaggctggcgcggccctccacttcctgtagccaacctccctctcagcctccctgcccccaccgggaggtgctgcagtgcggggtggaggggggttggagggagtgggaagagggagtgtaggaagggcacagggtcgcaggctcccggcccagaaacgtcttccctctaagtcatgcctcggaggaatactcggcacgcccccgcccccgcccccacccccggcttcccgtagactctaactccatcctagccatcaggctctgcagaatgtaatccgcattccccagcgtccttcatctctccaaccccagggtcccctgcagccctccatccccacctactcagtttttccacatcttcgagcttgtctatcgcccaagcccgcagcgtcctctccaggactccttgcccaaccgcggccgcccccacgtgcgcacccccggactcccgctccgcaagcctctcagccatctccttctcgtggatccccaagcccacctttgccagggctcaaatggccccattttcctatcctcacgggtccttccgacgcccgctccccacacattaccttaaccctctggaggcgagag

SEQ ID NO: 26205 - DNA, 1444 bp, Artificial sequence
  DNA replication origin
ttaaccctctggaggcgagagagatgtaactcatgcacgaaggggttgggggatgctgggggtccgggggtgggatctaggggggcccagtcccccggacttccctggctcatggcgggagaaggtgggagggagggcaccccggccctggccccggccaccactctgcagagcagctgctgctgcagcagcggcggcggcggcgctctggcccgggccccgcccggtgcaggcggccgaggggcggggagcaggcggcgcagcccagcccgcccgcgttgtcagggcgccggccgaggggcggggcttccagcgccctggcgcccctgctcctccgcgcccgccgcggcgcccgcagccgctcgggccattgttccgcggctgccagggctggagcgggctgcccctgggcttctgcgcctccgtcgttcctctctgaagacctggcctccgcctcggagtgggagtgggtctgggagctgagcgcagagctcagagcgccctctgtccccgcccgggcgtcgaggtcacccagcaagcgcagatcggggtgaggctcttgggttggtaggcagggagggacaggtgggccggatgcagaggccggcagctcgcgggtgaggcggcgccccgctcttcctatgggctccttggcccggtccgcgcctcctcgcaggcggaccacctttccttcccggtccgtggggcgccatcgcgcggggacttgaggcacttgcgtcctctggcggctgcatggcgccccgcaactctccacctccgcgtcctgcctgtgctaggcagggccgcctttactggtgtgagggttgcttgaacccttgaggcgccaggaatccctagtacactgacgcatgtgcttcccatgagcccgacaaggtctggcaggggagaggcagtggttcctgatctctgtcactctctgggtgaacgcagaggacacagtagtaattcccctcacccacaagctccaagctaccctagaaaacaaattgtttagcctcaggccatcgtttgagatcagggaccagggaattaagtggactctgagatccattgccatgacaaaaggggtaagagtctcattgcttgaggaaagaatacgccttaagttcactttatgtcttctgcccattgcatggcagttaggggagctgaaggaagaaagtgaaagaaaaagagacctctcataaccaagagtgtttgccgccactggcttctcctttaaaccaaactccaaattaatctgctccaggaaattttctgagcccaggctgagagggttgaaggctcatgcatcctactgagaccaaggagctgcactgggatgtttttgtatataacacagaggtcccaacacaaatacatcatttccacattttatttttgtatagatagggtctcgctatattgcccaggctggtctcga

SEQ ID NO: 26206 - DNA, 965 bp, Artificial sequence
  DNA replication origin
gcttgtcagccacgtcctctggggaggggaggggggagagaggtgggaggggggagagaggtgggaggggagagagaggtgggagcagagggggcctggacattttactttattaaagatgtatgtagtggttgagtgtttcaccaaaacgcatttaatattcacctgcattataatcaaatccacctgtgcacctttgagggtctcctcttctagctggggagatatcagcactgagacaaaacaacctgtggggaagggcagacagcgaagggaggaagcaggacttcccccgtgggctgctgctctgggcatcaggagaggtgacaaacaagctggtctcctctaggaaggcagccactggagcagaggagccagcctcccacaagatcaggacatgagcacgccacagggcacagccagagacacctgagacacaggaggcggtgctgacccaagggagggcaggaccgggggatgtgccggccaggacagccaggggtgcacaggcaggcagtattaatttggggaaaactaaatcattcggtttcattcaatgagtagtttgcatgcaaatgtgtgtggcgggggtgtgtggtgtgttcatgagatacagtgtgtgtggtgtgtatgtggtaaatgtgtagtatggtgtgggtgtgtggtgtttgtgtgtgtatggtggtgggacgtcctggagggtgtggtgtgtggagtgtactgtgtatggtgtgtggtatgtggtgtggtgtgatgtgaatgtgatatgtgcgtgtggtgtgtgtggagtgtgatgtgtggtgtgtgtggagtgtaatgtagtgtggaaggcttgagcgtgtatgtatgttttgtgtgcgtggtgtagtgtttgtggtgtgtgatatgtatgcagtgtgtgtaatgtgtgtggttggtgtgtggtgtgtatggggtatgtgtgtggtgtgtatgaggtgggcatg

SEQ ID NO: 26207 - DNA, 1535 bp, Artificial sequence
  DNA replication origin
cggcgccggcaagtggcgctgtctggcggggccgcccgctcgcgtctcgccgggctggtcgggccgctggtgcgttccgctgcccggcttggcgccggcatcaagtccccgtgccgggcggcaactactgagtttgggatcgcctctgggttcacttccctgggagaactcgagcccggatcttcgccccttccctttccctgtataataaggcccagagggaaaaactcaaaaaccccacaccttgttgcccctgggctgcaggcgccgggttgggggcacggtgcggacctgcgcctctgcagggccccttctccacgccaggcactgcctggcaaggctgctggagggagatctggccgcagatggtgaaggagaacatcgaggcccccggtccccaagcagggctccatgggtcgggcggcgggccttggtaagcccaggctaggggcgaacttccttttctccgggccgacgcggagggagggtgcggggaacgcccgcggaggggcctgtcctgcagcaccccagtggagagcagagccttagaggggcctgctagtcttaacttagtatttactggcagaagaaaggcttactttttcagatctcttcagataacgacctggcaggcaccagacgtaaatctgtggttgagtgcagtcagctcctaaacaggcatgcggtggaggaagcgccccaaacttggcatcttgtgtctggcactttgtttttgggctaaactgcctctggcgtcttcagccttctgtgcctctttgtttttgtttgtttttctattttccttcctgtttcagaaaggacagtggttttagaagtaatgacctgagagctttgcaggttgaagtgggacaagttttcctaaggtgcaggttggcaggtgccaggagcctgccggtggctttttctcaggcctctgggtcagggtccctccagtgaggtgaggcaggggtttctcccctcccagaggtgtggccactacgcagggggacaggaactgggtttcccagtccggggagtccaggatgccctgcactctgcgctgattcctgggtgaccgtgggggctgccttcccccacagcctgggctggagagggtctcctgagcttaggatccgcggggcaggagggctggggtgacaaggacacgtggaacctgctggggctccgggcagtgtccagggcgtgagtagataaagctggagctcgtagctgtgtgctggcagccctcggtgggctctagcagtactggcaggggggcccttggagtgggctccctctctgggctgggactgggtgatggcagtagcaatggggcacgaagtcttccctctcatttgttaggaagtgtggtctgtgctcctccccactgtctggctcttgggctgggagaagctgcaggctgagtcccacggggtgtgagtgtgtgtgagcaggagtgggtgctggaaggaggtaaagctggtgaccatcagctcctcattctcttgcaccttgcatgttttctctgacaccgc

SEQ ID NO: 26208 - DNA, 2006 bp, Artificial sequence
  DNA replication origin
cgcttcctcaccgtggcgcacgacgacggccgctggtcgctgcagtccgaggcgcaccggcgctccttcggcggcacggaggaccgcctgtcgtgcttcgcgcagacggtgtcccccgccgagaagtggagcgtgcacatcgccatgcaccctcaggtcaacatctaccgcgtcacccctaagcgctaggcgcacctgagcgcgccgccggccgacgagatcgcagtggaccgcgacgtgccctggggcgtcgactcgctcgtcaccctcgccttccaggagcagcgctacagcgtgcagaccgcggaccaccgcttcctgcgccatgacaggcgcctggtggcgcgccccgagccggccactggctacacgctgcagttccgctccggcaatgtggccttccgcgactgcgagggccgttacctggcgccgtcggggcccagcggcacgctcaaggcgggcaaggccaccaaggtgggcaaggacgagctctttgccctggagcagagctgcgcccaggtcgtgctgcaggcggccaacgggaggaatgtgtccacgcgccagggtatggacctgtctgccaatccggacgaggagaccgaccaggagaccttccagctggagatcgaccgcgacaacaacaagtgtgccttctgtacccacaggggcaagtactggacgctgacggccactgggggcgtgcagtccaccgcctccaccaagaatgccagctgctacttcgacattgagcggcgtgaccggcgcatcacactgcgggcgtccaatggcaagtttgtgacatctaagaagaatgggcagctggccgcctcggtggagacagcaggggactcagagctcttcctcatgaagttcatcaaccgcgccatcaccgtgttgcgcggggagcacggctttatcggctgccgcaaggtcggggcaccctggacgccaaccgctgcagctatgacgtcttccagctggagttcaacaatggtacctacaacatcaaagactccacaggcaaatactggacggtgggcagtgactccgcggtcaccagcagcggcgacactcctgtggacttcttcttcgagttctgcgactacaacaaggaggccatcaagatggacgggcgctacctgaagggcgaccacgcaggggtcctaagggcctccgcggagaccgtgcaccccgcctcgctctgggagtactagggcccgcccgcccttcccggttcctgcccacgtggcggctccttccaaccctccctgctaaccccttctcctccaggtgggctcccccgggcgggaggcaagcccccttgcctttcaaactggaaaccccagagaaaacggtgcccccacctgtcgcccctatggacttcccagtctcccctccgccctggttccctactcccctcgggtcagcggctgcggcctggccctgggagggatttcagatgcccctgccctcttgtctgccacggggcgagtctggcacctctttcttctgacctcagacggctctgagccttatttctctggaagcggctaagggacggttgggggctgggagccctgggcgtgtagtgtaactggaatctcttgcccctcccagccacctcctcccagccccccaggagctgggcacgtgtcccaagcctgtcagtggccctccctggtgcactgtcccgaaacccctgcttgggaagggaagccgtcaggtgggcgaggactgagcctcggtgtttttttgggtggtggctggaaacagcccctctcccacgtggcagaggctcagcctggctcccttccctggagcggcagggtgtgacggccacagggtctgcccgctgcatgttctgccagggtggtggtggcgggggggtaggggtgtgggggccgtcttcctcctctttcctttcaccctagcctgaccggaagcagaaaatgaccaaatcggtatttttttttaatgaaatattattgctggaggcgtcccaggca

SEQ ID NO: 26209 - DNA, 967 bp, Artificial sequence
  DNA replication origin
caaaggcttgtcagccacatcctctggggaggggaggggggagagaggtgggaggggggagagaggtgggaggggagagagaggtgggagcagagggggcctggacattttactttattaaagatgtatgtagtggttgagtgtttcaccaaaacgcatttaatattcacctgcattataatcaaatccacctgtgcacctttgagggtctcctcttctagctggggagatatcagcactgagacaaaacaacctgtggggaagggcagacagcgaagggaggaagcaggacttcccccgtgggctgctgctctgggcatcaggagaggtgacaaacaagctggtctcctctaggaaggcagccactggagcagaggagccagcctcccacaagatcaggacatgagcacgccacagggcacagccagagacacctgagacacaggaggcggtgctgacccaagggagggcaggaccgggggatgtgccggccaggacagccaggggtgcgcaggcaggcagtattaatttggggaaaactaaatcattcggtttcattcaatgagtagtttgcatgcaaatgtgtgtggcgggggtgtgtggtgtgttcatgagatacagtgtgtgtggtgtgtatgtggtaaatgtgtagtatggtgtgggtgtgtggtgtttgtgtgtgtatggtggtgggacgtcctggagggtgtggtgtgtggagtgtactgtgtatggtgtgtggtatgtggtgtggtgtgatgtgaatgtgatatgtgcgtgtggtgtgtgtggagtgtgatgtgtggtgtgtgtggagtgtaatgtagtgtggaaggcttgagcgtgtatgtatgttttgtgtgcgtggtgtagtgtttgtggtgtgtgatatgtatgcagtgtgtgtaatgtgtgtggttggtgtgtggtgtgtatggggtatgtgtgtggtgtgtatgaggtgggc

SEQ ID NO: 26210 - DNA, 925 bp, Artificial sequence
  DNA replication origin
cgacctggcaggcaccagacgtaaatctgtggttgagtgcagtcagctcttaaacgggcatgcggtggatgaagcgccccaaacttcgcatcttgcgtctggcactttgtttttgggctaaactgcctctggcctcttcaacctcctgtgcctctttctgcttttgtttgtttgtttctattttcttcctcgttgagaaaggacagtggttttagaaataatgatctgagagctttgcaggttgaagtgggacaagttttcctaaggttcaggttggcagttgccaggagcctgcaggtggctttttctcaggcctctgggtcagggtccctccagtgaggtgaggcaggggtttctcccctcccagaggtgtggccactacgcagggggacaggaactgggtttcccagtccggggagtccaggatgccctgcactctgcgctgattcctgggtgaccgtgggggctgcctcccccttcagcctgggctggagagggtctcctgagcttaggaactgcggggcaggagggctggggtgttaaggacacgtggaacttgctggggctccgggcagtgtccagggcgtgagcagataaagctggaccttgcagctgtgtgccggcagccctcggtgggctctagcagtactgttggggggcccttggagtgggctccctggctgggctgggactgggtgatggcagtagcaatggggcaccaagtcttccctctcatttgttaggaagtgcggtctgtgcccgtccccactgtctggctcttgggctgggagaagctgcaggctgagtcccacggagtgtgagtgtgtgtgagcaggagtgggtgctggaaggaggtaaagctggtgaccgtcagctcctcattctcttccaccttgcatgttttctctgacaccccagacccaag

SEQ ID NO: 26211 - DNA, 959 bp, Artificial sequence
  DNA replication origin
caagtggcgctgtctggcggggccgcccgctcggatctcgctgggctggccgggccgctggtgcgttccgctgccccgcttgacgccggcatcaagtccccgagctgggcggcaactactgagtttggggtcgcctctgggttcgcttccccgggagaacccgagcccggatcttcgccccttcccttttcctgtataataaggcccagagagaaaaacttctcaattaaaaaccccacaccttgttgccccggggctgcaggcgccgggttggaggcacgccgcggacctgcccctcccggagacctgccccggaaggggcagggccccttctccaggccaggcactgcctggcaaggctgctggagggagatctggccgcagatggtgaaggagaacatcgaggcccccagtccccaagcagggctccatgggtcgggcggcgggcattggtaagcccaggcgaggggtgaacttcctttccccggggccgacgcggagggagggtgcggggaacgcccgccgaggggcctgtcctgcggtaccccagtggagagcagagccttagaggggcctgctagtcttagtatttattggcagaagaaaggcttattttttcagatctcttgagatacgacctggcaggcaccagacgtaaatctgtggttgagtgcagtcagctcttaaacgggcatgcggtggatgaagcgccccaaacttcgcatcttgcgtctggcactttgtttttgggctaaactgcctctggcctcttcaacctcctgtgcctctttctgcttttgtttgtttgtttctattttcttcctcgttgagaaaggacagtggttttagaaataatgatctgagagctttgcaggttgaagtgggacaagttttcctaaggttcaggttggcagttgccaggagcctgcaggtggctttttctcaggcctctgggtcag

SEQ ID NO: 26212 - DNA, 1201 bp, Artificial sequence
  DNA replication origin
cccagcttacctggccagggcgcggggctgccccggtccgccgccgtcctcgccccgcagccgccggctccgtccgggaggctgagctccttgagagcccgcacgtagcggcacaccgcgactgctaattagcccggaagctgaatagcggcgggtacataccgcaagcggagtacggaaagcacgcagggctgccgctacctggcgcacgcgcactgagctgcggctgccgagcccgcgccccggtccctgccgctttacctcacccgctcttggatcactggggccgggaaacgcttcccggcgacaccgcgcgcggggaagagagggaagaaaaagatgcgtccgtgccgggcgttcacgaggccctgcggcccctggccccggcactgggacatcggcagggcgggcgggtgcacccaggacccgggtccagccgggaggatctacgggaccggggctggaacccagacgttggacggctcagcgccccgaacgtcccgggccctggggagcacacagatgcccgaagcacgtcccggccttgctggctggggagttgcaggggtctggtctcgcgggtaaagccggtgaacgcgaggctccgcatcctgccccggccgcggcgctgcgccctgctcgctctgcccggtgcagctgtaagcggggaccttagagctaggaaccctcggggatcgcggcctccgaaagccccatcgggcaggggaggccccctgctgcctccccaccgcagcacccctaggcgcatgctggactccaagtcttccctgctggtccccagtaaccaccctagcaccccatttctgatactctgctgctttagcccccagccccagggcctcactccaggcctttctctccttgctgtcctgaatggagaggaccctgacctccgcggggccctggggagcacacactcccagacactcacacacatccccaggagagccggtcttccgcccccacagcgcgagaaatcgaaatcccctggaggccctgggcgaaggtcgtgctggagactccggtgtcaccttcggccctctggccctttcattgagtcccaggcagatgtggtaagccgtgggagaggcacaaggtgcctagtctgtgcagagtgggacctcagctgcctcgctcccccaaatcctggtgatttgccctcgttttcttttctccttgt

SEQ ID NO: 26213 - DNA, 1325 bp, Artificial sequence
  DNA replication origin
gtccccagtaaccaccctagcaccccatttctgatactctgctgctttagcccccagccccagggcctcactccaggcctttctctccttgctgtcctgaatggagaggaccctgacctccgcggggccctggggagcacacactcccagacactcacacacatccccaggagagccggtcttccgcccccacagcgcgagaaatcgaaatcccctggaggccctgggcgaaggtcgtgctggagactccggtgtcaccttcggccctctggccctttcattgagtcccaggcagatgtggtaagccgtgggagaggcacaaggtgcctagtctgtgcagagtgggacctcagctgcctcgctcccccaaatcctggtgatttgccctcgttttcttttctccttgtggctggactaggcgaagctgtggcatgggaagttctgaagacgggggggggggcgggggggagggggagcacagaaggacagggggcctgggggttgaggagagcccatcttcctgctgccctgagggcctgacctgagaccctgaggagaacgggctggggaaaaccaaatcctgagctgcactagggttagatacagtgtggacttggcctctgcacaccctgagcctgagttaggacagcagctgtgaaatgaatgggattcaagatggggtctgataaatcacatttatatcctcttcttccattcaactaatggatcagtgtttttaaaagtctaagccacataacaaagagggcagaaggaagtcgttagcagatgaatgatttcatctggaagatgaagaggatttagagatctatgggatagattcgagggcacaaggccagaacatacgaagagggtctggagcccgggggcgggggtggctgacccgtccgtctgtgagaacctcagggagcctccaggctccagtgcagtgcaggtatcacagagggcagagtggaaatgggactggaacaggtagaataaatgaagatccagcatggacaattaatgcccctccccccaaatcatggatgcagccagtcacttaccccaaagaaaaaaatcagagattctctccaaagagagttgtgtacactgcctggtgagagtgggtgctgctagtgtagttgtcggtcctctggaggaagcctccctaccgtggcatttaaaggtccaccagtgtaatgactagctcccactctaagctctccccacatgcacataaccaccatcagcctgtccataaaactcctttagatacgaaaggagagaacgcctatttaataaacggttctgggaaaactggctag

SEQ ID NO: 26214 - DNA, 1205 bp, Artificial sequence
  DNA replication origin
aaatggggaaagaaatccaagcgcgtcccgaccgatggggcagttggcgcggtctagagagagggcacgaacctcgggcgccgtccggggttcgggtctggatcccgcggacgccgggacgaggggcggggcggggtggcagcctgcaggtcctccagcgctcgcccgcccaggagaagtctcagcgccgctctccgccgcaggttgggggccaggggagggtccgaacaccggctctgttcctgctacttcagcgggcacctggcgctccggcgcggcagcctgcgaggccagggccgagcgcgcggagccgaatgctgggctcggggatccgcggccgccgcctctaatccgcccttaagtagtctccgcctgcgtcacgccaggtcggcggaggggagcagagcgcgccgtgcggctgtcgctgcgcgtcggagcccgaggggccggggacgcgcgcggggggagaggggcaagagtcctggaggcccggcggggagcggggcgatttcgaaaggaaggactgcagcgcccctcggggcttctcggggagcccaggtaacctcacctgaccgccagacccaagcaggcggagggggagccgggagcggacgcgtgggtgagtggggaggggagtgagtaggtatcttctcttctctcggtgcatccctcaccttttcgctttttgcctcctggagacaactgaaattccttccctagatggagatgctggctgagggagggcgagtgggggcgaccacttttaaatctcccttaggggacagagtggctgagagtgcttctgcagagtggctgcggttcggtgcctctgtggatccgacagtgaagtgagaaaggcttgatgggaatccatttaggctgaagggtaaatgcaggtgtggagctgtctctcggtataggggtcagggcacacgagcgcatctaacaggtgcctcgcaaagagcaagtggggtggccatggttaaaggtctcgcttccccttgcactaacccagatgctcggctctttttaaattattgctattattttactaatgggaagggggggcggggtactcgtcaggtaaactgtgatttaatctgaatttaagacccagtattctgctagcagaaacagagccactcacagcctcgccctgcccccacttgccttactgggtttggctttctcccctcaaccagcag

SEQ ID NO: 26215 - DNA, 1078 bp, Artificial sequence
  DNA replication origin
ggctgtgaacatgagagaggaatgtggatttggtcctggttggttgggagaggtgatattgttagaagttttaaacaggactgaaaagagaggacaaggaagaaaatgaagtgtataaggcagagaagacactaaagactaaaagtccaaaaggccattagtggagagaagcaggtggctttcacaccagggagtgggacccttttagaggcgtgccactcaggtgtacattcctcagtatgttggggttttgtggagtattgcttgccttggcttggatttgaagtcaatcagccttctcttaatttggcctaaagagttcatcgaacaagagggtcaggtgagagccatttcctagatcgctggactgaaggggtcccgagtgggacggggggctcggcgggaagtttacctggtgccgcgggcggcccacgatggacgggaagacagcgcggggcgcgtcatcgcccgcaaagccggccttcaccagcccagagccgttgtcgcacaccagggcggtggtctcctcgtcgtcacacatcttggcacagcttcagggggttctgcaggttgaggaggggagggcggaccacgcttagctgcctgtgcagctggccttctccgcacccagaggacaggacagagcagaagggggttgtggggactggacagggggttgggcggggaacactcctgccacctcccttcccctcgaatcataaaagggagggaagaagccgcggaggagactggggacagagaagggcagaggaatccacccaggctccctggccaggagttccagctagggtgccaggtgcaaggagggacccaagaaacccagccccttagtcctccccagccctttaactttcttccttttcacgaactgggaactcgatctccagccctgtccatatcgccatgcctgtgccccagatggaggggaaagcgcacgagagtagggacccaaaagccccttggggagccacaaaattccccttcttagagcccctgcgaggtcctgcgaggaccaacgcccaggacaaaacaagttagaaccaaatcaaaaagtgtg

SEQ ID NO: 26216 - DNA, 2018 bp, Artificial sequence
  DNA replication origin
cccaagaaacccagccccttagtcctccccagccctttaactttcttccttttcacgaactgggaactcgatctccagccctgtccatatcgccatgcctgtgccccagatggaggggaaagcgcacgagagtagggacccaaaagccccttggggagccacaaaattccccttcttagagcccctgcgaggtcctgcgaggaccaacgcccaggacaaaacaagttagaaccaaatcaaaaagtgtgggctttaaaaaaaaaaaaaaaaaggcagtcgcagagcggcaggagctggggccttggctgaatgcgggccgggctggccaggtggcggcgcggggctggcgtccggcgcggcccgcggaccaggcgaggagtgaacgcggagggccgggcgctgactcaccgtcggcggggcgggtcggctcggctccggcggcagcgggctctgggtggctggctccaggagggccgctttatagaacgctgatggacagggtcagttggagcagccgggggcaggggtggggggcccggtctgccaccttgccttatttggtccccttcgcacccgctaggactgccgaggccattcatggagccaagggcaggggagaggatcagccagggagcccccagaccatgtaaggaaggggagggggcagtcagggggatggccaaatagggagctggggaggggcaggcgctgaagggtagggggcaggggaagactaagtgacgccagcccacccctccccctttctggggtgtgggtgctccctggatggtctgtggattcggtcctccgcagccctgccagccttggggacaataagccacatgcagtgggaaggcttggcgccctgccctctgctgaggggtcctgacagctgggccagggcagcaggggagcaacagcggcttctcatcttccagggctgccaccagcacaaaggacaccgcagcagcacatctgagtggctgcaaaaggggcacccaggacagggcacccttctggtctagtccccgccagcctgaatggctttactcagagagctggtgctgggctcatctaggtcagaaagctgagattaaccaaggccacccgagttccaacccatgcatggatcagggtctggccagggaagagtcagaaaagggtttctgtgagagcttggccaagtcttgctggagaagggaccaggtttaccccagcccagttattgggtagccctcatccatgctgcagggttttgctcaaattcagactctggtcttcaggccagaaaaggatcccctgctgccaaagtgaataaaggaacaaatgccaaaagtagcttgcccacttgatggtggggagatgagcatctttaaactgggggcagaggccctcactccaggtggagacaagactgcaaaggcaaatactttgatggagaacatagcaacaacttaaactataggactacaccaatccttgctactcaaagtgcagcccatggacaagcagtattgtcataacctggaaatgagctagaaatgcaatctcaagagccatcccaatccgcttttcagcaagatcctcatttgcttggtatgtacattaaagtgtgagaagcattggcataaatgacagatatcatctcctctgtggaaaacagattttgcaggatcttgaacttttgagaaggaaaaagaaaaatgacatgaaatgaggagagggagaaggaagagggagatgtaagaaggacacagatcactagtttgccctggggtgccctgcattctcagttcttgactggagctttgatttttaatgcttgtgtttttcctccagttcacaccagttaaaaatagaaaactgggcactggcatctctctctagagtggtcttgggctgatatgctgaggaggcctgctgattagatacttgtcccgactggggaatgctgggccctcccctctgaactccccaaccatgtttgggttggtctggagaagaaacgcgatgggcag

SEQ ID NO: 26217 - DNA, 989 bp, Artificial sequence
  DNA replication origin
gccagccgccccgtccaggagggaggtgggggggtcagccccccgcccggccagccgccccgtccgggagggaggtgagggggtcagccccccgcctggccagccgccccgtccgggagggaggtggggggggtcagcccccagcccggccagccgccccatccgggaggtgaggggcgcctctgcctggccgcccctactggaaagtgaggagcccctctgcccggccagccgcccgtccgggagggaggtgggggggtcagccccccacccggccagccgccccgtccgggagggagggaggtgggggggtcagccccccgcccggccagctgccccgtccgggaagtgaggggcgtctctgcccggccgcccctactgggaagtgaggagcccctctgcccagccagccgccccgtccgggagggaggtggggggggtcagccccccgtccggccagccgccccatccgggaggtgaggggcgcctctgcccggccgcgcctactgggaagtgaggagcccctctgcccggccaccaccccgtctgggaggtgtgcccaacagctcattgagaacgggccatgatgacaatggcggttttgtagaatagaaagaggggaaaggtggggaaaagattgagaaatcggatggttgccgtgtctgtgtagaaagaggtagacatgggagacttttcattttgttctgtactaagaaaaattcttctgccttgggatcctgttgatcggtgaccttacccccaaccctgtgctctgtgaaacatgtgctgtatccactcagggttgaatggattaagggcggtgcaagatgtgctttgttaaacagatgcttgaaggcagcatgctcgttaagagtcatcaccactccctaatctcaagtacccagggacacaaacactgcggaaggccacagggtcctctgcctaggaaaaccagagacctttgttcacttgtttatctgctgaccttc

SEQ ID NO: 26218 - DNA, 1279 bp, Artificial sequence
  DNA replication origin
gtttgtctcacagtggaggcaaggaattgcaacttttttctattattgtacaccttgaaggcgaggttaattaaatcctgttgtggggtttgagggccggaatttaatttttggagttttatttaatgtcgggagcagattgggtaataaaatgtatattgagaataagacggccttttgaccttttagggtctagggctgtaaagcgtctcagggctgctgccgaacgagccatgaactgggctgggtttttatatttgatgaagaagagcctaaacgctaactgatttgggataaagaaaaatgagcattaaccctgactatgcctttggctccagccacctttttaagagtaaattgctgggcaggtgggggagggctagtcacagaatgaaactgtaagccagaccaggtgtgaggaggggaggcgataaaaagattacagggtggaggagcggaggctgaggaagaattgggacctagcttgggctggcaaggaggggagagatcagatgggtctgtagaaaaggaagattagaaagactcagtgatgcttggggttgggactgaggggacaggagggagggaaagaaggaagatttgggacgagttgcactgggcacagagactaggaagggactgatgtgtaaaagaatgcctggacgtcaggcacctcagaccatttgcccattttaggacaagaattatttagatcttgtaggatggaaaaattgaaagtgccgttttctggctatttggaactactgttgagtttgtattggggtcaagcggcattgcagaagaaaataaggcatttaggttttaggtcaggtgtgagttgaagaggttttaagtttttgagaacacaggctaagggagaagaaggaggaatggaaggtggaagcttacccatagtgaaggaggcaagcccagagaaaagagtagagacacggagaaggggtggggggttcttgccctccagaaaagcagagaaggggttagggcacggaaataagggattggggcacagagataagaggttagggcgcggaaataagggattggggcacagagataagaggtcagggtgcagaaataagggattggggcacagagataagaggttggggtgtggaaataagcgattggggggttcttgccccctaggaaagcgggacttgctgctaagggtgaaggagaaggggttgaggggtacttgcccctgccccaggaaagcaggacttgccactaagggtgaaggagaaggggttgaggggta

SEQ ID NO: 26219 - DNA, 1012 bp, Artificial sequence
  DNA replication origin
cctcccggacagggcagctggccgggcggggggctgacccccccacctccctcccggacggggcggctggccgggcagaggggctcctcacttcccagtaggggcggctgggcagaggcgcccctcacctcccagacggggcggctggccgggcggagggctgacccccccacctccctcccggacggggcggctggccgggtggggggcctgacccccccatctccctcccggacggggtggctggccgggctgaggggctcctcacttcccagtaggggcggccgggcagaggcgcccctcacctcccagacggggcggctggccgggcggggggctgacccccccacctccctcccggatggcacggctggccgggcgggggggctgaccccccacctccctcccggatggggcggctggccgggcggggggctgacccccccccacctccctcccggacggggtggctgccgggcggagacgctcctcacttcccagatggggtggctgccgggcggagaggctcctcacttctcagacggggcggctgcctggcggaggggctcctcacttctcagacggggtggttgccaggcagagggtctcctcacttctcagacggggcggccgggcagagacgctcctcacctcccagacggggcctcggccgggcagaggcgctcctcacatcccagatggggcggcggggcagaggcgctccccacatctcagatgatgggcggccgggcagagacgctcctcacttcctagatgtgatggcggctgggaagaggcgctcctcacttcctagatgggatggcggccggggggagacgctcctcactttccagactgggcagccaggcagaggggctcctcacatcccagacgatgggcggccaggcagagacactcctcacttcccagacggggtggcggccgggcagaggctgcaatctcggcactttgggaggccaaggcaggcggctgctccttgccctcgggcccg

SEQ ID NO: 26220 - DNA, 852 bp, Artificial sequence
  DNA replication origin
gggaggtgggggggtcagccctccgcccggccagccgccccgtctgggaggtgaggggcgcctctgcccggccgcccctactgggaagtgaggagcccctctgcccggccagccgctacgtctgggagggaggtgggggggtcggccccccgcccggccagccgccccgtccgggagggaggtgggggggtcggccccccgcccggccagccgccccgtccgggaggtgaggggcgcctctgcccggccgcccctactgggaagtgaggagaccctctgcccggccagccgccccgtccgggagggaggttggggggtcagccccccgcccggccagccgccccatctgggagggaggcgggggggggggtcagcccccctgcccggccagccaccccgtccgggaggtgaggggcgcctctgcccggccgcccctactgggaagtgaggagcccctctgcccggccaccaccctgtctgggaggtgtgcccaacagctcattgagaaggggccaggatgacaatggcggctttgtggaatagaaaggcgggaaaggtggggaaaagattgagaaatcggatggttgcgtgtctgtgtagaaggaagtagacatgggagacttttcattttgttctgcactaagaaaaattcctctgccttgggatcctgttgatctgtgaccttacccccaaccctgtgctctctgaaacatgtgctgtgtccactcagggttaaatgaattaagggcggtgcaagatgtgctttgttaaacagatgcttgaaggcagcatgctctttaagagtcatcaccaatccctaatctcaagtaatcagggacacaaacactgcgg

SEQ ID NO: 26221 - DNA, 1404 bp, Artificial sequence
  DNA replication origin
tatgcctttggctccagccacctttttaagagtaaattgctgggcaggtgagggagggctagtcacggaacgaaattgtaagctggagcaggtgtgaggaggggaggtgataaaaagattatagggtggaggagcagaggctgaggaagaattgggacctagcttggcctggctaggagcagcctggggaggaagggagaggtcagatgggtctgtagaaaaggaagattagaaagactcagcgacgcttggggttggtactgaggggacaggcggtagggaaagaaggaagatttgggacaagttgcactgggcacagagactaggaagggactgatgtgtaaaagaatgcctggacgtcaggcacctcagaccatttgcctattttacgacaagaattatttagattttgcaggatggaaaaattcaaagtgccatttttctggctatttggaactactgtcaagtttctattggggtcaagcggcattgcagaagaaaataaggcatttaggttttaggtcaggtgtgagttgaagaggttttaagtttttgagaacacaggccaagggagtagaaggaagaatggagggtggaaggttgcccatagtgaagaaagcaagcctagagaaaagagagagtagagaaatggagggaaggggtttgggggttcttaccttccagaaaagtgggaaaaggggttggggcacagagataagaggttgtggtgcggaaataagggattggggcacagagatataagaggtcggggcgtggaaataagggattggagcacagagatatgaggttgggcgtggcaataagggattggggtgcagagatataagaggttggggcacagaaataagggactggggcacagagataagaggtcggggtgtggaaataagggattggggcacagagataagaggtcggggtgcggaaataagggattggggcacagagataagaggttggggcatggaaataagggattgggggttcttgccccgtagaaaagcggcacttgctgctaagggtgaagtagaaggggttgaggggtacttgctcctctcccagaaaagcagagaaggggtagagacaaggagagaaggggttggggtacttgccctttccccggaaaagcagagaaggggtagagacaaggagagaagggattggggtacttgcccttgccccagaaaagcagagaaagggtagagacaaggagagaaggggttggggtacttgccccttccccagaaaagcgggacttgccgctaagggtgaaggacgaaggcaggcgtccctgcgtggtctgacacccttgaaacgtgggtgaataatcagagagggattattcacagctggaggatcttaatacagcttcccttacatttt

SEQ ID NO: 26222 - DNA, 919 bp, Artificial sequence
  DNA replication origin
aaggaagaggaggcggcgaggccggggatttgagggggcgccgggaggccccgctcccgccggaggcaacagaaccgtagcgagccaacggagggagaagtggagttagtgtgaggaggaagccccggatcccacccctaaccccccttcgcctcctctgaggatccaataaatcaaaaggcgaaatgaaacaaaataaagagaagaaaaacgctaataatcagcacgagaacgccgaggactaggaaagactagggccagtgcctccccgggggcagggagcggagggtgggggggcgaataacgtgaaagttaccagaaacattatttagcagcggattccctgcgtccttgtcaatttcagagacaaaacaagcagcccaggctagtagtctaggcggcggcgcagcggctgcggcagcgcggccccagcggcggccccggcggcggctcctacgcagcccgtgcccgccccgagccgcgcgagccacggcggcagcggcgcagcagcggcagcaggagaaccgggggaatcgcgctgctggggtaaaagctggagcgaggcgaaagcgtgtaacgattgcacacgcacacacacacaccactcacacgcactcgccgcccgcccgctcgcacagcgctggaacacgcgcgcccagacacgcacacacgcacgcacacacactcgcacacacgcagaggcacgggagggaaagaagccgatgaataattttgctattttttaaaatactggccgccatcatcaagcagcgagcagcagcagaagcgttgaagggagaggaggcatcgggacaggcccctcttaggagaggatttatatctaggtaagtgttggagatttaaacctaccctttgcgccatcagtctgcgctccaataaactcctggatgtgtcgtat

SEQ ID NO: 26223 - DNA, 1140 bp, Artificial sequence
  DNA replication origin
ttgcaaaaattggacttcctccccccctttcctggtaggtattttgtctctccctctctctctttctcgctcgctcgctcgctctcactcgcgctcgctctctcgcgctcgctctctctcgctctctttctctctctgggagatgagtgagtgtcagtaggtgttggcaggttggctgctgcctggcttattgaagagcctcagtttggcggcgcgggtcggcggcgggagaacgaaatgacggaacccggaagtcgtggtggccatagcccgtcgtacggcggagacacatcccgggagtggggagcgggagcgaggaggagcgcgccgcgccgagcctctgatatgcaacgagtgcgatcggacagccccggctgggggggtgggggaggcgggggggcgggagggggaggggaggctcgagccgggcggacccgagcaaatcagcaagcctgctcctccacggggatgggggacggcgggggggaggaaaaggagagtgtgtctgtgtgtgtgagtgtgtgtgtatgtgtgtgcgtgcgcgcgtgtgtgttgcgcgcgcgcgcgcgcgaacagggagagagggagagggggagagagaagaggacagggagagcgcagagaggaaaactgcagaaaaccacagggaaagtacggtaccgcctcagatcttttcatttaaaaaaaaaaaaaaacttacttctagttcattttcccatcactcccggctcctgcctaactgggtcttgccggggacgtttggcatggcgctctagcttttgttccttttaattccgcggcctccctctcctctgcccgccgattacagcaccccgaaggcttcctgctaacgtccaagggcagcaagctctgcagacggtaccactgccgggctaaattttttattaagtggcactttcttttctgcgcagatccagcaaccttgtcaatactcatttttttccaggaccagaagagaccagcttaactcagagcacactccctccaagcggtgcggacaaggggccaccccgagagtctttgggggccgcggcggaatcgggagggaggaagtgaggaggcagtcatctgggtccgatgtagccaaaggcgtgtgtgtgtgtgtgtgtgtgtgtgtgt

SEQ ID NO: 26224 - DNA, 1095 bp, Artificial sequence
  DNA replication origin
caccgtgctcggtgtgcgtgcgcgcgctccaaactcttggcacgccgcgaaagggggcgggggtgggagctgcgaggggagctgctagggaggttgcattgttgtggcgcgttactccccgttactctgcttggaatatccgggttgcttgaacgaagaggctagaaagacagtgtgctcagaggggaaatctggaggctactctcttctgccgtgtgtgtgtgtgtgtgtgtgtgtgtgtgtgtgtgtgtgtgtgtgttttctttgcagagcaaagaatggaactggcatgagttcatctttagttagtgggggttagaagcagggactgcaaagagagctcctcctgctgtccccctggttgcactgctgcagtcccctagctgcatgcacgaagtgtatgtgtgtgtgtgtgtgtgtgtgtgtgtgtgtgagagagagagagagagaatatgagaatgtatgtgtgttttaacacctcgcctcgctgcctggattcttactgcgcaaggggtatgctatcagggcattcatctcggaaagctggagtgattgttaatggagaacgacttccattgaagcccagggtaggcgtgttacatgaatctggcgcagccagaacggaggaaataactcccgctgcgagtgaggttgcataactatagcgcaggagatgcttctgtggcacgaactgctctgaacggaggcggaccgattggatagacagctgtcacgaatgcattgttagaagacaaagtatgcattcatctcaaaagatttttgcacagaaacctactggggttgcgggctggagcctaaggtcagcccagccacaggagtcagagctcctggctctgcaaattctattatctgttctccacttagaaaaccagcctgtacatgaaccaccttaggggactgaatcccaagtgctcccaagttcctgacgcatcttcccagatataagtctcgccctgcgtgcaatgtttttctcttccttctcagatttgtgcgacctaagaatgaaggttgccgctggtgccacattaaagagaacaattcccgaggaaaaaaagaagttgggagaacctcgtt

SEQ ID NO: 26225 - DNA, 1168 bp, Artificial sequence
  DNA replication origin
cctcgccgccggctgcccctcaacccccggcggcgtctgggtcggtcctcaggcgccggcagagcagggctaggggccccgcggcggcggattcctccagacacgctccagccgggactcctcctcaggggggtggagggggcggcggggagcgtgtgaggcgaggggcaggcaaaccgatcgttcccacccggccggagaagagcgggcgggcccgggtccggggggcaggatcccgagaagcggcgggagaggacaagagcggctgcaggttccccgccagccagtgcccaccagcagctcagcgggccagctcctcacgcccgagagaggggagccgcgaggggggcggcggaagcgctcacgccgcccgctccttccgccgccgcagccgctgcccgaaccgggggcgcccgcgagagaaggaggcgaagtagtccctcgcgacttctcccggccgcccgctttccccggaggccagagcgggcgcggggtggggctgccgagcggggtgcccaggctgtgagggtgtgtgggtaggactaaaagccgcggcctccgggcgaatcactgcaactcgaagtcatgtgcagcatagcaagtttcaggaaagtagttccctcctcccttcatttcccaaatcgttgtcgagccacttagcggagaaagggggagggaggcggagggatatcctccctgcaccgtgctcggtgtgcgtgcgcgcgctccaaactcttggcacgccgcgaaagggggcgggggtgggagctgcgaggggagctgctagggaggttgcattgttgtggcgcgttactccccgttactctgcttggaatatccgggttgcttgaacgaagaggctagaaagacagtgtgctcagaggggaaatctggaggctactctcttctgccgtgtgtgtgtgtgtgtgtgtgtgtgtgtgtgtgtgtgtgtgtgtgttttctttgcagagcaaagaatggaactggcatgagttcatctttagttagtgggggttagaagcagggactgcaaagagagctcctcctgctgtccccctggttgcactgctgcagtcccctagctgcatgcacgaagtgtatgtgtgtgtgtgtgtgtgtgtgtgtgtgtgtgagagagagagagagagaatatgagaatgtatgtgtg

SEQ ID NO: 26226 - DNA, 1015 bp, Artificial sequence
  DNA replication origin
gaggggcagccggcggcgaggcgggagatggtggggtgggctccggcaggaccgcgccgccgctgcccggagcctgggctcggcacccccccgccggcccccaccgagcggagctctgcttcctcctcgccgcatccctgagggaagcgccgcctctgctcccgggttctccgcccgccgactccttcctggccggaccccgctgcgctccaccccagtggctggaggagcagctctccagtcagcctttgcagcccctctctttttccctttccaccgggcctcctcggatcccttggctgggcactgaggcgggggaagaggctggggtcgccacggcggaggttgctgccgccacccccctgcgggggtggccggggttcccggctgggggggtaccgttctgggtgaggcatccaccatggtgaggcccctgtgccgctgcccccgcgcccccccggccgccgctgcctcctgcccctcggtgctgctgttgctcccccgcctgctgttgctcctccatctccagatcggatcacggtgagggaaagatgagcgaggagacggcgacttctgacaacgagtaagcgcctcattgatctcgattgctaatccccctccccctatccgccctcggctctcccccagacccatccgaaacttgggtgccggaaagcttgcgaccctggagagttcggtgcatcttctggagatagctgatttctttagccatttttagtggcagcacccctccccatcctcccacatttagctgctttcttttggggtaggggattaagtgttgggagaggatggcaattgtacgtctatgagagggaataatgtggatggatggaagtggagtagaaactacccctttgcctgtgagacccctgtcccgtcctttttcactcacataccagtcaccataccttcagtatccatcctacttcctttatagctgtttcacttggaaactaatgtgtgggagcacctcctgcagcaaactgctctt

SEQ ID NO: 26227 - DNA, 1171 bp, Artificial sequence
  DNA replication origin
cgggccgcggccatgggcaccctgggcaaggcgagagaggctccgcggtgagtagaggcggccgtggccctcgggagcgcctgtgtcctttcttgggaaagaggcccctgcccgtcgccccaacaccccgagggaagttgagggcggaggggggccggggtcggccggagtcccgggacaccagcgcgacgggcggacgtgtccagaacgcccggcgcgctgcgcccggggtttcggggagggagctggggctgaggggtggtagaggggcggccgcgaggccagagctcgtccggtgagatctgctagggccgaagctcttcgcggagccggcgcccgcccgccgacttcctcccccacatctccacgcccggcatcgggactcccactcgcggactttccgcgctgcccgcacctgctggggcgctgggctccggctgcgccacctggtggcccctcccggccctgcccagaacggccgaggagcttgcagggagcccgcagaggtggcacccctcggttgcccctgccccacggaagtttccagatccgtgggtcagggaaacatatcgccttccgtatgggaagctgcactcctctccccctcactatgattctatagagggtcttggataacagaagttgaagaaagagggacagtgagtgaaagggctcttggccaggcagctttgagtttgtagccaaaggaccagaactaggcaactgcatgaacaaaggcctggcctcggcgtaggggctggacaagttgtgcacttcacaactccattcacatcgacactgatgggactgtgccttgcaccaccatacccagtagcggcaggaagcttgcgatgctggacttcccgtgcttataatcccaggaacgaaggattcttggccctgtatgcacgccctgcctctccccatccaggtatcccctgagggtccaccactgtactttgcactagattcagaaggaggagttcagtacattaaattgagtattgtaaggggaagaggacgggactggaaggaatccatactagaagtcaagagagtcaccttccactgcaaagaaagttgtggaagttccagttcccttgctccatttcatctcttacttttctaggcggatttcataaaaagctcagcctgaaactgacctccactg

SEQ ID NO: 26228 - DNA, 1183 bp, Artificial sequence
  DNA replication origin
ccccgccaccaccgccgccgcctgccggctctctcccccccgggcctcgtagccccggcgcccgccagccctcgagcccggcgagcccgaccgaggtgcaccgcaggcacaaactttgtgcgagcgcgccccctctgcctcgcgcgcgcgctcacacccgcctggcaaccacctgacacgctgatgctggcggctgcaggaaacgtgcggcgccccgccgctcttccccgaaacctgccccctttccgcgggtgccccggcctgcgcctcgcgcggttctctcacccctgcccgccttcgacctctcttggccaaagggttaagtctcaggggagttggagaggagcgggctcccggctaccacgcccgcgccttgcagggcacctgtgcccgtcgacctccacctcagctcgggaaacgggctgcgcctagcggctcccatgggaccccctttcccgcagccgacccgcagcttccacgcctcttcctgcggccgctgctcggagcactgcagtgaggacgccttctcccctccagggcctctcctgtatatatcagagcgcggagtccggcaggggaaaggaacggaaagacagttgtgaagttgccttaacctgtgccctggggtctctaggtagccgtctgcaggactgggccgtagacatgtgccctgtgccctgcgccctgcaccttggacgagggctgcctgtgtggaggtgcgctccacaggcgtgatccatatctggcccagacgcggccgcctggcgtcggtgggtgtaggagatgtggggacaactttcatacaacgtcagtgcgcacagaagacctggccaagaggggcggcccatccgctgcttgtccaggtgatagtgctgataatctcaatagctaatgattgagtgcggttgtgctaagtgctttctatacattacctcatttaatccactctccctgatacaaagagatcactgttgtaaagatgagaaaatgaaggtttagagaatgctatgccttagatcatacaactaataaacagcagagagacctctgacttggactgaggtctgtctgactccctgtaatcactgctggactgccctaataacacactcattatcacggccacagaccataactctagccacagtcatagttgtcttcctggccatagtgttctggactt

SEQ ID NO: 26229 - DNA, 907 bp, Artificial sequence
  DNA replication origin
ctactaaaaatacaaaaattagccaggcatggaggcatgcacctgtaataccagctactcgggaggctgaggcacaagaatcacccgaacccaggaggtggaggttgcagtgagccgagatcactccagtctgggtgacagagcgagacctgtgaaagaaagaaaagaaaaaagaaggaaggaaggaaggaagggagggagggagggagggagggagggagggaaggagggagggaaaaaggaagggagggagggagggagggaggggaggggaggggagggagggaaggggaggggaagggtgaagtgactcatccacagttacgcatcattatgaatagaaagaaccaggacaagatgggccttgtgtcaccacagtgaagactctgaactcctgtcagtcatcctgtgtgacttttcctctacccctaaaggttcaggtgagttgcccacagtgggcacagctgatctgacagctcttagctggggctgatgctgagactctggctgagaaatgttactttcaagcagactgaacagaaagtgctatttctgaattgctatcttagggaggggatgtcaaatgaaatgtaatttccgaggttctgggttttgttttgtttttgtcaactcaggcaggagagatgttctgtaccacggaaggagcagggaaggaggaagggaggctggcagcatgagaatagaccattccaattaaattctacaaagtgagaactgtgcagagctgctagaggtgagtaaactttcttgaaaagagatgcaaattggaaaatttagagagaaacaacaatagatgttggtgtagggactctactcaacccatgtggtttgttcacactgaccacacgtaggaatgctggccactcaaataaactttggaccctag

SEQ ID NO: 26230 - DNA, 1369 bp, Artificial sequence
  DNA replication origin
cttgcgccacgcgggctcggggtgatcagcaagcatcccgaaaagggacggggctggggagaccacctaggagggcccgcggggtggcgcaggggctttcgggcgagctgatctcccggaatgcctggttgatggcgagaggtggatactagagactgggcccgttttgtaaaaagaaaaatgggccgacggggcgcaggggacaccaagagagccattcgttaaagtacctgcccctcgggccctcgctgactctcctccaccgtccccgtggggtgaggacacgcgtcccccgagcgcctgtcctgagctggccccacgcccgccccggagggaggtgagcgcggcgtcggcggggccggcaggttggtgcgccgcgttcgccttcgctgccttcgggccctttcctgccgcggctgccagggggcccacagagacgcctctcccgctgccgcggcgctccctcggccggccgcttgggggcggtgtgcgtattctcatcaaggggcccggggaggacagctgctttctactcgaattttaaggaaacttactcgtatccagtttccacaagccaaattgaaattgtgtcttgaaaaacagtttttgtgcccactcgtgcttcttaacgtgactcctgtttggagaatttgcagaaccatctggctccagagtcttcagctatttacagagcagacccatagagtaataaattactctctgcctattattgtatttccctttttcctccctaaacgttcttttcatttttcggctcctgaacccgaggtgtgggttacatttctgtgggtgcacacattgccatgagtgccgctgcctagtgcttctgtcattgaagtctggtctccaagccactgtcccaagccagcatgactctagcttcctggaattccattcatctcttcgggatgggacgtcagccgcctcgctccctctgctgtgatccagcgctatcgggctcgctccgaggccagggcataggtagaagcttgaccaaataaggatctcagcacgggcagggggaaacccctggggttcacctcccatcttagcacttaaacctggcaggactcccgactgctgcaaacagccaagtgtttacattcatcaaacagcagtttcgcttttcttgcgtgggagtgttgtatgacaagatggtgtgtgtgtgtgtgtgtgtgtgtgtgtattacggaaagagtgttttctagttactcaatatgtatataaaatgcctctaaaagatgaccggtatgttcctaaggcacatgtttgttggatttcagatgttgggaggcagaaagaaaagtttctactggttgatgaataaaatcagattcttgtcccgcaa

SEQ ID NO: 26231 - DNA, 1400 bp, Artificial sequence
  DNA replication origin
agtctggcgatgctggccaggtctctggtgaagacgctttggatggggacgtccaactcagcattctccatcttttcacagtcgatgtacagctgggccctgtcttcctgcacaaacagggtgatgctcttccactggccggttgccaggagagcttcttccacagacaccacgtgctgctttccttggacggtcaggctgaggtccagggtgcccgccttgccattggacaccacgctgaagacctggccagagtggtctttccgctccagggccagcagcgtgccccgggtcttcttcatctgcctcagggatgccagaaggaggaaacccttttctgcccgcacagcatccaccaggtcttggaacttgtcatcaggcacaggggggatcaggttggcatcctcgatgcggaaagctgggctggaagggtcggggcccttcaccagtcggcgcccagaccccttgcgggcggccccggtgagttcaaagatgtcaaacacgctgttgtctccgccagactctgttagacaggagagaacacaaagtgagctttctaggctgggaccagcagtagggggctgagtccttaggggtggagacaaagggttggggtgaaaactcctggcaaccactgaaagaggtgaataaataccaggatcagagtgaagctgcgtcctgatgtccagtcaggctcaagagggagaggacagcacgtgagggggcacacctgggatagccagcacctcttccttgtccctccttcccctaaaggtgccacacaaactcacctggaatgcggttggtgccacacacatgcatcaggaacaggacgcctagtccccaggccagccccatggtggagctgttggtgcccagcagggatcctgtagcaggaagcacaagagccgagggtcagagatcagctaggcagggagggacggtgcgcagaaacggggctgggcatggggacagggccgggaccatccctctttgaccccgcgtttgctgaaatgaaggacaacaggattactttccagagagcatgagagagagagagagagagagagagagaggtggaggaaagagatgctggttttaaagtgtggggggcgcaagaccaacaatttgggggcttttgggaagtcgaaggtgagcaagatcaggaactgtagtttggggttgcagggagggcaggggaagtacagactcttccctggagtgctgatacaaaggcttaaggaggacttcagagagtaaggaaatcttggggtgtcctgatgagttggtttgtgaacctcaaggctggagaggatggctctggagccttgccctgaagagtcctccagcggctgagaggagcgggctggggtaggcgagcggggagagtgtaggttccg

SEQ ID NO: 26232 - DNA, 982 bp, Artificial sequence
  DNA replication origin
ggccagccgccccgtccgggagggaggtgggggggtcagccccccgcctggccagccgccccgtccgggaggtgaggggcgcctctgcctggccgcccctactgggaagtgaggagcccctctgccaggccagccgccccatccgggagggaggtgggggggtcagccccccgcccggccagccgccccgtccgggagggaggttggggggggtcagcccccaacccggccagccgccccgtccgggaggtgaggggcgcctctgcccggccgcccctactgggaagtgaggagcccctctgccaggccagccgccccatccgggagggaggtgggggggtcagcccccgcctggccagccgccccgcccgggagggaggtgggggggtcagccccccgcccggccagccgccccgcccgggaggtgatgggcgcctctgcccggccgcccctactgggaagtgaggagcccctctgcccggccaccaccccgtctgggaggtgtgcccaacagctcattgagaacaggccaggatgacaatggcggctttgtggaatagaaaggcgggaaagttggggaaaagattgagaaatcggatggttgccgtgtctgtgtagaaagaagtagacatgggagacttttcattttgttctgtactaagaaaacttcttctgccttgggatcctgttgatctgtgaccttacccccaaccctgtgctctctgaaacatgtgctgtgtccactcagggttaaatggattaagggcggtgcaagatgtgctttgttaaacagatgcttgaaggcagcatgctcgttaagagtcatcaccactccctaatctcaagtacccagggacacaaacactgcggaaggctgcagggccctctgcctaggaaaaccagagacctttgttcacttgtttatctgctgaccttccctccactattgtcctatgaccctgccaaatccccctgtgtgaga

SEQ ID NO: 26233 - DNA, 1283 bp, Artificial sequence
  DNA replication origin
acctccctcccggacggggcggctggccgggcggggggctgacccccccacctccctcccggatggggcggctggcctggcagaggggctcctcacttcccagtaggggcggccaggcagaggcgcccctcacctcccggacggggcggctggccaggcggggggctgacccccccacctccctcccggacggggcggctggccaggcgggggctgacccccccacctccctcccggatggggcggctggcctggcagaggggctcctcacttcccagtaggggtggccgggcagaggcgcccctcacctcccggacggggcggctggccgggttgggggctgacccccccacctccctcccggacggggcggctggccgggcggggggctgacccccccacctccctcccggacggggcggctagcctggcagggggctgacccccccacctccctcccggacggggtggctgccgggcggagacactcctcacttcccagacggggcggctgccgggcggaggggctcctcacttctcagacggggcggttgccgggcagagggtctcctcacttctcagagggggcggcaggcagagatgctcctcacctcccagacagggtcgcggccgggcagaggtgctcctcacatcccagacggggcggcagggcagaggcgctccccacatctcagacgatgggcggccgggcagagacgctcctcacttcctagatgtgatggcggccgggaagaggtgctcctcacttcctaggtgggatggcggccgggcggagacgctcctcactttccagactgggcagccaggcagaggggctcctcacatcccagatgatgggcggccaggcagagacgctcctcacttcccagacggggtggtggccgggcagaggctgcaatctttctgcaatctcggcactttgggaggccaaggcaggcggctgggaggtggaggttgtagcgagccgagatcacgccactgcactccagcctgggcaccattgagcactgagtgaacgagactccgtctgcaatccccgcacctcgggaggccgaggctggcggatcacttgcagttaggggttggagaccggcctggccaacatagcgaaacccggtctccaccaaaaccagtcaggcgtggcggcgccagcctgcaatcgcaggtactcggcaggctgagtcaggagaatcaggcagggaggttgcagtgagccgagatggcagcagtacagtccagcttcggctcagcatgagagggag

SEQ ID NO: 26234 - DNA, 1126 bp, Artificial sequence
  DNA replication origin
ggctggaagaaggagtgaaggtggaggcccaaagatcacgcaggagccatgctttttctgaagccagatctaggcctagcaactcagagcagttccccgtgggcagtgatgtggaagaaggccctgggcttcctaagtgcctctaggtcactttgtgaaacctctcacatgggcctgcctgggaggaggagcccagtgtagcccccacctgtctgctgcctgctcatcttccagggtgttgaggggatgggtagcatggctgtctgcccccaccaattacccacatggcttgggtcaaccagactctgtcagagctgttgaaggagacataaacctaggcttttggaggcagcttcagggaaaggtggagtgtgtgaggtggaaggtgggtgagaaagtgtgcaagggggaacacactgttctctactggccctttgccaaacagcaagggagagaggagtaacaaggccagactatggccatgtttagtggttttcaactgcggcccaaaatgaggcagacataggctaggcatggtctagcccttgtgtgtgtgtgtgtgtgtgtgtgtgtgtgtgtgtgtgtgtagggggagtgtgaggaagttgtgagggtgtgtggtgtgtgggggagtggtgtgtgtggggggtgtggtgtgtgtgaggagtgtgtggtgtgtgggggattgtggtgtgcgggggcggtggtgtgtgtggtgtggggtgtggtgtgtgcgtctgtgtggttgtgtgtggtgtgtggggaggtgtcatgtggcatgtgtggggggttgtgtgtgtgtgaggagtgtgtagtgtggggggggtttgtgtgtgcatggtgtgtgtgcgcgtgtgagggggtgtggtatgcatgggcagtggtgtatgtggtgtgtggggggtgtggtgtgtgggggtgtgtggtgcggtgtgggtgtgtgtgtgtaaggaggtagtgtgtgtggatgtgtgtagggggtgtggggtgatggtgcgtgtgtggtatggggggtgtggtgtgtgtgtctggagtggggagtgtgtggtgtgtggggagggtggggatgtgtgtgtggagtgtgggggtgtgtggtgtgtgtgtggagtgtggtgtgtggggaggg

SEQ ID NO: 26235 - DNA, 1247 bp, Artificial sequence
  DNA replication origin
ctggcccggccagccctggagtaaataaaccaccgggcaaggacccagacaatgggccttggcaaggagttaatgggctgggcctctcgcgttagccgagtgtgaccggagctggcagggggcctggcctggcgccagcatcgattacgaccagacggagccagggcagacttggcacgaatgggccccacagctggcagattcagtcaccctggccacaagggcacgaggcctgccctgggcgccggctgccaccgcggctgtgctccctgccaccgccttcactgccagtgtggcagggccgcttgtcaggcactcagtccctaggcccttttggttctccccaggggattgtccctggtcaggcctcttcctgtcccaggctgcctctgaggctgctctgtggccccacagactgggtgcagagcgggggtggggtagggggaggctgagggttgggctgggggatgcagctgtgacgcccctgcccccggcactcccaccactccaggacagagggaggctgctgagccaggctggtgttggtcagcaggaagaacaggtgaagcaagcctcatttctggtgtccagatggaggacagggtctttcttcccctgtttctcagaaacctttgtgggcctgggctctgctctggctcggcagctccaccctgcagggggattggccgggtggcagggaccacctgagggctcactgcgtccctgctaagaagttgttcgagtcagggtttgcaagcggggcttgcctgggggaaagggcatttcttgctttttgggtttactgctcctcccaggctctctgggtccctctcccctgggcgatgggctgtggcataacgtcctcagggcaaggtaacggctccatctggagctgatggctcctccaacgctaaggagctccatggacccagtcttgctgagcaaaggtttctttggcttgactgctggaagacaaatcacaccactgggcagtctccaaattttaggggatggtcagtatctctctgagagagatactgagaggtccaaaaaaccccacagaggagagaaaacaccaggccacatacccagagtgacagcccctgctctctgaggtcacaggtggagagcaggggaggtcaggccctgagggctgtggctgctggagccagctccaccaggcctgataatccctgcagatgaagccggcgcccatcccagtaggcagtggtaatccccacccaacc

SEQ ID NO: 26236 - DNA, 1199 bp, Artificial sequence
  DNA replication origin
gcattcctcagcccttgggtggtcgatgggactgggcgccgtggagaagggggcggcattcgtcggggaggctcgggccgcacaggagcctacggagggggtgggaggctcaggcatggcgggctgcaggtcccgagccctgccccgcgggaaggcagctaaggcccagcgagaaatcgagcacagcaccggtgggccggcactgctgggggaccgagtacaccctccgcagccgctggcctgggtgctaagtcccccattgcccggggccagcagggctggctggctgctccgagtgcggggcccaccaagcccacgcccacctggaactccagctggcccacaaggccgcacgcagccccggttcccactcgtgcctctccctccacacctccctgcaagctgagggagtgggctccggccttggccagcccagaaaggggctcccacagtgcagtgggggctgaagggctcctcaaatgccaccaaagtgggagcccaggcaggggaggtgccgagagcaagcgagggctctgaggactgccagcaggctgtcacctctgataaataggtaggaccgtaagcaagccagaagcccaggtgaacagtgggcccggagccaacaggaactcgctctgaaactccaaatcccaaaagagtagaggggctggtttccataaaggccgcaaagtaaaccttgtggagaagactccagtggctctggagaaagggggaagcaacgtggggcagcagaagggcagaggacaaatgagtcagcaaaaatgacttcctacctcccaaaggggagggggttgaggacgggaatttccagtaagaaagactggcaagatcctgggtaaaagctgaaagggaaagaggtacacggggcaggaaaataacaccattggaatgaaaatggttcccctgcagtctagtgataggagaaggagggaattgagtgagttggggtatcttagccatctcggccaatcgcgtggcactacagcactgggactttcttggcagaatgaatacacaggggcttagaggcatgtgctgctactgaggggagcaccaagtgagaaatggaaaagaccaggagagtggtgaacggcctcacgctcacttgacttcactcatgcagaagggctgcgggagcaagatggaagtcctgactgacgatccacactctgggtctt

SEQ ID NO: 26237 - DNA, 1187 bp, Artificial sequence
  DNA replication origin
aatacagaggattcagggactctctggcgcttccagagcctgtgttagggacagaatccgcactggcgacggcgctccgactgcgcttctggcgacggtcggaattttgctcggccccttgcaatgtttccatgggaaggttcgtacattcgtgaccgtccctggcagcggcccagcccgggacttggcgcttcactcgccattggtcagtcctcggcgtgacgcgcaggggggcggggcctcatcagctgtttgcgggatgccccgagcaggcgtattttggaaacaataccgcaccgtgcggagtggcctcctcccgccccggcctgtgcccgccgccgccgccgcccctgcctgcgcctcccgcctcctgccgcagcccggtgagcgcccgggtggccgccgggggccgggcggagttggatcgcagctccttggggaagtggggagcggagtcgcgctgcgcacgggggcccgggaagggtttgggctgcggacgtctggggtgaccatgaagaactggggcgctggggtgagggaacggggtgcagaacccacagttgggtgcgctgctccaagagggaacttgggggtagcatttgggactcgaaggagttgggtccaggtaggcaggggaacctggggtgcactgctgagcagacctgggcgcccgagaacggcccagcctctgggtctgactttgggataggacaggagctgtggggcatcctgcctctctgcggagtctgaaggctcctctccttaacagctgggctttttccctccttcccaatcgagtctgggcgtccagcccccgagtgctcgtcacgctggaccctggcgcggagccctggcatcacgactcggaggccgagactctctcctggagtcacccaggtctggggtgtgtgtgtgtgtgtgtgtgtgtgtgtgtgttcctagtcactgtcgaggatctgggtgtctgactactgccttctcctaagaggaggaggagtctaagttcagcatccctcttccagcccttaggggttgggatggctgcagcggggcttgagttcctttgctaggaataaagcattccctggccctgttctcaggaagtgccctcctcctcccaccgctctggacatcacctcttaagctcaggagaaaaatttcaccctctcttagtttacccttgacct

SEQ ID NO: 26238 - DNA, 1391 bp, Artificial sequence
  DNA replication origin
cccagcgccccagttcttcatggtcaccccagacgtccgcagcccaaacccttcccgggcccccgtgcgcagcgcgactccgctccccacttccccaaggagctgcgatccaactccgcccggcccccggcggccacccgggcgctcaccgggctgcggcaggaggcgggaggcgcaggcaggggcggcggcggcggcgggcacaggccggggcgggaggaggccactccgcacggtgcggtattgtttccaaaatacgcctgctcggggcatcccgcaaacagctgatgaggccccgcccccctgcgcgtcacgccgaggactgaccaatggcgagtgaagcgccaagtcccgggctgggccgctgccagggacggtcacgaatgtacgaaccttcccatggaaacattgcaaggggccgagcaaaattccgaccgtcgccagaagcgcagtcggagcgccgtcgccagtgcggattctgtccctaacacaggctctggaagcgccagagagtccctgaatcctctgtattaggtgtgggagagggggcgccaaagtaacttttgtcttctttttcacggcaatgggcagaataattgctgcgcgtccacaaagggaggggggaaggaggcggggagtttttttatgaggctggtgcgtccagtgggtgcagggtgcagggtgcgggtccctatgggatcccagcctcaggggaaagctccctcccgcctgccgagcaggtcggaagaaaactgcagctccaaagctgaaggtgtgtttgaaacaaacacatccaggggagcccttaggtcctcttcttgactgggcgtgggcactggcaaaataagcacctggctgagaagcggagcgctcaagaaggccggggctgcttgagcggttgacacatatctcgcatatggcagcatttagagactgtgctggtgctgccaggagagcagcatgtcctgcagaccgcgtaagggagtctatgggctacttcacaggcatttaccgagcacctactctgtgccagatattgggctgagtgccagaaacctggcgtctgccctcaaggagcttacagtctactaggagaggtagccctgaaaatagtgaaaagttattggaattgtattcattccaaggataatgactattgaggaatgcagaaaaattcagaatacaaaggctggagaaggcctcagggagacagcttttaaattgaatgggaaatatttttcaataaggaaaaccagatgcacatgtctcacgcctgtaatcccaacactttgggaggccgaggcgggtggttcacttgagctcagtggttggagaccagcctggccaacacgggaaaccctgtctctactaaaaatacaaaaatcaggcgg

SEQ ID NO: 26239 - DNA, 883 bp, Artificial sequence
  DNA replication origin
cagctcggcgccccaaacgagcaggtcgatgcctgaggatttaatggagaaatcccaaagtgagccggggcgcgcggtggaggaggggcgcgccgcagccggggccgctgggccctgatgggcgggagcggggtggagcggcctcgcctgccaggcagccctgggcgcggggctcggcggccacactctggagacagccacggtccaggcaggtgggggagggcgctgctcccgtcctgatgtgccaggagccgccagcagccatccaggtgactaagccggcccactagcactgagtcaccgcccgcctcgagctgttcttgcttctcctttgcatctgattattttgggagctggaaacttggagctgcacctgagtcccgccccttctagctctcccctccctaccttgggctccaggaagatgggacttgctgtgagtctgctgccaccccctaaagatatggaagacgctgtgggggccagaagtgcccggggggctgtggcagcaggcagagtgcaatagcagatatggtggtcaggctgcctgtgtgtgtcctctggaggtgttgggacagaagggcagtcttgtccgagctgactggagtcctcccgggctggctctgaactcatctcccacggggatgtttcggtaaaggagtggcttctggggtcggagtggcatttggagagcgaggctggattggcttaggctggcctgggcaggtaggtggctctgtgttgggtgtggacccacgtgtgtgtgagtgcgagagtgtgtaagccagtgtgtgtgccgtccccctgctggggacagcagctgggtccagcagagagctggctgggggcttgacaggagtttatcctaactgatgctgggtgg

SEQ ID NO: 26240 - DNA, 1441 bp, Artificial sequence
  DNA replication origin
gttcatttcaaatcctcagcaaccaatctctgccacctccacgcagcacattctgcttctgcagccagcattcgaccagtgtacccatgtccttgggtaacgaatctgtggggggagccattctggtatcacctggtccccctcccactgccccctcatccaaggcctagcagtcagcttcctgggtgaccacaggaggtcagagtttgtctaagcgggtcaggcctacagtattgtccactcagaggaaagagaaagaatccgcgtgggaaagacacaaagaggaggaggaggaggcgacagagtaaggggaggagaacagaaactaaatataaatatgtgttggggatgttggggatggcagcagggtatggttagctggctggctcccacaccactgtcccacagcacagagggccagcatctgcacctggcaccatgctttccctaggaaagccgagggcattgggcttgtggtgcagccacacagggtacagacctgtttgggactgtcaggttcccacgggttgcctgagctctattaggtgggcgccttagagtaaattgtgtgaaaccaatacagcctataatgcaaaagattgagccgtgagtagattgatgcgtctaaagaatcagtgaacaaaaataagtggccatagtgacctcagttaatcattgaagtctgaggtgcccaacaatgatttttaaaatccctgcactgtccttggtccccgctctgtgacactggcagtcacccagccaccacttgacggcagccatttggagtccacatgtactgagtttccaagccagaacttcctcagcactcagccagaacacagcctttctctgggggcccaagacaaggagagcaaaggtcttctcacttctttatctggggaagagatgagtgattcctgtcccttcccccagtatagaaaacaccctgtaccccaaaagaaacatggcacaggggcagccaggagtgagccccttggaatggccattctgatcttaggcagggactgctgaggacaagcagaggatgccgactctgggacaaaatcacaggcggaggggctccgaaacaggccctagccgctctgggggtgcgggtctcctgccctaggactctcaggctagaaagtcctcaggactcaggactgcgcaagggctgacaagggaactggaatcccttaaatcccgctttcctgcctgcgcaaggggctaccccagcacagtcttggggccctgtccacatgggacagatcatccaaggtgacaggttttccgactcccgcgtgggctctccaggatgtgtgggtgggcacacgcggcccgctcaggtccgggagagtcggcccgcggctctggagcgtgcatctgcgatgccagtgaacgaggtgattacacacagccggcgctcagctgattctccagg

SEQ ID NO: 26241 - DNA, 2137 bp, Artificial sequence
  DNA replication origin
ggcaacttctcccgcgctctgggttcgccgccgcgtcctacctgaggccacaccctgaaatcaaaatcgcggtcaggtgaagccggcgctgcaccaacgtgtaagcgcggcccctcctcggcgttcccgcgccgaggtccctcccgcggagggcgggcccggctcccacgacctcttcgagcgttcctgggcttcccgctccgcaggtgggttccccggctgccccggaggttcgcggcgagaggacgggcctcccaacacgcgcagcccccttcctgggtgcccatgccccgaagttcgggaccagccggcgccaggcgaggggccttgggcgcaggcatctggagctccgcgtccctggagcgggacctccctccgcgggcgcccgcccggcgcggggcattcgcgtccccgagagggcgcagcagtggggcctgcgagctggggccgggtggccgcgccgggtcggagtgtggctggagaggggccgccccggaagcggtgctgcgcccaacgtccccttctccccgtaagccccgcaaggagcctgccgcctcttgcacctgagccaggagttcagtcgggaggcgggcgcggagcggttcccagcgcctggacgtcagccagtcgcaacacccgcgggaacacttgctacatttgccataatgcatttctgatctgtttccgcgcaggcctgcggaggactggcccagcaaggtcccaggtcttccctctcctcagcgcctaagagagaggcccagtgcgggtgaggagtcgcgaggaagaggcggaaggcgccggaaggtgagtgagcgagcggcccccggccctagagccttctgcacccattttgaagagcaggcagggagggacagtgggcaggcaggtggccctcctgggctggctccttcctggtactgctaggcagcggaggtggtcccttccaggtgccgtctctcgatccttagtgggtgcatgttaagtcacttacaccactttgccccatggccccacggtaggctggtagacgtcaagacctcaaatggcccgccctgcccccgggcccatcttcaggtctgatgcctgtcctgggtgagggtgtcaccgcggcagagtgcagggaattcatgccggggaagaggttcccaaacaggaagggtggtggcaggcccagtggctgtgcagggcagggtgggaggcagccgtgggagactcccgcaggagttacaggtgaagctgccgctccacacatcccagcccaccgctcattccccagatctccagacctgctcaggtggcatccgatctggagtgtaggtgctgctgggagcactggaggctaagccatgaagagctcccagggtgtaggttgcgttttctgtatcttgccccattctggtggttttttgggggcttttctgacttgtttttctgggtgaagggggcagaggggctcaggtctgtgtccatgctcgtttttggtggccggtgtggcataggttgccgcattggataagaaaacgcctggttccatgcaaggtgaggttcagcctgcagtgccatgaattctcctccatagtatataggacagtggccgaagacacatttggaaccgaagagagtggggtttgaatctatccagactttgcctttgactccttagacaagttgcttcacttctctacaaacttataaatggcctcatctgtaaaatgggaatgcgaatgccttcctcctcattaggcggttgtggggagtaactgcctcatcagcctccagctgctatgttgggaagggctaagccactccaagttctcccatcctggagagctttgagggcagtctggctgtttggcaagctattgtcagagggtattagagcaaagcaataggaataaagtaaaggtaggggtccttggagggcgagtagtgagagaccctaattcagggtctctggacctcgtggtgacccagggaaggggccattcctggaagaggatctggcttgggcatcagaaacagcagcgccccctgcacatcacacatgttcatgtgttcatgggtgaccctggaacctcaactgttgcctgggatagagggagcctctggcttgagcttccagtcccatctctgttct

SEQ ID NO: 26242 - DNA, 1692 bp, Artificial sequence
  DNA replication origin
atcatccgccctgccctccattaacggcccagcgagaagcaggagccgtttaacaggctccttccagctctcgccagagtttgatataatttaaacctggacccgcagctcgtgtgggctcccgactcccgcgcgccgccgtttcacgtcgcaaacactttagtcaattatccccctcgcggagcttctatttaaagagatattgtcaggctcttaagcctcggaatcagacccgctgctttctgcttcatatacaaaggcttaaaacacgagttctttgaggattggaagaaatacaattaagcacagccttcgcaaccgttccaccccgcgggagcacccacgtgcgggacgggggagctgggaggcgtggaggcggggaagcgctcagtcctttccatttcaggcctctgtgacccagcggaaatagggcttgggcctccaggggtgaggtgttgaacctcgatgatggaattcaaatgcatctgagctgaagagcgggctggctctggagcccggagttggcctgggtaggggttgtgtggagcagtgactccacattatcaatgaagctgaatcctggggcagagagagagggagctggagttacccaggagctgattcaagggacaactggtgttcaacactagggactctcccactcccaaaatatgctttcattgtcttgagacaggagtttctaccctggaaaaacataacagccagaccccttcctcctcaaccctccagtcctgaaaggctctagggccccctccgtcctttccttctcccacacttggagggaaaggagactttggtagtttgtgggattattgtcagcatcagtaggcagaaagtggggaggctgggtccttattctccaaggtggacccttctatttacctggctgcccagttgttgggaaacccagcgaggggaggggggccggacaggagcgacagatggctaggccgacccaggattgagcctgagggctggggagggggaatccaccttcctggctgtagcctacggaaccagtcaatcgacacctctagacctaggcagggaataccgaggagcacaaaaaagaagatggaggtcccttatttctggtggagggctggtggaggtctcgccttggcagggaggcaggttccaaaatggactgcggggggcggctgccgaaaaggtgagggacctagaagagagaaataccagtggagtagaaacgggagggtaggggaagcaggcctcgggccttggcgccgtttaccgctgagcacgcagcaccacagcctcggtgcccgcctgccaagggttcggcccaggcaccgagacagacagagcgttggcctctaactccgggccactctcgggccctggcgcctccccgaccaggctggggatatctggggctgtggagcgtcggcgcaaacccaggcggccagagccggggccgccctccgggtggggactgaggccaatgggggcttgcgctaaggttgggggcgctccctccagcacctcctgtgagcgccaccgcccagtccccgaagactggggcgagtttggtagggccatcagggccccagcccgcaggcgggcagcctcctcctcggttaccgcacctagagccaggctcatgctccgacccagctcgggccgttcgctgccctgcgcccggtgccg

SEQ ID NO: 26243 - DNA, 1875 bp, Artificial sequence
  DNA replication origin
gccaccagacgtcgggagcagagactcgaccctctcccgagtctctcgccgctttcccggtgtccggcgcccctcagtcctcgtggtttggagccgccgtgccactcacccgcacccagggcagcccccgctcccccgcagcgacggtggcgcccgccgtgcacgcctgcctccagccctggcggggcgcgccgctcctcaagctgctggcgccgttcctccgcctcctcccctctcgcgggggccgggccacgccagggcgcttgctccttacttggggggctcagcggcgcgggagctgccgcccgcctagatacctgactttatagccttgggggtctccatggcaatggctgtcctgggagcggactgcgccgtcagggcagagacggacggggcgggggagaccgctcctgacccccaccccttcgtgggccacgaagtaggggagcggttcctcctccgcgctcccctgggaatgcggcggcggttgcggggcgggggcgggggctgctcgccgggggccacatgcacccaaccgggccaatcccaaagtcgcagtcttctctccccgccctccgcccccaaccgagtcggtgccctcggctccttagaaactggcgggacctcggcctcgtcggggaagactgaaagctgcccccatcggtccagggtgaaaggaattgggaccccatgagcgcagaactggaccacgcgcgagctaggggtggcagcgaaaggcggatgaggagtaatttgggggagggggtatacgtgccgcggattgggggcgctcagcctggctgggaactgccactcgaagtgcagagaatcacgcactcacacacaattgttccacccgcacacgctccctgggaacgaggggtggggtccgagtgcgctctccaatttcagacgtctccaaccccgacaacgcgcccgcgtgccagctcctggtggctgcctagcgggcagagtgtagacgcccagaccagggaggggctccttaggacccgggagtgccgcggacatgttaaaagttccctggcgccgccaccctggaaagagctagggacccactcgaggttccctgcccctcgcttctcccttgagcacaaaacaacccccaggccacagggctctggctctgaccactggctgacccctaaagagaggaggcgagcacaagttccattttccgtaagatgcttggagaaaccactgcatctcctctccctccggccagcaggtccccctcggtcctggaggaggggggatgatacacaggcctgggcggagcagagttagggcgcctcagagcctgggtgtgggtggtggggagggtgtgagtagggttggaatggatatttgtaaagtaaggagtaaagcagttatcagctgcagaatttactgagacttttcatgagccgcacattttgttgccggcagcgggtaagagagagacagaatctcggttctgggtgcgagacgttccacctcttaagaagacaacactgggacttaaaaaatggacgttgtcacctgagggctgaattcttctgctaaatacgtaccaacacagtccttggatgaaaagatggagttgtgggcaggagagggctctcgggccttttaaagataggccttcaaggatgtgcgggatctggctgcaaaagaaagaaggaaggaatcccaggccgggtgcagtggctcacgcctgtaatcccagcactttgggaggccgaggcgggcggatcacgagatcaagggatcgagaccatcctggccaacatggtgaaaccccgtctctactaaaaatacaaaaattagctgggcgcggtggcacgcgcctgtagtccctgctacttgggaggc

SEQ ID NO: 26244 - DNA, 1613 bp, Artificial sequence
  DNA replication origin
ggctatgaaagaagctgcgggtaaggcctgctgagcccggtgatctcggggatgagcctggggcgggtccggggctccttgggggttggacgggcaggacggcctggccggtgttgcgcctcacccgggcctccgcagagccgcggaccgccagcctggaggagctccgggagctaaagggcgtggtgaagctgcagcggcggcacgagaaggagctgcgagagttggagcggcgcggagcgcggcgctgggaggagctgctgcagcggggcgcggcgcagctggcggagctcgggccaccgggcgtggggggcgtcggggcctgcaagctcggtcccggcaagggctctcgcaagaagaggtaaggctcgtggcggtgccctgccctctgcagcgcgggtggcgcaggatctcagggcctgtccccacgtggcctccccaggagcctgccccgcgaggagagcgccggagccgcgccgggcgagggccctgagggcgtggacgggcgcgtgcgggagctgaaagacaggctggagctggagctgctgcggcagggcgaggagcagtacgagtgcgttctgaagcgcaaggagcagcacgtggccgaggtggccgggaggggcagggcgacaaccccaccagccccaccgaccccaccccccatggaccccattcgcccctctcaccgacccaaccccctcaccgactcccctccaccgacccccgccccccgtactccctctgaacaacaaagggcttctcgccaagcttacttcctctccctgcagcaaatctccaaaatgatggagctggccagagagaaacaggcggcagagctgaaggccctgaaggagacgtcggagaagtacgactgcctccctcccacacctgcttcgcctcccagcaagggctcagccgcacaaaacagctccttcatgcctgtctctctgcagcgacaccaaagagatgaagaaaaagctggagacaaagagactggagcggatccagggcatgaccaaagtcaccacagacaagatggcccaggagaggtgagccctggaggggaggcccagggctgggcagaccccacttcaggtggaaaggggcctctctacaaatggatcctgactcacttcccaaagatgcatctgtcccctggctctccaaaaagcggatcccccctgtcacctttgatcagagtgtcctcctcagacaaaacacggaggccaacactacatgggcagagctctggaggcagccaagcctgcagggagggagctgaggccttgggattgtagcctgtccactgtggtggcactgtttcccacggaaggacagtgtgttttgatggggaaatggttccctcagagggccccaggactcccagtggcccctacatactccttgggtccccacacctgcccccagctggttcctgccctatgttggatttctcatttgcctacatcctgcgtagacttcatgttaccctactctccctaggggttttctcccttttctaaaactccaattacaccaacaggttgaagagagagattaacaactcccacatccaggaagtagtgcaggtgatcaagcaggtgtgtaagggc

SEQ ID NO: 26245 - DNA, 1241 bp, Artificial sequence
  DNA replication origin
cagagggcagggcaccgccacgagccttacctcttcttgcgagagcccttgccgggaccgagcttgcaggccccgacgccccccacgcccggtggcccgagctccgccagctgcgccgcgccccgctgcagcagctcctcccagcgccgcgctccgcgccgctccaactctcgcagctccttctcgtgccgccgctgcagcttcaccacgccctttagctcccggagctcctccaggctggcggtccgcggctctgcggaggcccgggtgaggcgcaacaccggccaggccgtcctgcccgtccaacccccaaggagccccggacccgccccaggctcatccccgagatcaccgggctcagcaggccttacccgcagcttctttcatagcctcttccctggccccggccctggctgctgcaagagccacgggctgggctgtcaggtgctctggggggccccttggctccgttcgcctcctccacaccgccccctgggagtcgcagtatgtgccccctgccccgcactttccctaggtgaaattttttaaagggaagtgcctgtgggtgcagaggtggaggtgcccccagtaggtgtgcggaccgaagctcatacctggtgacccattgctcgttggggccaacgccccattgacctggctggcaactggactcgccagtgggaagggcttctgtgtagggagagcaggtcaggaaggtggcttgacagccctctctccccgagcctgggactcggccctctccccagcctctcccataaatagggctaatctctggtgagcccctggcagcagtgcaggcaacacagacctcaggcagacctcccatggcctccttgagcttcacagacttcgtgtcatgggcactgaagaacttaatggggttggcgagggccacagtgagatctgggtgggtgcacaggacattacaacatagtgtatatggagatgtggctggaagtctcccctgtcctcacccactccaggatgccccatctggatcccaccccaactctggaagctggcttgatgggaaggaagggggaacagacaccccgaggctcctggcatgccatgggctcctacctgcccaagcaccaggtatgtagtccttcatctccaggaagatgaagagcgcaggcatggtgaggggcatgttgctctcactgtgcaggcacaggtggtggtaccctgtgagacaggacagggtaggcagtgagcca

SEQ ID NO: 26246 - DNA, 1173 bp, Artificial sequence
  DNA replication origin
ctccattccagctgggccctgtccccaccccacccctgcctctacggtgctcccaacctttggggtcagatgcccatgctctggacccttcccctgaggaggtcctttctcctagtgagctccctgtgccttccctcagtccaggcctgggcagcagtctccccagctggtctccatgtcgtccttctccagccctcctgggccaaatctgaccagagaccaccacagggactgagaggccctggctccaaggcgacccggcctcatgaccacgtctccgctgtgagcagcgcagagaaggaagcccagagcaggaagtgctgagaggcacagggtggggctgggggtgggggcgggggcctccagaagaggcgggggcttcctgcttcagcctccttgggcagaagcagtgaccacaggcccccatggcaggcagggcgggtgggaggagggtgatttacaaggcagatgggcctctggctacagctcagtcctgcactcagccagggccaccccaggggctataagagcaactagatttctggagcagctcggggatgggtgccatttgagcccagcttggctccccctcctggctggcctccttcctgcccttctgcctgcctgtgtctgctgagattctgcaaagaggaacgcttggcaccatgtctctgctcaaccctgtcctgctgccccccaaggtgaaggcctatctgagccaaggggagcgcttcatcaaatgggatgatgtaagtggggcaggggcctcagctgctggagcaccaggtggtgggggccgggctgctacggggctttgcttgggtgggaggattggtttatgtctcctaggatccaggcgcctgtgtggtttggccaggcagctgacaccactgcttggataaacaaacctgggattaagggtgtatgtccccagctaaagggctaagccttggttctaggtgtgagaagtgggtgagctgcctgggtggtcactggaggtagtttatttgggtctgcttctcttctccttcaaacccccaagagaagaggaggaaagtgcaccccagagctgaggcaggctaggaggagaggtgagctcgtccccgctcccagcacagatgtcttgcccttgctccggcagggcgctcagacccagctccttcaccccctcca

SEQ ID NO: 26247 - DNA, 1512 bp, Artificial sequence
  DNA replication origin
ggggctcccacatagcactggcaagtgaacaaatgaacttgggacatatgtgctggggtccaggtcacaagcatgtcccttgtgggaggcaacatttggttgaatataagttcttaccacattctatggcccaaggctcccacttgccaaactctctggcataggtgttcccgtgggtcacaaatgacagacccaaccgcaacttccaggacatgcatgctttgagtgcacccagcagggggcatccttgcccttccactgcccaccctggaggggtgagactggcccactgcagggttgccctctacccagctcagcccaggagcccaaggccacatttcccaaacggggcattcatgtaactaccctgattttctctactattatttacataacatttttctttgtcaacacaaattttcaaacctaaatgtatttttaaaagcaaaaagctctttgatgaagattttccgctctcctgactgcctggattttctgcatttttggagctagctttgcaggaggtcaggatgtgagcaggagagtacaggcccccactgaagctacagttgtggtcccaagaacagtgcaggcagtgacatcactgagtaaagatgggcaaggctttgttctgtggattcggagctggagatggaaaggaacagagtgaggagccctgaaatcctgaaatgaggagaggaggctgtccctttcctcctcaggctgagggggaggaatggactggtctctccaggcccaaagtggagagggggctgatggctacaggacagatgaaagggagggacttgggtgccgggaccagggcagccgcaggtgacaggtgcaggggctttgggaagggacagggatttcccttgcaaaatccattcaaacagatatcgagggaacctgatcccagggaggaacccagaacagcatgggctgccagaggggcccccagaagggccccagactggagggagggagagaggagagatgacgctaagggactgggggaaacgaggaagaagagtcctctgaattgttaccatttccagaggcttggtcaggccctgctccggctccatcccccggccctagaattgctcttctgcagattatttctgtgctgggaattcccttagctccagcctccactgggcagtttattatcttaattccgcatgaagagtgtcctccctcaccctccaccctgccctggaccagacctccagccgcgacaattctagggcctgggtgagggtcttaccgttgttgggggtatgcaaagccccatgggggggtgacccagggcaaaaggccaggccccagaggggaaggaagtcttgggtagagctccctgcctcccaggctgggctaagaagggcgataagaggagcagattaggcaagaggaagtgggctgggctgagctggactggtgctgaactccctgggcctggggcagagtgtgggtcaggcacctgagcagctggggctgagcctggccaac

SEQ ID NO: 26248 - DNA, 1832 bp, Artificial sequence
  DNA replication origin
gctccgcctcccgggttcacgccattctcctgcctcagcctcccgagtagctgggactacgagtagctgggactacaggcacctgccaacacgccctgctaatttttttgtatttttagtagagacggggtttcaccatgttagccaggatggtctcaatctcctgacctcgtgatccgcccgcctcggcctcccaaagctgggattataggcgtgagccaccgcacccggcgacaattcaggaattttaagtcaacaggctgccctggctgacctaggagcagggtggaggagtgagttatttcttccccatcaacccacaaaaggccataaacactccacactaccaatatccttgaaatttctcagaaagtaaaaaaaacagctttttccttgaaatagcatctggctagccattactagtggcagccccacacctgggcctggatcaggaatgagactgaggctgggttagaggcctgtggttccagcagtccactagcacactcagttctggtagccacttgacttctgtgctgctgaggtgggcaaggcagctgttttgggagggcttcctcgtgtgtgtgtgtgtgtgtgtgtgtgtgtgtgtgtgtgtgtgtaaggggggtcctctggaagccaaagattcctggaggagggggggaagtgagaagggcagaggggatcctgccccacagggtagaagccaggtcaggctcacacttgcaggggcttgagggagggttcacccacagaaccccatcagaaccacagttctgttccccaacacacgcccagacaagtctccctcactcattcagacacccaggcagtccatatgcccagttctgggaacacaggaagtagcatccaaggaggagggaaccagaattctggaaagccttatagagagggaatggggaggagagaaggcagggagagcagagagcggaaggagggggagggcacaagtaaagccgcaagggagagtctgagcatgaagggttgttagcacctagggggtccaaagaccaggcacagagcccactgcctggcgcctggcctggagccaaagaagacaaacctcacatgggaaagtggggaggggacaaccgcccaagccttgaggtctggaggggatctgagagtgaaaacgctctaggagtcctgagagttaaactcctcaggttcagtgcagctccttgggtccaaatccaggccaaaaccaggaattggaagacccaaaaagcgggaccagcgacctgcggcgaactttgggactaaggtggcaagcgagtctggagaacagctcagtccgtggctctgtcccggaggctcagggttggcggggtgaggcgggctggggtacgcaattgcgacgacttcagtagagctccgaagcccagcctggactgggtggaaggaacacaaccagctgcggccccagtgagcgctccaggtgccagaaccgcctacccctggcgtcaaccaggttctttagctgtgaatgggcctgggagacccacccagggggtacgcggtgcggggagcaagctgagagctggaacgtggtatcttccctatccctcttaccgtcccctcccagaggataaacctaggcctggagtccgaagcccaggctgctattccacctgtcacttcggagcctcggggcggagcggggaggcgccagagttgacagctcgcgctccgaccgcccccttctagctccgcactccgcctcgcacaacgccgttcccccttttaaagaagtgcccggggctccactctacgccgcgccagcccaccaggggtcgcggtgacgtcgcccg

SEQ ID NO: 26249 - DNA, 1945 bp, Artificial sequence
  DNA replication origin
gccccctccagccggggccgtggagcaccggggcaaaggccggggcccccccatgaaggagcgcgacgcggccccggccgagcggggcaagccggccacctacaccggggacaagaaggcgaagatggcggccaagaccaacaagaagtgggtccggctcgccaccgtgttcgcctacgtgctctccgtgtcgctggccgccatcgtgctcgccgtctactacagcctcatctggcagccggtgggcgccgggacctcggggggagccgctggcccgccccccggcggctccaacgccactggcccgtctgggacttcgggggcggcggcggcggggcccaacaccactgggtcgtcccgccgcgaggcgccgcgcgacgttcccccactgcaggcggcgcgaccggcgcctccggagccccctgcggacagccccccggccgggccgctcgagcggcctcgggggccggacgaggacgaagaggaaacggcggcggcgcccgggagtcgttgaagccctccgcgctgggggccgccgggaaccattctccccaagcccagaggcaggacttcgcagcaggatggggtggagagcccgcgggagtgacccccacgagagtgaacgcccctcacactcccaccatcgccggctggccccggagcgggaggcccgcagccagatcttcagccaagggaccacgattcgccggggggctgggggtttgctgcccaggaccgtgctgcaccagggccctgagccgtagggggatggggggaggggtggggagatcccggcaccaaacccttctgcgccgctcgctctggtgtatcctacatgcaggggtgactggggctttcccccaagactcaggggaaggatggagctgtaggggctctttttaagtaagctgaagctctcgaaaggaggagggcaccaaaagtagtggagctcaggtacgtcaacctagttgcagtggccagagatgcattaaatttctagatccctgtatatagttgttgacatatgcactagaagctataatcacatagaattctatgtatatcctcccacaccctgggtagctactgactgaaggggtcaagcaagggctatttgctgtcccccaaaaagtacacctggccagaagggcacaaacacggcttcttaaatcactcactttctcctgttcccctcctgtttctgaaatataagtttatgacgttctttcacaaaagagtataatcattcttagactgttgacatggctgtggaaagccttaggagaagtagaaacaatttagggagggtggggaatgtactcatcccctcttctttccatcctagtgcccccaccaaagaggcttcttgttgcagccctcagtatctggatatgggccagggaggaaggaagggaaagagcaatgctgctgtgcttcaatcctggccttcccctcacagaattcttttaggaagagcaagcttttgtaagtagagtggcaagtgtttttatctttttttttttcctgctcctcaaaatgttgtcttgttccggcaatcacttttgccttccctctttcctgagcctgtagtgacaaagcccggcgatttgggatgaaatctgttgtaacaccagagctttgattacacatcctctggttttgagttattctacagaatcagaaaggctggaaggtgggcttcacactcaggattgtgctttgagaaccagctaatagaccagccgagggaaggttgaattggctgtctttacttttcccgataagccctacttaaatgcagcctgtaattgtataaaggagatgagaaacatcaagagaaatgacatacatgtagctctggggtagcaagaactagacttcctcaatttggattccatttccttctgccatttgcttttaggcaattgagtgtgggtagtgatga

SEQ ID NO: 26250 - DNA, 1267 bp, Artificial sequence
  DNA replication origin
taactactcaaaaccatggtccaggaaccagcatgggcttcacctgaagcctcttagaaatacgaattctcggccaggtgtggtggctcatgcctgtaatcccagcagtttaggaggccaaggcgagcagattgcttgagcccaggagttggagaccagcctgggcaacatggtgaaaccctgcctctacaaaaaatacaaaaattagccaggtgtggtggcacacctgtagtcccggctactcaagaggttgatgtgagaggatcgcctgagcctggagggttcgaggctgcagtgagccatgattgtgccactgcactccagcctaggtgataacagcaggaccctaactaaaaaaaaaaaaaaaaaaaaaagacgaactctcaggccctccccagaccattagaatctgcatgactcttcagttaaagtatgagagacacttctcaaaacagtctggtctgctaaagagatgcccctcaccttcctgaatagaggggtggggtggagttgagagccagtgaggaaggctgagctgggaccccacagtttaggcttcacattgggcagtggagaaatcccagggtgatctggactctccctagagccccacagccttcagcagagagcagcagccatggcaggaccagaaggagggggcagaggggaccatgcggtgaggtccacactagggctcaggagcagaaggcacacataacaagaaagaagggcacttgcttctgccaggcagaggtgggagggtcccctggggctcctaccgccatcctgcccccagccctgtagggcacctgtggcccagaacagctcccgcccagaacagcccagatctgccggatgactggctttcttccctccctcctgctggcagtctccgtcgcctaccggctggattactggtagtgggtgctcaggaaatgtttgttgaactgagaggaagccacagcttgtgcggagtccggataattcagcagacgtgggcctcaggggaggggcggggatggaggcttagtaggaaagacaagtcctgatgtcatacttagctggaagttgtttctctgtctgtggagtagctgtctgattcttgccttggcctggccctggtgctagtgcaggacggtggggaaagaggaagtggaaagagcaggaaatgaccctgggctgcagggccaggcccttgcctacattcagggtgcacgtgatgtctgacctgggtgtgggggcctgggagtaagctctcccatcctgc

SEQ ID NO: 26251 - DNA, 1099 bp, Artificial sequence
  DNA replication origin
ctggggaaagtgggagactgtgggggctgctcagaggtgtgacgtcatgtgtgaataacactgggaaacacacagtcagcagctgctggtaccccccgtatgatggttggtttgtcttgggcacatacccctctagcctgacagaccagaaggcctttgccctaggtgaggggagtgtgttcctgcaggcccttccagaagagctgtgtggccatcccacaggcgataagcctgtgcccatgcctttacccccctgctactctcttgcccccaccttgtctgggaatgggggagggggtacacagccttgccttatccctgtagcttccttaccccatctacacatctcctccccagacctggtccgggcctgagttctgaagaggctggagagcattaggtctccctccccagcaagtgctctgcgggcctcccagctccaacacagtgcggggcaggcgaagggaagtttgaggcttctggaggcttctgaagcctcctgaggctggcgtggaactcagtccactgtatggggcaggatgcagagcgtctgggagaaggagagagagtgtgtgcgtgtatgtgtgtgagagaggcccagggcacaaagcctgggtgcgtcatggttgctgggagagtttgacgagtctgactcagtggggacatccggcaggaaaggaagggagagcgcagtggcatttgcaagcaagatgggaactctggggtggtggagatggggtgtggggccaggggtgctgtgcaaaggcctggacaggaagagggctaagcctggcggagctgggggagggagtggggaggaaagggcagttctggaggggtggaggttggacctctggctgcctgggtgggtctgggaggagaaagaaggcagcgggggtttctgctctggagacagaggggacgagttgtggcatttgggaaactggcctggtcaatcagggatgtggggaatgcaggggcttctgattctcacctgagggcctggagctcagggccttgtagctgaggaaacagactccacgaattcctagtccagaaagaccaccctcctctcagcacccccaagccttgagtccca

SEQ ID NO: 26252 - DNA, 1061 bp, Artificial sequence
  DNA replication origin
ccgcacttcaccacgctggacgccccgggtcgaggcgggcggcttcaggcctgcgaggttcccggctcgctcagcgccctcctcccctccccagtggggcgaggcatcaggttgggtctttcttcccatccttctggacttcgacttggacctgggtgtgcaccccttagatgcggagccctgactccgttactcaagtgcgcagtctggtgaaggaggtgggggaagaagagaggcgctcagatcatccccagctccttctctttcttttttaaaatttaaaaggtttataaagcaaacaaatcacagtaagctaaggttaatttttgattcaggggcacatgtgcaggtttgttataagggtatattgagtgatcccagatccttttttatagtcaccgctgcccccccaccccacctcagcctgggaggtgcccaatagccactgactccagggcactgggaggtgcccaatagccactgactccagtgccacctcccccaccagggagtagctgtgagtagagcacatttgggtatgatggactgtggacaggcctggctaaggggtctagaactagaatagatattggcagtgtgagaagcctggggggctgggagtggagaggatcctggatgtgggatttgactaggcagaaagggttttacagcaagcaggctgttcagggcctggttacttgtgcagggagaggccttggttgaagacatggggctgaggagagagtcaggaacacttggactataggtatccctaaaatgtgtgccaatgccagtccgtgtaagacacaggtcataagaaatggggtggaagaatctagaggtgtagaagtgttgggtctgccctgaatagcttatagtttggttggagagataaagggccagcccataaattgctgccaataggcaagatatggtgaggcccatgaggtggttgagaaggggacagtatgcaaaaaggaaggacctctttcttcctaataggccttagagaaggcttcttggagatggtggggcttcagctggcttggaagaaagggtgg

SEQ ID NO: 26253 - DNA, 1495 bp, Artificial sequence
  DNA replication origin
aaggtaattttaaaaacacaaagtgtgaactatttcaaattcctctctagccagtgtgtgtgcacatgcgcatgttgtgtgtgtgagttattcactgtgtatctatccccagagtgctactcaggtcagcaggagcatttttgtgtttcttgaatcacataagcaagtccctatgcccaattagtgtctatggtctctggagaagtccagagaggggccagaggccccagggagtttctggaagagagcaagtggatcctgtgcccaggggaaatgagactggacatggctgatccttggcaagatatctgagacagcaaatgactctcctgccccttctagggatgcttctggccccaggtcctcgctctgtcctgtcactgccccatctttgatcaggccatagtcccaggcaggtccctggactggtgaatacacccatcctgtgtctcaccttcttgaaggctttgtgactttcagactgaagagtggctaaatctatccaggctaatgtgttaacaataaagggaagaaagcatttctctctacttgtggggctttctccccctctggggtacagaatgtacattttaactggggtattctggagacgatgtgtccacttctgctattgctatcaaggaatgccttttatttcagtccaggcaggaaagaggcagtgtcatgtcagaggagggattctgggggcggcagagccaggcagggcacagaaattgcgccatattgctacctagctgggctgttccctcacacatatggtggaggaagggagaagagaggtgctgagatctgggccctcagcaggaaggtgtccctcctgtcccaccagtatggggctcctccaggggtggtacaggccagcagcctgagcaccaaatccttcccatcttagcggctccagccagtgtggctgccacatgcagggactggaacccacacgtgcacagctgggggtcatgcagggcaggcaagcgactgatggtgacaaagacagtccctgacgtgcctgccgaatgtctgccttccccaggacacccgccttggcgagcctcccatccgcgattcacgcacaccttcatgcacactggcacgctgaaacccggactgaggttactgcgggcttggggcttccggagaagacgcaggggcagggcctagaaggaggggccggaggagccagggagtcctggcctgagaggaggggtaggagccgtgggtggggcaggttccctaagcggggagggcgatgggggctgacactagggggtgtcagggagcgaggaaattgacccggcaggatgagggcgtggcgaggggggcctggagcttggcgaccccgggaaggggctccgggagggtctggggaatgaatggggcaacatatggcggctactggggatacctggggcggggagggtctgggagggtctgtgatacggatctgcggagctgtccgccctacctgtccggggag

SEQ ID NO: 26254 - DNA, 2010 bp, Artificial sequence
  DNA replication origin
ctccgcgtcgaagcgctcgaaggggtggctgggccggaagacctggccgccgggcggcggcagcgtgggcagccgcaggcgggggctgactccggcgatgtaggcgccccctgccgccagtgctgcgaaccagcagatccagatgtagcggaacttgatgacgccgcagggcagcaggcgctggaagagcagacgcgaggtgccagccgccgccctccgcaggccgcggagccgccggtgcagcgccagcagtagccgccggggcgcgctgccctcccaccggccccgcgcccggcgcgcacagccgcgcgccaggtagcgctcgtggagcacggcggaggcgggcagccagaccagcgtgagcgccaggtgcaccagcacagccgtgcccatgaagagggcgaggcagcgaacggccggcaggcggctcaggtagctggcatagaaggccgcgctcgtggtgaggccggagaccagcagcaggtagccgaagtggtgcatggtgcggcccacgcgctgcgccagcccccccgacggcagctggctcttgctaaggcgccacaggtcgaagaagatgagcgtgtggttggcgcagacgctgctcagcaggaggagggctgccagattgacgaaggggaagtaggccatgcggaaggccacctggtaaaggaagaaggccaccagcagtgagcccagcacccccagcagcaccatgagcgtgaggaagagtgagcgcaggtacagggccatgccgaagaagatggcaaccagagccagcaaggggtacaccgtgtcctggaccaggaagtgcctcagcagctcctgcttgaggcccaggtccatgccagtgacagaggtgtagttgtcagcaagcccccagggggtggccagccggtccaggtagatgtccatgagggaagcaccctttggggtgggcaggaagagcaggctgtacttgagggaaggcacctggtagtcagtggtctggggactcagaaagtccctgtcaagcagaaagtgcaggagttggtagatggcactactctgggagcacttggtgggaacctgggcacagcgtggggacttgttctgcccaggtcccagacaagagggcaccaaggcgccactgtggtagtagagggcacaggtccgaagcagggccagtgtgcgggctgcgtcagcttgggtagtgtccaggcaggaggagcggttggagagcacagccagatagttgcccagggaccagctggggcagcactggttggctgctgtccgctggcacagagccccgaagctggtatgggagcggatctgtagggcacacgcaggaggggagagttcaggggcagcccaagggctcaggttttcccagtcctatacaaggctctctcatctcctttcacactacagggcaagcgcagagagggatcttgacagcctggtgagataggcttgtctcccagctgcctttggctcctggcccaggtgccagcagctacatcttgacttcatcaaagaggagcctcagggatgctgcccaaggcttcagcctcagagaccctgctgtaagggcccctgtaggtcacacaccccaactccatgtaaaagtggaggtagcagccacagatagaacagggccaagggtccaatgagctgaagcaagcaatgggaagagtggaggccaaaacattccaggttcagggtcactgccaaaacccagctcccctctgtccactgcaccgcttaaaccctcttaggcccagggctgtttctttttcaaatctcatgcctccttttttctcctttcctgttgttgacatcacaacagctgacgtagtacagagagcactgacctgggagtcagaggcccttgctctgccactaactggctgcgtaaccttgggcctgagatcatggtggcaacacagtacttattgagagattactattgccagtcattatgctgtattttttcaacttctatctcatttaactgtcacaacatccctg

SEQ ID NO: 26255 - DNA, 1071 bp, Artificial sequence
  DNA replication origin
gcagcagctcccttggggaggcaggggctggtgggggccgggaacagcacggaccatcatggagctgcagatcctcagagagtactgagggccggtgggacagcttgctggtggctgtgctggtgtcaaagctggggctccgacgccgtgccaggggctgtagctcatattgctctgagcaggacccgggcatccctcccactgaccctggtcgtgggcggcctgccttctccccaccagggtccccagtaccagcatcccatggcaggtgggcacagggccagaggatctgcccacagttcttctctggcccgaagaaacagcagagagattggaagaagaagctggcaaagccacaactgacgcatttgaccatcatgaggatgatgcccagcttgcgatagagcagcactgtggcaggcagcatgagcacgcctgccgcaaacagggctgcagcccccacggctgtggcgcagctggtctggcgcagagagaaggccacacggctcaggcggtcagggtgtgggcacaggtgataggagatgcagtagttgacagtgaagtctactgagaggcccactgaggcagagagaaacagggcctcggcagtgttgagctgccactcgaggagaaccaggagtcctacagtgagcagcacggtgcctgccacagctgccacggagaataggctgaggggaacattccaggtgcccaggagcagtgtggcaaaggccagcgccaaagccaggcccagcaccacagcaggctcagtgctcaggctgtgctgcaggctatacagctctagacggctagtgaaccaaccacggcggaggcctggaggtgccatgcccagctccgctgccagccagtggctgacctcattgtagaagagctgggtctggttgtagtccggactgttccggaagttggtctggaattgtaggaccagggcggccaggctgccatgggcatcaaagcggagtcccaggtcctgggtgccatcggggccttgctccagagccatcattttcaggcagtgcaggaaaaactggggggcccaggggaagtccg

SEQ ID NO: 26256 - DNA, 2404 bp, Artificial sequence
  DNA replication origin
aaggtgagctctttgagggtggtgttcaatttttcttccacacctctgtccccttgtaataccatatgcaaagtaggtgttcaataaacatgttgatgccacctggtgtcatgagctctcacatgggataaaacttccctaccaggaagtttgggaaggaggaaccagcctttggtctgcttaacgctccacagagagacttgtccttaaaaagctggggaccctaacctgggaagcagcttcagactcatacacttcccaaagggcaggtctgagttcctgccttgattggatttggcttcacctcttctgcccctcagtacctcttctggtggggcctcttatacactgtggctgtagaagaggcacggtcctgaagcctgggaatcaggtcagctaggacgccccagggccagcagacatctcagccagattccagagggaggcacgggggagatggagaggaactcctgggtttttttggaatacagctctctcaggaagtggaggcccaaagagggtggctggattcagtcagagacaccagagaaagcagattggaggagggtgctagcggtgaaagaaggcaggtagccaaagggaaactggaggttgtagtggtggaatgaaaccgctctgccatttagtggctaagtgaccctgaggtcagttcatcttacttagtctcaatgtctttacctataaattgggtgtcaaaagaacctgaccaatgtcaggctaccctgtagtgaagtagtgagatagattccaaggagactaaaatgtgcagagatggaaaggattattactgtttattaacacaggaaagcacaggagcctgcttccaaagagggactgtcccgtaattgagagatgctccaaggctgaccatcctccttctcctgctgcacacccagcagccatctatggctggatttggagaatttctggtcaaaccggtgagtatgaggagagcagggcagttggggagagaggtcccagcccaattctgcccagagaagctcccaaaagagagggaagtgtcctgatgaagagcccatgaaaggggtgagacccaggaggctgtggagattgctgcgggctcctctggtcagtaaggaaccctgacaagatccctaggatgggggtcccttagtctcactgaagttcttgtaacttgggatgggggccaggtcagcctcctctgatacccgaagctacacatctggccttccccacttctagaggaggggtcttagatggtgctgtgggagcagacaagccctcagcaggtcgcaagcaggtcccctccaaaacccctcctgctggaatcctccagatgtgaggagtaggagcagacagatcaaggctgggacatctggcagggtttaacatccacagctggagggtgagacctctccctgtggatctggagaaataccttcgggctccagcctattgctgcccttgccttgtcatccatgacagggttccgcgccctgtccagcctccccgggtccccctcagctgctatagcctgacgtgtgagtgctgggcctgcgcagccaaacatctggcaggtctggctggctattgggcagcaccacagggctgccatcccctggcccccctcggcccttccaggacaagctgctgtgatgggaagcgggcaatgatgggtcatacactgtctccctcagcgccagccacagggtgtcccgcttcccattgagctggcctcgctcaaggactggctgcccagtgtcatccaggtcatctggggacacacccacggaatctggtacacgggcactgggctcagaggtgcttaggcaggtctcatcagagacgctgagcccctccagggtgctggctgaggaacagaagccatcaggaggatctgcagccttggccttaggagagtgggctggggcttctggtgaggctggcaggggctcagcctcctccccttgggagtcctgcctggcccgggttttggggctggggccagcctgcttatagggggaggaggtctgcagggcagggcactggctgaagactgcctggtggtccagcagcagctcccttggggaggcaggggctggtgggggccgggaacagcacggaccatcatggagctgcagatcctcagagagtactgagggccggtgggacagcttgctggtggctgtgctggtgtcaaagctggggctccgacgccgtgccaggggctgtagctcatattgctctgagcaggacccgggcatccctcccactgaccctggtcgtgggcggcctgccttctccccaccagggtccccagtaccagcatcccatggcaggtgggcacagggccagaggatctgcccacagttcttctctggcccgaagaaacagcagagag

SEQ ID NO: 26257 - DNA, 1103 bp, Artificial sequence
  DNA replication origin
tcgacgctgccggggggagaggttccccggcgctcaggagccctccaaggcccccacccctaccactccctagaggaaagactcccccaagggctggagctccaagccctccccccggcagctgcggcagcctccggctgaggtcaggctccacctcctttctccagagggagagcgtggagggttgtttgttgttggggtgtgagagagagaaggttcgagatcacctggcccggtgggcacggctccggagcgggagcgggagcgggagctgggccgggtgggctggcttgggcaggagcccgccgcaagggcgaaggactcccctcgcccacccccaaccccggctccgagcccgcggcctgggcgccccctcgtcgcgcccccgcccggctctccggcccgcgtagggtgccaggacgccccaggcagagggcctgccttagggttaccacggggagccaggctttcctgctctccaggagcctgcagtcggaggctgggatgggctggggctagagagacaagtagacagaaaacagagtgataactttatgacagcaacacgtaatggctgctgaggacgagggaaggctgccagggtctgcccctggcaaggggctggggtgaggtgcggggacgttccaagaaggggctaagccgagagcggagcctgaaggagcaggcactcttcgggcaggctgccataggtaggggaaagatgaggacaccccaagcgccgagtaccagtttcagcaaaggtgcagagctgtggtataggggtgaggcagcagatgaggctggagaagtgggtagggccacctaagctttgtaaaccctgccaaggagctctgtcccaaagacgttggagaacatagaaggattttgaggaaaggaagcttctggtctgagatccaagaggcgagttgggggagcagcacgcggggtgtgagttcaggcaggaggatcttgcatctcagttccctcgcagtgctcacctgctccagggacgtctgacctcgggtctcgccctccctcccaggtgggtgttgggcggaaaaggtctgccctaggggaaagagagccctcttttagcgctgtcc

SEQ ID NO: 26258 - DNA, 2143 bp, Artificial sequence
  DNA replication origin
gaaccttctctctctcacaccccaacaacaaacaaccctccacgctctccctctggagaaaggaggtggagcctgacctcagccggaggctgccgcagctgccggggggagggcttggagctccagcccttgggggagtctttcctctagggagtggtaggggtgggggccttggagggctcctgagcgccggggaacctctccccccggcagcgtcgaccctcccccagcgaagggaggaggggcagagggggggtggcctcagtgagtgcccacttccgactctgtccctctctcaggctgcagtaccctcggacacctcctcccccacttacacccaccccctccttgaactctgcagtcccagaggcagggtgagactggggaccaagtgagcccaagggctaagatgcgactctgctgggctcccgggagcctggggggtgcccatcccccaccacttgacggtagtcgggggtgtgggcggggtgagaaggaccccggggacactccgattaggtctggagacagcctgaaatagggtgtagcccgcagttgttggggctgcggaggaggcgactggggtgaggggcagagaatgcaccccaagagaaaggcatagggccccaaagagggtaggagacgggattcagagagcgggaaggagaatgcagaaacagcttttacggggagaggcagactgcaaagacgtcccctggccggcaatctggaggctagcgctgggcagatgggggttttggacacagcgccatggacatgtgttccccaaagtctgagcgcatgcagcccccttgttccttcttgtgcggagactgagtcccacacagtccctacctcaccgggacctccccacccccaaggccggggccgtagttgccttcaggggagggagaggtcctgttcctcactgggcactcaacagctggctccttggtggtaggagggtaccttgcccctccagctcaagagtcaggaggagcacttctacctcctcatccctagggaagagggcccccgcaggtaaagaccagacttctgcactaggatttgcctggggggcaaataatttctggagatccctttaaggaggggtgttccaatccctttaagagggagtgggtcacagcaaaaggactataaaagtccagctttctttattcccccaccccccaggggcttcctatgatgggggagggggcaagtgctgctgccgcatttaattgttgccttggtgtccctcccccaaagagctgtgcccttcagttcgtccagtggggctgaggagccgggtggctcagtaagtattgtggggacctagacttcaggtgctctgggggttgggacaggggctgccccacttccaggaaagaaggtgggacctgggcaggggctggagggaggagaaagtggtcactgccaccactgcagggactgcactgccgttggggtgccctgcctggtgccaggtggttggatctcaggccaggcggtcttcggggactgcagcgggcagtggcggggaggtgctggggctgggctggagatgaccgagcagccagtctgtcccggctgtcagtctggttgtgtgtggtgggggaagggtgcgccgcgtggtctctctggccctggatgttttactctagggcatctccctctgaggcagttaacccttcccgatgggtctggaggtgtctggggagagagagcccctgcctggcagcagcccgggaaagactccggagacccgatggacccattcctctttctacaccaagtgccaaacccttttttcagtgggagacctctgggctgccaaacataccagggagaggaaaggtgatgggccccaggcgttggcacagctgcccagtgaagtggggtggaggcagcattcactcaggaaaggttacaggaccgaaggaaggaggaagaggtggagccctttccagctgtggaagggctttggactgggaaagaaggaggcccagttgcagaggtccctgaaagttgggtgaaggaggctaggagaggccaaaagttccctttgggggacaggcagggtgtagcccctgcctattctttgctggcttgttttaacaagcaatagggaggaaggggggac

SEQ ID NO: 26259 - DNA, 719 bp, Artificial sequence
  DNA replication origin
caagtgccaaacccttttttcagtgggagacctctgggctgccaaacataccagggagaggaaaggtgatgggccccaggcgttggcacagctgcccagtgaagtggggtggaggcagcattcactcaggaaaggttacaggaccgaaggaaggaggaagaggtggagccctttccagctgtggaagggctttggactgggaaagaaggaggcccagttgcagaggtccctgaaagttgggtgaaggaggctaggagaggccaaaagttccctttgggggacaggcagggtgtagcccctgcctattctttgctggcttgttttaacaagcaatagggaggaaggggggacagaggtggctcagtgagctggcacaggaggaacacttagtgcctttagccagcccgtgtccccgcaccatagcccactcagtcagagcctcctggggcagcggacaccgccacccacactggaggctctgaggggagaactcctccagcggccaggcaggcacttggtgggctgtcatgactactctgcctcctctccggttggtattccttcctttccctcccactgagaccccagataagacaacactcccctgctcaccccagggccctctaatgccaacaccaggaagacacccaatcctgccacctcgtcctgctgccatttcctcggctgaacgtgggcttcctgccacttaggtctccttc

SEQ ID NO: 26260 - DNA, 1343 bp, Artificial sequence
  DNA replication origin
gcccttgcctcatctttccgacttccctgcctgccacgtctcctttcctttccagcaaggtcggtcctggctcggtaacccctcacccgcatctctttttcctctttctgcccttcacctaccgcccccaaccccagctcctaattcaccctcttcagaagcagagtgtggagccctcatccatttccagctgacagcagagcctggtctgtgagtccttgacacccacacaccctcttccaccaccgcggggaacatcagagctctccgggggagggagaaaggggcgggcagcctgacaggagcggctggactccctccctcgcgtccccaagctacgggagaaccaagtgtagacacttacctggcttccccctagtcaccaaatgctgtggctccgtctctcacccccacagacgtgccctcccaagcccgagcacgctcgcggggtcagtggggtgggtgggcacagcaggctaagggcacagagagagatgggaagtccctgttaggtgcgggaaggagctgtgtcttgggcacctggtggtgccagagcccgcctaggacttcactaagcccgggatatgcacacagtaggttctcgagaaatgctgagttcacccctgaacaaagcctcattcccaattcaggcgggggaggggagctttaggaggtaaaaggagcagcggcagaaagggtagtgtcaagtcaccagagcgctggagcagcccagggaggggctgggccccaggaacgccttgggcagagagaggcacccagagtgctgaggctgcccaggcaagcaaggaaaacccagccttggagtgtggcccaggggcttcggaggggctcctcctgcaccacacacagcgcccagcctttcctagaccttgggactccagcgctcacccaggcagccttttaagacaatcagggctgctagccaatatggctgggaaacaacctcccccagaagcagttccccatctgcctccagagctgtccagggggcccagactgtcttagctgtttggggggacacacttaaaggaggggccccctcagcagggaaagtgtgtgaatggaagctaaaagctaaaactgtggcacggaaatgtctcgaaggtccaggttctcccactgccacttctcccacctcccacccttggggaaagcaaaaccccaaagctgtaaaagtaggacgctgaaagatttctccccttcctggacaggacagaggttcccggcagcgcccccccaacacacaccaggccagccctactccccacctcacagaattccccctctccctgtcccagtctggcccataggcaaattaaccc

SEQ ID NO: 26261 - DNA, 1265 bp, Artificial sequence
  DNA replication origin
ctccgaagcccctgggccacactccaaggctgggttttccttgcttgcctgggcagcctcagcactctgggtgcctctctctgcccaaggcgttcctggggcccagcccctccctgggctgctccagcgctctggtgacttgacactaccctttctgccgctgctccttttacctcctaaagctcccctcccccgcctgaattgggaatgaggctttgttcaggggtgaactcagcatttctcgagaacctactgtgtgcatatcccgggcttagtgaagtcctaggcgggctctggcaccaccaggtgcccaagacacagctccttcccgcacctaacagggacttcccatctctctctgtgcccttagcctgctgtgcccacccaccccactgaccccgcgagcgtgctcgggcttgggagggcacgtctgtgggggtgagagacggagccacagcatttggtgactagggggaagccaggtaagtgtctacacttggttctcccgtagcttggggacgcgagggagggagtccagccgctcctgtcaggctgcccgcccctttctccctcccccggagagctctgatgttccccgcggtggtggaagagggtgtgtgggtgtcaaggactcacagaccaggctctgctgtcagctggaaatggatgagggctccacactctgcttctgaagagggtgaattaggagctggggttgggggcggtaggtgaagggcagaaagaggaaaaagagatgcgggtgaggggttaccgagccaggaccgaccttgctggaaaggaaaggagacgtggcaggcagggaagtcggaaagatgaggcaagggcgggaggggcttctcagcagtcggggcccttttgcaggagtctggggccctttctgcaggaaaggggggttgttctcgcttgattttcggctggtcttcctgaagctttgccctgggggcagcagcctccggcgaggatggggtgttcctcggcccgcagttttctccagcgcgtgctggggaggatttgggggaaaggggatgcggaggggtgatggccagggcggggggagataagatttttccgggggggctagcagctgggagattggggtcgagtcaccgtgggatacgggctcaggttctgaagacgaagagaaaaatccaagaagccggcaaagaaaatcaccccttgccaccacccttggcacggcacccctcccccaaggccccaccactccccgcaccgcctcccccggc

SEQ ID NO: 26262 - DNA, 1331 bp, Artificial sequence
  DNA replication origin
gtagacccgactcgatcgggctgagaggaagggaggcgccgaagacggaaggggaccggttcgaaaagcgagtgtgggccgcgggaggccctgcggggaccttgcggggcggcggccgagtccgaggtgtggcggggggaatcgaagttgtcagaccgcctccaagtgacagcgggaccctgtgctcgcggcccggcctggtcttgccctgctcgctccgccgcctctcttctggggctgggggccgggtcaggtcgggcccgaggggctcgcttggcggtgaagcgccggacaaaggcggcgccggagcgggcgcaggtggtggcgtcggggaggggagcgggtccgaggcacccactccgaggggcgggcgacggggccggactctgccccggggactgcgggggccggggcgcccgccgggaggagctgcggcactggcttgccgctctagccgctcgctgttggcctcgaggctctgggaagtggggtctacttgccgggggccgaggggccggggtgggggtgtatgctcatgatgtgccttggctggtggcgacggggttgctactcaccgaggcgacagacccagtgagccgctgtagagcctgtcaagaatgaggggtttttcaacaagcagagtctgcctacaggcagaagtctaaccccacctgggacatctcctagtcgcccattgtcgacagtgttagaagtgcagaagactagtttgattaggacaagagacaccccaccccgtgggctcccgccagccctccgcagctgcctccagcacttttccttagccacaaaggtacccacttagaaaaatgagaagctgagtttataaatccaggcaggaatttaataatgaaataaaaagctttccagtccttttactttgtgccacctgagactttcctccctactctcttcacctcgctgtcttccacaaaaaaaaagaaaaagggcccagagggaccacatgtcttggaggggcaccactgtccttggccagcttggaggatgcttaggaaccactggcttaagctgtgagtgcctccatctcccccggtgaccagctgtgagctggatgttgtttacctgcttggaaaaactcattcagagctcccatgccctccatgtgaaccccacacccaaaagaagagttgggatcataaggacagggaaactcaggctgtttcagaatgtggattttgctgagaatctgagttcgagtcccacctcaggtagggctggttagaagccgctctcaactgtggttggctgtaatcccacctgggaaagctgcttgtctgccacttcagagggta

SEQ ID NO: 26263 - DNA, 1291 bp, Artificial sequence
  DNA replication origin
cacgatcaccgcaaacatcagcatggacggcagcagcaggggcggcccacccagccccgcccgggccctgcccagaggggcccgcctcagcgcccggcccaggggctcggcgccatttggggccgccagcggggtcagcgggcgggggaacatggtgctcaaggggtgggggcctgcgcgggcccggccgatccgagggcggcctggaaggcgggctcgggctgggggcgggaggagggtctgggaccgggggtagttggggaggggagggcaggggacagccctggcgcgtgtaggggtggccggctcccgggctgcggcgccgaagcgggcggcgggcggcgggcgcggcgagggacccgggccggatgtcccgcccggccgctctccacccccggcctcgcagtgacacaggcgcgggggcgggcccacgccgggggcggggagaggggcgggcgcccctgcggggcgcgggcttgggagggcgcacgcggacccctacccggaagagggcgcctgagtcagggccacccctgtcctctgggcttggggacaaaagctcctgagacctcgaaggcagaaaagactcgaggctgctctcctgcagcgtgtgtcctcagggaagtggacaagggggattcgccacaaactcaggcctgtcctagcccttcctccagcaacgggtctggaggcagggaggcgggcagcgctctctccgagtccagacgtgccggaggctggtctttccagctggaagcggagccctcggtgtgctcccccttgccacccttaactccctccgtcctgcaggtcgtggccactccaggaaggagaagcagaactgtcagacactgaccagtctccatggtgacccttgtgtttagcaatacctggggactgactacagtgcttgtccactgggtaatgctgaaatgtctggaaatggagtctcccctcctctgccttctcctcatgaggcagtgggataactgggcactctggggagggtctgacacattggtccatcagctgctggtgtggccaacacacatttggaagggtgaggagctgggggcacaaaacagcagggaaacagcacgtagtctccttgcctggagctagatgtgtgctccatggcaccaggctggtcacttgggcggacagcagacccgaagtgctttggatgtcagcaaccaccatttcccactgggaacctggctcagtagccagacttggtccagctatgtgcttgctgcctgcagagagccagcaagcctctgaagcagcagag

SEQ ID NO: 26264 - DNA, 1781 bp, Artificial sequence
  DNA replication origin
acgcgccagggctgtcccctgccctcccctccccaactacccccggtcccagaccctcctcccgcccccagcccgagcccgccttccaggccgccctcggatcggccgggcccgcgcaggcccccaccccttgagcaccatgttcccccgcccgctgaccccgctggcggccccaaatggcgccgagcccctgggccgggcgctgaggcgggcccctctgggcagggcccgggcggggctgggtgggccgcccctgctgctgccgtccatgctgatgtttgcggtgatcgtggcctccagcgggctgctgctcatgatcgagcggggcatcctggccgagatgaagcccctgcccctgcacccgcccggccgcgagggcacagcctggcgcgggaaagcccccaagcctgggggcctgtccctcagggctggggacgcggacttgcaagtgcggcaggacgtccggaacaggaccctgcgggcggtgtgcggacagccaggcatgccccgggacccctgggacttgccggtggggcagcggcgcaccctgctgcgccacatcctcgtaagtgaccgttaccgcttcctctactgctacgtccccaaggtggcctgctctaactggaagcgggtgatgaaggtgctggcaggcgtcctggacagcgtggacgtccgcctcaagatggaccaccgcagtgacctggtgttcctggccgacctgcggcctgaggagattcgctaccgcctgcagcactactttaagttcctgtttgtgcgggagcccttggaacgcctcctctctgcctaccgcaacaagtttggcgagatccgagagtaccagcaacgctatggggctgagatagtgaggcggtacagggctggagcggggcccagccctgcaggcgacgatgtcacattccccgagttcctgagatacctggtggatgaggaccctgagcgcatgaatgagcattggatgcccgtgtaccacctgtgccagccttgtgccgtgcactatgactttgtgggctcctatgagaggctggaggctgatgcaaatcaggtgctggagtgggtacgggcaccacctcacgtccgatttccagctcgccaggcctggtaccggccagccagccccgaaagcctgcattaccacttgtgcagtgccccccgggccctgctgcaggatgtgctgcctaagtatatcctggacttctccctctttgcctacccactgcctaatgtcaccaaggaggcgtgtcagcagtgaccatgggtgtggggccagcagctggtggggactggtttcaacgccagctttctgtgcttctgcctgtcattcggagaaactctggctctggggcttggggcttctcaggatcctggatggcagagactgccctcagaagttccttgtccagggtgggcacccacagtgactcagaggacagggctaggcaggagacctgctgctcctcattggggggatctcttggggggcagacaccagtttgccaatgaagcaacacatctgatctaaagactggctccagaccccgggctgccaggattatgcagtccacttggtctaccttaatttaacctgtggccaaactcagagatggtaccagccaggggcaagcatgaccagagccagggaccctgtggctctgatcccccatttatccaccccatgtgcctcaggactagagtgagcaatcataccttataaatgacttttgtgcctttctgctccagtctcaaaatttcctacacctgcc

SEQ ID NO: 26265 - DNA, 918 bp, Artificial sequence
  DNA replication origin
cttgggaggctgaggcatgagaattgcttgaacccagcagacagaggttgcagtgagcctagatggtaccactgcactccagcctgggtgtcagagcaagactgtctcaaaaacaacaacaacaacaacaacaacaaaaacaaacacagaagaaaaagaaaaagaaatgggattccaattccttcagcagaagcagcaggaactggaatttgttctgtagactgtggcaggcctgctggacagaagagggtcctgccaagtctctggactccactgaccggtttgggagcacacatgaggatgcaggctgggattggggcctggagcagggcagcagctggagtctcaacatgcggacaccagcaggacacacaaactccatcaggccaacatcaggagaagattctgtgctgggctgggccagtgatcccagattcaagggaggtgggggccccactcaggagggaaggtctgagtcagggaccatggagacaaaaaagctggagggcagcatgtgggggcatgttaaggatggagattagtgagcatggggaatagagagacagaaataaccacagaattgtgaagtctaagaaatgaaggcgaggatagctatgagagttgaattctagggttacagctgaaggagctgagtgatcctgggctgatggtggatggtagttacttttaatgaagttgctcaggcatcaggattggggctgctgatgaagggactggggtgttggaaggagattgggtcatacggaaaacagggtgatggtgaggcagaggagaaagcaggacaaagaccaaggtctatggctaaagccagaggcccgaaaaaagagggcccaaacacgtgtagggcaaccccagatccttgcagagggacattcatcaggtgggatgtcagagcca

SEQ ID NO: 26266 - DNA, 1837 bp, Artificial sequence
  DNA replication origin
ccccacctccctcccggacggggcggctggccgggcggggggctgaccaccccacctccctcccggacggggcggctggccgggcggggggctgacccccccacctccctcccggacggggcggctggccgggcggggggctgacccccccacctccctcccggacggggcggctggccgggcagaggggctcctctcttcccagtaggggcggccgggcagaggcgcccctcacctcccggacggggcggctggccgggcggggggctgacccccccacctccttcccggacggggcggctggccgggcagaggggctcctcacttcccagtaggggcggccgggcagaggcgcccctcaccccccggacggggcggctggccgggcggggggctgacccccccacctccctcccggacggggcggctggccgggtggggggctgacccccacctccctcccggacggggtggctgccgggcggagacgctcctcacttcccagacggggtggctgccgggcaaaggggctcctcacttctcagacggtgtggctgccgggctgaggggctcctcacttctcagacggggcggttgccaggcagagggtctcctcacttctcagacggggtggccgggcagagacgctcctcacatcccagacggggcggcagggcagaggcgctccccacatctcagatgatgggcggcctggcagagatgctcctcacttcctagatgggatggcggccgggcagagatgctcctcactttccagactgggcagccaggcagagaggctcctcacatcccagacgatgggtggcccggcagagacgctcctcacttcccagacggggtggcggccgggcagaggctgcaatctcggcactttggggggccaaggcaggcagctgggaggtggaggttgtagcgagccgagatcacgccactgcactccagcctgggcaccattgagcactgagtgaacgcaactccgtctgccatcccggcacctcgggaggccgaggctggcggatcactcgcggttaggagctggagaccagcccagccaacacagcgaaaccccttctccaccaaaaaaatacgaaaaccagtcaggcgtggcggcgcctgcaatcccaggtactcggcaggctgaggcaggagaatcaggcagggaggttgcagtgagccgagatggcagcagtacagtccagctttggctcagcatcagagggagaccgtggaaagagagggagagggaaaccgtggggagagggagagggagagcgagagcgcatcagagtattttaacagcagaattgatcaaacagaagaaagaattagtgagtttgaagacaggctatttgaaaatacacagtcaggccgggcccagtggttcatgcctataatcccagcattttgggaggctgaggtgggcggatcacctgaggtcaggagttcaagaccagcctggccaacatggcaaaaccccgtttctagtacaagtacaaaaattagccaggaaatggtggcatgtacctgtagtcccaactactcaggaggctgaggcacaagaatgacttgaacccaggaggcagaggttgcaatgagccgagtttgttccattgcactccagcctgggtgacagagtgaggctctttaaaaaaaaaaaaaaaagtccaggcgcagtggctcatgcctgtaatcccagcactttgggaggcggaggcgggcaaatcacctgagatcgggagttcaagaccagcgtgaccaacatggagaaatcctgtctctactaaaaatataaaattagccgggcgtggtggcaaat

SEQ ID NO: 26267 - DNA, 891 bp, Artificial sequence
  DNA replication origin
cccggccagccgccccgtccgggagggaggtgggggggtcagccccccgcccggccagccgccccgtccgggagggaggtggggtggtcagccccccgcccggccagccgccccgtccgggagggaggtgggggggtcagccccccgcccggccagccgccccgtccgggaggtgaggggcgcctctgcccggccgcccctactgggaagtgaggagcccctctgcccggccagccgccccgtccgggagggaggtgggggggtcggccccccgcccggccagccgccccgtccgggaggtcaggggcgcctctgcccggccgcccctactgggaagtgaggagcccctctgcccggccagccgccccgtccgggagggaggtgggggggtcggccccccgcccggccagccgccccgtccgggaggtgaggggcgcctctgcccggccgcccctactgggaagtgaggagcccctctgcccggccaccaccccgtctgggaggtgtactcaacagctcattgagaacgggccatgatgacaatggcagttttgtggaatagaaaatggggaaaggtggagaaaagattgagaaatcggatggttgctgtgtctgtgtaggaagaggtagacatgggagacttttcattttgttctgtactaagaaaaattcttctgccttgggatcctgttgatctgtgaccttgcccccaaccctgtgctctctgaaacatgtgctgtgtccactcagggttgaatggattaagggcggtgcaagatgtgctttgttaaacagatgcttgaaggcagcatgctcgttaagagtcatcaccactccctaatctcaagtacccagggacacaaacactgcggaaggccgcagggtcctctg

SEQ ID NO: 26268 - DNA, 1003 bp, Artificial sequence
  DNA replication origin
gtgacgttttccaggtacagaggggaggtccaggcagaagcgcaggtagaaagtgtgaatatgctgagcgtattccgggagcagcaagttaagccggtgtgaccggagggaaatggaggcctggctgccggacggtgagggtgactgcgcgagcgtccgcccaagaagtctccctgccttcccgcctttcccctgtcttgggccccttcttgctttcctttcgcgctctgtgctgactccgcccctccggcggcgcccgtggccccgcccctgagggaaacagacaaggggcggggccggcgcggtcatctctctgcgccttcccgcagggcgccgagcacctggcgccgcctgcctgacgtcacggtcactgacagcgtgagcccgcggcggctgctgccatggtggctggcggccgggtaagggtctgagtggatctcctgccaggccagagcgccttcgggggccgcggcggaaggccaggagtttgcagccagggcgccgggtttgtggtctgcagtgtcgtgaggctgaggtgggggttgaaggcccagaagccggactctgtgacccgggtcggggggtgtactggaggggcggctacgtccaggctgggtgagaagagaggcagtggggcccaggaggctggaggaagccttagggttcagactggggtgcacgtagtcgagagctcagggtttgggcaaggggatacctgccggggttcagccttgagggtgggtttaccgggttcacgaatctctctctctccttacccccgcccgcccgcccgcctgcctgctcccggtgacttctgctggccgcaggtgcagcatgtctagactgggagccctgggtggtgcccgtgccgggctgggactgttgctgggtaccgccgccggccttggattcctgtgcctcctttacagccagcgatggaaacggacccagcgtcatggccgcagccagagcctgcccaactccctggactatacgcagactt

SEQ ID NO: 26269 - DNA, 1358 bp, Artificial sequence
  DNA replication origin
agagctcgctgagtcccggaagccgagctgagcccgcttctccactccctctccccggccaagggggcgtgtctgggcgggttcccggtccagtccccggtgggtgcagcccaggagggaggcatgaaggtgcagtcgcagccccctagggcctggtcccggctccaagtcgccaggcggccggtactcaccatgcggatctgggtgctgatgagcaggtagggcatggtgcacgcgtcccggcctggctcccaccgggggctctaggctggacgccgactccagcccttctcgcgtcgggactgcgacgcgcagctgggagtcccgttactccggctctggccacaggcggcgtcaatcccggggcaccttgcccgtgaccgccgtggccgccaatcaggagcggctgccgtgacgcgccctgcagtcggcggttcggggcccgcccccgccctcccggcggcggacttggaccccggggcccacctgaggcttccgccgagtgatccagttgcgggaaggtggagtgcggggaggagggggcggtcccacgacctggaaggacactatcctgaagctccagcgtcctccaggacgcttagtgctgttttctttgcagcctgtgatcttactgcgtccccgcgcgcgtgttgcccccgcgcccgcttcttgaacacttcaggccaggttccaaagtcccctgccaggcagagcccagagcaaacggcgtcctcacggaggcctctccaggccccagcccacccctctcagagacgcctcgacagcttcaacggggccccacttcccctcgccaagacatgcgctccagagattccttaagcgctgaggaggccggggcacgaggctcggagctagccctgaaggcgacaactaaaataccacccagggcgcactgtgcattccccctcccagactctaattccagcacagaggcggatccttgcatttctgtggacccgcaggaaagtctgtaaaggaaccgcgcgcttggctgggtgccaggtctggagtgactgaatggatggaacctggccttccctcccctgagcttcccgcgcagctggacagacgcggcgcacgcgcaggaggtcactgggcaacacctggggcaaatgaaacaacttcccccgcaccagccaccaatgagcggctgcgagttcccaaccgtgtgtccacgcccctcatccgcagttatcaaaatctgacaactcatccttctttatctgccttgttgtgattggttttcttttttcttttcttttttttttttttttttggacatggagtttcgctcttattgtccaggccggagcgcaatggcgcgatctccgctcacc

SEQ ID NO: 26270 - DNA, 896 bp, Artificial sequence
  DNA replication origin
cacgggcaaggtgccccgggattgacgccgcctgtggccagagccggagtaacgggactcccagctgcgcgtcgcagtcccgacgcgagaagggctggagtcggcgtccagcctagagcccccggtgggagccaggccgggacgcgtgcaccatgccctacctgctcatcagcacccagatccgcatggtgagtaccggccgcctggcgacttggagccgggaccaggccctagggggctgcgactgcaccttcatgcctccctcctgggctgcacccaccggggactggaccgggaacccgcccagacacgcccccttggccggggagagggagtggagaagcgggctcagctcggcttccgggactcagcgagctctggccggcctgaagcctttattgccgcgaaggggcccgggtacgtgcgtcccggcaacagggcgacctccgggcgcttccggctcctgtcctacctgtcggcgggagagacccagggagccctggcctcacgcgcagcacctagtgccctgcacagagccgctccgcaggggaaaaaagggcgaataacctgagagaaagaggtttggaaaagataaggacctgccaaggcgctaaaaccccggtgccaagtccttgacccataaacagcaactagctgcacccttaggcacttccaggaagggctatccctgaagctttagggaaggaagaaaagaaagaacaccctgcttggaaaaaaggaaggcgagaaggggctgtgcagttagaggtgggaacaccatgagttagaagtcacgttcctttctctgggcgcagtttccttatctgtaaaaaggttctgattgcccctcaggagtccccttttagcttcagaaagacatgacgggcagcaaggtg

SEQ ID NO: 26271 - DNA, 1379 bp, Artificial sequence
  DNA replication origin
gcccgctccgcctgcgcctcggccttgcgcgcgggggcccgggttacctgcgcaggtgagttgggtggggccgggtccgccgaggttccggtcccagcttcctgcgcggctcgggtcgcggcttccgacccggtgctcggagagctggggctcggccgccttctccccctggtttctggtgaaactgagtcagcgccgtcggggcggggccgacattcacccttgcgctgccggccccgcccacgcccggtgcgctgcggccgcctctagcgcggagctccaggcccggcccgccccgcggccccgcagccccggtgcctccccggcagccagctccccggaggggctctcgggctccacccagtccagcctcgcgagggagccccgcgcccgaagcgcatacccagccgggaggggatgcggccgggacgcgagggtccggcctctggggcggcggcctccagtcttcctttccggccggggcctgctttcccagccccagacctgaggcccgatgcaaatgatctttccggccctcaggaaatcatttccatttcgtggcgggaaggtaacccaaaagttgcgtggctgcacctgtgataacagggatccgggatgtctgcctcactgtcagctccgggaagccctccctgctgtcagggtgagaaacggaggcgattccccgcgtccaggctcccctgcgtgctccacggggcttccctgttgttcgaggcccctcctcatcttgtatgtacagttcggtccattccctgctatggctcattggactgttgcccccttccctggagcccaggcttcctctctttcacaaaggggacgctgctggctactttcttccagggaaatgtcatccttggaagcctggaggttccagttcaccaagtagctgagttaatgcccttcacgaaacagtggactccttgaagccaagctcattgctcctcctgagtaaaaaactcttaagagaccattctctacggcaagggtctgaacaggtgaaagacagatgaaggcagggctggaggaaggaatcacatagcatgctctcttaaaatacagattccaaaccttttcctgatggcttaacaacccccaaaccaatgggaacattcttcccagtttctcatccagagcagctttgcctagcagatcctgtggccaacccttggattttgctgaactgcaacatcctccagctgctcacatgatgcgtgttggggtgggaatctggggcctgtctccccttctctggatgtttagggtttatccacagaccctggcacactggtggatatacaacaatggtggtatgctgggaatgaagaaaatgattgtgcagtcactgggaagaaagggtt

SEQ ID NO: 26272 - DNA, 971 bp, Artificial sequence
  DNA replication origin
tgtccgtctgtctggctgccgggtccctggagggcgcgtgggagggccgggcccgtgcgccctcttcgatcctggggtgctccggtccctcctccccgccacttcctcccggccggcccgcctcctccaaagtctcccgggctgatcaggtgtgtctcctcctctgtcccctcccttcttctcaggtcaccagcaccctcggaacccagaggcccgcgctctgaaggtgacccccctggggaggaaggcgatggcccctgcgaggacgatggcccgcgcccgcctcgccccggccggcatccctgccgtcgccttgtggcttctgtgcacgctcggcctccagggcacccaggccgggccaccgcccgcgccccctgggctgcccgcgggagccgactgcctgaacagctttaccgccggggtgcctggcttcgtgctggacaccaacgcctcggtcagcaacggagctaccttcctggagtcccccaccgtgcgccggggctgggactgcgtgcgcgcctgctgcaccacccagaactgcaacttggcgctagtggagctgcagcccgaccgcggggaggacgccatcgccgcctgcttcctcatcaactgcctctacgagcagaacttcgtgtgcaagttcgcgcccagggagggcttcatcaactacctcacgagggaagtgtaccgctcctaccgccagctgcggacccagggctttggaggtgaggagggtgccaagatggatgggtttggagagactcaaaaaagggactggttatggggtcctaggggagacgaacatcagagaggagttaaggagagttcacttttttttttctttttctttctttttttttgcgacggagtctcgctcttgtcgcccaggctggagtgcaatggcgcaatctctggttgctcactgcaacctccgtcttccacgttcaagtgattcttctgtctcagcctcc

SEQ ID NO: 26273 - DNA, 1721 bp, Artificial sequence
  DNA replication origin
ggggaggagactggagcaggccccgaggtggcgctggtgcggcccaggacgctcttcctaactcaggctctccccgccccgcccctgcagtgcaagtcctggtggatggagctccggtgcgcattgagctctgggacacagcgggacaggtgagaagctgggcgcggcctctactggtctgcggggagatgggctggaggctgggaggaccccatatggagcaaatggagaaagccttgggctcttggagtctcaggtttccagccccgggtgagaaatggattccatgtgtcggggggctaatccttaccacctggccttcccaccccaggaggattttgaccgacttcgttccctttgctacccggataccgatgtcttcctggcgtgcttcagcgtggtgcagcccagctcctttcaaaacatcacagagaaatggctgcccgagatccgcacgcacaacccccaggcgcctgtgctgctggtgggcacccaggccgacctgagggacgatgtcaacgtactaattcagctggaccaggggggccgggagggccccgtgccccaaccccaggctcagggtctggccgagaagatccgagcctgctgctaccttgagtgctcagccttgacgcagaagaacttgaaggaagtatttgactcggctattctcagtgccattgagcacaaagcccggctggagaagaaactgaatgccaaaggtgtgcgcaccctctcccgctgccgctggaagaagttcttctgcttcgtttgagcagctatggctgcatagcaagtagtaggcaggaggccaaagacttctgagacctggggcacccgggcctttgcggcagctactggcagggcctggccacctcataggactcagttcccttctgaacactcgggggacatgggcctctaactgcccactctgatatgcctgggtgagcctaggagggaaggctctgatttggatttctccagtcaaagctcacagaaaaaaacctggcactttgattttcatgggatggtcctaacagggtcagtcacctccgagcagtttgggaacccagtttcttgtcctgggccctcaggtcagcctggctgaattaggacccttccttggcacaggggtgagaaagagcttggggaacgcttggcattatggagggctggaaggggctcaaccccgatttggagagaagtttgggatggagtgggcgagagattgagagagcgagcaggaaaagaggtcttggagcctgggactgatggtggataaggcctggaaagaagatgacgaggaggaggagagagggaagtggggtggatgaggagcaggctgacacctgggctgccctcaatccccaaggccagggagggcggggctggcccctgggaagaactgggtctctgggctccctaggcactgcccaaactggctgagccaggagtggggcaggaagtgagagtcaaggcccagcaaaaggagggggaggagctgcaaattagaacctgaaggaggaccgggttggggatcatccctttcctcaaggtcacacagcctagaagctagagcagtgcagagtctgcaaataaaaccttaagtctgtgaaggcgtgcgttgtctctgtcatttcctggagcccactcctccctcagaaccctcctcaaggcctaactgcctggctagagacagattggggaccaaaggactg

SEQ ID NO: 26274 - DNA, 952 bp, Artificial sequence
  DNA replication origin
ttcgccgatgggtggggtccggggccgcctgaaacatgtagatgagatgggcggggccctacacaaacccgctggtagcgctgggccgactcgcccagcctggacccattcagtcagaggcagccagcgggacctgcttcaccgagcgcagcgaagccgagacccgggctggcccctctgctgcccccggagcgggccatgccgccgcgggagctgagcgaggccgagccgcccccgctccgggccccgacccctcccccgcggcggcgtagcgcgcccccagagctgggcatcaagtgcgtgctggtgggcgacggcgccgtgggcaagagcagcctcatcgtcagctacacctgcaatgggtaccccgcgcgctaccggcccactgcgctggacaccttctctggtacgtacgttcaatcgcccgtgcggccgcgtggctgcggcggggctgtgcaccggggagctggggcgggcgtctcggcgggagggcgcagaggaccccggggaggagactggagcaggccccgaggtggcgctggtgcggcccaggacgctcttcctaactcaggctctccccgccccgcccctgcagtgcaagtcctggtggatggagctccggtgcgcattgagctctgggacacagcgggacaggtgagaagctgggcgcggcctctactggtctgcggggagatgggctggaggctgggaggaccccatatggagcaaatggagaaagccttgggctcttggagtctcaggtttccagccccgggtgagaaatggattccatgtgtcggggggctaatccttaccacctggccttcccaccccaggaggattttgaccgacttcgttccctttgctacccggataccgatgtcttcctggcgtgcttcagcgtggtgcagcccagctcctttcaaaacatcacagagaaatggctgcccga

SEQ ID NO: 26275 - DNA, 1122 bp, Artificial sequence
  DNA replication origin
ccagattcaaggacgagggctgcccgattatctcgctgcataaggcaagagcaagaggatcctcaggattttaaagaggaggcgacggctgcaggttcccaggatctgtcagaggctggggagttacagcttccattctggggcgacggggaccccgggggggtagcccttttgtaatccccaggccccggacaaagagcccagaggccgggcaccatggcgtccatcctggatgagtacgagaactcgctgtcccgctcggccgtcttgcagcccggctgccctagcgtgggcatcccccactcgggtaaggaagaggagggtgccgctgcccctttcggctctcctagcatttgcgtgggagcagcgaggagggcagctccaagagctcggggtcatcccctgggccgtgccttccgggtctaggcccctgattctcctcaggctctcttggcccccagctggtggatagtcgaagtttgaaagagcaacgggagctgccgcgtgatctaggctctaccgctagggtccttttgagagggaattggggcccagataaggaattactcacctacagggcgcagttgggctgttgggagaacttagaatgggctcccggcttctgctgatgcttttcccaccaggccccttctggaggtgggagggaaggaatggacaaagaaagtggtgaaggcggagtattgcagaggaagaagggagggtcccagagggaattttgtcgctgaacggggaaaatggagatgaaatctttttggccttggctatagctgggtgcagcctggagtttggggacgtttttgtagaaagtagtgagtctccaggagaatgagggcatagggagccctggggaactgttccagtgagtggagttaacgaattggagctgctttcactctagtctttaccttcattcaatgctcaaaatatcccagcacttgccaactctacactgaggctcattaccgcatgggcagggaggggggcagagaatggggctatactacttcagttaagctgggattgctgggccaaagacctgataagggagaatacccagaccaccagtcccgtcccacctccacgcagccccattaccagtgg

SEQ ID NO: 26276 - DNA, 954 bp, Artificial sequence
  DNA replication origin
tcagcccggcccgccgcgtgccaactggggcagtgggactggcagagcctggcagccgtgggggcgcagcccggggcctgaggccaggagggtgttgggggagggagtcgagctaccctagccattcaggcgccgcagtttcaaggaccttggccctacaattgggagtgagctggcgagaaaggcccaggaccgacgggtttcagaggggggccgggatcgatgccgccgctccccgcagatgcgccccggcagggctactctccatctgccgctgctcgcacctgccggtcaataaatcgattttacaatttaatgcagcagcttcccgcccgcctgggacagatgccgcagcagaaccacctccgccctcgcccctcccctcgaggggcgccagcggttagggacgggattcccgctcagcaggcggtgccccgcgtggcctccttcacctctctctggagcccccacaaggaaccgcctgctgagggtttttcccgcgggacagagtgggttccccatagaacaggcctgagactggagagaggagtgaggaaggtgatgacttggtggtggccttgagaactcatctgggggcttcaagggaggaacaggatgcagtgactgatgataagaagggccccggtgagaaggaaggggtagggcatgggcgctgagggacaccgaactctgaagaatcttggtcagggggactgagcagagatggggaggaggcaggaggaacgagtctctccccaccctccaggtgagtctggtgaataagcctgacatggacctgcttcttggcacttcctaaccatgtggtcttgggcttgtaacctaactctagctctacactcagttttctcatctgtgcaatgggataataataatagggatggccggtgtggtggctcatgcctataagcccagcattttgggaggctgaggagg

SEQ ID NO: 26277 - DNA, 1667 bp, Artificial sequence
  DNA replication origin
ccccacggctgccaggctctgccagtcccactgccccagttggcacgcggcgggccgggctgacgcgtggcagcgccctgcggcagatgaggcacgcgccggcctcatttcaatgtgaatggatcgaatggagcagccatgtggcagcaacagtttgcaaatctccacgccttctgtgcagctccccggccgccgctccctgcacgtggccccttctccgcagcgaccgcagcggcgcccctcaaggcttaagcgccccgcccaagccaggcctgcttccccgcccctggtctgcccagcaggcacggtggcccggcccccaccgcgctcctacccgggtgcagtgtgccccgcgaagagcgccgtcccctgagagggggttggggagaggagaggcaaaaccgcgctgaaggtctcggagctgcgcctgcggccgtggggagggcacagaggctacgctgcgggggaggagtcccgaggctctacgaggctcctgttgcgccccaataacctggggtcagcttggggacaccgctggaaggcgaccttagcgcttcccggtcctcagtgccggttcttatggctggaggactatgcgcaatggccaagcgtagggggacagcagaagcagaaggcctctaggggcagaggcggtgggcctttcatgaagccaggcctcgaccctgcgcccgcttccgacgttggggagtgttgagggtgcgggtcgaattgaggaaccctgggcctgcggagggtcagtggtctttcggactctgggtctatctgtgcaccctttccatgctgttgtggagggtctgcgtcaggggcgggggcagccgacttcgatgggggtccagccccacggtgatcggtggcctcccatcccaggaccacgcgtgtagcgttcttccgcccgcaagtccgaaagtcccgagtgggagaagaaggaaggcgcagccccagttttgggctgacagaaacacttgcggccttcgcactgggctccccacccgcagcatgaccctctcctgctcagcaaatgtgggcaaagctcgaccgcagcgtgtgggagcgctcgtaggtacccagggccaagggtggcagtgtcctagcccgggaatgagcttctgggacagcgcctccgcaaataggtgtttcatgaatgtcttttgatgctgagaatttaaccctttcctcttctggtcagagcctttctagatctctgggatctcctgggtgctgcctctctgaagataataatcccaacttttgtttggtccttgataatttgcaaagtacatttgggcacattagtctgggcgtgtatgagggtagagagtgttccagattttccagtattgggagagatgccttgtgtgggactagatgtctcccttgagggtcaggtaagcaggaccagcgccagaaaaggaggatgtttttattaactcctgggccaggatttggagttgagagaggacagggctaggtagggctggatgccagcttggaggggagcaaggggcacccgctggcatcttagagaggcaagtccagggatccatagggtataggcggagagaagatctgggagcccacttgccaggatcgccgggaggcacgccccggactccccctccctcgggcctgggactccgcctgcccat

SEQ ID NO: 26278 - DNA, 888 bp, Artificial sequence
  DNA replication origin
gctgccgcttggaggagtggggccacccaggggaccctctcgggcgagacttgggaagccgcctgaaactcaaacagctccgcaagcctccagttccaccccacatcccgccttatgaggcgaggacccgggccgacccggcctcagtccctcaccttgattctccagtggcctgagccaactctggcgtcaggagagttcctccttgccccagctgagcgacagggcgcggccgggggcttggggctgctggggtggggggaggcagtgggcgcaggaactgaagctggactcaggtgaggggacgcgctggaggcggggccagaacctcattaccatacagctgaggacgcgcccccctcctacctccgggaccacgccccgccctcccccacctcagggaccgcgcgtctgggtctctggcacgcgccaagccctggcagggggcagaagggagaaggcacgcgctgggcacgcccccccttagctagagagggagacgcccaacaggtgcacagagagggccccgagccttagacccttagcccctagccttgctcagagtggccacagagaggttaacgcttctgctggcttccctgctgcgctggggacgcgtggtgggtgggcactcataggttgggggccgttgagacaagggctccagaagctccaggaaggaaaaggagatcggatttccctagcgctggtttttgcattccgggcttaagttctttttacctgctttggaacactaggtaactagcgcctgctgcggatgcacagcctacagggactgcctagtgtctccgcccccaagaccatccccgaaccacccactcacctcctgccccattaccgggcaacccctctatcctccggcggcca

SEQ ID NO: 26279 - DNA, 2170 bp, Artificial sequence
  DNA replication origin
cggagggagctcgggcgtctggccgccccctgccgccttcgtcccatcggccccgaacggagaaagggcggccccagagagcctcccggggtcggcggcccctcccgcgcgcagccccgacggccgcgcagcgccctctagtgccgggcagcggggcccgcgcggtccagcccgcctgcccgcccgcggctccgcttcccgcggccgcggccggagcgagattggggaggcaggaggcggagccgagcgggcgggggagcctccgagaagctcgcggccttcggcggcttcccggcccgggaagtgagccgggtcggctgccgcaaacaggaagtcgggctgtaacaaagagcgcggggggcggggagccgcgggagctgcggggcacggcggcggcaggtggagggctgacccgggcgggcaggcgcacctgccccttccgccgccgcgcaggcctcggggcgccctgggcgcgagggagggcgcagccgcccagggaaggccgctgggacctcgcaggcgcatccccgcccgaggaagggacagtcacagttcccccagtgaatcatttccacccccttcccggaatgcagcaagccacgtggggcggagggctggggccgctgatcctgtggatccagagggagaggctgggagagctgcggcgagggaagctacggagagctctgtgggtcccagtcaagagatggagcatccacaccaccgtggtttagtctggtggccttttctagcctgggatgggggaggtgggagccactgtccttttttccctaccccctgaccaggctgaccctggccctgaggcaggagaggaaccctggctgagcaagcaggataaagtcatttctccttctgcacaacccctccctgactctaccagccgaggggccctggaaaagcagctgtcctcaggtcaccgtggggtcaaattgattctccaggcagggcactggctccaggctgttaaggaactactaaactccgaattccctggtgaaatacccatgcaaattaaaggtgggcatttgctaacctgtggaaggcacctcacagtgagtctagaaccattatctggcctcctttctgccaagcctaggaaatctcctgtaccccaggacactcaagtgatcatgagggtcttgggtgccttacctatcagaaggggctggactctcaggaaatcctggggagaaggggcttcctccgctgtggcctgtttacaccccaagtgcctgcccagcttgtgggatgttgttaaaggtggagcctggcatgagctgcaggtcggagctgcccagaccaagttccccacgggtccccactttccccagaaagccagcttttttggtgggctctccagctccccatctagtgcatcagagcagctgtgagctttgccagccaactcctctccggggctcttctctgcgagtctggcagcctgtgcagcccgtcacagcctggtgttgtggacgtgcagggctgcgggtgtcctacctgtcccccacatgggagcctcgtcatcttgccttcgtgtcccagcccagttcccccctcccgtacacccctagggcctgggagctgctttcctgtttcattttgggcaggaagagtgaggtcgtgttgttcttccccctgctgccggctcaggctgtgggaacggttccctgaatgctttcctgtttgataccctgtgtgtacagtgaagggaacagggagcgatgagtgaggcgtggagcgtgtgcgtgctcctgtgtctctggcataagcacccaggtctggggtgggcatggtgtgtctgtgtcaaggagagaggaaaaaagggagggcaagtagcactccaaacccttggactccattaggagcagggcatctaatgggtctattttgctttactgtggacaggctgagagctgggagcatctgctcagctttttgtcagtggctcattttttcataatttgctctccatggaggagcatattttcggctatagagagggctgtggcaccctagggactatcctgtgccttagaggaagctaggcatgaaactcctagtgagactggaaaccccctcattagtgcctcagcaagagaaacctggactcagggaaggctacctcctcctcccctttctccctgtcttt

SEQ ID NO: 26280 - DNA, 1839 bp, Artificial sequence
  DNA replication origin
caggaggaggggtcactagagacagacaggctagccatgcctggcagggctgtggctctaccctgcagggggtgccatgacacggggcacttctgcgccagagccgacctgttgctaaatccggattcctgtgatgctggttaccatcatgagggtctggctgtagactcacttggcttcttgggccctgcgtcctggcctcagagaaactttggggatgaaggaaataagctgagcccactcttgaccagagtgttaaggggtaccatgccccagagaccagagaaaggtggtaaaaagtcacttgtggcagatctccaaagggaaggtgactcttaaggacttgggggtcctgctgccccttcccacagcaagggcctcccttctacctctgcctacatcagaggaggttgacgtagattagtgatgctcctggaaggcaggagcacatggaagtgatggtgacggaaacctgtgatctcagctgccttgcttggtcctagggctactgctggtgtaacagtaggtagtagacaggcataagcagcaaaggagagggccctcgacccccatcaggaatctcaggcaaccgtcaggtgatggtcaggtggttgttaccctgtctctctaaaataacaattgttgcagcccgcaccggggaaaggcagtctctgaatagagaggaacacctgaaactgatcagcagcttcccgacaagatctcaggaggtgggcaagtgggctcaagcgattacactaggaggcaaaatggcggagctcaagtggtatctgaccttcctctaggaatgctcgagtattgagggaaaaatgcctcaggtgagcatgtgcacaactccagtaagcacactgcacacgcgacccctcccaagagctggcaggcctcaggcatgcggaccgcccatcctcagggaagaaccagggaggggggatgcacgccaacatagaaaaccccaaatcagagttcaaacgcgcacttgaatctctcaagtcgcccacttgaccctcttccaagtgtactttacttccttttgttcctgctctaatacgttgtaataaactttcactcctgctctaaaaattgccccagtctctccttctgccttatgccccttggtggaactctttcttctcaggaggcaagaactgaggttgccgcagacccccacggactggatgctgctaacactgggactatcctgctagaccccaacctccctaggtcccaccccgctgatgcgggccggagcagtgggagctccagaaagtggctcacttagagatgcgtgaggaggattaacccaccagcagaggttacaacactgctcacaaacgcttccatacatcctcatttcaacccccctagcaacgcctaacaggcattacccgcagagaggttaaggataagcagctagatagttagcagggaggttaaggataagcagctagatagttagcggccctgggcagacagcaagtcctgcctccaatgctaatcagtgttgaaggaatgaagtagatggacttgtcccagagcacccggcaatgaggggtggcgctggaagggagctccagccccataactcacaccggtgtccggccctcctcgaccccattctcttcccttgaggatgtctctggaccaggatggccggaggcctgttgggtggcgagggggactggctgctgcgacggcgggggcaggggaaagggcctgttccccaggacactgggaggatatttgggggaaagccccgcactgggttctccccattttgcccgctcggcttaggggctcggagcccggagggagctcgggcgt

SEQ ID NO: 26281 - DNA, 1116 bp, Artificial sequence
  DNA replication origin
cgcccgctgattggttcagctccacctctgtggcaaacctggcaggagtgatgcaacggcaggggaggtttctccagcgccggcatgcagcaagggcgcctcggattgcgtcaggcggcgggcagggggcacccgccgggcccagggcgggcaccgggcgggcgtctccccagccgccccctcatgacctgggccccttggaggtacggcgagcgagtcccaggcggtgtcagcccagccttgccgctagtgcatctggccgagtccctgccagcctaggcggcacagactcagtcccaagtcgagtccagggcacgtccagaaggagcgctctgggcgtcgtaaacttccgtctctggggcccctcctgagatcatgcactgcgggaaagctgtcggaggcaccgtccgcattccgctcaagtgcctcacgccgttggccattgtgagcaaatggagaaactgggccacggggctgcagggggttctgcagagactgcggggctgagttaggtaggccaggcgcccggagcttgcaggcctcacatgggctacgccccggaccaggtgtgggacccctcgagcccaggtaggctcggggaagagcctgttagagcgcttggaccgaccggcagtcactttggaggtggtggctgcacctgcggagaaaggctataaagatgcaaaagccaggctagtcttgcccccaaggcgatgggtttaattcttcctggacgtgagattttgcagcaatgattaatccataggcacaaggttccgggagcagcgggcaaggagggcccagtgaggcccccacaagactatggccagctactggtcttctccctcggcttctggcctcccagccgagtccacaggccgccgggggttgacccaatacgcagcaagggactgccctcaggggatgtcactgactgtaaaagggaaacagaggcagctgaaggccttctctctaaactggccaggagatggctggcaggggcaatgtgcaacatggcttctcattcgattctaattcaatatttaaactaaacgtgatcttcacacttcacatattcattccgaaggtgtcgcagatataagtgggaaacttgca

SEQ ID NO: 26282 - DNA, 1089 bp, Artificial sequence
  DNA replication origin
gggctgcttgccagctgcacgtagggggctttcacccatcaagccattcgatcagcaagtatttccttaagctcccactgtgtgccatgcaccattccaggcacggggatacagcggtaaagaactcctcctcctcaaggaacttggagtctagaaactgatggtgaccattcagcgtggaatgggagaagagggccttgagcacccagaaagggcttctgacttgagcagggcagtcagggaaggccttcttggctttcttggagagggaacctgagaaggggcctctgaggaacagagagtaagggaacaacacgtgcctgaggggaggcaagctcagaccagctggaacagagtggcccggacaggagacacgagccagacaggtggcaggactgccggcctggtgaattgcgctgtgccatgctgcggggtggcattcctcctgggtcagtgggggcctctggtggattctgagaagggcagagatgtgcttaagagagaacactggctgaagtcagattggaggagagaggccagagggagctgtagggtgcccaagctgaggtgtgccagtgggaatggacagtggagggattgcagaattgtttaggggtgaggttgacagcatttggtggctggtttgatgagcagagtgaaaggagggtagagacagtagggctggggctcctgggacagtggcagatctggaaagagtcgggggtagatagccttgcgtttaagttaggggtgcctgtgaggggaggaatgacttctacggggatgttcagggcagctggatatgttggtgtgggagtcaggagagaaagctgggctggagttagagacttgggaaccatacatgtggagactgggcttaaagccctggtaggggaggagaggagaacagggcccggccaggccctgaggaccccagccgcggtggtctgagcaaagcaagaagaggtgtcgggaacaagcgctggagaggtaggcggagaacgaggagagggcagggtgaggagagccagggtggaaggtgtctccaggaggtgcacaacatggtcatgttgccaagatggccaagat

SEQ ID NO: 26283 - DNA, 1299 bp, Artificial sequence
  DNA replication origin
cccagtctctactaaaaaatacaaaaattagccaggcgtggtggtgggcacccgtagtaccaactacttgggaggctgaggcaggagaatcacttgaacccaggaggtggaggttgcagtgagccaagatcgcgccactgcactccgcctaggcgacagagcaagactctgtcttaaaaaacaaacaaaaaaaaaggttttctgattgtttcttttccttttcagttgggaaagacttgagcagggtgatgtttgggtttccagccttaggccgcagcattagggaatttcagagttagcaggggctgcagaatcatcctatctgtgcctctagggcatgctcctggagagccaggagtcggtgggaaggatcggccgattcattgctttttattgaatctacaacagcccaggccccttggcctcccactgctgtcggcagcagacaaacacaaccacccccgcacctggcctgggaagggtaaccggagctcaggggtgggcaaggctggctggctctgggggccttagagaagcggtagaaatccagtgggtagaaggggcattccggcaaaggagaaagggccacgccgagtggctgacgctctggggcgctggggaggaggcaggaagctgctctggggtccgatggtggaggaaatattagagattcttttttagagaagttgacttctgtagtgatgcttgtgtttttttcacgttttccttcccaccgcagggtctcttgtttgttttgttctttttctttgttttgtctgctttaaggtagactagtgtcttgttcaggcccggaggcttgtacttgtagccagagaaagatgggttgctggcgcaagacgtggtgggagtctgctgagatgttccgggcaggtgttggcgaggcctggaggaaaggcaggagctgggacggtggtggatctgcctcctggcagcccactggagatagaggcaagcaggagggaggagactggggatcccaggattttgccaagagggtgggggtctctcatcagcaggggacagggactgtgcaggacgatgtagccttcgtgtacctttctagggctggtgggattctctccaggttgtcccccactgggctacagaaaggaccccattcctctgggggctgtcatgcccttgaagagggaaatgtcagttggagaagcagaaggtgtgggaagaaggaccacaaatgggggagaccccccgttccccaggcctggatccgaagagggatcggatgctccagggctgaggccaggagaggggaggcaa

SEQ ID NO: 26284 - DNA, 1222 bp, Artificial sequence
  DNA replication origin
tcccggtgccgtgcgcccgcactcctcagcccttggatggtcgatgggactgggcgccgtggagcagggggcggcgctcgtcggggaggctcgggctgcacaggaacccacggagtgggtgggaggctgaggcatggcgggctgcaggtcccgagccctgccccgcgggaagagagctaaggctcggtgagaaatagagcacagcgctggtgggctggcactgctgggggacccagtacaccctccgcagctgctggcccgggtgctaagtccctcattgcccggggccagcagggctggccgactgctccgagtgcggggcctgccaagcccacgcccacccggaactccagctggcccgcaagcgccgcacgcagccccggttcccgctcgcgcctctccctccacacctccctgcaagctgagggagtgggctccggccttggccagcccagaaaggggctcccacagtgcagtggtgggctgaagggctcctcaaatgctgccaaagtgggagcccaggcagaggaggtgccgagagcaagcgaaggctctgaggactgccagcacgctgtcacctctcacaggcagaggcctagcaaggggcaggacccaggatggagccaaaatggggacggcagtgccaggccgaggaacagaggcacagggggttagagccaggagtgcgcagcacagagtcccaggcgaaggaggagaggcaggaaggatcagctagggtggtggggcggggcaggggcgcggaaaataccccaggagttccctggggtgatggtgccaccaggaagggctgaggacctggctgagccttcagggcgtgtccagctctcctcacgcccaaggaaatgcctgaggcaagggtgaggccagggcaggctgaggaggaaggacaggcctgcaggggactctccacaggcagcaagaggaaggatagaggacggtggccttccctggctgccaacccgggctttgtgacctaagccgggccccagccgctgggctggtggtgaagggtagaggacaggctcctgcaggctctggccaagcccgtctgacagccaccagctccactaataaagtgaccctgctgtgtcccaattctctacagctatcatgtaatttagtgtccaaactgagacacttttgagagtcaaagtcataattactccagaacaacagagtaaactagggctgacctggccat

SEQ ID NO: 26285 - DNA, 949 bp, Artificial sequence
  DNA replication origin
gcgccgccgccatcttggggtcccaggagccgcggagggagcgagctaggagcgtccacgcccaacgcagtcaccgtcccacggcctcagagagcgaaccgcggctccaccgtcggcggggcgacccccccctccggaccccgcccgcaccccgccccccctccgccgccgtcgcggcggcggggccaggcggcccgaggtgaggcaactagacgtgggcgggcgaacggagtgggggttgtgtaggtcttgttgcgcccctctctgcgggcgacaactgggccgcgtcttaaaggggccgtcgcccccggcccttggatttgttggggttagtatggaggatgggtgtggacactccccgcagggttgggacctcagggactagggccttgtccttcccgtttcatatctctggagacccggggtcatgcggtgacctcagccacctgaggaagcccgtggggcgcccacacgtggggagtgtgttagaccaggtgcacgtgggacccggtggggcggtgtcgggctaacacgtgtgtaggtttgggggtgggcaggggcagggcggaggctggaaggccttgagtgggaaccccgtgaaggttgtgtatctgtcattttaaacaaatgagatctaagggcttgttagtgtgtcattttgtaaggggcaagttgagatacggttgaatggtgcacgctgctggctggtgttgggtgggggcaggctgacacctgcatagacttgggagtgtctagatgacacctcttctggttttttaggtttttacatagcgactaggaaagtgtcatcctattttgacattccttcttgagctcgctaatggaaagtactacttccgtaatctccgaggctagaagccccctacagtttaggaatgacagaacctaggcagccacttactattctagttaacagccaactgtgcct

SEQ ID NO: 26286 - DNA, 1035 bp, Artificial sequence
  DNA replication origin
gccccgccgccgcgacggcggcggagggggggcggggtgcgggcggggtccggaggggggggtcgccccgccgacggtggagccgcggttcgctctctgaggccgtgggacggtgactgcgttgggcgtggacgctcctagctcgctccctccgcggctcctgggaccccaagatggcggcggcgctgaggcggctgcgggcgctgggccggcggcggcggcggccactttcactcactgagaggagcggagcagggacacggggagccatggcgggggggaggagaggcgccatagccaggccagaacaatcgagccgctacacgggtggcttacccccaccccgcccacactcactgctcgtcgcctgcccgtggccacccgtagtgccgctgccgtcggcctcgcgcagctcgcaccccgccgctgccacctgacgccccgtgcgaaccggggttcgaggggagaccctgatccatgccatctgagtacagattagtcgggactgggactggcgaagattgccgaaaggcggcggggaggaggaggaggatgtcatcgctacagtgagcaagcagatctcgcaggagaaaatgtcgcgagagctttccaggcccgcaaccgccgatgcaaggttacttttcccggaagtaacgtcaatcgaaaccgcccgggatcctgggatatttgttcccgcaggctagaggtgggaaggtgcagccaagttgataagatctctttaggggaaggagaggctcgcagctggtattttgttactagtttctgacccctttggatggggttgtagattgtcggggaagtgcctggtgtgtagttcgactactatacagtaattagtttggggctcccatttagactctgggagcaagaacgctataggttgggtaggacagcatagttagataagatgtctacgtgaaggttgtgggatacaaggacttgggaacacgcagacctgttatcggaaatgccagcctgttctcacatccacacagtgtgcctctgaaaagcgaa

SEQ ID NO: 26287 - DNA, 942 bp, Artificial sequence
  DNA replication origin
gggttgggactgaagggacaggcgggagggaaagaaggaggatttgggacgagtctcattgggaacagagactagggagggaacgaaatgtgaaaaatgcctggatgtaaggcacctcagatcatttgcccacttttcgacaaaaattatctaggtcttgtaggatggagaaattgaaagtgccattttctggccatttagagctgttatcaagtttgtactggggccaagtggtgttgcagaagaaaataagatgcttaggttttaggtcaggcgagagttgaagaggctttaagttcttgagaacacaggctaaaggagaagaaggaggaatggagggtggaaggttgcccatagtgaaggaggcaagcccagaggaaagagagggtagggacaccaggggcagggggtggtacttgccacccaggggaggtggggcttgccacccaggggaggtggggcttgccacccaggggaggtggggcttgccaccaaggtgaaggatcaaggcaggtgtcctgtggtgatcagaaacttctgaaatgtaggttaataatcaggcaggcgtccctgcagtgattaaataccaagggaagactatcttcctgagtctgtaactggcaccagagttttgagttcatggataaaatgcgtctcttctgtctctaccagaaagggaaaggaaccgaaattaaggaagggagagattgaagggtgaagggatagtgagagaggttggagaagagaccgaaaagactgcttacctgatttgaaattggtgagatgttaaatgttccttgggctggttggtctgaggacccgagatcataggtggagctcctcatggagtgagggcgaggacaggggaccagtctcctgaaggactccccctgtcccgggtcttcggcaccaaatgtcacatgagtccgtgtgaagagacga

SEQ ID NO: 26288 - DNA, 1021 bp, Artificial sequence
  DNA replication origin
ccttttaaagcccttcaactaggcaagaaatcgtgtaatctcactgagctatacctggggaatctgcctgatagttccactggggatcctctcagggaactgctctaatgccttcctggaggcctggctcatgaagccggtagttgtccacatgagattgggctagagaaaaaactctttcccgttcatctggggagagggtagaagttaggatgacatttaagtctctccaggttaaattgtaggacagagttagatattggaactcctgtatatattcagtggggtctgacgagaaagagcctaaactctggctgatttgggaaaggtctaatagagaaaaaggcacatgtaccctgactatgccttcagctccagccacctctcttagaggaaattgttgggcaagtgggggagagctagttgtggaacaaaactgtaagccagaccgggtgtgaggaggggaggtaacaggagggttatagggttggggagtggaggctgaagatgagttggagcctgattcagcctggtggggagcgacctgaggaggagtagtctggggaggaggggagaggtcagatggatcagttgaaaaggaagattcaaaagactcagagacgcttggggttgggactgaagggacaggcgggagggaaagaaggaggatttgggacgagtctcattgggaacagagactagggagggaacgaaatgtgaaaaatgcctggatgtaaggcacctcagatcatttgcccacttttcgacaaaaattatctaggtcttgtaggatggagaaattgaaagtgccattttctggccatttagagctgttatcaagtttgtactggggccaagtggtgttgcagaagaaaataagatgcttaggttttaggtcaggcgagagttgaagaggctttaagttcttgagaacacaggctaaaggagaagaaggaggaatggagggtggaaggttgcccatagtgaaggaggcaagcccagaggaaagagagggtaggga

SEQ ID NO: 26289 - DNA, 1262 bp, Artificial sequence
  DNA replication origin
cgatttctcaatcttttccccacctttcccccttttctattccacaaaactgccattgtcatcatggcccattctcaatgagctgttgggtacacctcccagacagggtggtggccgggcagaggggctcctcacttcccagtaggggcggccgggcagaggcgcccatcacctcgcggacggggcggctggccgggcggggggctgacccccccacctccctccaggacgggacggctggccgggcggggggctggaccaccccacctccctcccggacggggcggctggccgggcggggggctgacccccccacctccctcctggacggggcggctggctgggcggggggctgaccccccacctccctccccgacagggtggctgccgggcggagacgctcctcacttcccagatggggtggctgccgggcggaggggctcctcacttctcagacagggaggctgccgggcggagggtctcctcacttctcaagatggggcagccgggcagagacgctcctcacctcccaggcagggtcgcggccgggcagaggcgctcctcacatcccagacggggcggcagggcagaggcgttccccacatctcagaccatgggaggccgggcagagacgctcctcacttcctagatgggatggcggccgggaagaggcgctcctcacttcctagatgggatggcgggcgggcagagacgctcctcactttccagactgggcagccaggcagaggggctcctcacatcccagacgatgggtggccaggcagagacgctcctcacttcccagacggggtggcggctgggcagaggctgtaatctcggcactttgggaggccaaggcaggcggctgggaggtggaggttgtagcgagccaagatcatgccactgcactccagcctgggcaccattgagcactgagtgaacgagacgagactccgtctgcaatcccggcaccctgggaggccgaggctggtggatcactcgcggttaggagctggagaccagcccagccaacacagcgaaaccccgtctccaccaaaaaaatatgaaaacctgtcaagtgtggcggcgcgtgcctgcaatcgcaggcactcggcaggctgaggcaggagaatcaggcagggaggttgcagtgagccgagatggcagcagtacagtccagctttggcttggcatcagagggagaccgtggaaagagagggagagggagaccgtggggagaggagggagagggagagggcgca

SEQ ID NO: 26290 - DNA, 822 bp, Artificial sequence
  DNA replication origin
ctgccctgccgccccgtctgggatgtgaggagcgcctctgcccggccgcgaccctgcctgggaggtgaggagcgtctctgcccggctgccccatcttgagaagtgaggagaccctccgcccggcagcctccctgtctgagaagtgaggagcccctccgcccggcagccaccccatctgggaagtgaggagcgtctccgcccggcagccaccctgtcggggagggaggtggggggtcagccccccgcccagccagccgccccgtccaggagggaggtgggggggtcagccccccgcccggccagccgccccgtccgggagggaggtggggtggtccagccccccgcccggccagccgtcccgtcctggagggaggtgggggggtcagccccccgcccggccagccgccccgtccgcgaggtgatgggcgcctctgcccggccgcccctactgggaagtgaggagcccctctgcccggccaccaccctgtctgggaggtgtacccaacagctcattgagaatgggccatgatgacaatggcagttttgtggaatagaaaagggggaaaggtggggaaaagattgagaaatcggatggctgctgtgtctgtgtagaaagaagtagacatgggagacttttcattttgttctgtactaagaaaaattcttctgccttgggatcctgttgatctatgaccttacccccaatcctgtgctctctgaaacatgtgctgtgtccactcagggttaaatggattaagggcggtgcaagatgtgctttgttaaacagatgcttgaaggcagcatgctccttaagagtcatca

SEQ ID NO: 26291 - DNA, 944 bp, Artificial sequence
  DNA replication origin
gtctgggaggtgaggggcgcctctgcccggccgcccctactgggaagtgaggagcccctctgcccggccagccgccccgtccgggagggaggtgggggggtcggccccccgcccggccagccgccccgtccgggagggaggtgggggggtcggccccccgcccggccagccgccccgtccgggagggaggtgggggggtcggcccccctgcccggccagccgccccgtccgggaggtgaggggcgcctctgcccggctgcccctactgggaagtgaggagcccctctgcccggccagccgccccgtccgggagggaggtgggggtgtcagccccccgcccggccagccgccccgtccgggagggaggtggggggggtcagcccccctgcccggccagccgccccgtccgggaggtgaggggcgcctctgcccggccgcgcctactgggaagtgaggagcccctctgcccggccaccaccccgtctgggaggtgtgcccaacagctcattgagaacgggccaggatgacaatggcggctttgtggaatagaaaggcgggaaaggtggggaaaagattgagaaatcggatggttgccgtgtctgtgtagaaagaagtagacatgggagacttttcattttgttctgcactaagaaaaattcctctgccttgggatcctgttgatctgtgaccttacccccaaccctgtgctctctgaaacatgtgctgtgtccactcagggttaaatggattaagggcggtgcaagatgtgctttgttaaacagatgcttgaaggcagcatgctcgttaagagtcatcaccactccctaatctcaagtaatcagggacacaaacactgcggaaggccgcagggtcctctgcctaggaaaaccagagacctttgttcacttgtttatctgctgaccttccctccactattgtcccat

SEQ ID NO: 26292 - DNA, 1018 bp, Artificial sequence
  DNA replication origin
tccaggaagacgggaaaggggctgtagtggtgcccagggcacggggcgagctgggcgctctggtaggaaggctccaggcccggccgtctccggctcccgcggccccgacagccctctggctccgccggcccgcgcctccgcggcctgccctcacctgatccaggttctcgtcgctgccgctgtcctctgtgtccgagtcgatcacgacgcggcctttccgcttctttaccatggtggtcccccggctcccacgccggccgccgcccggactcccctcttgcccgcctgccagtgggaccgccactgccgccgccgccgccgctgctcgacccacacaaaggcgaccgcgcatgcgcgctccgctccgcccccctggccccgccccctgctcgccgcacgccgttcgcaggtcgccgggtgccccgccctgccccgcccccgacgcagcgtgagaggcggggccttcccccgtcgctggttcccggcagagagtggtggtggctttacccgcgactgccctggagtccttggctgtatctctgctgcggagccgaagtttggtgggctctcttcctatcgggggctggagccgcaaggatccaggttctctctgagggggctcacgtgtctacctactttcaagctgtccaacactgatggcgtgtacttaaggggccgacggcctggaagacataagtcgcctggaccacgcggtggacaccggttgggggctggagactgccgacccgggctgtgcgaatgacagctgagctgggacctggagaatgcatctgaattacccaaaaggagagtagagtgttgcatgcagagaacagcgtaggcaaaatggcccggcgataataaagttaggttcggagaactgaagttagttatggccagagcagagattgtgggtggggataggcgacagaccaggctggagaaggacacggcgactgcctcactcagatcctaataagtaagctgaattagggagtttgaacttgagtattgaaag

SEQ ID NO: 26293 - DNA, 1248 bp, Artificial sequence
  DNA replication origin
ggcgtgcggcgagcagggggcggggccaggggggcggagcggagcgcgcatgcgcggtcgcctttgtgtgggtcgagcagcggcggcggcggcggcagtggcggtcccactggcaggcgggcaagaggggagtccgggcggcggccggcgtgggagccgggggaccaccatggtaaagaagcggaaaggccgcgtcgtgatcgactcggacacagaggacagcggcagcgacgagaacctggatcaggtgagggcaggccgcggaggcgcgggccggcggagccagagggctgtcggggccgcgggagccggagacggccgggcctggagccttcctaccagagcgcccagctcgccccgtgccctgggcaccactacagcccctttcccgtcttcctggagtgtgcggggccttggagaccggcccgggcctggagacggagccccgaggacttggcgccttgggcggggaggcggggcagggaccgggccgttgggcctcgggctcgggggtagcgaaaggggccgcgatcttccggggccagatcggggcggcgggctgtagtccaggagatccgggctgggagagataggaagtatcgcccgccaacctgggaggctgggaggttttggaggaggtgcaagggtgcgcgtcgagcagttgggggcgagggccaagaagatccggactctggaagatggaagtttttcggacaagggatgtggacagaggaaggacactcgtaaatgttcctaggagcctctgccatgcttgccaaggatgacttagctgtgggcacgagtttatttggcgactagggtcgtttgtgtttgagaagggcccttgttgaggtgtcagacccaaaaaaacactcttgggtggaggaaagagggcagatactggaagaaatagagaactatgtagggcgacatggagggactgtgcatagcccaggcctcctcttggccctttcacgcagcatcccagaattctttcttacttgaagactgcaggaagcactgaaagtaacttttggcctcagtgtcttggggttgaactgtttatatactctagaaaacattgtagggaggaatctgctctttgtagcagtgctctagtgataccaggcgatacaaagatggtctcctttctgtttaatgagcaaatgatgtaaagaaagaatatgcaagagatagtagcttttgagtagaaagagtattgaacttggagtctgaaaatttgaattc

SEQ ID NO: 26294 - DNA, 1752 bp, Artificial sequence
  DNA replication origin
tcaagtgatcctcccacctcaccattccaagtagctgggactacagtcatgcaccatcacacccagctaatttttaaattttctgttgagacggaatattgctatgttgcccaggctggtcttgaactcctggcctcgagtgatcctcccgcctcagcctcccaaaatgctgggattgcaggcatgagccactgtgctcagctcctttcaactttaaattggcctaggcacagtttctttgctcttcttttttctggctatcatgagtttgaagggggtgcccaagggccatgagtgtggctatggaggaaacactgatcttccttcatccacgcacccctcatgctggggaggtctataggcctccccatccccagtgcctgaggctgtgtctccaacctttctgaacacattttagctaggaagcaagaagatcctggatcttccacaccctttaagaaggcaagggatggcaatcacagtgataagagccacgtccaagaccgcttctggtggtggagaggttgcttacctgcaagtgcgtccaatgaggttttctccaactccccagcactcccactacctaactggtgggagcagtgggacctagagagcaggggttctgggcagatgacaacatagcttgcttatcttccaggatttgggtgctgtggggcagccacttgctacctatctctgagaatccagaaagaacacctggggtgcaagtggagagaagaagggtgctgggttggtcaacttcatctccctggccacgtttttccagaagggagatcttccttcagtaactataatgtggctgtgatccagcagccttaggaagccatcaactcccagctcaaatttttttcacgatttccctgacttaagcggagactgctgagctcccttggcaaggagggtgttaaggagctgaagggaatggcagtgctaagacagggccaaaaggcatgccttctctaaggttccacaggccagccccagggaacatggagatacggcttttaggcactggagcatagataggcatgtctagggcttccagaccatgctcaggatacaagggagggccaagagccaaaaggcacccaggctcgggaaagggttcagatccccgctctgccacttgctattacctagggctgagctacttaacacctttgagccacaagttttccacctttcaaaaaacaacctgtccccagtaggggtccaataaatgctgttgttaatgagagtgaagccgctggaccctggaggagaggaacggcccttggagtgggctgatggagggcggaagcactgggcagtgggcaggaccagaaactccacttgggctggggttgggagggggggaagaaaccctgactccagatggaggctcccactgggagaccctgggctggcctagggatgcgtccagagaaagtgtgctgcctctgggccaggccctcgttgctgtcattccccacaggccaacgcacaccacctttactgaccaggcttctgaaggcgttgaaggcttgccaccttaccaccctccagctggccccaactgaggcccgacctacccacaacccccaagagtagtgaatactcaaaatagcaccaatagtaccaaaccagaaggtaagtgtaaaagaagcacaacaaagctctgacccttcccatgatgattaccttgatacttcttcaaaagatagatacttttgggccctgcaccatggctcc

SEQ ID NO: 26295 - DNA, 1740 bp, Artificial sequence
  DNA replication origin
cgggcccggggctcccccgcggcggcggccgcagcgaccgccgcacagcgcgcctcgaagagcaggcgcagctccccgacactccggcgcggggcccgctccagccccgggctgcagggcctcgcgccccccggccgcgccatgcccgttgggcccccgggcagggtcatttcccagtgccggcgccgccgctgagcccaccagcccgcggcgcgccggggactggagcggctcggcgcccccggctggagacggccccggggcggagcctgcgccgctgcacgcccgcgccccgcctcggccgcgccccccgcccactccttccactttcagagaaagcgcgggcctcccagggcccctgcgagggagagaaggctctcggtgactcctcggggtggcggggaagtccagcctccgtaggcacaaaacctgggcccgggccccgaggcttcgctccgcctgccctcggggaggtgggaggggccgctccgcgctggggcctcgcagccttcccgggcttcgcggctgggagagattcctccaggccgctccacaggccctgtccccgcgcaggagaagctggtcctactcttggtcccctaccccgttcctcgggttcctttgcgtgttcatccctcccgggcaagggcttcaagtctcggggcctttctccggcccgagctcctgagcagagttgaaggcccccggcttcccgaagaagccccaccccagggcgtgcacccaagtggagactctgccccagggactagctgaggctgctccccgcaagttccccacttcccggcgggcagagaacaaggtcagggggcggggcctggatctgtccccatggcccagcctagtcccgggctgcatctcccccgctgctgggtggcaggagctgagcccgccttcctcctcctctgttataggagctcggggcttggagtccgccgtgtggcgttcagcaagtcatttcacctccctcgactgcggattctcccgttgctgcgagaataaaataaaagacttgaaatcaggtacaccacactctagatgtgatttgtaggcagtccctttactccctccgtatatttctgcatttgtacatttagaaaaacctcatccaacccacagagttgtgtctgtaaaactaggaagacagcactgatgtttaagagtttcagacactgcaaagtgcttatcagtgtcattccatgtggatcttcggccacttcccatgttggtagtcagctgaccgaccggcgaggctgctttgaggagaagccactgtttcctatcttaccatagtgccacaggagtgagggtcccccctcaggcactcagtgtctggggatggctggggccctggagacagagcagccccagaaggattgccttggatgctgagatggccgcaggaggggctttccttcccttctctcccctcagccagggctcaggaatggcccaggagaaggaaagaagaaggttcagtgggaagacgggaatcttcggcaaagcatagtggctcaggcttgtaaccccagcactttgggagggcaaggcgggcagattgcttgatcccaggagttcgagaccagcctgggcaacatggcaaaaccctgtctctactaaaaatacagaatattaggcaggtgtggtggtgtgcacttgtagtctcagctactcggggagaggctgaagtggaaggatcacttgagcctgggaggtcgaggc

SEQ ID NO: 26296 - DNA, 917 bp, Artificial sequence
  DNA replication origin
cgggggcccaacgggcatggcgcggccggggggcgcgaggccctgcagcccggggctggagcgggccccgcgccggagtgtcggggagctgcgcctgctcttcgaggcgcgctgtgcggcggtcgctgcggccgccgccgcgggggagccccgggcccgcggggccaagcggcgtgggggacaggtccccaacgggcttccgcgggctcccccggccccggtgatccctcagctgaccgtgacagccgaggagcccgacgtgcccccgaccagccctgggccgccggagcgggagagggactgcctcccggcagcgggctcttcgcacctgcagcagccgcgccgcctttccacctcgtcggtctcctccactggctcctcgtcgctgctcgaggactcggaggacgacctgctgagcgacagtgagagccggagccgcggcaacgtgcagctggaagcgggcgaggacgtgggtcaggtacgggccgcgggggcggggccagcgccgggcgcgggggctgcacgggggacctggctgggtgctcccggaggacccgctcctgtccatgctccctccagcggaaggtcctgttctcgcggtttaggaggaatctgggggtcagagggaggcgcctggccgacctctcgcctgggcaactttcacctcggctccgccggcgggtcgtggcgctggccctggggcgtctaagaagcggggcgaggagcaggcgacccgccgcggggactgggcgaagcgggggtagcggaccttgttggctgtgggttaggacaggagggatcggaggggctgagccttgccgggtgaaccctcggaaggagagaggcgaaggagagtttcccttaccccccgccccctctccggtgccgcggccgcacccccgccgttgccacggttt

SEQ ID NO: 26297 - DNA, 823 bp, Artificial sequence
  DNA replication origin
tccagcggaaggtcctgttctcgcggtttaggaggaatctgggggtcagagggaggcgcctggccgacctctcgcctgggcaactttcacctcggctccgccggcgggtcgtggcgctggccctggggcgtctaagaagcggggcgaggagcaggcgacccgccgcggggactgggcgaagcgggggtagcggaccttgttggctgtgggttaggacaggagggatcggaggggctgagccttgccgggtgaaccctcggaaggagagaggcgaaggagagtttcccttaccccccgccccctctccggtgccgcggccgcacccccgccgttgccacggtttccctctcctgagtgggagtggagcggcgctccaggctctgctcgggagccgctgccgtctgctcccagcgcccgcacgaggcgtggacgcaggggagggaggggcgtgggcctgggagctctggctgggagcggaacgcagcccacccagtgcgcgccctgcctcccatcttcccggctcgccgctcctgagcgcggcagagaggggcggtaaactgaggctgcaagggggcaggatcactctgctagtctctgcctctgatagcctgggtgttctgggaccaggtctgaccctcggaaaacacagccctgggcactgttaagtcattcctgacgcccgccacttagggatgtgcggctcccgggacaccctccttgttcccctcgttttaaccaaggccaaataccttgaataactgtccgtggtcagcgcgaaggactttctttagatccacgtttcgcaagtgtccctgaggccgag

SEQ ID NO: 26298 - DNA, 842 bp, Artificial sequence
  DNA replication origin
gccggaccagccttgcttcctgcctggggaagccctaaattggcctgggccggcgcgctgtgcggctctgggacctgcggcgaggcaaagtccgccctgggcccttccacacggactcaggcagcctctgtcaacagcccctggcttatctgccgccgctgtggctgtttgacttcggggaggccccggcgggcctgggggtggggaaggcctggaagccgcagccttggagctggaagggccctcagcggcgatttgcaccggctcccgacggctcggagggcggcggggtcgcccaggtccccgaggcttgaccttagccggggcggtctctacacccaggcttgggccgcaggacctcctcctagcgcactccctctcccaggcacttcgccgagtccctgcgggcggaagagggaagcgggacgcgcccgcgcttcgcgccctttcgcctgcaccggctctcaggtgtcagagcttccgcgccccgggagctgctgctcaggcttttccgaagaggcggggcggggggcctctcactgccccacactccacatcctgggaagccccggcatccgccccccgacctaggcaagggttaccccagaaacgatcctgggtccggggctgctctgaccaccggggaagaaggggaagcggcaggctagtgaccgagccggcgcacccagcacctggcggcggggggtgttcctgctctgtgaggcttttcccctctggtgtcactgacaaaccccatcggcctccgggcttgtgaacccctgcaggtcgccacagcttccctgccttgtcccagccgattgtgcggcggagcaggcgcgcgg

SEQ ID NO: 26299 - DNA, 1118 bp, Artificial sequence
  DNA replication origin
aagctctgacacctgagagccggtgcaggcgaaagggcgcgaagcgcgggcgcgtcccgcttccctcttccgcccgcagggactcggcgaagtgcctgggagagggagtgcgctaggaggaggtcctgcggcccaagcctgggtgtagagaccgccccggctaaggtcaagcctcggggacctgggcgaccccgccgccctccgagccgtcgggagccggtgcaaatcgccgctgagggcccttccagctccaaggctgcggcttccaggccttccccacccccaggcccgccggggcctccccgaagtcaaacagccacagcggcggcagataagccaggggctgttgacagaggctgcctgagtccgtgtggaagggcccagggcggactttgcctcgccgcaggtcccagagccgcacagcgcgccggcccaggccaatttagggcttccccaggcaggaagcaaggctggtccggctgaccgtgaaggatgcacgtgggccggactctaggactcccggcttaccagccccttacgcgcggcccaggcaggccggagcccaggaagtttctgcctgcctgcctgcctacctctctgcctggggcatacgtagtccccttcacctcctaggagccctctccagcctgcccagagcagggaaattgaaactgggcagcctcactccggcagaggaaaaagtcacaggcaggcttttcctaaccagccaggggagaagttggaggcccacccgcaaggtcagctgcatgactctatggccttgcctgcctcctcaaacaattgtggggtattgctggaggaaaagagagggtgtttggctcctgttcatctggttttcttctttctgtgctccaggataggtaaggagacctggatgccatcccctcctggactcagaattcccacacatcgctttccactaattatagagcagaatttaggttaacagacttcctttttaaacagctaatgcccatgggaaggtgaagtcgtgggtcacttataccttagtgcaaatcgttttataaatttaaactgattgctcttcccaccaccacgaccacagggagtgctagtttgatagggcaattggaaca

SEQ ID NO: 26300 - DNA, 943 bp, Artificial sequence
  DNA replication origin
tccttccgcagcttgggccgctcacgggccttggtcagctcctcctctaggtaagtcctgtgggggcgcaggcagcggccagggcatgagggggcgcacacggagaccccttcgagcactcgccccgggtccccctcaagcagctgtcccggccccggacccctacttgatccccccaaccgacctggcagggcacgcatacctgacgcccattttgcagtcgagcacacaaggtccgtcgaagccatcgagcaggtcctgcagctgcaggtagctttcgccgtcgcgctccaccacgccgtggaaggcaggcacgcagccgcgcagcgcgtcagccatcagccgcgccaggcagtagcgctccggctccgagcagcgcttcaggatcagcccgctggtgcccgccgccttaaaactccctgaggaccggcatccgtcagcgccgcccagccccttcccgtcgcgggcacccgcccacccgccccactgctcaccagtgtgccctgccagctgcacccaggcgtagcgcttcttgaaagggcttatgaccggcagattgaccatggtccggatcttctgccagtggtttttctgaaagcgacagggtcaaggtctgataatcggcgtctcggcaatgcataagccctccctccactgaaacagggtctcgccacgcccccgacccaccggaagcagctggggctggatgagtcattaattcattcattcactctgggaaggtttatttgtgcgcctgtgtggcgggtgctgatacaggcgcagtgaaggtgattccagcgtctccagtgagctgtcaagagcctggacttagcatctgaagcccccggtttgcgctccagctctgccactgaagaacgcgtgggcaggttacgaaaatgctctgtcgaggtttttgaactgttgtgaacatcggaattacctg

SEQ ID NO: 26301 - DNA, 1553 bp, Artificial sequence
  DNA replication origin
gcatcggcggtgcccccccttagtggctggcacctggtcctgcaggacccggtgaactgccctgcaccgcggggctccagtctcaagccggcatgcacagtggggacaaagctgcaggtccacatgtcaggtgagcggcccgcggggacaggagtccagcctcatctctcagccaggctggccaggatgccaatgagattgtccagccccagcaaatagccgtcctcgcggttgccctcctcccagggccgccggtggtccaggatctggccatcggggaggggcgtggtcttgccgaagtcgatgagccacacgccggcgcgatggcagtgatcgtgcacaaagaggagcgagctgccgatcacctgcgagccccgcaccgtcaggccgcggccctgcccagagacgcccttgccgggttcccgccctagccctcgcggcccgggcacccgggcagccgccgcttacctcgtgcctcctgaagaactcggatacctccagggtgtcccggatctgctgcaggcggttcagataccgcctctgcagagggtggggtgggagaggagggcaaattaactaaacgccaaatgagcccctgctaacgatgaggagccgggacccacgctgtgcttggcaaatgccgccaggaggaggacccagggccccgcccagcgtggcccagaagggaaggagcgtagagcagttgcgagccagcgcggtgagggccatggtggggacacagccgagggcactgggccagatgacaggggcagtcctcggcttcaggctccccaacacctcagggtttgggatcccgctctcaccagcacttcctcatctccttgcacaaactcttcaaagacgcgaagcacctgctctcggcttcgcgtagtcttgaagtcggtgctgcaggagccgtccgctttctggatgtgggacaggagtgtcaggggccccgggcccgccagtggggaagaggacagcgtagagcagcggtacctcccagttgcaggggacggcgaggcggtgggagagggcggaggggcaggcggggcgggagcgggggatcgggaaagacagcgcgcagtggggctgcggcggtgccagcgaagcgcgcctgcctcaccttgatgccctcgatgcggaagccgagggtggtgctggagctgatgccttcccgccactgcatgtagcgcggcttggtgacggcgcgctgcgcgtgctcctcctccgtgggagcttcaggatccaccgccagcattttcttgtacatgtccttccgcagcttgggccgctcacgggccttggtcagctcctcctctaggtaagtcctgtgggggcgcaggcagcggccagggcatgagggggcgcacacggagaccccttcgagcactcgccccgggtccccctcaagcagctgtcccggccccggacccctacttgatccccccaaccgacctggcagggcacgcatacctgacgcccattttgcagtcgagcacacaaggtccgtcgaagccatcgagcaggtcctgcagctgcaggtagctttc

SEQ ID NO: 26302 - DNA, 3448 bp, Artificial sequence
  DNA replication origin
agcctgaccaacatggagaaaccccatctctactaaaaatacaaaattagctgggcatggtggcgcatgcctgtaatcccagctacgtgggaggctgaggcagaagaatcacttgaacctgggaggcggaggttgtggtgagccgagattgcgccattgcactccagccagggcgacagagtgagactctgtctcaataaaaaaaaaatatgatctggcgcctgtaatctcagcactttgggaggccaaggcaggtggatcacctgaggtcaggggttcgagaccagcctggccaacatggtgaaaccctgtgtctactaaaaacacaaaaaatagctgggcgttgtggcgcttgcctgtagtcccagctactcgggagactgaggcaggagaatcacttgaacccgagaggcagaggttgcagtgagccgagatcgcgctattgcactccagcctgcatgacagagtgagacttcgtttaaaaaagaaaaaaaatcatgactcttggagcccagggattgcctcccgcccagggcgtctgcagggaccagggaagtcctcatcatgcactcccaccttgactctggcccgcatctgccctcttttttgccctggctctatgccagtgagcaccacccttgcagggcttctacctggggacatgccatggtatggagagagtctatatagggtcagctgggcatatggcaggggcaggggaggtaaagggggtactagactctctaggactcttctccaggccgcctgcccactcccttccaacgtgtcttcctgcagagccctgggccatggtgcctttggggaggtgtatgagggactggtaattggccttcctggggactccagtcccctgcaggtagctatcaaggtgagaggagtgggacttctggctgggggtaggagagcggaacaccctgaagggaaggacaatgactagagctagggttaaccccctctcctgaagcgtgcagggcagctcagaaactgtgcccttttcctccccagaccctgccagaactctgctcgcctcaggatgagctggatttcctcatggaggccctcatcatcaggtgcacctgggaccaggggcagggctggaaggcgggaggggaatgcccgggaacagtttctcttcaccctgaggctgaggtagcaagtcaggggacacagagggcctctccagctttgtggagcctaaaacatggtttccgtctccctcctggtaacgggatatgtcccccaccccactcagcaagtttcgccatcagaacattgtgcggtgtgtggggctcagcctcagggccacccctcgcctcattctgctggaactgatgtctggaggggacatgaagagtttcctgaggcacagtcggccacacctggtgagacccttgtcttagcccccccaggcccctctaaagaccctgtccatgtgtctgagacctacatggactgatgccccctctgcctgacccagggccagccatcacctctggtcatgcgggacctgctgcaactggcccaggacatagcccagggctgccactacctggaggaaaatcacttcatccacaggttaggagcagtcctggctcaggggacccccatcccaactccctccccaaggaacagcccttccacacagcttttaaggaaatagatcaggaagagcaagaacttctagattctggcagtgattttttttgcctactctgtagggatattgccgcccggaactgcctgctgagctgcgctggacccagccgagtggccaagattggggactttgggatggcacgagatatctaccggtgcgggacttgggaggtgggaaggctcttgctccaagggggttttccccgcaccttggtggtgaacaactcatcattcacctcctccctcctgtagggccagttattaccgcaggggggaccgggccttgctcccagtcaagtggatgcccccagaggccttcctggagggcatcttcacatccaagacagattcctggtgataacacccttcccctccccttccccactgttcccctcccctgaggctaatcctgtcctttccagccacctcatgtgaggggaggctacacctgacgggcctcacttggttcccccacttgtgatgcaggtcttttggggtgctgctctgggagatcttctcactgggctacatgccctatcctgggcgcaccaaccaggaggtgctggacttcgtcgttggaggaggccggatggaccctcctaggggctgcccagggcctgtgtgagttgagtgctgcccgggaagggaggtccttcacaaccatgggtgggcatgaactcctgcctctccccaggtaccgcatcatgacccagtgttggcagcacgagcctgagctccgccctagctttgccagcatcttggagcgtctgcagtactgcactcaggtgtgcccccgacctaatctaacatcctggtcttgtgggtcaggagggagggccagaaaactctatgcccccctgctccctgactcttccattacaggacccggatgtgctgaattcactcctgccaatggagctggggcccaccccagaggaggaagggacttctgggctggggaacagatctttggagtgcctaagacccccacagccccaggaactgagtccagagaagttgaaaagctggggaggtagccctcttggcccctggctgtcctctggcctcaagcccctcaaatccaggggcctccaacctcagaacctttggaatcccacttatcgctcctgagccccaaggggccctgagggtaaggactgaggcactgagggtccctccctatactcctcaggctcctgggtggcctgttatgccagcggcctctgttccctgcagtctgtgctgtgtgtctgggcctgtctcggggctggcctggcagcgctgcacttgccatgctggaaaccagcccaggcctcccagggaagggcccagccacttccagcttttgatcttggggccagaggccgccttacacacaccccaggtgtccatggggagcactggattgctctcccattatgagcatccttcatctgggcagaccccccaccctgcagatgcttctaataaaaagctcttctcatcctccagcgatctgtggatgccagggaccggaactgaggaagagggggccggaggagggaggggctgaggcctgaggcacaggaagctgcatcttgtctttgagttttattaggaaggggagtccgtcgtggtgtgagacgttagaccggaaggtctgggcttgctaaataaaatccgcggtctggcacctctggagagggcagagcctcctcagaagagctggcctgaggaagaagccctttgccccctccccttctataagttagtgtcatttggctctgggaac

SEQ ID NO: 26303 - DNA, 885 bp, Artificial sequence
  DNA replication origin
gccctgctcagcagctccaaacaaaaagcaggagctcttagaaaaggaggtcaaatacactgcaaatcagcatgcagacaggactccctagatttccgtttaatccaggatctttcccatcacagcaggtccctgccttgttctgcagcagtcttcagaacttagagctggccgagtgagcaagctgagcaaaggggcagaaaggcaggattgggttaagtcagtggttctcaaagtgtggtccaggaacaggtaatatccccacaacctaagttgttcgaaatgcacattatcagctgggcctggtggctcacgcctgtaattctagcactctgggaggccaaggcaggtggatcacctgaggtcaccagttcgagaccagtctggccaacctgtgaaaccctgtctgtactaaaaatacaaaaattagccgggcgtggtggcgggagcctgtaatcccagctactctggaggctgaggcaggagaattgcttgaacctgggaggcggaggttgcagtgagccgagatcactccattgcacttcagcctgggcgacaagagggaaattctgtctcaaagattaaaaaaaaaacaatggaaattatcctgggagttgggggaaggttggggagatgctggtcaaaacaatgcaaaatggcagttaaataggaggaataccttccagaatctactgtactacatggtgactgtagttaatgacgatgtattcttgaaaatcgctaagagaggcggggcgcggtggctcacgcctgtaatctcaacactttgggcggcggaggcgggtggatcttgaggtcaggagtttgaggccagcctggccaatatggtgaaacccccatctgtactaaaaatacaaaaattag

SEQ ID NO: 26304 - DNA, 1051 bp, Artificial sequence
  DNA replication origin
tgggctgggggcccctgcccttatccaggccccctgggcgggagccctctcccagtggcagtgcccctggacagctggagggcgcttcctggaacacgccgctggccccacaggtgcgcgctggcgagctggaaccgttgctggtggcggccggaggcggcggtcgggcctacctgaggccgcgggaccgaggccggactcaggcctcccccgagaaactggagaaccgctcggaggcgcccgggagcggcgggagaggcggggcggcaggtgagggcgcgggccgcggggagaggcgggcgtgctccccgtgtggctgccaaccttcctgctgtcgctctgcaggtggtgggggcggctggacgtcgcgggctccctctccgcaggccggccgctcactgcaggagggggcggagggcggccagggctgctccgaggcttgggcgacccttggctgggccgcggccggcggcttcgggggcggcggcggggcctgcactgcgggcggaggcggcggcggctacaggggtaggtgcaccgttggagagggcagctgagcaggcccgagggtgaggtgatgttagaacctaagtacaggccggagccctcgggaggataggtgtgggagaggcattaagccctgctcagcagctccaaacaaaaagcaggagctcttagaaaaggaggtcaaatacactgcaaatcagcatgcagacaggactccctagatttccgtttaatccaggatctttcccatcacagcaggtccctgccttgttctgcagcagtcttcagaacttagagctggccgagtgagcaagctgagcaaaggggcagaaaggcaggattgggttaagtcagtggttctcaaagtgtggtccaggaacaggtaatatccccacaacctaagttgttcgaaatgcacattatcagctgggcctggtggctcacgcctgtaattctagcactctgggaggccaaggcaggtggatcacctgaggtcaccagttcgagaccagtctggccaacctgtgaaaccctgtctgtacta

SEQ ID NO: 26305 - DNA, 896 bp, Artificial sequence
  DNA replication origin
gtggcgcccccgccacccccgccacctcccgcccagcgccgcgaccccgggaccccttcgctcccatccatcgccgcgtgctcttcaacggctcgagactccccgaggcagacgagctggctctccgggctaccctgcgggcagcgggggagggaatcggcggggcccgggagcctcccctcgctgtgctggtgacccggcaccgaggaaagcacgctcccccggcccccaggcagccctcgcccccggcgccggcgccgccccatccccactggctgcgctcactccgggacaggcgtcctctccctgctgccccaccaggatgtacagcgactccccgagaccgagggagaagattgctgagacgaagacgccatgcgcccgcgacaggtggttcttggcgcctttgccgcccgcggctccgtaggctgagatcctgcggggaacggacggtgagtccccggccttcggtgctcaggccggccgctccgggcagaagttggcgacagaggaggctccagaattattttttatctgagggacttggaggctgcaatcgactctgacgggatgggaagggtaggtttgcacaccgaaaaatcagatattacacttatttcaggagggttcgtggaaatgtggggaggctcaagcaccccttggcgccgccctggttgggggccttccgctcggtgtaagaggttccgggtaagggctaactcggtggcgactactgccaccttgaagggcactcaaggtggacctccccgcggaatagtccaagacgcaagtcggtgcgcacgtggacttcgttaccctgagggtgaaacctccaactagcaggtcactgtccaccctacctccgccgtgcacttacagatactggccagggcccg

SEQ ID NO: 26306 - DNA, 1412 bp, Artificial sequence
  DNA replication origin
tgacgggatgggaagggtaggtttgcacaccgaaaaatcagatattacacttatttcaggagggttcgtggaaatgtggggaggctcaagcaccccttggcgccgccctggttgggggccttccgctcggtgtaagaggttccgggtaagggctaactcggtggcgactactgccaccttgaagggcactcaaggtggacctccccgcggaatagtccaagacgcaagtcggtgcgcacgtggacttcgttaccctgagggtgaaacctccaactagcaggtcactgtccaccctacctccgccgtgcacttacagatactggccagggcccggcacgcgccacagctgcacgcctctcagctgcccggcggcccccacggtcaccaccacgctggtccccgcgtacgccccgtcacattgtgtctgtgtgggcccatgccggccgctggccccgcaggtagaaaacagccaagacccctcggtgcctgagagcaaggagcgaggcaagggtcgtcgagcccctggctgggccagaggggtctggtatggtgagcgaaagaggaaggaggcgtctaaagctcacccggagaattcagcggggaggctggctccaagatactaggcggggcgctgactttcgggtcccgggggctgggacttgccagcggcaggggcgaggaccgcagaaaagtctcctgggaccccgggctagagcagagaatggcgcctgaaaggtgttgggagaaggcgcaggacgttaaggcgggtggaaataggatatgaaagaaagagagaaccccgcaacagctgcccttgcggtcgcggccacacccgtcacccggcccagccgcgctctcagcctggaagccactacccgactccggtcgcagaagccccgcgggtgcgcgctgataggtctgccagtttctctcctcgagcgcctttcccagtgaataacttaggggccgcaatgaatttggtcctgcagcctccccaatgctttcctcaacttagattggtggccccgccccaaggcggtgctgagaccccaaagaatgttcctccttcccaagctgcgtgatccagactctgggattcgcacgcacttggcgcttctcggcccgcactccagaagcacggaccggagaaatttggctgtgagagttcgaggcctctggaggaaccactgacacctggcctgttgaccggccacccccaagcctaggaaagtgcctcaggctggacggtcccctgaccgccagatagcacttacccgcggctccgaaccacaccagcagctgtccccagcagcccatccctgttgggtccacccggcaacaaaagcccttgcggtcgcggccacacccctgtcaacctaaagttgacagctcattttgccacggcagccctg

SEQ ID NO: 26307 - DNA, 1498 bp, Artificial sequence
  DNA replication origin
ccccaatgctttcctcaacttagattggtggccccgccccaaggcggtgctgagaccccaaagaatgttcctccttcccaagctgcgtgatccagactctgggattcgcacgcacttggcgcttctcggcccgcactccagaagcacggaccggagaaatttggctgtgagagttcgaggcctctggaggaaccactgacacctggcctgttgaccggccacccccaagcctaggaaagtgcctcaggctggacggtcccctgaccgccagatagcacttacccgcggctccgaaccacaccagcagctgtccccagcagcccatccctgttgggtccacccggcaacaaaagcccttgcggtcgcggccacacccctgtcaacctaaagttgacagctcattttgccacggcagccctggccaccacttacaggggtgtgctgccgctggcgagacactccccggacctaaagctggtctggccacgcccacctcagaccccaggacgccagaggaggaaagggaggggcgtgtgggcagcgaggtccctacgcttccgggaggagccttaaggagtccccacccaggggttctagtttccagccgtcagatgtgccgcagcctgctgggagctccggtaggtttgaggccggagaggaggtgccccacgcttaaagtgggagccacacctcggacaccaggtgggggcttccaggttcctgaggacaggagcagtggagtgtgcacttcatttgtggcagtggtggtggtggtgagtgtgtggcatgcgtcaccacacgtgggaagtactctaaactgctccaagtaaggcctcattacctgccattacttgtgccttttagtggtgcctttgtgactgcaaggctgaacctcattgctactcccagaaacctggatctctgtgtttgcctcatataattccgttgcctgtgttacccctgtgcacagcctctcactgtgatggggtgaaagactggaccagacgttagaagatccgagtgtttttagtagcactgaaggtcaatagatgataggtaggtagaccgatcgatcgattgatcttgagcactagtactggcacctctggtcaatgggtgatgtagcacaggccacaactgccctgagagtttccccaccacctgcaaaatcatatgaagggaaattgctctgtaaggtaccctacaaatgtgggagccactcccttcaggtagttttgtgtcttgagtcttcgatcatttgcttaaatgatcatttgccgggtgcggtggttcatgcctgtaatcctagcactttgggaggctgaggcgggcagatcacctgaggtcaggagttcgagactagctagaccatcatggcaaaatcccgtctctactaaaaatacaaaatcagacacacgtggtagcgcacgcctgtaatcccagctactctggaggctgaggcaggagaatggcttgaacctgggaggcagaggttgca

SEQ ID NO: 26308 - DNA, 1299 bp, Artificial sequence
  DNA replication origin
tgtagatcagttagtaactttttcatatatagcatgttgcctgtatgcagtttaactatataaagttcattgcaaagcagattatcttgtttttttcatagcaatcaaagttgaaatttgtttgctacatcaacaaattaagaacattttcacaaactgagaaataaacaaatatgccaattaaaaaaaaaaaaagaaagaaacagagacagagatatctggcccctgccatccatgtcttgacagtgcctcatgagtctctcctcctgctgccgcctgggggcgcccccagctgggtctcaggctgctgccagcactgctgttgttatcattagggtaattaataaacaagcactgctggggccaagtggaagaagaggcaggcccctgctgctcaggagaatccctgaaaagatccagtgagcctgcggcaaccggagctgagtggctggtccctcctctctacccaggacctctggaaggggtgtggggtgggcttccccctggagggaagggcaaggggaggagcacacttggtaggcttggtttggaaccagctctgcatgtgcctaacaggatgtctgtgggcaaggccaccctcgtgattactggttgtggggcaggctctgaagcaattattcattcatttaacaggcatctgcctatttatttatggaaagcctactgtgtgcaaggtggtctactaataatagctaatgtttgactggacagtgtgacgacacagccaactttcacaccaggtcctgggaaaaggggtagaagcaggggaagcaaccaggaaaaatgacagcccaaaaagatacgggcaattaggctttggcctgtgtagtgtagtggtggggatatatattaggtaaaacctggggattaccaagatcttgggaaactcaggacccaagttggaaaacatacggcaattggggctggagaaaatgggcatttttcaggtgggagggacttggagataaaggcatggcaataggacatgaatatggggattttgggtgaatggctcaatgaaagggaggcacgaagggatgctagccgatcctgttgggggagccccgggtcacggcagtttcggggagccagatggatgggagtgtctaggggttgaggtgctctaagtcctgagagggggatgctggattctgggatcagagtccgaacaagagttggggtgtggtgggggctgacagcggggttttgagggaaggctctggagggctgggttagaaaagatgccggagcgggtttagggaaaggaggggcgtggcc

SEQ ID NO: 26309 - DNA, 2102 bp, Artificial sequence
  DNA replication origin
cggcgacggcggcgacggcagtggaaggagcgcggtggcgcgggagcggccccggggaccccgcgctgctgacggcggcgaccgcggccggaggcgggcgcgggtctcggaggcggtcgcctcagcaccgccccacgggcggccccagcccctcccgcagccctcctccctcccgctcccttcccgccgcctcctccccgccctcctccctcctcgctcgcgggccgggcccggcatggtgcggcgtcgccgccgatggcgctgaggcggagcatggggcggccggggctcccgccgctgccgctgccgccgccaccgcggctcgggctgctgctggcggctctggcttctctgctgctcccggagtccgccgccgcaggtaggggctggcacgggaggcggcgggaagcggggggctgcggaggggcgcggccgggggtcggagcccggggcgggcctggcgggctggagtcggggtgggggtccggagccgaaggccgaggctcggagccgggacagggcacgctgcggagtgctcgccgccagatctccggccgggcccccacccccaactttctggcgctcggggctcttctggcggggtggaagagaagggagcggggtgtgggctgtgtggtcagcggggagtgtttgggactgcattttcccgcctcgatgttcccagctgttagctccctccttcccagtactggggaccccattctgcctgccccgcacgcgaaggtccgcctcggaaaccacacgggccggggctgggcacccaaaggccaccctgataccatttaggtacacaggggctgtgagggtgcccagtcacaaaaaacaaatgggcacactcgagttcctgtgccctcagagcttcctgaaagcagaaccttggagaggatgggctggtgccaggttgctggtctttgggaggggttagtcttgtgttcccacatagccactgaggcatttgctggtgacaagagcgttccatgcagcacggtgctctccaagttcccaccccgcacctcggggactgatgggcatatagggagcgggaggctggcccccatcctgtgactggtcctgagagggtgaagggagcagggaagagccacaggccaggacagcggccacccgctggcatcttctcttgagacagcattccttgccatatcagcctctcagggaagggaagggaaacggggtgacgagtatttacaagccgaaaggtgcggacctgatgctcagggagcccacgactttgcctagagtcacacagcaaagggtgagaagaagcagggctggatttcagttatgtggatacttgacctgcccctctctctgcttaaaaacatgccaggaggccaggagaggtgcgtgtatgtgtgtgtgtgtgtgtgtgtgtgtgtgtgtgtgtgcgcgcgcgcgcgcgcgctcgcacgcaagttccaaagagtggcccctgttaatgtggcagtggctcaggggtcttaggctccctgctcagggccccagccctcccttctgcctcccaccttcctagcactcgcccctgcccacattcaggtattaatagagtggatggctgccaggaaggctgccatgtgtttgatctgacgtggttttgcagccatatgttctccacttcaggggagcaccccctcctttccttcttcagccctgctccatttggtaaggttgggtgcagagggtgctggcagcaattcagggtctgggctgacaccttgggtggagagctggcagcctgttgcactagttgggtgcagcagtcattcctagagcagtgcctgccccagtagggtaactcccatcgtttcagcccagcctgccttccttttgctgtctgggctcagaaggaggacatggggaagaggtccttagagccggagggaacttggagagcttgccatgccccttcccttcgcccaggtccagcgaccttcccttccacactgtcctacctctgcttccttgactttggctgagaaagagccctctgtctgacacagaagctaccttctagaagagaatgggaactgtttacagagacagagtccctctcaaggctgaca

SEQ ID NO: 26310 - DNA, 756 bp, Artificial sequence
  DNA replication origin
cctgtcctccaccctggaccccagccggctgctggagcccagaggccaccttctccctgcatcctgaatgatgcttagtcagaagcctgtgttggaacatccctcgtttacggggcgctggcctacctcctgaggacctcagccacagatgagatcacacgcatgcacgtgcacacatgtacacacacacacctacctgcacagcacgctgttgagtgttggttgctagagtatctggctggctgctgtgtgcctggtttcctcacatcctgcctcagcttcaccaccctggcttatgtggaacacctatcagggagcagaaaaggggtgcagtacactaagtgaacccagattctggattcttggtgtccacagcctagctgatacgagatagcccataggacacctggtttaggtagaaggagcctcctcaaaggcagtgctgggcacccacgggtgtgctggatactggagtttgagaggagggaggtgctggggccaaaggagacactagaaaagtggtagatgggacaggtaagtggcagaggtgaggggataagttagaatgtaaaagggcagtaattaggggtgagggaaaggagataggggaccctaggaggtagagtgggaccatgtcgtgaggcagttgaagagttgaggaaaggtttttctgggccctactgctcccctctgctgcaggtaagtcagagcagctttaccacagcttcaggccacgagagccccttcacccgccct

SEQ ID NO: 26311 - DNA, 1585 bp, Artificial sequence
  DNA replication origin
aggtgtgaactcagagggtgggcctggggttgggctggggatacagcctgattgcccagggcctcagggcccctcacaggcatggaaaccagcaggaaaggaaggctgggcgcaggcagggagagaggctgggaaggggcaggtgcgggtctcacagccttccctctgcacttccattaacacttggctctccagccctgccctgcccatggtgggagccctacccaagctgtcacccatagcagcccctccccaccaggtgacagagtgcctgcaggagctggaagggcggctgcaggagctggaggaggcttgggccctgcgctggcaacgctgtgccgagagctggggcctgcagaagcttcggcagaggctggagcaggctgaggcctggctggcctgctgggagggactcctgctgaagcccgactatggggtgagtgggggtcctgccccttagctggctaccaggctctgggcccccccccccaagctgggcgtcacctgaacatgcttctccccagcactcagtgtcagatgtggagttgctgctgcacagacaccaggacttagaaaagctgctggcagcccaggaagagaagtttgcccaaatgcaaaagacagaggtgacgactgcctcggctaggggctgagggctggtgggggaacagtccctctcagcctgcaagtcagtgtctcccagggcactgagccctcacccggccctgccttacctgctcctttccctggccagctgcggtggtgggagaggcaccattgtggactgggtgtgagcctccagagccaaagctgaaagagctagtgatggggaggcaggccccctctgaccgggagggctgggggaggggaggtagacgggaacctgaggtgtggctggtctccctgacctggctcaccttgcccaccttgcccactccccaagatggaacaggagctcctgctgcagccacaggagctgaagcccgggagagctggcagctcgctgacatcctttcagtggaggccctctggacaccaggggctaggagcacagctggctgagacgagggacccccaggcaggtgtccctatggggctgcaggcacccccgccgtggtctccctgaagcatgcagtggggctggggctgtgggggtgagggcccacaccctggagccagtgctgggagcccgggcacaggagctgaaggtcattaggaataaagatggctgtctacagccataccaccctgaacatgcccgatctcatctgatcttagaagctaagcagggtcaggcctggttagtacttggatgggaggaataaagagagctgggggcagtgggtgccttgcccaccttcctgagggtgctggtcctgacatttctgggccccatcttgcattttcaggatgcaaagggtacccccaccatggaggggtctttggagttcaagcagcacctgctgcctggcgggaggcaggtgagtgcctggagattccttctccaggcagctccccacttgcagcagcacttgagtggctcgaagagccatctgggcctggcacccttgcactgtgaacttgg

SEQ ID NO: 26312 - DNA, 858 bp, Artificial sequence
  DNA replication origin
tcctgaatgcagagcacgcatcggctcagtggggggactgaggcctgatctcatgctctggttgcagagagagctggaagctatggagaaggaggtggcacggctacagacggaggcctgccgactgggccagctacatcctgcagctccggggggcctggccaaggtgcaggaggcctgggccaccctgcaggcgaaggcccaggagcgaggccagtggctggcgcaggctgcacagggccatgccttcctcgggcgctgccaggaactgctgtaggtgtcctacctcagctgccggctcagctctaccctgtggggtgggggtatcctggctcttgggggagctggaccctccctcccctgctccccagccagccctgacaacagctcccttccctgccccacagagcatgggcacaggagaggcaggagctggcgtcctccgaggagctggctgaggacgtggcgggggctgagcagctccttgggcagcatgaagagctggggcaagaaatcagggagtgccgccttcaagcccaggacctgcggcaggaaggacagcagctggtggacaacagccacttcatgtctgcggaggtgtgaactcagagggtgggcctggggttgggctggggatacagcctgattgcccagggcctcagggcccctcacaggcatggaaaccagcaggaaaggaaggctgggcgcaggcagggagagaggctgggaaggggcaggtgcgggtctcacagccttccctctgcacttccattaacacttggctctccagccctgccctgcccatggtgggagccctacccaagctgtcacccatagcagcccctccccaccaggtga

SEQ ID NO: 26313 - DNA, 857 bp, Artificial sequence
  DNA replication origin
ctcttcctcagagagtgcggccgcctggaggagatcctcgcggcccaggaggcaggtcccctcccgccctcacactccgctcagcctcctgctcctcctttctattctcctctctgctcagtccctttcctcctgcctctctggctttttctctaatatgaggcagctgtgcacaagtccttccaggtggccatggtgaagtgctgaggcccctgagcgtccactgacatccccagcccctatcccagactgagccccgaggaagttggccagaggctggtcatgctccccacatggtgcagaggttgaggtatcgcagcctcccaacctggactcccactcctcacagctccatgccaagctcagtgggcactcctaaggccctgccatacccagagtgcccatgggcacagactgcagctggaggggctggctggctggaaggcttggtggcctctgacttttctgtggatccaggtctccctgaaaaccagtgccttggggagctcggtggaagaggtagagcagttgattcgcaagcacgaggtcttcctgaaggttctgactgcccaggacaagaaggtaatggagtcaggaggcctgggcgtggtcagagtgtggtggttgggagagagtcctgaagggggtcacggggcgcttggtgtgttcctggaggcagtgctgatgagcctgcaaggctggggtcctggttggggttgactgagcaagttgtatgtgtggctcaagaagagggcccagggggagatgggccacactgcagagacccacacggggcatttggctctgtccacaccgtgtggtccttggggagcagactggtctggcttgtggctggg

SEQ ID NO: 26314 - DNA, 1682 bp, Artificial sequence
  DNA replication origin
ctgctgctcggcctgcagcctctcttgcttccgtgcccaggtctgatacacctggtcccgctggtcctgcagggctcgaagctcttcctggacctggggatggacacatgaggagcctcagctggggagggtggtgtgggtgaggtgaggactggatcctgagggaagctcctgaggagaggccagcatggcacagtaggacggggcaccaggtggccaggcacaggcttggtcagctagggtatgtgggggcaccaggggagggggcccacctccttggtgggtgtccctgcagcaagaagtgcctgctgccccagctgggtggcctgctgccacagcttctcccgggcctccagctccgcccggagccactggtgggcactgagcttcagcgggccactgctaggctcttgcgaactctcctccacctgcaggtcctggcgcacgcgggctgcccaggaggcatagtcacgcacctgatcccggggacacggagggagagccgggtgagggctgggctgggcagcaggaaaccaggtgctgaggcaactgcagcccacctgagtccactcacacagcccgagccgacctgggtcagggcctcgggtgaggcacatgtggccctttgtcacttggtttctccgttctcatccaacccgatcctcccagaaccacgaaccccctacatgagccagacccttaccacgacacatctctgccctttgttcctcctgccttcccatctctacagagctcacctggatgaggccatgagaggactggcggctagcaagatcagccccatcaagactgcttgatggggaaagaaagttcacctgctcttcaaaggccccttggccgcatttgcctggcaaagccttccctggtatttgacattgcactgctctccttgttctctgaattactaatttaacccttacagtcttctgctgatttgtgtacaactatacaagattggtgctggagggacttcaggcccttgtccaaatgtctcattgcatggaggaaggaagggtaaatggcagaaagagtcttgtaaactctaagtgcatgacaaacccagggttaagtgccttgctcaagctcacactgctagcaaatcagcagagttaggtccctaaactcaagcctttttgcagtgtcagtttgggcctcctggtctgccaggtcccaggacagtgggatgccggggacaccccgtggccaggacctactgtcccagtctgattctctgggtttcgggctcatctccccaggaagcagggctccatgagggcagcagttccactttccatagcttctatattgccctcctctctccacccgtggcttcagcagggagctgaagacagacattaaatagatactgactgatccagaggtcactgtctaacatctgggtctccagttatgagctttcctgggcagttcttactcccagccctgtctgggaccctgcatgactgccctgccactcaccttgctggcactgacccagaccctaaggtgtcactgctatgcccatgtgctcagcccctgaccagccagactgacatcccgtgtgctcgtgctctcccacccaagtccatgcttgttctccctccggagctggagggcctcatgcgtgcatgcccatgcatggtgcagcacacacacatgca

SEQ ID NO: 26315 - DNA, 1526 bp, Artificial sequence
  DNA replication origin
agggctggctggcaagccagaagcaggcagccaaaggaggggagagcctgggagaggaccccgagcacgccctggtgagaagagggccagggtcaaggagggtgccctgaggcagagcctatggggtggggaagctggctctggcggggcggaggaagaaggtggcagcagagcggtgagccctggctgaggtggggcctcctcagtggagcgggcagacgccgtggctatccaagcccacatcacccagttgggcactgaggtgcctcgattcccaggctgcttgacgcctaaccagctgggggctaccctgtcacccactcccctcttctcagcacctctgcaccaagtttgcaaagtttcagcaccaagtggagatgggcagccagcgggtggccgcctgccggctgctggcggagagcctgctagagcgtgggcacagtgctggccccatggtccgtcagaggcagcaggatctgcagtgagtgcccaacgggccaggccagcatggggtttgggggaaggagctgggcaggcagggcccagagtggtaagagaggatggcatgctgtgagggccacactggccctggctgcccacggggctctgcagggggcctagctccagagaagctgagcccgccacaggctctggtctgtgaaggaaggtgaggctgggtgtgcaggtcagagtcctgcccccaggattgagagcaggagctgtgggaagatggtggggccagacatcagggccttcccctgagctaccccagctcctgtgctcactcgggacagcccatgcctcgtgtggttcctagctgtccacttggctgatttggatccactcccagcctgtgagctttgaggcaaggtcatgacttgctcataacccctagcccagagcctggcctggcagaagccttaggagctcagccagttgcagagttagcgaggaacggagagatgtggcctctgcccacaaagcgtctgtgatcataacctgggtgacgcactgtgagtcaaagcacaggatgtaaagagtatcacagcacagataccatgcagtgccgagcattacagcagcaaagcactgaattcatggtaaagctagaagacaggctcccaggaagaaggtgcgtaggcagggccacaggcgggagaggttttaagaaggaggagctttgggcaagtcccgatacaactcagagaggagcgggctgaccagacctagcgggagggaggaatgacacggcccggcagctgatccccggctggtcttccacacgccgtgggcaggaccgcctggtcggagctgtgggagctgacccaggcccgaggccacgcgctccgagacaccgagaccaccctcagagttcacagagatctcttggaagtcctcacccaggtccaggtgtgagccggaggggtggctagaagtggatacactccaggctcagtgcccacgctccatccctcatctcctcggcattctcccttcctcaggagaaagccacgagcctccccaac

SEQ ID NO: 26316 - DNA, 891 bp, Artificial sequence
  DNA replication origin
tcactgccctggctgtgggaaagggcctctgggctgaggtcagcagctctgctgagcaactgaggcagagatatcctgggaactccacacaaatccaacgacagcaggaggaactgagccagaggtgagaatgaggcaggagtgcaggtggtgaggcaggcagacacagtgcccagcctgggcctgactcacctgcctcccgccatgccagatggagaggctggacgtgtccgaggcacagggaaggggcaagggacagccagtctggcagcttctgtcacgtgaggctctggccaaggctcccggatggatggggaggtgtccctgttgtggagacaaccttgtaccctctgcccaggtgggggcagctggaggccctgaagagggagaaggccgtgcagctggcacacagtgtggaagtgtgcagttttctgcaggagtgtggacccacacaggtccagctgcgagacgtgctcctccagctggaggccctgcagccagggagctcagaggacacctgccacgccctgcagctggcccagaagaagaccctggtgctggagaggagggtccacttcctccaaagtgtggtcgtaaagtacggccagcgcagtggtggcattgggaggcagtgaggaccatgggaaggcgtgggcagggcagtggaatgaggaagggacagaaattgggatggggagacaacaggtaggagggctgtggcaaagatggggggatgatcaggagaaaatggtcctggggacaggaagagccctatgtttttttatttctttttgagacggagtcttgctctgtcgcccgggctgagtgcagtggcgtgatctcggctcactggaagctcagcctcccgggttcacgccattctcctgcctc

SEQ ID NO: 26317 - DNA, 2017 bp, Artificial sequence
  DNA replication origin
caggccgtgtgcgtagatctcgtgcggaggggacgcgacctcagcgcccgcaggcccccaacgcagccggatcccggggaacgggcagaggccgttcagggagggtggcagctgctccagacccgggtggtggggcggggcgcacggctgcagacagccctgctggtcctgcaggtagtggggaggggtggaggcggggtgggggcggggcccggcgaggcgggggtgggggtgccagcacctgcccgcgctcagccgcgccccttcacccacaccacccccgaccccctcccacagtacttcgcggacgcggcggaggcggcttcgtggctgcgcgagcggcgatcctcgctggagagagcgtcctgcggtcaggaccaggcggccgccgagaccctgctgaggcgccacgtgcggctggagcgcgtcctgcgcgccttcgcggccgagctgcggcggctggaggagcaggggcgggcggcctcggcccgggcgtcgttattcacggtgaggacggggacagggaagggcgcctggtctcccttgctccaccgcggctgggccacacagaggacaaaaatgggagggcctttgtggcctctggcccaggattcgtggccttcccgtgggtgtaggtgtccctcaccccagtcctcagtggcatctcacttgttgacctagcccagaagtagtggaatcctgtctgcccacgtcaaccgagggcatccaaatacagcttggcctggctcctgttgccggcagtttcagaccgttaagcactttcctccaggaaggtcccctccactttcacccaggccagtagtgactgtctctcctgacttagcccgccttgttggtttggggtggcctcatcactcacccagactgccttctgacaccccttgctcagttcattgagcccccaaagttctttaaaacacgtatagcttggctcacagccctctttcaagaagctgtgtatgcagcacacgatgtggaaatcaaagccatcagatcctgtgctcacgtttggcccctcgaccctcagccccaaggaagcttcctgtcccccagacccatgtcccacacaccctttgagctacagctcagcgcctccaggtctcagggcacggaggtaggggtggcctggccaaagcccctgctgcttgatggggtcgcctgtagacgcgctgccctttgtcacacaggtgaactctgccctgagccctccaggagaaagcctgaggaacccagggccctggagtgaggcttcctgccaccctggccctggggatgcctggaagatggccctcccagctgagcctgaccctgactttgatcccaacactatactccagacacaggaccacttgagtcaggactatgagagtctgcgggccctggcacaggtaacacttctttttcaagaaatgctcgagtccttactctgtgccagcagctcctgtgcagtgatcccaggggacaaggcagtgactgacatgttccctgtcctcaaggagcttttatcatggctgagaagatgtcagacaactcattagatgcaggtgtgatgggatcacatgagaaggtagcccaggtcaggctggaggtcagggaaggcaccttggagggaaggacttttaagctgaggcttgaatgagaaacagaaagcaggtaaacccaggggtgctggccaggacctgtgcaaaggtaggaagggggcccagcggaggaagcgaaggcccaggtccctgcagcacagacgctggggaggccatggccagaggagagactagagaggcaggtgggggtggagcaggcagagggagcggcgtggatttcaccttagagcagggctggcactgagaggtttcagcagggcaagaccagacaggagcacactgccagtgccctttacccttccctaagcccttgccatctccctccaggtggtgccaagagggctctgagagaggatgtggggcccagcagtgaggcagggaccccctctggccct

SEQ ID NO: 26318 - DNA, 1834 bp, Artificial sequence
  DNA replication origin
tcctcaccgtgaataacgacgcccgggccgaggccgcccgcccctgctcctccagccgccgcagctcggccgcgaaggcgcgcaggacgcgctccagccgcacgtggcgcctcagcagggtctcggcggccgcctggtcctgaccgcaggacgctctctccagcgaggatcgccgctcgcgcagccacgaagccgcctccgccgcgtccgcgaagtactgtgggagggggtcgggggtggtgtgggtgaaggggcgcggctgagcgcgggcaggtgctggcacccccacccccgcctcgccgggccccgcccccaccccgcctccacccctccccactacctgcaggaccagcagggctgtctgcagccgtgcgccccgccccaccacccgggtctggagcagctgccaccctccctgaacggcctctgcccgttccccgggatccggctgcgttgggggcctgcgggcgctgaggtcgcgtcccctccgcacgagatctacgcacacggcctggtggcggtggacctcagcttccagggcctagcggggggcagagcagggggctcagtgaaggcagaacaggggagggggccgggggcccgagagggaagggcaaggcgctggcgaccggcgggcgcgctcggggagctgacaccttgtgtttctgcagggcgcctgcgatctggctgagatcccggcccagggccgcattccccacccgctgtccgcactccttcagccaggcttcctcctcctcacagttgcgcaggaactctgcccgctgcagggtctgctccagcagggcccgcctgagggacaataggggccaccgaaggacatggggagtcgtgaggcatgggcagtgggttcccctccgggtttagacactccccttagacaggatttttcttttccctggatgactcaacaggtgagacggaggctttggaagtgagggtcagtgtggagaaaactggcaggccaacagtactttaacctgggcaggagataatttgggttacagaaaagttctgggaaaggtggaagagttggggcaggctcttaccgggccctgacaagagccaccaggctctgttggagctgggccagtgtcctggccttggcctgcagcacctccacactggtgcccagggaggagtccagctctgctgtctgctgagcaagatggctcacatgggctccgtgggccgagacttgagcctccagcaggtcatgcctctgcagcagctccaccacttctgccagctgctgcccacaggcggtggacctggccggctcctggccagagatgatggtcattgcagtggtcccaaggtgctgggtccctctgagcactggcactggggaagtcccccaccttgctgtgtttcccaagggcctgctggtccagtgcccacctgcagctcctccagctggtgggaggcagcctccacctcctgcagcaggctcagcacagcctgcatgtctgccacctgcttcctctgtccctgtagatgctgaaggagcctctgccagcgcacggtaacttcctcctgcctagaggatatgagaataagggagatctcctctgggttggggcagggaagctacttcagggttcctggtctgtggtggggcttggctgccctggaagagtctgacctccatggctggggcaaggtctatggactctgacagcatcctggcaggcggtggtagaggcagtgtgtcctacctttggacacatgcagagaagccagaaggagggcctggaaggatcaggcctttggggccccctaacttggatgcagtccccatttcagttgatgaaaa

SEQ ID NO: 26319 - DNA, 898 bp, Artificial sequence
  DNA replication origin
gactcttaagtgagaggaagcagagcttgtggagaccctccggggaaagtaccaaagaggtgggtaattgcctgggagggtagtggctcagtgctgtctcagatctctttaggttgcaagtgacagaaatccaaccaaagctagcttagataaaaagataagaacgttttcctgaaacccatcagaccaggatgtgcaagcttcaggcttggcccaggactgcaggagacacaccaggactctgttggctctgtggccctcctcatgttgtgttccttctcaggggtgggcaggcggccacctccatttccagcctcgaattctgctggctcagcagccccagtaaaagtctcaggcttgagtctcattggtttgaccctgaccatatgcccatccctgaaccaatccttaggggcaggggcatgaaatgtggggagtggggaggtcagccccaccaaccacgtggcctgagagctggggaaggcagctcctgaggatgctgctaccaagaaaaggggatacgaggcaagtaaagcaacgatgacccccacaaaagccagggagagaggtggtggtcagtagtgtcagatgcttccaggaaaaggactgaaacagaaccagtagattagcctttgggagccaggtgaccttgccaagaggtgtgcctgtgagtggtggtgaaggaagccagatggcgcgggttgaggaatgagtgggatgtgaggcgtcaaattctcagcagctaggcctgggggaaggaggcctggccacaagcatcacaggggtttgggtaaagacaagcacaacctcagcagaatgaaaagtggacagaagggaagccatggagagggagcagctggcatctcagaagacaaagaggaggcaagacttggagcaa

SEQ ID NO: 26320 - DNA, 1496 bp, Artificial sequence
  DNA replication origin
agcctttgggagtgtcaggctaggcggtcacccagatgcagggtggacctggggacgcggccctgagcagcgccgagcagagcctccacccgaggcacaggaacccggcatcctcggcgatggcagcaatggctgccccgctggctggtccccaaagcggcaccgctcccactttcagacccgggccccagaagcgcatccccagttccccctcctggggctcctgctcccagtgcaagagcagcaccgctctgggcccagttccacttcagggccctgctctccccagtcgcgctgctccccagctgcgctgctcctctgccagcgggcgacctggcccagccccatcgccgcggcccccagggcggtgggctgcagaggaggctgtcggcctcctccccgcaccctccctgctgcggccggtgatggcagcggccgctccagatggtccgccgctgccatcattaggaacagcttaaatgtctaacccacaaaatcataagttgtggaataggtcacaactgtgaaaatgaatgaaccatatctattgttaaccaatataggtgaatcttacaagcctaatgtaaagtagagaaaaaaaacatgtttatagcagaatggatatttgtatgttacctagcttatataaagtttaaaaacgtgaaataattccaagtatagctcaggaacacacacataggtagagaaagagtaaagaaatgcctgggagtgatagacatgaattcaggttgctttaaaaaagtataaagcaatatatacgatatacaaaatgtatagagaataataaaatggatacctatgactccactgcccagccttaaaaaatcacactggtgacagagtcaaaggccccagggtgctccttacccaatcacttcccctctctctcttcctagggatagtgtttaacctttggttaaaaaattaacctgaagcccaagtgccgagcccatctgcaaattcttatcctgatttgcatatgacatgatttccatttcctgtggctgttttgcaacatcccctgggcctgccccatcctgcctgcctttcccttccttcaactgagccttactcgctgggaaagcatggttgcctctcccattcccagcaggagaacgagggtgagtccccactctctagcccctaggcatggacaataaccaacgcttttcatctgtcccagtttacaggtgttgaaatgtaatgtttcaggtgctggttgctcctcccaggatggggagaggctttccctatgcaggggatgtcaccaaggcagtaaggtatgtgagtggtgggtagacatatgacagtgttgacttccagtcaaggacaaatgagagatcagagcaaatcctggaaatgaggcgagaagaacaggaagatgagagaaggaacttggaagatctcttcccccacgattcggagaagagggctcctgaaggcaaatgttcagacatgtgcctcccaccgtagat

SEQ ID NO: 26321 - DNA, 1440 bp, Artificial sequence
  DNA replication origin
cagcggggcagccattgctgccatcgccgaggatgccgggttcctgtgcctcgggtggaggctctgctcggcgctgctcagggccgcgtccccaggtccaccctgcatctgggtgaccgcctagcctgacactcccaaaggctgggccagggcctgccatccacaccaccctggaccgcccctggttgccagggcaacagaagggagctcatagccgtgtcgcccctgccctggacactggccggggcccagccaggacctggagcccctgccccaggctgcgaaggaggggcggatggagctgcatgctccgcggagctggcgggagccgggagccggggagcaggcaacagcccaggttggggctgtgggcctgggcctctgtgtgctcttgggggccctgggagtccccccgaccccccggccttgcaggcttggaagtgcctgctcccgttgcctggcttctccccgctgccggcgcccactccgatctcagagcaccgtggggccgagtccaggtgctgttgcagcctggccgagggtgcacatatttggggcagtgctggtatgccagccccctgccgcttcagccccctccagactttgggtgccaacgagcatggggtggggggtgaggccaaggtgggggactgagggcagctccgtgctggcctgtaggtgccccttggcaccagcagcctgggcaccataggtggcagcagaaggcagacaagctcctgggtagaagggggtgggtccctggtgaggccccaccttcaggccaggctgccagtcctgtagatcagaatgggaacttgtggtaccttttccaggctcacccatggctgcccacggaccaatgtgcgcgcacttcctcccctcgaagccctgggctcagccagagcagagcggtcgtcaggatgaccagctgctgagaggagcttcccactccagggcctcctctctgctaggagttgaacactagtagggacgccctggctgggaaaagagctacctactgcgggtctcctctgagctgttctattgctggataaatctcctcatcttcttgctcacctcccacttgtctgtgtaccttgttcttcctggtcacaggacaagaacttggtacctgtctaatggcgggtctaaaagatctataacacaaacagggctgaaacatgccccttgctcacttcgttgtgggtgaagagaaggagagaagagctgcggcccttcagggaacccaaacctgggagctcatggagccacatctgtgactccctcttcggggccctgtggttcccggcatctccaagcttctgggcaccaccacattccctggagccagctgtggaagctgcttgcggtgcacctggagctgcccacctcactgcggcagctggcatgtagccagaccccacgtttgctcacacaccc

SEQ ID NO: 26322 - DNA, 908 bp, Artificial sequence
  DNA replication origin
ggggagagtcccccaggctgaaggtacagcagtgcaaggcgttgaggagtggaaaaggctggcgtgttcagaaactgagcacctgtgtctggggcacggtgaggaaggagtgatgaggtcagagaggccttggaagccatggtcaagatttgggattttatcttaagaaactggatgccaccgaagggtattaagcaaggacaaaaaaccaaacaccgcatgttctcactcacaggtgagaactgaacaatgagaacacttggacacagggtggggaacatcacacactggggcctgttgtgggatggggggaggggggagggatagcattaggagatatacctaatgctaaatgatgagttaatgagtgcagcacaccaacgtggcacgtgtatacatatgtaacaaacctgcatgttgtgcacatgtaccctaaaacttaaagtataataaaaaaaaaagaaaggaagtgatgtgaatgagatcatctggctgctgggtggggacagaattgggcaggacagggacaggaagatgtgttgtagtggctcagatgggaagcaaatggtcacttgggcccgggtagggggcagagatggaagcagtggtggactcgagaggtatttctgagcagaacctacacggcatggtgatagattagatatgagggcatccagtgggcttcagtgacccggcaggatagattagatatgagggcatccagtgggctccagtgacccagcaggtgaaggtacacagggctggtcttgaaggggaggctgtcaagatcccacgtggaggccggtggggagtctcagggggctgagccttgagttaggggcaaggtttggaaaggtggcagctggggaagggagaccctctacgatgggaggtagcagaactgggga

SEQ ID NO: 26323 - DNA, 900 bp, Artificial sequence
  DNA replication origin
catcctagcgccgcggctcaggtccctgcgggaaggaagcgctgctgtcaccgcccagtccacccggtcggcctcccggctggggctcctgccccagctctcaactcccgccgatccctggctcctggggcccgacccaagagcgacaaggaagaaacggaagaacacacagcccgaccaccaagccctgccgcctttgcagctctgcggaggccaggcgcctctgggagcctacggaagatcagggagccccggactcgcctcccaccgctcagctgccgtaaggctccgcaggtgaagacccaggacccgcagtagccgggatgcgctccccggcttagtcccgggcgggaacgccctgtgacgtcatcgagccgcgccgtgcgttcgccctgcgatcccgctcactcttggcgccttcgcggaaggtgcgtccgagccatggccgctgccaacccgtgggacccggcgtccgcgcctaacggcgctgggctagtgctaggccacttcatagcttcggggatggtcaatcaggtacgtgggggtggcggtggtgtcatcaagggggtgcccaaggtggcaacaatatggctgtgagttggtgctgctggctgtgggagtggtgagggtcctggttggggtctgtactagagtaataagagccccttccaggcaacagccgcgaacgttctgccgtggatgcttggaaagcggggatctgagtagatggtgtttagggtagactgtgttttgagtgtctgtagggtaaatttgtcccagtccagtttgtgggagattagactgttaccagcctttttttcatccagtgatactgcctctagactgtagtgtaagggcggggatgggaaatacgggtcgttctgtccccttgcggaacaa

SEQ ID NO: 26324 - DNA, 1806 bp, Artificial sequence
  DNA replication origin
ggggcgtcccaagaggctgtagggcggagcgaggcggggcgagcccgggcgtcctcccgcccaccgactagccaaggctcggcgggcaccacccagctcgggatgcagcgcgtgtttgggcgggggcgacccgggaggcttcggatggaacgaggcggagcgagccctggcatcctcccgcccaccaggctaaggactggccgaacgtccacacgggcccgcctgctctggctgcggcgcgtgtttgggcgggggcgagtcaggaggctttaaggaggattgaggggaggcggggccgggagttctcccgcccaccgggctcaggattggccgaagctaggcaggcaccgccccgctcgggcggcagctcgcgtccgcgcggcggcgtccccagaggcgcgtggggcgggcggggctgggttggggctgtgtctgggcttagggcgggggcctgggatgctgccgctgagctgacccgctggacttgggttgtggcagacggatggcgaacgtgcaggtcgccgtgcgggtccggccgctcagcaagaggtgagtctccgcgggagagggcgcctgaggcttcacaggagctgaaaagagcgggaggtccgcgtctccccctgcagagattctggcgcgcagaaatcggtgacaaagtgacccggggggtcggggtccggaatccacggaggcctggcgggacgggacctcagtcgagctttcgcgttgtgtcctggggatagcggttcccggacggccgcgggagggctgccctgggtgagcgtcgctggcgtcctgccagcaggagtttcgagggacggcggctcgaggcttgctgcatcgggttgggcctttgagaaaggctgggagagggatgagcattctcctctctctttctgggggcttgggagtacccatgaggactgaggctgaatggtgtgtgtttctgggtgcgcgtgggcttctctgcgaagatgtggagaaagcagaaggtgagggcgtgagggggaaattgaggccgacacaggtcgcggtttctttctatgctcgacagctgatttaatccaggacggaactgttaagtaggggaagttgttccaaccccttctttctctcagagccctcagtgcccgttttctcgtggcttattttgattccgcacctctcatctcagcccttgagacatccagtgtgcagccacgaacttttttctctttgtcaccagatgaagtgttttttaaagatcaattagagtttgttgacaggtggagagagtttaaagagccttctatgtagtaagaccgccaagagcaaaggacttagactgtaagggactaactagaggttaagttttggtggggaaagggtggttggtgtggagggaagtgagtggtggaaggtaaatctggcagagggtgctttggggaccaggaggcacatgttggaattatttggcaagtttaaaaatctctgggacataagatagcttgataattgggcagaaggatcaagaaaggtatcgtctcccataataaaattgggtactagtgtggattatgttcgtcctcatatagaaatgattggctttgaaaagtcttgtaattgacagactaatgagaagagcaatgagatagaaagaaacaaaaagttaaagagaataggaagaaggcaaaagaggtacactgaagaaagagggaaagcagatgcctgacctgctgcgttttgattggtaaatggcttgtgacacctggcttcttcataactggatgtggtagctcagggctggggggggttttataagtgcag

SEQ ID NO: 26325 - DNA, 1513 bp, Artificial sequence
  DNA replication origin
ccgcccacccgaggcgcgccctacggccccggctgctcacggcccgcgggccggcggctgaccctctcgcccctccacctgtgcttctgccctaggataacgctggggaggcggccgcgctgagctcactccgggccctgcggaaagaattcgtaccgttcctgttgaacttcctgagggagcagagcagccgcgtcctcccgcaggggcccccgacccccgccaagaccccgggcgcctcggcagccttgccagggaggccgggaggcccgccgcggggtagccgcggggcgcgcagccagcttttccctccgaccgaggcccagagcaccgctgccgaggcccctctggcccgccgcgggggcaggaggcggggcccggggccggcccgcgagcgtggaggccgcggcctggaggagggggtcagcggggagagcctgcccggagccgggggccggaggcttaggggctctggcagccccagccgccccagcctcacgctgtctgatccgccaaacctcagcaacctggaggagttccctcccgtaggctcggttccccccggccctacagggtgagactcagctctcatgcaggagatgggtaccacgaaggctctggggagtcagtcattcgagctcggcgctccgcagtggagcgccaggatgggtagaaggctgggggtgatggtgagggtttttgtggggttttttggcaagaggtctagctgttgcggtggtggaggggagatgtttgaagataggaatttgagaaaaacctgtggctactctcagcaggacgaagccttctcgcaggatcaacccaactccggtgagcgaagagcggtcactctccaagcccaagacctgcttcacctcacccccaatcagctgtgtccccagttcccaaccctcagccctggacactagcccttggggccttggccttcccccagggtgcagaagtctgcaagaggagcgagagatgctcaggaaggagcggtatggcctggccgctcctggggatatcggtttcctcgctgtgggggatcttcaggggttttccctgaaattgatttccctcttggggactctgggtttgtctcctgggctgttggtatcttctctggagtgacctgagtgtggccgtagcagggaagccaagctgactgctcatgaaatttctttattccatagctctaagcagctgcagcagtcacctacccccacctgtcccaccccagaattggggtcgcccctccccagccggacaggaagcctcacagatgaacctgcagaccctgccagagtgtcttcccgccagcgcctggagcttgtagcccttgtttactcctcgtgcattgctggtgagtgagagcggagggagcgggagtggagacacttgtagaacttatgggtaagagaattggtaaggcacttggaactgagccttggctccaaatggtgcccataccatgggctttctttttgtatctatctagagaacctggtac

SEQ ID NO: 26326 - DNA, 1039 bp, Artificial sequence
  DNA replication origin
tgtgtcgggttacgaggggggagaataacgtcgggtcgggtcagcgggctctgcagtagtcgccgcagcggcgatgggagcggtggggacgaggcggcggcggcggcaggagggggagcaggtgctggcacaagagcagcggcttgggggagccggcagcagcagtaacagcagcagcagccgccgccgccgccgccagtaaacgcggacggtaccccaggggactacccagccggccggccctggaagccgcgctcgggtcccgccgcagtcggcggtgggggatgggcaggcagtggcggtcccgcctgccgagggttaacccccgccggtcccggtcctgagctggaccagagccctcctccagaaacccctgcgtccgccacggcccaggtaggacacaccccccgaccccccagggcgccgccctcccccagtctcgaccccctcctccggccgcacccctcgccgagtgaccgagcctgctgaggaggggaggggtaccggggactttcagttcgctgcaagcccggggctcgtgccagaccccgtcactctccatctcggagatcgttctggttctgcccgatttccccgaaggctgccgcctcgttttgccccaggctttgggtgtcttcactgaacttggagggtcacgaagcttcgttctgcgtctctctctgtgggtgacccacatatcacttgtacccatgccacttctggtaccagcaccgaacacgaaggattcctaggaaatctgagcgcttatttcccaccccgcctccccaactatcatggaaaggaacatgggactactgaatctgtttgctgtgttgtaacgacagtgaaggccgcgactttcttgtacttagggtgctgaagtaatgatctgagggatttgctcgtcatttgctgtggcagagatgatgttgacaccctgggatgctgtgggagggacaaaagactcacgtatatgttctgtcaaatcggagaagtaaataatccattgggatgccaggatactttattctacagcgaa

SEQ ID NO: 26327 - DNA, 1389 bp, Artificial sequence
  DNA replication origin
ctctcatttccccacatttcccccttttctattccacaaaaccgccatcgtcatcatggcccgttctcaatgagctgttgggtacacctcccagacggggtggtggccgggcagaggggctcctcacttcccagacggggtggctggacagaggcgcccccccacctcccagacggagcggctggctgggcaggggctgcccccccacctccctcccagatggggtggctggccgggcgggggctgccccccacctccctccaagacagggcggctggccgggcgggggctgcccctcacctccctcccggatggggcggctggccaggcgggggctgccccccacctcccggatggggcggctgccgggcgggggctgccccccacctccctcccggaaggggcagctggccgggcagaggctgcccccccacctcctggaccgggcggctgccgggcggagatgctcctcacttcccagatggggcggctgctgggcggaggggctcttcacttcccagatggggtggctgccgggcggaggggctcctcacttctcagacggggcggctgggcagagacactcctcacatcccagatggggtggcggtcgggcagagacgctcctcagttcccagacggggtcgcggctgggcagaagcactcctcacatcccagatggggcggcgtggcagaggtgctccccacatctcagacgatgggtgccgggcagagacactcctcacttcctagacgggatggcggctgggaagaggtgctcctcacttcccagactgggcggctgggcagaggggctcctcacatcccagacgatgggcggccaggcagagccgctcctcacttcccagacggggtggcggctgggcagaggctgcaatctcggcactttgggaggccaaggcaggcggctgggaggagggggttgtagcgagccgagatcacgccactgcactccagcctgggcaccattgagcactgagtgagcgagactccgtctgcaatcccggcacctcgggaggctgaggcaggcagatcactcgcggtcaggagctggagaccagcccggccaacagggcgaaaccccgtctccaccaaaaaaatgcaaaaaccagtcaggcgtggcggcgtgtgcctgcaatcccaggcactctgcaggctgaggcaggagaatcaggcagggaggttgcagtgagccgagatggcggcagtacagtccagcctcggctttcacaactttggtggcatcagagggagaccggggacagggagagggagaggagggagaggagggagaggagaggagggagagagagaggaagagggagatccaatctgtgcttttcttaatgaggttataattcccctaag

SEQ ID NO: 26328 - DNA, 1346 bp, Artificial sequence
  DNA replication origin
tcaatcttttccccacctttcccccttttctgttccacaaaaccaccattatcatcatggcccgttctcaatgagctgttgggtacacctcccagacggggtggtggccgggcagaggggctcctcacttcccagtaggggcggccgggccgaggtgccccccacctcccggacggggtggctggccgggcgggggctgacccccaacctccctcccagtcggggcgtctggccgggcgggggctgaccccccacctccctccctgacagggcagctggccgggcgggggctgacccacacctccctcccggacggggtggctggccgggcgggggctgaccccccacctccctctgggacggggcggctggccgggcgggggctgacccccacctccctcccggacggggcggctggccgggcaggggctgaccccccacctccctcccggacggggtggctgccgggcggagacggtcctcacttcccagacggggtggctgccgggcggaggggctcctcacttctcagatggggtggctgctgggcggaggggctcctcacttcttagaaggggcggctgccaggcggagggtctcctcacttctcagacggggcggctgggcagagacgctcctcacctcccagacggggtcgcggccgggcagaggcactcacatcccagacggggcggtggggcagaggcgctccccacatctcagacgatgggtggcccggcagagacgctcctcacttcctagatgggatggcagccgggaagaggcgctcctcacttcctagatgggatggcggccgggcagagatgctcctcactttccagactgggcagccaggcagaggggctcctcacatcccagacgatgcgcggccaggcagagacgctcctcacttcccagacggggtggcggctgggcagaggctgcaatctcggcactttgggaggccaaggcaggcggctgggaggtggaggttgtagcaagccgagatcacgccactgcactccagcctgggcaccattgagcactgagtgagcgagactccgtctgcaatcccggcacctcgggaggccgaggctggcggatcactcgcggttaggagctggagaccagcccggccaacacagcgaaaccctgtctccaccaaaaaaatacgaaaaccagtcaggcgtggcagcgtgcacctgcaatcgcaggcactctgcaggctgaggcaggagaatcaggcggggaggttgcagtgagccgagatggcagcagtacagtccagcttcagctcggcatcagagggagaccatggaaagagagggagagggagaccgtgggga

SEQ ID NO: 26329 - DNA, 886 bp, Artificial sequence
  DNA replication origin
ctgagaagtgaggagcccctccgcccggcagccaccccgtctgggaagtgaggaccgtctccgcccggcagccaccccgtccgggagggaggtggggggtcagcccctgcccggccagccgccccgtccgggagggaggtgggggtcagcccccgcccggccagccgccccgtcccagagggaggtggggggtcagcccccgcccggccagccaccccgtccgggagggaggtgtgggtcagcccccgcccggccagctgccctgtcagggagggaggtggggggtcagcccccgcccggccagacgccccgactgggagggaggttgggggtcagcccccgcccggccagccaccccgtccgggaggtggggggcacctcggcccggccgcccctactgggaagtgaggagcccctctgcccggccaccaccccgtctgggaggtgtacccaacagctcattgagaacgggccatgatgataatggtggttttgtggaacagaaaagggggaaaggtggggaaaagattgagaaatcggatggttgctgtgtctgtgtagaaagaagtagacatgggagacttttcattttgttctgtactaagaaaaattcttctgccttgggatcctgttgatctatgaccttacccccaaccctgtgctctctgaaacatgtgctgtgtccactcagggttaaatggattaagggcggtgcaagatgtgctttgttaaacagatgcttgaaggcagcatgctcgttaagagtcatcaccactccctaatctcaagtacccagggtcacaaacactgcggaaggccgcagggtcctctgcctaggaaaaccaaagacctttgttcacttgtttatctgctgaccttccctcca

SEQ ID NO: 26330 - DNA, 1278 bp, Artificial sequence
  DNA replication origin
cggcaaccatccgatttctcaatttcctccccacccttcccgcccttctattccacaaaaccgccattgtcatcatggcccatccccaatgagccgctgggcacacctcccagacggggtcgtggccgggcagaggggctccccacttcccagtaggggcggccgggcagaagcgcccctcacctcccggatggggcggctggccgggcggggggctgacccccccaccaccctccccgacggggcggctggccaggcagaggggctcctcacttcccagtaggggcggccgggcagaggcgcccctcacctcctggatagggcggctggccgggcggggggctgacccccccacctccctcccggacggggcggctggccgggcagaggggtcctcacttcccagtaggggcggccgggcagaggcgcccctcacctcccggacggggcggctggccgggcggggggctgaccccctcccacctccctcccggacgcggtggctgccaggcggagacgctcctcacttcccagacggggtggctgccggacggaggggctcctcacttctcagacggggcggttgccaggcagagggtttcctcacttctcagacggggcggccgggcagagaggctcctcacctcccagacagggttgcggcccagcagaggcgctcctcacatcccagacagggcggcggggcagaggcgctccccacatctcagacgatgggcggccgggcagagacgctcctcacttcccagatgggatggcggcggggaagaggcgctcctcgcttcctagatgggatggcggccgggcagagacgctcctcacttcccagacggggtggcggccgtgcagaggctgcaatctcggcactttgggaggccaaggcaggcggctgggaggtggaggttgtagcgagctgagatcacgccactgcactccagcctgggcaccattgagcactgagtgaacgagactccgtctgcaatcccggcgcctcgggaggccgaggctggcggatcactcgcggttaggggctggagactggcccggccaacacagcaaaaccccgtctccaccaaaaaaaaaaaaaacgaaaaccagtcaggcgtggcggcgcgcgcctgcaatcgcaggcactctgcaggctgaggcaggagaatcaggcggggaggttgcagtgagccgagatggcagcagtaccgtccagctttggctcggcatcagagggagaccatggaaggagaccgtggagagagggagagg

SEQ ID NO: 26331 - DNA, 896 bp, Artificial sequence
  DNA replication origin
ccctctgcctggcaaccgccccgtctgagaagtgaggagcccctccgtccggcagccaccccgtctgggaagtgaggagcgtctccgcctggcagccaccgcgtccgggagggaggtgggagggggtcagccccccgcccggccagccgccccgtccgggaggtgaggggcgcctctgcccggccgcccctactgggaagtgaggacccctctgcccggccagccgccccgtccgggagggaggtgggggggtcagccccccgcccggccagccgccctatccaggaggtgaggggcgcctctgcccggccgcccctactgggaagtgaggagcccctctgcctggccagccgccccgtcggggagggtggtgggggggtcagccccccgcccggccagccgccccatccgggaggtgaggggcgcttctgcccggccgcccctactgggaagtggggagcccctctgcccggccacgaccccgtctgggaggtgtgcccagcggctcattggggatgggccatgatgacaatggcggttttgtggaatagaagggcgggaagggtggggaggaaattgagaaatcggatggttgccgggtctgtgtggatggaagtagacatgggagacttttcattttgttctgtactaagaaaaattcttctgccttgggatcctgttgatctgtgaccttatccccaaccttgtgctctctgaaacatgtgctgtgtccactcagggttaaatggattaagggtgcgagatgtgctttgttaaacagatgcttgaaggcagcatgctcgttaagagtcatcaccactccctaatcttaagtacccagggacacaaacactgcggaaggccgcagggtcctctgcctaggaaaaccagagacc

SEQ ID NO: 26332 - DNA, 1009 bp, Artificial sequence
  DNA replication origin
cgtcattggtgttcagagtttcggttctcttttctgtgatcgtattacttatgcaaaacgagcccagtcacttgcgcggccagagaggggcaggtgctgggcggcggctgacgggcgcagcaccctaggcccagtgtctggctccagccccgcatccggcgccggccccgcatccagctctggccctgcgacaatagagtccggaagtgcaggcaaagcggctcccgggagcgccgcgcggtcctgcgcgggatcagcgagggccgcgccccggcgggcgggcggcatggctgcagtgctggctctcagggtggtcgcggggttggcggccgcagcgctggtggccatgctcttggagcactacggcctggcgggccagccctcgccgctgccgcgccccgcgccccccaggaggccgcaccctgcgccagggcccggagacagcaacatcttctggggcctgcaggtgacgcggcgggaagccgggccgggaggcaggtgcagatcgggcaccgtgcggtgggacccttgcgggtgttgggccccacgctccaggctggggacctcagtcagattgtaactcgaggctctgtctagtgctggccctgtccttacctggggggttcgttatgcattgcctctttgccttttccttctgcccgagagagccgctgagccgcccctccccatgctgcctcttcctggctcagatctctctgttcaatacctgttttcggcagatatccgacattcacctgagcaggtttcgagatccaggcagagcggtagacttagagaaattctgttctgaaactattgacatcattcaaccagctctcgtcctagcaacaggtagggaggcttgccgtgctgtggtggtggtctgtggtccgcatggtagaactctagccagggctgtggcttttcattttggggacgttgggagcagtatagccacagccccaggtgagctctgtgaggtggaagagattggacattctaacccctt

SEQ ID NO: 26333 - DNA, 1207 bp, Artificial sequence
  DNA replication origin
gcctctgccctgccgccccgtccgggatgtgaggagcgtctctgccgggccgccccgtctgagaagtgaggagaccctctgcctggcaaccgccccgtctgagaagtgaggtgcccctcagcccagcagccgccccgtctgagaagtgaggagcccctccgcccggcagccaccccgtctgggaagtgaggagcgtctccgcccggcagccaccccgtccgggagggaggtgggggggtcagccccccgctcggccagccgccccatccgggagggaggtggggggtcagccccccgcccggccagccgacccgtccgggagggaggtgggggggtcagccccccgcctggccagccgcccagtccgggaggtgaggggcgcctctgcccagccgcccctactgggaagtgaggagcccctctgcccggccaccaccccgtctgggaggtgtacccaacagctcattgagaacgggccatgatgacaatggcggttttgtggaatagaaaggggggaaggtggggaaaagattgagaaatcggatggttgccgtgtctgtgtagaaagaggtagacatgggagacttttcattttgttctgtactaagaaaaattattctgccttgggatcctgttgatctgtgaccttacccccaaccctgtgctctctgaaacatgtggtgtatccactcagggttgaatggattaagggcggtgcaagatgtgctttgttaaacagatgcttgaaggcatcaccactccctaatctcaagtacccagggacacaaaaactgcggaaggccgcagggtcctctgcctaggaaaaccagagacctttgttcacttgtttatctgctgaccttccctccactattgtcctgtgatcctgccaaatccccctctgcgagaaacacccaagaatgatcaataaaaaaaaaaaaaaaaagaaaaacctcaaggagaacaagttggtgaaatatctctccatcatttcaggaataattgatttgcactctgacacaaaccagtcctgtatttaacatattagaaacatggcaatcctcagatattctgtttaaaagaaaagatgcaatctaatatgggcaatggatacataggtgtttgctgtatgattccctctactttggtatgttagagatttggggttatggttcttgttaaaacgaagtaagcacagtctactctg

SEQ ID NO: 26334 - DNA, 1260 bp, Artificial sequence
  DNA replication origin
caggatcccaaggcagaataatttttcttagtacagaacaaaatgaaaagtctcccatgtctacctctttctacacagacacggcaaccatccgatttctcaatcttttccccaccttcccccctttctattccacaaaaccgccattgtcatcatggcccgttctcaatgagctgttgggtacacctcccagacggggtggtggccgggcagaggggctcctcacttcccagtaggggcggctgggcagaggcgcccctcacctcccggactgggcggctggccaggcggggggctgacccccccacctccctcccggacgggtcggctggccgggcggggggctgaccccccacctccctcccggatggggcggctggccgagcggggggctgacccccccacctccctcccggacggggtggctgccgggcggagacgctcctcacttcccagacggggtggctgccgggcggaggggctcctcacttctcagacggggcggctgctgggctgaggggcacctcacttctcagacggggcggttgccaggcagagggtctcctcacttctcagacggggcggcccggcagagacgctcctcacatcccggacggggcggcagggcagaggcgctccccacatctcagacgatgggcagccgggcagagacgctcctcacttcctagatgggatggcggccgggaagaggcgctcctcactttctagatgtgatggcggccaggcagagacgctcctcactttccagactgggcagccaggcagaggggctcctcacatcccagacgatgggcggccaggcagagacgctcctcacttcccagacggggtggcggccgggtagaggctgcaatctcggcactttgggaggccaaggcaggctgctgggaggtcgaggttgtagcgagccgagatcacgccactgcactccagcctgggcaccattgagcactgagtgaacgagactccgtctgcaatcccggcacctcgggaggccgaggctggcggatcactcatggttaggagctggagaccagcccggccaacacagcgaaaccccgtctccaccaaaaaaatacgaaaaccagtcaggcgtggcggcgcacgcctgcaatcgcaggcactcggcaggctgaggcaggagactcaggccgggaggttgcagtgagccgagatggcagcggtacagtccagcttcggctcggcatcagagggagactgtggaaagagagggagagg

SEQ ID NO: 26335 - DNA, 1561 bp, Artificial sequence
  DNA replication origin
aaggcaggctgctgggaggtcgaggttgtagcgagccgagatcacgccactgcactccagcctgggcaccattgagcactgagtgaacgagactccgtctgcaatcccggcacctcgggaggccgaggctggcggatcactcatggttaggagctggagaccagcccggccaacacagcgaaaccccgtctccaccaaaaaaatacgaaaaccagtcaggcgtggcggcgcacgcctgcaatcgcaggcactcggcaggctgaggcaggagactcaggccgggaggttgcagtgagccgagatggcagcggtacagtccagcttcggctcggcatcagagggagactgtggaaagagagggagagggagaccgtggggagagagagggagagggagagggagagggagacggagacggagagggagagggagagggagagggagagggagaggggtcttttgttttctttcctcacttttccccaagcagaaggagcctctctctttgctggcctgcctggatatgtgggagaggtgaccacagtttgtaccgttctgggtcacacctgaattcaccatagtactgggtcttgtccaagttctgtggtgactactgcttggctactgctgatgtttattcaaggcccaggggctctttagtcagcagatggtgaatcttgccaggacatggtctttctcttcaacacagcaggttttcttctggcccaggctgagtctagaaatgccatccaggagtgagggcctgggctcagaggcttcaggaatctgcttggtgctttatttttactgtggctgagctggtacccaggtggcaaaacaaagtcctctttacttttctctcttgtttccacaagaggaaggagtctctctttgagctgcactgcctggagagttgggggatgggtgacacaagtactcccctggccaccacaactggtgtctcactgggtcttgtgcactccatttccactggctctgagcccaacatagtacccagatttgcccaaggactgcagtccttgtggcttgactgcctttcaagtttattcaggaccctagggcacttgtttagtcagctggtgctggagctagctggaactcaggttcctaccactggggcagaggattgccctctggcaagggccagcttaaatgctccctctgtgggtgctggcagaattctgccctgtgttgtgttcccctgtgacagcactgagttccaacgcaaagtctcacagtcattttgctctctcccacaagtgcacagattatctctgccacagaatgggggaagggtggtgtaggcaatgaagtactgtgttgtctacgctttttagtgcctctttccttgatatgatgttaaaaccaggtactgtgatcactcatctgatttttggttcttatgaaagtgctttcttgtggggatagttgttcaatttggtgttctgaggggaaaggggtggatgattgctggaaggttctatttggccatcttgctttacctcctccaaaaggggcttgttatgaataacaataggta

SEQ ID NO: 26336 - DNA, 914 bp, Artificial sequence
  DNA replication origin
gctgtacctcaggggacagggcggggcgggaggaggcggggccaggcctggtctctgataacgggatgggtggtgctggacctcgggcggggccgggcctcgtggcgggaggaggcagggcagggcctctgggacggggctggacggcttgttgacggaaacgagcccttgacgctgtggcccggaagtggagcggctgtcgcagtgcggctccggcagtggcagcggaggcctgtgtttgcggccttcggcaagcgactgagatggcgagcgcaactgcacctgcagccgcagtccccaccctggcttcgcctttggagcagctccggcacttggcggaggagctgcggttgctcctgcctcgagtgcggggtgagctgacggagttagaacgggcgacggcaggggcgggctcggggtcggggagaggccgggctcggggtcggggagaggccgggctcggggtcgcggagagggcgggctggggcggcggcggggagccgggcttgggcgagggaggtggctccgcttacctcagcttttccattcgccaccgttcggcccccacacgccacacccacaagtcggcgaagcccaggagaccaccgaggagtttaatcgagagatgttctggagaagactcagtgagtgcgcctccttccgggctccccttgcctcagttcctccagcgtcccgaccccttttcctcccgctgtcccccacggaggggactgctctcccccgctgcatcctttctgtgaggtaccttacccacctcagcacctgagagggtgaaatagaattctaacctcgacattcgggaagtgtttttgagaagtctcggtcggtaagggaagtcttccaagtccgtgcagcactaacgtattggcacctgcctcctcttcggccacccc

SEQ ID NO: 26337 - DNA, 1068 bp, Artificial sequence
  DNA replication origin
caaggtttgttctaggcttctctagttggcaggtcttccccatcccaccccctcccccagggctgccaggcgtattcctgcctgggcctcctggcacaagagataaaatgaacagggttactcccagtaactggtccaggagataccagcagagagggagtaggagagaagaaacatgtcagggtgctcacaggagtagtggggggaggttttgctatttccagattcttaagccaacaaaagtgccttcatattttctgtctggaagacagaaagcccagaaggagcccagaagcaacagtttgagagaggcgctttctgcggccaagtggataagaggagcggcctgcaaccatgggacagggtgagccaagccagcgctcgacagggcttgctggactgtatgcagcccccgcagcatcacctgttttcattaaaggaagtgggatggatggtaggcggggagatggtggtataactatggtgggggagggggtactggtgataatgaggtggctgtggggggggggtgtggtaggtgggtgctggtagaggtgatagtgagctggctgtggagcgtggtgtgatgatgggtgctggtggaggcggaggcggaggtgatggtgatgttgctgtggggtggttatggggtagcatgttggggtaaactggtcatgatagttgtatgatggtgagatggtgatggtggttaacatggatttatattcttatcccaaggtcatcatagcataagtgttcacagcttactgatacaaatgagagacaccctgggtagcatgaaggtgtcacagcttctacaccaaatgggagagaaggagaggagggagtcagggaatccacctaaaaggggcagaggcagacacaaagcaagaaaccaacacaggtggtcagagtcgcagcactcttggcaggaattattatatcctggcctgggaattgcctggctgttttgtgtcctgggagaagcaagcgggtaggcagagggaaatggtgcagaggtgtggggacagtggggtgcagctgtggttctgttgctatagaaactgc

SEQ ID NO: 26338 - DNA, 1096 bp, Artificial sequence
  DNA replication origin
gctggtctccctttggggaatgtgttctccttctggttctagcaaagagaatcttctctttcccggtacagttcccatgagagcttcacagagatccagtctctggcagtatttcagtcggggcactttctgaggtaccgttaggaactgttaggaaccgcgttagatactggtggtacagcagtaaagctctatagacgcgtctctgccaccaaggagcttctattccagcagggggagacaaacaatactaagtgcgtacaccattagctatttctctgtcaagtgtgccaaatgctgtaaaaaagaagtttgagtgctcttggacccaggtgtggacggtcagggtaggcttctctcagaaggtgatatttaagggaggataaataggagttagctagctaatagtgtgtccggaattggtgggtacttggtctcactgacttcaagaatgaagccgccgaccctcgcagtgagtgttacagttcttaaaggccgcgtgtccggagtttgttccttctcatgttctgatgtgttcggagtttgttccttctggtgggttcgtggtctcgctggctcaggagtgaagctgcagaccttcgcggtgagtgttacagctcttaagggggcgcgtctggagttattcgttcttcctggtgggttcgtggtttcgggggcttcagcagtgaagctgtacaccttcgcggtgagtgttacagctcataaaggcagtgtggacccaaacagtgagcagaagcaagagttactgcaaagaggtaaagaacaaagcttccacaacacagaagcagacccgaaggggttgccactgctgtctagggcagcctgcttttattctcttatctggccccacccacatcctgctgatttgtccattttacagagagccgattggtctgttttacagagagctgattggtccgttttgacagggtgctgattggtgcgtttacaatccctgagctggacacaaaagttctccaggtacccactagattagctagatacagagtgttgattggtgtatttacaaaccatgagctagacataaaggttctccaagtccccaccagactca

SEQ ID NO: 26339 - DNA, 1725 bp, Artificial sequence
  DNA replication origin
ggagctgcctgcctgtcctgcgctgtgggcccgctttcctcagccctttggcggtcgatgggaccgggcgccgtggagcagagggcggcgctccttggggaggctcaggcatggcgggctgcaggtcccgagccctgccctgcggggaggcagctaaggcccgggaggaatcgagagcagcaccggtaggccggcagtgctgagggacccggcgcacgctccgcagctgctggcccgggtgctaagcccctcactgcccgggccggcagggctggccagccgctccgagtacgggcccgccaaacccacgcccaccgggaactctagctggcccgcaagcgccgcgcgcagccccggttcccgcccgtgcctctccctccacacctccccgcaagctgagggagccggctccggcctggaccagcccagagaaaggctcccacagtgcagcggcgagctgaagggctcctcaagcgcggccagaatgggcgccgagaacgaggaggcaccgagagcgagcgagggctgccagggctgccagcaagctgtcacctctcaacaggacaagggttggcgtgagaggagagaaaacagcacgtgcacaggcgctaaggcaggaggcatctgaaagcaggtcagtgggtctgcatcacagagagagatggggagaggtaaggcaagggctaaatcttgcagagttgagctgcgaattttggattttattctcagagcagtgagaagccattgaaatgatatttgaagcaagggagtaacacaatcagatttgtatttttaaaatactggctaatatgggggaaatgatttagagggggcaaaaagggaagagagatgaccaataagagactagggtaatggcccacgtgaaagatgatggtggtctactccggggggtgttagtaaagatagacataggccggtcacggtggctcacgcctgtaatcccagcactttgggaggccaagacaggcggatcacctgaggtcaggagtttgagaccagcctggccaacatggcgaaaccccgtctctactaaaaatacaaaaattagctgggcgtggtggcgggcgcctgtaatcgcagctactcgggataccgaggcaggagaatcgtttgaacctagaaggtggaggttgcagtaagccaagatcatgccactgcactccagcctgggccacagagcaagactccatctcaaaaaaaaaaaaaaaaaaaaagacatggacagatttgacggagatgtaggaggttaaatggatatgacgtgctaatggacaggatatcagggtggagggcagagaggaaaagatactcaacatgactcccaggtgcaaataagttaattatgctggcacattgctttacaaagcactttcgcgtacattatcttgtatgatctgaacctcaatcttgtaaactgcattaagggatcatgattccaattttactgatgagaaaatacgttcagagagttaacatttattttagcgaatgtaagatcaattaatatactgcctcattccagaaagaatttaagactaacagtgaaatatggtattgcagaagagcacattacaatgatgcaaatgatgaaagaataaagatggaacccaaacagagccaaggaggaggctaaaagtgcatactatagcctacctatccacatgtgttccacatacgagaaacttacctctaagctccagaagg

SEQ ID NO: 26340 - DNA, 1431 bp, Artificial sequence
  DNA replication origin
cgttctgggactggaagggtcggctgaagctcagccggaggtagaagggctggccgcggcgcacagtgagccgcttgacgcccatctcctgcgtgtggtgctccttgttgttcctggagctctgcaggtcgacagactcaagccgcaaggttgccactaggggagaggaggggacaggtcacgcccacctgcagtcccctgggctcaggcatcccttgtggcttctcagtcatttctgggaggtgcggcgggtggtggggcgtgcggggggtaggtggggcgtgcggggggggaggtggggtgtgcggggggggcgtgcgggtgtgtgtgtgcgggggcgtggggtgtgctggggagggtggggtgtgcgggggggtggggtgtgctggggagggtggggtgtgcgggggtggggtggggtgtgcggggggctgtgcggggggagtggggtgtgcggggggatcggcatggggaagtgttgatactggtgaattccatgtctggacctggagccacaatgatcaaggattggggtccccaaaagggaaacaattccagataaccgaaacttaacccctgaagtgccgctgcatgctcttaactatttgttgacaatctttctaaaagtcacccttttatcctactgatataagaataaacatactaggattttgtatgaattaagtcagtgagctgactggaagctgggacttcagccatagggcaagtccctgctttggaattctggacactctctgggtcacttgtaacttacttctgacttctcagccatttccaggtctatgaggagggcactgcctgcttcctgtgtgtgcacacctggtacatggttgtaaaactctcatagcacagtaggcagtgggcaggttctggactgacacagcctcaggtctatcatctgggctgtgagacctcgagcaagtcacttaatatccctagacatcagtgtcctcatctgaaaaatggagacaattgtattcctaccttatagggttcatgtgggcgttaagtgaggatgcccatggaaggaccttggcgttgtgccaggtacagagtaaggagtcaatattagttactcttactggtaggaatcatgcgttcttgaattgcatttcttttgcgacctttgctggcaatgtttagattgcatttactgtcgacaaaagttcatcaggtctttcctctagtagtacatcagtttatctcagtggttctcaacgggaaattccgtgccctggaggacatttggcaatgtctgaagacattttttactgggaagagaggctgctaagcagcatcctaaaggaaaaactcatatttgctcccagccagtttttgtgccatttgtattttgaacttccacagaggttcttaatgtttttgcatctttcctacctatcttgatccttt

SEQ ID NO: 26341 - DNA, 1119 bp, Artificial sequence
  DNA replication origin
gtgcttccccttccacacgcgcaccggcccctgggtcgggcggtttgtgccgaatcaacccaccgagacaatcgctgcggcggagcggacgggaagctgggaaggggtcgcgggggagtcccggaagttcggcagctcaacggggtccaccagctactcccgcccgggctctgcggagactgagtcgcggtcgctgccctcgcgcatgcgccctcggtgccccgagccgcccgctcggacttccggtttgggagctgtacttgggaggctggagagccggggccggggccggggccggggccggggtcagggtcggaccccgagtgggtgaggctggcccggaggcaaggatgcgagggggttgaggggcagctcgagagggagacgctcccaggggtgggctggagggcgccctcagggcgccttagccgggtcagaggcctctggagggaccgcacgacggctccgggttacccggccggagggagcggagacaaaagaggccagaatcccgcagccgctgctccttgggctgagagctctgcgtccgcgaaccggcagcacctggagcctctggccgacacccgagcccgtcctcaggaagcccgttactactgctcctcggattccgtctctcctgcccaatgtgactctccccaagcccccatggtcctcgctttggagccaaaaccagcttctctccttgcgcgaggttttccgacaggtagctccctaatccttgctgagcggctactactacgcggggaaaacaaagacccgagattctggacgtgatttttgcctggggtgggctttgggagttgtgcagcccgagggggcggggcggacgcagaaggcctcgggaaggactgcggagatactgggggagatcagctgcgaccagctggacagaggctttttgttgccttcaagcaggatggtgacttgtctttagatcctctcgaactccagctctcctatatggttcggactcactgtgcaacattggccagggaagttaaatgggatcggatttggaggaggtgggagaggggcagacagtacttttattctctgctgcttcctggggctgccctggaagtcaaccagaaaagcagt

SEQ ID NO: 26342 - DNA, 1323 bp, Artificial sequence
  DNA replication origin
tgggttcaccagctctgaagtacctagccatcctcaagccgcttcttctttgccctgttatgagaaagctgggaaactctctccttttccaggaaagagggtgagggacggggattaaggggcgtgaacgagaaaaagcaggtagaggtactgaaatgtctgagtagtggtaaatgcaatcgtcctggaagcaggggaaggtatttcacgccctctcaaggtcccttcggttcaaggataccgtcattctccggctctactaaaggggagggcctgcaacgtccatgctgccatggaaacgcgccgccgtgttcctttttcttacgtggggcagggcactctgccgcagctacctatcatccacgggatttcttgagtggcgggcggcggcagcgaatggacgatccgatattgtgtgacgtgacgggaaagggggagttcgcggccggtggcggcggtggcgacagcggcgacctagggatcgatctggagggacttggggagcgtgcagagacctctagctcgagcgcgagggacctcccgccgggatgcctggtactgtttggagagaaatgggagtgcagtgggctctgaaggcctggatttcgggtctgaagggatggctgaccggagggggcggggtggcaagcatggcggcggtgacggggaaggggttggagggccctaaggagggggtggggaaacgttagctaagaaggcttggtggtcgtgaggaaagctgaaaggctgtggggcctctggcgaacagattttagaaaacattcttttggggggaggtagaggcgccagaaggacgtggcgggggggatggaaaaaggggcggggagagaagaggttaggaaggaggggaaagggtgtctacgagaaggtgatgaaaaatagggagggatagtcaggcttattgtaaataacgaggaatggtgacttggtaggcatgataggaaagtgcttgcagcaattataaatataatattctaattggaggagtcctgaagtggtcccgtttcccagctcttgtacttccgccccattatttaggtttagactgcgtgagcaaggctagtaggttacacggaactgatcttttgttattccattccaggggagcagatggaccctactggaagtcagttggattcagatttctctcagcaagatactccttgcctgataattgaagattctcagcctgaaagccaggttctagaggatgattctggttctcacttcagtatgctatctcgacaccttcctaatctccagacgcacaaagaaaatcctgtgttggtgagtgataccttg

SEQ ID NO: 26343 - DNA, 2260 bp, Artificial sequence
  DNA replication origin
aaattttcaacctttatttattggatctgtacatatatgagaccctgttttgtctcataagacaaagggaagacctggtttttgctctgaaggaacagcaatggcacaaactctgcctcttcctctttctcagcatgaggcttcccacccaccccgtcgtctcatgaaacgtctctgtctagaccacgcttctggactttggcgacacactaagaaatcaaaggaagggagcatcaagttgcattccctcccagagccactaggggtcacgctcctccgcgcagaagcgccggccaacgcagcctgactctgttaccggtgcgcgcccttcgctgattggtggaaccgcaaagaagtcgcgctttgattgggccgctgtcaggtgtcgctgcctgcaggttcggctgcgcgagcggagggaggcgggtgagtgaaggccgggggcggtgggggagtggctggggctgggggcggtatcggaccgggtgggcgcggtagagtgggcttggtgggttcccagggctggggttcgttccgggtgggctccgctttgggaagaggcccagcggaggggccttagtgtcagcgtagggagagtgaggcggcgaaggcgggggcgggcaaaggctagtggagtcgggatgcgagggcggtattcgtgacccggagctgtgcgaggagagtaccgaggagggggtcggcgggagaggagataggtatgtgggggtctgcgtgaggaagagggggtcctgtgggaggatggaggagcggagtcgtacaggggagaggatcaaggtggaagggatctgcgccaggaggggtggggctggagtccaggaggaagggggtagcttgaggaatgggttgcggctgagagaagacagcctggagggaggggtgatgtgaggaaagaatggatggcaggtcgtcattgtggggggtcactgaggggtcaatataaagatgttaccaagtatgatgactcgtgcgagagggtgaaggagtttaatactgggcaatcagtgagtgcgaggattagttggattaatggaattagttgaccaatgatgcggggtgggatggggaggctgcagtcagtattggggcaagagtcatagcaagttggggaaagaaggcgaaacgaagcagctgatactgagaacagggagaggagcacagttgatcagagtcggaatgaggagtgtgtctgaagaattaaaaattgcattaagaaggaagtgaggcgtccactgttcaaggtgggcagaaaatagtgttggtggcctgaggagtttttctgtgttggaagtattcctgcctggaatttgtattgatatttcctcttcgctaccaatggagtccaccatcaagtgcatagtgatttaggaaattagatgactatgcaaggagccctaaattctaagggttaaagaagttacaccgtttaccctcccttctaccccttctccagatctaacatagatgttcctgagaagattgcctgcctgcccctccctcgttaccttactcgcctatctccttgcttctttccttccattcacattgattcctgtcagagtaagactgccctttagcccagtgtggagtgtgaagttttcttttctttcacaacaaagcttgggggagaggcggatggggagaagagcatggaaaacagggaagcggctctgggaacaccacattaaagcccatcttctcccagaggtgcatctaaataaatcctggcttatttcatagctatttctgtcaggcttctatttttgctttgttaactgggaatttagacctttcgtctctcttcagccacatatttgtaaacagtctcttccctattctattagttaccatgccccgttatgtagttgcagtagaatttcaagaacatgagtgtacattcagtggaaaacgaggaaggactcaatggaagaaagggcaaagggttaggaatcttagagttgagagaaagtcccggcttcagagcgaagataaagaatgcaacaaaattctacttgctcaaactatacagggaccttgggaatgtcccaagtcagggaaattgggtcaggtcactgaaaaggaattcaaaaaaatagcgtttttatcaggggtaagagtgtgtgtgtgagacctgcagtgcacaacaagaaatattaagcctaaggagaatgtcgcacccccgtggcagttgagaaataaagacagcagataatgaaaactggaaaggtcgagaggtcgaggt

SEQ ID NO: 26344 - DNA, 674 bp, Artificial sequence
  DNA replication origin
acttgcctccccacacagtcgctcagcccacagagtctcattctccaagaagcagccccaaaagatgtctggggtgaggggaacagggggcaggccttcagggcagctggtagggggtgggagcaggccagcacagagccgcttcaccaggcggcggttggagccagacagggctgaaaaggagaggttactgcagatcgcatccaaaaactcatcaggaaactggtcgtggcaggcctgtagccagccttgggcacctggtgcccaggacactgcataccacacagctgtctggcagatggcagtggtgctgggatggggctgtggagtggcaggcttggtgtgctggcagagcaagtggatggagaagttggaaatgctgtagggtggtgctgggcctaagtggttctcacagagggcctccacagtgatggctcgccgttggcgtgggctgatgtgggctgacggctgagaagctctgggcagaggcacgcccgtgctcaggcagtgaaggagggcagggggtgggggtggtgatccagacagaaagcccagcgcctggacatcccaggaaaggttgtgccggacgcccctgggtgcagagggaggagcaggcaggatctggtcagttcacatttcctccagctgaagattctgaccctgactcagagccc

SEQ ID NO: 26345 - DNA, 1228 bp, Artificial sequence
  DNA replication origin
cagatcccgtgtaggagatgcgactctcgaagttgtcgtccgtgagttcggaggcagcggcgaggcgggccgcggcaagaagcagcgccacacccgggaacagcgctaggcggcggaggcgcatggcggcgaggtggggtggggacggccggaagggtcgcggctcggctgggactgcggaggtcgggcgcgcgaccacaaaccggctgcctgcgctggcgcgtctggcccaggggacctgcagccggaggtcccaacccccaaacccggctcgggccgctgtgtggcagccgctgattggctgcgcgtcgccttcgtccggcgggcgggaccagctggttaccgctgagtggccggagagcggggcggggcggggcctaggcggcgagtggctgggcgagcgttgctccgcatggtcctgggctgtgggtaggggctagggccgggtcccggggtgagccgaaacctgggggtcgagcggggcggggaatggggcgcagtgaggctgggagccggccctgagctcgtcttgcataggggtagccaggctcggggcacctgagctggaggcggaagcgtgaaataaggactgagtgggcaaagagaacctgggctgaggtgaggcccagaagcgagaatggaggagagaaggagctagcccccgaaggagtgttggagtggacacacttgggacgggacccattttcaaaatgtcaggctttggcattttgtccaatttctctgcacttggtttctcttgcgtgagcaggccaagacctcccccaactccacctcattgcccgattgtctcaggcacaggtgggacccagattctttgtccagccccgggcccctgcccttgtggctgctcctttttcttgcggtgtttttgtttgttttgttttgtttttaatgagttttaattagaaatgccatcacaaagtgaagatgcctggccgcttggtcgactgtgcaatgtctttaccacttagccccttttgtttcaaaacaccctgagtcctagtagaatgtttgttcttcccaactgctcctagttcgtagatgtgggtacattaaggaatcttaagggtaaagagggtggggaggaggggacagaaaacctgtaatccttggtgcagctccaagaatgaaatgacacttgatgcttacattttcttagcagacatggccgcttaccaacaagaagagcagatgcagcttccccgag

SEQ ID NO: 26346 - DNA, 2228 bp, Artificial sequence
  DNA replication origin
aaaattttcaacctttatttattggatctgtacatatatgagaccctgttttgtctcataagacaaagggaagacctggtttttgctctgaaggaacagcaatggcacaaactctgcctcttcctctttctcagcatgaggcttcccacccaccccgtcgtctcatgaaacgtctctgtctagaccacgcttctggactttggcgacacactaagaaatcaaaggaagggagcatcaagttgcattccctcccagagccactaggggtcacgctcctccgcgcagaagcgccggccaacgcagcctgactctgttaccggtgcgcgcccttcgctgattggtggaaccgcaaagaagtcgcgctttgattgggccgctgtcaggtgtcgctgcctgcaggttcggctgcgcgagcggagggaggcgggtgagtgaaggccgggggcggtgggggagtggctggggctgggggcggtatcggaccgggtgggcgcggtagagtgggcttggtgggttcccagggctggggttcgttccgggtgggctccgctttgggaagaggcccagcggaggggccttagtgtcagcgtagggagagtgaggcggcgaaggcgggggcgggcaaaggctagtggagtcgggatgcgagggcggtattcgtgacccggagctgtgcgaggagagtaccgaggagggggtcggcgggagaggagataggtatgtgggggtctgcgtgaggaagagggggtcctgtgggaggatggaggagcggagtcgtacaggggagaggatcaaggtggaagggatctgcgccaggaggggtggggctggagtccaggaggaagggggtagcttgaggaatgggttgcggctgagagaagacagcctggagggaggggtgatgtgaggaaagaatggatggcaggtcgtcattgtggggggtcactgaggggtcaatataaagatgttaccaagtatgatgactcgtgcgagagggtgaaggagtttaatactgggcaatcagtgagtgcgaggattagttggattaatggaattagttgaccaatgatgcggggtgggatggggaggctgcagtcagtattggggcaagagtcatagcaagttggggaaagaaggcgaaacgaagcagctgatactgagaacagggagaggagcacagttgatcagagtcggaatgaggagtgtgtctgaagaattaaaaattgcattaagaaggaagtgaggcgtccactgttcaaggtgggcagaaaatagtgttggtggcctgaggagtttttctgtgttggaagtattcctgcctggaatttgtattgatatttcctcttcgctaccaatggagtccaccatcaagtgcatagtgatttaggaaattagatgactatgcaaggagccctaaattctaagggttaaagaagttacaccgtttaccctcccttctaccccttctccagatctaacatagatgttcctgagaagattgcctgcctgcccctccctcgttaccttactcgcctatctccttgcttctttccttccattcacattgattcctgtcagagtaagactgccctttagcccagtgtggagtgtgaagttttcttttctttcacaacaaagcttgggggagaggcggatggggagaagagcatggaaaacagggaagcggctctgggaacaccacattaaagcccatcttctcccagaggtgcatctaaataaatcctggcttatttcatagctatttctgtcaggcttctatttttgctttgttaactgggaatttagacctttcgtctctcttcagccacatatttgtaaacagtctcttccctattctattagttaccatgccccgttatgtagttgcagtagaatttcaagaacatgagtgtacattcagtggaaaacgaggaaggactcaatggaagaaagggcaaagggttaggaatcttagagttgagagaaagtcccggcttcagagcgaagataaagaatgcaacaaaattctacttgctcaaactatacagggaccttgggaatgtcccaagtcagggaaattgggtcaggtcactgaaaaggaattcaaaaaaatagcgtttttatcaggggtaagagtgtgtgtgtgagacctgcagtgcacaactagaaatattaagcctaaggagaatgtcgcacccccgtggcagttgagaaataaagacagcaga

SEQ ID NO: 26347 - DNA, 899 bp, Artificial sequence
  DNA replication origin
ttccccacagggtccaatgtggcatggtggggaggcagtgacatctggggtggggccctggcacacatgctggacccaagcctggttgctggggggcacagcctgtagacttgcctccccacacagtcgctcagcccacagagtctcattctccaagaagcagccccaaaagatgtctggggtgaggggaacagggggcaggccttcagggcagctggtagggggtgggagcaggccagcacagagccgcttcaccaggcggcggttggagccagacagggctgaaaaggagaggttactgcagatcgcatccaaaaactcatcaggaaactggtcgtggcaggcctgtagccagccttgggcacctggtgcccaggacactgcataccacacagctgtctggcagatggcagtggtgctgggatggggctgtggagtggcaggcttggtgtgctggcagagcaagtggatggagaagttggaaatgctgtagggtggtgctgggcctaagtggttctcacagagggcctccacagtgatggctcgccgttggcgtgggctgatgtgggctgacggctgagaagctctgggcagaggcacgcccgtgctcaggcagtgaaggagggcagggggtgggggtggtgatccagacagaaagcccagcgcctggacatcccaggaaaggttgtgccggacgcccctgggtgcagagggaggagcaggcaggatctggtcagttcacatttcctccagctgaagattctgaccctgactcagagccctcaaggggcatggcaagcataggcttttctacaagcgaggtccctgagagtttaggcgttactggttgaaatgctgcaacggggcaaaaaagagaaagctgccctgccaaggtccaa

SEQ ID NO: 26348 - DNA, 984 bp, Artificial sequence
  DNA replication origin
gcgactctcgaagttgtcgtccgtgagttctagcacgtcggaggcagcggcgaggcgggccgcggcaagaagcagcgccacacccgggaacagcgctaggcggcggaggcgcatggcggcgaggtggggtggggacggccggaagggtcgcggctcggctgggactgcggaggtcgggcgcgcgaccactaacccgctgcttgcgctcgcgcgtctggcccaggcggacctgcagccggaggtcccaacccccaaacccggcttgggccgctgtgtggcagccgctgattggctgcgcgtcgccttcgtcgggcgggcgggaccaactcgttaccgccgagtggccggagcgcggggcggggccgaggcggcgagtgtctgggcgagcgtggctgggcccggtcctgggctgggggcaggggctagggccgggtcccggggtgagccgaaacctgggggtcgggcggggcgggaaatggggcgcagtgaggctgggagccggccctgagctcgtcctgcgtaggggtagccgggctcagggggcgcctgagctggaggtggaagcgtgaagtcaggactgagtgggcgaagagaacctgggctgaggtgaggcccagaagcgagaatggaggagagaaggagctagcccccgaaggagtgttggagtggacacacttgggacgggacccattttcaaaatgtcaggctttggcattttgtccaatttctcttcacttggtttctcttgcgtgggcaggccaagccctcccccaactccacctcattgcccgattctctcaggcccaggtgggacccaggttcttctttgtccagccccgggcccctgcccttgtggctgctccttttttattgagtttcttgttttgttttgttttgttttgtctgagatgccgtcttgctctgtcccccacgctggagtgcagtggcgcgatctccgctcactgcaagctctgcctcccgggt

SEQ ID NO: 26349 - DNA, 889 bp, Artificial sequence
  DNA replication origin
accaaaccctgaacagaggaggtggcggtggtggccctcgcctgtggcccccgtgctgcttgcactcgaactcgtcgccatggaggagctccaggagcctctgagaggacagctccggctctgcttcacgcaagctgcccggactagcctcttactgctcaggctcaacgacgctgccctgcgggcgctgcaagagtgtcagcggcaacaggtacggccggcccccttcttctctagtcactgcccctagggaccttgggcctcagccggcgaccctggagaaggtgcaggggagagggagcggcttccgcaagctctggcctccccacctctccaagtgaagcccgctaggcaggtgatcccgggctccggacgccggatcctggggacactgcttcacctgcgctcaacggtcacatcttcgctctccccgcaggtacggccggtgattgctttccaaggccaccgaggggtaagtgcgagctcagggtgtgtgagcgaggtgagggcgagggagcataaacgtgggctggaggtggaaggtgcggtcggggccggaggctgcgagtagtcacggtctgaggtagttccgataactgaactccaagtggggcgaggaggctgctggggttgtcccagggggctgtggtttgaggggactgtgctgtttcggcctcctggggaactcaggcccagctgcacctggtgtgctaacaagccctgtgggacccgtcttagtcttacttacggactggctcccggacgagtggcggcggcaggagggggaggggctgacttcatggggcttaccgtctccttccacccccagtatctgagactcccaggccctggttggtcctgcctcttctccttcatagtgtcccagtgt

SEQ ID NO: 26350 - DNA, 1643 bp, Artificial sequence
  DNA replication origin
cgcggtcggtggcgctgcggggctgagggagaggcggaggggggggcggaggggggcggagggaggggcggaaagagcagagggaggggcacagggggctgaggagtgctgggtcgggcttccagctccctacaacgcagaccagtactggagttcgtggtgctggaagaccgccgcccgactctgggccccgggtaggaaacgtaagtgccaggaagttagcagagtggttctttggctggcgcctgaacctcgccagtcttcgtcgcccctcccctgccaacgcctaccccgcttcgaccggagggtgcgctgtccctctggtcactgtgatcaccgtccatggccgcctgcggatacccacgccgtgctcagaagagggctctgaggccacgcccgcctgtggggtcggtggccgggcttccgggaccccagagggagtcgtcgcgcgctaggtggaggggacccctctggaatccggcgatccccgggcgcagatgcaggagcgggtggggagagccgcgttcctggcatgtttgcctcgagttagtcacgaaggaatcgaagagagccttagtcttcgaggcttttcccttcctgtgagcccctttgaggccagcacattgatttttttttctttcgcagaacaatttcggacctcctggggtctatgctaggtatgaggtgtatctttgccctccatcaagtagcaaagatggacatgtaaacaaatttcgacactgtgatgactgccacaaaaagcagcattatgaggttgaatgtaaaaggataaccttagcggcggcgggggccggaggatgaaggaaggcttcctgaggtaggcgctggttgaaactgaagttggagagagcaagtggcatttgctgaagtgcatttccggtagaaaactccagtggtccctcacctgactgagtggcgcagtcagagataaatggaacaggtacactgaccagaaagggcaagatgggctaaacttcgccgttgggccactgggctcccccgcaggattttaaagagctagccagtagatggattttgtttttgttattttcgcaatttattttcaaatatgtaatacgcgaacttggtacaacattcatgtgataaaaaggtagatacgtgggcaggacgcggtggctcacgcctgtaatcccagcattttgggaggccgagatgggcggatcatttgctgtcaggagttcgagaccagcctggccaacatggtaaaaccccacctctactaaaaatacaaaaatcacctgggcgtggtggcgggcgcctgtaatccccactactagggaggctgaggcaggagaatcgcttgaacccgggaggcggaggttgcaacagtgagccgagatcgcgccacggctctccagcctgggcgacagttagacccgtctcaaaaaaaaaaaaaaaacaaaaaaggtagatacaacgatcagctgctccgctccgttctttctagtggtaaccattgttccccctttctggtgttatcttttcagagtctacaaataaacattttataaagatgatccttcaatacatattctacagcccagttaaaatgtgagaggccatgatctacagacagccatttataaaggtggatcagggcc

SEQ ID NO: 26351 - DNA, 822 bp, Artificial sequence
  DNA replication origin
gcccggcgccctagcccgcacccaccttgacgtcctcgtcctcgtcctcgccttcccagcggtccccgccggcagtgccgccgccccccaccttccgcactgggtcttccacggagaaagcgtcggcgtctacggaagaaagcgagccgtgttagtgcctgccactgcgtggggccggcgccggcccgggccctgccccagcaacttctcctcaccccaggagtccgagtcccccgccgccgccgccgccgccgccatctcgagccgggtgtgagcgtgtgtgagagggagagctagcgaggagttagcacggcggaggtgagtcactgggtttgctctcgttgaccggcgcggagcaggatgggaccgtggctgactgtgcgccgagccgaggccacgccccctcaggcggcggcggcgacgcgcgcgggtaagaagtgggcggggaacgcggtcggtggcgctgcggggctgagggagaggcggaggggggggcggaggggggcggagggaggggcggaaagagcagagggaggggcacagggggctgaggagtgctgggtcgggcttccagctccctacaacgcagaccagtactggagttcgtggtgctggaagaccgccgcccgactctgggccccgggtaggaaacgtaagtgccaggaagttagcagagtggttctttggctggcgcctgaacctcgccagtcttcgtcgcccctcccctgccaacgcctaccccgcttcgaccggagggtgcgctgtccctctggtcactgtgatcaccgtccatggccgcctgcggatacccacgccgtgctc

SEQ ID NO: 26352 - DNA, 976 bp, Artificial sequence
  DNA replication origin
ttgagaagcccttcagcccaccactgcaccgtgggagcccctttctgggttggccaaggccggagccggctccctcagcttgcagggaggtgtggagagagaggcgcgagcggaaaccggggcttcgcgccgcgcttgcgggccagctggagttccgggtaggcgtgggcttggcgggccccgcactcagagcagccggccggccctgcggttcccgggcaatgaggggcttagcacccgggccagcggctgcggagggtgtgctgggtcccccagcagtgccggcccgccggcgctgcgctcgatttctcgccgggccttagctgccttcccgcggggcagggctcgggacctgcagcccgccatgcctgacccttcccccgactccgtgggctcctgtgcagcctgagcctccccgacgagtgccgccccctgctgcacggcgcccaatcccatcgaccacccaagggctgaggagtgtgggcgcacggtgcgggactggcaagcagctccacctgcagccccagtgcgagatccactgggtgaagccagctgggctcctgagtctagtgggaacttggaggacctttatgtctagctcagagcttgtaaatataccaatcggcactcggtatttagctcaaggtttgtaaacacaccaatcagcaccctgtgtcgagctcagggtttatgaatgcaccaatccacactctgtatctagctaatctgggggggaggtggaaaacctttgtgtctagctcagggattgtaaatgcaccaatcagcaccctgtcaaaacagaccactgggctctagcaatcagcaggatgtgagtggggccagataagagaataaaagctggctgcctgagccagcagtggcaactcgctggggtccccttccacactgtggaagctttgttctttcgctctttgcaatacattttgctactgctcactctttgggtacacactgc

SEQ ID NO: 26353 - DNA, 997 bp, Artificial sequence
  DNA replication origin
gctggcatttctgaaattgagaacaaaggatgtggtgagggaatttggagaagaatcaaagatggggttgagtgggctgagggactcagtgggggttcactaggattgagcagtggcccaggaacttccttgaacacggcagagatttggtgatgtgcgtttactgaagatagagtgcgctcctagtccaggtagggtggggagaggagggaagggaatgacccagctgctagacaaatcctacacccagccaccaaatttcagcccttaggagagctggagagatttccctactaagcctacacatcttaccccagggttctgtttcagggccccaaatttttgcttccccttctctagtgaaactgcgaaggagtgtgaaaggccccagcccccaaggcagctcattctgcacctttcttagtgtggtgcccctctctgccaacccctccctcacctcatgtagacaccagggggcaccatggtagagaagaactgctcagaggccaccacaaattccggggagatgctggggtctaggaaaggacggtatcctgcaggaaggagacggtgatgatggggagacaggcttcttgcctccacatcctcccatcacaggcacctgtctccttcccctcaggattctccgcacaggtgtcctccttccccgctccctcacctgtatactccgggagtgttttctgcaggaagctgggcagccactcatacacagcgatgttctgaggggcagagaggggcgaggggaggcacaagttggatggtgtggggcctggaagggtctgagcccaaggacggcttccgtgtggagatgagaccaggaagggtcaatcatgggagaagcaactcagacaggagcagtgtgaggcctgtccccacaaggaaccaggggatttgagggagtgggggttggggaggtgataaataatcatcaccagccagatttctcctataaacagcgcgtgcctccctatcattt

SEQ ID NO: 26354 - DNA, 1214 bp, Artificial sequence
  DNA replication origin
aggcagtcaggacgcactctcactgccctgggaagtgcagcgctatgacggctggtttaacaacctgaggcaccacgagcgtggtgctgttggtgcgttctgggggcccgggcgtgctggggccgtggctcgcgaagggccggggcgcgaaaggccctgagcggggaatctgcggggaacacgcgcccagcagctccgctgcctacacagcgcaatcttatgcgctcccggggccaagagacccttgagggaaggttctgtcagtgaagtgggatgggggttgagggaggcttagggagaggtttgggggatcctaggggatggagtgcttagacagagccccgctccctgcctccgcaggctgccggttgcagcgccgcgtaccagccaattacgccgacggtgtgtatcaggctctggaggagccgcagctgcccaacccgcgccggctcagcaacgcagccacgcggggcatagccggcctgccgtcgctccacaaccgcaccgtactgggggtcttctttggtgagggcaaagggggagaccagtggggttgatctggcgctctgctcagcctgggggaggggccagatcccgtctgcgagtccacaggagacccatccgactcccaaccacttcctctctacgcagcacttcgagactgccttcatctcggagagattttgggatgttgatacagagatatttgctctgtatctaacctttctcttacgccttattccaacctaggggtgtcactggacccccattatagctcttgggaactgagctccccagccaccgctctcctcaccgtgtgtttgtaaccattttacctccccctagcccagagggaggaggactgacttggggtacccctacataaattatatcattttgattctcacaacagctttatgaattgagtaggaagggaactcactatagtcttactttgcagattagaaaattgaggctacctggggctaacgtgcagagctggtggcggagctggcactgggacctctgtcttttggctcctgaggacacttggaggccgccctggccgtggggagggcgcaatacggacggtttgtcacgtattggcgccccatgcccgcaggctaccatgttctttccgacgtggtgagcgtggaaacgcccggttgccccgccgagttcctcaacatccgcatcccacctggagaccccgt

SEQ ID NO: 26355 - DNA, 775 bp, Artificial sequence
  DNA replication origin
aggctgcagggttggcatgctccgtgcaagaccagaggcactgatgctcctgggagctcttctgactggatccctgggtccatcgggcaagtatcaggctcctctagcggcggggtgttccccaggatccctgggaggtggggcggggagaggtgcggcaagcggctccctgagactggaaggtcatttcgccgtgcagctcagcgggatgggaaacttcccagtgcggcccgacacttgggtccggttaggggcgctccgcgagctggggaaggactggccaaggccttcgttgctcgggaggggtagctgggagcgtagtgctgaggaggcccttctctgtgcccacaggcagtcaggacgcactctcactgccctgggaagtgcagcgctatgacggctggtttaacaacctgaggcaccacgagcgtggtgctgttggtgcgttctgggggcccgggcgtgctggggccgtggctcgcgaagggccggggcgcgaaaggccctgagcggggaatctgcggggaacacgcgcccagcagctccgctgcctacacagcgcaatcttatgcgctcccggggccaagagacccttgagggaaggttctgtcagtgaagtgggatgggggttgagggaggcttagggagaggtttgggggatcctaggggatggagtgcttagacagagccccgctccctgcctccgcaggctgccggttgcagcgccgcgtaccagccaattacgccgacggtgtgtatcaggctctggaggagc

SEQ ID NO: 26356 - DNA, 1146 bp, Artificial sequence
  DNA replication origin
gtatggggaggggagactctcctcagatcctctcgacaccgtcgggtctgggctccaagtccaaggccatcgatcacctgccacccacagaccaggccaggcgtcaaagcaagtcacccatccgacctaaacccctctaagaccccggagtcacgtctccctccggggatcctcgtgaggtcttgggggtcccaccgccctgcgagccgcgcccgcgccccgccagacccggaactgcgtcgctaggtttgcgctggagctgctgggattgctgggcatgggtgggggggcgcagaggaggaggggggattggagggacctctgcggagctggcagaccccggtactactgtcctggcgcacccagcccttctctgtaccaggccgggagagggaggcggcgccgcagagcctcgggtgcagtctgagaagtttgggagtgacttgaagagtgactggaagcaccccagacccggtttgtccggtcacagccgggtccttacgtgagttaggagaggagtgggggtcggacgggagccccactgagagtaagggcgcgcgtttgttcacagaacgtcgggacctggttccctctttaatcacacccccgggggcgcttcgtgtgaggttccacgggggaaggcgagaggcgcaggctgccacacacgcactgtttggaagaggggaaggtagggaatagtggtccgggtgtgggtggtgggggatgcggctgcttagatctgtgcggtccaggtgattttggagggggtcttgaagtgcttgctcccgccctggcacctagggctgcacttcctgctttcatccagaccaagttcggatcaagtgggagttcttcaaagagagagtttggtaagaaactggggaggcaaggaaaacctcttaaggccataaatgccacaaggtttatagacatcgaatcgccatcccagtttaactcgagtctggatactttggcttgcatgattctgcacccttgaattccttatccacatcagcccttactggggaatcctgcctccaatccacttttcagatcttgttcaatttctccacttaactcctatttttgtgcaacaacacacatatacattcatacacagatacacacgtacacacagaccccttc

SEQ ID NO: 26357 - DNA, 837 bp, Artificial sequence
  DNA replication origin
ctaggccacccaacattcccaggtcccaaagaacccagtctctcaaaaccttgattgggcagaggacaggccctaacaggaccggttttagccttaggataagatcggaggcgcagggggctagcattcccctttcttccataacgtggaggagctgcggctcccccgccaccctgcccttggagctccctcccccggagcgcccaggcccgcgggccgggaaaagccctcccaaatctgacctgcggccacggcgtcaccagagcccgggactgcaacttgtctccggcctggctgccagctgggcccgcggagccctctctcgtccggtgcctctgcagctctgcgccgggacgggcggggctgggggtgaggaggggaaggcacggcccggctcggctcagccacggggcggggcgcagtggggcgggatggagtctggcgcctggggaggcgcggaggtgcttccagcggacggcagcgcgcgaggtgagacggcgagggctcccggggcgcaggtagagatgttccgtcggtgccgaaggcccggctagtgcggttgtgtggacggcgaaaaaagcaagtccgccttcacaagtcccatggggctggggagagggtgggaggcggagagggtatggggaggggagactctcctcagatcctctcgacaccgtcgggtctgggctccaagtccaaggccatcgatcacctgccacccacagaccaggccaggcgtcaaagcaagtcacccatccgacctaaacccctctaagaccccggagtcacgtctccctccggggatcctcgtgaggtcttgggggtcccaccgccctg

SEQ ID NO: 26358 - DNA, 863 bp, Artificial sequence
  DNA replication origin
agaggttgaagttctcaccaaagaagacccccaacactgtgcggtttctcagggaggccagccctgcagggccccttgagatggtgttgctaaggtctcgggggttgggcaggtggggttctcccaagggctggtacacgccatctgcatagctggctgggaccaggcgctgcagccgggagcctggggtaggaggggtaaggataaggatgaatcttcagggggcattcttgaccccctctctcccaggctttcctccatgtcatggatcctaaaaccttggaaatggatggcctttgctggtacttgccagctcttgccccgcagcactcagtacccccctggccctggggttctatccccacttggctctcacttacctttgctgccccatctgtgctccatgaggttgttgtaccacccatcaaatcgctgcacctcccacgaaatggggttctgagctcctgtgtgagaatggagggaaggggcagctgggcaagtcagtgcgtgagaggacaggcaggcctgccggatatgggtgctgtgagcctggcacttggagcagcagaaagtggatacctgaagtggatgtgagaggtagggtgcagagggaaaaaccagggcaaagtagtgtccaaactcaagccagatctttaagctgctcagtgggggagacatggcagggagccaaaaagcagtggagcagggagcagagtgtgctgacagacggcctcagagagggagagggggctggaggagagcagtggtgatggggaataggatgcaggggactttactccccttaaacttcagctccctgaggggacacaacaggacagaatccatccccagccctaagacac

SEQ ID NO: 26359 - DNA, 1408 bp, Artificial sequence
  DNA replication origin
tgtcctctcacgcactgacttgcccagctgccccttccctccattctcacacaggagctcagaaccccatttcgtgggaggtgcagcgatttgatgggtggtacaacaacctcatggagcacagatggggcagcaaaggtaagtgagagccaagtggggatagaaccccagggccaggggggtactgagtgctgcggggcaagagctggcaagtaccagcaaaggccatccatttccaaggttttaggatccatgacatggaggaaagcctgggagagagggggtcaagaatgccccctgaagattcatccttatccttacccctcctaccccaggctcccggctgcagcgcctggtcccagccagctatgcagatggcgtgtaccagcccttgggagaaccccacctgcccaacccccgagaccttagcaacaccatctcaaggggccctgcagggctggcctccctgagaaaccgcacagtgttgggggtcttctttggtgagaacttcaacctctggggaaggaagccggtggggtcggctggacacctctgcatgtgaagaggggtcagaggatgagagagaagtgatggaaggcctaagggatgagggtgagaggtggaggaggcagtggggtatggtaggggtagaagcaggtggagagaggatccatgctgaagtgaactctggttggggaggcagaaatctgccccacacagaaagatgaggggtggggttagggaaaaggggcatccctcctcgttgggttgttggtgggggtaaggggctggtagaggcagaaacatgaaaataatctgggagggcctctccgtgggaccctgttcttaggcattgccccatggcttctaggacaggctcagggcagggttctgattctggcagagtggactgaggggaagtcaaagtgggggtgctaggatggcttgaccccagtgacaggattggtggctggtccatcaggaatgcctggctcctgctgcgttttggagctggtgctgccggcccgtttgcctaggcacactcacagggcacctcccagttaccaaggagaaagccaaactgtcaacgacaacagcttggatcaggtgtaggcacagagggacagaagagacaaacaactgggagggagtgcctaaggtcagggcttggacttgcccataatggctgctgagtcttttgaagcttcaggggagggaaggaaactggatacctagggtaagaaggaaagtggccctctgcttgccctagcaccccctcctgcactgcccgcaggctatcacgtgctttcagacctggtgagcgtggaaactcccggctgccccgccgagttcctcaacattcgcatcccgcccggagaccccatgttcgaccccgaccagcgcgggg

SEQ ID NO: 26360 - DNA, 1596 bp, Artificial sequence
  DNA replication origin
cggagtgcaatgacacgatcttggctcaccgcaacctccgccttctgggttcaagcgattcttctgcctcagcctcccgagtagctgggattacaggcatgcaccaccatgcctggctaatttttttttttttttttttttttttagtagagacgaggtttctgcatgttggtcaggctggtctctaactcccgacctcaggtgaaccacccacctctgcctcccaaagtgctggggttacaggcgtgagccactgctcccggcctatgtctttttaaagttcccttttcattattttgaagccaatattttccttcagattgcacacattttagaaccctctgcccccaaaaggttgcaggccctgggctctgtgattatagctaaaaatgtccccagtgtagtgtcaagacatgaggtttagaccagtggactttgtgacaccctctgaacctttattactctatatttaatggtgggggggagggtaatatctacaccagcagcaggagaatggaagtaaaaatacttaaaaaccacagtgatgtatcttttaaaacaattgttttcttcccctctctatcggtctttcccttggggacacttcagactgataatcctgtacagagggctcctgagggcagattttcctcagttgacagccccatccctcccagcacacacacctttgagcccctccctcacctcatgtagacgccagggggcaccatggtggacaggaactgctcagaggccgccacgaactctgaggagatgctggggtccagaaatggccggtatcctggggaaataggagaagagaggacagaagaatttagccctaaaatccccaacgtagtccccaccccaccccgcaagacacacgcaagccctcccatcctccttccccgctccctcacctgtatactccgggagtgttttctgcaggaagctgggcagccactcatacacagcgatgttctgaggggcagagaggggcgaggggaggcacgagttggatggggagggacctggaagggtctgagcccaaggacggcttccgtgtggagatgaggaccagccagggtcagtcatgggagaagcaactcaaacaggagcagtgtgaggcctgtccccacaaggaaccaggggatttgagggagtggggggtggggaggtgataaataatcatcaccagccagatttctcctataaacagcgcgtgcctccctatcatttacaggggcttccctggacctcggctgtctggggaggggtttctgggtggcggttgtccacagatggggagctccatggggcagcggagtctcccgtgggcttgcacgcggaagggaggacgtcgcggggcgcggacggctgacctggtaggtggcgatgaccctcttgcgtgcgtgctggaacagctcctcgtcctcccagtctgggtgctggcgggccagcctctgcgcccacaggttgtggtagcggaaccagagcaggcccagcgcctgcaggaagggttcccggttccctctctctgccccgaaggctgcatccgacgtgggggcgcaggggaggagacgagcggtagcgtga

SEQ ID NO: 26361 - DNA, 1336 bp, Artificial sequence
  DNA replication origin
atacctcctcctcttctgggctccccactgtcagacgggctggcaaatgccttgcaggaggtagaggctggacccatggcaagccatttacagaaacccactcggcaccccagtctaacaccacaactaatttcacccaaggttttaagcacgttctttcatcagaccctggcccaatacctatgtatgcaatgctcctcagccctcttctccctgctccagtagtctcccttccaaataaatcacttttctgccttcagggtttctttattctgccctaggaccggaaggggcatggggagaggaagccactaacccagccagctcaccaggctggcccagacatctctcaagctgcccagtgtcctgagtaaaggagctggcccaaggcaaagtgccccagctagcaatcccttccccggcccaggggtgcccttcctgacagagggcctgtcagccactagtgtgaggcctggtgagcctgctcaggaggggcagaaacagagggtgtggaagcttctggaggaggttggctggggaagagaacggggtcgggggcagactcagctggagtctatagggagccagagccgcctggcttgttaccaggacctcagtcactcccagcccttctctgagcaaagggagagttgggcacctgtgcctacatggctcttccaggcagtgagatgatagcaggagacaaatgaacacatcacccaacctctctgggcctgttttctcatctgcaaaatggctggatgctctccaagtcgacttaaagacaggacaaccctctgagggaatttctctgagtgcgcccctttttttttttgagacagagtttcgctcttgttgcctacgctggagtgcaatggcacgatcttggctcaccgcaacctgtctcccgggttcaagcgatttctcctgcctcagcctcccgagtagctgggattacaggcacgcaccaccacgcccggctaattttgtatttttagtagagacggtatttctccatgttggttaggctggtctcgaactcccgacctgaggtgatctgcccgcctcggcctcccaaagtgctgggattacaggcgtgagccaccgcgcccggcaagagagtgcccaattttaagtgatccttcctattgcttccacaaaacgcctgcataccacatatcctcaatttcgagaaaatagccactggtttagaaactctcaagtactgtgattcacagcacactttggaggttgcacgtttaggttctggaagaggccctcagacggccctttggctcagcggtcccccgaaggtgcctgtccagcatgtcgaggg

SEQ ID NO: 26362 - DNA, 779 bp, Artificial sequence
  DNA replication origin
gcgcgctgcctctttgtctctccgcgcctcccctcctcccagacaaatggctgttggcaggaaattggacgcgctcgggggaagccgcgcgccgcggggagggggcgccgcgcggccagcgggcctcgggtgcccccagccggggcgggggcggcggggatgttttgacatctcgtcaaagaaaggaacttgatgcttcgaaagtgcttttcacagccgggctgtgtctgctccagagctgatttatacgcagaatctgcgctcgcttctccgctccctcccccgtcagcccggggacggcgccggaggcgcgggcgcggctgtgcccggcaggatcgggtttatttattgcctctggcccggagccggggcggcctggggactgcacagttccctctgcccgagcccctccccttctctccccaccccccaaagccggctgcttcccaggggcctgtcttccccaaacctcttaccagactctgggcggagccctccgacggtctggggtggaagtcggggacggaggcagagaggtggtaaggcgccccaaggggccgaattctgcactacctcgcacggacccagtggggagagggtggtggtggtggaggtcaccacctctgccctaaggtcggaaaggagccggagctgccagtctgaaactccctaccatcccagtagctctggaacccccttcctccaggggctatcctttctctccagggattcctctttccccagctccagacaaccccttactccaaggccccaggagc

SEQ ID NO: 26363 - DNA, 1021 bp, Artificial sequence
  DNA replication origin
ccgagcccctccccttctctccccaccccccaaagccggctgcttcccaggggcctgtcttccccaaacctcttaccagactctgggcggagccctccgacggtctggggtggaagtcggggacggaggcagagaggtggtaaggcgccccaaggggccgaattctgcactacctcgcacggacccagtggggagagggtggtggtggtggaggtcaccacctctgccctaaggtcggaaaggagccggagctgccagtctgaaactccctaccatcccagtagctctggaacccccttcctccaggggctatcctttctctccagggattcctctttccccagctccagacaaccccttactccaaggccccaggagccctttccctttagaataaattaaggaatctccagcttctactggatcccaggagaagaaaggtttgaaagatcacgtccctggcaagagccacagccctcagccaggtgatgggcacagggctgggtacaggtctatcacagtgccctggcttcacatctaaagagtccggatggccacagggtagagcagggacatgtgttcggctcccttaatgggtagcttgcggctggcatagtggtgcacaatttcagggacgctgctgaagggcgggctgttctggcccagcacatatttgtgttccttggttcgggacagcttcatgtgcatgaatccctggctgctcctgggaagaggagaggagactttggtgagtgggggctctcctcagccccctcatccatccacccagtaaccctccccaaccctacagcaaatgtggtggttccgaagccagctgagaatgacaggtgattaggggaggtggaggtcagtccagaaagcaggggtggtggtggtgtaagtaggtagcactgggcattggctttgtggtaaggccactggttgtgccaagaatgtgtgtatagggagcatacagggtgtgtgcaggtggaaactgagcgaccagcacctcccccgaccc

SEQ ID NO: 26364 - DNA, 1444 bp, Artificial sequence
  DNA replication origin
gagaagggccaaagacagctcaggcccatgttgcctgtgccaaacaggcagtggttagagaggaggagactgactggtcagtgggaagaacagggcctatccctctcctctgtctcactgtcactacctccatcacatcacacaatagcaggggacaagaagcagacgagcacagccttggagaagtgcccttgaaccttcctctgcagaataagtatcctggcccaggatgggcagccatgccccatggcaaaaactaggggaaaaataatttgcattcctgaggcttctgctctgaccctgacagatctctctcatccaggaaatctggcggaacggcgctctctcagctaaaaagcctcaatcctggagccaacggattcggaaagcaactttgcactccaatcaaataaaaatgttcttctctgctgaggagaagggggcaggccccagaactgagctctcggggtgagtgaagaaggacagcagagccaaggcagcccacagagtcatcatcacagaatttaggggcctgggatggctttcagctctcactctgccagggagggataaggccaacccgaatcagggcagggccctgaggcatggtggatttcctgttctcctccctatcctggtgcctgcagacccaggaaaagctccagcctccctcagaatggaccagggggagagggaggccaggaggagaggaggaatgggctcagctgcttagccccatgtgggcaacaggtcctgagcactgactatcctcatacctgagaggacgagggaaggagggaggagtgggcctggaccccacgaagcccccttggcaagagctgtaagctgcctgtcttcgcctcctgagaacaacagcctatagggcaaaggccagctcgtgctgtgtccgcaaggagaaacccgtcttcacctcctttctggggcttcagcacctgcaaggatgcttaggctggagaaacaggaggaggaagaggaggaggaagcaaagaggcaacaggagggaagagctttgtgctggctatgcccagggggaagggtcagagatcaaagggcactgagccgctgcttccagaggggcagaaaggccatcaaccagtgggggttgggaggtgcgcctcaattcccgttagcaaaaggctcatggatcaggctagagggggctacgaagtggagagccagcccgggagggggagggtcaccagttctggggccattacaaaggatagggcagaggggcagagtttggggcttccgtctcagattagtcggttgagaatctgaacaaaggtgggtgaaggctcggaaccccggggtcaggggctcgcgtctgccagaagctgagacaccgaggggcccgggccaggccacctttgtccctctcgcagcctccagacccctgaccgccttccctcctggccatccc

SEQ ID NO: 26365 - DNA, 1191 bp, Artificial sequence
  DNA replication origin
gggaaagggggtggggtaaagtgaggtgagacagctgctttcccagcagagccaagagcaaatgtgttggtgttggcttcaggcctacatttatggtgaggaactggctttatttctttccttttcttttttctttttcttttttttttttttttgagacggagtctcactctgtcgccctggctggagtgcagtcgcgcaatctcagctcaatgcaacctctgcctcctgggttcaagcgattctcctgcctcagcctcccgagtagctgggactacaggtgcccgccaccacacccgactaatttttttgtatttttggtagagacggggtttcaccgtgttagccaggatggtctcgatctcctgacctcgtgatcctcccgtttcggcctcccaaagtgctgggattacaggcgtgagccaccgcgcccagccggaactggctttatttctaagacaaaaatgcctagcacttgagcatctgagcctcaagaggataaggagtttgtgatagacaacactgggactgtttctagacttgatttattgacttgtctgtttccattctgttactaatctgattgacaatgaagcccgggatgtggctggaagggatttctgcgtgcgtgcgcatgctatcgtcagggccatgtgggcccgtttggagcaggtgctcccgtgggtgggggatgtttgagcgagggctgtttgcgtgtgagaagggcgtgtgtgaaaacgacacgggagaagtgggcgtctctagggagttgtttgtatgtgatgtgagatgtgtttgcctggatcgggaagtaacgtaggttcgggtatgtgcagtgcgtacggttggatgggaggaggttgtggggctcccaaggtagcacgggaggaggaggcttacagacacatcttacagaacctagccccttttcttgcccgcctagattttcctcctagattatagtttcccagttgcgagatcctgggagagggaagaggagaggcgtaaggctccctagagtcaggagtctgggggctcccctctttgcgtctcgcacgagctgggagctggggaaaagaacagatggggatggatgcgctccccacaggggaccgcgtggcgacacgtaaaggattcaacctcagtccagtagtcgcatcctctgccccagggctgcccacttcacttctt

SEQ ID NO: 26366 - DNA, 1842 bp, Artificial sequence
  DNA replication origin
aaagtgaggagcatctctgcccggccgccatcccatctaggaagtgaggcgcgcctcttcccggctgccatcccatctaggaagtgaggagcgtctctgcccggccgcccatcgtctgagatgtggggagtgcctctgccccgccgctccgtctgggatgtgaggagcgcctctgcccggccgcgaccccatctgggaggtgaggagcgtctctgctcagccgccccatctgagaagtgaggagaccctccgcctggcaaccgccccgtctgagaagtgaggagcccctccgcctggcagccaccccgtctgggaagtgaggagcgtctccgcccggcagccacctcatccgggagggaggtggggggggtcagccccccgcccggccagccgccccatccgggagggaggtggggggatcagccccccacccggccagccgccccgtccgggaggtgaggggcgcctctgcccagccgcccctactgggaagtgaggagcccctgtgcccggccaccaccccgtctgggaggtgtatccaacagctcattgagaacgggccatgatgacaatggcggttttgcggaatagaaaggggggaatggtggggaaaagattgagaaatcggatggttgccgtgtctgtgtagaaagaagtagacatgggagacttttcattttgttctgtactaagaaaaattcttctgccttgggatcctgttgatctgtgaccttacccccaaccctgtgctctctgaaacatgtgctgtgtccactcagggttaaatggattaagggcggtgcaagatgtgctttgctaaacagatgcttgaaggcagcatgctggttaagagtcatcaccactccctaatctcaagtacccagggacacaaacactgcggaaggccgcagggtcttctgcctaggaaaaccagagacctttgttcacttgtttatctgctgaccttccctccactattgtcctatgaccctgccaaatccctctctgcgagaaacacccaagaatgatcaataaaaaaaaaaaaaaaaagacgagcggtcagcatttccaacatcaataaagaatacactgaatccaacaaccaggaggtaactaaagagggttgaaagcacggtttcaaagagttactggggtgtaaactgagcttcacatgtagaaatggaaacagcaagggtgtgaccactttctaaagacatttggtcttaagcaaacaaagagagtgatgggctatggcttgagaggagttaggtaaagagaaaagattttgtaggatagaggaaccttggccagtggaggcaggatggctcccagtgttgggagaccccctcggctccttgtccctggatcctccccgctgcacagcttgtttcactcctgctgccagaaagcttgacctggtaaggcaagcacacccaggagagatgacctccattccagccttcatgacttctaaatttaacccagaccacattgcttcttggcaaatcatggtcaactgtatcaccaaggactgaaagaggtgacataggtctgcttttcaaaaatgctagcaatgatgacaatgaactcacgtgttgaatacatacactaggcctcaacagtcctaggttttgaatagctcatctgatcctcacaaccactttcttttatgtcagttatgtcatatgtcttatgtctcttatgtcagttatgtcagggttcatattttacagaagagaaaactgagattagaagagttaaattacttgcccaagtcatagagttagtaagctagagagctgagattcaaactcagatctttctgatcccagaggctgtgct

SEQ ID NO: 26367 - DNA, 1202 bp, Artificial sequence
  DNA replication origin
cccaccattcccccctttctattccgcaaaaccgccattgtcatcatggcccgttctcaatgagctgttggatacacctcccagacggggtggtggccgggcacaggggctcctcacttcccagtaggggcggctgggcagaggcgcccctcacctcccggacggggcggctggccgggtggggggctgatccccccacctccctcccggatggggcggctggccgggcggggggctgaccccccccacctccctcccggatgaggtggctgccgggcggagacgctcctcacttcccagacggggtggctgccaggcggaggggctcctcacttctcagacggggcggttgccaggcggagggtctcctcacttctcagatggggcggctgagcagagacgctcctcacctcccagatggggtcgcggccgggcagaggcgctcctcacatcccagacggagcggcggggcagaggcactccccacatctcagacgatgggcggccgggcagagacgctcctcacttcctagatgggatggcagccgggaagaggcgcgcctcacttcctagatgggatggcggccgggcagagatgctcctcactttccagactgggcagccaggcagaggggctcctcacgtcccagacgatgggcggccgggcagagacgctcctcacttccaagacggggtggcggccgggcagaggctgcactctcggcattttgggaggccaaggcaggcagctgggaggtggacgttgtagcgagccgagatcacgccactgcactccagcctgggcaccattgagcactgagtgaacgagactccgtctgcaatcccggcacctctggaggccgaggctggcggatcactcgcggttaggagctggagaccagcccggccaacacagcgaaaccccgtctccaccaaaaaaatacgaaaaccagtcaggcgtggcggcgcgcgcctgcaatcgcaggcactcggcaggctgaggcaggagaatcaggcagggaggttgcagtgagccgagatggcagcagtacagtccagcttcggctcggcatcagagggagaccgtggaaagagagggagagggagaccgtggggagagggagaggcagagggagagggagaggcagagggagaggcagagaggcagagaggcagagaggcagagaggcagaggcagaggc

SEQ ID NO: 26368 - DNA, 1050 bp, Artificial sequence
  DNA replication origin
gggagaggcgcgagcaggaaccggggctgcgagcggcgcttgcgggccagctggagttccgggtgggcatgggcttagccggccctgcactcggagccgccggccggccctgccggccccgggcaatgaggggcttagcacccgggccagcggctgcggagggtgtgctgggtcccccagcagtgctagcccaccagcgctgcgctcgatttctcgccgggccttagctgccttcctgccgggcagggctagggacctgcagcccgccatgcctgagcctcccaccccctccatgggctcctgtgccccccgagcctccccaatgagcgccgccccctgctccacggcgcccagtcccatcaaccacccaagggctgaggagtgcaggggcatggcgcggcgcgggactggcagccagctccacctgcagcccccatgcgggatccactgggtgaagccagctgggctcctgagtctggtggggacatggagaacctttatgtctagctcagggattgtaaatacaccaatcggcactctgtatccagctcaaggtttgtaaacacaccaatcagcaccgtgtgtctagctcagggtttgtgaatgcaccaatggacactccgtatctagctactctggtggggatgtggagaacctttctgtctagctcagggattgtaaaggcaccaatcagcgccctgtcaaaacagaccactgggctctagcaatcagcaggatgtgggtggggccagataagagaataaaagcaggctgcccgagccccagtggcaattgggtagggtcctcttccactctgtggaagctttgttctttcgctctttgcaataaatcttgctgctgctcactttttgggtccacactgcgtttatgagctgtaacactcaccgcgaaggtctgcagcttcactcctgagccagcgaaaccgggaacccaccagaagcccgaacacatccgaacatcagaaggaacaaactctggacacgccgcctttaagaactgtaacactcaccgctagggtccgcactttca

SEQ ID NO: 26369 - DNA, 1041 bp, Artificial sequence
  DNA replication origin
cgctctcgggaaggcttggaccgacgcggcccagaggccaggaacattccgcgcgtggaccagccgggccagggcgatgctgcgggtgcggtgtctgcgcggcgggagccgcggcgccgaggcggtgcactacatcggatctcgggtgcgtgcgccaccggcctcgtctggcggccgcgtgactcactcgatcctgcgggcggcgtggagcactcgctcgctccctgcccggagccgccaccttccctcgctttccctagccggaattgcacgagagtgtcccttctggtatccctgggaagctcagcttcaagagccttcgcaggctccaggagctgggcggcgtcccccagtcagggggaacttgcgttgcggctccagcccttggggtccacttgctgtctgcgcgtccgcggcctgctggcccacggcgcagggggcgccgcccccctctaccggaccttggtgcgctgcaccaagcttcccgctcggagcaaggggttgggacgacggaggctcctcttagtaaaagggtggcgttattggggttcagtagcctgagtgggcgtcgagttggggagatttctggaaaatgcgtgtggggtagatggatggggagaagaggcaagcaaagtgggaatcggggacggggagcgagcgaccagattcactccaagtataacatgggatcccacgtctggagaggagtcggggcgagtgcagcctgtaagcagagtttctgcgctccccgccctcggctgccctggcagcagaccctcccatgcttctagtactggaatcgctccgacattctggcttcctcccagcaactggttcctgaacagctgtcattctccgtctttcttctgcctccacccgagttctcctcctgcccacttcctaaggcttttaacagagcaggatagagatttggggggttgaggtttgctcaggggttgagggaccctccctgctctagattttataggccatgcatttttaaaaggcttttgaagtttttagatctccttcttatttgtt

SEQ ID NO: 26370 - DNA, 1105 bp, Artificial sequence
  DNA replication origin
cgagtgctccacgccgcccgcaggatcgagtgagtcacgcggccgccagacgaggccggtggcgcacgcacccgagatccgatgtagtgcaccgcctcggcgccgcggctcccgccgcgcagacaccgcacccgcagcatcgccctggcccggctggtccacgcgcggaatgttcctggcctctgggccgcgtcggtccaagccttcccgagagcgcgcccggagcggggtgggcgggcgcgcggggcccgaggccttttgtagccgcgctccgccccggccgccccccgcggccccattggctgccgggaacaggtggtggggccggcgtagcgccccgaattaggaactgtcgggaagcgccgcggccgctggctcgagcctccgatgcttgcccttttttagccagcggggccactgacggcttctgttgcacgtccggacccggacccagacccgagcgtcgcaagaaggcccgttggagtctcgcgcaactgggcaggacgcgacttctgacgaagtgacaatggtctatgcatatattaagtgaatatttgagaatttaaatatgcaaagcgtgagtacagtgttacccttaaattcacatatgcgcactgaaccagtcacctcatttttcggtaaacgaaaccacctaaagattaggtggtttcttggtgcaacatcgggtttgagactgcagaaaactaagtctggaaattgggccatttgttccccggggaggcagtgctttccttccagtaccccgtcggttgttatttggaacacctggcatttcacatggtctttggccatatgcccctggcttgagaaactccgtcatgaaaatcgacaagtgtgggtcagaaataagggaggacgacagtttcgttccttccatttcatgttttaaaatttttgtttcaacttgatcaggattcttttttagaaaagtattttccctcacagtgcagtcttaattgctgtggatttgtacagagctagagaactcaggttaacatttatgctcctagcaggagggggggcaagagatttgagtatttcatttttgtacttatagaattataactattcatttttgatgagc

SEQ ID NO: 26371 - DNA, 1446 bp, Artificial sequence
  DNA replication origin
tcgggctgcggctgggcttccgacggaggctccccgccaaggctgacgcgggtacgaggggtgaccagcccagcgggatcgggactgggcgtcccgccgacgatgtgcaaggcagccaccaggccaggagcgcctggcggagcgaccaccacgtggcccagggagatcggtcggtttctcagcagctcctgtgccgcctccagcaccgcggctgtattccgggcaccgggcgcgcctgcccgctctcgcaacaccggccacacggcgacgcgccgcaggggcggacagggcactaggaggaggcgattcaggctgagactcctccgggatctcgacgccccgaccgccgccccggggctcgcgcacagcgggtccagctgcacaaagccgtccgctccgtcccgccgaggccaggcagtgcagaggcaggagccgccgtcgggtagcgagatcttcactgccgagcccaagcgcgcgcccagggcgtggagggcggccgggcccaggcggcagcgctgggtgccccggtctctagcgtctaagggtagcagctttaagagcggcccttcagggaagggatccgagtccggagccatcgcacacagatgaaccaggcagacgaaaccagattaggaaacccacccggcccacaaaaagcggaacaccgagctcgcaggccggaagcagattgcgcgcatgcgctagggcagactgcgttgctagcagctgagtgaaggccgaaagggccaatggaaacgttagacgacgctcgggcctctgggtagagcgttggtgtccgctttcgtgaaatcgagttgcctaacccagagctttcccgagatggtcttcgttacaggtgtctgggaggcggcttaagctcacttcactaggtcattaagcatgtactttggtggttacatatatcttggaagtcaccggctttacattctgttttcctggccttcgaactggagcatcagtactaccgccgttggaatagcaacctagagactttgctattttgtgaagaaactctaactatccgcatgggcacagaattttgggtgctctggtgcaaatgtctcaggtgacttggcgtaactgagaatacagccttgggaccttcggtaatcggggttccaatctgggaggtccaggcacaacccttcctatgggaaagtaccagcatagtgggagggaagcacacggtagcgcttaaaatcccttgtagagaggaaagaaggaaaactaggctacctgatggatttgtagcacaccaacagtacatttgttctgatttctgatattcttttgaatattctttggcaacaagttaatcactaaagttcatgcgatcaatgcttactgtctaattggggcacaacagtactaagtcctgtattagaggcgatacctatctacgttattaagacaactgcctgctat

SEQ ID NO: 26372 - DNA, 938 bp, Artificial sequence
  DNA replication origin
gagccggcctccagcagcgggcgcggcgggcgcgagcacgaccccactctcctgcggccgcgggtggagcagcgcgagcccgcctcgctgagccggccgggggcggggagatgagttgcggccccgcggcagcgccccaggtattaaatagatgtgccgccccctcgcggagccccggcggagcgtcggggtcggccctgcgacccgccgccagcggcttcggaacttgaggacagggttgggcgcctttaatttataacgtgtttcgttttccacaggatggggagggacgcgcggcactgccctcgagaactggcgctccggtgaagtaggcgccgccggccgtccgcctcccccaagccgttccgcaccgcggccgctcagcctctgccatggccggctctggcgcgtggaagcgcctcaaatctatgctaaggaaggatgatgcgccgctgtttttaaatgacaccagcgcctttgacttctcggatgaggcgggggacgaggggctttctcggttcaacaaacttcgagttgtggtggccgatgacggttccgaagccccggaaaggcctgttaacggggcgcacccgaccctccaggccgacgatgattccttactggaccaagacttacctttgaccaacagtcagctgagtttgaaggtggactcctgtgacaactgcagcaaacagagagagatactgaagcagagaaaggtgaaagccaggttgaccattgctgccgttctgtacttgcttttcatgattggagaacttgtaggtgagttgtgttgccaactcactttccgtttacctttcctcgagagtctttgtcaagctgtagttacacaggctttgaggtttaacccatcttttcaggaagtttgtatttatcaagacactgatctcatgtgaaaaggccacacggttccaaag

SEQ ID NO: 26373 - DNA, 1077 bp, Artificial sequence
  DNA replication origin
gaggtgtggagggagaggcgcgggcgggaaccggggctgccagcgacgctcgcgggccagcacgagttctgggtgggcgtgggctcagcaggccccgcacttggagtggcaggctggtgccacaggcccgggcagtgaggggcttagcacgggccagcagctgcggagggtgcaccaggtcccccagcagtgccggcccgcaggtgctgcgcttgaattcttctccaggcctcagctgcctccccacagggcagggcttgggacctgcagcccgccatgccccagccccccagcggtgggctcccacacgggtgagcctccctgatgggcgccgccccctgctctgtgatgccctgtcccattgaccgcccaagggctgaggagtgcaggtgcgcggtgcgggacccgggggcagctccgcctcggctctggcacgggatccactaggtgaagccagctgggctcctgagtcaggtggggacttggagaacttttacgtctagttcaaggtttgtaaaggcaccaatcagtacccagtgtctagctaatctggtggggacttggagaacctttatgtctagctaagggattgtagatacaccaatcagcactctgtgtctagctcaaggtttgtaaatacaccaatcagcactctgtgtctagctcaaggtttgtaaacacaccaatcagcaccctgtcaaaacggaccaatcagctctctataaaaacagaccaatcagctctctgtaaaatggaccaatcagcaggatgtgggtggggccagataagggaataaaagcaggctgcccgagcgagcggtggcagtcctttctggtcctctttcgtgttgtggatgctttcttcttttgctctttgccataaatcttgctgttgctcgctctttgagtccacactggcattacccttatgtgctgtaacactcactgtgaaggtctgcagcttcactcctgagccagggagaccacgaacccaccagaaggaagaaagaaactccaaacacattcgaacgttagaaggaacaaactccggacacgccgcctttaagaactgtaacac

SEQ ID NO: 26374 - DNA, 1148 bp, Artificial sequence
  DNA replication origin
atttaaccaaaaagaccatatttaacttcgaattacttttgtttcctactcttacccttgtgtacattaaatctcacctaccgaaaacataagccccacgtctcatttacagcttgtctcccaagcgtcatgtctcacgctagaaattagaaatcagtgttaatcagctttgctcacaaatgctttataattaaatatggggctgaagtaaaataataacatcttcctttctgtacattcgtatagtggcaagcacttaccttatattatctcacttgcgcactcctttgtttaagagatgtttattgaacacctcagccggaaaagcaaagcccctgctctccgaggctcggcgtggaggagaccgagagccgtcgggggactgggtgccgtagcggggggcgggggggggggggaccggttgccttggcggaggcggggaaccgggtgccttggcggaggcggggaaccgggtgccctgaggggactgggtgccgtggcggagcggggggactgggtgctgttggtgggacgggggcggtgctgggtgcgagggacgggggcggtgctgggtgcgagggactgggtgccgttggggcggaggtgggggcggggaactgggtgccgaggagagagaactgggtgccatagagggccggggtaccgggtgcggtggagtggccgggtgcagtgaagagggggcccagtgcagtggggagacccagtgcagtggaggggaccgagagcgacgctgcagcacagcagcgtgagctggactttaaggactgttgttccctgagagcgcagaagaagaaatctttcaggtctgtagttagctctgggaaggagtccagaaggatgaataggagttcgccgagcggaaggggtggagcattccagcagggggaaagcgcctggaaagagagcgcacggcgcctctggaagctgtggtccttgtgcgttgtgggctggtgggaaggtggctggagaggcgagcaggggctcctggaaccgggggttcgggcccctttactcagcgctgacagtgcgcaggtggtaaacattcacagcgtggcgttacttctaactggtcaagccaagcgtttctaggcacggcctataaaaggccaggaaggaccgagacccct

SEQ ID NO: 26375 - DNA, 958 bp, Artificial sequence
  DNA replication origin
ctcctatgtctacttctttctacacagacacagtaacaatctgatctctctttcttttccccacatttcccccttttctatttgacaaaaccgccatcgtcatcatggctcgttctcaatgagctattgggtacacctcccagacggggtggcggctgggcagaggggctcctcacttcccagacagggcggccgggcagaggcatccccccacctcccggacggggcggctgccgggcggaggggctcctcacttctcaggcggggcggccggtcagagatgctcctcacctcccagacggggtggcggcggggcagaggcactcctcagttcccagacgggatcgcggccgggcagaggcgctcttcacatctcagacggggcggcggggcagaggcgctccccacatcccagaggatgggcggccaggcagagatcctcctcacttcctagacaggatgacggccgggaagaggggctcctcacttcccagactgggcgggcggccaggcagaggggctcctcacatcccagacgatgggcggccaggcagagacgctcctcacttccaagacggggtggcggctgggcagaggctgcaaactcggcactttgggaggccaaggcaggcggctgggaggtggaggttgtagcgagccgagatcatgccactgcactccagcctgggcaacattgagcactgagtgagtgagactccgtctgcaatcccggcacctcgggaggctgaggctggcagatccctcgtggtcaggagctggagaccagccaggccagcactgtgaaaccccgtctccaccaaaaaatacgaaaaccagtcaggcgtggtggcacgcctgcaatcccaggcactcggcaggctgaggcaggagaatcaggcagggaggttgcagcgagtggagatggtggcagtacagtccagcctgggcttggcatcag

SEQ ID NO: 26376 - DNA, 1364 bp, Artificial sequence
  DNA replication origin
ggccgggcggggggctgaccccacctccctcccggactgggcggctggccgggcggggggctgaccccccacctccatcccggacgggcggcctggccgggcggggggctgaccccttacctccctcccggactgggcggctggacgggcggggggctgaccccccacctccccccctgactgggcggctggccgggcggggggctgaccccccacctccctcccggacggggtggctggccgggcagaggggtcctcacttcccggtaggggcggccgggcagaggcgcccctcacctcccggacggggcggccggccgggcggggggctgacccccccacctccctcccggacggggcggctggccgggcagggggctgaccccccctcccccctcccggacggggcggctggcctggcagaggggctcctcacttcccagtaggggcggccgggcagaggagcccctcacctcccggacggggcggctggccgggcggggggctgacccccccacctccctcccggacggggcggctgccgggcggagacgctcctcacttctcagacggggcggttgccaggcagaggggctcctcacttctcagacggggcggttgccaggcagagggtttcctcacttctcagacggggcggccgggcagaggcgctcctcacatcccagacagggttgcggcccagcagaggtgctcctcacatcccagacagggcggcggggcagaggcgctccccacatctcagacgatgggcggcggggaagaggcgctcctcgcttcctagatgggatggcggcggggaagaggcgcttctcacttcctagatgggatggcggccgggcagagacgctcctcactttccagactgggcagccaggcagagaggctcctcatatcccagacgatggggggccaggcagagacgctcctcacttcccagacagggtggcggccgggcagaggctgcaatctcggcactttggggggccaaggcaggcggctgggaggtggaggttgtagcgagccgagatcacgccactgcactccagcctgggcaccattgagcactgagtgaacgagactccgtctgcaatcccagcacctcgggaggccgaggctggcggatcactcgcggtcaggagctgagaccagcccggccaacacagcaaaaccccgtctccaccaaaaaaaaaacgaaaaccagtcaggcgtggcggcgcgcacctgcaatcgcaggcactcggcaggctgaggcaggagaatcaggcagggaggttgcagtgagccgagatggcagcagtaccgtccagctttggctcggcatcagagggagaccgtggaaggag

SEQ ID NO: 26377 - DNA, 952 bp, Artificial sequence
  DNA replication origin
gggatcagccccccgcctggccagccgccccgtccgggaggtgaggggcgcctctgcccggccgcccctactgggaagtgaggagcccctctgcccggccagccgccccgtccgggagggaggcgcggggggtgggtcggccagccgccctgtccgggagggaggtgggggggtcagccccccgcccggccggccgccccgtcggggaggtgaggggcgcctctgcccggccgcccctactgggaagtgaggagcccctctgcctggcgagccgccccgtccgggagggtggtgggggggtcagccccccgcccggccagccgccctatccaggaggtgaggggcgcctctgcccggccgcccctactgggaagtgaggagcccctctgcctggccagccgccccgtccgggagtgtggtgggggggtcagccccccgcccggccagccgccccatccgggaggtgaggggcgcttctgcccggccgcccctactgggaagtgaggagcccctctgcccggccacaaccccgtctgggaggtgtgcccagcggctcattggggatgggccatgatgacaatggcggttttgtggaatagaaaggcgggaagggtggggaaaaaattgagaaatcggatggttgccgggtctgtgtggatagaagtagacatgggagacttttcattttgttctgtactaagaaaaattcttctgccttgggatcctgttgatctgtgaccttatccccaaccctgtgctctctgaaacatgtgctgtgtccactcagggttaaatggattaagggcggtgcaagatgtgctttgttaaacagatgcttgaaggcagcatgctcgttaagagtcatcaccactccctaatcttaagtacccagggacacaaacacttcggaaggccgcagggtcctctgcctaggaaaaccagagacctttgt

SEQ ID NO: 26378 - DNA, 856 bp, Artificial sequence
  DNA replication origin
gaggtcatgttcccaggacgggcgcgtcttcagggtggaagcctggcgcacgtccggaggtgccgaggacccaaccagcccaaactctgggggaaatgactcccctctgccctcgccccgcgctctgctaccatttccttacgtctctgcttcgctcagcgatgcaaaacgcgcgaggcgcacggcagagggccgaagccgcggtactctccgggccaggcccgcccctcggccgcgccgcgcagcacgggattccccggccgctgtccagcgctggccgcctgagccaaggctgccgcggagccagtacagtcggggccgctggctggaagggcgagcttcctaaggcggggggaagcccggcgccggggccgggtaggaaaggcgggggaggggctccggccgtctggaaggaatccacgcggcttgaggctgtgggggaagtagggtggcgagcggtccttctgcgcgcggggggcggggggggtggggtggtccattagggtcccctggcgagggggcggctttctagtgtgtgagggcgacgccctagaagctccccttcaaagttggccccacgcgctgaatgtggaaagttgactgggacccagtagtttcccatcccaaacctgctttccgagaagggcttcaaacccaaaatgtgaatcccgcctcccctctcagccagaactgtggactcgtcccggggaggggcggtgggtggggcggggctggcgggaaatttcggttttggcgcgctccctgcggcgacgctcatcgtgcgctctcctcttcccccggtggtctcctcgctcgccttctggctctgccatgccctgctctgaagagacacccg

SEQ ID NO: 26379 - DNA, 1113 bp, Artificial sequence
  DNA replication origin
agagcgcgcatcgcgcgcaattcgtgccgctaaaaaaaataaacccagagagctcgcccggggcttaggaccgctggggatatgggtactttgcgccgcgctcttctggcggggcccgggaggccgagggatcggccggggctgctgccgccgggggcctgggctttccagccagctgtggaccaaacggtcttcccttacccaaattaactgcgccacgcgcaggcggcgcacgggttgggcttgggaatggggaccgcgaggcttcagcatcccgatgccctgaaagtctccccgcctcggggatttgtctctgtgttgcagctggcaggggccgcctgaagtgggagcagcgcctggagaaggcgggaggagcccggcccgggggacgggcggcgggatagcgggaccccggcggcgcggtgcgcttcagggcgcagcggcggccgcagaccgagccccgggcgcggcaagaggcggcgggagccggtggcggctcggcatcatgcgtcgagggcgtctgctggagatcgccctgggatttaccgtgcttttagcgtcctacacgagccatggggcggacgccaatttggaggctgggaacgtgaaggaaaccagagccagtcgggccaagagaagaggcggtggaggacacgacgcgcttaaagggtaaaggaaccggttccctcctttggtgtgggtctcccaagtttcaagatccagaacaacgggcaggatgactctccctgtggaagactccttggcaagacctcctgggggcaccttagaggtgctagggttgtttagtccccaccccgttcgtggttaaactaccttgcccctactcccagagatttctgccccaaaggagaggacgtggttaaatggaatcttgggccattgttgaggcagattttgggaggcgagaagagttccttggggaagaaggggaggagttgcgagtgggataagaggagaagcccgttcctttccctgcaatatcaattctggttgtttctagaggaaagtactttccttggggtcatcttggtagatgctgtatttgaaagggggcaaggaaaggaagggattcccatgacagtcagaggagaa

SEQ ID NO: 26380 - DNA, 1261 bp, Artificial sequence
  DNA replication origin
cccagacggggcggctggccgggcagggggctgacccccccacctccctcccggacggggcggctggccgggctgggggctgatccccccacctccctcctggacgggggcggctggccgggcagggggctgacccccccacctccctcccggacggggcggctggccgggcagggggctgatccccccacctccctcctggacggggtggctggccgggcggggggctgacccccccacctccctccctgacggggcggctggccgggcagaggggctcctcacttcccagtaggggcggccgggcagaggcgcccctcacctcccggacggggcggctggccgggcggcgggctgacccccccacctccctcccggacggggcggctggcctggcgggggctgacccccacctccctcccggacggggtggctgctgggcggagacgctcctcacttcccagacggggtgactgccaggcggaggggctcctcacttctcagacggggcagctgccaggcggaggggctcctcacttctcagatgggcggctgccaggcggagggtctcctcacttctcagacggggcggctgggcagagacgctcctcacctcccagacggggtcacggccgggtagaggcgctcctcacatcccaggtggggcggcggggcagaggctctccccacatctcagacgatgggcggccgggcagagacgctcctcacttcctagatgggatggcgaccgggaagaggcgctcgtcacttcctagatgggatggcggccgggcagagacactcctcactttccagactgagcagccaggcagaggggctcctcacgtcccagacgatgggcggccaggcagagacgctcctcacttcccagacggggtggcggccgggcagaggctgcaatctcggcactttgggaggccaaggcaggcggctgggaggtggaggttgtagcgagccgagatcacaccactgcactccagcctgggcaccattgagcactgagtgaaccagactccgtctgcaatcccggcaccccgggaggccgaggctggcggatcactcgccgctaggagctggagaccagcccagccaacacagcgaaaccccgtctccaccaaaaaaatacgaaaaccagtcaggcgtggcgtcacgcgcctgcaattgcaggcactcggcaggctgaggcaggagaatcaggcagggaggttgcagtgggccgagatggcagcagtacagtcca

SEQ ID NO: 26381 - DNA, 1144 bp, Artificial sequence
  DNA replication origin
ggttgggggtaaggtcatagatcaacagggtcccaaggcagaagaatttttcttagtacagaacaaaatgaaaagtctcccatgtctacttctttctacccagacacagcaaccatccgatttctcaatcttttccccacctttcccccttttctattccacaaaaccgccattgtcatcatggcccattctcaatgagctgttgggtatacctcccagacggggtggtggccgggcagaggggctcctcacttcccagaaggggcggccaggcagaggcgccccccacctcccggactgggcggctggccgggcggaggcgcccccccacctccctcccggacggggcggctggccgggcggggtctgaccccccacctccctcctggacggggcagctggccgggcgggggctgacccccacctccctcccggatggggtggctgccgggcggagacgctcctcacttcccagacggggtggctgccgggcagagacgctcctcacttcctagatgggatggcggccgggaagaggcgctcctcacttcccagactgggcagccgggcagaggggctcctcacatcccagacgatgggcggccaggcagagacgctcctcacttcccagacggggtggcggctgggcagaggctgcaatctcggcactttgggaggccaaggcagacggctgggaggtggaggttgtagcgagccgagatcacgccactgcactccagcctgggcaccactgagcactgagtgaacgagactccgtctgcaatcccggcacctcaggaggccgaggctggcggatcacttgcggttaggagctggagaccagcccagccaacacagcgaaaccccgtctccaccaaaaaaatacgaaaaccagtcaggcgtggcggcacgcgcctgcaatcgcaggcactgggcaggctgaggcaggagaatcaggcagggaggttgcagtgagccgagatggcagcagcacagtccagctttggcttggcatcagagggagaccgtggagagagagggagagggagaccgtggggagagggagagggagaggaagaagaagaataaatatgttaaagggtccatactacccaaagcaatctacagattcagtgcaatctct

SEQ ID NO: 26382 - DNA, 896 bp, Artificial sequence
  DNA replication origin
gccgagattgcagcctctgcccagccgccaccccgtctgggaagtgaggagcgtctctgcctggccgcccatcgtctgggatgtgaggagcccctctgcccggctgcccagtctgggaagtgaggagcgcctcttcccggccgccatcccatctaggaagtgaggagcgtctctgcccggcagccaccccgtctgggaagtgaggagcgtctccgcccggcagccaccccatccgggagggaggtgggggtcagcccccgcccggccagctgccccgtccaggagggaggtggggggtcagaccccgcccggccagccgccccgtccgggagggaggtgggggggcgcctccgcccggccagccgcccagtccgggaggtggggggcgcctctgcctggccgccccttctgggaagtgaggagcccctctgcccggccaccaccccgtctgggaggtatacccaacagctcattgagaatgggccatgatgacaatggcggttttgtggaatagaaaagggggaaaggtggggaaaagattgagaaatcggatggttgctgtgtctgggtagaaagaagtagacatgggagacttttcattttgttctgtactaagaaaaattcttctgccttgggaccctgttgatctatgaccttacccccaaccctgtgctctctgaaacatgtgctgtgcccactcagggttaaatggattaagggtggtgcaagatgtgctttgttaaacagatgcttgaaggcagcatgctccttaagagtcatcaccactccctaatctcaagtacccaaggacacaaacactgcggaaggccgcagggtcctctgcctaggaaaaccagagacctctgttcacttgtttatctgctgaccttccctcc

SEQ ID NO: 26383 - DNA, 1196 bp, Artificial sequence
  DNA replication origin
aatggagtctcctatgtctacttctttctacacagacacagtaacaatctgatttctctttcttttccccacatttcccccttttctgttcgacaaaaccgccatcgtcatcatggcctgttctcaatgagctgttgggtacacctcccagacggggtggcggccgggcagaggggctcctcacttcccagacggggcggccgggcagaggcgccccccacctcccagacggggcggcggctgggcgggggctgccccccacctcccggatggggaggctggccgggcggaggctgcccccacctcccggatgggggctgccccccacctcccggacggggcggctggccgggcgggggctgccccccacctcccggatggggcggctgccgggcggagacgctcctcacttcccggacggggcggctgccggacggaggggctcctcacttctcagacggggcggccggtcagagacgctcctcacctcccagacggggtggtggcggggcagagacactcctcatttcccagacagggtcgcggccgggcagaggcgctcttcacatctcagacggggcggcggggcagaggcgctccccacatctcagacgatgggcagccaggcagagacgctcctcacttcctagatgggatgacggccgggaagaggagctcctcacttcccagactgggtggccgggcagaggggctcctcacatcccagacgatgggcggccaggcagagacactcctcacttcccagatggggtggcggccgggcagagactgcaatctcagcaccttgggaggccaaggcaggcggctgggaggtggaggttgtagcgagccgagatcacgccggctgcactccagcctgggcaacattgagcactgtgtgagcgagactccgtctgcaatcccggcacctccggaggccgaggctggcagatcactcgcggtcaggagctggagaccagcccggccaagagggggaaaccccgtctccaccaaaaaatacgaaaaccagtcaggcgtggcggcgcacgcctgcaatcccaggcactcggcaggctgaggcaggagaatcaggcagggaggttgcagtgagcggagatggcggcagtacagtccagcctccgctcggcatcagagggagactgtgcaaagagggagcgggagtgggagggagaggg

SEQ ID NO: 26384 - DNA, 1586 bp, Artificial sequence
  DNA replication origin
ctcacgcgagcccggcgtcccgccgcgtgcgccccggcgcagcccgccagtccgcccggagcccgcccagtcgccgcgctgcacgcccggggtgaaccctctgccctcgctgggacagagggccccgcagccgtcatgctttccgccatctacacagtcctggcgggactgctgttcctgccgctcctggtgaacctctgctgcccatacttcttccaggacataggctacttcttgaaggtggccgccgtgggccggagggtgcgcagctacgggaagcggcggccggcgcgcaccatcctgcgggcgttcctggagaaagcgcgccagacgccacacaagccttttctgctcttccgcgacgagactctcacctacgcgcaggtggaccggcgcagcaatcaagtggcccgggcgctgcacgaccacctcggcctgcgccagggagactgcgtggcgctccttatgggtaacgagccggcctacgtgtggctgtggctggggctggtgaagctgggctgtgccatggcgtgcctcaattacaacatccgcgcgaagtccctgctgcactgcttccagtgctgcggggcgaaggtgctgctggtgtcgccaggtgagccccgaggatcgccctgccctggcaccagggcttctcggcgccttgactgacgagccacagcgtggcataaggggttcgcagagggaggttcagatcggaactgtaggtatagaaaaaggttggcagtgtttccttgaatcgcaaataatgatcttttaggaccacctgttgtggaagctgataatgtgctaggttctgtgttaagcactctacaggcagtgtggtttttaatcctcacaatgggtaggctttgttataggacttttatagatgagaccactgaggtcctgagaggtgaagcctcatgcccagccatctatctccaaattccaagctcttaatcaatacttataacatctgcattaaaatgcagaggatcttgagtgcgaactctagtggatccagaggggctcttctcacctctgctgcttgactggctgtgtgatcatgggaaagtcacttctcctctctgtcccttggtttgctcctctctaatgaggcaggcttcaatgttgcttccagctctcaactgctgttagcatcctgtcccctccctgcagaacaaaggtgaccccacctgatccccagggagaagatactggggatctgctacaggaccgttgtgagcccccactgcatctatcacaatagtgaccctttcagttctgtggttagctcctgccacatttcagccagacttgaaacagtaacttaagtgatgacaaggtcaggaagtgacagagaacctgttactcacagggctgatggctttcccctcccagagagcttgtctctgcacttgaataaggaccaagggttccttctctcagtcagtaagaagaggcctacacaggagtgggctgaaagacctgggtgacagggtaggggtcgagggagccgaggagcctcagctttctagaatgcatttctgtgctaagccctatagtagatgcttttattaccccgg

SEQ ID NO: 26385 - DNA, 1053 bp, Artificial sequence
  DNA replication origin
ttattccgcgggggtcggcggggtcggcctgggcgcccgcgccgccgctgcgctttgtccgctgggcacactgcttctgggaggggcgggcagacatggtggcggccgccgccccctcctcggccctagcatgccgcggccgcctcgcggctacccggcttgccggtcccgagcggcagccccggggtggcgatggggtcgcgccgaggcagcggaggttctgcgggcgactggaggttggcagtgggcgggagaaagaggaaggcaggcgcggctgggcctcggcctctggcgccgcggtaccctttgtctcggcagcctgacggccccgccgggctctccggagaggggaacgggcggcgagggtggcgggtcctgggcgccctgtgctgcggggccgagaggcgctcgggtcgcggcgggatcggccggaccagacagggttaatggaagagcctggccagtcccgcgcggggcccccgcagcgacagccttggccgcggggactggagtcctgagggggagaagcctgccgttctgaaggctcgggacttctgccccaaagacttcgccgccgagaactgcgggtgcactgcctcagggaagaagttgagaattttgccaggtcatctctgccagggcacagttcatcactgtgtgtttagtgtgtttcggtgaagctctccaagtgtgttgaatcagcgtgcctagcctcaagggtgcatcgtgaaaactgaaaccaaaggaatgatacaggcctgctttgtgtgtgtcttcccactttaagcttgttttcagtacaaatactcttgctttaaacctgattggactgtggcgagcggacatctgttcaaaggaggggccgagaccacagtacttctgaagggggcttgataatgtggaaacattttaagttttctctccggactgttttgctctctcaattcaggcaagttactgaagtacgttttttatctagaaaaaggtttgatgtagtctgtaaatggtccttgtaaagtacattgccatctcagaattaaaagatccactctc

SEQ ID NO: 26386 - DNA, 1321 bp, Artificial sequence
  DNA replication origin
tgtttcagtccctagctacagttgcccagataaataagccttggtccctgccctcaaggagttcacagaccagtgggtgataaaattcctcatccagctagtggatgactgattgctccacaaggtgataagtgacagggcaggtgattgcaaaaagaaattgcctagaagtcagaagtcattcaaatggagccctggaagctaagcaggaattgggctgggaagagagtaagaggtcagtgtcccagcacagggacagaaaatgcaaaagtgcaaggggacccaggcctggtgcaggtgagacctgcctgtggcctggagctgggagcttagggtttgtagagggtgaagagaagacagatgtcagttcagtggcctggtgtgccatgctaaagagttgtctgggctgtcttgaaggttatgggaatcccctcaaggccttttctagaggagcagcatcatcgaagcctgctgtcagcctggtgtggaaaatagaacagtagctggggtagagagatgagcaaggagacagacaagcattcggggaagaaaccatgagggtctgtactgaggtagcgaaagagaggcagaggaaggcaggtgcatttaaagatgttacagaagctgaatagacagtcggaggcctcgttagatatgggaggtgagggagagaaataaggcaaggatggtccccaggttcttgtctggacacaggccggtggcagagtcacgtatcatacaaggagaggacttcaggagggttggagaaaggagctgagagaaatgttgaatgtggagggggagggatcaggcaagcagttatggatgggagagtcccctggactggggaacatgcggggcaggggtcagtccatgggacaggggtggcatctcacacttgggaagtgtctagcgagagaagaggaccctgagtgagctcaggaggacacccagacatgaagcatagacagaggaggaggaggcctggaggaggctaaggagggccagaagaggtggggttaggaaagcaagaccaacagagggtcccctgctgctggtgaccaggtaagccgtgtgtatcggggtgccctcagcgttccaggattacaagtagttagcatatctgccccccggaaacagcctttagaaccccccgcccccgcttatatttgtgacaaccgaaaatgccctcccatgtttccaaacactcctcagggccaattacaagattatttggtgaccttggtgagagcggttaccaaggagtctgtggtgaaagccagggaagaataaaaccacagctcctctgtcctgccgtggc

SEQ ID NO: 26387 - DNA, 1694 bp, Artificial sequence
  DNA replication origin
caacctcgccgcgcgaggcaagtccaagggctccgacgcagggcgcgggtagggaggcgcggcgccgcccccgggatatttaaccccagcctggagcccgccgggcgccggacgctcgggctcctcggcgctcgcgcctcccctccctcctcccggctgtctcccggagcgccccaccctccgccctgcgctcgcctcgcgcgcaggcaccggccggcgggcgcggggagcggggcgcggcggcgctcgcctctgcggagccgccccctggccgctgccgccgcgcaccgcccagcccgcgccgcccgcgccgcccgggctccagccgccccgctgtccgccctgagtgcgccgcggctgcccgagcgccccgcagacgggcgggtggccgtggacgcccagccagcagcccgcagcatggattcggattccggggagcagagcgagggcgagcccgtgaccgccgcaggtacctaggggccgcgacggcccaggcgggtgggctggggctggggaggacgggaggctggggcatgaaatcgggaagccgatcctcagcagcccgaccccttccaggccaagactggggattgctccgcgtcgtgagtttgctttggggcttcccccaaccccattgcacttgggcgcgcgggagggagggaaggtgcatttaggggtggctctccttgctgccagtctcccgcggcgggctctggtcgcccgggctgggtgggggcggggaagggttcgggaatccgcgtactgtagtttgctgcagagagggttgcaacacatctgccttttgaaataactttccgagcgcgggccgggtcctcgaacctggggcgccgggactgcgctgcggcgcaggtgactgggtccaagaacgtgactgggggctctgaacagaaaaggcctcgcgagtggttggggcaggggtcaaaccacagcttgcggccgcggttcccgaggctgctaggagagcccatgcacagggtccatcgctgccgcgcagccggcggagaaggtccagaaggtccccgcggactggtccccgaacacagacgcaggggcgcgcgcctcccgacttcgcctttaagaggccccgccggcttttcacaatcgatagttattaaagcaataggtggatgcttacttagggaagaaaaaaaatgaatgtcctcccccgcctctccctgatactgagcaacaggaggaagccacccacagccgtgggtcgacttgccgccggtctctgcccacctccaccggtccgctccgccccccacccacgggtctacgcacctaggacccgctcgccctcctcacgtgcccacagctcccggcgcttgtgcagctctgaaggttagctgtgggcctgcagacccgtgacctgcgggctgggaccctcctgtacagaccgcggccctggctaagcccccactcttcccagtgtcacactagagtactgacggtggggaccaagtaacagaaggcaccatcagtccagccgtgggtgtaggaaagagaggttcgggaaccaagcaggacagtgccctgcgtatattattaataccctttcatcctcacagcccctggccaggcagttattttcattttacagagattcccatagagtaaagggcttgcccacttctcacagccagggagtagccaggacccagtgacgccct

SEQ ID NO: 26388 - DNA, 1455 bp, Artificial sequence
  DNA replication origin
cagcccacccgcctgggccgtcgcggcccctaggtacctgcggcggtcacgggctcgccctcgctctgctccccggaatccgaatccatgctgcgggctgctggctgggcgtccacggccacccgcccgtctgcggggcgctcgggcagccgcggcgcactcagggcggacagcggggcggctggagcccgggcggcgcgggcggcgcgggctgggcggtgcgcggcggcagcggccagggggcggctccgcagaggcgagcgccgccgcgccccgctccccgcgcccgccggccggtgcctgcgcgcgaggcgagcgcagggcggagggtggggcgctccgggagacagccgggaggagggaggggaggcgcgagcgccgaggagcccgagcgtccggcgcccggcgggctccaggctggggttaaatatcccgggggcggcgccgcgcctccctacccgcgccctgcgtcggagcccttggacttgcctcgcgcggcgaggttgtgctggtctgcaaggccgagccccttccctagggtgaggccaagtttgtaaaattactaggtgaaaaagagcttcaactcgcgcaggaaaggagaggttccgagtgttccgacttatggggttgccagggttcgagtccaactcctccgctcagagaccttggacgagacctgtgtttgttttctcactaggaagatgagggaaggggggcggggaataagggaaggggagcggggaataagggaagggagcggggaataagggaagggggcggggtggggggagatgacagttggactgttgtggaaagtagtaagacaaggcgtgtgcgggaccgagcgctgggcctggcacctagtgacgaagtaaacacacaggcaggtaatgctaactccggctgtttgagtcttctgccagcgagggcagggcaggtggggcaagcggtggtgaagcgggttccgggggctcggtgagtctgaacactggctcgcctggaaggttggagccaccctgccaatcaagcagccgtgctatttcgcgccctcgactagaggggccagaattaattttaaaagcttttctttgttgatgggattaaacacagagtgctaaacttccgtaacaccatcctttatgaaaggaaaaaaaaaagcatttgtaaacctatttactaattaagagcccaaacgaggggggaaatgcacggagcaccgaggccttttttgttgttgttaattcttggttatctatatgctcttattgcctccctattataggctcctacactcacaaagcctcaagctgggttctctgcttgtaaagtctgcccagagaatgcaaattattggccagagcaaaagaaaatcaagaagaaaaagtctgctaaaaagcgccacttactgaacatttccctttgtgtcctcatctaatctgtacaatgacccagtga

SEQ ID NO: 26389 - DNA, 1258 bp, Artificial sequence
  DNA replication origin
cacttcccagtaggggcagccgggcagaggcgcccctcacctccctcccggggggcggctggccagacggggcggctggccgggcggggggctgaccccccacctccctcccggacggggcggctggccgggcggggggctgacccccccacctccctcccggacagggcagctggccgggcggggggctgatccccccacctccctcccggacggggcggctgccgggcggagacgctcctcacttcccagatggggcggctgccgggcggaggggctcctcacttctcagacggggcagctgccgggcggaggggctcctcacttctcagacggggcggttgccaggcggagggtctcctcacttctcagacggggcggccgggcagagacactcctcacctcccagatggggtcgcggccgggcagaggcgctcctcacatcccagacggggcggcggggcagaggcgctccccacatctcagacgatgggcggccgggcagagacgctcctcacttcctagatgggatggtggccgggaagaggcgctcgtcacttcctagatgggatggcagccgggcagagacgctcctcactttccagactgggcagccaggcagaggggctcctcacatcccagacgatgggcagccgggcagagacgctcctcacttcctagacaggatggcggccgggcagagacgctcctcactttccagacggggcagccaggcagaggggctcctcacatcccagacgatgggcggccaggcagagacgctcctcacttcccagacggggtggcggccgggcagaggctgcagtcttggcacattgggaggccaaggcaggcggctgggaggtggaggttgtagccagccgagattacgccactgcaccccagcctgggcaccattgagcagtgagtgaacgagactccgtctgcaatcccggcaccttgtgaggccaaggctggcggatcactcgcgattaggagctggagaccagcccggccaacacaggggaaccccgtctccaccaaaaaagtacgaaaaacagtcaggcgtggcggcgcgcgcctgcaatcgcaggcactgggcaggctgaggcaggagaatcaggcagggaggttgcagtgagccgagatggcagcagtacagtccagctttggatcggcatcagagggagaccatggaaagagagggagagggagaccgtggggagagggagagggagagcgagagcgtatcaggcat

SEQ ID NO: 26390 - DNA, 680 bp, Artificial sequence
  DNA replication origin
ggccgcgaccccatctgggaggtgaggagtgtctctgcccggccgccccgtctgagaagtgaggagaccctccgcctggcaaccgccccgtctgagaagtgaggagcccctccgcccggcagctgccccgtctgagaagtgaggagcccctccgcccggcagccgccccatctgggaagtgaggagcgtctccgcccggcagccgccccgtccgggagggaggtggggggatcagccccccgcccggccagctgccctgtccgggagggaggtgggggggtcagccccccgcccggccagccgccccgtccgggagggaggtggggggtcagccccccgcccggccagccgccccgtctggccagccgccccccgggagggaggtgaggggcgcctctgcccggctgcccctactgggaagtgaggagcccctctgcccggccaccaccccgtctgggaggtgtacccaacagctcattgagaacgggccatgatgacaatggcggttttgtggaatagaaaagggggaaaggtggggaaaagattgagaaataggatggttgctgtgtctgtgtagaaagaggtagacatgggagacttttcattttgttctgtactaagaaaaattcttctgccttggggaaaaaaaaaaaaagaatgcctgatacattgtataatga

SEQ ID NO: 26391 - DNA, 1415 bp, Artificial sequence
  DNA replication origin
tcagcatgtcatggctctcggcgcggatatgcggcgcgggctcgccgctgtggctgcgcttgttgcgagctgagctggccgggtcttggggtggtgcggacgccccgcgcggcgcgcggctcaactcggccaggaaggagcgcagggcactgtcctcgcgctgctcccggccccgctgcgcctccaaagcccgcagcgccgagctcagcccgcgccactggcacagcgcgaacaccgtgcccgcagcgttgagcgccgagagcagcgccacggccgccagggcgccacgcaggccccaacccgcgtccccacggcctccctcagcgcctcgggccatgctctatgcgccttgggcagggcagggcttggcagcctgcggccctggcagcctttatacgcctcgggcaagccgtgggctggtggcagcgtcgtgagtcaagtcaccctttggcccagctggcggggcgggatggggacagtagtggtggcgcccgagcagcccagagggacaggcgggcagaagcaggagaggagccagtggaggcagcctgcggaggaggggctggcagggctcgtgctcccagagtcccgccagctgagcaaaccctctcctcctcttcccactgctctgcctgagggcattgccgtggcccagacaggcaaagcaagggtcagactgagggggagagcaggaattcttatggagagaagtctccggattccacccccttctacccccacactgccctcttggagaaaaagatcagcatgcccagatgctaaggcacgtgcccactgtccatgggaggtctggtcctggcccgagcaccaggctgcgcatcactccccaccatggccatgaggctccacgaggccactgaagaccccagatgatctttcccaggaaggggatggataggggcaaggagacacttggcactggaaggcaaaaaaggccacccatcagaaccagaaaagcccaggactgcctggccaacaggactcgtccttgaaaggagagttccaggatttgacaagtcaggaactctccgatgagatccatatctggaaaatggcaggatggtgaggaaaaaaaccccaggaatcaggagacctagttctaaagccactctgttgctactcagctgggaggctttgagcatgtcccaagaccatgaggaggtgctttctggcctaagggttggagagctgggccatggttgggttcttacctagccctaggaaaacatgttttcccatgcctctcatttactcctcacaacttttatgttgcccaatacctgctctgcctcgagggtcactgtcaaccaaatgcagagtcacttttgagtctcctcagagaacctcttcactcaagatctttctcagcttctcctagaatggctctgcttccc

SEQ ID NO: 26392 - DNA, 1270 bp, Artificial sequence
  DNA replication origin
gcgtataaaggctgccagggccgcaggctgccaagccctgccctgcccaaggcgcatagagcatggcccgaggcgctgagggaggccgtggggacgcgggttggggcctgcgtggcgccctggcggccgtggcgctgctctcggcgctcaacgctgcgggcacggtgttcgcgctgtgccagtggcgcgggctgagctcggcgctgcgggctttggaggcgcagcggggccgggagcagcgcgaggacagtgccctgcgctccttcctggccgagttgagccgcgcgccgcgcggggcgtccgcaccaccccaagacccggccagctcagctcgcaacaagcgcagccacagcggcgagcccgcgccgcatatccgcgccgagagccatgacatgctgatgatgatgacctactccatggtgccggtaggcggggtctctgttccccgtggcgccccggccaggtgggcggctgggggtgtggggcgaggacgccgacgccctcttctcccctggccaggctgcgaggtgctgcggagagggctgtgggcatgagtagctggggatgtcaccttggcaagcacctcaacccactggagtctgttttctcatctgtgaggttggggacagggtgaaggagggagtctcttctacctctgacattctttgagtccacatgtaaacgaagggcgaaggcagtgtttctaagagcctattttccttctcagcttagacaagttttcgtctcctggtgtgaatggagccgcagcagccttggggctccgcctgtgccactgacctgtgggtggggccctctgagaggatggaggcgcgtttctgaaagagcgtaggctttttcaataaagggattctttccctggcatcaactagtggtctggcttttcacctggcatcgcctcattcctgcgagatggccggcctaattgtttccgtttaagtgaaaacagccctagttttactgcccacctgggacctagatgctgggaaagttgcccctggatctcaagcaattccaaatgagggacgtcaatatggtgcaatttttttcttaaaatgcagtgtcaaagctgaggttcttaacatgggacctgcggattggtctccccactgggctccagggagtacacggaactgcagaaattgccaagtgtgtgtgcctgtgccctcctgcccatgtggatgagggtctgcagcttttcactagatcttcaaggggtcccccattgcatgcctcccccaaaaggtttaag

SEQ ID NO: 26393 - DNA, 891 bp, Artificial sequence
  DNA replication origin
gtctggagcctcaggtcactggggccatcctggcagtgggacaggcctggagcctgagaatggtctgaagcctgaggctgcaagtgctaaactggtgctagggcaggcctggagcttgggtccatgggtgtccccttgatgactagggctgcagggaccggaccaacactggagggagcatgaagcccagggctatagaggccagcccagccctgggaacaatctggagcatggagccactggggacagcccagccctggggtaggcctgagagaataagtccactggcaccaaggcgggcctgcaggcagctccatgggatcttgtctggagcctatatccattagggtctgcctgttgctggatgagtctgaggactgagtccttggggccatcctggagcctgactatggtgtctggcctggcattggaaccagtccagagcctggggctgctgcaggtgagcttagaaattgtatgggcccagagacgaagtccagtgaggggcctggggctgcaggatcctgcctggtgcttagatgggcttagaggctcagtctgcgggaactggcctgaaatctgggcaataggggtctagcactgggttttactggggcaggcctggtgttggggtccgaggcaccattctggtgctcacctccctctctatcccccatgcagaaggtatctctccccacgtcatactacccaggggtggagggagggtggcacggatgggtcatgtaaaactctttcctatcctcttcacagcatcttttctgatttctgtgcaacattcaggtgctgtaatctctcatttggtttcctcagctcttgtgagtgtattctcatgcatggatagtcctttaaattggtgtttctgtgaggggg

SEQ ID NO: 26394 - DNA, 1560 bp, Artificial sequence
  DNA replication origin
ttgccatattagtctggagtgagttttgactgatcagattggacaataaaaggctcagctgtaattccaggagacttaattagtcatttgcaaccttaagatacagctatcaagaagccatttaaaggattcatgagggaagagaacaggtggatacaggcttcagattttgagtttgataccgagaggaagaaagaggctcacaacttcacaactgtgtgaatgggccaaaacttcatggaatgctgtaaaacaagagccaaatgtgaaatggtttaaataatgtgaattagtaacactcttggaaacctgagtacaatttgttgtttgatgatagttttgacttggtttctaatgcagtgaaggtcaaagattaagagactcatctagaatctagtagtaacaaaaaggaacccttggatatggcgcgggggaagggaggaagggggggggagggaaggggagggaggggggagagagagaaagagagagaatgccgcaggtcattaggtattatttttcattcctcctgcaactttctactgaaaagattaccaacgactgacagatctttgcctccaatcttccccacccttccctttatgcttcaaaatgctacaaagtcatcttcccaaagcagctctgattatataaatttttgctcagaaacatctgatatacccccactgcatgcagagtgaaatctgggcttcttggagcattcaagactctccataatatgttttggtaggccaagagttagaccacttggataccttgatctcttgctaagtattatttactttccctaccctataaatcatctgcctcaaacattaatctttgtaccttcaacaccccctctattttctgtactgtatttgcagcatttcttgtctatctcagcctgtcaaaattaaactcagcgtttatgtcaggttatgtctccataatgccttatccacgcccttagtcaacattcttcttcctcttctgtggtgcataaagacttttatatctcaatcacaccacctttggcgttctgcctggttttacagatagttatgtcttggtgtcccctacttccttaccctgtgatttaagcatagtatgggttagaacatttgccatgaattggcctgtggcagggagctgatgatccttgttatcaaccattcaaagtttagcagatagtttggaaaatcaggcgattctgctaattcatgaaattactcatgaaaaaaagtcgaaaggagtcacccgtctctaaggcggctttttgctgtctagaataaccgtgacaaaaggtgggagcaaaataattagctttcaggggagtatggcttctctaaatagttgcaagatgcctacattgtttatgtaaaataaaatatcttatgtactgcactttcgaaaagactgaagatatctaagatatctccaggtggaaattcccggtgacgggtgtccttctgaggtcaacggcactgaccattgcacactgtattctggaatacgttcaacacagcaaaaccggctcgtggcgcgtccccggcgtcc

SEQ ID NO: 26395 - DNA, 1127 bp, Artificial sequence
  DNA replication origin
gattcctcgcccgcactgtccctgcgggaaggcggcccccgcgcgccgcggccctcggccccctcgccgccgccgcgctcgcgctccggctccgagtccgaggaggccgagctgtcgctgagcctggcccgcaccaagacccgctcgtacggcagcaccgccagcgtgcgggcgccgctgggcgccggcgtcatcgagcgccatgtggagcaccgggtccgcgcgggcgacacgctgcagggcatcgcgctcaagtacggtgtcacggtgagcagggcgcgccgccgcggcccgggctggcagctaccgcgcaggaggcggtgcggctcggggtgcggtgggggtgggggtgggactgcgggtgggggtttgggggatggggagtcgcagggacggccgtgcgtccccgggcggctcggctcccagggctcgctcagcgcgcgctgctggccaccgcagtggtcgccaaagctggtcctgcagcgggaggggcggaccgccagggctccctccctaggtagctgcatcgagttcccggtgccccgcccaggctcagactagatctgtcgcgtgagggaggccgaagaggactagggctttggcatccccgtgaaccaccttcacccaatttgcaggccccatcacactactctatatttacgcaaagcccaactgaggtgaattttgttgtctgtgaaaacaagctccgtgatgagtcaggaatggtgcagttgttcctactgggtggttctggttctatcgattatgcttctttatgtagaagtgaaattacaccctctgggctcactggcaaccgcgaatgtgacacctgtcgctaagcagcagccaagaactgtggtgagctggagggctgcgtttattacaaatttataagtgtgtgtgtcttgggtgtatagcattacacctctgggaagaacatggaaacctgagggaacaaattgtttcattaaaattacttataattaactgtgagctatgtgatggcctttttacatttgggatctgtatcagttttcagtgttctttcctgaagcaccttagacagcaatgggaagaaagaggatcttatctatatctttcccttaaagtgaaactctttctggccc

SEQ ID NO: 26396 - DNA, 1206 bp, Artificial sequence
  DNA replication origin
ggacccggtgctccacatggcgctcgatgacgccggcgcccagcggcgcccgcacgctggcggtgctgccgtacgagcgggtcttggtgcgggccaggctcagcgacagctcggcctcctcggactcggagccggagcgcgagcgcggcggcggcgagggggccgagggccgcggcgcgcgggggccgccttcccgcagggacagtgcgggcgaggaatccgccatgggtcctgccgaggccgccgggtcggggagcttgccaagggggcggcgcctcctcctcctccgccgccgccgccgcctcttcctcttcacaggggctgcagcaggccgttccgcgggggcggcggacgggaagccgaggcggggagccgcaggccgggcatggcgggcgcctcctcctctgcgtcctgcctgccccgggcgcccgcggcacacgcacctgcaaggttaagagcgaaagcagctcccgccgcggcctgccggtaccgggaagaccctgcagagcgagggagccggggagcgctgaagcccgcggccgttggggctaagagagggctatctgcaggcgtcctaggccccaggtggacccctgctccattggcgatagagccctggcagaaccctgccctggccacggcgaaaaaaaaaaaaagcgttgctctgcctcctttattgattccccagcaggagccagcttgcacagaccttccagctctgccaatgccaagggtacttccctccccccaccccagtgacctcaaagtccacgtcacagtaaaacttaagatcatcaaacacacacagacagcttctccaggtccatctcaacagcctcagagtccagtcctttcaacattgcactaggagggatagtgcttctaaggcctaatgggtggcctcaaaataacccccctagttgttcgggtttcacactttgtacactagtgccaatttaagtcctggctgcctcgaaaggctggccacatacaattcattctccaggctcagtagttggaatttactgtctgcattcatcttctcttcgtcagtttattctttgacaccctgaaatcgcatctccctgccccgtattgctattaatattataaccaccaaagacctcttatctgtactcttcatttgaacaccgtctactcttgaacaccctttcaacacactgtattatacacagagtgggtaca

SEQ ID NO: 26397 - DNA, 1972 bp, Artificial sequence
  DNA replication origin
gcgggcgcctcccgcccgggcgcagcgcctggtctcccggcgcagccgaccgggccgggaggcgagaggcgagaggcggcccggctctgcacgcccgcccggccgaccgcccatgtcgcggagcatcctcccgcgggcagggagggcacggcggccaccgcgctgcgggcccgggggctgcagacaccggctgtccagaacaggccccacccgccccccggggcgctcacccgtccgtgcgctcatcccggagccggctgtgctggccgtcagtccgtcagccccggtggagcggggccgggagaacaggggcggcgccgtggccggggcgagcgcggcgatcaacaggcggctcccggccgggcgcggcgccggggcgcgcggctgcagcggagcaggctgggaagcgtagttcccggctgagcctcgccgcggccccgcagtcccccagccccgcccttccccgacaggtgtcctctcccggaatcggggtctgaaccccgccacagctctgcaggggaggaagcacctgggtcggggagaagcctgggcaggctctttggagacgctcggggctccggagagcgtggatggcaaaggctttcaagcctgtgatgagcattcctgtgagcgagcatcctgacacggaagccgcgttgagagcggtctcaggtacagaccccgcccgccccaggttttcctggctgggcgtgggcgtgggaggagagagtagttgggttggcagcctagggagggaaggaggtaagcgaggtggaagttagcaaggctctagggtgatggcgtgaggggctggagagcccaagcgcagtggcggcttcactgaggtgagaccggacaacttagcctgtctgagccttcgcgtcctcatctgtaaaacaggcttcaagcttgaaaaagtgttgtgaggattaagcgacccatagcacttaggatctggcacttagtgcatactcagtgaaagttccttccttggggtttccgagggagttcttgggccgggaaagtcctatatgtcgtgctaacctaaagatagttggacctcgttgggctgggtaaatgttaaaatccactgggtttgttagtcgttgagcccgttcacttcatccctgaatataccctgagatgttctgtctgccaggttcttgagagctccaaagatagagaaaataaagtcaagtttctgaagcatgacagcagagtggggtgacataggacaaagaccaacattatgaaaatacatggcatctagatttaacttccagaggccttttctaattagatgtgatatctctctccttcttgaacttttgcagcatattttgagcataacctttgcttatgggacttatcttggcagtctaaggttcgttgagttttgcaagttgctgctatgcagtgtttcacatgatggtgggatttgcattcacagatgtagtggaggaaaatgaaccaaagggatggatgcagcatggctggtgtaatctctatatgaaattttaggcaaaatgtgaaaagaggtgaaacagctttatagtctgtctggcacgaggtgtgcagtaatcgtgtggccaaaaaaacgtgctgcagaggaaattccacatctgaaaatgataacactggtttgcatttatgaaaatactttcctatttgtgttctcatttgatttttacaagaacccttgtgagacaggcagagtgaaggtatttttccccaatgatagttaataagaggcacagagaggtgatgtgacttattcaaggtcataggggtgttcagtaagcctgtcttctctccttccactgtgggcacccccagcactgtctcccttttgcacattgcaaaatagggccataccttccccagcagatgggttgaaccagaaagtaaagttaatcctctaaaactctgggaactagcatgatgaacactggcacgcagtggctgctgactg

SEQ ID NO: 26398 - DNA, 1234 bp, Artificial sequence
  DNA replication origin
gcttcccagcctgctccgctgcagccgcgcgccccggcgccgcgcccggccgggagccgcctgttgatcgccgcgctcgccccggccacggcgccgcccctgttctcccggccccgctccaccggggctgacggactgacggccagcacagccggctccgggatgagcgcacggacgggtgagcgccccggggggcgggtggggcctgttctggacagccggtgtctgcagcccccgggcccgcagcgcggtggccgccgtgccctccctgcccgcgggaggatgctccgcgacatgggcggtcggccgggcgggcgtgcagagccgggccgcctctcgcctctcgcctcccggcccggtcggctgcgccgggagaccaggcgctgcgcccgggcgggaggcgcccgccggggtgtgagtcccgcgccccgcactgcggtgccgcagcctctgcagcccgctgggccgcagcggggagggcgcggtctcctgtcctcccgggctgcggggctgtgttcttccactccgggctttgttcccccacttttccccttcctgtgcatgtttggtgagctcctggagcggtatgcatctccctgcctcgttcagcaggcgatggggaggggtggactggccggcgtctttcctgagatcgctggagctgtcactcgcagggcgtttcagcctcccagtaagcggcctcgtgcggatcctcgagaaccttattattattgttattacttttctggttaaagtaattgtagtatgtgctcccttgaggcttcctaaatgttccctgttgacctgcggaaatgaaggtggatttttaaaacagtaataaaaggcttctaatgggaatttttagagtattcagaggtaggaaggtgatgccgtcacaatgcaaattagcagtgaaggaggccgtgcttactgcagcttcgtctgtgcccattacatatctgaatcacgaggcatttaggacgggaatgaaaagaagatcgggggaggtgttttaaaaaccaggttctcctcttagcttgaccattcaggagctgagggacctgggcaagtccctccacctctctgggcctctgcatgtaaaggggcgtttgggctaaatgatttgtaaacctctgttcttccaagattctcccctctcagggaactgaaaagatgagagtgtttctgtttaacagcactacaaaaagcctaattgtgacaacaagcgcctcta

SEQ ID NO: 26399 - DNA, 929 bp, Artificial sequence
  DNA replication origin
ttgcagcctctgcccggccgccaccccgtctgggaagtgaggagcgtctcggcctggctgcccatcgtctgggatgtgaggagcccctcagcctggctgcccagtctgggaagtgaggagcgcctcttcctggccgccatcccgtctgggaactgaggagcgtctctgcccgaccgccaccccgtctgggaggtgaggagagtctctgcccggccgccccgtctgagaagtgaggagcccctccgcccggcagccaccccgtctgggaagtgaggagcgtctccgcctggccagccgccccgtccgggagggaggtagggggcagcccctgcccggccagccaccctgtccgggagggaggtggggggcagcccccgcccggcagccaccccgtctgggaggtggggggcgcctctgcccggccgccccgtctgggaagtggggagcccctctgtccggccgccaccccgtctgggaggtgtacccagcagctcattgagaacgggccatgatgacgatggcggttttgtcgaatacaaaagggggaaatgtggggaaaagaaggagaaatcggattgttgctgtgtctgtgtagaaagaggtggacataggagactccattttgttctgtactgggagaaattcttctgccttgggatgctgttaatctatagccttgcccccaaccccgtgttctctgaaacatgtgctgtgtccactcagggttaaatggattaagggcggtgcaagatgtgctttgttaaacagatgcttaaaggcagcatgctcgttgagagtcatcaccactcccgaatctcaagtacccagggacacaaacactgcggaaggccgcagggtcctctgcctaggaaaaccagagacccttgttcacatgtttgtctgctgaccttccctccactattgtccta

SEQ ID NO: 26400 - DNA, 1063 bp, Artificial sequence
  DNA replication origin
atagattaacagcatcccaaggcagaagaatttctcccagtacagaacaaaatggagtctcctatgtccacctctttctacacagacacagcaacaatccgatttctccttcttttccccacatttcccccttttgtattcgacaaaaccgccatcgtcatcatggcccgttctcaatgagctgctgggtacacctcccagacggggtggcggccggacagaggggctccccacttcccagacggggcggccgggcagaggcgccccccacctcccagacggggtggctgccgggcgggggctgccccccacctccctcccggacagggtggctggccgggcaggggctgccccctacctccctcccggacggggcggctggccaggcggagacgctcctcacttcccagacggggtggctgccgggcggaggggctcctcacttctcagacggggcggccgggcagagactctcctcacctcccagacggggtggcggtcgggcagagacgctcctcagttcccagacgggatggcggccaggaagaggcgctcctcacttcccagactgggcagccaggctgaggggctcctcacatcccagacgatgggcagccaggccgagacgctcctcacttcccagacggggtggcggccgggcagaggctgcaatctgggcactttgggaggccaaggcaggcggctgggaggtggaggctgtagcgagccgagatcacgccactgcactccagcctgggcaacattgagcactgagtgagcgagactccgtctgcaatcccggcacctcgggaggccgaggcgggcagatcactcacggccaggagctggagaccagcctggccaacacggcgaaaccccgtctccaccaaagaatacaaaaaccagtcaggcgtggcggtgcgcgcccgcattcccaggcactgggcaggctgaggcaggagaatcaggcagggaggttgcagtgagccgagatggcagcagtacagtccagcctcggctgggcatcagagggagaccgtggagagagagggagagggagagg

SEQ ID NO: 26401 - DNA, 1113 bp, Artificial sequence
  DNA replication origin
cctttgttgagcggcagccgccggagggtcacacacaatggaggagggagccggctccgccgtcgccgccgccgccgccgccgccgggcccgccgcggcgccctcccgagccgccccgccggcgcaccccgcacacgtacacacacacactcacgggacttctccgactcatcgagagagtgcggggctcgcggactgcccccagtgtcggctcaggtctccggctgtgctggcggcagcggcgtctccgaggctctcgctttgccgcagtcgccgccatgtaaccccgacccgcgagagagggcgaggaagagggggcggggcttcgcggtgccacgccccctcacgtcacaggctcactccacgggttctcccgcccccgccctgcccagcgcacccgcacgcgccggaatttccagcgcccgtgactgggctgcgcgcgccgcggaggcggtgggaaaggcacgcggctcgtccggcgtctcctgggggctttgcctgcgggcgggcagggaggaagacagctggggccgtttgctctactacctgccctggcattaagggaacaaagtgaccaaacccagtgccagcgtttactaagcacctactacgtgcaaggcactgggcaatccgagaggaagaggcctcagtctccaggaagggtggaccttaagatggattggctggaaggcgacagcccgagcacaagacagacgcgttagaggccaatactaaggtcattcattctgccagagtatggaggaaggctttcaggagtggtcgccaaggtggcctttcagctggatcccggaggagcggatataaccaggaggtggggagggtgtttctgtgagcaaagactgggaggccagagtacctggcttgttgcaggaactgggataggacaatttgaatttgggaagggatgcactatgaaacgtagaaaggtggatgggtgccttcttgggcccacttggctaaaagcaaacttacattacttatcatggcttattgagtccaaggagccttttcagtgtttatgtgaaatttaagtatttatgaaattagagacgcaggtcagcatattttttcaatgacttcatcaccatcttg

SEQ ID NO: 26402 - DNA, 1314 bp, Artificial sequence
  DNA replication origin
gccgctgccgccagcacagccggagacctgagccgacactgggggcagtccgcgagccccgcactctctcgatgagtcggagaagtcccgtgagtgtgtgtgtgtacgtgtgcggggtgcgccggcggggcggctcgggagggcgccgcggcgggcccggcggcggcggcggcggcggcgacggcggagccggctccctcctccattgtgtgtgaccctccggcggctgccgctcaacaaaggcgtttttgttcggtctgccgcccgccccctgctcgcccgcctgcccgcccgctcgggcctggccggcgcgtccccgcgcgggcgggcgggcggcgggctggggtccccgcgtggggccggccaggcggccagcgcgcccctcccacccggcacgcccctcgccggtcgccctgccaggccgcgcccgctccctggccccgcacgcctgctgccgtcccgccgcctgcgcctggctccgcgggttcgaaacccagccggaccggaccggagggcgggcgagcgaggggcggcggcccggggaacatgaggtggcgtggagtctcgccttactggcacgctgcctttcgaaatgctcccgcgtctcctcccccatcccacccggtgactcggcctcagctgactccggccgggcaaagtctccagtggcgtagcgcgcagcgctcacccggctcgtctcagagccctgaagtccgcccaagttttgagtcttgccatgaatgaggtactgaaaactcggagacgaaattcctaatttcctccctcggccctacagtctttccttagcttctttcgggaccttaagtggtggtctgtaaaagtgcccaaatgaaagcttgttttgtcggttcaccaaaaagggccttgtcactttgctgtgcattttagtccgccttgtgagttgtgtcgaaaagtaaaggtgttttggcatccttttgtttcttggcgagtgtaggacccaaccggtttaggtgttagggggatctctgtgcagcgggagcttcttgattcctttcctgttttattttttcttttgcttgttcattggaaaaggtccagtgaaagggactggtgagttggaattagaagcctacttgtattaacggcagaattcgtgttcattgctaaagatgcagtctcagtaatgacttttttttttttaacggatacagatgatttgtcaaggggaaaaattaacacgccatacaatgaagagcaagcagcttcagagtaattttctgatggctgattcttctagcctgtctcttacagttccaattgcacatgtcctcc

SEQ ID NO: 26403 - DNA, 1304 bp, Artificial sequence
  DNA replication origin
acccgctgcgggagcgcaccgagctgttgctggccgactacctggggtactgcgcccgggaacccggcacccccgagccggcgccatccacgcccgaggccgccgtgctgcgctccgcggccgccaggttacggcagattcaccggtcctttttctccgcctacctcggctaccccgggaaccgcttcgagctggtggcgctgatggcggattccgtgctctccgacagccccggccccacctggggcagagtggtgacgctcgtgaccttcgcagggacgctgctggagagagggccgctggtgaccgcccggtggaagaagtggggcttccagccgcggctaaaggagcaggagggcgacgtcgcccgggactgccagcgcctggtggccttgctgagctcgcggctcatggggcagcaccgcgcctggctgcaggctcagggcggctgggtgagcacgcggcggacaccgggacacggggcgggacgggcagccgggaagcgcccacgaggctggcacggtgaggaacccaccgcgccaggcccctggaacgaggtttcgtgaaagcagaaaggctcgtttcagcgggcctggaacgttcgctgtgaagtctggggtttctcctcccctggcagaaaggccggcagaaatcggccttcttagacggccgtgaaccgttccgaagcagctgcgcaggcttaggtctgctcacttggaccttgccctggccttagccgtcggggacttttaggggggcacccacgttaggtctgaacgttttgctcctatagaaatccccaaccaatgaagtcagcaatggcggggccccagccaggtggggtgtttttctccttcgcctattaaatgcgcctttggagagactcagacccattgatcacaaccccctacgcctctcagcctggccagagaggttgtggagtgtggtggtcgcccagtggtggcgctgacccaaggttccttaatttctagtcctctgcacccagtcctcggtgagaacgttctaggcccctggctttcagctgcaagccttcatctctgtggtcaaggttagagggacaggcccttgccctgcagctgatgatcaaggaaagccacctggtgatgagcccactgcatgcctctgggggctctgagctagaccccatttctttccccaccaccttattggcgttgattcaatgactgaagtggcccatgttatcggatacctatagccaaactattaaaaccagcaagttttttgatccgaaatgtagcctcctgggggcagtttccatttag

SEQ ID NO: 26404 - DNA, 1539 bp, Artificial sequence
  DNA replication origin
ggctggaagccccacttcttccaccgggcggtcaccagcggccctctctccagcagcgtccctgcgaaggtcacgagcgtcaccactctgccccaggtggggccggggctgtcggagagcacggaatccgccatcagcgccaccagctcgaagcggttcccggggtagccgaggtaggcggagaaaaaggaccggtgaatctgccgtaacctggcggccgcggagcgcagcacggcggcctcgggcgtggatggcgccggctcgggggtgccgggttcccgggcgcagtaccccaggtagtcggccagcaacagctcggtgcgctcccgcagcgggtcggccatggtggtgcgctcccgcaactggtcaaccatggtccggcctctgctggggggccgggccttcgctggttttcttggcccggccgcgcctcccccagggtagggctgccgtgccccgccccggcccccggcccccggcccccggtatattgtttttcaggactgagagaagagcctttgatgggaatcccacctgcacctgttccagtccccaaggcaaggcctggtggtgcgcacgtgttcgcgtagcaatcagatgcactgtgagactcgggttatttagctccagtggcgcgatcttggttcactgcaagctccgcctcccaggttcacaccgttctcctgcctcagcctcccgagtagctgggactacaggcgcccgccaccatacctggctaatttttttggattgtttagtggaaacggggtttcaccgtgttagccgggatggtctcgatctcctgacctcgtgatccgcccgcctctgcctcccaaagtgctgggattataggcgtgagccaccgcgcccggccatctaatatttatattaaactttctcagttcatattactccgtggcttctttctcctgattggatccagactgatgcagaatggatactagcagtggtatttctgggggttcaggggtctggagcatgttgaaatagccctcccagggtgaaagatgagttgctgcatcttgcatcactacaaaagaggcacggcacttggcagctgtcttagtctgtccaggcggctatagcagaatgccatagactgggtgacttataaataaaggcatttatttctcacagttttgttggctaaaaagtccaaggttgaggccctggcaggttctgtgtcttgtaaggacctgcttcctggttcatagacaacaggcttcttgctgtgtcctcacattgcagtaggtgtggagtagctttccggggtctcttttataaggacaataatctcattcgtgagggctccacctttgtgatctaatacctcccaaaggccccatctctgaataccatcacactgggggttaggatttcaacatatgaattttgggggacacagcctggaacagtaagccattttggactttgaaggcaacatatactgtgtttgtgctatttcaacccaattgacaggctggtggattgaggagcagaataagagaagactctgca

SEQ ID NO: 26405 - DNA, 1372 bp, Artificial sequence
  DNA replication origin
gagatggggagaaaagaaagagctgggggaaggggaatggggaggagatggggagaaaaggaagtgctgggggaaggggaatgggaagggaggaggagggagggagaaacagcagaaggggaaggaaggagaccaggagagaggtggaacagggagacagaggaagaggagatgaggaatgggggaagattgagaagggttagaaaaaggagtccggatgaatgaggagagggggagggggcagagaagaggaaagaggagataggaaggagagaggaggcgatgggagggagggaggaggtgatgagagggagggaggaggggtgacaggaggaagggaggaggagatgggagggaggaggagatgggagggaggaggagatgggagggaggaggagatgggagggaggagatgggagggaggaggaggagatgggagggagggaggaggagatgggagggagggagggggaaatgggagagagggaggagagagggaggaggaggggaagggaagagaaagagggaagataggtggagggagaagggaggggggcaaataggaaggggactgaggaggacacagggagaagctgggaactaacccttcctgaagatgtgctaaaggctgaggtaggcactttacatattttagtcccatcccatgttacaaatggggaaactgaggctgagaaaaactcagatattatcatatattctgtgaccgtgacagaggtgggtgtgaatgaaggccagccctcttatgtcaccaaggcatccctctaactcacagaggagtcccagtatcggtggtgccacctttcagccagctggcctggcaactatgagagcccgggacacaaaggcccttacaaccctgtgctgttttaagccacttataacctagagaagggtgcaaaggaggtagaagagcgggaagagggcagtggcaacgggatgcccacctctggctcgcctgggagaagagggacggctgccagggccccaccggtgagaggctgaccgcgcattctaaagcactggacttggcttcatgtcacagatatttcccataaatacccatcacccacacctttctgcctgaactttcttttttctggcccaggagggggctgcccaaggctctacacccctgggggcccatctgtttggccccttcaccacaattggtttggtaggtttatccccaagtcctctggaaaaaagaaaagctgattataaaatgcactcagcattattttcaatctgcaaaatacaatctatcccatggagcttacccctgagtctccacatgctgtcacatagtccaaatcaagtatctcatcagcaaatcccgacagcacccactgcg

SEQ ID NO: 26406 - DNA, 1507 bp, Artificial sequence
  DNA replication origin
gcgggcctggctcccgtcgcagccacgaccgcccccaccgcccccgccgtccccgcccgggaagtggcgagccggtccggcttgccccgcccgcctcccggcccgcactcacgctccacatcgtgcagcttggctcgctcctcctccagcttgcccttgaggctctcggcctcgctcttcagcgacgccagcgtctcgttctcgtgcagcccctcggttgccatcttcgcgcggggacgcagcggagagggaagcggagagcgggaatgcgctgagccgcggcgggcgccgctccagcagccgtccccggccccgagcaccgccccgcggccccgccctccgcgatgacgccagcagctgcgggcccggctgctgcgcctgagccccaagaccccgcacctgggcgcgcgctctggcgcagtgcctggtgcgatgtccgcgtcagcctctctcctccgggagaggcagggagtgtgacgcccattttaccagcgggcaaactgtggcttagggatgctgggtgatttgcccgaggacgcacacagagggaagggccaagccgggattccaactcgggactccccgcttctggggagaccggtgaggcccccgcgacatggccctcccatccccaagcctctcgtgcagatctccgctctgtgggacttgattgcgggctgcgggcccgtggctcctgcaggcagagagaggacgggagaggagacggctacgaggcttggccgcaggtagctacggtgctcccccaacaaggaaccggaaaccctcttcgtttgttgatctaaatatacaaaaataaaactagttgctgggttctcagacggagtctctgcggcattaggaggcccacccttattttctcttttcttcacgcaggaatcaggtccctggcctgggggcggcaaaaggagatggcggtgggtcaagtgggcgcgcaggctcagacctggggcttctgagcccacgcccaggcatctcggacctctcacttctgaggccacctcctgccctttagaatgaagggctggcacagttctgccaggatgcacgtttagcgacttctgtcagactgaagcatcccctctccgcaagcgcctgaagtgtgagaggcactgttctaagtgctttaatttgcacttgtttaatcctcacaggagtcaacttgaatgggcacacttattcccactttacagaagaggaaactggggcacagaaagactgagtaattgctcagggggcatgctccaagaaagagggagagacaggatttggacccagacaggctggctccctagtgctctggactttggtgtggatgatccaactcaagccttctcctttttccctcctatgtgatcttgcatgcgtttgtgcagagaatgagaaggcagatcaaagttacagatgctgcgagaacatcgccaagcagaatcttgggtgctgtccccacctctctgtacctgctccctcccagagaagccagcctcca

SEQ ID NO: 26407 - DNA, 1133 bp, Artificial sequence
  DNA replication origin
aacaggatcccaaggaagaagaatttttcttagtacagcacaaaatgaaaagtctcccatgtctacctctttctacacagacacggcaaccatccgatttctcaatcttttccccacctttcccccctttctattccacaaaactgccattgtcatcatggcccgttctcaatgagctgttgggcacacctcccagacggggtggtggccgggcagaggggctcctcacttcccagtaggggcggccgggcagaggcgcccctcacctcccggacggggcggctggccgggcggggggctgaccccccccacctccctcccggacggggcggctggccgggcggggggctgacccccacctccctcccagacgaggcggctggcctggcgggggctgaccccccacctccctcccggacggggcggctgccgggcggagacactcttctcctcccagacggggtggctgccgggcggagggactcctcacttctcagagggtgcggctgccgggcggaggggctcctcacttctcagacggggcggccgggcagagacgctcctcacatcccagacggggcggcagggcagaggcgctccccacatctcagacgatgggcggctgggcagagacgctccttacttcccagatgggatggcggccgggaagaggcgctcctcacttcctagatgggatggcggccagacagagatgctcctcacttcccagatggggtggcggccgggcagaggctgcaatctcggcactttgggaggccaaggcaggcggctgggaggtggaggttgtagcgagccgagatcacgccactgcactccagcctgggcaccattgagcactgagtgaacgacactccgtctgcaatcccagcaactcgggaagccgaggctggcggatcactcgtggttcggagctggagaccagcccggccaacacagcgaaactccgtctccaccaaaataatatgaaaaccagtcaggcgtggcggcgcgccactcggcaggctgaggcaggagaatcaggcagggaggttgcagtgagccgagatggcagcagtacagtccagcttcagctctgcatcagagggagaccgtggaaagagagggagaggacg

SEQ ID NO: 26408 - DNA, 830 bp, Artificial sequence
  DNA replication origin
ctgcccagccgcccatcgtctgagatgtggggagcgcctctgccctgccgccccgtctgggatgtgaggagcgtctctgcccggccgccccgtctgagaagtgaggagcccctccgcccggcagccgcaccctctgagaagtgaggagtccctccgcccggcagccaccccgtctgggaggagaagagtgtctccgcccggcagccgccccgtccgggagggaggtggggggtcagcccccgccaggccagccgcctcgtctgggagggaggtgggggtcagccccccgcccggccagccgccccgtccgggagggaggtggggggggtcagccccccgcccggccagccgccccgtccgggaggtgaggggcgcctctgcccggccgcccctactgggaagtgaggagcccctctgcccggccaccaccccgtctgggaggtgtgcccaacagctcattgagaacgggccatgatgacaatggcagttttgtggaatagaaaggggggaaaggtggggaaaagattgagaaatcggatggttgccgtgtctgtgtagaaagaggtagacatgggagacttttcattttgtgctgtactaagaaaaattcttcttccttgggatcctgttgatctgtgaccttgcccccaaccctgtgctctctgaaacatgtgctgtgtccactcagggttaaatggattaagggcggtgcaagatgtgctttgttaaacaaatgcttgaaggcagcatgctcgttgagagtcatcaccactccctaatctcaagtacccagggacacaaacactgaggaaggccgcagggtcctctgc

SEQ ID NO: 26409 - DNA, 1100 bp, Artificial sequence
  DNA replication origin
cctgggggaggagcagagagcgctcaagggaagcatccagctctgctagatggcaagtggcaaggagagtgccaagatgaggagtgtctccagctactccagactgttcagagctgtttgctcttggatggggagaggatgggtggggctagggtggaaggaacagaagtacacagcagaaagccaaagaaggcctgccatgttccagaaagtgctagtggttttgggtggccacaggcagagggtggattgaaaagagggtgaggcctgagcaggaaattggccagaatgctggttgcccaggcctggctcttcctcaaaacccatgtgggggttgattttcaaagcttttctcttgccgggccccacccacaggaattccaatcaagtacggatgagagagtctgtctgcccaaagaaacctcgtgctcagcctggctgaggaagcctccgggggctgctgcaccagtcaagagaggattggtgggggtagggttgggggctgacttatggccatggcaagggggctggtaggcaggggcggacaggagagggcttttaaaaggcagtcttttctagcacctggtgactgttgggctgttggggtggagacacagaggggtgcccagcactgtcccaggcttctgacatgaggggcaagagagctaggaaggaggagcgtcggcatcactggagtttggaatttatgagtctatgaggacatttaggggctgacatcttggaggcaattggaaatgtggtgtagagctccagtgcacgatctgggtgggaggtctcagatgcacaggtgccaggcagttgcagaagctgtggaattgggtggaactctccagaaacagcctatcatgagaagaggctgggaaggaccttgggagacacggacatggggggcagtgggaggggcaggggagccaggggaggggcccatgaggagcgaatgaagaggaggaggaagagaggggcatggtgtgacaatctggcctggctgacctggagtgtggacactcccagtccagaaagcggttctaggagggaaacacatgtcgtcccatcttgtcccatcttccatataagtcttc

SEQ ID NO: 26410 - DNA, 750 bp, Artificial sequence
  DNA replication origin
catcccgtctaggaggtgaggagcgtctctgcctggccgcccatcatctgggatgtggggagcgcctctgccccgccgccccgtctgagatataaagagtgcctctgcccggccgcgaccccgtctgggaactgaggagtgtctctgccccgccgccaccccgtctgggaggtgaggagcgtctctgaccggccgccccgtctgagaagtgaggagcccctccgcccggcaaccgccccgtctgggaagtggggaacccctctgcctggccgccaccccatctgggagatcgggggcccctctgcccggccgccccgtctgggaagtgaggagcccctctgcccggccgccgccccgtctgggaggtggggggcccctctgcccggcagccccttttgggaagtgaggagcccctctgcccggcagccaccccgtctgggaggtgtacccaacagctcattgagagcgggccgtgatgacaatggcggttttgtcgaatagaaaagggggaaatgtggggaaaagaaagggagatcagattgttattgtgtctgtgtagaaagaagtagacataggagactccattttgttctgtactaggaaaaattcttctgccttgggatgctgttaatctataaccttaccgccaaccccgtgctctctgaaacatgtgctgtgtccactaagggttaaatggattaagggcggtgcaagatgtgctttgttaaacagatgcttgaaggcagcata

SEQ ID NO: 26411 - DNA, 1251 bp, Artificial sequence
  DNA replication origin
gcccttaatccatttaacccttagtggacacagcacatgtttcagagagcacggggttggcggtaaggttatagattaacagcatcccaaggcagaagaatttttcctagtacagaacaaaatggagtctcctatgtctacttctttctacacagacacaataacaatctgatctccctttcttttccccacatttcccccttttctattcgacaaaaccgccattgtcatcacggcccgctctcaatgagctgttgggtacacctcccagacggggtggctgccgggcagaggggctcctcacttcccaaaaggggctgccgggcagaggggccccccacctcccagacggggcggcggccgggcagaggggctcctcacttcccagacggggcggccgggcagaggggcccccgatctcccagatggggtggcggccaggcagaggggttccccacttcccagacggggcggttgccgggcggaggggctcctcacttctcagacggggcggccggtcagagacgctcctcacctcccagacggggtggcggcggggcagagacactcctcagttcccagacggggtcgcggccgggcagaggcactctttatatctcagacggggcggcggggcagaggcgctccccacatcccagatgatgggcggccaggcagagacgctcctcacctcctagacgggatgacggccgggaagaggcgctcctcacttcccagactgggcggccaggcagaggggctcctcacatcccagacgatgggcggccaggccgagacgctcctcacttcctatacggggtggcggccgggcagaggctgcaatcttggcactttaggaggccaaggcaggcggctgggaggtggaggttgtagcgatccgagatcacgccactgcactccagcctgggcaacattgagcactgagtgagcgagactccgtctacaatcccggcacctcgggaggccgaggctggcagaccactcgccgtcaggagctggagaccagcccggccaacacggccaaaccccgtctccaccaaaaaatacgaaaaccagtcaggtgtggcggcgcgcgcctgcaatcccaggcactcggcaggctgaggcaggagaatcaggcagggaggctgcagtgagcccagatggcggcagtacagtccagcctcggctcggcatcagagggagactgtgcaaaggggagacgaggaccgtgcgagggcgagggcgagg

SEQ ID NO: 26412 - DNA, 1005 bp, Artificial sequence
  DNA replication origin
ggctgctcgcggcgagcccgggagtgatggcgaggcccctgcgggcggccagcgcctgaggcgccccgccccgccccgccccgcgcggccctccccgcccggccctgccctgccctgctccctgccggcggctgcgggcgcttcctagtccgctcgggcggccgcccaggcgaggtgcggcctccgcacaggcggggggcgtaggcgcgcggggcccgccatggctgcgtcggagctctacacaaaggtaaggcaccccgcggccggcgtcgaggactggggctgtgcggccctcgccgccagctgtcaggctggggagggggcgggagcgccgggcccaggcgagccccaccagcgccatccccttcagcgcctcagaaccctcggccctaccagccggtcgcccgctgcggcaccttcctctttcgggcgagatggtgaaggcggcggaaggtggcccgcctcgggggtctcccaggcccctgccgcgctgctcgagctgggggcagagcgggcttcggagtggaaagggggcccatgtggatttagcagggcgggcgtgcctcccctcctgcttggctttggaaaattcccggcgggtgggagatgcttgctccagtagatcggatgggttctctcgtggggacacgcgcttaaaataacgtcttgtgttggtatgcagtgccgcttctaccgccagctagcctttctgtgaggttattttgaatcctgcaaacggtggccgtatcacctttagctccccagtttagctgcgctgggggtggcgagccccggggaaagatgctgccggatgaacgcgagctgattcaccggctgggagggtcggtactcatttatcgctgggagtttgcaacctgcgtgtaatcccgcagagccttgttaggctccatgtctttaccatcctctggggcaagcctttcccttctgggtttggtttaagggaagtggcagtcttttcttagactgacatcaatatactcaggg

SEQ ID NO: 26413 - DNA, 1447 bp, Artificial sequence
  DNA replication origin
cagggcagggcagggccgggcggggagggccgcgcggggcggggcggggcggggcgcctcaggcgctggccgcccgcaggggcctcgccatcactcccgggctcgccgcgagcagccgcgagcgctccacctgcccggggtcctaggggtcgccgccgccgccgcagccacttcggcggcccgcgatgctgcctccgctgccgccgccgccaccgccgccgccctgtgcattatgggagcgggaggaggctgcgctccagcgctgccaccgcggctgctctgggctctctcgggctcacgctgcctcccatcggctacgagcacagagcatcatcatcatcagcctgccagccggccccgccgccgcctcgcgccctgccgaggcccggaaacccgcccgggacgtgagccccgagggcgcggcacaccccgggcgcccccaccccgaagcgagcccggggccctctgctgcggagcctagctcccgcggtagcgcagccatggcacgggctgttactgtgtccgaataaacgatgggagcctccaggctgctcctcccgtccttccaagcattcctagggagaggatttaggggaagccctcttgaaagactgtagaataacccaggactgtagaagagccttgtcagcagcagtgacccgggagatgggcaatgcaggaccgggaatttcaggttaaggttgatcaccaaggtcattccgagcacctcgatgtctgcagcaaagtcgtctcccgataccagagggcaagggccgcttctaagctacagaaacttaagtgactttgaaacgagatagcccggggacagcccaggtgcctctttcctagacctgtgcgtttgcggagatgcaactacccttctgtcccagccttcttcccgtcctgttcgctgctggtgattgtcggctccatggtggcacctgaagtttatccggttgccacctgaaaatgacggagtacttacatggaaaatctgtattacagtttaactcaacatcaaaagggcaaagccgccctcactctcctcacggtgatccttgaacatccagcacaagaatgtggtctttctactcccaaccctgcgctgtcttcatcctctatcttctccccaccctcattgtcgtttctggttgaataatcttcattctttattgttgtcgttgttgttgttgctgtttttgtttgtttaatccctgcctctttgtagtgccctcatctctcgtttctttgaactacaactggtccccagtgcctgtcatggtaatctggtagaccatttctatcacgaacaactctcatggctgaggcccccggttgtgtgtgttgtgtgcgtgtgtatttggagaaagaccattcactgaaaggaacggggccagtccttactccgtggaactcagacctctcctcttcgcccacaatcccctca

SEQ ID NO: 26414 - DNA, 1050 bp, Artificial sequence
  DNA replication origin
ttcttaagggatatctttgtcaaacagttggcctgttgaacccttttattttcaatacttccttggctgacaaatgccttccttcgtttctccaaaaggagtgcaatattaactctttttgtttttctagttgcaattccagtgcaattcttcctgtctgagattctacatcctggttgagtttcgatggtttccaaattccttatccaggcatttagggtctttcaattgttcccctgcccccagaaatgcattcattttctgtggctttttactagtttaacttttagagggcaatcttatttccaagtttctgagggacactttgttggaaccaacaaacattgcgagtaactattcagatatcaagtagaatgaggattcagtaagaagccgcaggacttggcaaataaaaaggtcattgggggagctcaatgctagcagtttcggtaagcttgtgggagtggaccccctgggagtggacaaatgaatctgaattccttcgttagatatctaggaagtgctggaccctcagagtaaaatataagtaattacagacgagatccctgccctggtgcggcttatctgagaaggaaaggtgacctaaagtcacgacaattgtgtaatgatacagttcatgttgttgaggaactgtacagggctgtgacagcctttaagaggtggctctggcctagtgtagaggtttaggaaggaaaggttctgaggcagagacgtaggactggagatgtgaaggcgtggcagagtggagcaagacttttggcgtgcccaaaagacagcctgtgtggctacagagcggagagcgaggagaacagaactaggcgaggatgggtaagtggaaagagtaaaataaagctcctagaacgaggggaccagagtggacaggaaagggcggggaggggcggttccacttagaaactacaattcccaggaagcactcggcagccacaaacggatgtgaggtgaggcaggagcggcgacctttgaaggaaaaaaggaagtgtttggacgacagcgagcgggagaagcggg

SEQ ID NO: 26415 - DNA, 1806 bp, Artificial sequence
  DNA replication origin
gtctcagaatccaggcgcgcctctgccggctgggagcgcaaccgaagtgcctgggacgtctcgggcttccgggactctgctggtgtctcccagccgccatctccagcgccctcgcacccgccgggcacctgcaccgaaaacccggccccaaactagcgccccggggcgagcggcggcattgccatagtaaccgggcgccagggccgcggaggccgccggggaggaagtgacgaccggggtgggttggctgttgttgggacacgtgacctaggcagtgttttgacagggcaaacagcagagaaagaactggccgagcgagggggacggggagccggggcgccagagctagagacagcgggcgggcaaggagctggcagaggcgctgggcaagagggccggccggggctacgggcgggggaagcccgggggtcgcggggctcgggtgccagtcaggcagggcggaggggctgagcgcagggagcggagcgaggcggtggctgaggcgcgggtggatggccacaggggcgccggggagccgcttcgggctggtcgtctcgggtccccacggtcacctgaggcagccgcgggggccgctgcgctccatactccgctcccgctggccctgcgcctctcggagcctggggtctgaggtgggagtgtgatgtgagctgctgggcgagcggtggagagaagtgccaagaggaggcgggattgggacgggagaggagagcgagttagtcagcagaggtcggccgagggagcggaggagccggccagctcgagagcgccatgaaaacaactctccagcggggagaggggcagacgcggcgctcggtgcggcggggctgaaggaaatccggggccgcggcgggacggaaggggttgtgcagagcagggggcgagcacaggctgtaaacacctcccccggagccggccgcggaggactggttgggagttggtagggtcgccccgggacagcccggaagagttcgtttggggctgggggctgggcgggaggaggtgactcgggtttctgtgtaaacttggccgcggttgccgcaggaaggctagccagagggtaattacacaggtgaggcccggcggggcgggcggagggctcgggaggcgcaggggactggaagagttggctgcgcccaggcaccaggtggaagaatttccataccagccctgcggaggtgcctctgtttccagaggcgtttttgtacgaaggggttagtttgtgttgctcaaatctttttcttcttcttgcctgtacctccaggttataaatagatcctgttttggttcagagactgtgtcagaaggacacattggcctggagagcacagaggcagggaagggggtgctcgatccggaggagatgggggaggcggtgcagagagttttgcttttttcagaccagccgagggtgctgtcaccgcagttggtgccaggaagaggcctaacttaacagtagtttacttgcaaggtccgggtattagaatagggccagattaattttatttttgtctctttcagcattttgaaagcgaagcagaagccgtagaatcagcggcgagcctgttgaaagaacccacaggtgcatttcacagcactctgggcgaaaattggatgtgaaaatgaagccagaccgaggtaaatgatttgtttaagtagggcttgttcccccacccccttcttttctatgcctcaatttagaagtgttaacctaattctgcagtaggatcaactatttctgtatcatatgtgattatctgtttttgtgacagattccagctggtgagg

SEQ ID NO: 26416 - DNA, 1035 bp, Artificial sequence
  DNA replication origin
aactgggctgggttttttatatttgatgaaaaagagtctaaacgctaactgatttgggagaggtcggataaagaaaaaggagtattaaccttgactatgcctttagcttcagccacctttttaagaagaaattgctgggcaggtgggggaggactactcatggaatgaaactgtaaaccggaccaggtgtgaggaggggaggtgataaaaggattatagggtggaggagtggaggctgaggaagaattgggacctagctccgcctggcgaggagcagcctggggaggtggggagaggtcagatgggtctgtagaaaaggaagattagaaagactcagcgacgcttggggttgggactgaggggataggcgggagggaaagaaggaagatttgggatgagttgcattgggcacagagactaggaagggaccgatgtgtaaaagaatgcctggacgtcaggcacctcagaccatttgccaattttatgacaagaattatttagatcttgcaggatggaaaaattgaaagtgccgttttctggctatttggaactactgtcaagtttgtattggggtcaagcggcaatgcagaagaaaagacgcttagattttaggtcaggtgagagttgaagaggttttaagttcttaagaacacaggctaagagagaagaaggaggaatggagggtggaaggttgcccatagtgaaagaagcaagcccagagaaaagagagagtagagacatggagggaaggggttcgggggttcttaccctccagaaaagtgggaaagtggtcggggcacagagatacgagaccggggtgtggaaataagggatcggggcacagagatataagaggttggggcgcggaaataagggatcggggtgcagagatataagaggtcggggtgtggaaataagcaatcgaggggcagagatacaaggttggcatacttgcccctcccccagaaaaatgggacttgccgctaaaggtgaaggagaaggggttgggggtttcttgccccccagaaaggcaga

SEQ ID NO: 26417 - DNA, 1167 bp, Artificial sequence
  DNA replication origin
aagtctcgcccagcccaacctgggctgtgtttgccctgagtggccttgcggcctggttgattgataactggcccctgcacaagtccatttgcttttttgttaatatttatcccggggtgacatttcaaatgtccccctgcttttctgggccatgggagtcaggcaggagtgcggggccctaggcagagcccttcaatccttgaagacttctgggccgggagagaagccaggactgggcgtgtgggacgcaggagctggaagcgttcctgggtccaagagttgggggagaaggagtcaagcgcagcggtttcctcgcgcttcgcgtcttggcgctgtgggtctggtgtcgcgcagctgctcccagcccgctgcggcgcgaacaaagggccagcagggcgcgaccgaccgtgtccgcctctgagcccggggcgaggggcgccgccagctgggagcgcctcctccgaaggcctaggatggcctcctacggagaccaaggagtcccagagcccgccaggccgaaaagtggcagtgcatcccggtagtcaactggggaccctcacacacacacacctagccgactgcaaaaccaaaaaaggtctcgctcctgcggacagtcaccagaaggctctgcgtggtgcctgtctcacggccggtgtctgtcccctcgagggtgtaggaccatagttccccctgtgtagttctctctgtgtaacgggcataaacccgggtgaggagagggaggtgcgcttggggataagaagtgggctcgtggcgacgactggaaccgctatggctggggcaggggaaacctacttctggggcttaaggggggctgatggctattgtgtggcgaccttggtgtcagcgcagctaggatgcctgccagagacgaactccactacctgttcggaggtatgcggctatcccgtcaatgggtgcagcacctatcgccctggaagcatccggagagggatcccggtagctggggcgaccagcctgacccagggcacagcggttgctagagacccagccccgacatcgccgcttaccaccgacacttgggtcggacagtgccaacaatagcacggttgtgttgtagcagcagaggacccaaatcccaggatgcgcctctccttatctgcaagcctcgagccctccgcgctccct

SEQ ID NO: 26418 - DNA, 2147 bp, Artificial sequence
  DNA replication origin
ccagaagtcttcaaggattgaagggctctgcctagggccccgcactcctgcctgactcccatggcccagaaaagcagggggacatttgaaatgtcaccccgggataaatattaacaaaaaagcaaatggacttgtgcaggggccagttatcaatcaaccaggccgcaaggccactcagggcaaacacagcccaggttgggctgggcgagactttctcatggccgccccccgaccgaacccctccccccttggctcaggtccttcttaggtcgttctggggcaaacaccggacgggaagggggcgccgccaactcccccgcggggtttggaggtttcctcgcctccaagtcccgcagggcagggtcggagtgcccaacacccacccccgcccgaacctcgggcctgcgcgccgccttcccctgggtccgcggtgctgcgcttgctgttgggtgtgtgtcgctgtctctttccgagccggcagctcctgctgtgtggccgaagccctctggaatctttaattggaaactaatcttggtcttgatagacgcccacgtcagaggcgcgccacccacccacaccccccgcctcatcccggaggagacgcggcgagaaccctgtcgctctgctctttaatggggcagcagcaagtagtacatggagggaacatatattgatttttaaaaggtagttaatttggtgggaatttcctcctgtcgcccttcttccaccagccgctgttatttcgtgaccggaaggcgcctccccaaacacagcgccacgtgcaagagggttttgaccctctgcaacaggctgccggcaactggaggacagaggggcgtggagaagccaccactctcccgctgcggagcgaaggaaccgagctcagtgagccctgacctcgcaaggtggttggaacgagactggggagggtctctgagcgcaacagcaaggaaagctgccaggggcacctccccatatgggagctggtagtggggggcaggcactaatgtcccgtaggaacggccaaggcgctctgcaatccattttaaggctcatgcacttggcccgttagagatcatttggaaagttcagaaaataaccccactctttttaaaatatgaaaatgttaatgagatggctccttcttcagtaacttaaaaataggttgtgaagagactgttcctggttccttgcaggagaccctcctggaccaacacagaatcctcagtcctagccctttccaccatcccttttaagttaaggaaacaaaaatgtaatagacatgcttcctcagggtctcaggacacagagtcggcttggtgtttggtgccaaatgcctgccctgctggactctccagtgtttcactttttcgaggaaaaggccatgggcctagggccgagggctgcatggacctctacaggttgctgggtgcccaggcaggcgctccttcgatagcctcctgggtgccacaagcacctgccaggcaccatgtttgcgcctccagcgtgcgggtcccagcactcaggctccctccccctccacagtgccgtcccctgagctcggctatgtagctctccacgcttggaggtcagagggcgctcctgcggccaggtttccatggctcagaggtcgtctctgaacagaacgtgtcagtctgtccttccagggggcgacagcaggcagtggggggaggagggatattgaagtccagagcaagagcctccagggggcgggggtgggggatggggaccgagttttcccggaggggtagccttctccatttctatcttcttcccacattcccccgctccactctttggcttcagcgggcactgcctgggtaagaggccctgaagcctggctctggggtggtgtgggtgtgtgaaaaggcactaccttgggctctggagagacggagcagtcaggacgaggagcagccccttcgcccactccctccggaacctcagttgctcgcgggcagcccacgggtggagatatggtgccggtagcacaagagctagagagtggaaaaccgggggccagcgattcgctggggcgcccagcgagcctcttctcccctgactggttcccgggcgcaggctgcaggaacctgcatgaggactttgcctggggcgaacgaaggcag

SEQ ID NO: 26419 - DNA, 1292 bp, Artificial sequence
  DNA replication origin
cacccggccatgctcggccgccacggggagcagcacctcacgcccacctcggccggcatggtgcccatcaacggccttcctccgcaccatccccacgcccacctgaacgcccagggccacgggcaactcctgggcacagcccgggagcccaacccttcggtgaccggcgcgcaggtcagcaatggaagtaattcagggcagatggaagagatcaataccaaagaggtggcgcagcgtatcaccaccgagctcaagcgctacagcatcccacaggccatcttcgcgcagagggtgctctgccgctcccaggggaccctctcggacctgctgcgcaaccccaaaccctggagcaaactcaaatccggccgggagaccttccggaggatgtggaagtggctgcaggagccggagttccagcgcatgtccgcgctccgcttagcaggtgagccggccaaggagctgggcgcgcgggagataaggtacacgaaagccgaagggaccaaaggaggaagggtaggagagagggctgggtgcgcttcatcccgcccgcccctacccctagaagggggactccctgtgcctggaagggccagcacagggctgtgggagcaaattgcctactccagggctcagggtgttgggctgtggaaggctccgagagctaagcggccgggcctcggcgactgaagaggctcatttgcgctcagggacagcgagggaagctcgtacggcctgaggcggagagaaatccccgcacctggtgagacactctgcgccacctctcagttcagcgatccgggtttgggaagagggatgcaacgcgtgcgtggaatcgcacgcaaatgttcctcgcaggtacctctgacacatcccaggcgctgggctggagcgtgccggagcagcgtcgatgtttggccgaactggctgctgtgaccccctcccgcgctcattcttttggcgctggctggggtgacctcaatctaagagtatgggcaaaaagtttcagagccattgggcggtgggtgtgtagcacagacgagttgtaagggttaggacgctctctgcgcatggaattggctgtggaaaggagagggaggctgaccgtcccaaggtcccagtgagagctgcaaagcaatagccatgtcctgggaccgactccgctgccgactccctgaggactttgcattttgttttattattcctcttcgcgattttcgtctgaatccccgtgcgggaggggggtttggggatgagagtgtgtaaatgacccccaagtctaggagcagaggtct

SEQ ID NO: 26420 - DNA, 957 bp, Artificial sequence
  DNA replication origin
ctcctttggtcccttcggctttcgtgtaccttatctcccgcgcgcccagctccttggccggctcacctgctaagcggagcgcggacatgcgctggaactccggctcctgcagccacttccacatcctccggaaggtctcccggccggatttgagtttgctccagggtttggggttgcgcagcaggtccgagagggtcccctgggagcggcagagcaccctctgcgcgaagatggcctgtgggatgctgtagcgcttgagctcggtggtgatacgctgcgccacctctttggtattgatctcttccatctgccctgaattacttccattgctgacctgcgcgccggtcaccgaagggttgggctcccgggctgtgcccaggagttgcccgtggccctgggcgttcaggtgggcgtggggatggtgcggaggaaggccgttgatgggcaccatgccggccgaggtgggcgtgaggtgctgctccccgtggcggccgagcatggccgggtggtgggcttcgaagccgttgggggtgagcatcttgtcggtgggcatggcggcccccgggtgggcatagtgggggagcccttgctgggagttgtggatgctgcccagaccggagctggagaggggcgagaggctctggcccatgccggccacgtccttgtggtagggggtatagaggttattcatggaggccagcccgcgctcatcccgcatgagcgtgaagctaccgctcacgttgcccgccaggcgctggtggtggtgcgggtggtggtggtgatggtggtggtggtgatggtgggggaacttgtccgagactgtggagatgggaggcagcggctgcagaggggtcaaggtggtgtaggtggtgggcatgctcatacctgggggagtctcgcaggccatggtcatggtgggatgcagggggccggccaggctgtgctcaggggcccggt

SEQ ID NO: 26421 - DNA, 784 bp, Artificial sequence
  DNA replication origin
gggtatagaggttattcatggaggccagcccgcgctcatcccgcatgagcgtgaagctaccgctcacgttgcccgccaggcgctggtggtggtgcgggtggtggtggtgatggtggtggtggtgatggtgggggaacttgtccgagactgtggagatgggaggcagcggctgcagaggggtcaaggtggtgtaggtggtgggcatgctcatacctgggggagtctcgcaggccatggtcatggtgggatgcagggggccggccaggctgtgctcaggggcccggtggtggtggtggtaatctccgccgccgctgccgccgtccagcagggacgccatgcccatggagcgcgggtgcgcggggggcaggtggctgccgcggtgcgccacggagctgcgcgcgtgggggctgccgcccagcaggtcggcaggggcgggcaccggctcatggctcaccccgtgcagctcgccgatcgcttccatggtcagctgcgcgttcatcgtgatccgggcgagcaggcggcggacacaacatcgatgtggccaggcagaggcggcgaggggcgcacggagtccggtcttcacatcggctgctggcgactgttgccttccttcctctcactgtggggctctgtctctctctctctctctctccgtgtgtgtgtgtccgtgtgtgcgtgtgcgtgtgtgtgtgtgtgtgtgtctcgccttccctcttaccccccaccttcccctctgcgtcctcggcttttttttttttaatattaatttccaaagaggatccgc

SEQ ID NO: 26422 - DNA, 1176 bp, Artificial sequence
  DNA replication origin
gtgtgtgtgtctcgccttccctcttaccccccaccttcccctctgcgtcctcggcttttttttttttaatattaatttccaaagaggatccgcgccgttgggagagcgcagtgccccagcccgcccgcctcggccacctctcgcccctctctttcttaaaattctgaggtctccggctcccctgccgcggcccgcgcgcctgccgcgtctgctgcctgcccgccccgctggccagcttgagccatggctctgttactgttacagactctgtggccgcggttcggtagccgccgccgccgccgccgcagcggcccgccctcacgcccgccaggcgcagcgcgcatgcgcgaggcccgcccccgccccctaggtcgcggcgcgccaggcccttggcgtcccggtacaaatgaaggagggggcccagcgccttccctgcggcgctggatggccagggagctgcgggcacgtgcgaaagattggcgcagagcgcgacctggggccgccgctgcaatcccaggagactcgcgcctggctcgctcgcctcccttgcttgagtgggctctgtcctcccagcccggggacgctcgtgtcgggcttctagcggctggagtgctgtgcttggagacatcgcccctctctctccagttgctgcttcccggtgcagcttgcccggggagctggggactgtgtcatcaccccttcggctctagcccactaagctttatttcccggggggctgctgggagtgcgctttcccacccttgaattcacggcctattgggggatgggggttggggtggggtggggtgcagattgcttaaagggctgggtccgtttggcggccgttgacccggcacccttcgtcctcccagatacatacttgcccaccctttctcatccatgccctggggagaggagtaatcagtgccaagaatcccagttcgggccatacctcactgtcccccgccgcctggctccttctcccgctcagctcataattaaggctgtgcgtccgcttcgccgatgactcggcctgtggaggggggcgagggagagcggagggagtgccctggagggtacccatgttaacttccgggtgctggtggggccgtggaggctcgggccgtccctgcggttactcccaaggccctcctgctaaagcacccggaggcggtt

SEQ ID NO: 26423 - DNA, 1742 bp, Artificial sequence
  DNA replication origin
ggcggctggccgggcggagggctgacaccccaactccctcccggacggggcggctggccgggcagaggggctcctcacttcccagtaggggcggccgggcagaggcgcccctcacctcccagacggggcggctggccgggcggagggctgacccccccacctccctcccggacggggcggctggccaggcggggggctgacccccccacctccctcccggacagggcggctggccgggctgaggggctcctcacttcccagtaggggcggccgggcagaggcgcccctcacctcccggacggggcggctggccgggcggggggctgacccccccacctccctcccggacggcacggctggccaggcggggggctgacccccccacctccctcccggatggcgcggctggccgggcgggggggctgatcccccacctccctcccggatggggcggctggccgggcggggggttgacccccccccacctccctcttggacggggtggctgccgggcggagatgctcctcacttcccagatggggtggctgccgggcggagaggctcctcacttctcagacggggcagctgccggacggaggggctcctcacttctcagacggggtggttgccaggcagagggtctcctcacttctcagacggggcggccgggcagagatgctcctcacctcccagacggggtctcggccgggcagaggtgctcctcacatcccagatggggcggcggggcagaggcgctccccacatctcagacgatgggcggccgggcagagacgctcctcacttcctagatgtgatggcggctgggaagaggcgctcctcacttcctagatgggatggtggccgggcggagacgctcctcactttccagactgggcagccaggcagaggggctcctcgcatcccagacgatgggcggccaggcagagacgctcctcacttcccagacggggtggcggccgggcagaggctgccatctcggcactttgggaggccaaggcaggcggctgggaggtgtaggttgtagtgagccgagatcatgccactgcactccagcctgggcaccattgagcactgagtgaacgagactccgtctgcaatcccggcacctcgggaggccgaggttggcgggatcactcgcggttaggggctggagaccggcccggccaacacagcgaaaccccgtctccaccaaaaccagtcaggcgtggcggcgggtgttgttgttgtttttgagatgaggtctcactctgacttttttttttttttttgagacagagtctccctctgtcacccaggctggagtgcagtggtgtgatcttgactcactgcaacctttgcctcccgggttcaagcgattctcctgccttagcctcccgaataggtgggatcacaggcacaaactaccatggtcggctaattgttctatttttggtagagacaggttcaccatattggccaggccactgcccccggccgtggggattatttttagggtgatgaactgggcatggtggctcatgtctataatcccaatgctttgggaggcagaggtgggtggatcacatgaggtcaggagttcaagaccagcctggccaacacggtgaaaccctatctctactgaaaatacaaaaattagcaaggtatggtggcacacgcctgtagtcccagctactcaggacgttgagggaggagaattgcttgaacccagggggctggaggat

SEQ ID NO: 26424 - DNA, 905 bp, Artificial sequence
  DNA replication origin
tccgcccggccagccgccccgtctgggaggtgaggggcgcctctgcccggccgcccctactgggaagtgaggagcccctctgcccggccagccgccccgtccgggagggaggtgggggggtcggccccccgcccggccagccgccccgtccgggagggaggtgagggggtcggccccccgcccggccagccgccccgtccgggagggaggtggggggggtcagcccccctgcccggccagccgccccgtccgggaggtgaggggcacctctgcccggccacccctactgggaagtgaggagcccctctgcccggccagccgccccgtccgggagggaggtgggggggtcagccccccgcccggccagccgccccgtccgggagggaggtggggggggtcagcccccctgcccagccagccggcccgtccgggaggtgaggggcgcctctgcccggccgcccctactgggaagtgaggagcccctctgcccggccaccaccctgtctgggaggtgtgcccaacagctcattgagaacaggccaggatgacaatggcggctttgtggaatagaaaggcgggaaaggtggggaagagattgagaaatcggatggttgccgtgtctgtgtagaaagaggtagacatgggagacttttcattttgttctgcactaagaaaggttcctctgccttgggatcctgttgatctgtgaccttacccccaaccctgtgctctctgaaacatgtgctgtgtccactcagggttaaatggattaagggcggtgcaagatgtgctttgttaaacagatgcttgaaggcagcatgctcgttaagagtcatcaccactccctaatctcaagtacccagggacacaaacactgcggaaggccgcagggtcctctgcctagg

SEQ ID NO: 26425 - DNA, 902 bp, Artificial sequence
  DNA replication origin
cccggccaccccgtctgggatgtgaggagcgcctctgcccggccgccccgtctgggaggtgaggagcgcctctgctcggccgccccgtctgggaggtgaggagcacctctgcctggctgccgcatctgggaagtgaggagcgcctctgcccggctgccccgtctgggatgtgaggagcgcctctgcccggccgccaccccatctgggaagcggggagcgcctctgcccggccaccccgtctgggaagtggggagcgcctcttcccggccgccccgtctgggaggtgaggagtgcctctgcctggtgcccttcgtttgggaggtgaggagcgcctctgcctggccaccccgtctgggaggtgaggagtgcctctgcctggccgccccatctgggaggcgaggagcgcctctgcctggccgccccatctgggaggtgtacccaacagctccgaagagacagcgaccatcgagaacgggccatgatgacgatggcggttttgtggaaaagaaaatggggaaatttggggaaaagaaagagagatcagattgttactgtgtctgtgtagaaagaagtagacataggagactccattttgttctgtactaagaaaaattcttctgcatgggatgctgttaatctataaccttacccccaaccccgtgcactctgaaacatgtgctgtgtcaactcagggttaaatggattaagggcggtgcaagatgtgctttgttaaacagacgcttgaaggcagcatgctcgttaagagtcatcaccactccctaatctcaagtacccagggacacaaacactgtggaaggctgcagggacctctgcctaggaaaaccagagacctttgttcatgtgtttatctgctgtccttctctccactattatcctatgac

SEQ ID NO: 26426 - DNA, 932 bp, Artificial sequence
  DNA replication origin
agaggtgctcctcacatcccagacgggccggctgggcagaggtgctccccacttcccagacggggtggcggccaggcagaggcgctcctcacatcccagatgatgggcggccgggcagaggcgctccccacttcccagacggggcagctgggcagaggcgctctccacttcccagacggggcagccgggcagaggcgctcctcacttcccagatggggcagctgacgggcagaggtgctcctcacttcccagatggggcggctgcgcagaggcactcctcacttcccagacggggtggccaggcagaggcgctcctcacatcccagatgatgggcggccgggcagaggcgctcctcacttcccagacggggcagccgggcagaggcgctccccacttcccagatggggtggcggtcgggcagaggtgctcctcacatcccagactgggcggctgggcagaggcactcctcacatcccagacgatgggcggccaggcagaaatgttcctcacttcctagatggggtggcggccaggcagaggctgtaatcttagcactttgggaggccaaggcaggcggctgggaggtggaggttgtagcgagccgagatcatgccactgcactccagtctgggcaacattgagcattgagtgagcaagactccatctgcaatcccagcacctcgggaggccgaggcgggcagatcaggagctggaggtcaggagctggagaccagccgggccaacagagcaaaaccccatctccaccaaaaatacaaaaaccagtcaggcatggcggtgcgtgcctgcaatcccaagcagtcggcaggccgaggcaggagaatgacaggagcctgaggcagggaggtggcagcgagccgagatcacggcagtacagtccagcctcagcaacagagggagaccgtggaaagag

SEQ ID NO: 26427 - DNA, 750 bp, Artificial sequence
  DNA replication origin
caggagctggaggtcaggagctggagaccagccgggccaacagagcaaaaccccatctccaccaaaaatacaaaaaccagtcaggcatggcggtgcgtgcctgcaatcccaagcagtcggcaggccgaggcaggagaatgacaggagcctgaggcagggaggtggcagcgagccgagatcacggcagtacagtccagcctcagcaacagagggagaccgtggaaagagagaggggagaggggagaggggagagggcagaggggagaggggagagggcagaggggagaggggagagggcagaggggagaggggagaggggagaggggagaggggagcccctttatttctttctcctgcctgactgccctggccagaacttccaacactatgctgtgttgaataggagtggtgagagagggcatccctgtcttgtgccagttttcaaagagaatgcttccagtttttgcccattcagtatgatattggctgtgggtttgtcataaatagctcttattattttgagatacttcccatcaatatctagcttactgagagtttttagcatgaagtgctgttgaattttgtcaaaggccttttctgcatctggtgagataatcatgcggtttttatctttggttctgtttatatgctggattacgtttactgatttgcgtatgttgaaccagccttgcatcccagggatgaagcccatttgatcatggtggataagctttttgatgtgctgctgca

SEQ ID NO: 26428 - DNA, 957 bp, Artificial sequence
  DNA replication origin
tcccggccaccgccgctgagccccgccggtgcccgcacgccgccccgccgccccgccgccccgaggcctcgtcctcctcccaaactttgcaaagtcggcccgcgtccccaccgccctcggccgtgcctcggctccgaggcttgcctcgcagccgcagcggccccgcgaggaggaggagccgccgccgcagcatcaaagagaccgaattcccgcggcctgggggggagtcatgctttgcggtctgtaatgtcagcagaacaggagaaggatcccatttcgctgaagagagttcgaggtaaccgagaagggtgccggattgggggaaccggggtgagtgaggtgcgcggggccccgtgcccggccgccgggaggccatggggctctgtccgggcctaagtccgcgcagcccgcgtcccgccggcaccccggggccgaggctgcgatccgagcgcgcggcccgggcgcccgctggcccccgagacatccgcgcggatccctcgcctcccgactttgtgttcggaggcagttggagccgcaagcagcatcctttcttaccccctcctcacccacctctcctcgttctcaagacagcacaataggcacctcaaagggtgaaaaacagacaccccctggcagagacctcgaacggtgcccaccccctcaaaaaaagtaagttggagtacacaagagttgatgctgttgaagaagggctcctgggctttcacgtctctcctggcccccttctcgcccccccaccccggcaaaggcaacaaatattcagtttattttccgtaggtttaagaggagaagctacaaattcagaaggcattttctctgttggtttatggataagatattatctaaaatcagtgttatgcatggttgattttcttctttcttgcgcactggttaggaattttcctttcgtgttactatcatctaagaaaaatcagaggg

SEQ ID NO: 26429 - DNA, 1208 bp, Artificial sequence
  DNA replication origin
ccctctgaggaggaggtctgctctctcgccgctcccgagtcgcagacacaaaagcccccagactggagccgcctgtaaaacccgctctggggcgggcgagggacgtggcgcggccccgcggcttccccgccctgagctccccagccccgcgcggggacgggcttcggggggcgggggccgctgcctcgtcccgcggcgcctcccgccaccgccgccgcctcgcgctccgcctcggcccagcccccacggcccgcgcgcgcctcttgctccaagccggggctcgcgggcccgcggctcttgcagcccgggtgggcagcgcgcgcctaggggccgccccgccccgcgcccggcgctccctcgccgaccgccaggcccgagaacgcccgaccccgcggccgacgctaccgggcccagctttcgcaaggaaagggcatctccgaacttcgtcggaggccacagcagcaggcgtctcggcctcgcagctagggatcggaaagatgaacgtaccatgcgaggaaactttgtaagcgggagctggagagttctcggcgggcatgtggggatccagattccccgactccgtgtccgcgtggccgtggtgtggacacctgtctgtagaatgcctccacttggtattttaacgacttgactcttcaagaaagagcgacgtagaataaataccagaaaggacggtgggcgggggaggggggagcgtgggtagaagcggtgacgcggctggatctcatttagacgttaaattttaggaggaacacccccagtgtgattgtaaattagatgtgatcaccggtccacattcttcagttgggctgtgtgaccggaggcgacttaggtaacctctctgggtctcagttttcttgtctataaaaggcagtggggctacatctcgaaggtctcttctagctccgacattgtttaacgcacttctacgaaattgttttccctggtttttgttttttgttttttgtttttgtttttgttttgctaggttttctggttatccactgggcttattttgatgtaagaatcaccgaaaagcactcatgaagcgtgggaggacacagaactagctacagacaggagtctcgtccttccggagacagacacccaactcattcagctgcacagtgtcacagagaacagatgttaacatgaagccaatgtacagcctcaacagctgcataccagac

SEQ ID NO: 26430 - DNA, 1354 bp, Artificial sequence
  DNA replication origin
atggggcgtggggagcgcgcggcggggtcctccgtggtggcgctgacccccggcccccgctctcgccctgcggcctgtccggaaccgccagctgcagacactagttgcttgcggcctctgcgctgcttgggcagggctgcgggagcttctccgggcgcacgcccctccgcgccgcgcgcccgtggctgcggagttctggcggccgctgtccactctggtctcttccttctcgcgccattgtcccggctccggccgcgtccgcgcctccgcgaccggccggactccgggtcgccagcccgccggggccgccgcggctgcacgtggctttatttatattgtttccttagtggcagcctcgccgtgcagggggcgccgcggttcctcgcggcttcccgtgtctgttgtgggagttcccccactttttagggctgcgagagggaataggtgaactcataaccccaatcggcaccagcttgccggatctggatccagccaggaggagatgggagggtggaattggcagggttggaagtgaagtggccgatttgtgccccggaaaggaggggggaaaagtccccgaagctgaaaaggaaggtaggtaaataggatttatctcctacagctaggtatttgggggcagggcctgaagtgtgtacggctctgaagattcttccaaattctagatttgccttgcacaaacttggatgaactcgtttttctaccttgcgtccgtattggtttcctagaagagataaaagtgtaaagtgaatggggtgacggtaggagaggtgttcaggagaatgggttattttatttatttgcaggttacagacgctaggctttttctgcaatggggttagtttctgttaggcttgaaaaaaggatcaaagtcagatgtggctcagaaacacaatgggcgccttccggagtggtccgcgcacagcgctgggctgttagggtggctcgcgtcgccctgggcatacattacgggaagcagggagccttgaagagtgagtattccgaggacctgccttgaggagaaacaaatcatttctgggggtttgtaatcaaggatccacaacgatcaggaggaaggtgaagcaacgcttcccccacacacccccattctccattcacccccaatcaatacgtgagactttaagacggcctgtgcactaaatgcaggaggtgacagagtattgtatggtcatcgaatgctttatcctggcgagggcccaggggcgatgtgtatatgcttaggataaagcctttcctctgctctgataaaaatgtgtattggttgattaagcgatctcctatccctattagacagtaaggaccaattagtcacgca

SEQ ID NO: 26431 - DNA, 1127 bp, Artificial sequence
  DNA replication origin
ggggctgacagcagagcctccggtcgtggccgccgccgctacctccccgggtccggctgctgaataacccgaagggaagcccgccccgcagccccgcggtccccgcacctcgtcctccaggagcccgaacacctccaccgcgcaagttgccatttccgaacgcttccagcaaaccggacgcgctcgcccccgcccagggcaggcaactgtggaggaggaggaggagaagcgggaggaggcggggaagagttggaggaagaggaggaggcgctccctcagcgacagcagcgcctcccgcggcgagcgggcactagcggcacccggcagcgcggcgggaaaaggccggcggcgcgcgctcctggggctgggcgggggcgcgcgtggcggggctcggggagtggggagggcgtgcggcggggctcgggtgggatgagcgcgcgcggcggggaccatggcgtggggagcgcgcgtggcggggcgcgccctcggtcccttcccgggaggtgggtggttgacgggcccgccggggagccagggagcgccgggaagcgccgggaagccaagctgcagtgttcctcagcaacaagtctcgctgagatccgacccagagttcggcctctgactagacgcctgggaatccgtgagcttaatccccgcttaaatcccaaacggaaaatcatagcgctttcttgtcggttaagggtgtcattcccataagaagctggacctggggaccgccagggaaagcctgagcgtggcagcaaatggggaggcctggagggatcgcagcagtcttggactcgggatctgaaattctctccctaggatttgtaaacagtgccagttcctaagctatttgttgtcctatggtctgtccatctttaaatcccaccagtaacaatccaatctccaggctgaccctctaaacctgctttagctgggcgttgatccgcagcaccaccagaaggcagtgacgaagagggaaaaataaagtgaactaggacctcctgtagaataactcctcctgtggaataactcctcctgtggaataaggttatggaataatcatgctttttaatattcctgtctgatgggctttataattccataattacaggaagacctcc

SEQ ID NO: 26432 - DNA, 1210 bp, Artificial sequence
  DNA replication origin
ccccacctccctcccggacggggcggctggccaggcggggggctgacccccccccacctccctcccggacggggcggctggccgggcagaggggctcctcacttcccagtaggggcggccaggcagaggctcccctcacctcctggacggggcggctggccaggcggggggctgacccccccacctccctcccggactgggcggctggccgggcggggggctgacccccccacctccctcccagacggggcggctggctgggcagaggggctcctcattttccagtaggggcggccgggcagaggcgcccctcgcctcccggacggggcggctggccgggcagggggctgatccccccacctccctcccggatggggcggctggccaggcgagggtctgacccccccatctccctcccggacggggtggctgccgggcggagacactcctcacttcccagacggggtggctgccgggcggaggggctcctcacttctcagacagggcggctgctgggcggaggggctcctcacttctcagacagggcggttgccaggcagagggtctcctcacttctcagacggggcggccgggcagagacgctcctcacatcccggacggggcgacagggcagaggcgctccccgcatctcagacgatgggcggccggacagagacgctcctcacttcctagatgggatggcggcagggaagaggcgctcctcacttcctagatgggatggcggctgggcagagacgctcctcactttccagactgggcagccaggcagaggggctcctcacatcccagacgatgggcggccaggcagagacgctcctcacctcccagaccgggtggcggccaggcagaggctgcaatctcggcactttgggaggccaaggcaggctgctgggaggtggatgttgtagcgagccgagatcacgccactgcactccagcctgggcaccaatgagcactgagtgaaggagactccgtctgcaatcccggcacctcgggaggccgaggctggcggatcactcgcggttaggagctggagaccagcctggccaacacagcgaaaccccgtctccacccaaaaaatacgaaaaccagtcaggcgtggcggcgcgcgcctgcaatcgcaggcactcggcaggctgaggcaggagaatcaggcagggaggttgcagtgagccgagatggcagcagt

SEQ ID NO: 26433 - DNA, 946 bp, Artificial sequence
  DNA replication origin
aagtgaggagcccctctgcccggccagccgccccgtccgggagggaggtggggggggtcagccccccgcccggccagccaccccgtctgggagggaggtgggggggtcagccccccacccggccagccaccctgtccgggaggtgaggggcgcctctgccctgccgcccctactgggaagtgaggagcccctctgcccggccagctgccccgtccgggaggtgaggggagcctctgccctgccgcccctactgggaagtgaggagcccctctgcccggccagctgccccgtccgggagggaggtggggggggtcagccccccgcccggccagccaccccgtctgggagggaggtgggggggtcagccccccacccggccagccaccctgtccgggaggtgaggggcgcctctgcccggccgcccctactgggaagtgaggagcccctctgcccggccaccaccccgtctgggaggtttacccaacagctcattgagaacgggccaggatgacaatggcggttttgtggaatagaaaggggggaaaggtggggaaaagattgagaaatcggatggttgccgtgtctgtgtagaaagaggtagacatgggagacttttcattttgttctgtactaagaaaaattcttcttccttgggatcctgttgatctgtgaccttacccccaacccggtgctctctgaaacatgtgctgtgtccactcagggttaaatggattaagggcggtgcaagatgtgctttgttaaacagacgcttgaaggcagcatgctcgttaagagtcatcaccactccctaatctcaagtacccagggacacaaacactgaggaaggccgcagggtcctctgcctaggaaaaccagagacctttgttcacttgtttatctgctgaccttccctccactattgtcctgtgaccctgccaaatccccc

SEQ ID NO: 26434 - DNA, 1025 bp, Artificial sequence
  DNA replication origin
gatctaacaggtagaaacctgatagacactctatcagaaaagttaaagctgaagggctcataacacccacgggcccaaagaaaggtcagtgtgagctgaacagctgttccatttggtgccagaggccttggctgttgtattctacatccacgcagcctccctgatcagccccacctagaaaagccaattcttctgctcttaaaggagactgacttatttgtggcaaagctatcatttaggtatgaatgggaagggggggaatggtgcggagtctgcggggggagggcgggtgttcaacgggctccaaaggaaggagctcgtggctgacgcctgagcctccatgttgtgagtactacatgcgtttctttcagaggcaggcagtggccttggctgcagggaccctgacaagccgcgacttgagctatgctttagagcctgggtggaattgggagcggtataaaggagggagggcattcctggaaagggggtggggtggggtggggaggtggaggggaacagcatgagcaaaggcacgaaggaagaatgaatctgctgcgcgttgaggatggcatggagacttccctgattggagccgggagttcttgcagggggatggaggccgctatgattggatagttaaagtggggccagatttggagggctttgaatgcccgaccgaggagcactcaacccagctcctgactcgcgatttccgttcaagaccgaattacctaaagggtggttaattccaacgggtgttcttctttgggggcttctgaaaagtcagtttatcgtcttacctgcttcagttctcttcatttactcagggaggaagtaatcctcacatgcatgtgcaggggaagggggataatgttgatttctctttacttgctttgaagatgcctcccccgcccaaatcccatttccacgccaaatattattaaatttggtttctcctcctcctcctcacgcaagttctctttctctcgccagcacctcccccacgttttcctgctctccaccag

SEQ ID NO: 26435 - DNA, 960 bp, Artificial sequence
  DNA replication origin
ggcgagaagacagggagctcggacacggggaggctgacccggagcctacccatgaggcagcgcgccggctgcacgagagcccccccctttccacggctcggctgccagctccgcaatgggagccgccgccgtcgccgcagtgtagtttttcgtgctcctccttttcctcctcctctttctcctcctcctcagggctccagtcaggccgatccgctccgctcacggtaagcgcccccccgcccccgcccgccctgcgctgcagcaggcagaggccctcccgcgcggcctgcgccgcctcactccgggggcgctggactgggggtcttgaggccggcgcgggtcgtcgggagcgcccagagcgcgggggaggagaccggctgcgcggcggcggccggaccgccatcttgcgtcggcccaggcgggggaggaggtatcccggcgcgacgcggcagccgcctcggctgctgcaggcctgggccgcgcaggccttcgccttctgctcctccgccacctcctctcccaggcgtgtgcgcctgtttgtccccagcctggttttggcttttctctctggaggcaactccctttggtacattttgtgccgatgtttggccaagacccatggtcctcacaccacagcccacccccgtgtctcttcagtcgtaggaaaggagaccaaaggggattcgggatttgcaggcacagggcccctcattttgcccagatgaccggtcgttccacgtttgcaccctcatttttgtcaaagagacctcccctcctctgccatagaattcccgttattgtctacagaagaagggccctgaggagaaacgtggagttggagacaaaattttctgagctttgcaaggttcacttactgagacggaaagaatgatctcactctgaggttttagcctgctccagcgatggaaggaattcctcccaacttatcgcaagttttaa

SEQ ID NO: 26436 - DNA, 1429 bp, Artificial sequence
  DNA replication origin
cggcagggacgcggcggcgccccgcagcccccagccccgccgcgccgccccactcccgctcgctagcccgcaattacctgccgccccgtctccgcatccaaccaccccgattaaagttcactttggccgggagaacgggcttgggcttccccttgcaccgcccagcggctcggttcactttgccccgcacgagctctcgggtctgggagggggaggcggctttcgggcctggccgccccttcctcccggggcgggctgtcggtccccccgaatagaacttgtgggtctcttcaggcggacatttttttcgctgaggcggcctcaccaccgcgctcggctcgcctccggatccctccgcgccgggaagagccgcgggttaacccttccctccccgacccgctccgccgcctaggaagtggggccggcagagggggcggggaggagctgtcggggactgggaggagccgcaccgcggcgggtggacaaagcccgcggtcgggtgaggcgggacggagttggggccggtggggaggggcatgaggcgctcgcaggcacctcgagaagcaggccccgaccgctcgccgacgaagcctcgtccgggcctcctgggagcggggtggcaggtaccgtggcgcctcctcgcgttggtcttgctggttctcggcccccgaagcggagcgacggagacacagctgtggaagcatctggatccgctgcccaggtccccgagcttcccggaacccgaggccgcaggacactgaaggctgccattcccgagtaggtcacgctggacgccaccctaagctgggcccagaggctcccgtccaggagggctgcagtcggcgcagacaccgcgcgtgtggagacgggagacccatcctcctcggccgttccgagagtaggcgcggccggtcagattcgatgcagagccgaatgcgggagaaagggcaaaacgtacctcaaaccagacaaagccttgtgagcttcaggttctcaaataccccactcacccagaccccacatctccagtcagcccctcgcacccaaatcccattcggagcaaccgaactgcacgtgggactagttcttgggaatggatcaagccagtctcttcatctaacggagacagccctgggtggctctgtcacacagccactgtcttgtgcacaagttctgaacttggcctcagagaagccccagagtagaaagaagacaaaataagccccagttcttcgattctgggctgaagtgagattttcttgaatggcagccattgttttgcctcttaggtaagtgagtgcagtaaagaccggtaaggcccacgcagaagaaacactgaggaaagaagacacttccaaagtaacaaatgggaggaagcagccaacgcccgaggacaacatggcaagaaggagcctttggattccggact

SEQ ID NO: 26437 - DNA, 879 bp, Artificial sequence
  DNA replication origin
gcctggggaggaggacgccggccgagagcgagactagttgtcggggtttctgttttctgtttaaaaacgccccttggatgagctgggggtgctttccgacctcctgggcccgccggggacgtccgggcggcggcggccgcagacgcgggcctgcgagcggcgcgttccctgcaacttgtcagttctattgttgccgagcgagtgagtcacttcgcatctccgctcgccgccgctccgctcgctggacgccgaattgcccctcaccccgctcctcgagaccccagccgcggccgggcccggcgcgcggagcacccggcggcggcgcggagcagggggcgccgaggaggtggcagagactggctcggaaacttgggggagaggcggcgagttgcgggagccgccgcgtcgatctcgggccgcggcgaggaacgcgtggattccgggacccggcgcgggcactgagccctcccgccccttgctcgcgccgcggtgggagcgagtcggggtcctggaagtcatcccggcgcccccagcgctcttgcgtaatcttccccagtacctctctctgttccctcacacactttgggcctcggtggtctctcgctgagcccgtttcctctgccctaggacctgctagaagtggccgaagatgaatccccagcaacaacgcatggccgctatagggaccgacaaggagctgagcgacctactggacttcagtgcggtatgagagctttccatggcatcttggggttctgctgaggtttttgtttgtttgtttgtttgtttcttttaaataaagggtgaggggaagcaacgtggagactaggcagcgtgaactccatctgctttctgcttaagcagtagttctcagggctg

SEQ ID NO: 26438 - DNA, 1515 bp, Artificial sequence
  DNA replication origin
acggtatgatccaatttttgtcaaatagtgacaaaaaggaatgacaacctttatgtgtgaatatgtttgaatgaacaaggagaaaagcagttttcaatagctggtacccaggctccaggcatagggaaaggaactgaaaggatgtaagaaaaaagcagttttaaagaaagcacttacaaataagcacaaaaatgcatgcatctgtgtagttattgcaggttatcacgtaaaagtaaaattaaaacatccacaaaccgttaaaggtcaactttagagttttaaagtaattgtggtacaaacacactttgaaatttctcctgcctgtaaatgaagacagaagaatgtgaggggaggagggacctgagcgggggagggacaggagggagggaggaacctgagtgggggagggacctgagggagggagggacacgaggataggagggacctgagagggggagggacctgaggggggagggacatgagggggtgagggacacagcggtgggggaacacaagctgaggagggataggaggttgggagggacctgagggggaggaagacacgaggcggggagggacctgagatggggagggacatgaggaggggagggacctgtgatggggagggacatgaggaggggagggacctgtgatggggagggacatgaggagggggagggacctgagagggggagggacacaaggggaggagggacacaaggggaggagggacacaatagggggagggacataaggggagagggacatgagtgggggagggacaggaagtgtggagggacgtgaagtggggggacctgaggggggagttctgactgaggaggaggagcacagggtcccagttgaggggaaggacagttaaagacagaaaacaggttttctccttttcctttctcctcctcccttttctcttcacctcctcccctcctttctttctccccctctgcaccctcccctcttcttcctgccctctttctctccctcctcctcctccaggaaactctgcctggctgagtgggatctgttctttacccagggcgtgtctgtctccagggagctgatgagcctctagggagagggcaggccaggtctcactcctcctcctgcccttcccaggatctgtgagataagtgacatgtcatccaaggtcacaaaatttattaacccaaaaaacaggcctaagatcccactccccccaacccacaggcccaagccactgcatcaggtggctggaagacatcaacgtgggcagatgttctgactgatcagaaacccctgcggcaggaattgctctgcgggcctctcataaatggaaggcacccccagtcccgcctccctgggagcccattgctgagttttcattttcctgctgggagggctcagggagcactgggtcctggcactttgtgcctcagagacgcttccaaacaagctgcctggtcctttgaccacatggtggctgcccgggaacaccggttggcttcctctacctctccg

SEQ ID NO: 26439 - DNA, 1056 bp, Artificial sequence
  DNA replication origin
gaaggaaggaagggagggagggaaggaaggaaggaaggaactaatgaaggaaggaaggagagagagaaggggaagggaaggaaaagcagaaggtaaggaaaaggggaagggaagaaaaaggggaagggaaggaaaaagggaagggaagggaaggaaacggggaagggagggaaaaggaagggaaggaaaaagggaagggaagaaaaagagaaaggagggagggagggaaggcaggagaaggggaagggaaggagaaggggaagggaagcacagggaaggaaaaggggaagggaagggaaaagggaagggaagggaagggaaaagggaagggaagggctcttgtttggaagaccagatgtcttggtgaccagatgtgtgcaatgagggagtggaactggcaaaggcaaagctgaggcttccaggctgggtgccttggagcatcagaaataggaacaatatggaaagaggctgcttttcaggagagctcctgaaggttccatggagcatgaagtaatggtggaacttttcagtggaaatgccccagcaggcagctgggaagtggaggagtgtctctgggcagcatccatgtggagggtgaggggagagtgaggaccaggagccaggaaaggagagtgcagtgccttcactgagggtggaggaagcagagggcatcacccaagggagaaagaggagggtaactgagagctgttgggaagaacccaggagtctttgacggaagcccaagggtgagggactcctgaaggagagggcagtgccgaatgtcacgaatccacttctcacatgggcccttccaaggatctgtagagagtgtgcactcaggaaatatttgttaactgtcaaaaaagcatttcatcagcaatttcccctcccatacagatattttgctgatgacaaaaataagaggagtcattggaggtaaagacagaggtgagagagatcagctaccagagatactgctttcgttgctcttattgtcaagatgaatgctcaagccccaccaacctcaacttaaagcaaacatttccagggaatgct

SEQ ID NO: 26440 - DNA, 969 bp, Artificial sequence
  DNA replication origin
ggagtccgggtcgcatcttcgagccccaggacacgcgcggcgcgggtcaccgagagtggacgcgcggactgagcacagtgcacctggctgagcccgaacccctgggggtcccgccgccctgggcggcccctagcaccccgaaacccggctgccggcgcacaccccgccccgctccagcccggagctcactcaccgccgccgccgcctcctcccgcgtccagctcccgccgcagccagcagagcccggccggagtgcaagggccgcggcgccgccgggaggccgagcgagcccgcgccccgccccgcagtcgccgcccgccctcctgggaggaggggcaggggctggccgggggcctggacccgccggggctgccggcgggcccaaccctcccttcaatccgcccgcggcccgtcgggacgaacctacccaggaacccccgcaccacccgccctcggctccgctgggcccggggctgcgcttagacctcaccccttcccggagccgttcgtccttccacctcccctccgccgtcaccgggcatttttcttctcccagcctcggcctctccaaattcctggcctgcaggaagccctccctatttcgcgctctcgactgcgccgagctcagtttacccctttcccttcctttccctgcttagcctttttccccctcactgtcagaaacttaagggatagcgctcttctgccaccgcaaacccacacctatttattgagcacctactgtgtctagacactggtggggaggttatcccacttgcgcggtaacaagaaatgtctgtctctgttggagaaacagtaaagtgaggcgcctcgtaaggtcacacagctggcggtagtagggctgggattcgaatacagtttttaggtccttgtttagacccaccccacgataaactgcggcacgcctctcgctagctgtgagaacttgggcaaaatgttatcagttct

SEQ ID NO: 26441 - DNA, 1320 bp, Artificial sequence
  DNA replication origin
gattgaagggagggttgggcccgccggcagccccggcgggtccaggcccccggccagcccctgcccctcctcccaggagggcgggcggcgactgcggggcggggcgcgggctcgctcggcctcccggcggcgccgcggcccttgcactccggccgggctctgctggctgcggcgggagctggacgcgggaggaggcggcggcggcggtgagtgagctccgggctggagcggggcggggtgtgcgccggcagccgggtttcggggtgctaggggccgcccagggcggcgggacccccaggggttcgggctcagccaggtgcactgtgctcagtccgcgcgtccactctcggtgacccgcgccgcgcgtgtcctggggctcgaagatgcgacccggactcccgcgccgcgccccgccgagggcaggcgcagaacagatgcgggcgatccctggggaacccgcttcggggcggggtgggagggaggaggccctgcagaacctccctttagtgaagagggactttctgccttcgcacccctgcctggaccctccggctctagtgacagctgggagagactcacacgaagcagtttctgacctatcctgtcgtacacaagtcctcggcgtgctcggccggaccatcccctggaaagaaaggggcgtgtgacctttctctccccgatcctccagaccactgcgccgcccagggaggtcatccccgagagagcccccgcctcactcggagcacacattctagctctccccgggacttttccaagttgcatcactgtttggcctctagacaggtacttggctgtcatgttggagttagttacacaggatttttgaaactttgtatatttgctttgtgtgttcttcaccctaaggccgctgccctcccgactctgcttatgccgctcaaaacgttgctcaaagctcgctgggaatgcttttgcgggcattggttctcaaacttggccccacatctggagagttttaaaaaatactggtgcctgtgtcccactcccagagatctggattcggcttgcctgggttgcagcctggacaatggaatttttaagacgccgcaggtgattctaatgtgcaggcaagtttgaaaacctctgctttgagagttgctcccaccagccactcttcggacggctcaagatcagtcctgatctagaactcatctcaggtcctcatagctcttccctaatccacctctccacctgaagaacctgttgattggtgctttccaactttagacagtagatggtgcctttactgaagatccctttgtttctacctctctgtttaca

SEQ ID NO: 26442 - DNA, 1429 bp, Artificial sequence
  DNA replication origin
accagctggtgggccccctgaaacctcaagcgggagggtcactgccagagccggcacaggaccggggagttgagcccagggtggggcgtcggggccaggtgctggctcccgagctttcccatccctagtcccctctagagggggcggccgggatgggggaacgggacggcggcggctcccgcccccgctactcaccctcctgctgggcgccccgggcgtcctggcggcgccgcccgagagcagggtgaccgtggacgtggagcgcagcatcccgcagcggcggtcggtagcgggctggacgccggcgttcctcccgggcagaataagcgtgcggggcccgccctgcgcgggggcgacgcgggacggcgccggctacttgcagcctcagctgcaccgcgaaggcccgggggtggggccgggggcggggccgggccgggccggggcggggccgagcgcgctcacccgacccgtcaggctgcattttctcccgagggcgccgacccggttaaagttgagcaccatcctctcccagggcgctgcgccctcccagggtcagtcccagggcaagaaggagccctggacagcctggacgcccatgctctctctgtcccccgcagagttgagatccacctgcccattcagtctcacgacctacccccaccccggactgccccctacagcctctgcacgccctcgtatcactgggaccctcaccccatgtcattcattcagtatttcctgaatgcctattatgcgtccccaccagcagccaacccagtcgactggctgttggcctcggagagtttgcagtgtggtggggatgacaggtgccgggctgtggtagaagaggagataccatgtactaagggagcacacagccaacctcagaggaggtgatgactaagctaagacctgaaatgcaagtaggagtgggccacactgcccatatttattcaatgattactgtgggcctgcctggcgagcactttgcgtgtgttacctcatttaatcctcaccattgccctttgagggagtcactgttgttaccttgtatccccattttgcagatgaagacgctgactcacctagggattgagcaacacagcaggcgacccactggcctctcagtggcaaaggtaggatatgaatcccccagtccgaccctagtgccttgcttgtcccctctgctgtcccctaacagagggaggagggagtcccaggtcaaaagaactagcatgcacaaagatggaaggaaagcaagggaaggtataaaatatgtttcaagaattggaagtatcacagtgcagtgggaaaacagtggagaagcagcggaagggagctgaggacatcatgaggaacctgtgtgcttagctggaaatttggcctttatcttgaggacaaagtgtttttcagcagggaaagacacaat

SEQ ID NO: 26443 - DNA, 1115 bp, Artificial sequence
  DNA replication origin
tctccgggtccctgggtcagagtcggcgggaggcgcacagcggccgaagtcgagcgagggtcgtggcccccggaagcggagctggcaggggctggcggggaccggagcggcccggtgctgcttcggagtagagaaaggccaggaaagtccaggctgcggagggcggctcccagctcgcccacgttccctcccatccccgtcccaggacccaccgaaccccgtcccccttcctttccggagacccgggagggcgtcctccgttctcctcctccgggcaggggcgccaggctctcggcagctacgccctctcccccgaccccccgactcccctcagccgggccgaggtgcatggtggccagagggtcagggagaggtggcagtgggtgcgagtccccctcgcctcgggctcagaatgaggatccctgcgagcgggtcagcgcggggcggcccttgccaggcgtcgcccgcccagttgctgccctctgccggccgggaccgcccgggcggcttgcgctgtggcgggaggatatgggcagtgatcatccccggctcctccgaggagctgcatgcttcgtgggctcctttagttcttctcggatcccctcttccggctgtttcccctcctcacccagcacacccacagaaacactattttgtttttctgttgttccttacacgctaagagctatcgtcccgccagaccttaggctcattttactgtccctttgggattgagtttccatctcccccctaatctaagtgtttccaaagtctaacaagctgccctctagtctgtggatcggcctgcaggtgtaaaccaagaacctagagaccctgcctcagaatgggctttggactccgtggactaaatcaaggccgcatggaaagacctgcataagtcccttcccttccttactcctcactccaaatgtaagcttgacaggggcctacagtgttgataaacgctttttctacactaccaagcaacactgtgattctcgtctttttgttttgtttgaagagacagggtctcactccttcactcaggctggaatgcagtggcaccgtgacagctcactgtgatcttgaactgggctcaagtgaccctaccacct

SEQ ID NO: 26444 - DNA, 872 bp, Artificial sequence
  DNA replication origin
gagctcggaaaattacatctcggacatggtgtctttttttcctgctgcttgaaggtctttgcatttatgttcgcatcactggggcagctgccgctataattactgcttgttgggactttttgtttacttggtagctgtggtgcaccaagagaggcagaaaaagaagaaaaaaaacctctgttacttgtgacgttaagaagtcgaaagcagccctgcttacatcttccacggaccattttagcccaagggaaggtcctcagcagctctaacacgtagcggagcactatctccgcgtaggagcgctcccgccccggggcgggaccaggacaaaccccgcctcccaagcccaatcccagctctccgccggcggacaggaagcggcggcaggcctagcagcacgggaaccgtcccccgcgcgcatgcgcgcgcccctgaagcgcctgggggacgggtaggggcgggaggtaggggcgcggctccgcgtgccagttgggtgcccgcgcgtcacgtggtgaggaaggaggcggaggtctgagtttcgaaggagggggggagagaagagggaacgagcaagggaaggaaagcggggaaaggaggaaggaaacgaacgagggggagggaggtccctgttttggaggagctaggagcgttgccggcccctgaagtggagcgagagggaggtgcttcgccgtttctcctgccaggggaggtcccggcttcccgtggaggctccggaccaagccccttcagcttctccctccggatcgatgtgctgctgttaacccgtgaggaggcggcggcggcggcagcggcagcggaagatggtgttgctgagagtgttaattctgctcctctcctgggcggcggggatg

SEQ ID NO: 26445 - DNA, 938 bp, Artificial sequence
  DNA replication origin
ggtatggagagcagccccgagagcctgcagccgctagaacacggggtggcggccgggccagcgtcagggacaggttcttcgcaggaagggctacaggagaccaggctcgccgctggtgatggtcctggggtatgggcggcggagaccagcggcgggaatgggctgggggcggcggccgccaggaggagcctcccggactcggcttctcccgcgggctctcctgaggttcccggaccctgcagctcctccgcgggtttggacttgaaggacagtggtttggagagtcctgctgccgccgaggcgcctctgagagggcagtacaaggtgaccgcctccccggagacagccgtggccggagtgggtcatgagttgggtaccgccggagacgcgggagcccgcccggatctcgccggcacctgccaagcagaactgaccgccgccggctccgaagagcccagcagcgccggcggcctcagcagcagttgcagcgacccgagccctcctggggaatctccgagcctggactctctggagtcgttctctaacctgcattcttttcccagtagctgcgagttcaatagtgaggagggagcggagaacagggtccctgaggaggaggagggcgcggcggtgttgcccggggctgttcctctgtgcaaggaggaggagggggaggagaccgctcaggtgctggcggcctccaaggaacgcttcccgggacaatctgtgtatcacatcaagtggatccagtggaaggaagagaacacacccatcatcacccagaatgagaacggaccctgccccttgctggccatcctcaatgttttgctcctggcctggaaggtacattctgcagctttctacttcctacagcttttggggtggaggaaaacggggtgagggagctgctgcatgtcaggtgatggcttcctttcttt

SEQ ID NO: 26446 - DNA, 1138 bp, Artificial sequence
  DNA replication origin
ctggaatttgctccagagcctttgtgctgtaggacaggctgcgggaggagctgcaggactgaggtacagaagccgcggaaggggcccaacgaggggcagagccggcacttgactccgtgggatcccacgagacagacaccctttcctcaccgcccgagtgagcgccgcccctcacagagacctctttgcaccctgggccacgcggggcaggcgctgccgtccaggaggccccatggagctgacggtgccgctgaagcaggaggccgagggcctggcgctgggctcctcgtggcaccgcttccgccgcttccacctgggcgaggcgccgggcccgcacgaggcgctggggctgctacgcgccctgtgccgggaccggctgcggcccgaggtgcacaccaaggagcagatgctggagctgctggtgctggagcagtttctgagcgcgctgccagccgacacgcaggcctgggtgtgcagccgtcagccgctaagctgggaggaggcggtggccctgctggaagagttctgggtgagcctgacggggctgcgacgggggaggggaggaggcaggggagcggggaagccaggaggaagcggagggaaaaccgctgcttagcccccgaaaaccagtgtgacccacggtggggaggccatggcgcagcaaggagggacagtccatgtggggctccatccaacaccagctgcaagtcagtagggcccccaagaccttggcatacttgcgagttctctagaaggactcacagccatgttcacagtcacggcttatcacagagaaggacgcgctggaagcagccaggaagagggcccggaaggctccacggagaccagttatcagctgtcctctcccttcactcctcccggcacgcagggagtgttgccagccagggaccctcctcagatcttggtgtcccgggttcttactggggactcctccccgatctgtgtggctgacctcagcctccagccccggaagctcaaggataccacctggcccaaactccaccccaaatccatcttgctgtcgggctggcctgagggccccaggcagtcagaccctcctcatgcgcgagacaccaagggctcagagatgacttcccgagggcggagggcaaaagcc

SEQ ID NO: 26447 - DNA, 1646 bp, Artificial sequence
  DNA replication origin
cagcagcaggcgactccctagccgtcagggctgacttagcgccctccaactccccgggtccgggttaccttcatcactccattgtcaaatcgcactcccacgcctcggtcctcagcccccatcctgagactctagggagagtcggaagtgggagagaaatcccctcacccacactccctcactgtaggctgtgggtgtgtcggtagacgaatgccttgcccaaacacaaatcgtctgcggagacccagaccctaagtcaccaccgagccagagataaccggccggtcaccgaccccagccttccgcggccgcagcccttcctctttctcccctccaggccggcccctcccccgttgcgcgcacgcgcggcctccaatggatcccctccccccccgttcccctcaccttaatcattagccaccctcttctcttccagggtccgggaatcactgacccaggaaggaagacagaaatgtaaggcgtaaagagtaatgcgtcgagagccagcgatctgcgcctcagacgtcggcctaataggcccctagagtcaagaacagtgtctgtcaccgccaccaaaactgtacgtgcggcagcgcctggactcggcccagctaagccggcgtgggttcagaatgcctaatttggtcccacaagaactccttctctgaagctgcgggcgtttctacgctgcgcaaaccgaacacctcctcgccgtcgccgccactgccgctgctcccctacagccgccgccgccgcttcgccgccgccgccgcctaaccaattcctcccctaccgaggagagcacgacactagggctctttacgacagttcggaaagtgagagcgcagtagccttcacgcctccattaacatctgtttgtttctgcgcttgctcgattcccgtttctcaccgtcccgccccctcggtcccggccctccccctttgtactggttttatcagtctgttggcgaactgaaaggtgtcacaaagctcattatttaattttctttggtgattatgcgttcaacatttaagccaaatcttgactacatcttggttcattttttcgtaactaaaaattaaccaactacagaattgatacatttacagatatacgtaaacaaaaacatcatgggttagtgtctttcacaacaaatgatacccatatcatatgcgctaatgacataaagatcacggcacctcactgttaaagtgaatttgcttccggaatcagatcaaaagtggtcacatatctcctgcgaactcgggctgtacaatcgcataagcctccttgtttattttataaaagtcagtagataacaaatgcgtcattatatgcattaggaggatagagagaggatgagcttcagagtccatcaggcagacttcctttcaaagtccagtggtgccacttaagagttctctgattgatgagatccttataaatcttagtttcctcctctataaattgggataacgtatttacctcaaaaggttcttgttagattaaatgagacaatttatataatgctctgaacattacttgccaattaagtgttcactaaacattaattccctccctttgccatcaactcatctttttcaatactttttttgttcactcatattttccgtatcattcagta

SEQ ID NO: 26448 - DNA, 1038 bp, Artificial sequence
  DNA replication origin
gctctcctcggtaggggaggaattggttaggcggcggcggcggcgaagcggcggcggcggctgtaggggagcagcggcagtggcggcgacggcgaggaggtgttcggtttgcgcagcgtagaaacgcccgcagcttcagagaaggagttcttgtgggaccaaattaggcattctgaacccacgccggcttagctgggccgagtccaggcgctgccgcacgtacagttttggtggcggtgacagacactgttcttgactctaggggcctattaggccgacgtctgaggcgcagatcgctggctctcgacgcattactctttacgccttacatttctgtcttccttcctgggtcagtgattcccggaccctggaagagaagagggtggctaatgattaaggtgaggggaacggggggggaggggatccattggaggccgcgcgtgcgcgcaacgggggaggggccggcctggaggggagaaagaggaagggctgcggccgcggaaggctggggtcggtgaccggccggttatctctggctcggtggtgacttagggtctgggtctccgcagacgatttgtgtttgggcaaggcattcgtctaccgacacacccacagcctacagtgagggagtgtgggtgaggggatttctctcccacttccgactctccctagagtctcaggatgggggctgaggaccgaggcgtgggagtgcgatttgacaatggagtgatgaaggtaacccggacccggggagttggagggcgctaagtcagccctgacggctagggagtcgcctgctgctgctgtgatcaaggaaacgtagtccgcggaacagctgaaatacagacgcgtcagattttgtatggagttggcttgttggtcatttaaaaagaaactgatgtttttactattgtccttcgataatttatcagagtcagtgtcagtgctatagtgggaatatctgttcagtgcagcagaaatagatttgttacaacagttcttaaataggttatagtagatagatctttacagatgggt

SEQ ID NO: 26449 - DNA, 1848 bp, Artificial sequence
  DNA replication origin
acagccagccccaccctgttgaggtccagcccaacttcttgagggagaaatcttaagtttgttttgtagggaaatgaatgtagcctttactttggtttgtccttaagcgaagtggaaaaaaagaaatgttctccatgtttccgttttcctttttgtttttgctaaatgctttttatgaacatatttaataaatgtttcaggtataagtgtaaagatctcactaaataggaacaagttgaacttacacacctttgaaagaatgtatgaatggtgacttaaggcagcatagtatataggaagaataactttaaagctagaagatctggattagggttagagcactggagttatttttaataattatgacagtggggtgaagggagtgtcactggtatccagtgggtagaggccagggatcctacagggcataggacagcctcccgcacccacccccatacacacacacacacacacacaacagagaattcccagccgcaaatgtcagtagtgcagatgttgagaaactgctctggataaactcttgtataagaatatttacagcaacatttttggaggggcaaaggggagctctgaggggtaataatgaaagaatgggaaggagacctgaggagtaataactgattgataaaatgagagggaagtctgtggattaataatgagggggtgggagggaagattgtggagtaatgatgagggtatgagggaagtctgcagagtaataatgagcaggtcggagggaagtgtgaggagtaataatgagggacgggagggaagtctgaggagtaataatgaggaggtaggagggaagtctgcagagtaataatgaggggtaggagggacatctgtggagtaataatgagagggcagaaaagcctgtagagtaataaggaaggggtaggagggccgtctgcagagtaataatgagggatgggagggaagtttgacaagaaataatgagaaggtgagacggaagtctgaggagtaataatgagggggtaggagggatgtctgcagagtaataagggggtgggaaagaagtctgcagagtaatgagcgggtgaaaggaaagtgaggagtaataatgaaggggtgggagggaagtgtgaggagtaataatgagggatgggagggaagtgtgatgagtaacaatgagcggtgggaggtaagtgtgaggagtaataatgaggggttgggagggaagtctgaggaggaatgaggggggtgggagggaagcctgaggagtaataatgagggggtgggagggaagtgtgaggagtaataatgagggatgggagggaagtctaaggagtaataatgaactggtgggagggaagtctctggagtaatgagggtgggtggatagatgggatgggagtagacaggagtgaggtctgaggcataataaggttgtgaatggggagcaaatctcatggcagcattttttataatagtgaaaactggaaccatcccaagtgaccatccacagtgccctggagaagtaaactgtgacacactcactcgcgcagtggtgtagtatcaggcagcaagggtgaaggaacgatagctgcaggcatcagcagggcacgtcatccagttgttgagcatgtgaccgtggaatatgattcctttcatacagttgacagtcggaccacaaatattggctaggggtatttacatgtgtggcaaactgtagagatgagccagagaatggttaatacaaactgtaaggtggtggtaatctggggggaatgcagtgaaggagaaatgcctacaggcttctgtggcacctgcaaaagttccatttcgaaacttgaggaaggagggaca

SEQ ID NO: 26450 - DNA, 1167 bp, Artificial sequence
  DNA replication origin
tttctgcgtcgcgaaactttctgtggccgggttgctatggctgccagctgtcggaagccagggtgtgggcgcatcggctgcgaggggcacggcgcgggagggggtcccctcctcctgctgggacgtggggggcgcagccggcaggggaggtgctcggagactcgcgccgcagccgctggcggcgtcccctgccctccccgcggccgtgcccgccccgccccgggcaccctcgcgccgactccctctcctccccgccgccgctccgctgcccggcagcgcccgcagctgtcccgcctggcagcggcacgcgggcgggggcggtccctggcccgccttggcgaggggcggcgcgggccgcacaaaggcaggcgggggcgccaggtagggcgagcacctggcggccggcgggctgtcaagagccagggagactcgggcgcgggcggcaaccacgccgccccggacctgtgccgggcgccggccccgagggtctccgcgccccggacgccaagtaaacacctcctgaagaggaccccaccccttcccaagcgcgaggggatcggggcttttcggggatccaggggacgcttcgcacgggaagacgccctcgcgagtttcgagtttgttgctgttttccctttggcactttgggaatgtgtggaaggggccgcctctttgacttgtgacttttctgctattccaactccccagtccagctacactcccctccctccctgtataaccttagccacctcccttgggctttggcgtggtgtacttttctttgcggggcacgaaagcaaggactctattttgaagagatcggcagttcatcaaaaaaaaaaaaatctattacaaggcttcatagtttccacacttgcttcttttcaagtagtcctgcttaggtggattatctcgtcctcttctggtttgctgttgttttctaatggctgtggaagagaagccaagtcaaaatgataaccagcacaacactaattaaaaaatcgatatcccggtgagcagcctgagggaagtgcagcagaggcccatcgaaacctgcacacaaagctcagaagcccccttgccccgtgctgtttattccaaagaatgattacaaacaaacatcaacgagaaacctttcaaggcatcctcggccaaagccttttcttt

SEQ ID NO: 26451 - DNA, 1369 bp, Artificial sequence
  DNA replication origin
gatttattttccaatgagcgaaatccccgcccgccaactccaaggcgcttggatgcgagctctgtgggaaacagcagcgacgagcagaggctattttgggtgtgggaacgaggagggaggaggggcggcgccgccaggctgggcgcgggtgcgcggggaaagcctccagctcgggctgccacggcaaccgcgtccaggcaacgcgcccggaagcggctccggcggcgcgcggcggctcgcgccccccgggagccgcgaacccggccgggccgcgcgccgggccaggcggcaggcgcgcgctgattggacggcgctccccgcggcgcgggcccgcagccgggcgccctgctcagccagcgccagcggccgccgcacccagccgcgccggcgaggacatgggcagccgcggcgcgcccaccccccgcgccggtgagtgccgcgctctgggaaccccggccgggcggcctctggggctgggcggcgggagctctctgggacggccggtgaccttggggcagcctctcaggagataggcgtggggtagagagagctgcgcgtggcccatgtgacatgccgcgggcgagagggttaactgcatgtgacgcgaagggctgaagttgggcacagagcgcaactggcgttgcattttcgcgggggctgcatgctagcgaaccaaccgacgcccggagggactgtttgggggagctggggtggtgcacggattgccaggggtaaaggcgagtcagccgacccactactcagagtgagtgaccttgggtaggttaaccatctgctcttccgccccttcgctttttctcatctttcaaacgagaggctagggggtctttgcagttccagaatgctgttgtgccatcctactgcgagctgagaaagagccctaaagtacggttctgcaggtaccggagatgcaaagcttaaccatgtttattctaggaggggtttccattaattggctcctaaagtggtaagaaatgttatcgttgtctggaagattatggagcaagcagtcggtggtccggagaatggcttcttaagatgcacaggttaaaacctctttggtgccctaaagacatgaacaaaatcaggattaatgctcctaagttcttctttcctgtagttaatctaataggaaactttgtatttgaacaggtaaaatcaaaacccaatcgtggcaggcagcagcaaattaagtgagtcatttcttcaatgtgcacgaggtttatgtgtgtgtgtgcgcgcgtgtgtgtgtgtgcgtgtgtgcgcgtgcgctctcgtcctcagctcaaagtctgcgtacggcagtgttggaaattatttcataggagtaaccagaaataatgctagaatg

SEQ ID NO: 26452 - DNA, 1415 bp, Artificial sequence
  DNA replication origin
agggaaggagggaaggaaagagggagggaaggaaggaaggagggagggatggagagagggaaggagggagggatggagggagggaaggaaggagggagggaaggagggagggaaggagggagggaaggaaggagggaaggaaggagggaaggaaggagggaaggaaggagggacggaaggagggagggagagaaggaaggagggagggaaggaaggagggagggaaggaaggagggagggatggatggagggaatgaaggagggagggaggagggagggaggagggagggaggagggagagagaaagagaaaaagaaagagaaagaaggaaagaaagaaagcccacactacttactcaaagcaagcaagcaagccccacactgcttattcacaggaaggaaggaaggagtgaaggaaggagggagggagggagggaaggaaggaaggaaggaaggaaggaaggaaggaaggaaggaaggaaggaaggaaggaaggcaggcaggcaggcaggcaggcaggcaggcaggcaggcaggcaggcaggcaggcccacactgcttattcacaaaatgcagaggaaacttctgaatcttctcaggtgagataatcttaatttgctactctctctctactcacattcccaaggccagtcatttgccaaattgtaaaggcggccttatttcctcactccagtctttgggtggtgctctgcttcctgccaagaccagctgcctgctcacagctgcccctgctgctgctcagcaccacggaagcaaagggcagccacggccatgcttgttctatctcctgtctccacaaactcaccaaaatagacttgtcttcactgtggtgtcacaagctccttgagggcagggatcatgtctgactcagctgtgtctttcccacagcggctagcacaagaacttgcagacggtagtgtcgaagcaaagagtcaaactctgtaaaatatttgaagagatttattctgagccaaatatgagcaaccatggcccgtgacacagccctcaggaggtccagagaacatgtacccaaggtggttggggcacagcttgattttatacattttagagaggcatgagacatcaatcaaatacatttaagaaataattggtttggtccagaaagacgggacaactcaaagggggtgggggatggtaggggggtatttccaggctataggtgaattaaaatattttctggttgacaattggttgagtttgtctaaagacctgggatccacagaaagggaatgttcaggttaagataaaagattgtgaagaccaaggttcttttgaaatcttatagtggctgccattagagacaatagaaaaatatttcctattcgtatctttaaaaggttctagactcttaatcactttaagattgggagggtct

SEQ ID NO: 26453 - DNA, 1138 bp, Artificial sequence
  DNA replication origin
ggaagggggtgggtaatagggaaaggtagcatggatgcacagagacaccggcggggtcagccagaccgagtaacagacttcgggggtcgggggtggggcctgcggcgctcgatcagccagcgcccggactctttcgccagcaactttgcgggcttagtgggcgcgggaggggaagccggcgaacggcgcgaggatagccgggaagtaagtcggtactggggccagaatagggggcagggacggaacagagagctgctcaccttaaagttgcttcaagttgcgcgtccgcatccgggaggacgccgctgcgcgccgcttctctctcggcgcgcactcgacgcgcactccgcgcgcagcgtccgggtccggttggactcggcgcgaacctgggctcttgagctcagccccgcagcgtcccgtgccgcccggtccgcgacgctcctggagcgtcctgcgggcggccgagctcggctgcggagtcccggcgcggatggtggcagcgacgtgttagggctccggagggcgctgctgtgggctccgcgtctccgctgagctaggtggctgcctccatgtcctccctcgaaccatctgatagttttaagcggtgacaggagcagaaaagacccctgtagcggcgcttcattaatgtgccacttcttagctatcatatgacaatcgccttgggaggaggaggaagaggagggggagcgggggctgcagagggaggggactgagcgagaagggagagcccggccagctctggtttctttcacacctatttacatggacaccttggccaataggaatcacttccagctcaagactgggcgagggggaagagcctcggccactgggcaggcagctggacgcgccggccggtgtgcgccgtgtgaaggtatgaggaagcggccgccgcggaagagggagccaggcgaccactcacgttcacagatggagcagccgcgcggatgatgtttgacatggaaattgcttggctggggtattctgtttcctctgcgttgtatccggtttgtatcgttaggtaactttaggcacggctttcccctgaagccgacccttttcctgcgcttagcactacccggggttggttgcatgggttataataatgaaaacacac

SEQ ID NO: 26454 - DNA, 1070 bp, Artificial sequence
  DNA replication origin
cacgccgtaggcgctgtagtcgccactcgccatggagatgggggtggccgagtcgatcatgccggcggagccatacacgtgtggccagccggtgcccagcgagctgcccatggtagtcaactggttggggagcgggtaggcagcgggcaccggctgcatggcggagaaggccagccccccaggcatcttgtattcccgcgcgatgatgttctcgatggcgaaggggtgcttgaagcccgagggctgcgccacgccgcccaagttgtaggcggcggcgggcatctgtggcaggtgcgtgcccgaggccgccagcgcgctgagccgcagcttggcctgctgctgcaggtactgcgccgcgtcggctggcttgctgggcgccaggtggtcggacttaagcaccttgaagcgcttgcggcgccgcaggaagctgccgttctcgaacatgtccccgcagcttgggtgcagcgcccagaagctgcccttgcctggctggtccggccgccgcgggatcttgatgaagcagtcgttgaaggagaggttgtggcgcagactgttctgccagcgctgcgtgttctccctgtagtaggggaagcggtccatgatgaacttgtagatctcgctcagcggcagcatcttctcgggagagctctggatggccatagcggtcagcgagatgtacgagtagggcggcttctggtcgctgtacgtgttgcggccgggccgaggcatcttcttcctcgccctcttcttgctctgggtccgcgcgggccggcggactgctcggatctgggaagggggtgggtaatagggaaaggtagcatggatgcacagagacaccggcggggtcagccagaccgagtaacagacttcgggggtcgggggtggggcctgcggcgctcgatcagccagcgcccggactctttcgccagcaactttgcgggcttagtgggcgcgggaggggaagccggcgaacggcgcgaggatagccgggaagtaagtcggtactggggccagaatagggggcagggacggaacagagagctgctcaccttaaagttgcttcaagttgc

SEQ ID NO: 26455 - DNA, 1329 bp, Artificial sequence
  DNA replication origin
tgtaaccgaacactacttgtttcccaaaaacctataagaaaggaaagacagagagagagagggaaagacagagagagagagagaaagaaagagagaaagaaagaaaaagggaaggaaggaaggagagagaaagagagaagaaagggaaagggaaaggaaggaaagggagggaggggaaggaaagggagggaggtgaaggcagggaggcaggggaaggcaaggaggcaggagaaggcagggaggcaggggaaggcagggaggcaggggaaggcagggaggcaggggaaggcagggaggcaggggaaggcagggagggaggggaaggcagggaggcaggggaaggcagggagggaggggaaggcagggaggcaggggaaggcagggagggaggggaaggcagggaggcaggggaaggcagggagggaggggaaggcagggagggaggggaaggcagggagggaggggaaggcagggagggaggggaaggcagggaggcaggggaaggcagggagggagggaggaaaaaagaaagaaaaaaaaagacaagacaagaaaagaaaagaaagaagagcatctgggaattccaaacacaccaggctgtagtcagcacagactcccactctatgccaccattcaataaatatatactgagcacctactactgcaaggctcagttcaagcagtctgagtctccatatgtaacaagaggttcctgactcttgcaggcttagagggaacatgccaacacatttctatcatcgctctgtgccatttctaatgatatgtgcaataaagaccactgagtttacttccagagcatcagagcgaaggcaccaaggggtgctatttgatatggaactcaaagacagatggcagaggcagcacagacaagggagatgttccagaaggaaaatgcaaaagcctagaagccagaaaacacatggcacacttgaggtgtagaaaatgggatgggtctacgggaagaggtggttcgtttagggaagggttgtggggctgtctttggggtctgatagacccaggttcaaatctgtctgtgtaacttcaagcaggctgaggtattctgagctccatctctgcatttataaagaagataatcataagcctcagaggttgttatgcaatgatttaaggtaaaatagtagcacttgtccactgtatagtgggtgcttaataatcgctcccttcctcgcttgtcttgactctggcagtaacaggaagaaatcacggagaaacctaagcagggatcagacacgactaccatgtcgcattttctctctcccatggcactttactttttgtctgtacgca

SEQ ID NO: 26456 - DNA, 1262 bp, Artificial sequence
  DNA replication origin
gggcggctggccgggcggggggctgacccccccacctccctcccggatggggcggctggccaggcggggggctgatcccccctcccccctcccggacggggcggctggccgggcggggggctgaccccccacctccctcccggactgggcggctggccgggcggggggctgacccccccacctccctcccggacggggcggctggccgggcagaggggtcctcacttcccagtaggggcggccgggcagaggcgcccctcacctcccggacggggcggccggccgggcggggggctgacccccccacctccctcccggacggggcggctggccgaccccccccccccccgcctccctcccggacggggcggctggccgggcagaggggctcctcacttcccagtaggggcggccgggcagaggagcccctcacctcccggacggggcggctggccgggcggggggctgaccccccccacctccctcccggacggggtggctgccgggcggagacgctcctcacttcccagacggggtggttgccggacggaggggctcctcacttctcagacggggcggttgccaggcagagggtttcctcacttctcagacggagcggccgggcagagacgctcctcatctcccagacagggtcgcggccgggcagaggcgctcctcacatcccagacagggcggtggggcagaggtgctccccacatctcagacgatgggcggccgcgcagagatgctcctcacttcctagatgggatggcggcggggaagaggcgctcctcactttccagactgggcagccaggcagaggggctcctcatatcccagacgatgggcggccaggcagagacgctcctcacttcccagacggggtggcggccgggcagaggctgcaatctgggctctttgggaggccaaggcaggcggctgggaggtggttgtagcgagccgagatcacgccactgcactccagcctgggcaccattgagcactgagtgaacgagactccatctgcaatcccagcacctcgggaggccgaggctggcggatcactcgcggttaggagctggagaccagcccggccaacacagcgaaaccccgtctccaccaaaaaaaaacgaaaaccagtcaggcgtggcggcgcgcgcctgcaatcgcaggcactcggcaggctgaggcaggagaatcaggcagggaggttgcagtgagccgagatggcagcagtaccgtccagctttggctcggcatca

SEQ ID NO: 26457 - DNA, 990 bp, Artificial sequence
  DNA replication origin
ccgggagggaggtggggggatcagccccccgcccggccagccgccccgtccgggaggtgaggggcgcctctgcccggccgcccctactggaaagtgaggagcccctctgcccggccagccgcccggtccgggagggaggcgggggggggtcggccagccgccccgtccgggagggaggtgggggggggggtcagccccccttccggccggccgccccgtccgggaggtgaggggcgcctctgcccggccgcccctactaggaagtgaggacccctctgcccggccagccgccccgtccgggagggaggtgggggggacagccccccgcccggccagccgccctatccaggaggtgaggggcgcctctgcccggccgcccctactgggaagtgaggagccgctctgcctggccagccgccccgtccgggagggtggtggggggtcagcccccgcccggccagccgccccatccgggaggtgaggggcgcttctgcccggccgcccctactgggaagtgaggagcccctctgcctggccacgaccccgtctgggaggtgtgcccagcggctcattggggatgggccatgatgacaatggcagttttgtggaatagaaaggcgggaagggtggggaaaaaattgagaaatcggatggttgccgggtctgtgtggatagaagtagacatgggagacttttcattttgttctgtactaagaaaaattcttctgccttgggatcctgttgatctgtgaccttatccccaaccctgtgctctctgaaacatgtgctgcgtccactcagggttaaatggattaagggcggtgcaagatgtgctttgttaaacagatgcttgaaggcagcatgctcgttaagagtcatcaccactccctaatcttaagtacccagggacacaaacactgcgggaggccgcagggtcctctgcctaggaaaaccagagacctttgttcacttgtttatctgctgaccttc

SEQ ID NO: 26458 - DNA, 852 bp, Artificial sequence
  DNA replication origin
gtggcgggtataaaagccccacccaggccagccggctctgctcagcatttggggacgctctcagctctcggcgcacggcccaggtaagcggggcgcgccctgcccgcccgcgatgggccgccagctagcggggtgtggagacgctgggaagaagggtacggcctggcagggaggccccggcaactggccccggaggccgtcgggggcagggggctgaagggacggccggcactggagagtctttggggagggggctcagggacaaggtgtttggggcaggggtgaggggccaccggccctcgggccgggagggtgcagggcagaggtggtggggggtcgggcttctctaagaagccctagcgggagcggggcgaggcggcgtggggagaggggcggagggaggccccgcattccagacgcgccaggcgccgccgaggcagggcgtggccgcccagggagccgcaggtccccggcgcagcagtagcaagtgggctttccactgccctctagaaagtgccccccatctgctctaagttactgtactcgaaacaaacgcgcgcttgtggagttgaaccgaccagcaggagggaagtagcgggggaagacgagaggggggagtgtgagtaggcacccctcagccccccataaaagaagacattaaaacgtcagttattccccttgctctaggttatcttgtagcatagcaacttcggatttcactctacccggagagtttcccgcttggttgaacacattggcctcaggaaggtagtgtcccccatgattctgtggggagggttgtcctgttactcgccatgatgtgacaatgagtcaggaactgagagtagagag

SEQ ID NO: 26459 - DNA, 1355 bp, Artificial sequence
  DNA replication origin
gcaccactgcactccagcctgggtgacagagtgagaccctgtctaaagaaaaaaaaaagacagtgatgatgattatagctaacatttatggagcccttactatgtggtgggcactgatgctacaggcactttacttgtgtaccctgtaataatgagatagggctcgttttaaaggtgaggaaactgaggcacagagagattaagaaagtgtccaagttctcatagctaacaaatgtcagggtagagattcaaccccagactctagattttgcaaatcaaatctctacactttgtcttcaaggtcataatcaactctctcctttttccttaaaaaaaaaaaaaaaaaaaaaaaaaaaaaaaaaaaaaaaaaagttttcactttcatccttaattcctatgcagtgaagctaacgtaacaagacgaggtgcgctggtgggttctgtgtatcctttccgtgtccttggtgcccagtcacgcaggttctcagcaagtggtggcaggacatgcagctggatggactcgtgtgtaggcccacatgttgggggtggggggtgaggtgtatgtgtaagcatgtggggggtgtgtgtagggtgcgtgtgcagtgtatgtgtgtgtggcatgtgtggtgtgcatctgtggtgcgtgtggtgtatatgtgttgtgtgtgtgtggactgtatgtatgtggggtgggtgcgtgtgtgtgccgtatccttggtgcccagtcatgcaggttctcagcaagtggaggcaggacttgcagctgaatagacttgtgtgtgaggtgtgcccgtgtgtcgtttgaggtgtgcctgtgtgccgtgtgtgggaggtgtgcccgtgtgccgtgtgtgggaggtgtgcccgtgtgccatgtgtgtgaggtgtgcccgtgtgtcgtgtgtgaggtgtgcatgtgtgccgtgtgtgaggtgtgcatgcgtgccgtgtgtgtgaggtgtgcatgcgtgccgtgtgtgtgaggtgtgcatgtgtgccatctgtgtgaggtgtgcatgtgtgccatgtgtgagatgtgcctgtgtgccgtgtgaggtgcgcctgtgtgccgtgtgtgtgaggtgtgcctgtgtgctgtgctgtgaggtgtgcatctgtggtgtgtgtgagcatggtatatgtgtgtagtgtacgtatgtgtggtacatgtgagcatacggtgtgcatgtgtggtatgtgtgtgtatgtgtggtgtgtgtgtgcctgtgttaccatttaagatggtagcagctattggcattaaaaaggacctgctattctgagctctggctttgacagtaagctgtgcccacagcagctgttagcaatcagagtgtgtttccatccgatgtgaa

SEQ ID NO: 26460 - DNA, 1317 bp, Artificial sequence
  DNA replication origin
gagtcgccgcgcttcggaaaggaaggggagggtctgcggagttcagaggaagccggggacgcccgcggccggtccccagggcccgcacccgggacagctccggcctaggtcggggaggcgccgcggccgggcagggccgtgcgtgcgcgttgtcgcgatgtcatccccggggactggtcagcgccccaggccttgcgccctgcccctgcgtccccgagcgcctcagcggccgccggccgggcaagtgccgcaggtccgcgctgtgtcccgcgctgtgtcccgccgcggccacttccgaaagcgcgcgggccggagcgagacgggcgcctcgagcgtgccaagacgctctgggcggcccagggagccgcggcgcaccccgcttgacactttggctggtggatggaggtggggaggaactcggcagcccacgggatccgcgggcaggggcggaggttagaccgtggtgagggccgacgggcgcgggttagtcgcggccaatcctgccgggcggcccggccttccgccctcatcaggactccgtagccgggccgggggcgggaggggagggggatttggttggagggaggactggctctaggtcctctcaggtgagaaggagagaaaccgtggcaagtcagggaactttctgatgggaaagctaaagtttggaggtgttcaggaagtcgcccgtgctgccggagaaaccgagactcgctcttgggacggttgcaaacagctccggagaaactcagcccgcagcacgccgcccgccgcccgccgcccgcttgtgcgcccgcaggttcctcgccgtggataatctgcccgagctgcttcgcaggcccggccgccaggcttggggatttagagccccatctgtttgcggcggacgcggcttccctaatgcgcagcaattgtgcagacccagactgtcctgcgggtcctagccaccggtgcgggtgccaagcgcctgttaaacgtttgctagtttggggttgtgttgcaatctggaatgaaggacaccagttcggtatctgcgctgggtttactttcggatcaccgagctttgcctttcttcactagagattgggtggcatctcttttattaattattaacaggccgaaacgtactggacgttaagatgagctgcttgagatgaaatctttctatataatgtgcccacagcaaattttctcttttcccctgtggcttgaggggaatgggatttaatcatttttagaatatgtaattcatataagtaaaagagaggaaacctcccgtgatccgcgctcttaagcacttaaaattatttgggagga

SEQ ID NO: 26461 - DNA, 1003 bp, Artificial sequence
  DNA replication origin
tcatcgctgcgatcacaaaatacatcatttaagccgcggtgcggagagcgcagggagagcggatggtccgaccccggagccccctctgccgccgccgcgccgccgccgcccgagccacagcagcagctgccgcagctgcccgcccgccgagagccatcccgagccataagaggctccatgtgaccggctgacatcacggccgccgctctgtttacaccgcgcccctccgcttcctcccggggcgggaggcgggaggcgggaggcgggaggcaggcgcgccccagcgccgcgccccgccccgcccccgcgggcaggtgagtagcagcggcggctctgctggcccaccccggccgggcctgccctcccgcgccccgggccctcgcccgggcgcccgccttcccctcgccttcgggatcacctgtggccgccggtcgcttttctgcacgcagcgccccgcggaacgcgcctctgaccactttctgcccccactcggtggggcaagaggctcgcaacccgacgccactctcccgctggcttgccggagcactcgggggcgataaatgcgccagctcgttggtggaaaagacaggtttggtctggggagctacggtcacccgcatttcctagagtgccccagctctaatcggaaggtacggcccacttctgggccgtggagaacgaagccactgggaccgtccggggagtggagtaagctcctccgaagtctttctggagagactcggcctgggcgggggaactccgcccacccaacccttggcaacccttggatattggcagttataccaataaccaaggtcctggtctacacctgtcccccccaacccccttccccgcgtccaagaccactgatacctgcaaggaaagccggaaattgtatgtgaatcacctaaatgaactccagttgccagctgatttgagccgctaaattcccaggctcttccatatctctccagagaacccatctacaagtaggaaaagctat

SEQ ID NO: 26462 - DNA, 1291 bp, Artificial sequence
  DNA replication origin
gaacaaaatggagtctcctatgtctacctctttccacacagacacagcaacaatctgatttctctatcttttccccacatttcccccttttctattcgacaaaaccgccatcgtcatcatggcccgttctcaatgagctgttgggtacacctcccagacggggtggcggctgggcagaggggctcctcacttcccagaaggggctggccgggtgggggctgacccccccacctccctcccggacagggcggctggccggtcgggggctggccccccacctccctcccggacggggcggctggccgggcgggggctggccccccacctccctcccggaaggggcggctgccggacggaggggctcctcacttctcagagagggcggcggggcagagacgctcctcacctcccagacggggtcggggccgggcagaggcgctcctcacatcccagacggggcggcggggcagaggcgctccccacatctcagacgatgggcggccaggcagagacgctcctcacttcctagacgggatggtggccgggaagaggtgctcctcacttcccagactgggcagccgggcagaggggctcctcacatcccagacgatgggcagccaggcagagacgctcctcacttcccagacggggtggcggctgggcagaggctgcaatctgggcactttgggaagccaaggcaggcggctgggaggtggaggttgtagctacccgagatcacgccactgcactccagcctgggcaacattgagcactgagtgaatgagactccgtctgcaatcccggcaactcgggaggccgaagctggcagatcactcccggttaggagctggagaccagcccggccaacaaagcgaaaccccgtctccaccaaaaaaatacgaaaaccagtcaggcgtggcggcgcgcgcctgcaatcgcaggcactcggcaggctgaggcagaagaatcaggcagggaggttgcagtgagcagagatggcggcagtacagtcccgcttcggctcgtcatcagagggagaccctggaaagagagggagagggagaccgtggggagaaggagggagagagagggagagggagagggagtcggagtcattttggttttattcatccatgcaattgcagctgctctcccatgggacataggacactcagggtgggggacgctgtgcggaatcaccctcagcacacccgctgatcctggctcattatctttgattcagaaaggtgcacttggcttcactctccccttggaatgcatcttcttcctg

SEQ ID NO: 26463 - DNA, 790 bp, Artificial sequence
  DNA replication origin
tgtgaggagcccctctgcccggctgcccagtctgggaagtgaggagcacctcttcccggccaccatcccgtctaggaagtgaggagcgtctctgcctggccgcccatcgtctgagatgtggggagcgcctctgccccgccgccccgtctgggatgtgaggagcgcctctgcccggccccgaccccgtctgggaggtgaggagcgtctctgccccgccgccctctctgagaagtgaggagcccctccgtccggcagccgccccttccgggagggaggtggggggccagcccccgcccggccagccgccccgtccgggagggaggtggggggccagcccccgaccggccagccgccctgtccgggagggaggtgggggggtcagcccccacccggccagccccttctgggaagtgaggagcccctctgcccagccgccaccccgtctgggaggtgtacccaacagctcattgagaacgggccatgatgacgatggcggttttgtcgaatagaaaagggggaaatgtggggaaaagatagagaaatcagattgttgctgtgtctgtgtggaaagaggtagacataggagactccattttgttctgtactgggaaaaattcttctgccttgggatgctgttgatctttgaccttacccccaacccggtgctctctgaaacatgtgctgtgtccactcagggttaaatggattaagggcggtgcaagatgtgctttgttaaacagatgcttgaaggcagcatgctcgttaagagtcatcaccactccctaatctc

SEQ ID NO: 26464 - DNA, 975 bp, Artificial sequence
  DNA replication origin
tttttttttttttttttttttttttttttggtaccatagagttgctctgaaaacagaagatagagggagtctcggagctcgccatctccagcgatctctacattgggaaaaaacatggagtcagctccggcagcccccgaccccgccgccagcgagccaggcagcagcggcgcggacgcggccgccggctccagggagaccccgctgaaccaggaatccgcccgcaagagcgagccgcctgccccggtgcgcagacagagctattccagcaccagcagaggtaggaggctggagaggggctggggagggggcggcgggagcccgggcgcggagcggggggcggccgggagcgggcgcccggggcgcggggtccggcggccgcgcgcgagcctgcggcggcgccccgagcccggaggacccccctcccctcccccctccgccccccagaaatgttgcaaacttttgcagcccgttctcggcttgcgggagcagagtggggcgggggaggcggcgggaaggttgacagccggcgggctcacccccctggctttgatttttctgcaaacactggaggaaagctgcgttgcctcaattaaatacgctcccccaaaatacggagatgcggggagtgggggcccgggaaagaaacttttaaagcggcagtgtccttttaagaaggggcaaaaaaatctgtttatggccaccctccttccgctttaccttttctcctcttgacagtttcggccctggctgcccgagtcgggggtgtgttttcggtccctctcagatctgggcggggggcgggaggagtgagcgacctgggaagtcccgggggtggagagggggcgctccggggtctgggggcgacgtggacaccttctttggagcacggcggtgcgtttgggatttgaaggaagggccgaaggaagcggggtgcgggcgggcgagctgttcgccaagttgtctggcgggcgc

SEQ ID NO: 26465 - DNA, 880 bp, Artificial sequence
  DNA replication origin
gggctcggggcgccgccgcaggctcgcgcgcggccgccggaccccgcgccccgggcgcccgctcccggccgccccccgctccgcgcccgggctcccgccgccccctccccagcccctctccagcctcctacctctgctggtgctggaatagctctgtctgcgcaccggggcaggcggctcgctcttgcgggcggattcctggttcagcggggtctccctggagccggcggccgcgtccgcgccgctgctgcctggctcgctggcggcggggtcgggggctgccggagctgactccatgttttttcccaatgtagagatcgctggagatggcgagctccgagactccctctatcttctgttttcagagcaactctatggtaccaaaaaaaaaaaaaaaaaaaaaaaaaaaaaaaaaaaaaaaaaaagaaggagaaggcgaccggcgaaagcaggagggaaaaagcaggcggcggcgggcgggcaagcaaaagcgcgagggagcgcgcggagtgtctgggtggacgtgtgtgtgcgcccgaaaggggacaagaggcgggtctggccacaggcagcgctagcgagagcttctccagccggcccccacacccacattccccaccctccagaccccagaccgagagccacagactggctgccaattttgggaggtggggaaaagaggggaggaggagaacagagcctcccgcgccccaatcctcccctctccccagcccagggacagaaattaaaatcggtgagatgattccgtgcctacttctgagactctctcgggaacagaactcgtccccatccgctgccagcttgggtagagacaaatccgattgtccacgtccacgttgggaaatcgcaggtagccccc

SEQ ID NO: 26466 - DNA, 1245 bp, Artificial sequence
  DNA replication origin
ggcgggctcgtggagggggcccgggccggggactgggagcccgcgcggcgctccttgtcctcgttcccgctggagacggagcggacgcgggtcaggcggcgactcctcccagcccgcagcgcgcgactcagcagcccgtcggggacgcgcaggaggcggcagccgcggggccgccgggcgagcgcgtcctggggcgggcggggacagccgggggccgcgggggtcgccgggcccggagctcgcgggacgcgcagggtccccaggagggcgtccgggccgccgccgccgccgtaggtgtgggcccggggccggggcgcgggcgggcccccgagcaggagcgactccttgcggcgcgtgtgcgggctctcgagcagcgcgcagaagccgtaggcggtgcgcacacggggcaggtgcggcagtgacagcgcggcctgcgagcgcgggtcccagtctgtgcggccggcgccctcgtccatccctgcttcttcgacccaagaattccggagcgcagccaaggccaggcggggcatgagccgtggcgggatgcagaactcagggatgcggtccggagtgagcacatttgcgcacgcggcggtggtgcgagacttggctccgcgggcccgacccgggagaagccagtctccgctccgccgaaggcactcaggacccaagcggagtcgctccaggcaccacatctggccactctctgctggagcttgtctacctgcagtgcacaaaggcacaaggatcgtcagagcgagtcccgcaaggtgcagtaaatcctgttccttttctcctattaatactttcggggtgtttcttcctgcctttcccgaaacaaggcaaactgctcttgcttgccgctattgcaaactattttttcagtgagcgaaaaacaactgtttttcttttgtcctatctcaactgtgttgtaatacacacttcggagcttgttttaatccctctccgccctggctggcctaaggcagagattcacaaaatgctggattgtaacttcagtcgctctgttctctgtgccaacgattgccttgcaatcgtttcctgactctttggaccatagcagtctagtcctcagctagaattaaagtaattgttattccttccgggaaactgtggctggttctccccttgcagaggcaaagagcctcagacgaatcccccagggaattaagcaagccgatgggtccctcctaaaatacctggagtcctgcgtcagatgggtct

SEQ ID NO: 26467 - DNA, 1514 bp, Artificial sequence
  DNA replication origin
ggcgctcctcgtcctcgttcccgctggagacggagcggacgcgggccaggcggcgactccttccagcccgcagcgcgcgactcagcagcccgtcggggacgcgcaggaggcggcagcggcggggccccgcagcgagcgcgtcctggggcaggcggggaccgccgggggccgcgggggtggccgggcccggacctcgcgggccgcacagggtccccaggggggcgtccgggcctccgccgccgccgcagctgtgggcccggggccggggcgcgggcgggcccccgagcaggagcgactccttgcggcgcgtgtgcgggctctcgagcagcgcgcagaagccgtaggtggtgcgcacacggggcaggtgcggcagtgacagcgctgcctgcgagcgcgggtcccagtccgtgcggccggcgtcctcgtctgccgcgcggggccacaggtcgctttcagcggcgcagcgccggggcacggcggcggcccggattggagactcgagcgtgcaaggggccggcagccgcggcgggatgcagaattcggggatgcgattcggcgtgagcactttggcgaaggcgggcttcggcgcggagctgcctgcggccgaggaacagagtttctcgaggagccgcatccttggaggctggggctaggagtggcgggaagaggtgcgcctgcgggggagagaagctgctgagtttgggcgcctggagctgctgcagcccctcgacgcggctggatccctcccccagaccctgtaaacgtcccccacgtgtttaagaccccagaccagttccagccttcctctcccctgcacccacaacaaatcagccccgcttcagacctttctctcttcttcagtgtctctggatctggttgcaagctcagtgccagtggcctctagcccgctgccgaggcgccaccttcagtactgcggccaggagagtggcgctcccctcttataccgtaggctgagtcccgcccagccgccagcggcccaacccggaggtgctgcacagcccgccttcccgccaccctctcccacgacgccgggaggtctgcatgcactgggcgctcaggtctgcgcgaagctgtcgcgggagcaggcaccttgtggtcagctctgggacccgcatttgcagtgagtgcgtggagccccaggcaaggcctgggaaaggttgcaggtgaagagagggcaccctgtcgtcctgccaaggaaaaattggcggctgaaaatgtttctggcttcttggagaaggtgaggctggacgaggaaacaggaagttaatttggctaggagataaaccgtcactcaccctgcatgtaacctggacgtgacctgcacgtcctgggagcttctgttttcctgtccccacgcactcgcagcgtgcagaccaatatggtttccagttatttatatacttatttactgtctgtctccctctgctagactgtgctctttttgatagcataggccctggctcagtccatgccctaagtactggtgaagtggg

SEQ ID NO: 26468 - DNA, 968 bp, Artificial sequence
  DNA replication origin
tctctgcccggccgccccatctgagaagtgaggagaccctctgcctggcaaccgccccgtctgagaagtgaggagcctctccgcccggcagccgccccgtctgagaagtgaggagcccctccgcccggcagccaccccgtccgggagggaggtgggggtcagccccccgcccagccagccgccctgtccgggagggaggtgggggggggtcagccccccacccggccagccaccccgtccgggaggtgaggggcgcctctgcccagccgcccctactgggaagtgaggagcccctctgcccggccagccgccccgtctaggagggaggtgggggggtcagccccccgcccggccagccgccccgtccgggagggaggtggagtggtcagccccccacccggccagccgccccgtctgggaggtgaggggcgcctctgcccggccgcccctactgggatgtgaggagcccctctgcccggccaccaccccgtctgggaggtgtacccaacagctcattgagaacgggccgggatgacaatggcggttttgtggaatagaaaggggggaaaggtggggaaaagattgggaaatcagatggttgccgtgtctgtgtagaaagaggtagacatgggagacttttcattttgttctgtaccaagaaaaattcttctgccttgggatcctgttgatcggtgaccttacccccaaccctgtgctctctgaaacatgtgctgtgtccactcagggttaaatggattaagggcggtgcaagatgtgctttgttaaacagatgcttgaaggcagcatgctcgttaagaatcatcaccactccctaatctcaagtacccagggtcacaaacactgcggaaggctgcagggtcctctgcctaggaaaaccagagacctttgttcacttgtttatctgctgaccttccctccactattgtcctatgaccctgccaactccc

SEQ ID NO: 26469 - DNA, 1086 bp, Artificial sequence
  DNA replication origin
tggggggctgaccactccacctccctcccggacggggcggctggccgggcggggggctgacccccccacctccctcctagacggggcggctggccgggcagaggggctcctcacttcccagtaggggcggctgggcagaggcgcccctcacctcccggacggggtggctggccgggtggggggctgacccccccccacctccctcccggacagggcggctggctgggcggggggctgacccccacctccctcccggacggggtggctgccgggcggaggggctcctcacttctcagacggggcggctgccgggcggagaggctcctcacttctcagacggggcggttgccaggcagagggtctcctcacttctcagatggggcggccgggcagagacgctcctcacctcccagacggggtcgcggcccggcagaggtgctcctcacatcccagacggggcggcggggcagaggcgctcgccacatttcaggcgatgggcggccgggcagagacgttcctcacttcctagatgggatggtggctgggaagaggcgcttctcacttcctaggtgggatggcggccgggcagagatgctcctcactttccagactgggcagccaggcagaggggctcctcacgtctcagacgatgggcggccaggcagagacgctcctcacttcccagacggggtggcggccgggcagaggctgcaatctcggcactttgggaggccaaggcaggcggctgggaggtggaggttgtagcgagccgagatcacgccactgcactccagcctgggcaccattgagcactgagtgaaccagactccgtctgcaatcccggcacctcgggaggccgaggctggcggatcactcgcggttaggagctggagaccagcccggccaacacagcgaaaccccgtctccaccaaaaaagtacgaaaaccagtcaggcgtggaggcgcgcacctgtaatcgcaggcactaggcaggctgaggcaggagaatcaggcagggaggttgcagtgagccaagatggcagcagcacagtccagcttcggctgggcatcagagggagaccgtgga

SEQ ID NO: 26470 - DNA, 1169 bp, Artificial sequence
  DNA replication origin
tctgcaatcccggcacctcgggaggccgaggctggcggatcactcgcggttaggagctggagaccagcccggccaacacagcgaaaccccgtctccaccaaaaaagtacgaaaaccagtcaggcgtggaggcgcgcacctgtaatcgcaggcactaggcaggctgaggcaggagaatcaggcagggaggttgcagtgagccaagatggcagcagcacagtccagcttcggctgggcatcagagggagaccgtggaaagagagggagagggagagggagagggagaccgtgggccgtggggagagggagagggagagggagagggagagggggagggggagggggagggggaggggtgaaatgattcttacaacgcatgccaatcacatttcatccaaatattgcttgacacttagctaagcatttccatatacaatggccttcaaaatgatcaactgagcccactctatgggtcatcaggaccaccatgggttactctgtactacaccagacatagacatgtgtctggaggggatctggatgctgcagggaggcctccatcagggcctcagggctcttctgagagacaatgcctttcaccccattccccactaatgaataaatgtgtggctgcgatgttggcctcttctactctaaatcaaagggaagcccttgtgtttcctatattgctgtggatggagctccatgttagagtaagtaaatgattttctaccatgttctggagaagtcctcattccagttattttataccttcagatgatttcctattactcattaattacctttgctttcagattgaataactccctttagcatttcttgtaggacaggtctggtgttgataacaatgtctcagctttcgtttgtctggaaaagtctttatttcttattcatgtttcaaggataactttgctagataactattctaggataaaagtttatttccttcagcactttaaatatgtcatcccactctctcctagactgtaacgtttctgctgagaagtctgctttcagaagtattgaaactcttttgtatgtaatttgcttttttcttgctgcttttaggatcctttctttatctttgatctttgtagtttgattattaaatgccttgagggggtcttctttgggttaaacctacttgct

SEQ ID NO: 26471 - DNA, 1147 bp, Artificial sequence
  DNA replication origin
cctgcattggcatcactcacgagaagcaaaagggaggaaaaaaaaccccacattttccttctggagaggggagggaaaagacacgagaaattcatgcaacgtgcatgcagctggaggaagaggaaaacccgagtgagccgtgcgccttaccgggggatgcatttactgtctcattgcagagcgcctgcccgggagtgcagcccgcgtccccccgcgcgctgggcgaccactccgctcccgcagccgcctcagccgctgccgccgccgctggctccgggcgcggaacaagagccgagggcgagcgcgagcgcactgcccgagagcgctgggagggcaggaagcgcgtcatcattcggggacggcgcggcgccggtccggccgcggcgccgcgcggcaccggggtgggccgccaccgaggctcaggcgcccgtcctgggtttcctcccacgcgtggtgatgctgaaagggtccgcgagggaaggtgatgcaccggccgagctgtcacggggaagggaggctcggggtgaccccggcttcccagaattggggctctgctgtgtaaaggggatgactgcaggacacagcgtcttgtaggctggggcccctaggtccgcagagtgccctctcgggacctctggcccggtcctgggggaagcgagctgtggctaactggagggccgtggtgggcggtggggtcttgctgcgaagcggagggccgtgaccccaggcgagcctgctcctttcagcacaaggaccctgaaaccttgctggtcaggtgtcacttaggtatttagagaacgactatagggatgagtggcggtaggggcgtgctgtgttgataagaagaaaataattcactcctgcttgccatgccctgaataaagtcagttatatacctcttacatttacagtcattattagtaaatactgtaaataccatggaacaatgtgaaggttattcaagggggtgaggagacaaaacactatgtaccgtatggtcccgtttttaaaaactgtgatttatggagaaaggcagaaaagactggatagataaacaccaataagtctctcagtgattggtggaattgtgagtaattttacttttttatttatctgtaagggacacattagtaatttaaaaaaacaa

SEQ ID NO: 26472 - DNA, 1375 bp, Artificial sequence
  DNA replication origin
cccgcaagggcgcgcggactacagcgcgtcgccacgccagccggcggggcttgggaacgagagccgccgtcacggacagcgtgctgggcttgccgccttcctctgtcccgcctggacccggccttggggctccgaggctcagggaacacgcccctcttccccgcagctaccgctgcccgggtgctcagccggagccgtgcgctgggcggcgtcccggggctgggcgccgagtgtagagcgttctcccggtgcccgggctcgcctgggtgctccgaggggcgcagtagctcacttcctgggggagaggaggcgccttggttcgtggatcaggaccagggcctggcctgtggtcgccccgaggccgccgaacagcctgagcttccagtcgcctctttggctttagcggcgacagcagtagcgcccgcggctgcgtgttctgctctcgcagctcgtagaggcgaggaaaggagggcgtttccagaagttggggcttcaggtgacgcgtggggaaacttggattcttgctgtccttgaagagctgggacaacttaggccagaattcctgtgtctcatagtgaaaacttctggttctttccagaagatgagagaggaatgaactgaagtgttggcgttgtcaaagacataattaaagacggttgggtagggatgatgtcttggagaagtggtccccaaaatacacgtaaattgccctggtgctgtaagtaccacttacttttccattaataatacctgggtgtgttaagctgtggcattgtaaggttgcacgctgacctcccttctccagagcttggaggcagcgacctctctggagtgagggggaagcgggagtggggaatctttacttttgaagtagactgtgacctctgctttgtgatgggacagggcacgggcgtgtttgccaacctacaggcagccaattgcaggaacgtgttctccttggagtgttaccgaaatgatgtcatagtattgaggttttgtcggcacttccggtcttcttcactgaagaggctagaagggaccacagaaacctctggggttgggggttaggtgtgcagagggaggggagaggctttcctgtgggagatgtgcctggagatgttaggtgttaggcagctctttccctgattcatttcatgaagcgcctgcaaaagtgactccgatatgaatgtcagccaagattttacctaccttgattgcttatttgggacctctatgcaaaatcagaggatggcggtgggtgtgacaagtggtcttgagagaagagggatgcctacacgaatgccttttttttttcattgagcactagaatagtggaaaacacccagagcccaagatatatttttccaaaattagc

SEQ ID NO: 26473 - DNA, 1068 bp, Artificial sequence
  DNA replication origin
gaccccccccacctccctcccggatggggcggctggccgacccccccacctccctcccggacggggcggctggccgggcagaggggctcctcacttcccagtaggggcggccgggcagaggcgcccctcacctcccggacggggcggccggccgggcggggggctgacccccccccacctccctcccggacggggcggctggccaggcagggggctgacccccccacctccctcccggacggggtggctgccaggcggagacgctcctcacttcccagacggggtggctgccgggcggagaggctcctcacttctcagacagggcggctgccgggcggaggggctcctcacttctcagacggggcggccgggcagagacgctcttcacctcccagacggggtcgcggccgggcagaggcgctcctcacctcccagacggggcggcgggacagaggcgctccccacatctcagacgatgggcggccgggcagagacgcttctcacttcctagatgtgatggcggccggccgggaagaggcgctcctcacttctagatgggatggcggccgggcagagatgctcctcactttccagactgggcagccaggcagaggggctcctcatatcccagacgatgggcggccaggcagagacgctccttacttcccagacggggtggcggccgggcagaggctgcaatctcggcactttgggaggccaaggcgggcagctgggaggtggatgttgtagcgagccgagatcacgccactgcactccagcctcggcaccattgagcactgagtgaaccagactccgtctgcaatcccggcacctcgggaggccgaggctggcggatcactcgcggttaggagctggagaccagcccggccaacacagcgaaaccccgtctccaccaaaaaaaatacgaaaaccagtcaggcgtggcggtgcgcgcctgcaatcgcaggcactcggcaggctgaggcaggagaatcaggcagggaggttgcagtgagccgagatggcagcagtacagtccagcttcggctcggcatcagagggagaccg

SEQ ID NO: 26474 - DNA, 1583 bp, Artificial sequence
  DNA replication origin
cccagatatgtactttcccaagggggcgaccgcattcctcaagacagccaatacttttttggaaaagcttttttctcctgccccccttcctcctctcctccctccgccccgtgccccctccccgctcctcccgcgggggccgctcgcccattcgctgccggccgccggcctcccagttgacggtggatatgactatatatggggacccgagccgccgaggcggcggccggagaggccgccctgtttctaaacctgcgcgccagggagagggcgttggggccgagccggggccgaggcgcaaccctccgccctccgcgtgcccttctcccagggccggcacccagccattagggtccccaaccgagcccgccctgagctgccggaggccgggagagcgcggaccaggtggtggatgcgcgtcgcccccctgtgccgtcccccggcgcgcttagccaaaggcccgggggcttcccagccgtgctgcaccccgcgtcagggtcagtgcgctctcggcacccgccagcgcctccccggcagctctcagccagccaggtgtcatcctgcgcgctcacgctctggaaactcaactgcagcagagaaagggagaacgtgggagaaagcctggggcggctcttgagactttctctgcgggcgcgggtcagagaggcagggggcggcacagcgacagcacacggagtcttgttttctgcctgccctttcccccagcggagggacagtcaaatactttagggacacaggactcagtggcgtacttctgtgcttgctgtgcagtgcctccaaaaaggtgtgcatgtgtgcgtgtgtgtgcgggtggcagtctaaggggaaagaacattgagtttagactcaggcaatttggtctgtggtctctactctgccaccagcaactgtgagaccttgtttgctgcccgcggcttcctcaactttaaatccagcgggtagataatccccgaggtccctccagatataacttgttatcatttttcttgcactgattttagggagtcggccttccatgttagatgcttaggtgccaggtttcggaaaacatgggatcggcgttaacctggctaagtcattgcatccgcagccgcaactctgaggaggctctgccgtgtgagctgtgcttggaaggaggaggatttcccccaacacttcttatttttaactactcctcccatctcccaagggggaaaggctgctttttttcagagcttcagtgggaggggaggagagggggctgcccccaagccctgagatcagctgaggcagggttggtgagggtcttgttaatagtccccacagaataattcacagtctgtactgcatggttaccaaatattccccggacggtatctgagcagattaggcaggccaaacaacttgtaagtccttcagagaatgatcaaattcctctccaagattttatcgggtttcttccactaacctaactgcccaggagggaaaagatacactgacctaatggtcagaacattagatctgaccattagcataggggctgcgtggcacagaaattgaccagagccctttaatcacggtgt

SEQ ID NO: 26475 - DNA, 943 bp, Artificial sequence
  DNA replication origin
gcttttccaaaaaagtattggctgtcttgaggaatgcggtcgcccccttgggaaagtacatatctgggagaagcaggcggctccgcgctcgcactcccgctcctccgcccgaccgcgcgctcgccccgccgctcctgctgcagccccagggcccctcgccgccgccaccatggacgccatcaagaagaagatgcagatgctgaagctcgacaaggagaacgccttggatcgagctgagcaggcggaggccgacaagaaggcggcggaagacaggagcaagcaggtctgcgcctccccggccctgcgcccgcgcccagagcgccgggactcgagcctggcacccccggctggatccccaccccgaggactcggggagccaccaccctacccccaccaccacccagggcggccagggcgcgcgtctggaaagaaggaagggaaacgcaagagccaggcttagtctaacttagtctggtctgaggacgcttatttcccttctctggttcccatggcccgcgaaatcaagtcctagaggcgctttattctcaggactgggaatcagtttgggggagggaggaggacacccggttcctggggacgtttgaaggaagggcgagggatggagaaagggggtcgagtaactcaagtgttagaagttcgttgacttttgactggggagaaaggaaccttaaacttggggaggagaagggagtcctggagttgttacctaagaacaaagatggggcggaatggaggctacagcccgaaagccaggccagcagtggcgttcttctgtgtccccaagtagtggacttgagcccgctgagacctcggcaggagtctcgtcccagggcaggtgggtgtgcggggtgagccgcggagcggttccagctcgggtaaagaggaagttacctcgggtcctttgcactccaactcggcggcg

SEQ ID NO: 26476 - DNA, 1384 bp, Artificial sequence
  DNA replication origin
cttggggaggagaagggagtcctggagttgttacctaagaacaaagatggggcggaatggaggctacagcccgaaagccaggccagcagtggcgttcttctgtgtccccaagtagtggacttgagcccgctgagacctcggcaggagtctcgtcccagggcaggtgggtgtgcggggtgagccgcggagcggttccagctcgggtaaagaggaagttacctcgggtcctttgcactccaactcggcggcgccccgagcccgaggggccccagccaacccgacgcccgtgtgttgtgtgtgtctaacacccggtccgtgccggccgcccgcgcccgcccgccgctgcccccagctcgaggaggacatcgcggccaaggagaagttgctgcgggtgtcggaggacgagcgggaccgggtgctggaggagctgcacaaggcggaggacagcctcctggccgccgaagaggccgccgccaaggtacccggggcgcgcggcacggcgtggcgcacgaatggctaactctttctctttctctctctccctccctgtctttccctctgtctctcccgctgtccctgtccttctggttctgtgcacccacacccctccccttcgggatcacgctgcctgctgcacccccctccctccctgtaccccctggccaactcccagctggaagatgagctggtgtcactgcaaaagaaactcaagggcaccgaagatgaactggacaaatactctgaggctctcaaagatgcccaggagaagctggagctggcagagaaaaaggccaccgatgtaagtgcacgctcacactgcttccctcacctcttgcctgcgtggccactccggggtcaccacagggctggagagcaatgaaggaagtttaccttttcctgctggacacctgcacacagccctgccatggcccagagcattggatgccgcctctgactgctactgcacacattcatttatatttcatccactcctctcttcttctcctttcctttacctccctgggggtggaggtgggtggatgagaggctgggagaatagagcagctgaaattggactctggaggtgaacttcacctccctggtggcagaaaacccttgaggtgtcatcaccaaggtttgtgtagagaatgccaggttttcttcactttctttccttttgccgtttccagtgggtgggaagttctgggtttggtggtgggtctagtcagggttcagagaacctggcctctaaatgaaagaaatgacacagcggtacctttacttagatggctgcacttcatggtggggcacagagacactttgaggcttcctttctcattagtgtaagccttaatccaccccttaagatctgcctgggaagatg

SEQ ID NO: 26477 - DNA, 1029 bp, Artificial sequence
  DNA replication origin
tcgcgctgcagggtgcccgcgcgctcctcagcggcgtccgcctgctcctgcaggctccggatcttcctgcgcaccgcctccagcgagctactccccgccatcgcgccggacggtaggcgggcgggagggctgcagtgggagaggccggctgctgccctgcggacccggctgccgcggctgtcctggctgcccagcgccggtccgccccgcccaggcctctctgtgcgatggcggcgccccctgcggccaggagcagtccggaagtcgcagcctccagggctgcgcagacaaaccgcaggcgggcgcgcgcggctgggaggggcgcgcgccgtggatcccgggactggctgggggcactgcgcatgctcgcggcggcggggagaaaggcgctcccggcgcgctgcgggggtacctggtgagctgggcgctccgggaggccactgcactagggctctggcttccacttctagggcccctccgcggcgcggtggtgacccggggtaacggagctggctgctaagggcaatagcgactcctgctggccgcgggagcgctccgctcccgagtccagattcccatgcccgggagccagagaagctgagcggcgggtctggagccggaatatgccctaaagggcctgatcccaaccgcaagattataacccaagcactacccccattccccaaaacttcacgaagtgaaaaccacccgcgtgtagagcacagtggttagacctcctgttctaaatgcagttttcctaggttgactctggctcctagtttcctgctgcgtgacttcggacacattacctgtcttctctgggcgtcatctgtaaaagtgggaataataatagtactttccccatggggctgctatgagaattatgaaggactgtaaagcgcttagcacaataccttgtacatagttaaaaactcaaatgatagctacgattaagaaatacacaagcattgttttaagagtcaggctgaggcccataatcagctgtgtaatctcaggccagcctccctg

SEQ ID NO: 26478 - DNA, 891 bp, Artificial sequence
  DNA replication origin
gggggcgccgccatcgcacagagaggcctgggcggggcggaccggcgctgggcagccaggacagccgcggcagccgggtccgcagggcagcagccggcctctcccactgcagccctcccgcccgcctaccgtccggcgcgatggcggggagtagctcgctggaggcggtgcgcaggaagatccggagcctgcaggagcaggcggacgccgctgaggagcgcgcgggcaccctgcagcgcgagctggaccacgagaggaagctgagggagaccgtaagggatacacccatcaccccgcagcccccagaggcgcatcctcccggggcagccccgcagggccctcctgcttccccccccgcaggccccggtccctcgtccccacgcctccagggcgcacctggcgcacctgggccagctggcggcgggctctggggaggggcccggcctgttctcctgagcctttgttttccatctcgctgatccaaagtaaacgctcccaggggaaacgggtggtgttgagaaggttctggaaggagcattttcccaggaagggtctgtttctggggtggtggctttcagtcgtgtctgtgcgtccccgggaggtgcactttgcgctgctggcttgctttactctgagagtggagagggaggaggtccttcctcttggagatccgtactttgagaaggggcgccgacaggtcaagtgggagaggcactgtggacttggggcccggggatgctacactccgccgttcccgtcgaccctgtggtttcccggcggcctgtgtctccgaggcggtagacagacattgacagcttgacagcgccgcgttctgctggaagagctaaactatagtgcaaaacccttaacccgtcccttttttcagcagtc

SEQ ID NO: 26479 - DNA, 1139 bp, Artificial sequence
  DNA replication origin
tacagaacaaaatgaaaagtctcccatgtctgcttctttctacacagacacagcaaccatccgatttctcaatcttttccccacctttcccccctttctattccacaaaaccgccattgtcatcatggcccgttctcaatgagctgttgggtacacgttccagacggggtggtggccgggcagaggggctcctcacttcccagtaggggcggccaggcagaggtgcccctcacctccctcccagacgaggcggctggccgggcggggcgctgactccccacctccctcccggacggggcggctggccgggcggggggctgaccccccacctccctcccggacagggtggctgccaggcggggacgctcctcacttcccagacggggcggctgccgggcggagggtctcctcacttctcagacggggcggccgggcagagacgctcctcacctcccagacggggtcacggcagggcagaggcgctcctcacatcccagacggggcggcggggcagaggcgctccccacatctcagacgatgggcggccgggcagagacactcctcacttcctagatgggatggcggccggaaagaggcgctcctcacttcctagatgggatggcgggcgggcagagacgctcctcactttccagactgggcagccaggcagaggggctcctcacatcccagacgatgggcggccaggcagagacgctcctcacttcccagacggggtggcggccaggcagaggctgcaatctcggcactttgggaggccaaggcaggcggctgggaggtggaggttgtagcgagtcgagatcacgccactgcactccagcctgggcaccattgagcactgagtgaaccagactccgtctgcaatcccggcacctcgggaggccgaggctggcggatcactcgcggttaggagctggagaccggcccggccaacacagcgaaacttcgtctccaccaaacaaatgtgaaaaccagtcaggcgtggcggcacgcgcctgcaatcgcaggcactcggcaggctgaggcaggagaatcaggcagggaggttgcagtgagccgagatggcagcagtacagtccagcttcggctcggcatcagagggagaccgtggaaagagaggg

SEQ ID NO: 26480 - DNA, 865 bp, Artificial sequence
  DNA replication origin
aagtgaggagcgcctctttccggccgccatcccatctaggaagtgaggagtgtctctgcccggccgcccatcgtctgagatgtggggagcgcctctgccccgccgccccgtctgggatgtgaggagcgcctctgccctgccgtgaccccgtctgggaggtgaggagcgtctctgcccggccgccccgtctgagaagtgaggagaccctccgcccggcagccgccccgtctgggaagtgaggagcgtccccgcctggcagccaccctgtccgggagggaggtggggggtcagccccccgcccggccagccgccccgtccgggagggaggtggggagtcagcgccccgcccggccagccgcctcgtctgggagggaggtgaggggcacctctgcctggccgcccctactgggaagtgaggagcccctctgcccggccaccaccccgtctggaacgtgtacccaacagctcattgagaacgggccatgatgacaatggcggttttgtggaatagaaaggggggaaaggtggggaaaagattgagaaatcggatggttgctgtgtctgtgtagaaagaagcagacatgggagacttttcattttgttctgtaccaagaaaaattcttctttcttgggatcctgttgatctatgaccttacccccaaccctgtgctctctcaaacatgtgctgtgtccactcacggttaaatggattaagggcggtgcaagatgtgctttgttaaacagatgcttgaaggcagcatgctcgttaagagtcatcaccactccctaatctcaagtacccagggacacaaacactgcggaaggccgcaggttcctctgcctaggaaaaccagagacctttgtt

SEQ ID NO: 26481 - DNA, 979 bp, Artificial sequence
  DNA replication origin
cagcaccgccgacaggggtggatccccggccccctacgccccccgctccagtggccgcaccttgatcctgtgcagcaggtcgcggctgctctcgatggctctggcgaagcacctggagcagggcggcgccggggtctgcggagaccacggggcgagggactgctcctgtggcggctcggccagaggcgacgcctcagggtcgggggccgcgggggactgcgccggggccgcgcccctcagcccacctgccagcttcaccccgagcgccagccccagccccagcccgaggcccccgacccagccgtggccgagaggcggcagcccggcgcgctgatggaccccgcgtcgtccgcagcttgaggccaagcccccgggggcggcagcccgggcagtcactgctgacatgagccggtacatggcgtctctgcacagccggccgccaccaaactcacgcacaccctgccagccgcggcgcggggcggagggaagggcagggggcgggacgggggtggggaccgcggtcagaccctagcagtcgacgcctgactacccgagcgccgatcgcatcgagcccttcttcctctcccttttcttgtctcttccttgtttttcctttctgtctctctttcctttttttcctttgcttaccctcagatcaagcgtcacctcccagaagccttcctagttcccgtcccatgggagttctcgcccttaccatcttgcccctcagtgtgcacacttctttaacaacagttaacactttgtatcatttaactacttgtcagattccttaccagagtgggacttctttggggagcctagacttagttttggatcctcaacttctggaacagcgcagggcacacagtagacgctcagcaggcatctcctttccctttagagatgcctttctcctttcctttccctttctcctttccccctttagaacgcgcttcttttcactctcttgccatctccc

SEQ ID NO: 26482 - DNA, 894 bp, Artificial sequence
  DNA replication origin
gggctcccaagcgccccccgccctttccccgtcccctagtacccgccccccaattctctacccggtcccgggccgcggcccctccctcaccgatggtggagatgaaggtggtgttgaaggcgtcctctgagaagcggaacaggaggcaggtcttgcctacccccgagtcgccgatcagcaggagcttgaagagataatcgtacgtcttcgccatcttctcgctccggccctctgaccggggagccagaggaggcggtggagagaggcggggagggggccgcgggcgagggggcgtgcccgccaatccgccgctgctcgccccgccccacgccccgcccctcctctcggagaaggcctgcgcgccccgccccgtgcggccaatcggcgagggcttcgtcatcaccgcccgcgccccgggacttcatgggacttgtagttcctccggggagcctcgggcgtgccccgcgaggactgtccaggcggctccagcggataaaagacctgctatgggcggggtgacagggtggaggcgtttccacccgagctgggaagggaggccccgtttcgtactctgctggtcgagccgcgggaacttaactttgttatttctttgtgtgcagacgccttccaaatccaggacctcagaatcagagccccgtagttcccgcatctcttccgccgagacctggagcagagatgctttctttccttggcgctgctgtggcgcagcctacgggttatctgcagagggcattatccagcttctccccgaggccatgcccagcaccactataaccccctcccgcagcccctcagtcacagagctgagaaagaatggttaccatgctaactcgaacctcactcgtgcccccttcttcacgccacacagaccag

SEQ ID NO: 26483 - DNA, 1852 bp, Artificial sequence
  DNA replication origin
gccgcctggacagtcctcgcggggcacgcccgaggctccccggaggaactacaagtcccatgaagtcccggggcgcgggcggtgatgacgaagccctcgccgattggccgcacggggcggggcgcgcaggccttctccgagaggaggggcggggcgtggggcggggcgagcagcggcggattggcgggcacgccccctcgcccgcggccccctccccgcctctctccaccgcctcctctggctccccggtcagagggccggagcgagaagatggcgaagacgtacgattatctcttcaagctcctgctgatcggcgactcgggggtaggcaagacctgcctcctgttccgcttctcagaggacgccttcaacaccaccttcatctccaccatcggtgagggaggggccgcggcccgggaccgggtagagaattggggggcgggtactaggggacggggaaagggcggggggcgcttgggagcccgggagaggagaccccggggactgcaaggtggcgggggcactgagaggggcgagggcgtgagggagaggggcgagggcgtgagggagagaggcgagcgggaacgtgaggctaagggcgaagggggaacttgggggcaaaggaacgggaaggggaacagaggaacaaggactaggggtattgggggaacgagagggttcggagactgacagggaggggtctttgagggacaaaatgtgttggggggaagactcaggaaatctcatgtagagagaaggggatagtggacgtgccaatgattaaaagacaggagaggaaggaaatgtgaagggggaaatgagggatgggggcaatgagagggatgtgaagtaaagggacagaggacacaagggacagagaggtgagaaccaggcaactggaagggaattcaggggaatgagcggtcaggaggtgaggaagaaggggacggctggccacaggaggtctggactgagatgtcgtaggaggggacagaagaaaattgtaggtggaagaagagttcaagggatcagagggcagaatgaggatacttgatggagaaagtaaagggatctgggtgtgagacagaaaggaaaagaggaagcaacatcatagtaaagggaggttgagcagagaagacagaggagatggaaaagagaggaaatggaaagtagtggggcgcaagacttgctatagtaactgattaccattttctcttcacttcctttggatcaagtgcaggagaaagcaaaatgtgactaatgatggaataatgtctatagagcgttaatttgttctgtgagtgttaatggatgttaagggaattggtgacttttggaaatgatgtggtcaggaaaatatggttcacctctttactaccatctcctgagaagcaagacttctcagtattttaaatccttcggtttgaatgtttaacagcttctcagccaaggaaatgaacttacattctacctgcctccctgtatattttgctttggttctaattattgttaagtgaatcacaacatgtgatatacctctcagttacttccaattgaatcaagagtttttctgatcctggctgggagctgtcctttctacttttgtactggaagacactgtgttcaggtaataagatctcttaacttatcataaactgaagaccaagtcaaagctggttttaagctgttttagaagtgaccaccttaacatcatttctcctgttaaatagttgcaggttaattaagtaccttaagaatacctcagcttttggttgtgttggtgatgtttctggcctctaatagtggcttatttagtcatctttcgtatggttcttacagcatatttcaccat

SEQ ID NO: 26484 - DNA, 928 bp, Artificial sequence
  DNA replication origin
cgggagtgaggttgcatgtgtatatatatttgtgtgtgtgtatgtgtgtgtgtgtgtacatatatatggttagggttaaggtacatatacacagtagagggtgtgagagaaagcaagtgtgcaaaatgttaacaactggtgattctaggtgatggctggaagtgagggttgaaggagaggagaggaacgagtcagttgtgatcgccaggcatttggtgtggtggctggtattaccagctgacatagagggttggggggagctttggagggaggaagggggaggaaaagatggtgagtttggttatttttaaaaatgatttgctagcctgagtccccttccagccacatctggttttaggatcccatggattatccaaagggggtagccagcaggcaggtggtctggagctcagaggaaaactgggcaggggcagagctggtgttgaagccatgggaggggacagcttcaccccaggggagtgtgtctgtaagaaggagaaggggccaacaacaaaaccaccgtgacagctgacattgaggggcaagtggccacagagatctgagaaagggcagggaaacgggaggacaattcaacaaagcagtgtccccagaaacagagggttcagaaatcaggagtggggggttagtgccaccagggtcaagggctgcatgaagtgcgagggccgaagagtctgtgtggactcagtgggacatgggcgtggaagagcagggaggtctgaatgggaagtaaagacacagatgcgggtatgcacacagttctttgaagatgctcggccgaggagacaagagtaatcaggtcaggggcaaaaaggggtactcgcctgaggaagtaaacattggatgtccacagctcagagttagttcaaggtcacattcaaattagataccccgatttcccccggcctgc

SEQ ID NO: 26485 - DNA, 963 bp, Artificial sequence
  DNA replication origin
cccgcccgtgtgctgcggagcaggaggtggtgctcctcagggaggctcgggccctgcggggttgggagaaggacaggaaggaaggctcgggcatggcgggctgcaggtcccaagccttgctccgccgggaggcagctgaggcccagcgagaattccagcgcagcgccggcaggccggcactgctgggggacccagcgcaccctccacagctgctggcccgggtgctaagccccttactgcccagggccagcagcaccggccggccgctcccaatgcacggcctgccaagcccacgcccgcccgccgagcccacgcccacccggaacacccgctggccagcgatcgccgcctgcagcagcccagttccggtccctgcctctccctccacacctccccacaagcagagggagctggctccggcctcggccagcccagagaggggctccctcagtgcagaggtgggctgaagggctcctcaagcgtagctagagtgggcgctgaggccgaggaggtgccaagagcgagcgagggctgccagcacgctgtcacctctcaataggaccagtctggccaaggagcagggtgaggggcccaggtgcgggatgggaaaggcaggtgagctgagtggatctgtggtgtgagtagactgcatttggtacacctgtcacttttcttgtgctcatgcaagctctgcttcccaggacatctaacaccaggcatattcacattcatcgaataccaataggggtacagagatgaaggaagcaggcatgaggtctatggtttcatgcactaaaaaatattgtatttcagaaggatggggtgtttttgctcacatcattgtccagtgcaggtcagtggttctcccgagtggctctcctccatgtggtgactcagggaccccggctgtcttcatcttctgaaaccatcatctataccatctcagtcactgtgaaaggggca

SEQ ID NO: 26486 - DNA, 1750 bp, Artificial sequence
  DNA replication origin
acgacggggagccgttggggaacttggctgagtccggagcaatgcagacgctggagctcaggtgtggacactccatggccacgaggagggcagctgggaggactgcggctccaggacccggcgaggtgggggcggaggaactccggaggctccgtctggtgtcgcttctagccgggcgctcggccgacggcggctgcgtctcgagcccttgcgtcaaagaaagcacgggcttccggacgccgggttttctcgcccgccgtctcccggcgccccgctccgtagaacgtgtaactccgagatccgggttctgcagccacccctagactggaggcttccgcctttccaggccggcccctccccgccccgcccccgggtccgcccccgcccagcccgcggggtggggtcccggcgagctccagctggtggcgcagagtccggctgtgttccgaagtgactttcctagtcacgccgcttccccggccccgggaagggtggggcgccgagcagggcaccccgggccgtccgcggcgtttcctgcggtgggcggaggatactgaacctatgtggtgcggactactcggtggcttcgtggtaaaaatccggccgctccgcaaagtgtaaagaagaactttaaaacctctcgggcagacaggcaccgtggccctcattttatacacgaagaaacaagctggggaggccaagggcctggccccgggggaggcgggcagcgggtttcatgggtgccagggcagtcccgcccgacttagcgttaggctccttgcggcaggtgcgatccgtagccctttctaggttctgaacacgtggcgttagccagccacctagatgctgcgtgggtgggcccgcaggggcgcccatgaacccacgttcaaatcctgtcactgtgactcaccatctgcgttacctccagcacatcgtaggactttcaagccaggaagttcaagtgagataaacgtagcctgggattgctgggcaagctaaactccccattaccaggcgataagaagggaagggatctagcatttgttagatacctaaggtctcccagccaggcacttcccataccgcatttaagcctcgcaacaccctaccagctgttaccatcccctttttaccgcagggggaaaccgagtctgtaacttgttgatctgtatggagattggatccctgaccctctgacctctttttagtgagggattagagaagagggcaagcctcaaggggccgcttgggccggcataccctggatcgagcctgcgatctcactggggcacttgaggacgtccggggctattacaaatattgcttccaagttggggctccttgtaaaacccggcgaaggagcctcggggccagaaggcgagcaggaggagggggaagactgatgtggcaatcctgcggccagagcgagaggaggaaggaaggtcaggaaatgattaaccgggccgggcagtggttagagccgggcacctccccgcaatgcagtcctagagcagccagggacgccccgtcaatcacttcttactcctccctacctcccacgccacaagtcggcctcttccgcatagacctctgcctaatggtatccacccaccgggggcacctctgctcatcctttccccagaagtatttctgggtcctcaaagatctgtccttttccaagtggtatttgctgttagagcaagcctcggcctgggatttttatggcagtgatgcgttgtggaaagtgcgt

SEQ ID NO: 26487 - DNA, 1130 bp, Artificial sequence
  DNA replication origin
ccgcaggcggccggcgcgcggactcggggaggggcgagggcgagccgggcccggcgggctggggagggtacgcgatgaggcgggcgcgtgcgggagcggcggcggctcctttgtttcccgaggcccgacggccgggccagcgaaggagagggccgcgaggggcgggagtccgcggaggcctcgagcgcgtgggggcagcggcaggcggggaccctggccagctgcgtgcgcccttgccccgccctgccgtggccgggggctgtgcccgtccgtgttgcggggtcgcctgtggggcgggtgtccggcccccgaggggcggccgcacgtgtggcggggcccgcgccgcgcttctccgcagacagggcgggaagagcgccgctctccgggcgcagctttgtctgggctgcggggcgcgcggggctcctctcctccgccgaacccggcccgggtttcctttcccttctccgcaggctcgggcacctcgaaaccccgagaggcgctgggagctcgggcggcggaggtcggggtctttcatccgtcagggatggtgaagtttgaaaacaggctgcgggctgagaagctcggaggctgagccaacagctgctttggaggggactgctcgagtttgtttttcagaccttttgggttgtccgaaaatgcgttgggattcccagttcctgtgttgtgaaacacttattagatttatataaggcttttgagtagcttaagcgttttaactcctgctggcccccttggaagccccagtgccctctcattgtctgctctaagcgacttcttaggatcgcaccggccacacggctttgcttacttcctggtagggccctggtgccaccgctagtctttgtttattagctttgagatggtcactggtatcttgggttatattaatagcgtacaattcgaattgtgcacttcagaaatctgaagttcatttgaagaaatatagaaaaacggcaatggtatgatttagctgtgacatgtctcattgtgggccggagctgggaagatagtttagagaatgccttagcacttttgacagcttactacttaaatagtgattatgttcttggaaacaacatcggtaggtccacaaagaaaaatgtactctg

SEQ ID NO: 26488 - DNA, 1419 bp, Artificial sequence
  DNA replication origin
cttgcgtttatcctatgtataaaatcgtaacgtgaggtaggctttcttatccccactgtgcagacggggaaaatgaggctcagaatatgcggtggtggtctgaaggtggaagagctgggttcgaagccaggacggtctggggctgcgctccttccccgggggcagcggcggggcggcgtctagcgctgcagcagcttgccgagggccgcggcgggcgcgcgcgggcgcgggggctggtcgggcagcatggcggcgctgtgctctgcccgcagggccaggcgcgggcacgcggcgcgcaggcggcgcaggccggccgcgctcacgttgcggcagaagtccacgtgcaatgtctgcagcgcgcgcccgtccgccgccacggcagccaacgtgcggttggtgacgcgcgcgcagttctccaggcgcagtgcgcgcaggcgtgggcagcagcgcagcaggcgcgccaggcagtcgtcggtaacgtggccgcagcccgagagcgtgacggacgccaggttggggcacctgtgaggagagtgcggtgacccggggctcactggcttgttaaagctacccaaccgccccatgggaccgagtggactcatttaccgaggaggactcgggccctgcgaggtgaagacacttggctgcgatgacactgcagggttccaagtcggctttctggccggcccattttccctcctctttctgcccctgcaccccaccgtaccttcatctgcgtgggttcttggctcgtagccttgggagcccctagtgggaagccccgaccccggcccagcagagtcctggggcggctgtggacagagggaatgccggttccaggagccacaacccttgactctttgtttcgctctggatgtgctgccttgcaggggagcggtgcttggcgattgctccagtctagcttcaagctgaggcccctgaatgtcccggcgggacgtgagtgggaagagggatttgtttccttggaggtggcctagtgacaggcccatcccaaccctcaaggcggtgggggcacgcgttagcattgagtccgggttcagcttagtagactagagctgttcctgcatcccctgggccaccagcctggaaaagggtagggttcggaggcagctagaggcaagccctgagcaggtacagtcacggacacccacccaggtcgcttggccagaaagcttgggggaccctctgctgcagcctcaccagcccctcccagcaaagaaaagatcttgagccaagttagacttggtttatcgccgtgtcagtcactcacggagccttcatttcctctgcgtggggggaataatgtctaccactggggttgtgaggagcctgcaacggggccttccacaggcagtcctaacccgctttccctggaaacaaacgggaccagcctgcttc

SEQ ID NO: 26489 - DNA, 1607 bp, Artificial sequence
  DNA replication origin
ggagtcggccgccgcccgcggaccgagccccagccggggcagaggagctggtcagcagataaaggaatgaagcagaaagagacgcgaccacagcggggccggggcacagacgttgtaagccgctggaggggcgggtctctcggccctctccgcgggcgcctcggcttctacgctgctccgaggcgcccgggcggcaggaggcctctagagccggggacccgggggatccgcggcgcgccaggagggctcccccagctcgcctgccgcccacccgggaccccagcagccccgctcggctgcagtcccgaaacggccccggccggccctgcgcggccggcaaagcacacacgcgcgcgcgcacacacacacacacacacacacacacacacacacacaggaccaggaggacggtagatgatgcgttaccgtacgtggctctggagctggcggggtggggcgcggctccggcgacccgagcccggctccgcagaggctgcggcggtcgcgtcctttatttttgctgcagcagcagcgacttgtcaaagggaaagacgtaagaggcggcggcagcagcggcggcgtcaggcgagtctcacgagatttgggcggaactctcgcgcagccgggagccctcgccccgcccaacaggcccagcgcgggaggtgaaaggggaaccgagaggaaggcggctgaggtggagttgggggttgagcgaaaaggggaaagggatttgggagcgaggggagccaagctaggtgctggggacactttgctaccgcgcggccctcacccttcagccgtcgcggaatccgggcagccccgaccgcctgcggggacctgactccacagatgaagcacaattgggggcgtttcacaaagggtggtgaggagtggggggccatgcagtgcgcccccttttcctcgtggtgggcagggaagaccccgccgccaggcgaagggacacgtgttacggccggcggcagggccagggcctcacccctttatctccgcctcgcacccggcgccccacgctctttatctctcatcgcagcggccccggccctccggccggctaagttcaatcacataaaagcgtttcacttgacctactcttccaccttgttcatgtctttgcgccttatgggactgccagaaccctgcagatgccagggcctggctcctcggttttcttttctgcttgggaacacagtagtgtcctttgggtgacttacatccttgatcatgacctcgacctccacgtgaaaccccatgaggggaaggacacagactggctcagtcctcaccatatctccagcgcctaacataggtccaagtggacattaaattgttgagtgaataccccatctccatcttcctccttctgtacctggttttactcctttccagccaccttcatggtgtctttccttccagatattctaacgagcatcaattaaactgaccgatgacttggggacaaaaaatagagttggcctctgcgttccagaagtttgcaatccaattggaggcgtaggagaagcacacaaacatacaagccatgaatgtgtcactaatgtaagaaattacggtatagacagacgagggag

SEQ ID NO: 26490 - DNA, 2094 bp, Artificial sequence
  DNA replication origin
ggactgtccggagggggctccagcagggggcgccccgagccccgtcccgggcagccgggcgcgcctccagccggcgcctgggacggggctggccgctccgccccctcggctcctaggctgctcggcgggcgggtgccgggcgctctgggaggagaggactgcagggccgagcccagcgcaccccgccgcgtcccccgttcccgccgcgcccgccgcgcccgccgcgcccgccgcgcccgccgctcccgccgcgcctgccgcggccgcgaccgcggcagctcagcctcccgccgtgagtagcacccgtctgcgggctcgatgggcgggacggggcgcgcggcctgacggcagcagcgcccgggtctggggctggcggggcgaagagatccggggcactcgctcgcagatcccgggcccgccgccccaatgcctgacgccgtggcccggggcattgtggccggcacccgagcgcgggagctgcccgccgctgccctggggcgccctccggagcctggcactttgacctgggagacagggtagaggcggcgggcagagccaagcacccagcagggagatgggagacagacgtccatcgagttaggccccctggaacgggcagagcacgcccggctcccggccaagtcttctcagcttgggctgactctctcacctcttgctcccgcctggcacaaggatgtgatgcgaggagggtgctcagatgtctgagcttcctctggggctgaatgaagctggggtccccgccgtcaggcgccccggcctggggtagagctaggatgggcgtgggggcggccagcaggtgtgctgcaggttggggtggaacggcttggaagggcgttgccaacagttgactaggactctgggctaggcattttggaggtcccaaggcttgcataggtctggctaaccctcaccgtaactctgcacggtggaaattggtattcttactttacaaaagagaaaacaaggtccagagaggtgagcctcgttgaggccgtgcaggtaatggtaaggcagtggtgcacactggaggagagggcaccatagctggctgcctcgggggcaagcgggcaggtgcagggacagcgcctgacatcttgtatcctggaatcctgtggagggcagccactctggtttctgacactgcgactcccaactgcctctgtggaagatattcctgggagagtcctgttgacctaagaggccgtggtgccttggcctcttcacagctaacttcacagccctgtccttccccaaaccgctcatctcccaagatgttttttgagcaccctcaagtggcaccactgatgattcagcaccttcagaggagacttgggcagaggggtcaggggtgtgtggatgtggctggaggtctgctcctctggggtaagttcctggctggcaggaatgagacccgcactgaccctgcccacctccttgaggcctcccgatttgttagctgtggggtgaacaagcaggcttcccaagggagctggatctttgccagagagaccaagtttttcttgtgtcaactcaggcaggtggctgaccttctgtgggccccagcttcctcattggagactgtgatgggtcaaagcctggaatgtagagaggagctctgtaatgccggagccccatcccttctgttggcagcctctccagagcctgagtgtgatgattcctaatgggggtgtgtgtaatgagacggtcgtgtgtgttttgcccaaccattgcctgccctcttgctgtggtcccgtttcactcacttgcacttggtgaggtgggatgaggaactgagagagttcactttgcagagtgagctgggccagtggtggagagggcttcttgagtgttgagagtttcctatgaggtgatcttccagccctagacacctcctcctagcttgtccctcaggaggccactgactttgccaaccctggtgacatcttggaggagttggggtggctatcaacagaagaagccctgggaagaggagcgggatgggtcacctgtatgatgctcagtgagtcccttcccctttctggatctcagcttcctcttgtaaaaacaagtggg

SEQ ID NO: 26491 - DNA, 1897 bp, Artificial sequence
  DNA replication origin
cgtcaggcattggggcggcgggcccgggatctgcgagcgagtgccccggatctcttcgccccgccagccccagacccgggcgctgctgccgtcaggccgcgcgccccgtcccgcccatcgagcccgcagacgggtgctactcacggcgggaggctgagctgccgcggtcgcggccgcggcaggcgcggcgggagcggcgggcgcggcgggcgcggcgggcgcggcgggcgcggcgggaacgggggacgcggcggggtgcgctgggctcggccctgcagtcctctcctcccagagcgcccggcacccgcccgccgagcagcctaggagccgagggggcggagcggccagccccgtcccaggcgccggctggaggcgcgcccggctgcccgggacggggctcggggcgccccctgctggagccccctccggacagtcccggggcgagagcccagcttcccggccgggtaggggacacctcagggctcccagactcccgggagagcggggagagtcggtagcaagaccctctgcgcgtccctaccggctctaccgcgcacatgctgcgtggccttgggcaagtcggctaccctcccccggccttatctggaaatcgatttgaatgagcttatacgtatgacatggtctggcacaatcctcagaaaatggtacttgtgtgctcctctccccaccatacacaccgtgagcgaggaagccccactgaggaataggccgtctcctccctcccagccagagcgctccctacaccgcagactctcctggaaacctcaagcccacagcgtacagcaaggtgggggctgcgatgagaagggccgctctgctcctcactgcccccgacccagcctgagagcggcctgccctcgtttgccctttgtcctggcacggttgctgagtgaagcccccctctcaccatcacgccttctctaatagaggacttgggaatgggttcctctctctgccctctgccaaaaaatccctgaggaaaaaaggaatgagagtgagggggtgaagggaggaaggaagggaaaacagaacttaagccaagttcatttgtcttatttcaaaacaagaggctgtttagaggaagcaaatgaggacccctccaacccctggaatttccatccctaagtcacccatggggctcctcaaaagggccttagattcagagtcctaccaccaggttcaaagccctgccctgccactccgcatgtgtgttcttgggcatggctctttcttcatcagtaaagtgggagaaacgcaccttccggtagctcctaatgaagctatggtggggctgagatgagatggagtgtgtaagatgcacctagaggacctctaccagtgtgagcacacacacacccttcagccttttggacattgggacaaatacagatggaccccaccccccagctgagcagtgcctccgggtccaggacatcctcggcaaagagttccttgtttataaacttcacaataattcagaacagtgcagccagcgagcctcctctcctaagagcagcatgatatatagagtaatatccaagactagaggtggtttctgatgtcaacggacctaagggaatgacacccactggtgaagtttcaccaacatgagaagtcccccaccaaactatccctaaacacctcttcctccatttccatttacctatcactggtgacaaaccattaccagccttggtggcacaggacaacagtttcactatgttcatgcattctgagggacagaagttcagacagcacagtgtgtatggcttatttctgctctgcagtgtctgggatttcaactgggaacacctgaatagctgggggctgaaatcatctggagatttctccattctcatacccagtacctgggctg

SEQ ID NO: 26492 - DNA, 1186 bp, Artificial sequence
  DNA replication origin
tgggttgtttacagctttgtggattgcatagagagagtgggttttattctaagtgcagtgggaaacattggaaggttttaagcacatgccttgataacagtttgtgctgcagggtagagaatggacgttctattggggatgaaggcaggaaaaaatggagactcacagacagaggggcagacagtcattaggatgaggaccaagaagtctgaggatcccaggagaggcctccctggacagtgggagttggggaggccctgtaggccagggaaagctgggtccctgaatgatggggccgtagggaggaaatgaaagcacagcacttctcctcactctgggctgcttttcttctaggggaccccactagaatctgggaagtttcagcttcctgattctgtggtccttgtgtgatgcaatttggaaaaagagaatgtgggacatgatattggtgagacctgtttgccccattttggggtcgtcatctcagcccttctctgggggcagggctggggatggaggttttttgctccagctcagaggcgtctctgcagaagcaggggaggggtgagtcccctcaaccccagccccgaagacaggcactctgcttcctcctgcccaccccaagacctcccactacgtatgagctttggaaggcagggcctcgcctctctgcatgtcacggggcctttgtgggggaagtcagtggagtagaggacctgccatggtgctgctgatagcagctctccgacagctgaagggtgcagggctgagaggtgggagcagaggtcctttccagcacatggcctgagagagttctggatcaaaatcctgccacatatccaggaagaacctgcccggaggggtggacaagagcaacccggtgccaccccccaaagtctctcttcccatccactgccctgtgcccacttatcctagtcatccaggagaagcccacagtcaagctgctgctcaatgcttctgttaagggcctaacatgaatcatctcacttttttttttttttaagacagagtcttgctgttgcccagtctggagtgcaatggtttgatctcggctcactgcaacctccgcctctcaggttcaagtgattctcccgcctcagcctcctgagtagctgggattacaggcatgtgccaccacacctggttgatttttgtatttttagta

SEQ ID NO: 26493 - DNA, 1678 bp, Artificial sequence
  DNA replication origin
ccgcttggatttgccagcctcgcggaccatggttcgagctcttgagggaccccagggctccgaggggcaggtccgccagccggttctcccaggtgtgcgggagcggagagtccccgggcagccgcggcgccgcaaggccgctttgtgcctttgagagcgggagggtgggcacgtcgccaggcgcaggtgctgcggcgtcctcccgcggggcctcacgcgcagacccgctgcccgcccgcgccgccaggtgttccgagtggaggtgctgtgcagcgggcgcagacacacggtgccaaggcgctacagcgagttccacgcgctgcacaagcgggtgaggcggcgccgacctcccaccggccccggcccagcctctgtccagcccccgcccaggccctgtgaggcgggcgggcgagccccagcctccgccacccccattactgcctcagtccctgcgcagccggtcagcccccgggcctctgtgggtgggttggggccttcctcgccctcggccggtccaccactcaccagggtctgtcccagtagagcccgaaggcgggggcgcgggagggcttctggctggggcgaagagggcttgagggctcagtcgggatgctgtgatcgcacgcggtaaacctccagtagatcaagaagctgtacaaagtgcccgacttcccctcgaaacgcctgcccaactggaggaccagagggttggaacagcgccggcagggcttggaggcttacatccaggtatgcgagagcacagttggttgccccccggccttctgtgccaggggtgtggcccagacagagaggtgtgggggcatggcagggagggaacccacaacttggggatgttattcaccacctcaagcatcaattttctgagtctaatataggtccaaacacccccctctggcttgttgaaaggactgaaagaggtaacggacacaggtagtcccagctccatgaaacccaggtcctgtcccctccatggtgaggtcctgtgctgccctcctgatggcatgtagggtgagggtccttcccccaacagcaaagctatgccgcgtcatggggtacaacctgtgcacacagcgcccagcgcccagaagggccctgagcctggttcaacgctctgctgtcattgtcgtgaaattctttttttggaacaaagagccctgcattttcactggcactgcgctatgcaaattagtagctgggtctgattgcaggtctcctctgtcctctccagggcatcctgtacctgaaccaggaggtgcccaaggagttactggaattcctgagacttcggcacttccccacagaccccaaggctagcaactgggggtaaggggggccgatggcgggggccaggggctgtcagcagtgagcaggtgaggaaaggtgttggagggcaagccctttcttttcacatctgccaggatccagcatgaccgccctcaccagctctcttgacctgggtggaggggcttttttttggacagacttggttacccccgccacctccggaactggggcttgttacaaatagaagcagtggtcccctgggaggtgcagttctgggctctggtgtctccaccccttcctcacgctcccccggcatccccaggcagcttacagtgtttctcttctcttcagcaccctgagggagttcctgcct

SEQ ID NO: 26494 - DNA, 1199 bp, Artificial sequence
  DNA replication origin
tgggggtgggttgctttgaaggcacttccgcttagcaaccccacgcggttgctaaggagggggcagccgtggggataacccggaagtgatggtgtcagtttaacgctgcctgcccaaagtttgtcctattaggcccgccagggtactctgcgactccgggacgagggcggggccgcgctagtggttccggttcggctccagccgcccctcggctcctcgccttccccctcccgtccgccttctcccctccctcccgctcctgggaaagagagaaaccaccgctgcgggtgggtagagaagcacttggcgcctcggggaggggaccgcgcccgcctcatttgcgccttgcagcactgctggaccaggtatctgcccggcttcgtcggggttctgtaggctgaagtctgagggggtgtgtgtgtgtctgagggggttggtggggggccctttcctgggcgtgggtgggggacgccgtgatcccgggtggggcgcaggctggcgtttgtgtctgtggagggttgcgggggcggaatggaggggctgagggacacagcgggtggagagtttcggttagcggggtagaggtaggcggaggaggcgccccttccgagaaactgactctagccggtgtggaccgggagtttgccacctggagggcttactctgaaagggggagcatcccccgggagccaaaaggagggcacagatctcgtcagggtgactggggctatcccgtgcttccattgccctctttccctacccaccccgctgggacagagctggacttcgaaggttgtgggggttctgagtcgactgggtaccgcggggagccgcccttggcggagcttagggcacaagagtgggtaatgagactttcctctacccaacttccgtacgcttcccccacttcttcctttactgtttcctcgcccccacgtcctacaggagcaatgtcccccaagtgggcaggcatcacaatgtaaaagagagtggaactgggtttgttgcccctaaatgacacttaagatgtttggaaagtgcctgaatgacatattcaaccaagtctcccagctcgatattaattccggtataaattaccttagaaaagtggaattctgaaaagcatttaacaataggctagtccaggtgtagtcttgtgtagtagatgtacgtgtttatttaaaaagaatggactgggg

SEQ ID NO: 26495 - DNA, 1623 bp, Artificial sequence
  DNA replication origin
cagtccagtgtccgcgtcttccgggtgactctggttgtcccggatcgcggcggcggcggcggtggcggcggctgagggacccgcggccccggacacagcggcaccggccgggcggggcggagaggcgcggggagggggcagagagccagagccggagccggagccggagccggggtggggtgggggggaggggccgcgggaacggatggcggcctgggccccgtagcagcggcggctctacggcccggggccccgggcgggcggaggtggcggctcccgggaccggccgcgcggtgagtccggagctttgtgtggagccgggactgggggaggaaagaggcggcggcaccgatggggcgcggggctgaggggatctgatgggggccgggggcggcggcgctgcctgacggaggaagtgggggttgggggggctggggcggagcgaggggaaggtgtgtagggggggtcgttgcgtgggtgggggagggggcgtcgaggggcgcggggtgaagttcaaagcgtggccacggccggttcaggctgagggtaggggtgcccgggaggggattagggtctggctaggttatgggagcaggccagagagtttctgaggcgagtctgggtatgttgagggcgctcggggcgactggggccagtcagggagttggcgggggagggggggcgggggcggtggtggttgttcagagcatagggtcggaagcaggacgtgtgcgtgacctaggagtggggagcaaggtggctgggatcctgcagtaagtaggttgtgggtgtgtgcccctaacagtcttcaggtcacatttactcctgtccttttcttcaagatggagggatccctgggcctggacctcaactgctatccttgtacccccgggagggtttgtgaccctatcctgtttggaaaacccatgctgccctcttttccctttatgtgtaattacggttggatcatctctgtgctttgctcagattctccttcctccctctggggttgaggaggaggagacacatctgaccaattaatgtgtgtttgtgaaacaggcagcagcaaacagtcatttcagcttcgaggaattaggctcacacagggtggagagatcagagcccttcagggggaatatttctgaacaaatcacggatgattaaattctctaagaaacagctccctacctaaatgagagtgagaaagatagggaagaaagcctgtctgtttccagccatgtgtccagagcctaaggggttgaggagagtccccaagcccctacaggcctcccttttctgtattaggctttgctctgcagccttgagttaatttcacccctgctgctttgtcttgggggagggagtgctggtttaggctgttgtgaggagatgactgttctgctgccacacacaatagtcgtgtcattttatcgggagcgctaccccagggctgagaactgctgcagcagagataaaccggtccctctcacccgcctattgtgtacacagtgaaggtcataggttcaagtcttgtctgagagctttggatatgctccatctcccaggctcctcagtgccattttcttccttttccagactggggcttgccattggaggaggcca

SEQ ID NO: 26496 - DNA, 1730 bp, Artificial sequence
  DNA replication origin
gttgagagactatttcagtaagaagagtgcccaagtttgagaggaatcctgagtggcagttagagggctctatgcaaagaaaagcaataaagaaggcaatgcatttgagaggaactagtctaattctgaatagaacatggcccaatttaaggaagatttacagggaatggatctgcttgcaaaataatgaggcccaagtgagaggcagaggccataaggccaaatctggggacaaaaggtctggtgtggggaactaatgagcttcagacacggtttggacaggacagcaacaagtttggggaaaaaatgaggaagagaattaggtccaaattgtaaatgaaagccattctgatgtataaggagcaactaggattaaaaattccggggaattaggaaattgtggaacagtttcagagaacagaggcagaaatatgggatatattaaaatttgagggagagataggtgagaagggttgtcttggagaaagagaggcatgtagagaaaggaaaattgaggaactatctgcagggggaaggatataccatgcaagtttggaaaaccagggtgctcggtctgagaaagatgtgcagcctttctctaattaatgggggaagactagggtcgggttttgagggaggaaattgcaaagatctagtgtccagaatatagagcttggtttgaaggcactggaggtacagggggaaggttcactggaagcgagatggctgggtcctgtgatctaatgatccaaagacgggattcagttaagaggggaaggagaaggatgagttccagctgagaaaagatgtttagagggtaagaatgtttccaagagtgttgggggtataccattggggcaacaggatggagcacaagaatcaaacctggtgtttgataaataaaaggaatggcgctgggagactgggaaaatggggcctaactgggagaggggtgtggagaggggaaggtgggggaaagatgaagctgaagtatgggaccaggaggaagaggctggacatctgtgtaaggactgctaggcctgaagagaatggggggagggtgatgagtgggggtaaactgagaactgaaggatggaggttgactttgcggggggcagtgatatgagaagagtctgggtggggggtgcagttttcatcagggagggaattcaaagggaagggtgaagtgacttataaggggagtaagaaagatttgaggaagacaggaaacaatttggggaatctggatgccggggaaagcccagtttggggaatggggcacaattcggtggggctgaaagaaaaaaggggacttgcttggaaggttgggttccggcttttgggggctttaggggaggagaaggcccggatgagggggatgggcccggctgaagagggggctaaaggacagaagaaggcccagttgcagggctgaggaccggactagggtggctgaagtggtgaacggacctggctgggggcggatggccccgctgcggggggcgggggccggctaggggtacgtgagaggccctctggagcagatgagggaggatgggggcggggagcctgggccgggccgttacctgtcctgggtgtttatcatcctcggcggctctgctcagggtgggaggaggcggcgcagggagtggatagatggatgagtgggtgggtgtggggtcacgcgcgcggggtcgatctctgcgggctaagtccctgtcaggccgcgg

SEQ ID NO: 26497 - DNA, 1317 bp, Artificial sequence
  DNA replication origin
ggatgggcccggctgaagagggggctaaaggacagaagaaggcccagttgcagggctgaggaccggactagggtggctgaagtggtgaacggacctggctgggggcggatggccccgctgcggggggcgggggccggctaggggtacgtgagaggccctctggagcagatgagggaggatgggggcggggagcctgggccgggccgttacctgtcctgggtgtttatcatcctcggcggctctgctcagggtgggaggaggcggcgcagggagtggatagatggatgagtgggtgggtgtggggtcacgcgcgcggggtcgatctctgcgggctaagtccctgtcaggccgcgggccgagcgcctccttttgcctcagcgagcgcctgcctccaactgaccctccccggccgccaccgccgccgccgccgccgccgccccgcccccgagtgcctcatctgcatagccccaccccagcgccgcgcggtgtcctgggaaactggggcccacaacaaagggcaaagcaccgccccgcctccgcgcaggcgcaccacggaccgatcgtgggggtagggctagggggtccgaacgaagggcaggctgtgcaggaggccatgaccaaggcggtgggtctgcccgcagctgcggcagcgcggcccagaagatgcgttgtgtttccggtagttttctgtgaggattgactcaacctggtcctcatccctattccttgttggcgtggggccgaacagggctgtgccatttgggaggatattaaaacaaaatcagaaatcttaagagaactacacacatattagcaccattcctagtctgagtccaggcccacagatctgttatctcagctcataatgcagatcaataacctcagctgtcagggtagatcaacaatctcagcatctcgcacacatctcatgtcaatcgtcaaggctgctccaagcactggcttaggtcatctgaagccagaactctgtagatcatgagcacagtcacaacaagacagtcgtggaaagcgtcgtcactaacttgttcacggtcacttcagatcacaatcagtgcaagttacttcaatcgatcatgcaaggttactagttcagtcacctccattcattatccctactggtccttatgacagattagtgcctgaaggccacagtcaccggtgcgcagacccctcagatcacagtccttgtaggttacaatcacagacacttcaacacaatcatcaaaagccccgactctgttcacagtcaacccagattgcaatcaagagaggtcacattatctcagatcacagtgggtc

SEQ ID NO: 26498 - DNA, 871 bp, Artificial sequence
  DNA replication origin
tgggatcctgccaggaggggcgaaatcatctcgtccaccggccatgtgcgaaagggagggagtgtaaggcggctccgtggaaccaccagcagctgggtggttaatggatggtagggaggatgtgtgtgcggggtggggtgctggataaaagcctcaaagatatcagtgaatagggacgaggagctaggctggcggagacaagaactggagtagaaggggacaggcttcgcagggcctctggcctctgctgcgtcattctaggggtgagagagccttcctgcccctgccctggcatgttctcgcccaggaaaccaagggctggttatccaccttgggcgcccttccccttggcctgggggagaaaccgcagagcccctggtgtggactggtgttgcctcctccccttgtgctgggggttggtgcagaatggcgccggtggccctcggctgggctgggctcagcgccgccagctcccactcggctattcagagaccttcagccagccccagtcgatgacaatctaggtttggatctccactttttggcggaaggggaagggaagaatatacaactgtgacatctgtccactaatgacttaagtgtggtggatttgtttgggctccagaggccttgccctccttgtaccttgatgccaaaaggcccttggctttggggatcttgcccccatcctgactctacctggctgttagaatctcccttgacagttggggagggtgacagggttgctagcgtacttggagtctctgcttggccccctgctgtgggctgaaactgggggagagcatgtctcctataaagctgaatggggacccagaaccccacttctgctaaagggtctacttcagtgggg

SEQ ID NO: 26499 - DNA, 1027 bp, Artificial sequence
  DNA replication origin
agcggggcctgccgcgcctcgcggggccggggtggccatcgctcccggcgccttcccgccgctgccctctcgcccgggtaggagcggcccgtgtccgcgggcgggagcgtgcggcctggactgccccgccggacaggcattgtctccccgccctctcgggctcgaggcgggccgcgcgcgccggccgccgtccgggcgtcccgcggtgggcgagatgcgccgcgtccgttccatgcctgccgcccgcgcgccccttgctccccaccccgtagccgctcgccgccctcctccgaggcgcacctcctgcgtggccaggaccccgcctcggcggcacggagcggagcgggattagcacggcccgagggcggcaccctcactccactgccttttccgccctgaccccctccccgtgaccttggaggcctgggccggccggctcctcggttcctgcgagctgttgtcatgggggtgggcgggctttcttcacagccccagaacctgggctttggcagaggtgagcccacaatttaattagtttggaagatgactaaagacactcagttcgtccttctcctctctctgggtttgtcctggcaaccaagccaggaccccaaagctggcctgggtgggatcctgccaggaggggcgaaatcatctcgtccaccggccatgtgcgaaagggagggagtgtaaggcggctccgtggaaccaccagcagctgggtggttaatggatggtagggaggatgtgtgtgcggggtggggtgctggataaaagcctcaaagatatcagtgaatagggacgaggagctaggctggcggagacaagaactggagtagaaggggacaggcttcgcagggcctctggcctctgctgcgtcattctaggggtgagagagccttcctgcccctgccctggcatgttctcgcccaggaaaccaagggctggttatccaccttgggcgcccttccccttggcctgggggagaaaccgcagagcccctggtgtggactggtgttgcctcctc

SEQ ID NO: 26500 - DNA, 1013 bp, Artificial sequence
  DNA replication origin
ggatggagattataatttactgggaagactaagccacagcacagtgatcctgtggtgctagtcctacctaattcaggaggtcgacacacagaggttctgggggctcaggcacttgtccacggtctgggatcctaaccagtccgtgactgcaaatccagcttttcttttttcttttctttttttgagacggagtttcgctcttgttgccctggctggagtgcaatggcaagatctcgggtcaccgcaacctccgccccgtccaggagaaggggcactgaggagggacccagttctcccgcggctctgccggattcaggctgcagcgcttccagcgctccccgaggtgggtgcgggtttctactgtggcagcagggcgggcccccatcggctgggttttcaaatagaagagaaaaccgacccagaggccgcgccctactgacctgcgcgggggtgcggggggagtcacgacgacctcccccacctcccccagcctctaggctattacatccgtccccagccttcgggctcagaataggaggcagggaaaggtgtgaggggcactgaggtcgggggaggagcgagaagacccgaaagccaggcgtgttgagggcaaggtgggcaacagaaccttcttggtcattcgaggcagccctcgctaatgaccattggggtcccaacactcgaatccccacctaagtcctattcagatagtgactgggagtgggaagggagtttgagatcctaagtcccaccctctgggctgggagcctgaggccagagaggggaagtgatttcctcaaggtcactcagcaaaacagcgcccagcccgggccaaagctcaggtgtctcccaaccccctccccccggccatcacccccagaactcggtcccccggagctgaggtctgcgcgactggatttaggggcagaatgagtgcgtcgggaaccccaaaaccctagatcaagatacaaggggagtcgacggcccggaaacctcgctgcgggtgccctaag

SEQ ID NO: 26501 - DNA, 1243 bp, Artificial sequence
  DNA replication origin
ggcgctgttttgctgagtgaccttgaggaaatcacttcccctctctggcctcaggctcccagcccagagggtgggacttaggatctcaaactcccttcccactcccagtcactatctgaataggacttaggtggggattcgagtgttgggaccccaatggtcattagcgagggctgcctcgaatgaccaagaaggttctgttgcccaccttgccctcaacacgcctggctttcgggtcttctcgctcctcccccgacctcagtgcccctcacacctttccctgcctcctattctgagcccgaaggctggggacggatgtaatagcctagaggctgggggaggtgggggaggtcgtcgtgactccccccgcacccccgcgcaggtcagtagggcgcggcctctgggtcggttttctcttctatttgaaaacccagccgatgggggcccgccctgctgccacagtagaaacccgcacccacctcggggagcgctggaagcgctgcagcctgaatccggcagagccgcgggagaactgggtccctcctcagtgccccttctcctggacggggcggaggttgcggtgacccgagatcttgccattgcactccagccagggcaacaagagcgaaactccgtctcaaaaaaagaaaagaaaaaagaaaagctggatttgcagtcacggactggttaggatcccagaccgtggacaagtgcctgagcccccagaacctctgtgtgtcgacctcctgaattaggtaggactagcaccacaggatcactgtgctgtggcttagtcttcccagtaaattataatctccatcctgacctgccatctcacagataaattgaggcctagagatgggcaatgtctttccaatgatatactcattcctttagtaaataattattgagcacctactgtgggctggggaccattttctgctggtggcaaggccaagagcaccctggtttcccatcagccctgttgccaacacttggctcaggccctatgaagagggagctgctgcctgtaggagccagacctttacccagagtttttaagatgcctccagcctcaggcatctccagatagaaccaaccttgggaaccctcagatacccctaccatcctccacaggcctcagtccaatctggctgtgggcttgatcaccatcccctcccctagaataggtcttcctatcaggtttgtctctaactttggcccaggaatactcttcctcttc

SEQ ID NO: 26502 - DNA, 934 bp, Artificial sequence
  DNA replication origin
cgtctgagatgtggggagcgcctttgccccgccgccccgtctgggatgtgaggagcgcctctgcccggccgcgaccccgtctgggaggtgaggagcgtctctgcccagccaccccgtctgagaagggaggagaccctccgcctggcagccgccccatctgagaagtgaggagcccctccgcccggcagccgccccatctgagaattgaggagcccctccgcccggcagccaccccgtctgggaagtgaggagcgtctccgcccggcagccgccccgtccgggagggaggtgggggtcagcccccgccaggccagccaccccgtccaggagggaggtggggatcagccccccgcccggccagccgccccgtccgggagggaggtggggaggtcagccccccacccggccagccacgccgtccgggaggtgaggggctcctctgcccggccgcccctactgggaagtgaggagcccctctgcccggccaccaccccgtctgggaggtgtgcccaacagctcattgagaacgggccatgatgacaatggtggttttgtggaatagaaagcggggaaaggtggggaaaagattgagaaatcggatggttgccgtgtctgtgtggaaaggagtagacatgggagacttttcattttgttctgtactaagaaaaagtcttctgccttgggatcctgttgatctgtgaccttaccccccaaccctgtgctctctgaaacatgtgctgtgtccactcagggttaaatggattaagggcagtgcaagatgtgctttgttaaacagatgcttgagggcagcatgctctaagagtcatcaccactccctaatctcaagtacccagggacacaaacactgcggaaggcctcagggtcctctgcctaggaaaaccagagacctttgttcacttgtttatctgctgac

SEQ ID NO: 26503 - DNA, 1234 bp, Artificial sequence
  DNA replication origin
aaatgaaaagtctcccatgtctactcctttccacacagacacggcaaccatccgatttctcaatcttttccccacctttccccgctttctattccacaaaaccaccattgtcatcatggcccgttctcaatgagctgttgggcacacctcccagacggggtggtggccgggcagaggggctcctcacttcccagtaggggcggccgggcagaggagcccctcacctcccggacggcgtggctggccgggtggggggctgacctccccacctccctcccggacggggcggctggccgggcggggggctgatccccacctccctcctggacggggtggctggcctggcgggggctgacccccacctccctcccggacggggcggctgccgggcggagacgctcctcacttcccagacggggtggctgccgggcggaggggctcctcaattctcagatggggcggctgccgggcggaggggctcctcacttctcagatggggcggctgccaggcggagggtctcctcccttctcagacggggtggctgggcagagacgctcctcacctcccagacggggtcgcggccgggcagaggcgctcctcacatcccagacggggcggcggggcaaaggcgctccccacatctcagacgatgggtggccgggcagagacgctcctcacttcctagatgggatggcggccgggaagaggcgctcctcacttcctagatgggatggcggcccagcagagacgctcctcactttccagactgggcagccaggcagaggggctcctcacatcccagacgatgggcggccaggcagagacgctcctcacttcctagacggggtggcggccgggcagaggctgcactctgggcactttgggaggccaaggcaggcggctgggaggtggaggttgtagcaagccgagatcacgccactgcacttcagcctgggcaccattgagcactgagtgaaccagacaccgtctgcaatcccggcacctccggaggctgaggctggcggatcactcgcggttaggagctggagaccagcctggccaacacagcgaaaccacgtctccaccaaaaaaatacgaaaaccagtcaggcgtggcggcgcgcgcctgcaatcgcaggcactcggcaggctgaggcaggagaatcaggcagggaggttgcagtgagccgagatggcagcagtacagtccagcttcggctcggcatcagaggga

SEQ ID NO: 26504 - DNA, 1111 bp, Artificial sequence
  DNA replication origin
gcagagacctagagacccaagtttgaggggaagccggtgtgggtatttgatacccatctgacatctcagtatgacaggggtgtgggaattgtgcctgtggttgttatagtgtaatccctgagatggagtaaatcaaaacaggaaatgggacctggctacattaaaagagaaagcagaggccgggcatggtggctcacgcctgtaatcccagcactttgggaggctaaagtggatcacctgaggttaggagttctgaggccagcctggccaacatggtgaaacctcgtatctactaaaaatacaaaaattagccaggcgcggtggcgggcgcctgtaatcccagctacttgggaggctgaggcaggagaatagcttgaacccgggaggcagaggttgcagtgagcctagatcgcgccactgcactccagcctgggtgacagagcgagactcttcctcaaaaaaaaaaaagagagagcgagagagaaagaagagaaggaggcttgcaaaggactacagaaagaatgctgggagagggtaataggcccagagtagaggagcttatggagagaatgaagtggtcattcgtgtcctgggcagccaacagttgaagcagatgaggggaaaaaagtctggtgggtttgacaattttcatgggctggggcaggtgaatcatagcccaccagggtttgacactaagctggcgagaggacagagacaggataagaaggggccctggctagacagggttttgcttgggtattttgaggtgagaaacaggtttgtgataggaagagaaacttaggtgacaggaaggaaactttagtgacaggatgagaagggttagggaacccaggggaaggagctaagggagggtgtagaccacactggtgtggtctgcccaggactggacaatgggggtcttcagggcacaaggagagatcgggaccccaatagttgctggcaagctctccaggcaaacccaagagctccatggaatgaaggcagtagaggacaaagggttaccaggcccagcattgcacatgggccaagaagggtgggggcaatgcctagcgggtgggaggatgctctgagatagctctgttccccccag

SEQ ID NO: 26505 - DNA, 1413 bp, Artificial sequence
  DNA replication origin
gggaacggtaacaaccacgacgccccacaactggtgagaaagtcagcgagaatgaaggaggacgcggtctgcgaagtccccgatatggatccagcccctcgcccctgccccatttgcccaggctcttcctgaggtgagactggcgggagtggggcgggcaggaacgagggcctgagcccaggaccgcaatccccgtgaggggctcgaggaccccagcccaacgccccgccgggccccgccctcacctcctcctccatggcgagtccgccgaggtcccgccgctccgccactcgcttccagcgccgcgcgggctctgccaccgcgtctacgcccggccaggcggcgactctccgcgttctgtcccgccggctgccgggggcccaagaaacttcgggggggcggggccgggggcggggtgaggcttccgggggccggggcggggccggggagggggcggtggggccgggggcccggcccagggcgggaaatgggtggggaggggcggggcctgggttggagactggacggaggagccgggcggagatgcaactggaggaagagggcgggacggggcggagaaggtttcccgcatcggcggagggagagggactaggagggggctgcggcgggggaggagagggggcttccggcccagagactgaggcgagggtggcgggagcggcgcgcaggcagggctggggtggggcgcacacagtgagcgctgggggcgctggcggtggagcctttgaggtctcccgaaccagtgggctggggttgcgagaccgagccgagctgccctgggcggccagagatgtgggcacacagaggctcctcctctttcctccccgacgccgggcagtgggcggtggcctggtcttctccctggaacctctgggcggggccgggcctggagcttgggtctctgtccggagggtggtgtcacaggaagagctggagctgagagtcgggactccggggtccctttagggggcggcccgcccctggctctcaggggtctccaagcgcagtgttctcctgctctccttgggcatcgctcaatccctcccgtatctgagggtcgaccatccccccgatcccgcggtgagcttgcagccctgacagccttactggagagtgggagtgtggggaccagcagagagtaatgattttagttataccatgcgccctcattttacattggagaaactgaggcccagagagagaaagtaactggctgcatcgcagcctgcagcaccgctcccctctcacacacacacgcatactcccccttagctctcctggtcaaccccgtcccatgccaaggaagggaaaattaagtgcatgtgagatcaatggtgaccttcttcggctctggctgccatagcagcggctgtgccagcgaccaagctcccc

SEQ ID NO: 26506 - DNA, 1293 bp, Artificial sequence
  DNA replication origin
ccccagccctgcctgcgcgccgctcccgccaccctcgcctcagtctctgggccggaagccccctctcctcccccgccgcagccccctcctagtccctctccctccgccgatgcgggaaaccttctccgccccgtcccgccctcttcctccagttgcatctccgcccggctcctccgtccagtctccaacccaggccccgcccctccccacccatttcccgccctgggccgggcccccggccccaccgccccctccccggccccgccccggcccccggaagcctcaccccgcccccggccccgcccccccgaagtttcttgggcccccggcagccggcgggacagaacgcggagagtcgccgcctggccgggcgtagacgcggtggcagagcccgcgcggcgctggaagcgagtggcggagcggcgggacctcggcggactcgccatggaggaggaggtgagggcggggcccggcggggcgttgggctggggtcctcgagcccctcacggggattgcggtcctgggctcaggccctcgttcctgcccgccccactcccgccagtctcacctcaggaagagcctgggcaaatggggcaggggcgaggggctggatccatatcggggacttcgcagaccgcgtcctccttcattctcgctgactttctcaccagttgtggggcgtcgtggttgttaccgttcccattggattgaccaggagactgagactccagcgagattgatgacttgctgaaagtggcctgggtgactgggctcgaaccccgattaccgtggtcggatcctgactctctctctctctctgtgtgtgtgtgtgtgtgtgtgtgtgtgtgtgtcggatcctgactgtgtgtgtgtgtgtatgtgtgtgttggggggttcctgtctcaaggatcggatcctgactctgtgtgtgtgtgtatgtgtgtgttggggggttcctgtctcaaggatgtgaccatgctttggtggcaggaggattggagaagttgcttttttctcccttgtataagtctctgtatcttttcccccactctctccccgctccacatccatctgagcagctagctgtagggaaggaatcgggagtccggcccacctagggtctgatcttagtccctgccttccccacccgagggctggaccaactgtgtccctggagcctccttctaaccactcaaaacactcttggcctgggattgggtcttgcccctgcccctgccctttacttgcaaactcagttctgccagcagccgctttatccgagggtccagcacg

SEQ ID NO: 26507 - DNA, 1353 bp, Artificial sequence
  DNA replication origin
tccatgccaacattacattaggagccgtggattccaagtacaataaaatgggatctttcctcaggttgctcactgccagtcagggagacaggcactccaactcataaatgcaatgggacaagctctgtgttagacccacaggcaaattctgtggcagcagagagcagacatcaatgggctgtgtttgctgagggaatcagtcgaaacctgaggaggaggtttctttgcctgggcctcaaaggaggagttagagtttacagaacagaggtggcagggaaggacattggagacagagggaacagagtcacagtgggttaccgggttactggagccatggtcagctctttgtgtagtctcctattggctataagtaagaggtgggggactgggaggtgaggtgggagaggggagcggggatgctggtcacccagaaaggttggactttgccctagagaccaagggagtctggggagggggtcgtttcaggaggtggggggcggcaggtgggggtgtggggtggagactggaggcagggagggtagttaggaggtagtgacagtgaaccaggggaggagtggtgagggcctgaactgcaacagtggcattaggggtagagtggaggagaactggggactttggggcattgtgaatgtgggagagatggaatgggagagagggaattcagagatgactcacagagttctaaggaagtgggagtacctttttgagataggaagcccctggggagggcgggatggggagaggatggtggccatgtggaggggtctggtgaactactagaattgagctgaggcaaaaaattgacagtcaacgggcatccagacagtggataattaaagccacaagcactgctgagttatatcttgtatgttacttaagattagatttgactgtgactgacaagaggccatggtgtcagaagagttcatcagaggctaaacctcagctccgggggagttaggccaagacagcagtgacacaaattcatttatcttgcatgaattaagtctggtggtagaggccatctctatcatggcactccatggtcatctgggacccagcctccttccctcttactgctctgccatcttaccccttgactttgatttctggacccatgaggtgatacagctgcagcccccgcataagtgttctcacccttgggaagcaagaaggggtataggatgcacactttccctttagagacactttctggaagttgtactgctgcctcattgcgagggtggtcttgcagctagctgcctggtgttttttttcctgttgactgtgtgccagctgaaaatcaaaagtcttattactaaaaaagaaggg

SEQ ID NO: 26508 - DNA, 714 bp, Artificial sequence
  DNA replication origin
ttatgtagtacaactgcgattatgacagggcctcttcctgaaggggaagggtggggaggagacctgagtcatcagtggggcggccggccccacaggctgacacaggcagcttgtggaaaccaggccccccgccctgccttccgcaggtagaggccccagagaggggaaggggccgaccacctgctcccgagccattctcgggctcggccagccattgggctgggaacctgtcaatcctggttgatcttccaatgagctgtgaactggtcttccgggaggacttacaggaggctggaaacggggcctggcgcgcgcttccctctcagtgcgaggctgactggttggactcgccgggctctactgtgggccccacgctatgtttagacgcccgacgtgtcccattttattgaactcgtcctgccccccaagtagggacgatttacctccattttctagataaggcactgggggctccgcgaggggatgtggcggactggagcccagctgcactcctgacgggactgaatgcggggctgagggaggcaacaggaagaatgagtattttctttactggaagggcagggaaaggtttctctcagaaggtgacatttgagctgggccctaaacaatgagcaggatttagctgtcttgaggagggggagagggaagggcatgtgacccggaaaggatgcagcctgggcaaaggcagggagg

SEQ ID NO: 26509 - DNA, 808 bp, Artificial sequence
  DNA replication origin
gcctgggcaaaatggtgagacctacccttccacccccccacacacacgctcactgtctctacaaaaaaaatttaaagaaacaaaaggaaaaatagcgcaagcacgtaacctgacgcagaggatccaggtgagagggactaggagcgtatgggcgttcagtttccctgagcctggcttctcgcgcttagcgtcctcctggaactccgaggggagtgggcagaggcctctgggcctcgctgcagtttcggttgtcgacacgcgggggagcaagagccggcgaagagcagctgtaaataccgtaattccctcccatctgtccccacgaccggcacgacagtgatggaggccagaggggcgcgaggagggagaggctaggggttacagactgtagtgtaacctgagatgggctggatctacctatgacagaggaggctctgcgcagagaagcagggtgcccacatgctgagtctcccaactggctcctccacgctgggctttctgctgtaccattttctgaggctttccccaagattgccagtgagggtacgtgaatgccaggctaaagacttgggccatgggggcggggtgagagaggaatagacgcggtggtaaagatgtaagtaaatgtggggttgagtggcagtttaattcccagacatactcgggcctttctaatgagggaaaagatccaataactttcgcaaagaaagtagggaattactatggattcccgttagaggaatgcgcatcttaaaaagctgcaggaagggggcaatatttaacccaaatgaaattctaaaggtctttt

SEQ ID NO: 26510 - DNA, 1944 bp, Artificial sequence
  DNA replication origin
ctgggcgaactcccggggaggagactgggtcagggacacctgcggaactcggcgtggccccgacccgccggcctcgggcgcggaggggtgggcaggttaagagagcaggaggagggacctgcgtcctggtccgggactggggtggccggggcagctgcgctcctagcaggcggggcgtggagtctggaggagcgaccgccccgtcctctcggctccccgggccccgccccggcggacgcgcgcctcgcgcccgggcaccagcgcgcgcaggggctgcggagcggcaggatgcaggaggagctggcgtgggagaccgacggccgtgagtctgcctggaggagggaggggggcgggccgaggccgagaggacccccgcatccgtttggggagtgccaggggtgaggttggcgccctccgaacggccacctccgtgtggggcgtctgtgtggctccgagcggaatggttaccggtccgcgcactgggccgaggggaccttgccagtgcgtctgggactcggggaccacacccgccaggtgagcggggagcagcggctgagaggttagctacaaataataaaggtaatagcgatccttgactgcgtgctgtactttgtgtgccaggccttgacccaggagaggcacgtcatttgatcttcgctgcggccatatgggtaggacattatgttatcttcatttcgcagatgagaaactgaggcacagggtgttcaaatgagttgttcaaggtcacacagccattgagtggtagaagtgctgaagggcccagctcacccggaatgctggggctggatagcgagtggagaccgcatcagatggggcacgcactcagaggagaggagcctgactggccacaggtggaatgagggcacctccgaacctccctcaaggagtgcgcccagtgccagggcctctaggccgggcagcagcgtctgtgtgggcatcagctggcctggggcagctttggctgcaccgtctgggagaggggagagaaagattgtgtcggtgtctgcactgtgagtccttgatcctgcagccctggctgaatcctgacagctgaatcccggggctttccctcaaaagcgcatagtgcagctcactggattcctttgagacctatagtgtccaaaatgctggcacactgcatctactcagctgagggatgtgttgggggtgggaatgctcaatcaagattaggtacatggttctgcctggggcggaggatcacttgagtgggcctgcgaagaatgtgtaccaatggagcattggggtgtgtggcagagaattctggacaaagacccagcatgggcaaaggctcaggtagctcagtgggtattggatgtggccagaaagagggtgccggatgggaggtggatggaagagatgagactggacttgatttcattctaacttaaccttctctggcctgaccctatgcagtgtctgctggcttcccattggaactcctggctgtttgccaatacaaaccaggccaatccccctaagctgcacataagatagagggtgccagacaggaagggacctatacagatctctttcttcaccctcccccagttttacaatggaagaaacagacctacaagggggatgtgactagcccaggatcctgctgctggaaagtggcagggaaggtactagaacccaggcctctgtaagctcacatctgaagtggcagctctctttggctaccagaatttgaccctttgccttggaggaataatagtgatgatgatggtggtggtggtggcggtgtggtcattatgtgccagacactgtgccagggggttttcatatctcatttctaatcatgatattaaccttgtagggaagctcgcactcctgttttgcagatgaggaaactgcctaacacagctaggaagtggttaagccagagttgaacccaggact

SEQ ID NO: 26511 - DNA, 985 bp, Artificial sequence
  DNA replication origin
tccagtgcctctcagggacttggaggataatccttggccacatggggctttccagcagggggaacagcaggaaaaggcctagaggtgggaagctgcttggtatttctgagaagcagtggtgggcagtgccagaccatgcagcgcctcatcatccccaaggttaggagtttatcctgagagccatgagaaactgtgaagagttttagatggggacagatgggtccagtcattttactatgttggctctggctgccatgtaggagaggagcatgtggcagaatggggctgggtccccagctagctggggaccagagccagcaaagacccttccagcctgcagaccagctgtcctgggggagggtgtgggaggtggtccaggcagccaggtggcagcagcacctgacaagtgtcatctccctccgggcaggtgggcagggtggccctgcactgggctgcaggtgcagggcacgagcaggctgtgcgtctgcttctggagcacgaggctgctgtggacgaggaggatgcggtaggggccctcacagaggcacgtctgtgtgtacgtgtctgtctgtctgtctgtctcagggtggtggggggcactggagatctctctgggtctatgagccagttgccgagattgctgctaatatgcagacattcaggtgcagagtggtggggagtcagaggcttcaggcgcagggacactgcactgattctgttttactcctgtacagcaatgaagagctctccactttcaagggtctttcagttctcagagagccttttcagtccctcatgataccatgcgaacagagagagggctgtagaacagataattgggtggattgatagaggcctgattagcaaaagcaccaggaggaaagtctctcatgatatgccacagggctctgccctggctaacacttcaatcaaagtcttggataaagactaataatagtcttagttaaccaattggcaggcagcg

SEQ ID NO: 26512 - DNA, 885 bp, Artificial sequence
  DNA replication origin
cttcccggccgggtttgggggcgctcgggagggtgacggcagggtcctcgaggcccagcccggcggtgggggcgcggccggcaggagctccctccctgctccaggagccggctgagcgcgccccgcggggggctccgcagcccttacaaggaatttggtggcgcttggggtggccccgcccgccaggctccaccggcccctcctccccgcggggtggcagcccgctggacgcggggccgagggcgcggacgccgacgggtccggggccgcgcgctccagggaagcctgcatcccgctcccctgggccccgacgggcgggcgcactgcgcggggcccaccggccgcagacctgcgtggccgtccagggcgtcgccatgtcctcggtgtttggaaaaccccgcgcgggcagcgggcctcagagcgcgcccctcgaggtcaacctggccatcctggggcgccgcggggctggcaagtctggtgagtggcgccggggagcctgagccgccaagtgcggagctgggcgtgggtggggggacagtgggctgtgctcttgggggcaggttcttccactggcttggggagcttccttcacccaggagggtcgcacaagacaccgtgattttctttgcctcagtttccctgttgccgggctttctcttctctcggctttgtgctcagctccaccatctctgtcttctgttccctgcctgcctcttccctttgtgtcttcccactgtctctgtcctccgtatcagtgacccctgctgtctctcccctctctcttgtgtgtctcggagtcctttactggtcggtctcccctgccaccaaccttccaacccccacccctatgacctaccctggggccagcagtcagtcctggcgact

SEQ ID NO: 26513 - DNA, 1121 bp, Artificial sequence
  DNA replication origin
agtgtaatctaaacaaattccacccactaccttaataacacagctggtttaccatgatttccccaaaacacaactaggctgagtcaatattcatgtcctggccaggaaaataattgttcttctttgaagagtcgttattaccatccagctctgaccctgggccctgcctgcacacctggttttccatggttcctctgtgggtgggtgggtagatgagttaaccatctgcgggaaggggaaggagaagggctgccgtgagaggtctctgaggctcccatgcctttccctgctctaacctggagcgtactccagaagagatgcctcacagggttctagaatgtacgcaggcctggagcccagggctgattctgtcactctctattttgcttcattttccccttccttcagtatttatatatggggacaccgaagcccaaagaagcaaggtgacttgcccaagattactctagggcaggagctagcactagatcctaagtgtccaggttcgtggtgtgggccctttgccctgtctttggtatgaccagatttaccctgagtcccaaggggaatgaccaggggacccctgccaggctcaccaccaatcccagaattgctgtaggcaagaggcagtgccaggttttagaacaaacaccccatttacacaacaggccacaaacacatgcaactcattagctcccattagggagagacagtaattcagaatggattaggtttcttgaagctgaacccatattggccctgaaatcttagtgaggggttctctccgccccgccccctctcccagaagcctgggttccgaatgggttctgcagtgaggcctctagagtctccacagcaaagggcagaataatgtgattggggatatagagtgccaaggctgagctaaagaaagggcaaggcttggaattgaacccaggaagcttcctggaggaggaggcggggctggcttggtagaacaaagggaggggtggattttcttgctggtgaaaagagattgagtgggaggttcagggaagagtgcaaacatccttcccctctctccccctagccctggggctccttctctgctccttcccggccgggtttgggggcgctcggga

SEQ ID NO: 26514 - DNA, 1382 bp, Artificial sequence
  DNA replication origin
ggccgcgtagctgctgggccgcagggccgccacgtaggcgcgggcctcaggcagcgccagttcggccgccagctcgcgctcgccgtcgcagatgaagagcgcggcactgtggaacacgtcgcgcaggccgaaggcggcggccgcgtcgcacagcaatgcgcagttgtccgacgtgaggttgtgctccagaaagcgagccagcgccggcgcctggaggaaggcggcgcactccacggcctgcagcagctcgtcctccgccgccagcgccggccggtcgccgcgcagcacctgcagcgtggcgcggaaacctcccgcgctcagaacgcccaggcgcacctctgctgcgcgggtctcccgcatgccggagcggaagaggcctcggaagaagccacagtgctccaccagcagggcgcggtcggcttggaagagctggccgcccacccacacctgcaccagggtctgtggaccccgtgccatggcgagctggccgggcggaggctgccgctggggccttgggttagccagccaccaactctggggctcccctggagcaaaaaacttccctgggggctataaatatctctccctggctaaagatagtatggctcatgtgatgtggtggcccgcaggctgtatggctgcaggcccggagggcatctggagacctgtgtgatcactcatatccttagaagaaatggtaataatgggtccagaattggtgggttcttggtctgacttcaagaatgaagccgcggaccctcgaggtgagtgttacagctcttaaggtagcgtgtctggagtctgtcctttctgatgttcagatgtgtttggagtttcttccttctggtgggttcatggtctcgctggctcaggagtgaagctgcagaccttcgctgtgagtgttacagctcttaaggcagcgtgtctggagttgttcgttcctcccagtgggcttgtggtctcgctggcctcaggagtgaagctgcagactttcacggtgagtgttacagctcataaaagcagtgtggacccaaaagagtgagcagcagcaagatttattgcaaagaggaaaagaataaagcgtccacagtgtggaaggggatatgagcgggttgccactgctggctcgggtagcctgcgtttattctcttatctggccccactcacatcctgctgattggtagagccaagtggcctgttttgacagggcgctgattggtgggtttacaatccctgagctagatacaaaagttctccacgtccccatcagattagttagatacagagtttccacatacaggttctccaaggccccaccagagcagctagatacagagtgtcgactggtgcactcacaaaccttgaactaaactcagggtgct

SEQ ID NO: 26515 - DNA, 2022 bp, Artificial sequence
  DNA replication origin
tgcccctggaggccagcacgttgctggccggggtggccacgctgggcaacaagctttacatcgtggggggcgtgcgcggcgccagcaaggaggtggtagagctgggcttctgctacgaccccgacggcggcacgtggcacgagttccccagcccgcaccagccgcgctatgacacagcgctggccggcttcgacggccgcctctacgccatcggcggcgaattccagaggacgcccatcagctccgtggagcgctacgacccagccgcgggctgctggagtttcgtggccgacctgccgcagccggccgccggcgtgccctgcgcccaggcttgtggccgtctcttcgtgtgcctgtggcggccggccgacaccaccgccgtggtggagtacgcagtgcggaccgacgcgtggctgccagtggccgagctgcggcgtccgcagagctatggccactgcatggtggcccaccgcgacagcctctatgtggtgcgcaacggaccttccgacgacttcctgcactgcgccatcgactgtctcaacctggccacgggccagtggacggcgctgcccggccagttcgtcaacagcaagggagcgctcttcacggccgtggtgcgcggtgacaccgtctatacggtcaaccgcatgttcacgctgctctacgccatcgagggcggcacctggcggctgctcagggagaaagccggcttcccgcggcccggctccttgcagacctttctcctaaggctgcctcctggcgctcctgggcctgtgacttcgacaacggcagaactgtgacctctgggctggctttaggagggaggagacgccgcgactcctccctgagctatggctgagtgtgtgaggccggccttagaagtagctggcaacttccctctttctactgagacacccaggtttggtgccttctggtggtgtggacatgttcaagaagctcagggagcagtgatgatgccctcaaattacttgggctctgctgagagctggtgggtcacaatgtcagtgaacagggtagggggagttgggatttgaataatccgggcttatatgtaatgggctagtgattgagcatcgctgggagcgacttaaatgatgttaatcaaactgcaagtagtaggcaagaattaggcacctactgtatgcccaatacagtgttatgcgtaatgagagccgtagttgccacacagggatccaggaagcttaaaggataacccagaaaacaatcttaacagttacaggacaacaaaaaggtttacacacaacttgatccacagagttgaaggcaacatgcaaaaaaatttaaaaccgcatacaatataataaaataaagtgctgaagaaatcagggcaaagggaaaataggaagagaaaaaatatataactccagaaaagaagagagtgtgcaaactctatggaggagatgagcaggataccattagctgctgaaaggggaggcttagaccatggaggctgagagctcagaagagaagcagggttggggaaggctggagcagatggggagggtctctgcaagtccagccataccagcagagcagcagtagttggggcatctagagaggggatgagactgggccagcttgcagcagataatgactgagctgagcctggagtgagacctgtgggggcgagaggattcttcacgttcctttttggaacccttaggggagcacccaggtgtaagcccttgcccaccctgtttttgccatcaccacggggcagtggactgttaacccacatgacttcaggtcagttgaggtatgagccaaatcctgcctcatcttcctcagttgtagcccctcctccacattctacaggtttgttctcttcctgtcctattctgccctttgcaattccctgggctggaatgcctagtctcctcctctctccctgtcagtgctctaccatcctctgtgcagcattggctcacccagctcttcgttttcctgacctgggctgcctgcattgctcattggacccct

SEQ ID NO: 26516 - DNA, 946 bp, Artificial sequence
  DNA replication origin
cggtgccaccaccgccgctgcctcctccgccgccccagtgtcggcccttcccggggaccgacgccggcgagcggccgcggccaccgcctcccggcccggggccgccctggagcccgcggtggcctgaggcgccgccgccgccggccgacgtgctcggggatgcggccctccaacgcctgcgcgaccggcagtggctggaggcggtgttcgggaccccgcggcgggcaggctgtccggtgccccagcgcacgcatgccgggcccagccttggcgaagtgcgcgcgcgattgctccgggctctgcgcctggtgcggcggctgcgcggcctgagccaggccctgcgcgaggccgaagccgacggcgcggcctgggtcctgctgtactcccagaccgcgccgctgcgcgcggaactggccgagcggctacagccgttgacccaggctgcctatgtgggcgaggcgcggaggaggctggagagggtccggcgccgccggctgcggcttcgcgagagggcccgggaacgcgaggccgagcgggaggcagaggccgcgcgggcagtggaacgcgagcaggagattgaccgctggagggtgaagtgtgtgcaggaggtggaggagaagaagcgggtgagagcagcggccgctcatgggggtaggagtggtggtggttggaacctggagcagcaggaggctttaaacttccatttcccagggctaagcctctgttttacgcgcaaaatgaagcgatagctaaccttcccagctcataccaccatgttaattttgtgttaatgatgtgtggtacacaaaagttccaggtgcactgtaaaatcctgtaaacacaaagtataggattacacggtggcactgcacgaatgacaggtctcccctatcctgctccaacattgtccacttactctcaaaaccagtaagtgtctagttccttg

SEQ ID NO: 26517 - DNA, 1001 bp, Artificial sequence
  DNA replication origin
ggcgcagagcccggagcaatcgcgcgcgcacttcgccaaggctgggcccggcatgcgtgcgctggggcaccggacagcctgcccgccgcggggtcccgaacaccgcctccagccactgccggtcgcgcaggcgttggagggccgcatccccgagcacgtcggccggcggcggcggcgcctcaggccaccgcgggctccagggcggccccgggccgggaggcggtggccgcggccgctcgccggcgtcggtccccgggaagggccgacactggggcggcggaggaggcagcggcggtggtggcaccgggtagaaggcgccagcgccgcctccgccgcgggaggcctccgcggaggctcggggctgcagagccagcggaggctgaaggaagggggcggaggcccccggaaaagggccgggccgctgggggagaggcggcgggaaagccggggagggcagcggcggtggcggacagccgaaaggagcaggaggcggcggctgcgggggcggtgggcctgggcgaccctggccgaagaatggtggcagggccatgttcacgacggagatgctttgagaagtgacaggaatctgagtggctcctcatgagaaccttccgacggaagtgacgtcgttacgacgcgcgacccctgtagactcgtccctccggaaggctcagtgcataagtgggcagtcgttcaaccttctgtcgttcagttcataaataccgttcttattgagcatcctaggtgcagagctacccactccgcatacagtgagactgagagatacagagcttctcttcgtggaactatctgcctagtataacacactaatcaattaatcatggtgagtatcttcgagaagttggagaaggttatcctaagaaactgcggctgcagctgagatctggaagataaatagttaaatagaaaaagagagggaagcacagtgcagatgagaacatgtgcaaaggccctagtaaataggagtgtgaccaactacc

SEQ ID NO: 26518 - DNA, 1023 bp, Artificial sequence
  DNA replication origin
gactgccacgggcacggtggctcacgcctgtaatcccaacatgatccaaggcaggcggatcatgaggtcaggagatcgagaccatcctggctaacatggtgaaaccccatctccactaaaaatacaaaaaaattagccaggcatggtggtgggcacctgtaatcccagctactcgggaggctgaggcagaagaatggcatgaacccaggaggcagagcttacaatgagccaagatcacgccactgcactccagcctgggcgacacagggagactctgtctcataaaaaaaaaaaaagaaagaaagtggccaggtgtggtggctcacacctgtaaccccagcactttgggaggccaaggtggacggatcacctgatgtaaggagtttacgaccagcctagccagcattgtgaaaccccctctctactaaaaacacaaaaattagccaggcgtggcagcaggggtctataatcccagcaactgactagggaggctgaggcaccaagaataactggaacctgggatgcagtggttgcagtgagtggagagtgcgtcattgcactccagcctgggtgacagagggactctgtctcaaaaaaagtggggggtgcacgggacttggttgacctggatggcatgcaaggggtggggagggaccaaggaggtgctgggtctatgggacttgctcctatgtatccatcagtgatctggttggcgccatggaggctggggcgaaggcggagggggggtggggggtagcggggagctaggttgtaaattgacagttgtccccaggcaatcccctggtatgggaaagttccagaggtccctggtttaagcttcggtccttggaactaataagcgaacacataattagataagcttacagtgtagagagtgtctggtggagagaaggtaaaggttaattggatttttttttttgacaggtgtcattctgtcgcccagggtggagtgcagtggcgttatcgtggctcattgcagtctttacctcccagggctcaggt

SEQ ID NO: 26519 - DNA, 1217 bp, Artificial sequence
  DNA replication origin
taaaactataatgaaattcaactttgtgtctatggaattgacaagaattaaaaagaattctaatattctgcatgagctaagtcatgagaatgctggccatcagaggcccttccacaccaccctgtgatgtgaatattatcactatgattctcatatcatatgtgacaaatatcttcagataagcaaattttatatatccacccaacaaacaattcttgaggccaaggaggtatcagagggtggcttttgtctaagggcctgcaatgaagaagaggtggaatgagagatggttccctggtctcctgacccactccaagctctcccttcctggggtctgagcttcagaagccaccttagagttcctgggtcctatgagaacccccatggcttttgaagcactaggggccttgtggttctaggcctcagagcaaacagatttgatgtgggctcctgggagcagcccccaacctttacctggcaaaagaagatgggaagctctgtggtgtctgggggaccagtcttcgccctacctcccgaagtcatagatgcaatccaatggcatgggaccacctctcctctgagtccagggcccagcacagcctggatgcagaaggagaagtttcttcctcagaagatcctgcagggtaggagtgtgtgcggtgtgttggtttaagcacaatggtctgtgtttagatttgcatgtgaccatgaggtcacactttggggttttctctaatgaaggttctgagtagggagaggggatgggagtctagtccttaccctccagcagagttaagtcaatgcccctctgctctcccccaagctccctgtcagagaggtctcccaaggaggatcttggggcatttgaggccagagacttaagcaattcagagaattctggaggctgaaaagcagaggaaaagtcttttggttttccaaagatctcggtgtgaatcctagatttacccatctggctgtgggatcttgggcaagcattgcagcactctaagcctcagtttccctgggtgttaaatggctccttctgtgcagttttggagggaaaagattcaagagagacaataggtagcattaataccccaaggaagagaggtaggctcagtccgcagagctgggacaaagacaagtacaggggcgggtcgagagggtgcccacatcaatttctaccagggctgctgctgctgtgaggatggctggca

SEQ ID NO: 26520 - DNA, 1414 bp, Artificial sequence
  DNA replication origin
cgggccggggcgcagctgcggccacttcaaaggcggcgcgcggcccggtcggctgtgggaaccggcccccgcctcgggcccggccgccgggaaggggcccgccgcgtcctccgggctcgcgccctcgcccgccgcccctgccgcgccctgggccggggagcctggggccgcttggaccggggctccggtggctgttgtcgctccccatcacgctcccactttcatcaggacctccagtgcttttctcctttgaggcccggagtcaaagggcagagcggggaaggagggagaagagcgggggggatgggagtctgacacaaagcgctgacctccgaggagtggagcagatggtcccacttactcctgccgcctagccactgcggctctcggggccccaggctcgggcctgaccccgcccgccagctgaatgcctgcagtggggccccgcgggggccgggcttccccaggctcccccacccgccccactccgctgcccactctgccctcacctcctggcgttggagtcaggctgcccggagcagccggctgggagcaagggttggggggcttggctgagtttctgccctggtccggattcccaagaacttgccaggccagggtgtcccagtcctagggtcacttccagagctttagtagacacaccgattcctgagcactacaccagaccaatgaatccgaagctctggcagcagggtccggaaatctgcatggttaggcagcaccctaggttattatgatctgcagccgagtttgagagccaggggcctagcctaattcaccttcttccttttcactgaagaagctgagactcaagtagaggaattataataacttgttggaggagagccattgaattgtggcaggctggggacttatgtggaagacaagatgaggagtgatccccaagaacatatgaccgtttaagtcagcattcagggaacagtttatgaggacttagtgtttacctagtatttgttctaggtgctggaggtagagagataaatgtgtctgttccctgcccttaagggactcataggtcttcgatgggtaggcagatagacgcatcaacagccaactctaatacagtctgaaaaggggtaggagacgtgcaggcaacatgttagagttaggaatgaattctgcttcctttggcggatatggaagacggaggcggtggtagaaaaaggggcaacagagttgtaggcagagggggcagtggaagcaaagaatacaagggtgaatgtctgcaaggtgacatagcatgagaggagagtgtccttttacggatgtgttacaagacagggatcctgatccagaccccaagagagggttctttgatctcactcaagaaaaaattcagggcgagtccgcagtgcaaagtttattaagaaaa

SEQ ID NO: 26521 - DNA, 1801 bp, Artificial sequence
  DNA replication origin
aagcccggcccccgcggggccccactgcaggcattcagctggcgggcggggtcaggcccgagcctggggccccgagagccgcagtggctaggcggcaggagtaagtgggaccatctgctccactcctcggaggtcagcgctttgtgtcagactcccatcccccccgctcttctccctccttccccgctctgccctttgactccgggcctcaaaggagaaaagcactggaggtcctgatgaaagtgggagcgtgatggggagcgacaacagccaccggagccccggtccaagcggccccaggctccccggcccagggcgcggcaggggcggcgggcgagggcgcgagcccggaggacgcggcgggccccttcccggcggccgggcccgaggcgggggccggttcccacagccgaccgggccgcgcgccgcctttgaagtggccgcagctgcgccccggcccgcggctaatccccgccgacgcgggcgtcccgcccccccgcccctcccgcatagcaatagtgtccgcgctgaatggcgctggctaattacctcgctcgcaccaccgcgggtgaatgagagaatccggcattgtgcgcggcgaatggagaaaataagacagccattgtcctcgcacgccaaacgagggtttgatgtcgctggggcgagcgaggcaccatttcccgccaccccctcccccagagcctcggattccccagctgggcccggccccggcgcactcgcggcggcggagggaaactgaggaagcggtgcctgtctccccgaggaaataggcccttcaccttccgtggaagctgggcggacacgcgcggcccccggactcgccctcgtccctccctccgggcccctccccgagccttctccacctgcagattctcaggggcgctctaactgagcgcgcagttgtccttaattcaggaaaaacgggcacggctctgcattcaaagacctaatcccatttcgccgatacacaccaaacacttggagaaagagtggggaatttacataccttagtgcccagctgtgtgccaccaacctgaaaggactgccgaggtttaggcaatggctgggagagatgcgggtagagaaggcaggagagaaagactgggaaaagaagagggaagatggggcactgtggggagcctggactgatgaagggactagaggagtcgggaagagggaaatggtcagaaaggggaggtctgcaaagcaaggcctcagaatttggatttaatgtcccaagcacggaggccactgttttgaccgagatgctcctggaagccaaggcaccatgagaagcccggtaaggctgaggcacttcttttttcacaggtgaggacacgaggtggctcaacttagaaatcaatcagaactaaaggaaaccacggtgcagatggacaagccgatggtcacactatgtatgcattcaagagatactttgtgctacgtcaggctgctttttcaccatcaccaccaaacaaagtgggtttttttttaaaggcgagggttgggggggtgggtggggagattacacccttcaagatcaggaagtgtcttatctttctgtgctatccttcacagagtacttggcacagaggcagataggtgcaggatagatactcttagagatttgctgatgtgagatttgagaatggacctgctttttttttttttttttttgagatggagtcttgctctgtcttccaggctgcagtgcagtggcctgatctcggctcactgcaacttctgcctcctggattcaagcgattcccttgcctccgcc

SEQ ID NO: 26522 - DNA, 1019 bp, Artificial sequence
  DNA replication origin
ccttgccctggctctcgcggtccgccggttctgctgcctggagctcggctctgctgcctggagctcggtcaccaccactctgttccctttagtggctgcaatggtcccatctcccgggaggagagtgcaaatctagtcccttaaccctcccacctcaagttccccacagacactcatctgggctattctctctccactcctctcccaagaagtagaagctcgcgtccgcatcaaggaaaaactttattcccgacagctataccagggttggattcggggctaagacgggtgaactcacgacatggggaggatgcgcaggggtttgaataagtgcgatcctaaaaagtcttaaaacattacatcttcctgggccggggacggggggaggggggcgcggggggcgctgggcggggaatgcctataaccccaacgcccctcctttctccccacccatttccccatctccctcagccagggagggccctagtctgctggggaggggccagctccaggatcgctagttatctggaaatgtgaggaggggtctgtgactgccatttcagaccaggtgggttcattcctcctcgagtggagttgtaactggtctggtaagttgtttgctggagaagttggtgacttggcatcatgcctgggattggagtgcttgtccctccagccgggcttctgattctctgattggccttaaccccatctattctttggcctccttcttttcctgctcatttctcttctgcaggagcagagaggttggctggaagtaaaggttctaggagcaccctcttccttggttttgggaaaccatagttggtgtttgctactcttcatctctccctatgacaaaggcaaaaggaccaacacccagagtgccagaggagaggggcaatggggccacaacctagtctgtaccccgggtactgggaccacacaccctgctccctgccaggcattggaccaggcatctgatgggttttggccagcaaaaagaagcatgatttatt

SEQ ID NO: 26523 - DNA, 1417 bp, Artificial sequence
  DNA replication origin
gcgagcggtgcgagtgtggagcgcgcaccccgggcgaggctgacagatcgcccgggtgggtgcaagatggcgcaagcggcgctccccctgcgccccccgcgctgctgagcaggcatgcggccccagtcccccaccgcctgggctcggccccggccggagccccagccccggccccggcgccggccccgcgggacgctgtgagccgcgagaggcccgggagccgcgcgtcgccgagccgagctgaccgagagccccatggctgtgcagcgcgccgcgtctccgcgccgcccgcccgccccgctctggccccggctcctgctgccgctgctgttgctgctgctgcccgcgccgagcgagggtgagtgaaagcgccccggaccgggcggttgcggacggagccaggggaagggcgagcagggagggagcgggcgcgaggggcggacccggggagagcggcgcggacctgagggcggaccccgcgcgggggggaccctgcggatccggacggggagagggtaccaaggccggactgctgggggccctaggggcgtgttgaggacggaaccccccggaggaagactggggcaggacccggagcccagactgaggagcaaggagtgcagcgaagcgggagcaagcggggcgggctggcgtggagaccgagggaaacgagccaggggagaccgcaaggctaagcgctgaccgaggcggacgagctggggtgctgggtgcccggccgtggacatagcccgaggcagccaagacaggggacagcagcctggggagcggagaccgggactctgacggctgcactgggcggagatggcacgacctgcatttggagctggtactgggctgaggagtgcgcgggagagacaggagaagacgagggagattcctggagggcggcgcgtggctagggagcgacccgggacagagcccgtgagccaagaaggagaggagaagccaccgaaagcgagagcgagcgagccgcggggatgctcacgtgcccctgcccttccccgaagtgtgcacacgcggagaccttgccctggctctcgcggtccgccggttctgctgcctggagctcggctctgctgcctggagctcggtcaccaccactctgttccctttagtggctgcaatggtcccatctcccgggaggagagtgcaaatctagtcccttaaccctcccacctcaagttccccacagacactcatctgggctattctctctccactcctctcccaagaagtagaagctcgcgtccgcatcaaggaaaaactttattcccgacagctataccagggttggattcggggctaagacgggtgaactcacgacatggggaggatgcgcaggggtttgaataagtgcgatcctaaaaagtcttaaaacattacatcttcctgggcc

SEQ ID NO: 26524 - DNA, 1466 bp, Artificial sequence
  DNA replication origin
gacgcggcgcgctgcacagccatggggctctcggtcagctcggctcggcgacgcgcggctcccgggcctctcgcggctcacagcgtcccgcggggccggcgccggggccggggctggggctccggccggggccgagcccaggcggtgggggactggggccgcatgcctgctcagcagcgcggggggcgcagggggagcgccgcttgcgccatcttgcacccacccgggcgatctgtcagcctcgcccggggtgcgcgctccacactcgcaccgctcgcggccgccccgccctcctccccagcccgccgcccccctcctctctgctcccggtcccctcccccagccccctctccccggaggcccggtctggggaacaaaagagccggcgagcgctttaagcggccggacattcccggctgcgcggcggacgcgccccctgcgctttgaactgtggctggagcggccggcgccgtcccgggctgcagccgggtatcccctccccgcgggccagccggggacctggggggctgaggaagtggacaccagcggactggggagtgggtccgggctgcggaaagacacacagctgcgggatttgctctgacccactctttctgctgcgccctcctccaagtccatattttagagataattctctaaaaagctgcgtaaagttgtcaaagattcagttttccatggatttctggtccttccactcaaaggatagatcctgtagctgcaagcttggcttctctggaccgaggagtcctggcgctccgctggggaggattgcctggagagagcagacccagcagcaggacaatgagagctctaaaggggcctggcttccgacctgggttctgcctgctgcctagcccagtcactctcactgagctcatctgaaagatgaaaataatcttatctctcctgttcatccctagagacctttaaaccgcagaggtcctgacaaatgacctggtaactggaaaagcacatagaaagttaaaattcccagtaacgtttctgtgccacaaagaaggccctcaatcgttcatgtcagagaacatataaggagacaacagaggtcccacgtgagaatgttacagaagataagcatgtcttttagcagagacatacccatactagccctcagagatcttgaatctcagccactctctattaaatggtcttctgttgagtccagcatgatggactagtccatcaaaattattgagcagctactaagttctaggagctagagaattaaagctggcaggctaggcttagtggctcacacctgtaatcccagcactttgggaggccgaggtgggcagatcacttgaacccaggagttcaaaaccagcctgggcaacatggtgaaaacctgtctctacaaaaaatacaaacattagccaagcatggcggtgcatgcctggagtcccactgtattccagcctgggcaacac

SEQ ID NO: 26525 - DNA, 777 bp, Artificial sequence
  DNA replication origin
gctgggatctggtccagcctatgtctctggggaggttcctgcccatctctgggatttgctttcctggtctgtgcaatgagtaagaaaaactgctattgttcaaaacagcctgatgctgtaaacagggctcttcttcccttggctgcaggcatctggagatttggggcccctctttccaagatgctggcagctacagaggaagtgggagtgaggcagttctgttggccttgctgaggagggtaggctggggctcccctaagtccactccccattctcaggaggacatcatccctgattccttcatcccagagtcctgactttaacggggctcctgggagtgccaagggcaagtcatggccactttccctgatggcccattctgcagcccttcctggaagtctcccttccctgaagtcagactggctcccctgctcacctgtgggggctgcggcgcaggccagcacacatgcaggccaggaggcagaggaggcccaggcagacacccacgatgatgcccgtgactgagtgcatgtccagcgagtctggtgggggagagagaggcacagagcaggtcaggacagaggaagggcacagggcatagatcaggactatccatggctttctcaggagacaccagctggaccctcacccttcagatgctcacaatcttctgatacaaggacaggagggccctgagcctcacagaaactactactacctctccctctgactgtcctccctaaaacacacccagaagttatggtctctctgcctcaa

SEQ ID NO: 26526 - DNA, 1182 bp, Artificial sequence
  DNA replication origin
gaatgatttgcccaggtcagtagttcagctgggacttaagcccaggtctgtgatgattccctgtgtcatgcagttctccctgacacctatgtgccatccagctggggtaggggccagtgacattaacccattagacgtggaagattgtgctccaagactttttccagcttcagggtgggaaagatgtcccctcatccttcagcttggggctcccctgagaagctccctttcctccctcagatcctggtcctggcctacttctgacttgctgtgtgacccaggcaagtctctgaccgctcccgagcctcaccttccacgtcggtggagcagagctcatgctgatgttcttctgtctcagtccccagtgcagcaccccagctctccctgtccagccccaacccttcggacatcagggtggcgtggctgcccctgccccccagcctgagcaatgggcaggtggtgaagtacaagatagaatacggtttgggaaaggaaggtgagtgggggtgggtgggctgcaggcatgtatgggaatgatcaacgtgaagagctgtcagggctgctggagacctgagcagggtacgggagtcggaggaaaggaagcagagtaggggttggggaagggtgaacctgaaaaacaggggtctgggcaggaatgaaaagggaagacagaggggcctagcttaaggcagagggaggcctgggctctcaccccaacccctctacagctgcagtgtgtacttctactgagtccctgcctcagtttccttatctgggaaatggggggctgaggtgggaggatcacttgaccccaggaattcaaggctgcagggaactgtgatcgtgccattgtactcccatctgggtaacagagcaaaactctgtctcagaaaaaaataaaaggataaaaagttaggaggaggaaggtagctgagggaccaggggaagggtgaggaaggagggaaaggtgaggaaggagggaagggtgaggaagtggccatggtggccctcagggctctggaagccaggcgttcttgctggccttcatggtcagcctcttgtgtctgcatcccgtgtgtgtgtgtgttggcaggggatggtcattgacagctcctggggaagtggggaaagcctgccatcattctccctgcagctgagcccaggctgatggcctgcatcagc

SEQ ID NO: 26527 - DNA, 1779 bp, Artificial sequence
  DNA replication origin
ctatctttaaaactttttcaaaaaattgtaatgactaatattccatactttaaatatagctataatgtaattcaccagttcctgctgttggatttttaagtcctttccagttatccgctgttacagttaacactgcagtgatctgctctgttcacaaatacttgcctgtacttctgatcatcttcctaggacaggtacacataaatggaatccttggcttcaaggcctaggtgaagctcctttatggccctttctccagcattgcaatttactatttttaaaaatgttctcaagttgatgggtgaaaattaacatctgtgttttaatatctttttttttttttttttatagagacggagtctcactatgttgcccaggctggtcttgaactcctggtctcaagtgatccttccacctcagcctcccaaagtgccaagagcacaggcatgagccaccgtgcccagcctaacatctgttttgaagtgcctttctttgatgacatgaagttgaacatttttgtgtttcttggctatttgcattgcttctctagattttctgttcatgtctacaaggcaagggctttttaaatggttttcatttcacattgaggtaaaactttgtgcgcattcgaatcgttggcttggtccgaccttaccagccctagcttcatcatagtactgggctgggaccccagggaaggagcatgtccttcttgagagaaatgaattcagtaatgaaaactgacgagtgtgctgagcacctatgattaatatatgcctgcactgtgccaggggttctgacattctttcaatcctcatggaaaccctgccagttaagggctaattcccccttacagatggagacagccgggctcagagagtcccagcaagaggaggaaatgagattcggaccagggacggttgtgtttgctttatccgggtgcagagtgttcctgaggttcggagactgaagggaagggcagtccctagcgtcccctccagcgcgtctccctctccttccccagacgggaagcccatctccacagatgtcatcgtcctgggccgcaccaacctactaattgccaacgcgcagccctggcactccggcgtctatgtctgccgcgccaacaagccccgcacgcgcgacttcgccactgcagccgctgagctccgtgtgctgggtgaggcgggccgaagggcggagggagcgggttagctggggctggggtgaatagagcagggggaggtggacgggtgggtgtgctgggggcactcaggcgctctcctggaggacgaactcagggaggagtccctagtaaggcggaggtgggacgagggatggggacttggtaactggaggacggagtgcggggcgttgagtctgggatggagcgagaggggtgattaaggcctggagcgggtgattagcggggagttgtgactggggttattgtggggatagtggagtgatctgagtggtactaagaaaactggggggcagggtagatctggtaggtgtgggacatatgggagggcagggaggaaggagatgggtaaatttaggggtggggttagatccgggaggagcaatatttaggggaggctgaggaggcctggggacagttttgggagagaaagagaatggtcgttgtggggctggggtaaatggggagaagaaagggtaggtctgcgctgagccggagtagtttggaaagggtgaatcagggagaggttaaagtgattggaaggggagcgagggagggcggtggggggcaggctt

SEQ ID NO: 26528 - DNA, 1865 bp, Artificial sequence
  DNA replication origin
ggggcaggaaaccatttgctttcgtggacatgtccagcgcttgttctcacgatgggacgcgtgtcaccccggccccaccccccagggaccgaccagggaagcgtggacgaggtcagcagggcctcatccagtccgcagcccagtgcggagtgggtacggggtaagtcagagttgtccaagctggagaaagggctggggaggggatagcgaagtccccaagggtgtgtgtctagggctgcggcttccacccacagctctgtcgcttcctgtccggtgtgcgtttgggggcggctcatggggagtgtaggtggcagggctgggagggggatgggctggccgctttgttcgcctagttcttgccttccccgcggaggggggagctgaggatgtgtccggggagagtcggggagggacttggaggtgggggtggggagggggatttctctccagctgctgcggctttccagagagactcagccaggccacgtgggagggaggcggggggaaggagcctccgcctggccagccccaggcccatctccaggaaaaccaaacagcgggtgggaaagtgccgggaactcctcggaccccttctgtccctacaaagacacgcccctttccagccccaacagcggattaagctggaggccgccgcgaggctgggtctcggctgctgggccagaggagctggaggccctggcttgtcaggtgaaaggggcggggaagtgtcagagagaggtctgtcttcccagagctcaggggattaaggaatagttcccctgccccaccttccgctattcctagggctcctggaacgagctcagggtcacccagctaaacggcatcagggctgggaaccgcaccggcgcattattcaatacctttaggacctgccgcgagggacccagcttccctggcctctccctgctcccgaacgcacaaagcaggcgagggaccgagttgcggcgtctcttggttgcagtgtgagtggctacaacagcttgccctggtcctccaaatctcagcaggccgggggacactccagtcgagtcatgactagccaccctgatctgtactgaggtcattcattcgttcaacaaatatttatggagcaccttttataggctagcttgtgcctagtgcctagaatatagtaaataaggaggcagacctgatccctggtgcaaagctttcagtctggtggagggggaaactgacaagtcccctgaagtgctggggaagacgcaggaaggaggggctcctacaccgatctgggaaggtcagcaaaagcttcctgaagaaagtgatgagtagtagagctcgacatggagttagccctgtagaaggagaatgatgatggggacagttttccagagaacagcatgtgcaaagttcagaggtgatttagttgagatcattggattaaactaaatctagctggagtttagggacaaggggtggatggggggcaggtgagggaagcatggaaaggggtcagggagtatcaagacaggaggctgaagaggggagctagatccagctcacaaagggctttacagggcccaccaaggtttctggcctgagagtccccatgagcccttgacaggatttaaaatcagctttgcatcatctcattccagccagtgtggaggatggattgggtggggctggaggcaggaagctccagctccttcgaggctgttgtagcaatccagaagagaggatggtggcagctagcatagtggcagttggggttgggctggagtggctgcattccagagattttcaggaaatagaatcagtagaacttgaggatagattgaatttgtagggggcgagagagaggaaagtaagaaataggccgg

SEQ ID NO: 26529 - DNA, 830 bp, Artificial sequence
  DNA replication origin
gtgctcctgtcgtgtccgcagtgcgtgccatggtcgcggcgtggcatcggcggggcgggtagctgcggtgtcggtggctttcgcggggcgggctctgccttgcctgcgcgtgtcttgggttgagagtgtgtgtaaaagaggagggaactggggttgtgtctgcacctccatttgggtcgggtgcgtgtgcaattgtgtttatggggctgagctaatatttggccttggcatttgggaagtgtccttgcccatagtgggggacagagcgatggatcccgtttgactgggggtggtggtgataaaacaacactcaactttgcccagtgggtgtggtccctggggccggttagagaggggtagagggaggtgttgctccccaaaacctgtggccagcagtggactgggggagggggcaggaaaccatttgctttcgtggacatgtccagcgcttgttctcacgatgggacgcgtgtcaccccggccccaccccccagggaccgaccagggaagcgtggacgaggtcagcagggcctcatccagtccgcagcccagtgcggagtgggtacggggtaagtcagagttgtccaagctggagaaagggctggggaggggatagcgaagtccccaagggtgtgtgtctagggctgcggcttccacccacagctctgtcgcttcctgtccggtgtgcgtttgggggcggctcatggggagtgtaggtggcagggctgggagggggatgggctggccgctttgttcgcctagttcttgccttccccgcggaggggggagctgaggatgtgtccggggagagtcggggagggacttggagg

SEQ ID NO: 26530 - DNA, 1031 bp, Artificial sequence
  DNA replication origin
gcgcgggcgcagggtccccggcggggccagggtggccacactcgccgggcgccccctcccgggccgctcgcccaagatggcgatggaggggcgggtgaggcggcagcggccctggcccccgcgccggccccagctcgggcccgggcccccgaggccgcgcccccgcccgcggcgccgcgcctccccgggccactgacgcccggcgcgctctccccccgcggcggcggccgaagcacggggaggcggcggcggcggcggcggcccgagcccagccccatggcgcggggggacgccggccgcggccgcgggctcctcgcgttgaccttctgcctgttggccgcgcgcggtaagggcgggcgcccggagaggcaggagcgactgcggagtgctggtgcgcccgcgccctggtctgcatcgggctgcggggctggctcaagccggagtcccgagcaagtgcgggggctgcgcgtccaggtgcccgcgatgcctgcgcgggggtctgcgagctgcggccggggggcgtttgtggggcgtgcttgtccgcagtgggtgtgtgcctttggttcgcagagtctggagtcgtgtgtgtgtgtgtgtgtgtgtgtgtgtgtgtgtgtgttgggagtgctcctgtcgtgtccgcagtgcgtgccatggtcgcggcgtggcatcggcggggcgggtagctgcggtgtcggtggctttcgcggggcgggctctgccttgcctgcgcgtgtcttgggttgagagtgtgtgtaaaagaggagggaactggggttgtgtctgcacctccatttgggtcgggtgcgtgtgcaattgtgtttatggggctgagctaatatttggccttggcatttgggaagtgtccttgcccatagtgggggacagagcgatggatcccgtttgactgggggtggtggtgataaaacaacactcaactttgcccagtgggtgtggtccctggggccggttagagaggggtagagggaggtgttgctccccaaaacctgtggccagcagtggactggggg

SEQ ID NO: 26531 - DNA, 1558 bp, Artificial sequence
  DNA replication origin
ggcttttgctctgacataggagccgctggtgggtttctagcagagaagtggcatgatctcattttaacaggagcactctggctgctgtattgagaaaacactcaaggaggacaaggacagaaaaagatcagtgaggagtttgctgtgacaatccaggtgagaggcgacgggtcttggaccaaggccacagtgagaaagtggagggtgaagcatctgaacatgaagagtaggagatgactctacatttttttttaatagaaatgggggtctcgctatgctggccaggttggtcttgaactcctggcctcaagcgatcctcccacctcggcctcccaaagtgctgggattacaggcgtaagccaccaagcctggcctctacatttttgacctgggcaacaggaaaggaactgagatgaggaagactgtgggaggagaaagattgatagaaaagatcaggatgagtttgtctactagacagctaaaggaactggggcctggatggctggatacagaagtccagggttcaggaaagatggtctaggctgaaagtatacatttgggcatcattagcataaagatgctctttaaagccttgaggaccagatgagatcactaagggaagcaagtgtttcaaggaagagggagtgattcactaagtcaaatgctgctgatagggcaagtgaagatggggcgtggcaatgaatgaataaacgccaggcctgttagatatgcaaagcgccagtgattattgagggttaactgacaacagacaggtgtagagacaagatggctctaagtcacaggaacacttagagacacagggaagggaagaactatggcatcttggagttggaaaggaccttaactaggtcattgaatctgtactcttttccccaccctagcctgacaattgaacccttggctgtagaacaagaaatatttgcgggatactgaggcaaacagtctggctaggtaggttagagaaagtaccgttgaagaatgagaaaaagggtacttcagtaaatgctggacagcagaggcagggtgagggagtggagatgaccttccgaagtcagaaaaccaaggttcaggtcctgtatctgctgctccctagcctcctgtccttgggcaagtcacttcaccttctccagcctcagtttccccatgcggcgacatctgaatatggtagtgcttgaaggtagtgtaaaagtgtcctgcctgtgttagttactgccagagcaagggaaggaggccaagagaagcccttggtttgggatggcagataggactatcaagatctccgcaggtgggctggcgcaacgtgtggagaagcgaaccagcattcaggccaggacctgggctggaatggactgggctcgggtggcaagggggccatctggacaaagaccgtggccctgaatctgcctcccctgagcctggaacggaggtggagaccccgaggcagcaacagggagaagaaatagagacgctgaggcagagagaccagaagactcagagacggggagactaagagacagacccagcaacaggcggcctc

SEQ ID NO: 26532 - DNA, 941 bp, Artificial sequence
  DNA replication origin
ctaaagcctccgaggccaaggccgctgctactgccgccgctgcttcttagtgccgcgttcgccgcctgggttgtcaccggcgccgccgccgaggaagccactgcaaccaggaccggagtggaggcggcgcagcatgaagcggcgcaggcccgctccatagcgcacgtcgggacggtccgggcggggccggggggaaggtgcagtatccgcccccttctccttctcctgcgccggcgaggcctgggccacggctcaccaggccctttccgcctcacggagggactgctcggcgcgttctcagggtcagcgcgctttgcggtttacccggcgcgccgccctgcccagtgcagagccggtggtgcccttcccccctcccccccacttgccggaagaggaagccgaggctctgagattccgagtcaaccaccgttcactgggcgccccttgagctctgggcgctggcctcctggcttccacgtccgttatcttaattgagtctcgctggggttgggaggccgggtattgtcagcgcttacagatgaggaaacggaagcccacagaggcgaagggattttccttaagtccgacttggcagatgggcttcggcctcagattttctggtttttcagctggtggtcttttttctctcctgcctcatgctaggtcgattccctccctgctcactgccctctcccattctgttccacccactcgcagcaggacactttcctttcctgccacacctgtcttctcacacacttttcttctaagacttggcattcctcccatctctcttctcaatattctctgctatgcctctcctcttgttcctcattcatagtttttcaaggtctttgccccctctgtgctattgaatctctcaactaggtgtggaccctaaagaatgagatagctaggcttcagtgaggctttaggtgttt

SEQ ID NO: 26533 - DNA, 1548 bp, Artificial sequence
  DNA replication origin
ccgcgtgcgcgccggagagcctgcagtgcgccaacaaggtcggcgacgcggtgcgcttacggcgtgctggcgcttttcgaggctcatctgcagatctcgggccgggggcacaaccccccgagggctgcaggaaccttcgggtccccagagagctcggcctgggcctctcaggctaccccgggcctcttctttgttcgcagtcggcggccttcatggagcccaggcccggccctggctgcctggccgtcggggttcgagttggctggggcccttcgagatgtgggatgagcttgttgggtcaggggtgcggttgtgacagcggcttgctgggccgtagctgaatgcctgccgctggcctgagaggtccagccaggcccctcggacgttactgaggctgggcgctgccggaggtgggggagggggaggggtggggggccacacccacctcgcaaccgttcagtgatggaaatcattctcattacttttaattttaaaattcacaagagctggaggaagtgatttccccctctgttctgaaggttgtgagctcaggtttgctgagttgcacagagaacttaaaaagttcttaagttacattaagcatttctgtttgagctccttggcccttaatgtaagcaagctgaaggcacgtagtagtggagactccaggacctgtgtatcctcatgtctctgtccaaactaaagattctgggctttgagaaactggaattttcattctggaaggttctttctttctttctttctttttttttcttttcttttttttgagacggtgtttcgctcttgtcgcccaggctggagtgcaatggcgcgatctcggctcaccgcaacctctgcctcccgggttcaagggattctcctgcctcagcctcccgagtagctgggattatagacgcgtgccaccatgcccggctaatttttgtatttttagtagcgacagggtttcaccatgttggccaggctggtctcgaacttctgacctcaggtgatccacccgtctcggcctcccaaagtgctgggattacaggcatgagccaccgcgcccagcctctggaaggttctttctacagtcattcttattggaaacttctccttaacatctatggcactttgtcatctctttcactccatttaactctctctgcctctgaacaggcatctgcttggatcacccgtggatccggtaaaatgtaggtgctttctgagtgtcgacttgaatttattgaatttaatataatctttgcttctggaatataaacagttttcctgttgaaagatgaagacagtagtggccagaatgcctttaaataggctatgacattgcatggtgtgtcgtttaatgtgttcatccagactgaggctatacttttgggtcagagtatgagtaaatgttctgtgctgtctccctctactgctccacggtggtttaatagaataggaaaaaacaaacaaaatcttttgtagatggggatcaaagtccccgtctagagagggttcttccagcagtcaataaaaaagtacggaaca

SEQ ID NO: 26534 - DNA, 1548 bp, Artificial sequence
  DNA replication origin
ctgatggctaccttcccaattcaggagcagagaaagagcatcagagtgagagtgcattcactgaacaaaaaaagcatctactgtactctcttctcattgaaaaatgtaccctttatcttcgttgattaaaaaaaaaaaccggattccttccggactcaaccaataagcaattctttctaaccaaccctgaccctccaatatgttctgtccaagggcactacatgtttccgtatcttataataaatatttaatgtaaccaaaagagcacacaacttcctcccacccccaaccttttgggaaaggtatgtggctaactagggctcttcccttcctgttggatcctcccagcgttgcagcaggaagcaaccagttcatagagataaagcaagctagtatttgtgcagcgcacaacctttcctgctcaggaaccaggccttcaggtctggcaaggataacagccaccacccatccgcaacctcatctcgcgaaccgagtaaagagttatcccgggttgggtgccactgagtagggagggcaagaaaagaaaaggctaggtgggaagtaatgtcagcctgccgggtcactgcgacaagtgcgcgagtgggtgatgggcgatccctcttaccctccctcccaccacccaggtcgcaacggagacaagggagctctaaacacgatttggggagggaaggtagagagagttgccaaatggggagtgggagagggagcggtcagagaaggttaaggaccgcgagaaccgcggggcggagggtgggggcggaggcccttggcccgctcagattttacggggtcctggacccgggatgggagaagcttagaggggcggccgtccaagtggaggggagatacagaagagacgctcgctcgaggggggaaagagggcagataagaaaaagacctgtaatgggagtctgcaccgaaggcaaggccaagagggaagcgaagaacccgtcagaggggcttcgggagaggacgcgagctgggaagggtgtacgccgagggggagggggcgctacacccgaaaagagagatggtgggaggagcggcggggccgtagaacccggggaaaggaattcgacgatgtgggagaaggcagtccgccaggggaaggacacgcagggaggggctctgaggccagcgaaggcctatggagaggtcgctcagagagcggcatgtgatggggacccctgtctgagcgggggagaagaggctgagctgggtaggagacggaaccgcacaaaaaggaagggctgagggaggcctatatcagtgcaggggtggccggcacgagggtccaccgggagtggcccgggtccccgaacgaggactgtgtagagtgcgagagcccatggcctcacctttaaagaggtagtcgtactcgtcgtcgcgggtgcccattgcgcggccgaggagcgaaagggcgggagcagcagtggtatctgtgggaccagggggcgtcgctgcaggggtaacccgagcgccgagcttcaactgccggactgggtgaagagcccctccctgccgctg

SEQ ID NO: 26535 - DNA, 865 bp, Artificial sequence
  DNA replication origin
tagtatgtgagtttggtatgtgtgtgtgatatgtattggtggtgtgacagctgtggggcaagcttagcatctgcatgtcagacatctgggctgatcctggccatgaagccccaacggtgatttgatcatagtggctttgagcatggtacgggtcaaagtcagggaggggtggcttggatctatagggtatacatgcatgtgtaccgtaaaagagcccagcgccctaggtgagggctgtgtagtgtggacttggggcagtggcctgcagagccagagtctgacaatagtgatggtgacagtgtcctaggtgggagccagactgtgggggacagagggtcttgcagaggctaataaagaaaactagggtccaagtaaaatgcggtgcattcacattttaggggatgcttctaaactatctgtgcatttattcaacacatatttactgacactctgtgcaggggactgtgccgggcttggataggctgggggttaggaggtggcagggtggggaatagagtaggcacacagggatgaaatggacagatccttggagctttctgtttagtagatgggagaaaaacatccacaatgtgccaccagagtgggtatgtcagtgtcctgtggaaaggctctgtcccatagggaagacagcaagaaggctttataaggaggtggcaactgaatggagactggagggtgcaccagcaggatgtggctgagggggatggagagcaagggtattcgagggaatgggcagactgaacaaaggcgtggcagtggggccacacgtgggttggggggctgcagggtaaggcagtttggatttgctggagttcaggggttagggaagggtgatgagaggcag

SEQ ID NO: 26536 - DNA, 1201 bp, Artificial sequence
  DNA replication origin
cggggagcagcgctgcaaagatgggaaggccgcatgggcatcggttcctggcccctgccccaaggagagccttcggggctcctgatccctgactgtcccgtctcttgcaggctgcgacagcgaccactgggggccccactgcagcaaccggtgccagtgccagaacggcgccctgtgtaaccccatcacaggcgcctgcgtgtgcgccgccggcttccgtggatggcgctgcgaggagctctgcgcacctggcacccacggcaagggatgccagctgccgtgccagtgccgacacggtgccagctgcgacccccgcgccggcgagtgcctctgcgcacctggctacaccggcgtctagtgagtcatgcggcaggacctggaggggcgggacctggaggggcgggacctggagggtgcctgggtggggagggtagaggaggtggaggggctggggcggggcctggagtggctgccctcaccgcagctgcacgcccagccctgggctccttgtgggtgggctgggtggtgggaccaggagggatagtcttggctgtgaaatctcctgtgagtctaaatgcccaggcctcacccacgcaggtctcagattccttccttccaggaccgcgttgactggtccttcctgagactgcccgagtgggcactccctaaaaccctcccaggaggcccttcctggcagagacagcccttatcttgaaagtctcttctgaccttacccaaatgatgctgctcacctggggccttcccttctagggcatttgggacagagagaggtgagggtcctaggcagataccatgtacagatttgggaggattactctgcctgttcctctcccctactttctctccccagacaccaaacagcccctcattccagttccccagagagtagtattgacaggagacctacaagactgcttagctgagaccccctcagaggcaagattgaagttctcctcccaaccctgtagcagactctgtggcctctccaacagcctagatcctgaggggtggccaaggactctgaccacagagacgttgttgattgagggtgttccctaccccgatgtctggccagctcccaagtcctagtgagctagaggccagggccattggatgaaggcccaagaccaagaccccatgcaaatcctgccccacccttcaacagcacccagtccctgca

SEQ ID NO: 26537 - DNA, 1186 bp, Artificial sequence
  DNA replication origin
agaatgtggaactttcagtgctgaaagcaagatggttgctcaccctattagccagacaagtgagacatcctttacagcccacttgagatggcttctgttttaagaagccttgcctggtctccttagctgggagcaatcattctttccatccaacttctcccagaacattatgtgtgcctgtccatgcctgaactccacaccctactttcaccccagaatttgagcgaatgaggctataactgaggacatcttgttattgtgtgtcccatatgcatcggggagggtcagagtgggaggtggcagcaggcttggtgacctctctggggctctgctactcagcccctttccatagccgtagagtgtgaatttctgcaacactggctcagctatctctctttgaaacatttaattacatgtaaagatcttgaaggctgcctgttacttcccagggaagcctttctttttcctgctccttctgaagctggctgcttggaaagtaatgaaactgaactgaagctgaagcaaccagggggcgtaggcattactgaaaggaagaagcatgaggaagagatgaaaagggtgacagggagatggagccaggggaggggcagggagttagaggaaatattcccagagagtgagtgaaatgcaaatggtgagaaaaccaatgcgtgtggggaagagggagaagcgggcaggaaagatagagaaatgggagctggaatgggctgggtcccgcaggtcccaagaagagaggggtagggtcacagaggagaggggtggcagatgggaaaagaaagggcccggcagaaaggaacagaaacaggcagccaaccaagagcttagcaaagagggatgtaaacagcttgtggctccggaatttcaatacaggagaggggggcttagggcagccatttggttggaagagaatggccggaccaggaggtaggttctgaagctgccttgaggaaacaaacgctctgcccttcttagcctgtgcgactatttgcatggcttggtggaagaactgatgcaggttatgaggcaccaaagcttccaggcaccccttgctgccacctgtccggggagcagcgctgcaaagatgggaaggccgcatgggcatcggttcctggcccctgccccaaggagagccttcggggctcctgatccctgactgtcccgtctc

SEQ ID NO: 26538 - DNA, 968 bp, Artificial sequence
  DNA replication origin
agcaggtttagtaagtgccatgttagtaatacattctgcatcacaacagcccaaatcccactattgatttttttattgtgttccttcatatttgaagtcgccatgcattttaaagtaattattgaatggcatcctcaatatagcttaacacaaatatcattctaaatgggagtgattgattttcaatactttcaagtggctttctcccttgtgccttaggatcagttataagacggcgtatcggagaggcctccggaccatgtaccggcggaggtcccagtgctgccctggctactatgagagcggagacttctgcatacgtatgtaggggctgctgctgttctgccctcagtggggaagggaggagaggcaaaaggaggggaggggaggggaggtggggctgatatccacggcccctaggcagcagtcctcagccagatggctccagaagtccctgcctgctgccagtgctcagaaggaataatgagtttggtgcaaatacagtagcaagggttgggccatcagatcaacctccttacagggtggatggaagtgcgtgagttcaaggccttgatgggggataggggagaagtggctccttctggagtgggcactctgagaagcaagggagaagaagtgctgggtgcctggcacagggttaagatgtgcaggtgctcaagacagctttgctggatggaaggagagatggatgggtatgtagatggacagttggatgggtggaaatgggaaagggaggaaggaaggctgagttgttggatgtcaaaaccacagtaagaaaaggatgggggcaaagatgagatggaccatgaggaagtggttccgggagctgggaggatttccaaaaaggatttgggggacattggagaagaggtgggtgcatgaaagacaaacattgcctcttttcctatttgcttagagcagctcagaaaatgcaggccttagtgtcc

SEQ ID NO: 26539 - DNA, 1410 bp, Artificial sequence
  DNA replication origin
ctgacacttatcttcctacccttaaggcactgccagagtttgggatccaagcccaaaaaggaaatgattatatccaaacacagcagtgttgaaattgtggaaagaaaaaaaagaaaaaaaaccccacaaaagcaaatgtgctatttactttatgcaaagtggctttgagaggaatggtaaggattagggtagacgtgagggaggcaggagttcctgctggaacaggggcgggttgtgggtcttctctgcagaacttgaggcagcaggggctggcggggcagtgcagggtgggaggagggtgcagggagcaggggttgtaaatgagctgccgtccccacattctagagatgtcattgctaagggatgaccatggcccctttggaggatttgctaagcattctttcaagaaacgagtatgtatggggtacatcctgggtgccaggcactgtgttggctgcagaacagacccggtggccttcctggggagtactatgcagtgtgagagacaagcaggaatgaaacacttgtgtagggggctgcatgggacagatgcatgcagatggagtgagtgcttggaaggaaaggaatatggctctaggaacacgtaaagcaaaggagcctgccttggtttgggtgaactgggaagcaggcggggagagtcctgagggaaggagagctgagctgggatggaggatgtgtaggagttcaccagacaagagaagggggttgggggtgggagttacagagagagatcctgagcagacggaaacacggtgctttgggagaactcctagaaagtcagcgaggcaggggtggagagtgagaggagaggggtggaaagaggggttgagggggagtaggtgggaggcacccagggcagggtgcacattttggtctttatacccttccatcttgaaggattttaaggtagggggtgggcaggtagcgatggcgggggtggtttggggttgtggggagagtgaggaggtgtgaggtagcagtgatgtggtcagatctgtaatttaaagagatcactccgactgctttgtggagaatggatggggaatggagggtgaagatgaaatcggggcacggattcttagggcggcccaggtgagatggtgggagctgtggaagagggagggggatgggttccagccctggagaccacaggctagctgaaaagctgctcagctcaggttgaagtggaaacaggcatcttcagtgtgggatgcgtggggaggaaggccacctagattctttttttgttttcagttttgtggaggtataattgatgcatattaaactgcacatatttgaagcattacaatttgatgagttttgacatatgtatacacccaggaaaccatcgccataataaagatagtgaatatatccatcacccccaag

SEQ ID NO: 26540 - DNA, 1138 bp, Artificial sequence
  DNA replication origin
ggcgtggcggtgcccagagcccccgagcccgggcggcttctcccggacctggactcgcgggctccatccagcggcagccgcgtctcgggatcggtgccccgcagcccgcgctgcgaggccagtgtgactgtctcccgagtggtcatgttctccggaaaaatatttcaaagtggctccgcttcaggatcgcccactctccatccctccaagagccgagagaacagggcctgcggcgggttggaggaggcctttgggatggtttgggctcctggccatctcggctcccttgggcaggggtcctcgcgccccggcaccagcgcccctccggcgctctgccagggaaacaagggttaaaaccccggccggtggggggtggggggtggggggcggggggtgcggctcgcggcggccggctggggcaatcggagcctgccgggggctcagtcccactcgttcccggagtcggaggggccggattcgccgacctctgcggcttctcggagccagcggagccccggcccagcagctctctttgttggagtgctgtcgggagattatcttgagaggtttagggggtttagaggtaccaaaagctcgaggctttccggagagggtccctctgccgtcactccctgcagactgggcggggtgccccgagggcgttgagcagacgttgagcatcctctgctcctccggcggattttcctggtgcacaccatgcaccagctctctccgttgctcacattttgtttaagccgctagaaattcgaggtctaggactgcaatctcgccacttcctcccactcacagatcagcaaactgaggtccagagaagtgaaaggacttgcttagagctgctatacgggaggaagagtagataaaccaagtctcctgacttctgggtcagggccttttctagtattccactctaactttactgctttcttcgcacagggcaagtgttcccagttaggccactgcacatccttgacaggctcgagggctgggtgtgtgtgaggttagaggcagaggacctgtctctggattttcgggttaggtgctgtgctgggagcatctcccaggataaatcactcatgtgacagtttgttgcatacctgttctgtccctgcaccgagct

SEQ ID NO: 26541 - DNA, 1257 bp, Artificial sequence
  DNA replication origin
aagcttctaggggagggacttgctccatcagacccagaatggcccgggtgggctaggtgctcagacacacggacggacacacagctcccagtctcaggcattaggcctactttattcgcaaaaattcatctccccaggtgtgtataaccacctttccaaccctgggcctttccgctccagttttagttcaaggacaaaagagggcaaaccccacgagcaaagtaccctgccgccactcctatcccgtgtaagcaggagtcagcccacatttcctgggaaggggtaggaggtggaggaaagggggttccctgcaccactcttaagagccaggtctttacccctgtctggcttggcctcactaggagtgtcgtggggcagccaggcggccccaggtgctgtagcagaggaggaaggcttcctccccatggcccccgggacttgggcgcagaggcaggcaaagggacgggaacgagctgacgggcctcaggcgccctcgcacttcccgcatcagcgcaggagcccagtcctaggctgcgaggagcggtgggggtctcgaccttgcctggagtagacctcggcaagacaagttcattgccctcttctctttgggtctcagtttcctcatctcaccaggcacggctcagcccgacttgggtcttaacattttgagttctttgcttttcttgcccttttccttgccgggacgtttctcgagcccctgtcttgagtccctgtctccggccctacccctccctctcgaccttcggcctgttaggagcacggcctgggggtgcccctggctccatttaacccccagacccccactcccatccccgggatctcccatcgagagcatagaggaggaggcgcgcaggccgctccactcccccaggagggaaagggggagtagggaagagaaaggggagtagacgcgcgagaaggttagcaggaggagaaaatagaaaatagagaaaagagggagcaagaaaaatgaccaaaagaacgaaagtggggaggagggaggtgagatgctggaaaaggatgaatgggagaaaaaggagaatccaaaggcaagctgaagagagagactgaagacaggaaaaagaacgaacgagcgcgcgcgtaacagcaggatctgaaaggaccaaacagagagaaagaggaaaaaaatgaggggggtgtgcgggagagcggagggagggagctgcgagccgggaggaggaaggctgggagggaaggagagggaggggccgaggg

SEQ ID NO: 26542 - DNA, 1306 bp, Artificial sequence
  DNA replication origin
gccgggagacacgccgccatgctgcagaagcgggagaaggtgctgctgctgaggaccttccagggccgcacgctgcggatcgtgcgcgagcactacctgcggccctgcgtgccctgccacagcccgctctgcccgcagcccgccgcctgcagccacggtcagggccggggcgggggcggggacggggccggcgggagcgggcggccgcagtgaggggctgagcgcggccgggaggcggagcgccagcggcggggacacggaggcgtaggccccgcggcctgcgcccgctcgccggcctcaccccccggctctctgccggtggggacccagcggcccgggtccgcggcttctggggcgcccgggactcccttactgctccgccctgtccaatgggagggcccgacagacccgcaccccatgccggaggccgggtggtttggctcctcagaggggcctgagggcgcggaagccgaggcctcctcccgccgcaacctcgcgccgtggagaaatggggaggtcccgagctgggagcccccgggagctacaggccagctgctgccgctgcgaagctgacatcgcctgctttgcagccacaggtttcctgacctgcccgcactgttgccccagacttttcccccagtggagagccacttcaccgtagatttgtgaactctctgggcccgcactggagcggaaggtcacggggaagttggactggggactcctgggccccagtccttggtttctaggccacaagggtggccgatagaacgatgcacgttactggctctcttcccccatgggaggatgagaatgggctgggggtccttgtcagcgaatgtgtggaatcctccaaacattgtgattaaggtgaacatttcagttagagcttggctaaccagctctcagatgcaggtctggtgggaaacctcacctctgcacgttgcttgcacggagcattttctctgttcaatctttctggcccttggaggctgctgagcacgtgcagaagcttgacacagagccaactttaaattgctgggcatcatacacaagtggtataaatgtgggggtgcttcatttgaatgtgtttgtcaatgatgagttaacactgaaatattcaggttatgctgaaaatgtgcttgttcgttgttaaatcagccatcctctccggcacctctggcaacaccataaaccacgttgagcttgtatttatcacagcttccaaaaaaatgagggtgctcaatatacctgaactttgggcctctaccaaagtagatttgtcttttaaaaactcccaccatgg

SEQ ID NO: 26543 - DNA, 1304 bp, Artificial sequence
  DNA replication origin
ccattggttgtctgcgaggcaataggggcggagccgagtgggagtgtggaaagcgccgcatcccgggtgggaggcgaggcttccccttccccgcccctcccccggcctccagtccctcccagggccgcttcgcagagcggctaggagcacggcggcggcggcactttccccggcaggagctggagctgggctctggtgcgcgcgcggctgtgccgcccgagccggagggactggttggttgagagagagagaggaagggaatcccgggctgccgaaccgcacgttcagcccgctccgctcctgcagggcagcctttcggctctctgcgcgcgaagccgagtcccgggcgggtggggcgggggtccactgagaccgctaccggcccctcggcgctgacgggaccgcgcggggcgcacccgctgaaggcagccccggggcccgcggcccggacttggtcctgcgcagcgggcgcggggcagcgcagcgggaggaagcgagaggtgctgccctccccccggagttggaagcgcgttacccgggtccaaaatgcccaagaagaagccgacgcccatccagctgaacccggcccccgacggctctgcagttaacgggaccagctctgcggagtaagtatggggcgggcggtgaacctcggggcccggctggggaggcccgagccggggagcaggagcgcgcgccaggctccgatctggtttgtcacgtacgtctggggctggcagggggcgagaaactcccggccgccgaggtatcggtgactaagcactgattgtgttcctgactcagaccagttagcggatcccgcgggtctccattcctctctgtaccccttttcccgaccgttttagtggttcctggccactgtacagtcttctcccaagaaaataaaagctagcacgtctcccctgcctcctcccagttctgttctaaatgtgatcatctgggagtctggcctgtaacggggagaggaggctaatgttttggaaagaattaagatcgcatctgtgcttttgagaccagctcagggtattaagtgtggagcatcatcctcaccttcatgcctgacacctgtggggcctgagtgccttgttgcaggccaactgcctggccagcgggggcgtgctggaagtccgtgtggacttcgtggcttttccttgctgactttggaggttcctggtacttggccttcctgggaaattgctcaagaaagcggctttcttcttcatcctactcttcattcattcattgaacaaaccattttctcactaatgatttcctagctttcc

SEQ ID NO: 26544 - DNA, 1303 bp, Artificial sequence
  DNA replication origin
ttcctgggaggcgggaggcggccagcctggttcatcagcatccagtcctctagtgctgccacctagtggacgcttaataatgtgagtaaaatcgaaatagtacaataatgaacctaaccgtggctaacgttgactgggtgcttcctaaggtccaggggctttcatgtattcattcatcaacccctgagacaaggcaatagatgcagcttcggctgcagtggggcgggaggttccaggctccagcaagggcaggcttgtacggctgtgtggacaaaagccggccccgtctggactgaccctggcctcgtggtggccctgctctgagggtggtgctattactggaaccgttagaggttgaggaaactagagagctccttcaggcctcgctacctagcaattgtgcggaggtttgctgagggaggccagggggtgggtggggtgggggtctagacccacccacctggggggtaggctggggggaggctgctttactggggggcccagctggtgaacggggccaggtcccttggggtttccctggtgatgcctgtggtgaaggcactaagatctttattcccaaattctgacgttccccaggtgcattcatggggacaggagtgattctcaaagtagaagccagggctgggtcccttacaaaaatgtagtgattggatgggggtgtgtcaataaggatatttcccccaccagatttcctacctgtctgccctctagcctttcctcaagaaacatttcctgagtccccaagaggccctggccagagtaaaataggacttggcctgtgggcctctggaactgggggtctcatgaggacaggaggcgagcagggaggggaaggggggaggttctggatgtggtgcagagtggccgggctgtaatggatggagggatggaacgctgagagactaggggtgtggggctgtcttcgaagggacacgaaggatgcagagacatttgccaggcgttcgtggaggcacagagtggggaaggcattggaacaggtggaaggatagcatgagtaaaggccctgagatgtatttctggacctgggaggttggtatcttctctctgcttgcacctgccctgcagtgcccaggcaaggctgtgtcctcaggggtaagcaggccgctgaacaggcgagtgggctctggggactctgttccctgggctgaggtaggcaggaaacatacgactttaagagctgatgtccgcctggcgcagtggctcatgtctgtaatcccagcactttgggaggccaaggtgagcagatcactgtcaggagttt

SEQ ID NO: 26545 - DNA, 979 bp, Artificial sequence
  DNA replication origin
actccagcctgggtgacagaacaagaccctgtctaaaaaaaaaaaaagaagagagagaagagaaggaggaggagggggaggaagagaaggagggggaggaagataaggaggaagagaaggaggaggagaaggaagaggagaagaggaagaaagagaaggagaagcaggaggaggaggggaagaagaagaggaagaaagaggaggaggagaaggaggaggaggaagaggagggggaggaggaaggggagaaggaagaggaaggggagaaggaggaagaggaaggggagaaggaggaggaggaagaggagggggagaatggggagggggagaaggggggaaggggagggggagaagggggaagggaagtggggagggggaggaggaggaggagaaggaggaagagtgggggagaaggaggagtgggggagaaggagaaaggaggaggaggagaagaaagaagaggaagaaaaaaggaaagtggggattgggaaggagatttccttgaaggtgagtgggctcagccgcacagtggctgcactggctggagcccagctgacctgctgaggtcagcttcctggacatagcctgctctccctgcactcctctgcctccctatggggaggaaggttctagtgtgaatgatattgttcagatgaagaaactgaggtcactagacatggttgaggctggaccccagcctgcctgagtccacgctgaccgacagaccaggctccgatgtgatccccaccagccccacctggggtctctctgccgccccaccaagggccctcaggcatggcaaccattcgttctgtgttttccaggctggccatgccatgttttaaacagtctgttgttctgtccgcacaaatatcccaggacttgtcagtctgtgtgttccaagccccttcctgacctcccactccgtcccaccgtctcccctcggtgctggaggcgtactctgcacagctgtctgtca

SEQ ID NO: 26546 - DNA, 1407 bp, Artificial sequence
  DNA replication origin
agatcatgctggcaacttgaatgtattcatattcatattcgactggaatggagtggcttttctaagagtacatctgaatgggggagaaggagggagcagatccctgagagcctggggagggggtatgtgcacagagaggggaagctgaggaccccagaggctgagggtattgcccatgtgccagaaggaaatgggggggttgctattgtttctaggagaggcctggggtgtagggggcacagaaaactcagtttccatgagtcagtgctggtaacctggagaagaagggggcattcttataacccagaatttcccccagggggatgggctggcctgtgggcctagctccacatccatctctctgcagaccccacagctgccctgggaaggagacactgtcttcatccccatttctctccccgtagacggaggccctgagagagggagcaacttacccaagagcagccacactgaggcagcgccgggattcctggaactaaggtctcttgatgagttgctttgtactcacattctgcctgaatctggagctaggcctacctgatttctggctttgtgaccctgaacaagttactgagctcggtttgcctcatctgtacaatgggtgtgatagtggctgtctcctgaggttgctgacaggaagggtctggcacacagcaggcatgcaagcagtgggagctgaatcacagaggagtcaaatcttacatagaacacggttctcaaagcagcttaatgaaaagaaaaacttcctggaaaatcctttctggaaggagccataaagagtgaagtccttggggacgggtggggtgaagggaaggcgtctatgggagaaagagtacggctttagaattgtccagaaggtcaaaaagtgaatgaggccttgaggcgggcaagctgtgtgcagtggaagaggggctggccccctcatccccgtgcaggtgcaggaggagaacagtgccaggacaggctttgaatgcgagctggagaggtcaggccccgcgccctgttggagatgcctggtcttggcagtggggtgatcacagggggctccctccgtgtgtgcctggatttccggaaccccaccccagagctgtttctccgaggagagctggggccggtggacggctcctggctgcccctgtcaggcctctcccccagtcctccgcctccctccctgtctggcagccaactgaattttatgtggggaatttgaagaatttgaaaaggcagaatgcaaatgccagtcttagagatttccttgtcagccgctgaaggggaaaagcccctctttgtggggcagtggagagagaagtggagtgtggagttctgcactcgggtccccaccgatgctggcggccaggtggccagggacagtcccttcgcccccca

SEQ ID NO: 26547 - DNA, 925 bp, Artificial sequence
  DNA replication origin
ctgcttcattgggttgttgtgaagattaaatgaattgatctgtttagggtgctcagaatggtgcctggcctggagtaattgctacataagcaggactgttgtgtttatgcttcagtaaatacttatgaagcctctaggtgccaggcaccatgctaggtgctggggacactgggatggatgaggcaggcctcttccctgccctctaggatctctgtgtctagtcggatgaccaactatcctggtttacctgggcctgatggctttcctgggacatgggccaatcactgcccaaactgggaaagtcattggcaaaaggacaaattggcttccctacatctagtaggggcacagataattggacaggtcttcccaagaagacacagtaaagaagttcgggctgtcatggaagcattggacagggcaagactgaagcctgggcaccggggagggctcccagggaagaagcatttgaactgagacctaaggataaaaagggggttgagcaaaggaggaaggtgggtgagagaaaggggcgtggaggagagtgtcctgggcagagggatggcatgtgggcagagctggaggccagtgagaaggtggcacatgtgaactcaggtgtgcccagagacccgggcccgtgcaccgagacatgcttgtacaagtgctgagaggaggatgcaaggggcagtgtggcagggagatatatacacatggatatgtacatgctggtatagccgcagatcgcctctcacgacagtggttgcctctgcggaggagtactggggagggggtgctggagaggtgggacagaagccctgtggagcattgttaagtcgtgagaatgtaatacctactccaaaagataaaataatctaaagccacagcctcgcatgcctgggctcactcccacgcctagctcattccg

SEQ ID NO: 26548 - DNA, 962 bp, Artificial sequence
  DNA replication origin
gagaggcccgaactcctcaggggatggagagctggcccaggctggggccatactggggaaacaggagaatcaggacttggtgactggttgtccccgggaagggaggggactgcaggacacccagatttctaggtggatggtgtactcccaagagctggggcaggtctggagaaaggcagtgagtttgatgtcagaccagctgagtgggggtgcctgtgggacccctcacagtcgtgggtccaccctctgccttcactctgtccctcagcccccagtctcccacccccagcctccagcagtctctgcccaaactgtctcacagctatgggggctttgaagttccctcctccttctctccttcccccttcccatgccgctctccaccctcagagctctggtttggcccagccaggcgcagtctggtctccctgggcaggaagccagggggcagctgagggaggccaggcctgctgtttctggggactaaacccctgggggttgacaggccttgtatgacaaatgcggtagttaggggcaatcccccacccccactggggctcctgggatccaaggaagagaggtaaacacacaaggagtgccccatcccttccttcctctgcacagagacacacagtccctggcccatcctcacaacttccccgaacagggagcagggccagaatgtctgacccattgctcagaggaggacactgaggaccagggaggccagaggatgcctgcccagtcacattccccctctgacctccgtgcccccacctctcaatgaggaggtactgggggcccctggaagaggatgggaaggtggcgtgaaaccagctctgccacatccctgccctggggcctggggaacaaaccttcgctgggctgagccttggtttgctcatctgtaaaataagtatgacagtgcccacctcctggagccctgaggactgaatgaggac

SEQ ID NO: 26549 - DNA, 2160 bp, Artificial sequence
  DNA replication origin
tatcaggactctggggaggacaatgcttatgagaaaggagtggaggtctgagggggtacttccaggataaaggatgggcaaagagtagtgttttcctgaggcctcccaaagcacttccatgtggaccagtctggttggcatgaagaatctgggccaatggggatgtcctcatctataagcaagctccccctgtgatcatcctgctgttccagcctggcactgtgctactctctgtttgtccctgatgtcctgtttctgtggctatgactccctggaaacaggtctgttaggccagacgttttcctccacagtggccctgaccatatagaaagggcacaatcttggctctcccatccaccaccaacaccaagttggagaaagacagggagcaagtggagccaggagtctggggaggcttcctggaggaggtggtctctgactagacaaaagaaacaggagaccaggacttggttctgaggatgatggggaaccagagaaccaggccagagaggaggacggaagacagatttgtgtttcagaaaagcagtgtctgtggggagggggaggaactcacgaacttgagatatgaaggcagactggtgggatcgggtgtgggtgagagaggcagtgggaggggtcagggatgctcctaagtttctgcctgggggaaggggcaggggaatctcaacatgtccttttagggcaggttgctttcaaggaggccagggagagccaggcggagtgtccagtgtgcagctagatgaaggcatttgatgtttttgagtcagttgtgtccaggtggtagttgaatctgtgagcaagggtgaatcttgagacagtgggaagagggagcctgaagctggggtgtcccagtgttagaggcagggtgatcagagggggagggggacctggcgatcacgagccctaggacacacagacaaaggcagttcagagagggagcatcccgcagggcccaactgcacacaaggttgtgtggatttggccacagggaggccactgatgggcctgtcgagggcaggtcagtggagggtgaagcagaggccagatggacccactgagcccgaggccctggcatctctctcggggggccctgccacagcctcccagttggtgtccctgcttctgtcctcaccctccagtccattcaccacacaatggccagaggactctgaaaaacacacccgggtcatggcactccccgcctccgaccctctctctacctcctcgccaccacccctgacgtggaccactgaggcccatgccttctggcttctgccctctcctttcacgtcttgggcccctgctctgaacaaggggcctgtttttcgctctcagatctgtgggggtctcctctggcttcagcacctccacccagaagaccctcacggcccacactctcacccttcacctgggtcaacccgccctcagatctgagcaatcagtgtctcccaagggaagcctccccgaacacccgctccctgcgcccacatagttcaggttctctagttttatacgtgctgtgccacatacaaaacactcctcacaggcctacctaagtttttaatcacgtgccttatctgcctttctcattcgaacgtgaactattgagagggaccggggccagttctgctgtgtcctccataaactgcaaccaggcatggcacctggcatggagtgggtgcccagtacatgggaatgaattagtgctaatgaatgaggacaaggatacaaagggattaaagagagtatataggacaaatgttgtcactgagacacttgcatgagaagctggaaaaggacagtgtgattcttggagggggcagggggtttaaccacctggtgccagcctccgtcaggcttcctgtctatattaaaaaggtaacgatcataatcgttgggcacacagtgtgtggtcagtagatgctggtaaacagcctcgcacctgcttccgaggtcttacagcgcagttcaggctgggctgagggtgcggtctcatccaccatcctgtcaggacggtgaatctccccgacccccagcaggaccagctcagggctgggctctcccacagtccaggagagcccacggtgctgcggggtcgtaggaccttggcgtcaggccactccattcccaagttcccag

SEQ ID NO: 26550 - DNA, 1956 bp, Artificial sequence
  DNA replication origin
gggacccctgccctccccaaactggagcaccaggcgcgggacaaaggagggggcgcccggcatccctggcctgtctgagtaggtcgactactgcccccagcctctctctggggcggggcagggccctaccagggtgaacccggggagggcatcccggctctgagtggggcgcatcagggtcgcccccaccccctcccgcggcccgcccctcccgcgccgccggatgtttgagtttggtttttgtgatcgagcggagctgggaggggccgcccgggagccgccgccttatcgggctgtccccgcgctgtctcccgctgccccggcctcccaggctggcggcctctccccccacccggctcccggcccggctccgcgctggcgggccggtccctctgggctcctggagggcaaagctgggggtggtggggtcctgcagagcggggccgagcccgcccgcagcgcctggggcctggggagtgggtggtagggtaggactggtgtcacgaagacgccccgagggcaggaggccctaaccactcccttggcagtggatgtggggagtgggaggaactggagggctttttttttttttttttttttttggagattgccccatcccttttttgttttgttttgtttttttgtttttttgagagactggtcttactatgttgctgaggctgttttcaaactcctgagctcaagcgatcctcctgtctgccttccaaagtgttgggattacaggtgggaaccaccgcgactggcccccatccccattttatggaagaatacccagagctcaaaaaaggacaccaaccggctaaagccacccccaggcgccatcaagatcctccccagccccggcctggaacggctttcctctcccggggcccgttgcccgtggcaaagaggcgaggtctgctgagccccggaacatgctaacctccagtgaggcctgtgggggcccaggccccaacacagtgaaaaatgattgggttcctctctctgctcccagccacactggcctcctttcgctctggctggtccctcagcctagaatgctctcttcatctcggcttacagaaatcctgtctctccagggcaccacccgagactaccttcattcagcccctagaggatggaggactagaacctcacctatgaaaaagagcaaataccaccagaggacaatcgagtgagggttctgaagcttggggttcccttcgtgaagtggggagctgagatggcagaagacacctctccgcctcctgaagcagcccaggaggtttcaggtgaagacacctgagatgggaggaggtggtgtaacctgacatccaggatctaagggtgtggtcagccctgcagggcccatacccaaaggtgaatctgagcccagatttcatgcagccactcagcagtccccacagtggtatccagtggctgtgtgtcagagggtggggctgctgagcagggagggtaagattggagcaggcattgtggagtcctgggggaggagggaagtcagggaccatccaggagggaaactttcagctgctctggagtggttaaaaagaagaaggtaggaacaggaaggtagattctggcacaggcaaaggtctgggggcccacgagaggaatttgggggcagggctttagaaagatggagggatggctggtgtcggtggagatgtcagggtaagctggggcccactggggagactctttgtcgttgttgttgttgttgttgttgttgagacggagtctcactctgtcgccccggctggagtgcaggggtgcgatctcggctcactgcaacctctgctgcctgggcccaagcgattctcctgcctcagcctcctgagtagctgggattacaggtgtgtgccaccacgcccagataatctttgtgggttttagtagagacggggtttcaccatcttggccaggctggttttg

SEQ ID NO: 26551 - DNA, 1295 bp, Artificial sequence
  DNA replication origin
cggtgtgtaggggggatgcagaggcttgcaggagaaaagtgagaagaagggctggagccggctcatcacgcggctagtaggcccactgaggagtgtggactttatcatggcagtagtgggaccctctgaaagtcccctctgaatatggagtgggcggtgggttggagagaatgtgcaggctggaggcaagcgtgtccgtgagaaggccaaggctgtgccctgggattggaggatgggccctgggtctggggattggggatggggaatgggacagactcaaggctacttaggaagcagtctcagtcggccttggtggctccctgaatgtgggagaggaggggcagggagggctctgagtggctcctggtagccagtggccggctgattgcctggccttcctcttgccgtagcaatggaggccatatttggttctgtcaaaacctctctaagctgaaatcatctgatcttcttcccagcttccagccccacaccctccccaccacgtctggctatgaagccagcctccccatctcacgcccacattcctattcctttagtcagtcgctcaacaaaccttcaccgagtccctactatgtgccaggtgctgtgctggaacctaagggatacagctatgaacaagacagtcctgcctttatggagctcacaatctgaagaacaatccggataacagtgaccaacaaagacgtgcaaaatgtcagagggccacaaactgcagagggtaaggggtggtgggaggcaggcgggagagcattgcatacattttacatgacatggtcatcttaatacagacccagtcacaacttacactttttaggcattcattaagtctcaggcactgttctaagcattttacacgtgtgatctcattttgcactgccactggaatgagggaaaagtggaattccagagtttcatatcccagctctgccactaccatgaggtcttgtgcaaattgcttctctctgtgcctccgtttgctcatctgcacagtaggcatagtgattgtttctacctgcagggttgtgaaatgcgtgagtgtatgtgaagcgctgagacagtgcctggcacattagtaagtgctggacgtgtttgctccttctaggtctacatttttagcagagggaatagcaagggcaaaggccctgaggtgggaaacacgttccaggaatgggaagaaggttaggacgacacaaggggagtgtggcgagggccgaagttagggaggcagggcctgggcaggttgtggcttcccctcccctgagtccttttcctga

SEQ ID NO: 26552 - DNA, 809 bp, Artificial sequence
  DNA replication origin
cgggcgctgtcaggccctgggcgggggtgccggggtggtgtggggcgggggcccgagctcggcccgccccgggagccggccccttggagcctccggccctgcaatgggacgtgttctcctttaagagttaagaaacttgaaaccttgtttgcgcaacaatcagcgccgcggagccgccaaagtgtctagactggcatatgatgggaggcagccaatgactccgcggcgctcctccgggggccctcagtgtgcgtttgaggagaacaaaaaagagagagagagccgagcgggggagcgatcgagggagctgagccgagagaaagagccgccgggcgctgcctcgccagacctcgctgggaccccggggccaccgggaggcacttttgtggaggggggagggggggcgacctcggcagcctcggcgcacgaagcgtccgagggcagcgtggggcgggctgcgacctctgcatcggtggactgcatttttaattaaggattcccagcagctctttgggatttttacagcttccactcatgtgttgacacccgcgtccaggagaaactcgctccaagtgcatctagcgcctgggacctgagacggcgttggcctttcgtgcatgcaaatccagggatttaggttttgtttgggatttccttttctttctttccttttttttttctttttgcagggagtaagaagggagctgggggtatcaacaagcctgcctttcggatcctgcgggaaaagcccatgtagttaagcgctttggtttaaaaaaaaggcaaggtaaaggcagggctttccagac

SEQ ID NO: 26553 - DNA, 1149 bp, Artificial sequence
  DNA replication origin
ggcggagtcgcgaagcgcgctcgcggctgctgctgctggagcaggaactcaaaaccgtcacgtactcgctgctgaagcggctcaaggagcgctcgctggacacgctgctggaggcggtggagtcccgcggcggcgtgccgggcggctgcgtgctggtgccgcgcgccgacctccgcctgggcggccagcccgcgccgccgcagctgctgctcggccgcctctttcgctggcccgacctgcagcacgccgtggagctgaagcccctgtgcggctgccacagcttcgccgccgccgccgacggccctaccgtgtgctgcaacccctaccacttcagccggctctgcgggcccggtgagcgcgctgcgccggccgggggggccccgggtccccgtccccatccccttccgtgcccttctctctgtgacactgcgggtcggcgcagctgcgggtgctcccccgggtgcccttggagcgtgggagccaccaggggaggcgcctcagaccggccgaggggagtgggtgtcccagcacacacatcaagtggcaactttatctcaaggctccggtaaacttaaaagggtacatgtcgtagttttctctgtgcagtttcagggacatgatgtaggctccaacttcataggcagtgaaaggggagggcaggccaaggagagaccaaagaagtaggtgctatttcctcctacctcaattccggaatctaccccagtctgtgcccaggcttctagcatttgtatgcacgtgcccttacccacactgtgcttttctatgtccaagtagctgtaagttgtgaaattgggtgtacacaaatcatagctagaatcaaaagtgttcgtcaaatgtccaatttgtgcctttgcatactttcgacaaagctttgcagggtaacccctctctggagtaaagagcaccctctttattccccacataatatcattccccacatcccttgggtgtcaagtgccagggtcttccatagtccttctcaagttttgtgttcagcttttgtatagagtttagggtcttggaggcatccgtgagtagatgaagaagccagatactggattacctctgagaactgccccccttctttgttctcctcttgggatttcctgcacacgccccaccctcagc

SEQ ID NO: 26554 - DNA, 1863 bp, Artificial sequence
  DNA replication origin
ggagtagcagggcccccagcccttggcgaagctgatgcggacgctgttggggtcgtaggggccgtcggcggcgtcgggctcgggcgcgtgctgcaggcccgagcgctcgaagtcgaacaccttgatggagtagccggggggcaccttgcgcacgaccagggcgcggccgccgggcgcgtccagcgtcggggagttgacgaagatggggtgctcgccgcggttgtaggcccacacgccgtcgggctccttgctgagcaggatgccgaagccgatcttgctgcgcgttcgccgcaccgactcgctgcgctgctccaggttgagctggcccaggcagaagccgctgccctgaggtaggtcgtagaagatgctgacggcctggtcgtacaccgcatagaggcggcccacgcgcgtccggtgctcccagtacgccacgctgcaccagtggctcggcttggtggcgtccggagacatgctggcgtctgcgggacaagcacagggaccgccgcgttattctgggtggggaggtgggaggcaccgaggagcggaggtgggcactgctgtctgcacagtgggagctgggtaaggtttccagcattcagcagtcatgtgggcaccgtgtgccaggttgtcctcaggaaatatggcgcacaacgggacatctctttcacacacacaagctcacacaaaggagaaaacaaaggttatgagccacagagtgcaagccagagagcacctgttgtgtgctagatgctgcggacgcagacatgaaccatgcacaccctgcccctgcctcttcatgctagcaggagagacagacaactgcctgcacgcccccaaaggaggggctgactgtggagcaaccatcacggacccggcgtggagcactgtacttcttactcttcacagcacacaggactcacttggtcctcacgatcactctgcaaggacgccaccttctcctcgttctacagaggagggcaccccgccagaatttgaacccactagtccaagtctcaacctgacagagtagggttaggctattgggggatggcgggggaggttgaaatcacattagaggactcaagcacagggaggcgggctgggggtgggaggagttgcccccaggatcccttccggcctggagcagtgggattcctgtggtggccttgttataaatatgactgcttgactgctccctgactcagccttagcctcctggtaccgcccacctgagttggctttcttggcaggaaatgcaggtttgtaccagaactgcagctacttctgcatggcagaggagctgagggtccctaaatgacaaagaaaatggctccttaagggctctggagctgcccagcaattgaaggtgtgtgctgctcctctctgggcctcagtttccccactgtatagcaaaggggtagctaagatgttactgaaatcccttgtcactgactcgggccgtctgtgtgtctggaggagtttaacaattttctgagaccaaagttcagaccaacacaggccagggtgctccctgctctcatgtggccagcttctcagattctgacatctggcctttcctttgagctcacagctctgagaagcaggcaggcacctataactgcccagtgaggtgacatgatttgcctgccatgcctgcttccacacaggtctctggcctgggcctgtgcagagggaggcgttctgctggaggcttgacagagcaaagcaaagcaattcatggctctttttctgaggaaaactgatcaaagtccaaccaaatcccagaggacaacacttctaacagcttcacctgggagcctgagtgaggccagctctggacgcctttgccttggtcttgcccct

SEQ ID NO: 26555 - DNA, 1643 bp, Artificial sequence
  DNA replication origin
gccccgctacgggagaggggtgccgagagccccgcgtcctcgccgcgcgtcccccgcggagccccgggccgcccgacctggccccgcgcccggagccgcgccctccctccccgcccgcgccggcgccgccgccgccccctgccctgcgcgcggcccccgcgctgccagcggctccttccccagcgggggccgttctcgagctcagtaccggcgcactcggacccgggccgcccgtgaccccccgggatcccccggaccccggcccgcccgccccgggcccccagactcggggcgcccgcaggccccgcggggcacgggaaccggcaatttccccggccgccgccccgcccgccgcccgctctgtacttagctgatgacgggttccgcggccctcggcggggcgggtggcgggttcagggcgggcgaagccggcccagccggtcccgtgctcggctcgcaggcggccgccgggcctgtgtcatccaccaggaatttctgttttcccctccgcggggctggaagaaaaaacaataattaggtcactgggcaggcggcagagagggtgtgggacaggccagtggcgccctgttgggcagggaaagggtttgggaggacggcggggaggggagggccccgcagcgctctccttcctgccctccccagcctcccgcgggtgcaagcaggggcagccctgaccgtccccaccgttcactcattccacaggcgtttgctgtgcacctcttgtgcaccaaattcgatgctaggcgctgggaattcagcagtgagcaaaagagaaggaaggacctggtgaaaaagataaaaagacagagaggcagtcaggcggtgaccacacggtgggaggccactgcacaggcagaggcgtttcagggtatatggacgggagccaggtagttatggaaggcttcctggaggaagtggcacctgctcagaggcctgaaagaggaatgggccttgttgtggggagaggcaggttgggtactccaggtagaaggagcggcaggtgcaaaggcttggcggtgagaagacagggcacacggcaaggactgaaagcacagcagagaagcatcgcatgaactttcaatcctcagggtgactctgacgattaaagacgcatatttttgatcccatgaggaccctaaacgcaagccagcgactttatctggtgctcaactgaagatatagccacattttcccacattggaggaagactgttttggacttactgagaggtactaagtccgggtactgtacctatgagtgactgaagacattttcaaggggtcgtctggacttagcacatttatctccttcactccgaccttaagacaacccccactgtgaaggacaggatgccaggacaggggcacctgcctgagtcatttggaggatgagccgtgagactgggaaggtggacagcatcggggtataaaggatcttgcgggttatggtaccgacttcagacttaagagaaccagggagccatggtttacagcagggaggtgggggacaggatctgatttcggaaaacttaatagctcacaatagccacgatttatttggctcctattacatgctggcacaggacaggtctgatattttacatacattttagtaaacttgac

SEQ ID NO: 26556 - DNA, 1794 bp, Artificial sequence
  DNA replication origin
cggctgggccggcttcgcccgccctgaacccgccacccgccccgccgagggccgcggaacccgtcatcagctaagtacagagcgggcggcgggcggggcggcggccggggaaattgccggttcccgtgccccgcggggcctgcgggcgccccgagtctgggggcccggggcgggcgggccggggtccgggggatcccggggggtcacgggcggcccgggtccgagtgcgccggtactgagctcgagaacggcccccgctggggaaggagccgctggcagcgcgggggccgcgcgcagggcagggggcggcggcggcgccggcgcgggcggggagggagggcgcggctccgggcgcggggccaggtcgggcggcccggggctccgcgggggacgcgcggcgaggacgcggggctctcggcacccctctcccgtagcggggccctgccccggctcttagaaagagcattgggctccgggccagagcgccgtggggccagcgccccagcccttagtgaattgcttcatctgccactcatgtcctgcgccctggaagctgcagagagagcctcggctccccgtgcaagcgctgggctgacaactgacagcggcgacgcttggaatgagacgtccaagggttcaagggtcaactctttcctccaggcctagcagatcatagatactccttcttcttaaacttattaaggaaaaaggcagtcactcatgccttccgccaacaaatattgactgagcacctactatgcgctagacatgctgctaggccttgaggatggaggggtgaatgagacaggcaaagcctcatgttcttttggtggagacaagcaataaacacttgaatacacatctcagacaagatagtgctgcagatggtgatgggtgtcagggagactcctcatcacctgaggcaaggggaaaaggcattgtgggagacgggggagctgttctatttgagactcagtggccccagaggaagggcttcctgggacagtgccctttaagctgagacctgagcaaagcgtgagatttagcaaggcaattttctaagggaaggttttttagataaagcagactgcaggtgcaaagttcccagcccttgctggtagaatgatctctcaggctcctgagcccccaaagcacaagattgcaccccttcctctgacaagagaggaagcgtgaagcccagatctggagtcaggcagacctggctttacattctggccctggtactcactagctgtgtgaccttgcacacatcacttagcctctctgagtggtagttcctgcgtctgtcacatggggagaataatgctctgttctttacaggtttgtgtgaggattcaatgaagtaacaccaaaatgttgcaagcccagacttgggcatccttatgtgctcaaacaaatgatctctgggttccctaagaagacctcaccttctgcatctgaaaactaggtctctctgactcggagtgaaaagcgaatttacctttccccatcctggtggcaacgagggggcccatggtagaactgtgcgcagcttggacaaactctgggagaggggtcccagctggggtttcctgttggacgccctttggaactcagagccccgttgacaggaggagagaggagcagttgattggacagctccccacccagccagccacactatccgagtctcaggcatttggtggagttcagagaggaggcctccagcaagcccaggtcagggccaagctgtcacactggtgaggttcatacttcacattctcaccctcttcc

SEQ ID NO: 26557 - DNA, 986 bp, Artificial sequence
  DNA replication origin
ggatttttgaatcgtttattcccacccattccactttggacatgacccttgtcagagcaatgaatgcaaactcatgttagtgtcaccgttaacaaatcacagagagtgagtccgatctgagaggggagctaagtccacctttgggggctgggcacttggtggccagctagcagggcagcagctctttctctgaaactccaggatcttgggcaggcagctgggccccaggggcctgagcgtgtaggttacaaagtgaattgttgaaaaagatatttaagatcatagtttagttttgtgatggaggaaaatgaaagcagcatctcagtccctctttttggaaagggaaatccaagcctttgagtgctagggtggggcagaggtgggtgaggggtgagcaagagtgacagcgtttgtgttttgggggctgccaccagatttggtcatcttagggtggatctggcttttcctggggtgcgggcaggcctggggggatagggtgccctcaggatcagggagagggtgaaaaagtacctggaagaagatggtggctctggatgctctgctgggagaggagatgaggaggttgtgagttccagagatggggtcctgtgcctgcttcccagtgctggcagggctttgttgggctggtggtgggggtcaggggactggacaggggtctttggtggctctgggcatagccagcagactggagcatatcagtagctggctccatgctgcaggggccagaggtcctgtagcagacatttgcagaggaaggggcagcatcaacgtcaatgtcacagcctgggctatgggctcggccctgccccatgtccggggacaccatgtccatgagcaacttcttataggactgaagaaggggtggggatatagagtgctgcagaaatgctctagaaattggcccttgtgggccgggcgcggtggctcacgcctgtaaccctagcactttgggaggctgaggcggg

SEQ ID NO: 26558 - DNA, 1478 bp, Artificial sequence
  DNA replication origin
aagggtgtaatgttgaggtcattactgtgggcaaaagggggctcacctcagctggaacctcctgagaagcgtacagaagtcctccctgacaagtatgaaactggggttcagagaatttaaatcgcctgcccaaggtcacaccgctggggagtaaggcattggccagcagggattagaaccttctgttgtcagagctcgtgattttcccataatactacagaccagggtctagttaggctctgactcgtgggggactttgggcccatcacctgacctccctctggaggtggctcagtttctcacctgggcgggggatgatgaaggacctagggagagaaatcacagaaacaggggaggtgctcacagcatagcagagcatgagcagggcacagggttggggctgtcatcctaggcatggggtgtgggtgggggtgtcatcctgggcatggggtgggggtggggtgtcctcctgggtgtggggtggggaggggtatcatcccaagcaccggattgtggtggggtgtcatcctaggcatggggtgtgggtgggggtgtcatcctgggcatggggtgggggtgagtgtcatcatgggcatggggtggggatgggggtgtcatcatggcacggggtgggggtggggtgtcctcctgggtgtgaggtggtgaggggtatcatcctgggcacagggtggtggtggggtgtcatcctgggcatggggtgggggtggggctgtcatcctgggcaccgaatggggtggaggtgtcatcctggccacggggtgggggtggggctgttatcctgggcacagggtgggggtgggggtgccatcttgggcatgggatggggtggaggtgtcatcctgggcttggagtgggggtttcatcctgggcacagggtgggagtggaggtgtcaccctgggcagcgagtaggggtgtgggtgggggtgtcatcctgctgtgtacgggcaccaaggaagaatgaggagccatgtatgaagggagactctgggaagccaggctgcccacctcacttcccttctcctcgccctcccccagccacagtctccccaggctgggagacctcaagtctgattgcaccaacacctggtttgcattaagaagttcctgactgctgaaggaagcctcccatagagacttactcttcccgattacatagggctttacaacttaccaagtatttccaatcatttttaatttttatcttcccacacctctttgaggtgagcagagaaggcgttgttattatcccaattttacagctccatggaagggaacttgcagaccccagcccagccccctccctttatagacacattaatgtggcccagagaggagaggctacttgtccaaggccacacaggtaatgcatggcagagtcaggacaagaaatgaactctcttggctgacaggccgatgttcttgctaatgcactcacccaggacgtccagactcccgg

SEQ ID NO: 26559 - DNA, 962 bp, Artificial sequence
  DNA replication origin
cccgattacatagggctttacaacttaccaagtatttccaatcatttttaatttttatcttcccacacctctttgaggtgagcagagaaggcgttgttattatcccaattttacagctccatggaagggaacttgcagaccccagcccagccccctccctttatagacacattaatgtggcccagagaggagaggctacttgtccaaggccacacaggtaatgcatggcagagtcaggacaagaaatgaactctcttggctgacaggccgatgttcttgctaatgcactcacccaggacgtccagactcccgggatttccctgggaagttgcttaggctgggcgcagtggctcatgcctgtaatcccagcactttgggaggccaagacaagtggattgcttgaggccaggaattcgagaccagcctggccaatatggtgaaaccttgtctctactaaaaatataaaaattagccgggcgcgcctgtaatcccagctactcaggtggctgaggcaggagaagtgcttgaacctgggaggtggaggttgcagtgagccgagactgtgccactacattccagcctgggcaacagagcaagactatttcaaaaaaaaaaaaaaaaatcccctcgactgggcatggtggctcatgtctgtaatcccaacacttggagagaccgagtcgggaggatcacttgagcctaggagtcaagagcagtctgggcaacataggaagcccccatctctaaaagaaaaataaacaaatttaagctgggcatggtggtgcatgcctgtggtcccagctacttggcagggctgaggtgggaggatcgcttgagcccaggaggttgaggttgcaatgagctaagatcacgccatagcactccagcctgggcaacagagcaagacactgtctcaaaaacaaaacaaaacaaaacaaaaaacaagtccccttaacagcatt

SEQ ID NO: 26560 - DNA, 1523 bp, Artificial sequence
  DNA replication origin
tcagtcacatcatcctcatccccaccctttgatgcttctctaggctgtgaacgccttgaaaaccttagtcttttattttggaagttcaggaactgaataggagggctgcaactcagagctgctccgtcaatgtgtgttaaacttatttgacctccctccaccacttttcatggcattagcaatgcaaaccttttcacatgagcttcccacagccaccctaggagatcgcgagggaagctacctctagccccattttacaggtgagcaaataatccttgcagtgttacaacagtgtgcccgtgtagagaactgttttgcaaagagctcgatcaatgatgtcatctttgccttccgtgacccaggcagctgggtgcagtctcaagatcggagactgaggcttcaacaaagtattgggttcaaattccagctctgccacttggaaccctgagtaagtaatgtaatctctctgtgcctccgtaaacgtgaggcacaggaacatctacctcaccaaccactgttaagactgaatcaaagggcagcaggcggactacccggaatgaagaaagcaatcaataaatgtggattgtgtcatccttgtctctcttgacggacgggaagaggagagtgaaacctaagaccacagcggcagcgcgttaacaggaggaccagcaaggaacggaagccaggttgtcaagcctcagttggctttcacgtattctccttttcaggcgggtatttaggaagagaggagggtgaggagcacagcgcacttctgcagcagcagctgcggattggcttgtgggaggcggttctccggagcaaggcaagggcccctgccgcttctgggctgactgtggattccgccacacctcacagggctttgtaactccccacccacttgagggttccagataactttttttttttaacaaagcaggggtgggggtgggagattcctgctgttaaaaacaaacaaagggcttagacaccggctagtcggctgcgggaggcagcaagagaaaggccgaggggcctggagtagctcctgaaaaccgccgagggccctgcgggcagacgcccctgaattcttttggtggggagaaaagccgcggagctccccaatgtgccaattggtttgttgttgttttgctttttttgaatacacaaactctccgaaaactcctgtcttgccccacttttttgtgagttcattgctttggaaacaaaactctcttccatttattggcaattatcaaatttccgatccttctctatcaggagatccagcaacaaacaccctgttatgtaaatttctttcaaagataaattcgaaagcccctccattcattccttcaagaactcaacagatgtccttgaggctcattttctgccgggcactcggttcacaaggctcaagagacccctggctccagccattgtccaggttgtcactggtgtccccagctctccacttctgaggacccacttctcaccccctcctcctccgcacacgttcccgaggc

SEQ ID NO: 26561 - DNA, 748 bp, Artificial sequence
  DNA replication origin
cgggtcctctccagggtgcactcgcgtccggacgacgcttacttgctgcgagtccaaccctctccggcccgcaactccaaccgagccgcccgagtgtggactccgagagcggacgccacgggccgcgctcagccctcccgcccgaggcccctctcgccgtgtttcccaggacttcctccccgcgcccgcccgacttcaggtcggggccgcgcagggtcccgcgcgctccagccaggactgccgccgcccgggtcgcccacgtgggcgtgctgggcgcggggtggtggccggccgggcgccctccccggagcagggggcgggcagggcgcccgcgggaggaggtggcggggcgcgggggaggaggcggggagccccggcggcgagggggcggtgacagcacttggaaaggaggctgcacgcggatttgcatgaaacacagactgggagcgggcgggagcgggagcgcggcgcacgccccgggccggcccagccagcgagcgagcgagcggcgagccgggaggaggagggtggcggggcggtgaggccgcagaggcggagggatctgcgcatcaaagctagcgaggcgagcgaagtttggccgggggttggactttccttcccggaggcggcacccaaacagctaccccgtgcggaaacccaaacttctgctgccacttggagtctcgcggccgccgcctccgccccgcgttcggggccttcccgaccctgcactgctgccgtccgcccg

SEQ ID NO: 26562 - DNA, 1080 bp, Artificial sequence
  DNA replication origin
agcgggagcgcggcgcacgccccgggccggcccagccagcgagcgagcgagcggcgagccgggaggaggagggtggcggggcggtgaggccgcagaggcggagggatctgcgcatcaaagctagcgaggcgagcgaagtttggccgggggttggactttccttcccggaggcggcacccaaacagctaccccgtgcggaaacccaaacttctgctgccacttggagtctcgcggccgccgcctccgccccgcgttcggggccttcccgaccctgcactgctgccgtccgcccgcccggccgctcttctcttcgccgtgggagccgctccgggcgcagggccgcgcgccgagccccgcaggctgcagcgccgcggcccggcccggcgccccggcaacttcgccgagagttgaggcgaagtttgggcgaccgcggcaggccccggccgagctcccctctgcgcccccggcgtcccgtcgagcccagccccgccgggggcgctcctcgccgcccgcgcgccctccccagccatgtcgtccatcctgcctttcactcccccgatcgtgaagcgcctgctgggctggaagaagggcgagcagaacgggcaggaggagaaatggtgcgagaaggcggtcaagagcctggtcaagaaactcaagaagacggggcagctggacgagctggagaaggccatcaccacgcagaacgtcaacaccaagtgcatcaccatccccaggtgggggcccgcccgggggggacccggggtcacgccggcccagccccctggcactgcggggccgacccagtggggctggagatgggaagagggagagagagggagggagtgagactgtgtgggtgcgtgtgtgtgagagtgggagagcgcgggcaggaagggggtggggggaccccaaacaaaaccatctctgatttgcaaagatcagagcccgaggcttccacgcggcactctggcttccacacctcacattccctttccacctccgggaggggagagcgggttgctgcgggactcggccgcccccactccggggagctggggctggaagttgaggcccgctttg

SEQ ID NO: 26563 - DNA, 1071 bp, Artificial sequence
  DNA replication origin
gcctggtcaagaaactcaagaagacggggcagctggacgagctggagaaggccatcaccacgcagaacgtcaacaccaagtgcatcaccatccccaggtgggggcccgcccgggggggacccggggtcacgccggcccagccccctggcactgcggggccgacccagtggggctggagatgggaagagggagagagagggagggagtgagactgtgtgggtgcgtgtgtgtgagagtgggagagcgcgggcaggaagggggtggggggaccccaaacaaaaccatctctgatttgcaaagatcagagcccgaggcttccacgcggcactctggcttccacacctcacattccctttccacctccgggaggggagagcgggttgctgcgggactcggccgcccccactccggggagctggggctggaagttgaggcccgctttgttcggctccgcgggccggagcccctcctccgccgccgcctcccgcccccgcggcccgcgctcgtggaggtggtggtgtctttgcgtttcttttcttcagtcgggtctccccactttcctctacaggaatgcggtccgtacagctggggctgtgggtgaggagcgggagcctagtgattgacagattccttcttcgttctttctttgccttcgggattagcatttttatcgagtatttttagactcggttgtgccagtctcccgccccctgagcatgcacgcactttggttgcagtgcaatgctctgacttccaaatgggagagacaagtggcggaaaatagggtcttctcccacctcccacccccccatcccgactcttttgcccttcttttggtccaagagattttgaaaccgtgcagaacgagggagaggggcaggctgcagccgggcagataacaaaacacaccccaaagtgggcctcgcatcggccctcgcattcctgtagagccttccttcccaaagcgcgctgccatctgtctggatctcctttatccttcccgttgcgcgctagctaggtcgggcgggagcccacagatggctgatagaaggggtcagtgacttcactccc

SEQ ID NO: 26564 - DNA, 933 bp, Artificial sequence
  DNA replication origin
cttcaatatgaagaaggacgaggtctgcgtgaatccctaccactaccagagagtagagacaccaggtatgctgcctggcctgcctgtggggacagcaggtgccaggggtcatcacctctccccggctccccatccccccgagggtctgcggtgcacttgggggtgcggggactttggtgctggtctggcatcgacactgagccacctctgctctgtctcccccggacagttctacctcctgtgttggtgccacgccacacagagatcccggccgagttccccccactggacgactacagccattccatccccgaaaacactaacttccccgcaggcatcgagccccagagcaatattccaggtaggcacgtgggcggcacaggctggcctgggaggcaggggcagcggtcagccccgacatcagtcctgtggccccaatctctgccccctggccgtcccccgctcaccccctctttgcgcacagctctggcctgagggcccctgactcagaaccgcatccctgttgggagaggacccatgacctcagctcccccctcactagtgatgcttttcttggcatagaggagcagcgtgacccttccgcccggccttggtgcagtcatttattttggaagcggaaatagcaacactgtttctctcaccgcccttgaggcccggactggtgttcagtcccaatagactgggggtctgcagaggcggggagtgagctgagggccaggcagcaagtgcggagagctggctctgtaaattcgcctgggcatcaggcctcggtgaggggctccaacctgggtgggaattgaagtgactttgagttttcactctgcagggagaaatgggctttgccgtcaaagactgcaaatgtttttagaagcccctcatttacatgcaaataacgtgtgaatcaccagcact

SEQ ID NO: 26565 - DNA, 985 bp, Artificial sequence
  DNA replication origin
ttgagcgccgtgaagaagcggttctgccgggccaggtcctgccagggagccttggagcagtggtacttgatgaaggggaagcagccggtgcgcaggacgtggtagttggcgccctgcaccggccagttgaagtgcgagaggccgaactggtcgttgcggacggcgctgtagggcacgcagaaggaggtccagtgcggcaggcgccgctgcagcagatgccgcgtcagcacctccgaggcgctgggcttggggcgggcggcggcgcgcgaggcccacggcctacacagcagcaggcggagcgcgacctcgtgggccctcctcagggcctccatggcccgccgcgccggggacgcaggctggtgtccgcagccgctggcgcgcaagcgcgcccccgggcgagcgccgggaaggccaaccggcgccgcgcgggtgcccgagagcccccggtgtgcggcggcgcgtgcgcacagcggccccgtggcctcccgctgggggtggagtccgggggatgggaagcgtgagctgcgcgaggcggagggtcacctgcgtcaaggagctggttttgagtggccaggtgtgacctcacgccgtcattagtaactcgggcaggggagggattcggggaggtctcatcaatttgggcctgaggaaaattcaggtggaagacaattaaataactaaccacctccgcaaggtgcagaactcaaacccaagtctccctcccacgccctgggctccagggaagcccttgggtgttgttgttgaaacaggacgaggcgtgaccccgggtctgcgttgtttggtaaggccgggagcacttttgtgtgtaggtcctcgctgtcgggttcactgtttaaaattagtcccagagatttcaaaatcaaaagtttatttaaaaacctcacgtgtctcagtgcagcgtccgaacacacaaaggcacctccctctaagaacctggtagacggaccaggagcctcttatcgag

SEQ ID NO: 26566 - DNA, 1016 bp, Artificial sequence
  DNA replication origin
gctgggtctgcaggctggcagcccctggggccccacagggtggttcagaagggactggacagcggcttccacatgggatggagcccagagagggccatgatgccacctcaaagataccttctgtccccctgactgctgcccaaactcccccttggagcttcagcctttagctaagtctggcccctattagaatgggagcctggccgggcactgtggctctcatctgtaatcccagcacttcgggaggctggggcaggcagatcacttgagctcaggagtttgaggccagcctgggcaacatggcaaaaccctgtctctacaaaaattagccaggcgtggtggcacatgcctgtagtcccagctactcaggaggctggggtgggaggatcacctgagcctgggagggggagggtgcagtgagctgtgatcgcgccactgcaatgcagcatgggcgacagagtgagaccctgtctcaaaaaaaaaaaaaaggaaaaccagaatgggaaccgtgttctcagtcacagaaatgtccatgagaaagaggggcatagagggaggatggggggagggaaagacggccccaagtcccagggtgagggagggaggtagtgcccagcaggtgggcagaagggcgtggagaggggagctgcaccaatggctcacagcagcccaactccattcctggggccaggtggacccccaggactgcacctggaccgggtcccagctcctactttgggggatcgggtgttttcacttcatgaggccggaggaagcagttcaatcaaagcgcaggtgagaggccaaaggaggaggctgaggctggcatcagctccaaggtgctgtggcaaaggcaataggcgtggtgatgtggggtcaggaatagggaggaggagcaaagaggtctgcagggggagccaggccaggggaagcagtaaaccgctcaggatgtctgccctgagcctggtccttggtgggtgctggctgctcatataggaagtgggacgaggtcagtg

SEQ ID NO: 26567 - DNA, 1144 bp, Artificial sequence
  DNA replication origin
ccatagtagagccccagctcctacccccacgacctgctccccggtgcccagccctgagcagcggggcttccccagcctctgtccacgcgcctttctccagctcagaccagggacaggagctgggtgggtctcctggcactggccagagcgcggggagctgtccgtagcttggtgctgaacggggacgcagagtcgacgctgcacaccccctggtgcggggcggtaccctttgtctaagaggtcctgggggccccccgcggccgggctgctggaaacggaggcgtctttggccctcgctgtacaacagaggcaggacaggcaggtcctgctcagggggacccagcccatcctctctttcctcccaccccccggcaccctgggggcgtcctggctccaggatcgttgtcaccaccaggccgaattctgagatgccttttaaaaaatcattaggaggctaagaataattaccgaacgagattgtaattatggggtgggggagcctgggccgagggagagggaatgagctggcggggacttgggggcagctctcggactgggaaggaaaataggttcctgtgttctccccggggaaggtgtgggaggaaagacagcgggatagttggagcgggacagaggcacagcctgggaaagacacccgaatggaggggccagaggcagaaagaaaggggccgagcgggttccaggactcccctgggagaaaagggaaaggcagggagatccgagacagaaagaccggaaccgaggagggggaagagggcaagaacgcgatctaaaagagaccctcagaggagacagagcccacaaacttgggagaggttttcggggcctaggagaacggtaacctacgtcagccagggtagccgggaagaaggcaaaggagtctgtgggctgggcctgccctctcctcagtcccttcaccaggcctgagctatcggttcgcgcttccagagtcccttcccagggtctctgcgagccaggagggaaaggaagagaggggagaagtggaggaaaaggggagacacgccccagaggagttggaacgcaggagggaaaggggaccatacccggtagcccgagggaaaaacgaggcgagaggggagaaggcgaccccgcgctgctaccc

SEQ ID NO: 26568 - DNA, 1346 bp, Artificial sequence
  DNA replication origin
gcccacaaacttgggagaggttttcggggcctaggagaacggtaacctacgtcagccagggtagccgggaagaaggcaaaggagtctgtgggctgggcctgccctctcctcagtcccttcaccaggcctgagctatcggttcgcgcttccagagtcccttcccagggtctctgcgagccaggagggaaaggaagagaggggagaagtggaggaaaaggggagacacgccccagaggagttggaacgcaggagggaaaggggaccatacccggtagcccgagggaaaaacgaggcgagaggggagaaggcgaccccgcgctgctacccgcggaagatttatggcgcctcccgggttccaaggacaggctgcgttcgtcgctgctgccaccgccggtagtcgccgtggccgctgcgccccctgcccaggcggcccgtcgcgccccaggccatccctgccattattaacttctgtttgattagggtaattgttcaaacttgggccggacagtatgattaattacagtttaattaacgtgtccattaaggacacttaatgccaggggggcagggagggaggtggtggaagcggccaacggggcgcctgggtgcgggctaagaggggcggggtgcgactagtaactcaaacgaagaagtagagacagattgagagaggaagagaaggggacccagtggggcgttaggggaaagaatggtgaagacggagagaccgactgagacaggaaagggatggagagaaacggagctttgaggagagagaggaggtacccaggggcgtctgtagcatcagaggactggacctcccccttggggaaactggcttagcagcgttgagagcgtagttaacctcagatcactcccaacgatgacttggctcctgccctgggcctgttggtgatggcgaagggaggcattcaaggccgagggctccccaaacctagttcccaagtcccctgcccagggacggaaacaggagaacgcccctcctcaggttagagctctctcttgatacctcccaccgaagtcaggagcatgggagaggcagatctgctccttcccgggtgccatcctcgctgccctgcacccaggtccctgtcccggtctctggtgaccctactggttcccgagggccactctaggctccaccaccctggccctcgcctgcggccggaaagtgaagtactcctccctgcgcccgttcctcttgagtcccccttagccccatcacccggttttggcccagaccaaaactggctccttggccgggagcactgggccctccccacttcgttcttggggacaaactttatggccccagggcctttcct

SEQ ID NO: 26569 - DNA, 1298 bp, Artificial sequence
  DNA replication origin
cgccgaggctcgggcccgcccagcagggcgctccgagttgggcgcgcgggggatacttggcagtggggagtccaaactcattcaccccctggacaggcgtcttttgttactcagacccatgttggcgccgttaacaacagcccccggggcttgggggaggagaaggggtaaaggagacctcaggaatgcccgggctgcaaggaacccaatcccgttttcggattgggaaggaagtgaaacccagatacgcagagtgacttgcccaaggccacacagcaaagccattgccaaatcctggctttttcagcgcccagatccgtgcgccttcggcaaccctcgcagccggtgctgccggcccgggtcctgaagcccggacttcggggatcggccgcccctctgctcagtcgcgcatgcacgcgggcgggcgggggcagtgcaaggaggggtggggaggggggaggggcggtcactgcccatctccagacagcagggggtagaggggggtgaagagaaggaggggggtgaggagaaggaggagggaaccgtgtctgccagggaaggagagaggcggaggctaccgctgttcgcggtgctgaacctgaccctctccaaagcgctcggtgcgcacccggacctagcgcggcccccaccgcacccagcttggtgcccgagccggcttcaggggacaacattgccagtttccacaaacccgagcttctcctctcacggctggcgcccgcgttcgttgagcagaaagatttcggctggatatataaaccgttttctttccagctattagtgagaccaggatcctgcagttctaaccacattttctgcatttttagctgtattccagaccaaagctggtttccaccgaggtcaacgtgtgggacagagaggttctcaaggaactttgttgggatccacttcttagcttccagtcgcccactccttgagctttcctccttcagatatacgtttcccactcgggccaactgcaggattcggggctctgggcttcctctttgaggggcatcacctctctgagtatccttcatgcctcgctgtcccggctcatatgggctagaaggaatctcagccatcttcgtagccattgcaaggctccaggcacacaagttgctgctggtccttgcactttgctttctggctgaggcagggagggagctgtgcaggcagacctcagcagcgggggtacttggggactgatgtttggggccctctaggtcgcctgacccagccacatgtcctcagacaagccaggctcccatccggcccaa

SEQ ID NO: 26570 - DNA, 1184 bp, Artificial sequence
  DNA replication origin
gaacatggcgccgccgcccgggcccgcccctgcccccgggggcaagtggctggctcccgggccccccgcacccccgcctgtccccgcgccgccgccgccgctcccagtgccaggaccgccctttggctcgcccgcgcctaaaaccgggtcgtcctttttggggcataggccgaaggccgtagggaagccgtaaggatgggggaaaagtggtgggggcagcttttgcaggagcccaaagcctttgctgggcaccgggatcaccgggtagcttcgtacgccggcgccgccaccgggccctcctgggcccgccgggccactagctccagtcgccaggccaagtccgcgctgcgggtggggtggaggtggccccggaggcccggcagcctcatcttcgccacagcgcaggcttttgtggggcggcgggcctggggccatctctgcaccgcaccctgggccaccgccgccaccgccgccagcaccacccttcccctgcccacccgacccgccattggcaccgcctccgccgcctccttgtagggagaaggtccgcttgcgcgtgccgccattaaacatggccttgacgtcctcccaagcatggctcagttcgtctgtggccgacttgtcactgagtttgaggtgacgacgccaggagttgaagttggcggcatcgggctgcgtgtacttggcgtcgggtgttcggtgcgagtggaagatgaacttgttgggcgagaagtacatgctgcagtagccgcacttgatgcacttggcacgagagctgttgtaacgcgcagggatgaagctaccacgcgagccccacgcgcactcgtgcaccacatcgaaggcgaagttctcgggcagcttgggtggtttgtgctcgcccaggaacgacttgcacaggcgttcggcctctcgcttagtgatcatgccgcagcggcgcgacgagatgggcatggccccggcccgacgcagaatctccagctgtaccggcgtgcactgcacgcacgtgatgcccagggccacgcggcggttgtggatctcattatagctgtagttcttgaggagggtgttggagatctgcgccaggcataggcgctcctggccgtcgatgaccagcgacacaatgggcaccccgtacagcgacgtctcgcccacctggttgggtttgagagcgctggagcccgagt

SEQ ID NO: 26571 - DNA, 1273 bp, Artificial sequence
  DNA replication origin
cgcccgacgtggacaccgcggacgagcccgaggtggacgtggaatccaaccgcttccccgacgacgaggacgcccaagaggagaccgagcccagcgcacccagcgcagggggcggcccagacggtgaacagcccactggacccccttccgccacctcctctggcgcggacggtcccgcaaactctcccgacggcggcagcccccgcccccggcgccgcctcgggccacccccagctggccggcccgcatttggggacttggcagccgaagacttggtgcggagacctgagaggagcccgccaagcggcggcggcggctacgagctgcgagagccttgcgggcccctaggaggccccgcgccggccaaggtgagccccgcgcccgccccgccagtggcgccttcccacctaccctgtgcgcggcagggctgcggggccgggcggagaacgggaattttgttccgcgcaggcgtgggagcagcaggcctcggccactctccgcaggcccagccttgggcgcgctgcgaaactgggcccacccgcaccctccagtgagggtttcgaagggaagggaagctgggggcggcgggaggactggggaacttgtgtgctttgtttttgttgatgggaatggggaggagaccggctgagactgccagacacagagacagaaaaggggtgtggagaaagaaagaggaggtaagaaaggaacccagagccagagaaaagcgctcgcccgggtgggcatcagagccccaaggaagaggagaagagaggacagtgtggcctctccctgagtcgggccccagcagtaccgggtccccggaatctcccaccaccccaactcgcagttttccgagtctcttcgcactcccgccttgggaaccacagggttcgttgctgggaagctgtctcgggaccgcgtgcggagcgggaggggggctctcaagctggcagggccggggcttgaggggcaggatgcagccaggctggagtcgttggccattttgaaagtgagtgcgcatacctgtacattcggttcattaaaacacgaatcattaaccggatgcgaaaggcgtcatttatgccgcggacggggcactggcgggagggaaaatgcctaaaaggaggcgggtgcagagggtggaggacactttgaacgcccctcggcttgggagccgctttgtgtttagagtaattttcccgagggcgctaacaattaccctgaatctacaagggggcaagggtgcgccgcgtgcgtcactgtgcccgct

SEQ ID NO: 26572 - DNA, 773 bp, Artificial sequence
  DNA replication origin
agcgtcgtggccgcctctggttcccggctgtgcgcccaggagcgcgccctgaggctttgggccgggcaccccccacccccgcgcctggtctgctcatctccgggcttcaggcccccgccccagccccttggaaaagagctaggcgagcagccgagcccaccagggacgagcgacctacatcgcgcgcagatactggggcaccgcgagcgcgcgtggccgccgggtctgtccgcccgactcctgctgagaacgcggcccaggctgcgaccttcggggtgggtggggggacatcgtccggggttcggctgcctcgacctgcccgattttccgctgcccccaacccctcctctgtgaggaacctggtaaggcgcgcaagtgcagggcggcccccaccaccccgcgatgggcctcagctaccctggcgcttctggggtacccaagcgcgcggccatgtgcccccatcctccgccccgatccggcctagccaaaggggaccccgcggccaaacacacttgctgaataaatgagaggatttgaaggccgtgtcgggcgtgattttgttaagggtttaacgccgtgtctgggtgtactgcagcatgtgtgtgcgtgtggtggagagggcgttgtcactgttgtttttaagtaactaaagattggaagttgttgggagtactagcttagcttccttgttttcattatttttctttccctctccctctttctctgcgtctctctccttgtcttccttcgcaggccttccttgaccccggccc

SEQ ID NO: 26573 - DNA, 1450 bp, Artificial sequence
  DNA replication origin
cccctttggctaggccggatcggggcggaggatgggggcacatggccgcgcgcttgggtaccccagaagcgccagggtagctgaggcccatcgcggggtggtgggggccgccctgcacttgcgcgccttaccaggttcctcacagaggaggggttgggggcagcggaaaatcgggcaggtcgaggcagccgaaccccggacgatgtccccccacccaccccgaaggtcgcagcctgggccgcgttctcagcaggagtcgggcggacagacccggcggccacgcgcgctcgcggtgccccagtatctgcgcgcgatgtaggtcgctcgtccctggtgggctcggctgctcgcctagctcttttccaaggggctggggcgggggcctgaagcccggagatgagcagaccaggcgcgggggtggggggtgcccggcccaaagcctcagggcgcgctcctgggcgcacagccgggaaccagaggcggccacgacgcttttaattagggctggggcgccccgaccgcggcagctccggcagtatccgggtcacggtttctttgcctctcttgaaattcggtttgttgccttcaagagccagataaggaagacaatcactcgcccgccgatgatttggaaacgaggaaatcctatccagaccaaaggagtatctcccagccaagtcctgcaaatacagacagaggtgagccagcccttgaacccatcgctctccaccgcacccaggagctgggacccaggtcgcccaggttcccagaggcttgcgagaaaggcttttaatcaagtgtaagcggctgccagtcttcttcctcggcgagcagataaatatttaacgcgagcagggtgcaggccaggttttctgaattgctgcctccttggtgggtttgaggttctttcaggtaagggcagaggatgtactaaaaggaaatggagggacgtcctcacccacataaaataggtcaaagggcatttcctgcccttagatggcccatcttccctgggccgtctcctccaggggtcactctcctactctctactgtaatgtcctagaaggtggatagtactggattcctgtaactgtctcctctaaaggcagaaggtctagggtaggtccctgattcgatgtggttcctgggaagctcacccctcccctctcaagggctttcctaggacagaacccctcttacctgcccctgtatcccaggcgaagatgggcttaccttggatgtcacaggaactcatttggtggagaaagatatcgagaacctggccagaggtgaggataaatttgtgaaaaaggtgtacgctgtgcttgagagtgatgggtcattcctgtagaggggtgttatccctgtagggggtgagtgtggaaaagacactcaccaaggccttgggggcatgagttttcctttctttgggtggaaagtaagatcctct

SEQ ID NO: 26574 - DNA, 1017 bp, Artificial sequence
  DNA replication origin
taacaaggaaagcggaggctgcacttgtggtctcaaatcttttccaaactccactgcgtaaaaaaaaaaaaaaaaaaaaaaaaaaaaagtctttgaaaccagactcgcatccaaatcccaactactttaaccagtggcaggatcactggagcagatggtttaacctcccagagcctgtttgctaaactgcaaaatgggggaaatgataccatttaggttaagcgcctggctctttctaaatgttggctcaaacggtggtgacccttcccagacttccaccactactggaagtttgcgtcccaaagcagacaccctcatcgccttggctccgaatgcagagagctagttccgagaagccgaggggaagctgaaggcgcgccctggccaaccctccccacgatcccccgccgcaacccctgtcggccccttccagcccacagtgggtggccccaggcctcgctagggtcacgtctctcgggtccccgcgcagggaagggtccaaccagcgactcgcaaccttttcggggtcccgagtccaacacccgtgggaatcccatgggcaccatggcccctcgctccaaaaatgctttcgcgtcgcgcagacactgctcggtagtttcggggatcagcgtttgagtaagagcccgcgtctgaaccctccgcgccgccccggccccagtggaaagacgcgcaggcaaaacgcaccacgtgacggagcgtgaccgcgcgccgagcgcgcgccaaggtcgggcaggaagagggcctatttcccatgattccttcatatttgcatatacgatacaaggctgttagagagataattagaattaatttgactgtaaacacaaagatattagtacaaaatacgtgacgtagaaagtaataatttcttgggtagtttgcagttttaaaattatgttttaaaatggactatcatatgcttaccgtaacttgaaagtatttcgatttcttggctttatatatcttgtggaaaggacgaaacaccgtgctcgcttc

SEQ ID NO: 26575 - DNA, 703 bp, Artificial sequence
  DNA replication origin
tgtcaaacctcgccgcttggcgccattatttaaatggaacgtgcctgtctcgcagctgtacgtgcccggggcggggcttcgagcgccctgagcggggcggaggctagaggcgggctgggaaggtggaggggcgggccggggcggggccaggccggctagaggggcgggtctagcggcggcccccggcgaagttcactgcgcttgcgctgacagacgcaagatggcggacagtgcggaactaaaggtaaagcgcagctcgaattcacttctaatattcggccgcggagacggcgccgctgctgccaggggggatgggtccgaccctggggggcctctcgggcctgactccacccgggcctggagttgtagggagagaggcgcgcccggtctcagcagagggggcccgcctgcggcgggccgcgggccccgggtgcctcgggggcgctgacgggtcgtccccggcgtgttattgttgtgggcgcctctggcgggggtggcgggggaagagatagggagtccggaggtaggggctgcagctgtctcatgggctcggctttttcaccttccagttagcctccctgccccccatggggagctggggctgggggcagggtgctctcgtaggggggattgggaaagctccccgtggccgcttcctcttcctcctttgcagtcccgggctcctgtcaggcgctcttctcag

SEQ ID NO: 26576 - DNA, 1021 bp, Artificial sequence
  DNA replication origin
ggggtggcgggggaagagatagggagtccggaggtaggggctgcagctgtctcatgggctcggctttttcaccttccagttagcctccctgccccccatggggagctggggctgggggcagggtgctctcgtaggggggattgggaaagctccccgtggccgcttcctcttcctcctttgcagtcccgggctcctgtcaggcgctcttctcagacccccgggaacttggcttcggccgccccgcccctccgtggatcccagtagcccccgccccggactcggctttccccggctgctcgcttgtcaggaagcgcctggggtgccccgcttgtgggaagcgcgatcccggggcgatagggtggggatctgggggagaagctctggtaaagtttagcgagccccgggccggcgttggggttcggctgagaggtagtgagcgggacgttactctttctctctgattccgggcagccgaggggagaaaccccctcgaagagtgtgtctttggaagcagtgttgggagggggggatgcagctacctctctcccttcttttgccttagctggtgtggagggtgagaggagcctttgggggtctctgcacacaccatgatggcgatgctgtagctgatggaggtgaatggttcgtgtttatatccccccattgccttttgtttgtagggacatcttgctggccatgttgatttgaacgaaattctcccctcatgctactccaacccccgataaatagaacgttcctcttaacagtaccaattactcacgcctcacgaaattagatgaaagggtgcccccttttccccgcttttctcccaccccaatctttacctgatgatggcttctttaccgtagcagatataccactacacaagcagttgggggagggggtggtggaacccttatgactggattgtgacaaatggggctccgcttgaataattttggtttagtagcaggcagttcttaactaacgcgtattatttcgaggctctgaacgcgatctt

SEQ ID NO: 26577 - DNA, 943 bp, Artificial sequence
  DNA replication origin
gaggtgggggggtcagcccccgcccggccagccaccccttccgggagggaggtgggggggtcatccccccgcccggccagccgccccgtccgggagggaggtggggggggttagccccccgcccggccagccgccccgtctggggggtggggggcgcctctgcccggccgcccctactgggaagtgaggatcccctctgcccggccagccgccccgtccgggagggcagtggggggggtcagccccccgcccggccagccgccccgtccgggaggtgaggggcgcctctgcccagccgctcctactgggtggtgaggagcccctctgcccggccagccgccctgtctgggagggaggtgggggggtcagccccccgcccggccagccgcctcgtctgggagatgaggggcgcctctgcccggccgcccctactgggatgtgaggagcccctctgcccggccaccaccccgtctgggaggtgtacccaacagctcattgagaacgggccatgatgacaatggcggttttgtggaatagaaaggggggaaaggtggggaaaagattgggaaatcggatggttgccgtgtctgtgtagaaagaagtagacatgggagacttttcattctgttctgtaccaagaaaaattcttctgccttgggatcctgttgatccgtgaccttacccccaaccctgtgctctctgaaacatgtgctgtgtccactcagggttaaatggattaagggcggtgcaagatgtgctttgttaaacagatacttgaaggcagcatgctcgttaagaatcatcaccactccctaatctcaagtacccagggacacaaacactgcggaaggctgcagggtcctctgcctaggaaaaccagagacctttgttcacttgtttatctgctgaccttccctccactattgtcctatgaccctgccaa

SEQ ID NO: 26578 - DNA, 1302 bp, Artificial sequence
  DNA replication origin
cctccctcccggacggggcggctggccgggcagagaggctcctcacttcccagtaggggcggctgggcagaggcccccctcacctcccggatggggcggctggccgggcggggggctgacccccacaccgccctcccagacggggcggctggccgggcagaggggctccccacctcccagcaggggtggctgggcagaggcgccccccaccccccggacggggcggctggccggggggggctaaccccccccacctccctcccggacggggcggctggccgggcagaggggctcctcacttcccagtaggggtgaacgggcagaggcgcccctcacctcccggacggggtggctggccgggcggggggctgacccccccacctccctcccggacggggtggctggcctggcgggggctgacccccacctccctcccggacggggtggctgccgggcggagacgctcctcacttcccagacagggtggctgccgggcgtaggggctcctcacttctcagacggggcggctgccgggcggaggggctcctcacttctcagacggggcagttgccaggcggagggtctcctcacttctcagatggggcggccgggcagagatgctcctcacctcccagacggggtcgcggccggatgctctcacatcccagacggggccgcggggcagaggcgctccccacatctcaggcgatgggcggccgggcagagacgctccttacttcctagatgggatggtggccgggaagaggtgctcctcacttcctagatgggatggcggccgggcagagacgctcctcacttcccagacgggatggcggccgggaagaggcactcctcactttccagactgggcagccaggcagaggggctcctcacgtcccagacgatgggtggccaggcagagatgctcctcacttcccagaaggggtggcggccgggcagaggctgcaatctcggcactttgggaggccaaggcaggcggctgggaggtggaggttgtagcgagccgaggtcacgccactgcactccagcctgggcaccattgagcactgagtgaaccagactccgtctgcaatcccggcgcctcgggaggccgaggctggcggatcactcgcggttaggagctggagaccagcccggccaacacagcgaaaccccgtctccaccaaaaaagtaagaaaaccagtcaggcgtggtggcgcgctacaggcactcggcaggctgaggcaggagaatcaggcagggaggttgcagtgagccgagatggcagcagtacagtccagc

SEQ ID NO: 26579 - DNA, 1679 bp, Artificial sequence
  DNA replication origin
cagccatggaggcgacgcggaggcggcagcacctgggagcgacgggcggcccaggcgcgcagctgggcgcctccttcctgcaggccaggtgggcgcgcgccggggtgagagggcgggctaggcgcctgtgcgctggggcctcgggacccgccacgtgacgctcctagggctgccgggcgggaacctcgtgtgcggcgctggccggggcggagcggagcgcggggggcttggaggcgcgctaccgtggcggcggtgcccccgcgtttccttctctgtctggggagcctggggcccagcggggctcggcctccccgcttcgccgttgctcgggtgggaggagcgcccgcccgaagtttggggttttcctcccttcccgcgttccagcgacccgggctggcgccgggacagccgctgcgctgggagagctccccagggcggtgggtacacacacctcgtcactcggacccccaacttatccgcaagttccgggcgccacctccgcgttctcggggtccctccagccctgagtaggacttgattctgtcatttatcaggaggctgtctgcttgacctggggcacccaagaatgtgcgaatgtaatggaagagacagcggggaagggcggaagctgccgtccagagaatgaatgaggagcccttctcagtttttggtttatctcgttgggcgagcagagctccattctaccttcgtcccgttttactgaccagaaacattcactgcattcagcaggcattctttaagcgcctgtggtatgcccagcgctgtgccaggcagtaagggggtaggcagggtgaaggtgggagaggcttacggtcctgtagggatcaggagagacagagcccaagtgggagtgagcggtcatcttggagggcttcatggaggaagtggcacttgagctgagtctcagaggacttggtaggggacccagggaagacaggctgttccatccagggaaacagtggggaagggcaaggagtttagtggtgctggagctttccggctgtaaaagaaagtgacaggaggatgcagactgattgtgaagggcctttaattgcagcaagtctaggactcgagttgaggacctagattgcaaaacttaggggtaggcgcactgccgtgaccgtgagtgccgcctcaaatgttgggccttggaggccttgcttgtctcaccctagttcctgtcctaggtgacaggttaaggacacagtctttatcccataggcactggggagtcgtgagaagtttctgagcactagcatgcgcaaagtccttgttaggaagtttttggtacgacctggatgaagggagaagtctgagcgcttgggctgaggtgagggatggctcgtttctgctgctgcggacatgcgggctgagcagctgcggactgtgtccgttttcacttagaaacaatgtactggccatagaccgcatactgtagctcacctgtctccctcggcctgtgagttaagtattattttactgatgaggaaataggcttagatgggctgaggagcctgactggctgagtccccgggctgtctgccccacgccgtgtccagtggtttcatctctgctgtgacccaacccatttaccagctcccctcttccaggcagcctcttctgcctgcgggatgtctctgttccgaatccttgccaag

SEQ ID NO: 26580 - DNA, 1551 bp, Artificial sequence
  DNA replication origin
cgccccggccagcgccgcacacgaggttcccgcccggcagccctaggagcgtcacgtggcgggtcccgaggccccagcgcacaggcgcctagcccgccctctcaccccggcgcgcgcccacctggcctgcaggaaggaggcgcccagctgcgcgcctgggccgcccgtcgctcccaggtgctgccgcctccgcgtcgcctccatggctgccccgcaggcccctcggccctgcctttccgaggaagagaccggttcagctcggctgccccggcggaggccgccgcaaattcccagcgcggggcggttcggggcgggccggcgagagcgcgcggccctcgggaggaacaggcggggctgcggacccggggcggggcggagcggagcggagcggagcggagggaggcggggcggagggagacggggcgggctccgctaggggagggccgggcgctgcgagtgtggcgtcctcgcggggcgggggctgctggcctgtccgggctgcgcgcgtgaccaccagcgggctgggatgtgttagggtcccttgcctgcctgggtacgggaatctctgtctagggtgactgaggcctgggtgttgggctggggcggggtagcgacctggagatagactaagctgatttaaatgctccccggggcagagggttctgtgggatttcccttgttcttacgggtggaggagaggaggcaggactggagacctgcacgtgtagcacccgcgtggtgcagcacgtgggttgcagatgttctagtgaggggctggcggtgacagtgggaaggagcgagttggtgacatctagagtcgtgtgagaggtatggtgactgggactctggatgtggggggtgaggggagaagagttcaggcagtggccggattctgcccctgggtggatagtggaggcaccccccgggaagtgggctagagcagatttcgtgtaaataaagattcatctttgaacgcattaagcttgaggtgggtcaggaaggctgttggaccggtggtctgaagctgaggcgagacctgggaacccagtggacaggctcgtgagtcaccggagcatacaagacagacagaacctaaggggacagcatcctcaagtgaaaaacagaaccaaaggtcaaacctgagaacagcctgcagggcagattgccaggacttcattagtggtaccactttgaactagctgtgatgcgggcaaatggctcaacccctcacagcttcagtttactcatctgtaacaagaagatgcctattgcatctactacattggagttgtgatgactatatgaaactcttagcagagagcccagcactggtggactaagttatttacaatagcccgtctcgagacctgaggtttccctccacagaaaggttaccttccacaccactgtcaatgtcacaaactctctcctccccacggtcactgtcagcagcccaggccgctaactagaacaactgcaaccaactcccattctccccaccacccccgtgctacaccaggcgcacacgacatgtgcaggtctccagtcctg

SEQ ID NO: 26581 - DNA, 992 bp, Artificial sequence
  DNA replication origin
gtcctgcttctgcccctgagccggggttagggaaggggttgcgcgtactcggagggtccatttcaggaaaagggcggcgtttctgagttcccgaaatgtgggagggcttgagagccacaacaccaggctctgagaagggactggaagtacggcctgactttcccggagaaaggggttaagtgtgagagaaagatgggagcgaaggggagctgcgctcgcggtggaaggagcgaggtatcctgggaaggaaagcgagtcccgcgttcagacagagcaggaatctcatcctgagccggcagaacctccgttttctcacagacatcacaagattgttgttaggatttgaaacgatcgtttatccaatgaatattagaggtcgactacgtgccaggctctgcttagcactagggattcagtaatggaacaaataagtcaacaaatgatagacaagatcagttgaactggtatcattaccatttgctctgaagcaaatgaaatagaatgatgggggcactcatttagtttgggtgatcagacaagacctctatgacaagtgacaagaacagacggtattctaggcaaaggggacagctaatataaaagtcctgaggagggaacagtctggtgagctcggaaacagaaaggtcagtgtggctgcagcagagtgggccacagtaagaatgatagatgaagtcagaggatgcaacacacgttagggcctaataacccatagcaaagggtttaagtctactctgtgatgggggcatttgaagggttttaaagagggaagtgacaagatgctatttgtgttttttaaaaagatcactctggctgctgtatggagaataaactctggaaggcaagagtagatagggggacaggccttggattaggatggtaggagtgaatggtaggtgatgaagcttctgggacagtctcaaaaaactcaatatgaaagtgacttcctccctcttcctcccttccccaaagga

SEQ ID NO: 26582 - DNA, 1176 bp, Artificial sequence
  DNA replication origin
ggcagcagtgcggcccagggaaggcggagacgcagaggaggccgagtgccgcgaagggcacgtccgcgacccagcccgcgcagggaggaaggcggtcagggccgcccgccaggtcccaggcgccggccctggaccgaggggatctccatggcggacgccgccccgggcctcaggccggacccctccttcctgcgggatgcgacaggcgcgtgcccgagctacgggtcgccggccgggtcccgagaggacctcgcgcaccccggatggcgaaagatgggcgcgtctctcctgacccggcccacccggcctaaggcctaacactgcctcctcctgcgctttccgcccttcgccgtccctgactggaggaaacctgcaggctctcgtccgccgagctcagaagtgccaggcgctgccaacggccccggagatcctcgcgtaggggcccccggggcgatgcggaacgctcccgcaagagcggcgccggaacttgggcggggaggaagacgagctttcgcagacagggccgggaggagagggcgggagcgggagggacgctaagtggggtgtctccgcctaagccgaccggcgggcacacgcgggcccggtagagaaaggttctgctgcgcgtagttggcccatcccgtttgggcctggatgtcctcaatgtccttgactcctggaacctcctcctggcccctaaacggccctgagggtctccagccagggagtgggggcggagtgagggcgctaagctgatgggctaaggagaccaccctattttactatagacggtgcgggtcctgcttctgcccctgagccggggttagggaaggggttgcgcgtactcggagggtccatttcaggaaaagggcggcgtttctgagttcccgaaatgtgggagggcttgagagccacaacaccaggctctgagaagggactggaagtacggcctgactttcccggagaaaggggttaagtgtgagagaaagatgggagcgaaggggagctgcgctcgcggtggaaggagcgaggtatcctgggaaggaaagcgagtcccgcgttcagacagagcaggaatctcatcctgagccggcagaacctccgttttctcacagacatcacaagattgttgttaggatttgaaacgatcgtttatccaatgaatattagaggtcg

SEQ ID NO: 26583 - DNA, 1450 bp, Artificial sequence
  DNA replication origin
gacgagagcctgcaggtttcctccagtcagggacggcgaagggcggaaagcgcaggaggaggcagtgttaggccttaggccgggtgggccgggtcaggagagacgcgcccatctttcgccatccggggtgcgcgaggtcctctcgggacccggccggcgacccgtagctcgggcacgcgcctgtcgcatcccgcaggaaggaggggtccggcctgaggcccggggcggcgtccgccatggagatcccctcggtccagggccggcgcctgggacctggcgggcggccctgaccgccttcctccctgcgcgggctgggtcgcggacgtgcccttcgcggcactcggcctcctctgcgtctccgccttccctgggccgcactgctgcctgggcgcggcggcggcgacggcgccctgttgaatgggctgtgagggcccaggtttaaagcgctggcgaacgcggcctccgggggcgcacggcagctgcagcggtggcgaccaaacgggtgttggagttggcggcggccatggagggcctggctggctatgtatacaaggcggccagcgagggcaaggtgctgactctggccgccttgcttctcaaccggtctgaaagcgacatccgctatctgcttggctatgtcagccagcagggagggcagcgctccacgcccctcatcatcgcagcccgcaatggacacgcaaaggtggtacgcttgctcttagaacattaccgggtgcagactcagcagactggcaccgtccgcttcgacgggtaggtacatcccaagccagcctctctccgacgcgcgcggactcgttaattcacgggccctcccctccctcaccctctcttaccctctcttcatgtaggtactcacttctcccctttttgtaccacctcctgccccactaatgcccacttcatcttccagggctaataatccatcccatgttttgctgcccgtcctcatcagcccctacccctcattccctctgtgggaagataaccacaccctcggccttgaaatctaatagtcgtcttctctactagatagtctgtgaacaagccatttggaggaggtggctgcctttccaggttttacttttagtggaactggtgatgtaactgatcagaaattaaggaggtcagcggttaacattgaagaactccgaaagagttatttgggcatccatttttactcccttcaagtgagtggttccgtaaaaccttcagtgggctgctgggctttaatgtcaaaataagcacctagaaccagcagcagctgcagcatcatgagggattgtcacgcagccagacatctcaagacatgattctgattcctccacgttgctcggtgtagatatattggctactaagatggcattggacctgatgtgggagatgatgccattcttaaattacatcttatcccgtgatgttgtggggaagc

SEQ ID NO: 26584 - DNA, 1721 bp, Artificial sequence
  DNA replication origin
aagtttggagagccgggcgcggcggccccggagggctgaagggtgggggtgagggctgcgcagagtgcctccggccaaagacagagcaaagccccggggcgatggccggtaggcgggggctagctctcgtctgcccggccagcagcggcgggacacagtcgcgcagcgcaggacccccgaaacgttacctgacacccggggtagggacccggcattgcctcccaacccgcgctcggaattatgcaattattcaataatctggggaaagccgccgtcgcctagacgcgcgccgccgcctaatgcactccaggtgtcggggcgcggcaggaacctccggcccgaggggcgcgcggctgggagcgggaagccagccctgagctctccgccctagggtaccctggccccggccgtcccacaccgggctccccggctccaccctccacgcggggcggctgccagtgatgctgttctgcggaagacggccaagtgctccggcaagggccagcgcctcggttactggccgggtgtgggcgctcaaccttgcctccccttctgcgtgggctccaggcccgagctggggccagtagtgggggtcagatgcggtggtagtgggagaggtgccctcagggagctcaggtggagacccctatcccgcagccgcttgccccagtccccgggtaccacgcgaagcaagtccaccctcctgtcggcctacagaggagcttctcagagggcccatggttgaaagggcctctggctagtggaatcctagagtcacagtttaaaacaatcattgatacattgagttgtgggggcttggaagggagagcaggggaagaactgccaccaggccaatatgcaactagaagccagctgcgggaggaggccaagcccatttaggtgtgtttagacaggaggggagaatcttctccaggaactgtcctcatatcactaggagatccagccacaagaaaagagacgcactcctgtgtgactccagataggtggctgcatcagaaccttgggaaggagtggctgccttaggggctagggacagcctggacctcaggaagctaagagcaatggctttggaatcagacctggcttccacttctggctctgcaccctgctagctgttcaatcttggactggttatgcgacctttccaacaggtttccttatgtgaagaatggagacacaaattccgtgtcctgtaaagttgtcaggatgcactaaggcactgtaagaaaggcccttaacacagggctgggtgcacagtaggctttaatcaatggttgttaatgttgttgctactcaaggaggagggggcagagaatgacattaaaggacctctgaagacacaggatttgtgactcagagctccgcttatatggcgaaaaccactcctgagttatgtctggtcagttgcattcttgaaatatgggattcattaaacatatcaatcaatgttggaacaatgacatctgcttgcaaggagctgggggtggggccctagcgtgtgtgcaatctgggtcctgcctgtaactgagaataagccaaggccagggaaagctaaacagaggcaccagggagtgaatggcttggggaaaccaagggctgggtgttcaaacaagagaagttcaatttcagccagataagcaaggaaggcttcctggaggaggagatatcatttgaactggccctggaaaagtgtgtagagt

SEQ ID NO: 26585 - DNA, 1613 bp, Artificial sequence
  DNA replication origin
tgatgcacctggagatttgtgcaaggcaggaatgtgggctgcagcccattccctagctgtaggggtgttctacattcaactcagctggcttaaactcaactcagtgaagaggactcactgtcgtataactgataagtcccaaggggagtggggttaaggggtggcttcattcaggagttcaacaagatcctccattctgtcatccagtgtccacctcatctcaaggccagatcctccttccctaccctgaccctgtcaacttctgagcctacaaagttccttgtcccaggctgggagaggaggcaggagtgggagaggtgaggagagagagttagttcatttgtttgtttgttctaggggctcttttagaaaggcaagaaagcttgcttcccaaaaaaactttttcttttgtcatattgccctttctgaaacgatgggctgggaagggcaacatactgattcatttcagcctgaaccgcatgcctccttacacacacacacacacacacacacacaccagggacggaatcaccttccccgagtctgtggctgaatgggtgaggtgaagatgaagtaaaacccagatagccaaccgaaagatagtgaggttgggagacgagcacaagcccacttcacttatgtgaacctgggtcttctcaaactccagctcatcttcaggggccctgactgaacatcacctcctctgggaagcccttccaatacctcccagatagaaaactctatcctttgtgcacccacacaccacctgtactcacccatccatccacccgcccacctactttgttcctgggtgttaggggctgagtactccattgtgaaccagagatttctaccctgatggtgttttcagtctgcacaggagagaaaagttaaatgatcacaccaattgatgccttgcttctctactaagcacaatgaagagaaatgagggagagcgggctggggaatatcagcatgtgtctgggactcaacctggtggggacgggaagagggggtgaaggaagcctttcctgagaaagtgggggaagggcgctctgctgtggctttccctgcatcttggccttcctaccctctgcctcggcttcctccattgctggaaaagcctccacaagcgcggtggaggtccggggcctggatttaaagctcttgagataaatgtgcattgaatttaactaccagtgattagaagagggaaagaaggtggcagggttacaaagaagagcttcacgttaggttaagagggggtgcacggtgtccctgggtgctttggaatgcctcaggtgtggaggctcagggagtggcagtggaggcgaatctgcatgtattccagggtcagaagaaacactagcctctacaattcaagccgcagggtgcagggagacacggggatgtcttagaatggacctttgagggacatccactcacttggccaagggagacctgcgttccagcaggtgttcctgagccagcttgggtaccctctgagttttgtgaatctcttttcactgggaaatgggaataaaaaccacttttcctgaacagaatctgactgaggcggtgcggtgctacactggtgagggggttcccaggag

SEQ ID NO: 26586 - DNA, 1423 bp, Artificial sequence
  DNA replication origin
cttcgccgcaggaaggcgaggcaggaagaaagggagagagggagagggcccgggctggggggcggggggaggaagaggggccgggaactcgctacaaaggaggaggcggagggaggaggaggaggaagcgcagcccgccagcggccgtgccccgagcctcccgctcgatcgccggccgccgggcaccgctgctcccggagtccggacgggcgcccgggtccgcggccttaaccccttcgggcctgcggacgccacgcggctgggcgaggctggctcccggcacctgccggctgggagaacgggcggcgccccgggctctcgggtgtcccgctggcccggggacgctggtgaagtcacaggctggacggccgaggcgctgcgcgggcaaagaaggcggtcgggttcgccccctggaggctcgcaaagtcggcccgtgggccgtgagtgtggcgcggcgggctgggaggggcgtggcagccgcaagcccgggagccctgcccgcacccccacctcgcgctggcccggggcacagggtggccagacggatttgtgtaagcactctttcgaatctaattcccgccgcgatgacttgcccgaaggccgccttagtgagttttgcagaggaggaaactgacgatcagagtgggacggacgtgggaagtgacttagaccacagcacaggacctgcctgcccgagccgttcctcccgctctttccactcggccgctagctccctaaggaacctcttgttatagaagctgccctgccctaggactgtctacactaccactgagtgccgctctactggtggagtgataacacaggtgcgtcctgtgtgttgatccaatcctgactcggggcacagtgtgtcctggagctgctgcggagatttgagggacagtcacctgaaggtgacctcgcaagtcttgagaaaggagtctccctcccaagcacctgagcagaaccggtttccgcagatacagaaccgcggagagggtggaggggaggagttagcagaggtggaagcagaggggttctccaagcaggacagcctggcaagcccggaagtgctggcttcctgctccacggtaattaccggtgcaattcacctggacagcgaaggcaacgtcatatatgagcacctgctctgtggaaagtgctgggggaacagagaggagatgggatgcctgccttccgggagaccagtgtctagattggagcaataataatagagtaaccagcctccaggaagtgctttgtgggtcattgtgcaattttttttttttttttttttttgagaccggagtagtctcactctgtcgcccaggctggagtgcagtggcgcgatctcggctcactgcaacctccgcctcctggattcaagcgattcttctgcctcagccccccgaggatctgggactac

SEQ ID NO: 26587 - DNA, 1319 bp, Artificial sequence
  DNA replication origin
cccagcccgggccctctccctctctccctttcttcctgcctcgccttcctgcggcgaaggaggctcatctattataaatgcacattcggggctgacatcagcgacgagcggcgggcgagcgccgacgagcggtccctgcgcgctgcccgcccggagcgcagcccccaggctcggccgagccgccggcggggcgcggggagcgagccgggagctgccggacccccttccgccgccgccccgggccgccgccgccgcccccgcacgccgcgcccgcgcccccgctccgccgcggagtttctgcatgactgtcacaaaggtaagcgccgctcgcccgccgcgcccgggacccgccggcgcctgcatcccccgggctaggctgcggggggcgcgggggtgtgggtgtggggagggggcgccggtgccgggaaggtgcggcgcgcgcctctcttgctgccggatccgctcgagtcactccggcccccaaggactgcggaggccagggggaggatgccgctctggcagccccggcggtttggccaacatccctccgcgcccggcccaaccccgggactgcatttttaacccttgtttgggatgctgcatttttaacccctggagagctgggctgggcggctagcggtgtccctccagggagtgcgcggcgggaagcgtcgctggcaggggctggtgctgagcagtgggtgtggggatgggcctgccgccccgaggaggccagcggaggggaaaccccaccccacctgccagcctctgccgcccatgccgggagcgctggctccactccaaagccactctgtgcagaaggcgctgcccagtcccgggagccgctaccagagacagggcaggtccaggtggttggcttgaagatgtggggagggaatgtgacaggggaagcaaaggtgggcatcttggcagcccccatattggaggatgattgttgggccttgtcataggggcccacgtttattggagagacttcaggggcttcctagttgtagggaggaaagagttaagaggaaagatgatggggcagtggaaagtgccagggtcaagggaccagggagacctgagttcaatcccagctctatcccagatcccctggatgaccttggtcggggaggggtccactttgggcctcagtttcttcttgtgtgctgtgagggtgataatatgggtcctgggttgtgacaggctgttaaagaaccaataacatcaagggtgtgaacccacactcttcagagagatctgtctgggtactgagctcacagtctggcggtggcctcgggcttggccgtccattc

SEQ ID NO: 26588 - DNA, 964 bp, Artificial sequence
  DNA replication origin
tggcagcccccatattggaggatgattgttgggccttgtcataggggcccacgtttattggagagacttcaggggcttcctagttgtagggaggaaagagttaagaggaaagatgatggggcagtggaaagtgccagggtcaagggaccagggagacctgagttcaatcccagctctatcccagatcccctggatgaccttggtcggggaggggtccactttgggcctcagtttcttcttgtgtgctgtgagggtgataatatgggtcctgggttgtgacaggctgttaaagaaccaataacatcaagggtgtgaacccacactcttcagagagatctgtctgggtactgagctcacagtctggcggtggcctcgggcttggccgtccattcaagggccagactccaccctttccagctgcccagctgggtcccagaattggggagctggaggccaaagtgggaccggcagcccagagtggggtcagatggagggtcagagcagtggggccagatggagggttggggtgcaagtgatggaggtggggtggttttggctccttctggtaagccagggcctacccttgccctcctgaggtctgccccaagactgaatgtttgtgcggattcttgggcccaactccaaactttgccattggccctggttctgggacttgggagcattgtgagaagatgaacttgagggtgcaggggcttcctcagctctggctacttctggcagggctgttgtggcccacctggggtaagatgcttagggttttgaaatgatgcaaatgctattcagctgggagggatattaaggttattaatgtcaaagatgcaagcaggctgggacagaggagtaatggatgggcccggctagagagagaaagggtgtgaggttttaataatagcgctgaggattaactcagcgcctcccctgtgtctctttttgtgcgcgagct

SEQ ID NO: 26589 - DNA, 957 bp, Artificial sequence
  DNA replication origin
ggagcagcgtgagcagaggccagggcagcgacgccgtggggtgctcccgagccacgagggtgcccagtgaggtttgagtgtggagggtcgggggctgggaaggtgatgagggctcaggggtggcttgcggggaggtgggagttgtgcaggagtgctgttcctgggcccatgtgtatcagtccatccatgaagagccttttagtagtaaagagatgcgacgaagtcattagattccacaacaataaatcttcattaagcatgcactgtgcccgtgaccctaggtgatgggacagtccacatgggtgaataaaacaggaacagtccctgccctcagggacaggcccaggaggatggggagacaggacagaacacaatcctgacatcagtggtagaaatgctgttaaagaaaatacaggggcatggggggtagggggtgggggttgtgagaaggggatcccctgtggaatgaaggggggatagagccccatgggatctagggggatctttctggctgagagagaagcaattttgaggctccagcaggagcctgcctgccacggaaagcacagtgagcaggcctggtctggtgggaaaggagattgaaggggaaggtgggttctggctcccataaggctggcctgtgctagctgctcactaatacttctcgactgactgggaggacagataggtgaaggataaggctggaggcctggagcccagcagccatgttgaggtgatgaggatggagccagggcagaggcagcaggcacagggaagatgcatcttcaggccttggggatggtgtgggaggagaggggtacaacacagcaggcagagtcttcccggagctcctgggagaagatccagatccacaaacccacggggagaaatggccgcgcatcacgcagagcactccccacgccccttcccacaggccaccccagccactctggcctc

SEQ ID NO: 26590 - DNA, 1052 bp, Artificial sequence
  DNA replication origin
gggtgattactgtcatcatgacaaccctgccaggtgggatttattatctctcgtttacaaataagaaatccaaggctttcgggagtaataactcatctagcaaatggctgggtcaggactacaggtcccgaagcccatggtcttcactgccccatattctatttccagagatggaagtaactggtctgaagtctctttcctttccagcaactccctccactaaaacatagaactagctctttcagcattcctccacatccccccgcccatcttcagtgcactctcccatctcacagatggggaaactgaggctgagaagggggaggtagtgaatagagaggcccagtgcaaacctggcttatccacagggcctcacccgtcccactcctcacgcagggttttaaatccaaagctttgccatcaggcagatgtggggctttggccaagactcatctgcaccctgggcctcaaaagatttctctgtccgaaaagatccctgtccagtatttgggctgaactctggctgttgggaatggaaaaacgaatgggtgtgtttcccagcctcaaggagcccatcgcctagaagcaggaacaggtgtgaaaacagaccacgatacccctgcctcaaacatggcaaggacatggcaggaagcggagagtctgttggcaaagcagaggaagaagcaggatggctccaggtggcttcctggaggcggtgccctgagctgtgcagagaggagcatgaagaagggcaggcaggtagaagagaccggggctggctcaaggtctggtgagggcaggtgagtcaggaaggggcagagtgggccaagccatggagccagggtggggcaggacttcatccagaaagggaggccttaggggtttttagagtaggggtgggggagcatgagagtgaagggagatcaggagcggggagcctggggagagggaagcctagggcctgtttgtcgagggtcttctttgctcctcacctgtgctgcagctgagccacagatcctctcactgcccaggaaggagcccagagccaaatc

SEQ ID NO: 26591 - DNA, 934 bp, Artificial sequence
  DNA replication origin
aatgcgggctccgggctccatgtggcgcggggcgctggcaggcgggcggcgggggtgcagtacgcgcggggccggccttgtggctttctaggctggttttgagttccaggtgttttatttatttatttttatttatttattttttttaacggctaggcccactcggggctgagcccgaagggcgccgaggcgttactggggggcaggagccgcctccagggccctgcgcgcctgtggcacgactgccgggcgccgggctgccattttgtcaccgtggctgttgtcgctgtggggggcggggggagcggagtcttgcgccatcaccccgacggcctcccgcgcggaggaggcagggggagccggctttggggacccccagttgtgctatgagccccgatgggggtttccgccccgcgccaacggcctgaggctgtgctggagagtcacggcggccgcggcgccgggaggacgacgatcctctgtgcaaatgcccccccccacgcgctccctgcctcccccgcctcctctccggggtttcgccgttcctcctgcaggcgctcagacgtagttaaatgtggccttaaggactaaccgatcgctctggtgtttgctctttcggcggaagtgatagagtaaggggaacattaaacatgaggttcttttggcgggggtgaggggtgtcgcgcacgcgactctagtggccctgactgaagccaaggacagcagcctgttccccgggagggaagagttgtcgatccgttggggaaacgccctcccgggctgggctctccgggaaggtaggtcgagctccgtgtttcaggtggatgttgcagcgccctgcaggctaggggaaccctcctcctcggtctaaacctgctccttcccccttttatttttgcctgggagaaggcagctacaatagtaatgagatcct

SEQ ID NO: 26592 - DNA, 1011 bp, Artificial sequence
  DNA replication origin
gccgccccgcgaagccctcggccgggcggggaccccgacccgacccctccggccgcgcccctccccctcgcagaacgcacctgcggccccgcccccggccgaacgctgaggcggcggctggctggcaaggccgggcggctcggccctcgaggcacagtcaccttcccttcccccgccattccgcccacccccctcactcagccacagagcagccgccgcgctcctcagccgccccgaaatctaaaggggtccgtctccggcaccactaccaaatggccgagcctccctggccggctgcgcagcccgcccattggtcccttcccccccccgccgccactgccattggctgttgcccggagaccctcggcggcgattggctcgggccgctgccgctcgtccatggggccgcagatcccgcctccacggcgatcaggttagtgtgcgccgcgggtgctgggggctcgagaaccgagcggagctggttgagccttcaaagtcctaaaacgcgcggccgtgggttcggggtttattgattgaattccgccggcgcgggagcctctgcagagagagagcgcgagagatggagatgggcagacggattcatttagagctgcggaacaggacgccctctgatgtgagcatttgccaaaaatatctctgtcggtccattctcctactttgtgtgtgtgtgtgtgtgtgcgcgctggggggaggcactttttttgggggggggcgcccgggaggtgcgggtttgggggtcggactgcaagcgaattggcaaggctggggggttgcaatgccatccgagcatgttccggctgccgccgccgctgcccttggtgtgtgactacctgtgcgtgtgctcccgcgtgtgcgagtgtgggtgcgagagtgtgcgtgcgagtgtgcacccatcgggggccggcgggcgcacgcgtttgggtcggagagaatgaggcgaaatcaccctcggagatcgctgctcccgtgactccgtctggggggaagatt

SEQ ID NO: 26593 - DNA, 926 bp, Artificial sequence
  DNA replication origin
ctgcccggccgcccttcctgggaagtgaggagcccctctgcccggccagccgccccgtcccggagggaggtggggggggtcagccccccgcccggccagccgccccgtccgggagggaggtgggggggtcagccccccgcccggccagccaccccgtccgggaggtgaggggcgcctctgcccggccgcccctactgggaagtgaggagcccctctgcccggccagccgccccatccgggagggaggtgggggggtcagccccccgcccggccagccgccccatccgggaggtgaggggcgcctctgcccggccgcccttcctgggaagtgaggagcccctctgcccggccagccgccccatctgggagggaggtgggggggtcagccccccgcccggccagctgccccgtccgggaggtgaggggcgcctctgcccggccgcccctactgggaagtgaggagcccctctgcccggccgccaccccgtctgggaggtgtacccaacagctcattgagaacgggccatgatgacaatggcagttttgtggaatagaaaggggggaaaggtggggaaaagaatgagaaatcggatggttgccgagtctgtgtagaaagaggtagacatgggagacttttcattttgttctgtactaagaaaaattcttctgccttgggatcctgttgatctgtgaccttacccccaaccctgtgctctctgaaacatgtgctgtgtccactcagggttaaatggattaagggtggtgcaagatgtgctttgttaaacagacgcttgaaggcagcatgctcgttaagagtcatcaccactccctaatctcaagtacccagggacacaaacactgcggaaggccgcagggtcctctgcctaggaaaaccagagacctttgttcacttgtttatctgctga

SEQ ID NO: 26594 - DNA, 1183 bp, Artificial sequence
  DNA replication origin
cagaggcgcccctcacctcccggatggggcggctggccgggcggggggctgacccccccacctccctcccggatggggcggctggccaggcggggggctgacccccccaactccctcccggacggggcggctggccgggcagaggggctcctcacttcccagtaggggcggccgggcagaggcgcccctcacctcccggacggggtggctggccgggcggggggctgacccccccacctccctcccggacggggcggctggccgggcggggggctgaccccccccacctccctccgggacggggcggctggccgggcagaggggctcctcacttcccagtaggggcggctgggcagaggcgcccctcacctcccggacggggcggctggccgggcggggggctgacccccccatctccctcccggacggggcggctgccgggcggagacgctcctcacttcccagacagggtggctgccgggcggaggggctcctcacttctcagacagggcggttgccagtcagagggtctcctcacttctcagacggggcggccggggagagacactcctcacatcccggacggggcgacagggcagaggcgctccccacatctcagacgatgggcggccgggcagagacgctcctcacttcctagatgggatggcggccaggcagagacgctcctcactttccagactgggcagccaggcagaggggctcctcacatcccagacgatgggcggccaggcagagacgctcctcacttcccagacggggtggcggccgggcagaggctgcaatctcggcactttgggaggccaaggcaggcggctgggaggtggatgttgtagcgagccgagatcacgccactgcactccagcctgggcaccattaagcactgagtgaaggagactccgtctgcaatcccggcaccttgggaggccgaggctggcggatcactcgcggttaggagctggagacctgcccggccaacacagcgaaaccccgtctccacccaaagaatacgaaaaccagtcaggcgtggcggcgcgcgcctgcaatcgcaggcactcggcaggctgaggcaggagaatcaggcagggaggttgcagtgagccgagatggcagcagtacagtccagcttcggctcggcatcagagggagaccgtggaaagagggg

SEQ ID NO: 26595 - DNA, 998 bp, Artificial sequence
  DNA replication origin
caggcttcgaggtcgcggagctcgggaagttcccccagggtgtccccggtccgctgcctcctcaggcccgtcactcactcggataagccggcacagacgaaggccatagcaaaagcgcaactagaaggactaagggcttcataggcgtcgtccgtagcactctgccatgcgaccggaacgtcctggggccaccaggctgggaacctcaaggccgaaagggaaggtgtcagcggagtaccgtcctgcctcaggccctgggacacccagcaacggttgtccccagcgcgcaagcgcagcggcatgggggaggggagagcgagcggccaaggcccgcccctcctgggaccgcgtgcagggggcgggggatcgcgcgcgccccgccccgccccttcctagtgcgcatgctcgctccgccttcgtaggtccgcgcctggtgtgggctgggaacgcctcgacgcccggctactgcgtgcggggtgctgcctcggggcgtgcggggctcggcccatcctgcgcggtagggataccgccgtggtttaaacgcggtccctgtgaggaaggaactgtaatgggagaggcagataacctggcaattaccacagcgtgaaagggggctgtagtgggggaagcgctaggtactgttgtgcacagtggaaacccacccccggaagcgggtggggagcttggctaagtggaggacagcttggagcaccccaagaactgagcatagttccggcgagttgcattgtggggcttgggagggcagttgttggaggacagggaggagaggtaggcaagggcattaaaaacgccctaaggggcttgggtgtttttgtttttcaaaagatcacattccatttctttgaccttcttaaaaagataggggtagggatgagggagagtacgactatgaaaggatagcatgaggttgttttggggactaatagatggcagtggccacaagaatctatacatgtgttaaaattcacagaaggccg

SEQ ID NO: 26596 - DNA, 1172 bp, Artificial sequence
  DNA replication origin
agggaggtgggggtcagcccccgccaggccagccgccccgtccgggagggaggtggggggtcagccccctgcccggccagccgccctgtccgggaggtgaggggcgcctctgcccggccgcccctactgggaagtgaggagcccctctgcccggccagccgccccgtccgggagggaggggggggggtcagccccccgcccggccagccaccccgtccgggaggtgaggggcgcctctgcccggccgcccctactgggaagtgaggagtccctctgcccggccagccgccccgtccaggagggaggtgggggggtcagccccccgcctggccagccaccccgtccgggagggaggtgggggggtcagccccccgcccggccagccgccccgtccgggaggtgaggggcacctctgcctggccgcccctactgggaagtgaggagcccctctgcccggccaccaccccgtctgggaggtgtgcccaacagctcattgagaacgggccatgatgacaatggcggttttgtggaatagaaaggggggaaaggtggggaaaagattgagaaatcggatggttgccgtgtctgtgtagaaagaggtagacatgggagactcttcattttgttctgtactaggaaaaactcttctgccttgggatcctgttgatctgggaccttacccccaaccctgtgctctctgaaacatgtgctgtgtccactcagggttaaatggattaagggcggtgaaagatgtgctttgttaaacagatgcttgaaggcagcatgctcgttaagagtcatcaccactccctaatctcaagtacccagggacacaaacactgcggaaggccgcagggtcctctgcgtaggaaaaccagagacctttgttcacttgtttatctgctgaccttccctccactattgtcctatgaccctgccaaatacccctctgcgagaaacacccaagaatgatcaataaaaaaaaaaaacaaaaaatctaccaactaaaaaaagctcaggaccggatggagtcacagccaaattctactagacatataaagaagagctggtaccaatcttactgaaacaattcacaaaatcagagaggagggattcccctaactcactttataaaaccagtatcattctgataccaaaatctggcaaggaca

SEQ ID NO: 26597 - DNA, 1302 bp, Artificial sequence
  DNA replication origin
ggcacacctcccagacggggtggtggccgggcagaggggctcctcacttcccagtaggggcggccaggcagaggtgcccctcacctcccggacggggcggctggccgggcggggggctgacccccccacctccctcccggacggggtggctggccaggcggggggctgacccccccacctccctcctggacggggcggctggccgggcagagggactcctcacttcccagtaggggcggccgggcagaggcgcccctcacctcccggacggggtggctggccgggcggggggctgacccccccccctccctcccggacggggcggctggccgggcagaggggctcctcacttcccagtaggggcggccgggcagaggcgcccctcacctcccggacagggcggctggccgggcagggggctgaccccccacctccctcccggacggggcggctggcctggcgggggctgacccccacctccctcccggacggggtggctgccgggcggagacgctcttcacttcccagacggggtggctgccgggcggaggggctcctcacttctcagacggggtggttgccaggcagagggtctcctcacttctcagatggggcggccgggcagagacgctcctcacctcccagacggggtcacggccgggcagaggcgctcctcacatcccagacggggcagcggggcagaggtgctccccacatctcagacgatgggcggccgggcagagacgctcctcacttcctagatgggatggcggccgggcagaggcgctcctcacttcctagatgggatggcggccgggcagagacgctcctcactttccagactgggcgccaggcagaggggctcctcacatcccagacgatgggtggccaggcagagacgctcctcacttcccagacggggtggcggctgggcagaggctgcaatcttggcactttgggaggccaaggcaggcggctgggaggtggaggttgtagcgagccgagatcatgccactgcactccagcctgggcaccattgagcactgagtgaatgagactccgtctgcaatcccggcacctcgggaggccgaggctggcggatcactcgcggttaggagctggagaccagcccggccaacacagtgaaaccccgtctccaccaaaaaaaaatatgaaaaccagtcaggcgtggtggcgcgcgcctgcaatggcaggcactcggcaggctgaggcaggagaatcaggcagggaggttgtagtgagccgagatggcagcagtacagtccagcttcggctcggcat

SEQ ID NO: 26598 - DNA, 1679 bp, Artificial sequence
  DNA replication origin
caggactgtcactcgaggagctgccgctaccgccccccgccgtggccccgccccttgccgtggctgggatctcgcgggaagagctgcgggcacggcggtggctcggtctcccggctgcgcgcggagcgggagggctctcctcacacaagcgcttccttgccgagaggctggagctgcggcaccgcaggcctgagccaccccttctctgctgtctccttctcttcctcagggctcccgtgtctgctcgccctccgacgctgctcaggttagaaagcccggagcgcgtctccgctgaggagcggtcggggagcggggacacggagcagccggagcaggcgggctcctgacgggggcggctctgggggctgcgcggcgctgcctggtgggcgcgaggcttggcggggtttgggagtccggggggcgaggaggcggtgcagtgggatccgggcgcgggcgcccaagggcggtgtagcgggtgccggagctcccgaggtgagggggcaatgtattagggatcctgggggctcttccggcttggggtaggggtgggtggcggcacacggggtcctaggtctttgacgtcgagggagatttatcagggtcttgagcttcttggaggtggtgtagcggggttccgggacaaggggtctttttacccgggtcccgagctctttggggcagagaatgcagtttagcaaggtttacaccggtgtaaaccttgtctctggaggcagatcatcggggtcttgggggttctttgagcgggcgtgggcgtccgtttcgcattgctgggatgaagaagcagtgtgtccgggttctggggagaggggtctgttcatcggtgtctccgggtgagagagcgatgtatccgttccgctggggccggggccgccttggggggttgttgggggctgagggtgtgtagcggcgaccagcgtctggccggggtttctgctttgcccggagcggggcggtaacttggcatggtctccagtcttttgggggcgacggggcgagttagctggcccccgggcagtctctcggggtgggcgcggctccgcaggcgctgggtccgctgagggcgggagagggctttggtgctaccgcgcaggctgggcagcatcctgaaacgtttttgttcaggtctccttctctctggatgagatttactcaatgcttagttggaggattgatcggtgttgttgcctagttgaagaagcagtgcgtttgttctgcagttttcttttctctgccccgggatccctgtgggggcgcgctggtctcgctggagctccgggagctagagtggcagcaccttaggtgggcgtttggtctgcaggttctttaggaggccggtgtccgcaggttgagcgtggatacagctcctgagcaactggaatctgttgagggtggggaagactgattttggcttgctttcctaggtggtggtctgctttgctcatcctgcatgattagatctgttctgaagtcttgcctgagtgaatgttaggcagagtcggatagtgcagggaagcgtgttctgtctggcttctttctgtcctttgaaaagcatttgtagagagggataacgtcaaattcagcctccagaaaacaatggaatttgaaatcccaaagctagaactctgcaaaaacgttttctgtgacctgtaaggatggtt

SEQ ID NO: 26599 - DNA, 1894 bp, Artificial sequence
  DNA replication origin
agcagagagccttctgcacggcggcggccgccccaccttcacaccggccccgcgtgcggtgaaagtggccgagccgcgccgccgccggatcagggccgccccggcacaaactttcccagacccgccctcggagcggccacccaggctcaacgggctccacgggcgcagggcggctggggctgccgcggagggcgggtgcgcgtggaccgggaggtggggaggcggcgcgcggcggggagtcccgccccgggttacctgggttccaagggtctcgggagtccagtggacagggcgcggggacagcacaggcaggccggagaccagacactcctcccgggctgcggcgaccccggactcgcgggccctgcacctggccctgcgggtcgccgcgcctacccatgccggtccccgcccgtcccctcccgcgcggggcggggcggccccgggggaggagccgagggccgtgggcaccaccccctgagccaggcctgcgcctcatcacgtgccaccgaccctgggctctgtgacttccaaagactcgccaccccattccacagcctgaggtgccaccaaagccataagcccaggggagtctctcacaccccattctcctagggcccatgtaccccacgcccacctccaccccaggagccgaaggccggcagggagcctggagagcctccttgatgggagaactgcggagcttgcccctcggaaaagtgcatggggtggagaacagggaaggagaaaaaaacaacaactgggtactcgcagccccaccgcggtgtccgcttcgccggtgggagaggatcctcgccgccctgaatccttgaagtgagttccacccctgtctcttggagtgctcagggtggcgggccctttgccagccctcaccctttccccagggatcctgtcccaggtcacaggctcctagactggaaggcgctgggcctggacctctgccactcagtggacacagctataagagatgaagggacacagaggacaaagaagaaacatttggcttcagggaaccagactctgtgtctcctcccaggtgctgaaggaacaggttgcagctacctggtgcccccaccccgaccctgccagagaaaggttggaacatccacacctgtggaccgaagtcccccaccaggctctttcctcccacccttcagccccaggctctctgagctcctgctcctccctgccttgccttgtttgctgagggcacacacagtggagagagcacaggactgggagtccagagacctgggctctagtctactctgtgactcgggtcaagtctctggccctttgtgggcccaagttgccccatttgcagtgaataggttgcagtcaattatctccggccatttttacggatcctgaaccgtggtcttgggcaccttgctttattaggctttttggtggctgtgcatcttgtaagggtgtgtatgcatgtgcgtgtgtgtgtgcgtgcgacatgcgcttgtcctctcagacccaagttcttaaagggaaagagactggggcctacacagaggcaggcatgtatattccacagaccagagtttgacaagaatgactggacacaagagtggagcccagtcccagctctatgctgaattcagagtagccttggacaagaccctcaccatctacaaaatggagattaataatccctgctttgcctttccaaggctagtcgggggactcagtgagatattagatatgaagctctttgaaggggaatagcacagggatgtgtgcttttgatgtctgggccagtgatgggtttgggggaagaatagggtgtgaagcattctctgggaggcaaaggctggcactggactgattggccaccctgccaaagctgcagcatgcacagcac

SEQ ID NO: 26600 - DNA, 1239 bp, Artificial sequence
  DNA replication origin
tcggccactttcaccgcacgcggggccggtgtgaaggtggggcggccgccgccgtgcagaaggctctctgctgcaatcgagggcggtgaggggagctgttgccttctcgcaccttttctctcactctccagggcgtttgcgccgcttatccttcctccaccgcccccctcccgccgcccccactttaataaaacccttggattggggctgcacagttggcgatttctttacacctgtgcttcccgcctcctgagcccagatgtgagcctgggctgagcaggaccgtgtgggtgaggggcggcccactgcctgcgggggtcgtcccggccctgttgaagtgggtgcccagctacagggagttccccctgctctgtcattggcctccccccggccacagcccccagctgggcatctcctggctcccctagcacttcccaagtcctagtcggatgagcccaggagagggggtggaccccggcccagcagaacaagaactcaggagcccggtaactcttatccgtgagcagaaccggcttcctcccgcttaggttgggaggagggctcagcttagtgggagtcgggggtgacaactgccccttcccacgcagagccatagagaagagatggggagaggtcaggggatctgagaagagctagcagccaaaaagggacacatccctgatttcatttgaacctaacaaaccaatggcgagtagatattaacacatgggcagatgagaagacaaggaggcccaacaaagctcagccatttgctggagaaactggtgggcttttctccaccactgagtggcgggtttcccaccgcatccttccagagctgcatggtcgcttctgcattcttgcagtgcccttgactcagcagaggtttgtttcttttaccccactccccacccccctaggttctgcctgtgaaagaggttcaggggagagggcacctccaagcagacacaaactccagtcagtaaggtcctccaagagccagccagagccttgctaagctcccagaactgcaggagggcagggacctgctttgttccctgcagggacctgctttgttccctgccgtagcaatagtacctggcacacggaaggtgctctgcgagaatggaatgattagcctgcaacagcaaagcttcttttccaactgccttatctctgcccttggcaagcagaaagggcactctgaaaagttggatcagaaaggtgtccagccccacc

SEQ ID NO: 26601 - DNA, 1266 bp, Artificial sequence
  DNA replication origin
ggactagatatacataaagcctctcttcttacttcacctgcccattcccaacgtactgcctcccaattaaaaaaggaccccccaccttcctagcacatggtatttccccaaagtgagaacacgaaggaattagtcaccgcgggggaatggagacagtagataggcgaggatctaagaggggcttccatcatggagggtgagcaggtcctccatgttcatcatggagggtgagcggccctgcgtgctcatggtggagggtgagcgggccctccgtgctcatggtggagggtgagcgggccctccgtgctcatggtggagggtgagtgggcctttgtgtacatggtggagggtgactggccctctgtgttcatcgtggagggtgagtgggccctccgtgctcatggtggagggtgagcgggccctctgtgctcatggtggagggtgagtgggcctttgtgttcatggtggagggtgactggccctctgtgttcatcgtggagggtgagcgggccctctgtattcatggtggagggttagtgggcctctgtgctcatggtggagggtgagtgggcctttgtgttcatggtggagggtgagtggccctctgtgttcatcgtggagggtgagcgggccctctgtattcatggtggagggtgagtgggcctctgtgctcatggtggagggtgagtgggcctctgtgctcatggtggagggtgagtgggcctctgtgctcatggtggagggtgagtgggcctttgtgttcatggtggagggtgagtgggcctttgtgttcatggtggagggtgagtgggcctttgtgttcatggtggagggtgagtgggcctttgtgttcatggtggagggtgagtgggcctttgtgttcatggtggagggtgagtgggcctttgtgttcatggtggagggtgagtggccctctgtgttcatcgtggagggtgagcgggccctctgtattcatggtggagggtgagtgggcctctgtgctcatggtggagggtgagtgggcctctgtgctcatggtggagggtaaacggggcctctgtgctcatggtggagggtgagtgggcctctgtgctcatggtggagggtgagtgggcctctgtgctcatggtggagggtgagcggggcctctgttttcacggtggagggtgagcgggggccctccgtgttcatggtggagggtgtgtgggcctctgtgttcgtggtggagggtgagtgggcctctgtgttcgtggtggagggtgagtg

SEQ ID NO: 26602 - DNA, 655 bp, Artificial sequence
  DNA replication origin
catacagagggctagcaggtgtaggggcaggggcgggagcaggtacagttctggtctcatggctctgaggtggcgtggacctcaggtaagaggtttacattggagacagggtttctccggaggtggaagagatgcagtaggcatggaggagatctctggggagccggatcgtgtgagaggagaggtcaaaggaccacttctgagcctccccacccatgtgtgccagaaagcagaggaggggagccagcccaggggaggggggacatggagggtaagaggggatccggagggtgggagggaatccgggagggagggagggatgtgacagggaccagagaaagagaggggcattgaggaggcctgaaggacccctgcatcaatcttggcagtcaggaggccgggaccctggacaggggcacgcacattccccactctcttctgcaaacccatcaaagcctgagggtaagcctggctcacacggaaaggggcacggtctagtgaatgctggggactgggcagcagagcactaaggagtgggcagtgaagtgggaaagtgtgtgtgtatgtgtgtgagagtgtgtgagtgagcgtgtgtgtggtgtgtgtgtatgtatgtggtgtgtgtgatgtgtgtgtgtggtgtgtgtgtgtgatg

SEQ ID NO: 26603 - DNA, 971 bp, Artificial sequence
  DNA replication origin
gctgtcccgggaccccgaggaggactgccccgcccccgggaaccgggtgcggcgtaaaacaaccccggctccgggccgacccttcctggccccttggaggcccaggcggggcggcggggggcgacgcggcaggggtctccgcgcccaggctcccgcggagcggccacacgtggaggttcccactttggggtcgcggccgcagcagcaccgggcgggatgctgtccgcgctgcccgcgtacggccgcggcctgagtggagacgcctgcccccagccccgaggcctcggcccccgtccgccctctctccctgctcggcggcctcgtactcacgctgacttcatggcagcaggctccacgccgcccaaacgcgcatgcgggacggctggctggcgaagactgcgggacgttaggaccggcagcaagaactagaacttcgcggctaaggcgcggtgctctgcgaagccggcggcgacgctaagagcccaggtgagctcccgcctggcgcatttcaaacgggccaatcagcgcccgtccgcagggagaggcaggacctccgcggaagtgacttcgctgccggaagtggcgcttgtctcctaggcgaccgacgctgaaagggccgcggagtcgcgtgtcagggctggagggagatcttgaggtatggtatttaaactcttccgccttgcgatgacgaaactgagggtttcttttcctccatcacaagaagttcaatggaagggcctttccagggttgattcagaggtcggaatgtcgttctggtgaaaagtgttgtattcctgtgctgtgccctgctccaagtctcaggctccgtctctctggctcccaagtcaccacattatcttggcgtcttttctctctctgattcacctttcctgggtttccctccagctctgtcctatatgtacattattttatcaaatcttttttttttccttttttattttttgaggtgg

SEQ ID NO: 26604 - DNA, 943 bp, Artificial sequence
  DNA replication origin
gcgttggggtgaggccctcacttcatccggcgactagcaccgcgtccggcagcgccagccctacactcgcccgcgccatggcctctgtctccgagctcgcctgcatctactcggccctcattctgcacgacgatgaggtgacagtcacggtgagtgcgggcgcgggccggcggccgggctgcctgtgggcggtgactttcggctctccatgcggttcccggctccaggccgttcgactgagcacttccggccggggccaggccgcgaacacaggccgcatagggcgggcgctcctcggggctggggcctctctccgggcaggtcctgggcccccgggaccacgtgcgggcccagcgggcatggagtgcgcttgaggctgggcgctccggctccaagagccttcgtgtagaaaagctcttccgcagtgcttgggcaccctgacccgtgcctcgtctctctcagggacacttactcggacctctttcggtgtaattgccttgaattcccccggtcgtggaggaaggcgcccgagctcggctccacctcccaggtcttgtaacttaaaaatagccgcgtgactcaggcaagtcccagcccgtgaaacagcagtgatgggctcgcctcattgcagggcgcctggcacacatctcttttgcttgtgatagaatatttgagctggttaaacatgttatgtacacttattgagtgacgtgcagcattttggagatattacatacgctacgttttgatggattgacgtttttatttgttgtaggaggataagatcaatgccctcattaaagcagccggtgtaaatgttgagcctttttggcctggcttgtttgcaaaggtaaggtgatggtggcaaagtgattgtggtaaggcctgctgatttacgagggcagttgtacatgctaaagtacccccagcggtgccataacgc

SEQ ID NO: 26605 - DNA, 2619 bp, Artificial sequence
  DNA replication origin
cattcaaaaggtggtgaaagccactggagggttttaagcagggaagtggcatggcctgatttccactgtacaaagctgaccctggctgactcacggtgagtgcattgggagggcaagagtgaaggcaagggcctggcctggggggtccaccctccttcagcctagaggcaccagtttccacagagatgcccattggcctggcccttatggtcccttcagagcccaaacattgctggaaactttgcccaggaatgtgatgcctggggccaccaagagcacaccacgccacctttgcctgtccattctgcagatgagcaatacagacccggaaaggcctaaggctgcttagctctaaaataatggctcactcacccagtgcttctaatgtggggcctaatcacttgtggttagagagggagccccacgttcggtcaggaaggggtgggggctgcaggtaggggagggcatcactgatgcccaggagacagactttagttcagcagtgaggcagtgctggcccagattggggtggccatggggagaaggaggaatgtggacagactgggatgtgtgttgggggtgggatggtcagggacttgctgatagcttgggtgtgcgggatgaagaggggaattcgagctaactctgggatattttgcttaagcacctgagtgggtggtgatgtcattgacagaggtgggaagtctagggagcagggaggaggagcaagtttgcagcaaaagctaagagtttggttttagccatatgcattaattttgagatggctcctagtcattctcctgcagttgaatacacaccctgggagttccaaggagcagccaggactggagatggaggcgtggagtcaatgacggagacctggtatttgatgcaattggatgggatgaagttatcttgggaccattgggaaagaagaaaagaaagaggccggggggttccccctgagattatcctgcacatagagactgggacatgtggcagagttggctgaatagactgagaaggagcagacagggagtaggaagaaacccaggagagggagcagtggaggccaagtataaagcattataggaagtgggaagaggtcctgaatcaatcactgctgaaagttcaagtgaaaggaaaagaaagtgaactggacacttaggggtcggtggtgacatgatgaatgctgagtcagctaagccatggggacagaatgcccactaagaaagtggaggcaggaggtgcagacgattttttaaacactttttgcagtgaaggggagcagaacattgagatggaagctggagagagaagtggagcccaatggagctgtttgtttatcacaggagatcctagagcagcctgttgtggatgacctaatggagaaagaggaagcgatgtgcagaaggaggaggtatctacggttcagataacagaagtgggatccaaaacccacatggagggaatggccttgggcagagcagtggccttcatccacaggagcaggagggaggctgccaggtttcacgatgggaagatgacttttctgatttatgctatttcctgagcaaagcatgaggcaagtgaggctgggggtagtgaggggtgtggggagaggagaaaggctgagacagttgctctggagaatgggaacgtgcaagacaacggtagcagtgctgtggaacaacaccagggcccaattgagatttcaggctatgaatttagaggaagccagtctgttttttctctacctttattttgctgtgtgggtgcaggcattgagtaggtgggtagttggatttaacccaggttgagcatggtctttaagtatgaagaagtaaggggagaaaagaagatgaaagatggatgtgatggcagagggctgatggtggtgacagaggagggtgaggggtgggagggcttggcgaggcggagggatcacttgtcatctggaaggatgacaggtggtctcccggtgggatgtttgaagtggagattgtgtggatggtgccgtgttcatgatggtacaagatgtgatgcccgtgggagtaggtggggaggagggtgacaaatggttggaccgacctggtagaggaagagagaggcaccagtgttgggtggatctgcaaagtggatgttgaagtcaccaaaactgatgataggatgagggtggggaggaagacagggcagatgtgtcagttaagtctgtgatgaatgtgaggtgcaacccggtggggcagtggtgacaggtagagtgtatggacatggattcagagaggatggcacttagaaagggaaagggagggcaaatgttttggaaaaggcaatcccagggtctgtgggggcgtgggagaggaaacagggggaactggtgtgttgggggcagccaggtgtcagttagggagagttcaaaacagaggctgagggtatgggcttgcttgtaatgacagggtctgagtccccagcaccgagagagggtgctgttcctggaggctggaggtctcagtttctgtgggaggcttagattccacatctgtgtggtttcaagttcctcagaagcagaatggtgtcatggtcacttttgagtgggtgataggatgctacggaatgagg

SEQ ID NO: 26606 - DNA, 1025 bp, Artificial sequence
  DNA replication origin
caaacccagaccccactgctggaaactcttaagctaacacgggggacgtgaagtaatttggggctggagtacaggactttgcagagtaaattgagggatcctgcagtttagaaccaaactacaaatagcagtgaggccgggctatggagtacagtcctgactgtccaggccattggctgtgaccctgcttcctggaacgccgggtttccatacaatggccaggtaagctgcagggaaagagggaggaagccagggcgaggcgccgggctgcagggaaagaggcggggatgtagggtgggggcggggctgcagagaaaaaggcggcgctgtagggtgggggcggggctgcggcgaaagaggcggggctgcggggaaagaggcggaactgcagggtgaggggcggggctgtaggatgaggagccgggccgcagcgttcagggcaccccctcatttgcaactggcacagccccactcacatctgttttccatgctgtgggcatgaggaggcagggcacatggagatgacatactagtaaaaggcgcgtttgaaagttgtcaaaacgcattagggcagtgttgaaggattctgagcaggggaggttaccatggcctgatttgggggataggaggtggaagatggattggagagaccaggacactgttaggagcctattgtaatagtatatataagagccaacctggttcctgaccaggctggggccgggagtgtagaggagcaaagaggtggagatgacactttctggagacagcatatgaagctggcacttgagaatggatggggtgcagatcttccctcctctgctaagtgacttgaaggtaggaactgggatccatccacctttctgtccctcatagtatctgtcacagtcagagccttacaaggcccaagtgctttctaggtaccggctgggtgaatgaacaaggggccaggtcctgtaatcccacaatataagctctgtggaactgggaatgagggtcctgacctcgttgccgcatgccagtga

SEQ ID NO: 26607 - DNA, 961 bp, Artificial sequence
  DNA replication origin
catccggcgcttggcaatcgccacgggaggggcaaccttcctccttttgctaccaccacccctccccgcatctttcttttcaaatgaccatgtgattccattaagttccgtgtgcaatagcaatcattctggaaaaactgattgtgactctcttaatgactgcttggtcggatgttaatgtaacgggggaaaatttacactgtcctgcttgctgcagccagagctgaaaaggattccaggccagtgcaggtggggcatggatgcagggaggtggggcatggatgcagggaggtggggcatggatgcagggaggtggggcatggacgcagggaggtggggcatggacgcagggaggtggggcatggacgcagggaggtggggcatggatgctgggagggtggggcatggatgcagggagggtggggcatggatgcagggagggtggggcatggatgcagggagggtggggcataaatgcaaggagggtggggcataaatgcaaggagggtggggcataaatgcaaggagggtgtggcatgcacctatggctgattggcagaattttattaacaaagtaatgtctgtgtttcttagaaaggatttctccacctgtcaggggtgtctgggaggagcatggtcattccccaccctgctttgggggccctacccctggtggcagggctggggccttgcttccttgccctggctgtgtgccctaggacatattaccagaaggacatattaggatagagcaggagatccagtcagaggtcaagagctgaccctgctctgctgtagctgtgtgaccttgggctagacacccaccctcttggcagcttcccaccggaaattagtacaagcctgtgccctacctcccggaggcacttttgaggccagaggcagacattgccaatccaagtagccatcccctctgctcccttcttgctagcagaacccaggc

SEQ ID NO: 26608 - DNA, 1673 bp, Artificial sequence
  DNA replication origin
cccaagtggagacaaagagccgcggagcaggcggcaaagtcgtcggcgggcgccggggccgggcggcgggcgcgggctttgtgcgcctagggctcggcgggcagcggccggccgccttccctgggctgcgtcgagcgcgtcaatgcctgggactgcgcggacatcgtcggctccccagcaggtccggcgcggggtcccgaggccgggggcccctcctggggcgagctcgggccccctccgggtcactcagcgggtcgcgcctgtaggggggcgcgccggggcagccccaagcatccggggcgcgcgggtccgatcctagaggcgtccgggcctggggctcgcggcgagaagaggaaggaggcgggctacgaggtggtggcttggggccgcaggagcgccggagggtgagggcgggagcccggcgcgggcgcttcgacgccccccctcggagaggagagcctgctgttccgtctgctactgccgctgccgccgccgccgccgccgctgcaagcccttcccagggccggggaggaactccgggctcagtaggtgcaaatcaaacgccctggcatcctaagtccagcgggcacgggaagcctccgcaaagggttctcgctgctcccagcttgagcaccgcgtccccaccgaggagcgctcagcgccaccgccgctgccgcgtcggagcgcacaggcaggagagcgctggaggggagacgcagcccgagaccggggagctctacggcttccttccttcccctcggcccggctctcctctccgcgccccggcaaacccccaaaacacacacacccaacacacacacacgcgcgcacgcacacacacacacaccaaaaaaaaaagtgccccggacctacggataccacacacagacaggcgaaggggacgagcacgaggtctgaactgccgcgagagcagttccaaatagggactgaaaagtaacaaaataatgtggcagcttcgtccggcgctggccaatgggagcgcggggcccccacgtggggctgcgggactcggcctacgactgggtgccgctgggcgcgacgtcacaatgccctcttgtgtctaaaactatgcatgaaaagtagcaatcaggccctacccgctggtgactttcgcatgggagtgaaaaacagcgctcctcagatcaggaattaaccgaaagacatataataaatagatatatattatagtcctgggctgctcgagtttttttcctccttttttttcccacggtctactagcaaataattatttagcgggaggaggaaagagggaagacagaggaataacaacaaaagaaaataagacaagctgtacaatcttcaaaacctgtggctggtagtaatgtatcagtttattctgcagcggcggcgaacgattcctccctctaatctcattaggtctgcaaagcagcccaattagatactataaaacaaacaatcactttgtcactttaatgttttcacttcaaaagatttaggactgataaaacggtggctcctaaagttgcctccgacctttaaaaatttgctcggaactcaggatgtccccttttcttcaccccttcttctgcccgcctcccccacattagcccccagctctcctttgttcactcgcccttcttttcagaaagccaaataaacagctcctttga

SEQ ID NO: 26609 - DNA, 802 bp, Artificial sequence
  DNA replication origin
tggtggagcagggatgaaagtgttcagacttaggccctcttttcttgctcacattcattcattcatgtatcattcattcattcttcatggagctcctgctgtggaaggcacagggctggctcttggaaataaaatggcgaaccaaagcagacaccttccctgccttacagtctagagggggagatagatgcgaataccttccctgccttacagtctagagcaggagacagatgcgaatcagatggcctttccgacaaaatggacagttccagccaggactagtggcgtgcatgagcggcatacagtgtgtgaaggccttgactatgggggactggcctggtcagtgaggtcaaggcagacttcgtcgatattcaaagtatgacctgaaggatgaataggagctaactacaggaagggggagagggaagaatgttctcggccgaggggagagcatgtgcagaggccctgggcaggacagaaggaagcatgtcaggcacaaaaggctcagagggacaggtggcgaggggggagtgggatttttcctccatattaatgagctgcacctttaaccccaaaataatgggaaactactgttggttatgaaggccacgggctatggatttgagctgacttgcattttggcactatcgctcgggcagcattatggagaacagattggaaggagccatggtgagtttgggaagagcagctgggaggctactgcatttgtccagcccggggacagactcaggggcagagatggagaggattggaggaagctgagagatcttgaggaggcaac

SEQ ID NO: 26610 - DNA, 1564 bp, Artificial sequence
  DNA replication origin
agaatctagctgggtgtttctggtaccagctgtgctcaagatactgttttgtgagtaagaaaaaggatggacagagggtagatggatgttgaataaatgaattgatggatgattgttggatagctggatgcaaggataacagaatgatgcagaatagatagatgggtggatagatgttggatcaaagcatggatggatggatggatggatggatataaagatgaaagtgcagatgagtagatgggtggatatgagatgaatgggtagatgagtggatggatagatagatatgagatggatgggtagatgagtgaatggatgaatatgagacggatggatagatgagtgggtgagtgactatgagatggatgggtagataagtggttggatagatatgagtggttggagagtggttggatagatgaggggatgagtgactatgagatggatgggcagatgaatggatggatggatggatatgagatggaggggtagatgagtggatgagtgaatatgagatggatgggtagatgagtgggtgggtggataggaagtggatgggtagctaagtggatgaatggatggatggatataagatgaacgggtagatgagtggaggggtgaatatgagatggacagatagatgagtgggttggtggatatgaagtggaggggtagataagtggatgaatggatgaatggatataagatgaatgggtagatgaccatggatatgagatggatgggcagatgaatggatgggtagatatgaaatggatagataaatgtgtgaatgggtgaatatgaagtggatgggtagatgagtggatgaacggatggatggatctaagatgaatgggtagatgagtggggggtgaatatgagatagataggcagatgagtggatgggtgaatatgagatggatggatagatgagtggatgggtggatatgaagtggatgggtagatgagtggctgaatggatggatggatataagatgaatgggtagatgagtggagtggtgaacatgagatgggtgggcagatgaatggatgggtggatatgagatggatagataaatgagtgaattggtggatatgaagtggttgggtagatgagtggatgagtgaatatgagatggatgggtagatgagtggatgggtggatatgagatggatggataaatgagtgaatgggtggatatgaagtggatgggtagatgagtggatgaatggatggatgataaaagatggatgagtagatgagtggagcggtgaatatgaaatggacagatagatgagtgggtgggtggatatgaagtggaggggtagatgaatggatgaatggatataagatgagtgggtagatgagtggaggggtgaatattagatggatgggcagatgaatgaatgggtggatatgggatggatggatagatgcatgaatgggtggatatgaagtggatgggtagatgagtggatgaatggaaagatggatataagatgaatgagtagatgactatagggtgaatatgagatgaatgggtagataagtgaaggggtg

SEQ ID NO: 26611 - DNA, 2330 bp, Artificial sequence
  DNA replication origin
ggggatgacagcttcactccttagcatgcacccaagtcctgcccaccctggtgccagcctgccctttcagcaccctctccccacgctagctctgatgccacagtgtttttgtacctgctgcttcctctgccataatgctcttccctttccttcttgcctgcctgtccttcaggaccctgctcaaatgtttctcttctgtaaagtttcccttgactcccaagggcagaacacaaccccagcagccatctactttacacacccctccatcaaaaccatctgttttcctgtctgactcccttccaagtgctgagaaaaagggttatgtctttgtttacctcttgttcccaaagtctagctcagagtctggaatgtagcaggcactcaatgaaatgatgatggagggagggagggaggcaggggggcagggagggatggaggaagagaaggatggagggagggaggaattgagggatgaatggatgaagggtggatggaggggtggatggatggagagatggagggagggagagatggagggatggagggagggagagatggaggggtggagggagggagagatggagggatggagggagggagagatggagagatggatggagggctgcgtggatggatagaaggaaggagggagggaaggactgatgaatggatggagggatggatggaggagtgagtggatgtatagagggatggagagagggagggatgtatagagggatggagagagggagggatggatggagggatggaaggagggatgggtggatggatagaggggtggaaggagggagggatggatgaatagatggaaggatatagggatggatggatggagagatggagggatgggtggatagagggacagagggatgggtggatggagggaaggagggaaggagggagggaggaatggatgaatggatggagggatgtaagtatgagtggatggatagagggatgaagagagggagaggtggatggaggagtggatgaatgaatggatgcatagggagatggaaggatgggtggttagagggatggagggagggatgggtggatgggtggatggatggggagatggaaggatgggtggatacagggatggagggagggatgggtggatggagggatagagggatggttgggtggagggatggagggatggagggatggaaggatggagggaggcaaaggcagagggatagagggatgaatggagagagggatggagggatgggtggatagagggatggagggatgggtggatagggggatggagggatgggtggatggagggatgagtggatggatagagggatggagaaaaggagggatggatggagagatgaaaggatgggtagatggatggagggagtgatgggtggatggagtgatgggtggatggaggaatgggtggatgggtggacagagggatgagggatgagtgaatagtgcgaagaaaggatgagtggatagaaggatggagggagagatgggtggatggctagaggggcggaacgagggagggatggatgaatggatggagagataaagggatgggtggataaagggatggaagggtaagtggacagagggatggagggatggagagagggatgggtggatggatgggggtggagggatggatggatggagagattgagggatggatgaatagagggatggagggatgggtggatggagggatgaagggatggagggagggatggacagataggaaggatgaaggaaagatacaagcaggtaaacgtcttcataagcccaccaaaccccccacctccccctcaggcatagtctgaggacctgtactatctccaatgctggaggcctgagtccccccatctgccataaaacctctgctttgtctctgacatcagaggccctggccaaggtcctctccttgccacccttgtaatctcatgccttggatctctcgttagtactttatccctgtgaagtggattggaccccatacctagagggggtcatgggagcccaactttctcctcagaaatacaccagaaggttacagacccttccccttggcaaaccctgcctgctctacccagagatggaaggtgggacgattggccccaggtcagctccagcaacaactccccacgcaggcctcagtcagtgctccctgggaatcctccaggccctccatctccccactaaaagcccttcctgcccaggactggggtcacatcagtgcccaaacccaggaagatccttcacctcagaagtgcaggcatcagccaaccagagcaatgccagccatgagccag

SEQ ID NO: 26612 - DNA, 1372 bp, Artificial sequence
  DNA replication origin
ccggcccttcccactcactgccccttaagtctccctcagcatccctcccaccccagcgccccagcccctgccagccacctgctcaaggcaggcctctctccctccctccgggcgcctgccctgccctctccgcctcccgatggctaggacaagatgatttacaagagcgtggcgggagggacggcgagccagattaatgcaccagtgagcggccgccttgctcaccaaacacacatcatgaaaacttattgctcagaaaacagcacaacgccactaattcataaatgttcaatgccccccacagtggagcagccagggcttatcgcctccaggaaagaggaggctggttctccccaggccaccctcctcccactcgccctgcctggcctggtggccttcccaccggctcctcagccaggcacccgcccatgtgctgagcaggtggtttcacttcctggtggtttttattttatctggcccgaggatgcttctggctgagccctgggtggtgtcttggggcaaggaggtggcactcaagatggcctccaggcctgctcagtcagctggtcctccacagacacccaggctcagggagaggggcctggagaacgggacagaggagggcagacagaaaccaggagggaaaccacagctgtcacccctgcacagagggcctgcctcagctgactgttctggagaggggaagacagagacagaaacagagagaaaaacagagacacacacacacagagaaacagaaggaaacgagaaagagcggcagaaacagagaaaagagaaacagacagagagagagagagagggaggaagcgagacgagggaaagaagcagccagcccttgagcaggaagactggccttcaggctggggcgctctcctgggtgaggaaggattcatcttgcctggaagccttggggacttggggaagaatggcaggcccgctgatggtcccgtcctgtttaggacaggcaggaacaaaagagacacggtcctcactgattctctcccatcccatgggtctagccacacctctattgtttccacaatggtggatggcgtaaccacccacccgcctcgggtctctgtgtggccagtctctgcctgcccctccctcccattctccagcccctgcagactgagctctctggagtgcagcttcccagctcctttgcctgctggcttcagttggggttcagccatagggagtcgccagcaggagatgaggaggtaggagagaagttagggggtgtctctggcatccctgcatcctctgtgcccatgcctcctcctccaggggtcccactgtcaccaggtttccataacaggccagggctggtagcagcttcccaccgtcg

SEQ ID NO: 26613 - DNA, 977 bp, Artificial sequence
  DNA replication origin
ctcctcaaaagtggtaactgagaggaaaatctttgggtccaatgtttggggtgctcatttcccatgttttaaactcgagtaaactctgcggtggcatttgatttgtctccacgtgacagctcagactcagactactgcttgccttcccctccctccccttctgtctccagcccacaaccctgtggcctctcatttcctgcacccgcaggcttgctgtggaggacggaacacaggcagcctggactggagggtggaacgcgtcaacttccagcaatgacttccagaaaatgccagatggaacaggggcaaaaataagagtgtatgtttgtgtgtaggtggggggaggggtgtgtgttgtgtgtatgtgtgtcgtagagtgtatgtgttgtgtgtgtgctgtggtgtgcatgggctattgtgcatactgtggtatatgtgagctgctgtgtatgtgctgtttgtgtggactgtggtgtgtgtgctgtggcgtgtgtgtgtatggactggtgtgtgtgagctattgtgtgtatgctgtggtgtgtatgtgctgtgtgtggtgtgtgtgtgcgctgtggtatgtgtgtgcactggtgtgtgtatgctgtgtgtgtgaactattgtgtgtgtgctgttgtgcatgtgcactgtcgtgtatgtgctgttgtgtgtgtgcgctgtggtgtatgtgctgtgtgtgtgtgtgctgtagtgtttgtgtgctgtggtttgtgtgtgtgctgcggcgtgtgtgtgagctattgtgtgtgctgtggtgtgtgtgtgtgagagctgctgtgtgtgtgctgtggtgtgtttgtaagttatgtgtgctgtgctgtgtgtgtgcactgtggtgtgtgtgtgagctgtttgtgtgcaagttgtgtgttctgtgtgtgtgtgagctatgtgtgtgctgtggtgtgtgtgcgagttgctgtgtgtactgttgtgtgtgtgtgcacacaggcatgcgg

SEQ ID NO: 26614 - DNA, 1280 bp, Artificial sequence
  DNA replication origin
ggcttagcacccgggccagcggctgcggagggtgtactgggtcccccagcagtgctggcccaccggcgcgctgcgcttgatttctcgccgggccttagctgccttcccacggggcagggctcgagacctgcagcccgccatgcctgagcctcccaccccctccatgggctcctgtgcggcccaagcctccccgacgagcgctgccccctgctccagtgcccagtcccatcgaccgcccaagggctgaggagtgcgagcgcatggcgcaggactggcaggcagctccacctgcagccctggtgcgggatccactgggtgaagccagctggattcctgagtctggtggggacgtggagagtctttatgtctagctcagggattgtaaatacaccaattggcactctgtatctagctcaaggtttgtaaacacaccaatcagcaccctgtgtctagctcagggtttgtgagtgcaccaatccacactccctatctagctgctctggtggggccttggagaacctttatgtctagctcagggattgtaaatacaccaatcggcactctgtgtctagctcagggtttgtgaatgcaccaatcaacactctgtatctagctattctggtggggccttggagaacctttgtgtccacgctctgtatctagctaatctagcggggaggtggagaacctttgtgtctagctcagggattgtaaacgcaccaatcagcgccctgtcaaaacagaccactgggctctaccaatcagcaggatgtgggtggggccagataagagaataaaagcaggctgcgcgagccagcactggcaaccagttgggggtccactgccgcagtgtgggaggtttgttctttcgctctttgcaataaatcttgttactgctcaccctgggtccacactgcttttgtgagttgtaacactcactgggaaggtctgcagcttcactcctcaagcccgggagaccgcgagcccaccgggagaaacgaacaactctagacgcgccgccttaaaagcggtaacattcactgcgaaggtctgcagctttactcctgagccagcgagaccacgagcccaccagaaggaagaaaccccgaatacgtctgaacgtcagaaggaacaaactccagaagcgccacctcaagagctgtaacactcaccgcgagggtccgcggcttcagtcttgaagtcagtgagaccaagaacccaccaattcgggacacaatacctataatcccagtactttaggaggccagggcaggcggatc

SEQ ID NO: 26615 - DNA, 1161 bp, Artificial sequence
  DNA replication origin
aagaacagggaggggaaaaaaggacagatgaatgaatgtatcctcttttgaaaagcttttctgggagtgccatccagtgacttctgccacatatgggtcacgtggccacacttcgtggtaagagaatctgggaaggagactattttagctgggcttattgtcttcctgaacaaaatcaagattctatcattaaagatgacttggaaaatggctgttgggtgggcaattggccgtgtctactgcaaactcatctaaactagaactaagtgggctgggagatcccaggaatcatctgggttatatgaataagacagcacttgaggacttcacaatttagaagggaagacagataagtaattggaacaacaagaacactgaattacgttttaatataatgtggttagaggaagcaatcgaagcaagcacaggaggctttgaagcagaggtggggtggggaggaggcacaggagcaggagttaatcacaggacagtgtgtctatcgcatgaggtggggtggggagggaagaggacgtcctctgcaaaggggaccctgtaagtgagggatagtgtgtggaatcacaagccgttttgtattatggggaccagtctaaggtgggaagggatggggtgtgaagttggagacatccgcaggggtcgatggtcaaggttctctctgcctgggtacgaaccttggccttcattctgaaggctgaggcactgaagggtttgaagcagggagtggcctggtctgaactgtgttttgcatagccattccggcagcgatgtgggggtggctttgcttagacagaaggcagagaggtagggggtggggaggcatctctgaagactctcaggatgtagcaggagagtctatactgcctgtcccagctctgtagtctgggtgatgaggtttggtggtgctctttactaatttagtccaggaggaggggcaggggcatccctgggcaaggggaatagggatgcgtgctcctagttctgtatggagtttggagagtgaactggaatgaggagtgccagacccaagcagatcttctccgtttttaaagaggaggaaatagctctgagtgggacaactgaattgtccaacgtaggtcacgctgagaggtgacagcgtgctggcagtcctcacagccctcgctc

SEQ ID NO: 26616 - DNA, 799 bp, Artificial sequence
  DNA replication origin
cctgctatgcactgagcagcggctctgcagggtgctgtgctctgggccccgaggtgcagtgaacctgggcccgccctgtgaggcccacgacctgatggatgggagacagacatcactggcacctgtgccctatgtgcagagagccgggatggggaaacggaggtgcggtgggcctgtgagggatgtggtgggctccggggctgactggggcaggctcccagggcaaagggttagcagaagagtaggctggatgaagagtgggatgtggggtgctgacagaggcagggaggggaccacaggacagagcacacaggcactcagaacagcttgtgtggcagctcagagacagagatctctggaagcctccgagggtcagggttgaatgtgaagggagctgcggctggagtcatgtgccaggaccaggaagccatgtggagaagccggggtttggccttgaggtgatggggatcagggaagggctttaaacaggaaagcttcgggggcatgtttctgtcttctaaggaaggctggggctgctgcagaagcactggttttgaaggggaaagggcggaagcgaggacatggggtcaggaggctgcttcagggctagggcagggaggagggagagggctcggggggaaaggagagggtacagggacatcgtggggtgctgaggaggtcggtggggcctggaaggatgggaggaggcgtcaggggaaatctatggcattttctgggttggcagcggtatggatgggaactgagggagctgtggggctggggaggaaggtagcttctt

SEQ ID NO: 26617 - DNA, 1206 bp, Artificial sequence
  DNA replication origin
ggaggcttgggagaaaggggtggggaagagacccgtagaggctcgggtgcggcggcggggaggatccccggggtctctgggctgacggagtctccggcctcagggaggagtcgccagggccgccgaagccgaactggcagaggaaaagcagaggaaggcggcgcgcgaactcgccagcaaaggagggctgcgctgctcccggagcggagcgcctcgcagcccggaccgcgggactcaccgcgctggcggcggcggcgccagacgacgcggggccgggcacgtcctgcctcctcaggcgggacttgaggctcttcatggctaactcttgcctggcccccgcgcgaaccttaaaggctgcggagtgccagcgcgcaaggagtagacggcagcggctgcagcagaggcggcgcgggctgtaccagccccacctgcctgccacctgcgggccccgggcagcagacgtcgacaggcctgaggcggggctcccctcccgtagccaattgacccgctgccctggcgggggcgtggcaaaccgcgaccaatcggaatgcgggaatggggcgggacttcccttttaaactgagtaacacccttcctctcccagctggaggaaaagtttgggaactttagcccgggaaggggcggaggaggtgggcggccagaggcgtggagatgcgcgcaggccgggctccaggccaccggcgcccgcccacccggagcttaagatctagagagagcacggggtcccgcctttgccacctctcatcttcccggactcccctcctctttccacccacgcgctctttaccaagtaaagttccttcccttccgtctggtcttagaaatgactcttggttacctgcacacagaacagctttcaggagcaacttcttttcagtctcctgttttactaccaaatcctggtgcctggaaaccaccacacgcatcaaaaattccagaaataaacagtctctaagaaataaggtgctgattgtgcagaaaaacgtacagttaagaaagaccttgaaagacgttatagtaagttacagtacaagttacgtgctcgtttatttgttgagtgaagaatccgccgtattggaagcaaagggacggaatgggggcggggagggaggagaagaggtgccatcaattaaaaatgactcccacagccagtgatttaagttgtcaaaaaaagttacgcccttt

SEQ ID NO: 26618 - DNA, 1884 bp, Artificial sequence
  DNA replication origin
cctcccctgggccgagcggcaggcgcgctcgcaccgcccccgccccctcgtcgcagtcgctgccgaccggctggctgggccttgcggcgtgaggaccccggcggcgccgcagtcccgcgagccatggcccagtccggcggggaggctcggcccgggcccaagacggcggtgcagatccgcgtcgccatccaggaggccgaggacgtggacgagttggaggacgaggaggagggggcggagactcggggcgccggggacccggcccggtacctcagccccggctggggcagcgcgagcgaggaggagccgagccgcgggcacaggtaggcgcggcggctggcccgggaggtgggccccgagggggcgccgggccgcgcgcgagttcggggcgctgactgcgcgcgacaactcctcgggcagagggggttgagtcagccccgccgccggggaagcagctccgggccgagcccctgagtcagaaccggcccgtggaggcagccggtgccccagcccgcagcttcgtcgcccaaccgaggctcccagggctggcggccgggatctgaggggcctggacgtggggatgttcagggatccaggaggaggactttcacgggccatccaagccaccccctcctctggaggaggcctcttctctgtgggctccctcaagacaccacctccccatcgccgcaaagtccatccctacccgccttcccctccccttgcgagtggtcccgcttacccttcactgccatcatcgccctgcctttcccagtcctgctggctgcgctcagtctttaggtggtagcaggccaggtacagcggacacttgctgatgggggattccaggaggtgggatttcaaggtaatttgagacggatagaggacttgctgctttacttcctccgccctgggggattcccattttcacacagcctttcccaccagacctttatgtttgcatcatcttgctgccttgcggggggcggggggggggtgttcctgggttttgggtagtttggagctgctatggcacttgtttaaccttgtcccgggtcccgagctttgtcctcaggcaccttggctcctgtccactaatgcccaggcccttaaggactggtgttttgttcctgctgttgaaaggagataaaacatagacatagacatgagagtggggaaatgacagaacttgcacattctggtggatgccaacaggcacttattaggagctctctttcttctaggaccctgtcccaggcgtttagctgttaaggttctgcaggattgtcctggcaagcgtatatctacttcactgggagaatactcaactcaagggtggaagaatactgggcccagagccattctctattactggctcacccttccccaggttaaagggtcagacttctggacccagagattcggggcagaccagtagagacagttgttaggggagaaaagtcagcccaccagggtagggcaggaaagctggaccatagtgtatgacaaagtagatagatcagtgctttataatgcaaggcctgattcgtttagctctgtgccaagtaccgagagcataaaaatgatgaacccttagtcactgacagctcacagtctcgagaaggcagtcccctagtcagacaatatcagagtatgtaaaatagccccaagtggtttatccttataactttattttcctgtggcagtggcaaatagccatccctatcctgagggctaaatttgtgagattgtatcattagccaggattaaagctctacttatgtttaaggcctggaaagatcccctatggaggtctaggagaaaccaagcctcagtatgggtaggcctcttgcctgaacccctcttgctcttcctccagaactg

SEQ ID NO: 26619 - DNA, 1244 bp, Artificial sequence
  DNA replication origin
ccgccgcgcctacctgtgcccgcggctcggctcctcctcgctcgcgctgccccagccggggctgaggtaccgggccgggtccccggcgccccgagtctccgccccctcctcctcgtcctccaactcgtccacgtcctcggcctcctggatggcgacgcggatctgcaccgccgtcttgggcccgggccgagcctccccgccggactgggccatggctcgcgggactgcggcgccgccggggtcctcacgccgcaaggcccagccagccggtcggcagcgactgcgacgagggggcgggggcggtgcgagcgcgcctgccgctcggcccaggggagggacaggggtcgcggcgccccgccccgcgccgccgccgccgccgccgccgccgccaccaccccgaccgctagtggagcgcccgcgcaggcggggcctcggaggtggagggcggctttccggagctcctccgacggaggcccgtcccggaaggatccccgcgacccccgatcactccctccgtcttttcgccgctgtggggccccagcccgagaggaggtgtcagggctccctcctcctgcgccttctttcacggcgccgcagggatgggcgcagcacagctgacttctgtttgtgcttgactccgggggtggcagccagagaccacagctccaggggcttccaggcctcctgcgtgtctcccccactggcctgccaagatcagaaaatttccatcgttagtctccttgacataataaccaccctagaccgcgtcttaggaggtcaggggcttggctcctgccttgccctgtatcagtttttctccaagtgtggttcccagaccaggagcatcagctgcaccggggaacttgttagaaattgaattctcagggctcatccagacctcctgaatcagaatctatgattcagaactttgtgttttaacaaggcctctaggtgatgctgaagttcacaaaagttcgaaagccgatggcctatagagtatgccctgcacatagtatgcactcagatgtttgttgaatgaataaagggagctattgaaatgtcaggatgttctaaaacactgccaccttttcacgtgtaacttcaaattgagttccatctcacctctccaaatgtgacccagaaactagggacaggagcatagaaatgaataagaccggccgggcgcagtggctcaagcctgtaatctcagcactttgggaggcccaggcgggcggatcacgagg

SEQ ID NO: 26620 - DNA, 843 bp, Artificial sequence
  DNA replication origin
cgcccagtctgggaagtaaggagcgcctcttcccggccaccatcccgtctaggaagtgaggagcgtctctgcccggccgcccatcgtctgagatgtggggagcgcctctacccccccgccccgtctgggatgtgaggagagcctctgcccggccgcggccccgtctgggatctgaggagtgtgtctgccccaccaccaccccgtctgggaggtgaggagcgtctcttcctggccgccccgtctgagaagtgaggagcccctccgcccagcagccgccccgtctgggaagtgaggagcgtctctgcccggcagccaccccgtccaggaggtggggggcagcccccgcccggccagccgcgccgttcgggaggtggggggcgcctctgcccggtcgccccgtctgggaagtgaggagcccctctgcccggccgccacctggtctgggaggtgtgcccaacagctcattgagagcgggccatgatgacgatgggggttttgtcgagtagagaggggggaaatgtggggaaaggaaagagagatcagattgttgctgtgtctgtgtagaaagaagtagacatgggagactccattttgttctgtactaggaaaaattcttctgccttgggatgctgttaatctataaccttacccccaaccccgtgctctctgaaacatgtgctgtgtccactcagggttaaatggattaagggcggtgcaagatgtgctttgttaaacagatgcttgaaggcagcatactcgttaagagtcatcaccactccctaatctcaagtacccagggacacaaacactgcggaaggccgcagggtcctctgcctaggaaaa

SEQ ID NO: 26621 - DNA, 1175 bp, Artificial sequence
  DNA replication origin
gagagcacggggttgggggtaaggttatagattaacagcatcccaaggcagaagaatttttcctagtacagaacaaaatggagtctcccatgtctacttctttctacacagacacagcaacaatctgatctctctttcctttccccacatttcccccctctctactcgacaaaacccccatcgtcatcatggcccgctctcaatgagctgttgggcacacctcccagaccaggtggcggccgggcagaggggctcctcacttcccagacggggcgaccgggcagaggcgccccccacctcccgaacggcgcggctggccgggcgggggctgccccccacctcctggacggggtggctgccgggcagagacgctcctcacttcccagacggggcggctgctgggcggaggggctcctcacttctcagacggggcggccaggaagagacgctcctcacctcccagacggggtggtggtggggcagacacactcctcagatcccagacggggccgcggccgggcagaggctctcctcacatcccagacggggcgggggggtagaggcgctccccacatctcagacgatgggcggccgggcagagacgctcctcacttcctagacgggatggtggccgggaagaggcgctccttacttcccagactgggcggccgggcagaggggctcctcacatcccagacgatgggcggccaggcagagacgctcctcacttcccagacgggatggcggccgggcagaggctgcaatctcggcactttgggaggccaaggcaggcggctgggaggtggaggttgaagcaagccgagatcacgccactgcactccagcctgggcaacattgagcactgagtgagcaagactccgtctgcaatcctggcacctcgggaggccgaagctggcagatcactcacggtcaggagctggagaccagcccggccaacacggcgaaaccccgtctccaccaaaaaatacaaaaaccaatcaggcgtggcagcacgcgcctgcaatcccaggcactgggcaggctgaggcaggagaatcaggcagggaggttgcagtgaaccgagattgcggcagcacagtctagcctcggctcggcatcagagggagaccgcggaaagtgggagacggagacgtaggggagagggagaggaggag

SEQ ID NO: 26622 - DNA, 1863 bp, Artificial sequence
  DNA replication origin
ctggatctgtttcccaacggttagtttttatgggttataaagactttggttgtttgactagcttggcttttcttctcccaatttttgattaggttgtgtaattatgaagaagaaaaatggtgtagggggatgtgtgtggcacatgtttagtatttatctctcttgctacacacatatatatgtatgtggatgtatatgtttgggcaaagtttgtataggtggtgatggtggacagatggttcaaggaaaggacagctatcttgacaggtatacagcttggtgaggagggaaactggcagataattgaaaattcaattataatgcaaaaatttgttcttatagtcatgtaatcattccataaatatttattgaattacttaaatttgtaaaatattgttttaggcactgcaatacaatggcaaagaaatcagacatgatcctagctctcatggagcttacattctaatatgagaaacaaatattaagcaaactacacaattatttcatggcaattatggtaagtgctactgaagtatctgtgctattgaatcacatggagtacacgaagaatgagagtacataactaagggatcaaggggaaagatgtttagctgatttttaagggaaaaagacttaattggcaatgatgggagtgggaggggcatagttccaggatattataatacatgcaacaactgagcaaagtcttgttggtaggaagtaatatagtatagtatgtccaagaactgaaaggtcagcatgatggtacacagtgagcaacagggacagtggccttggttagggctagtgtggtatgcagggggaaaaaacatgcagggccatgtaaattgggttaataattttgctctttatcttaataattgcaagatgccattaaagggtcttaaatacccaccccaatgtaggaagcaggttagtactgcagaaagagtgttggtctggcaaccggacctaagtaaggattacagacccctgaggaaattactaacctcttgctataatttaatctgtgtaatggtggcaaggctgaagtttatcacaaggaaggctggaaagttttctttaaaatggtacgtggggaagaaggtagtagtaaccagatgcaaaatgagtgcaaacaatgtttagaaggaacagaaaagtaggcagaagagagcaagatggggaaagtcagctcactagggatactgaacttaaaggcagctggagctagttatcagtcataaaggaagcttggggtgggaagggatttattagcaagctccatcatcttcatctgtagctccacatctccttcgccccatcatttgtgacacaaataagggactttcctcaagcttatgtaatgttatgcaacacagtttcaagcactccaatcctggagatttgctcaaattaaaccctttctatttaaaaactctggagcagcgagtgaaagcaactcactactctgcaggacaagactctgtgtgtgtgtgtgtgtgtgtgtgtgtgtgtgtgtgtgtgtgtgtgtgtgtgagttttgggggaggagcagttagaaggaattaactgggtcacttaattccaaagtgttaatgataagtgggaccttggagatcacctctaaagcacacccctaactttgcagattagaaaacaggaactttcgagatgaggtgcctttcccaaggtgacactaagtggaggagcccagccagagtccaggggtccttacacaaccttcggtggtctctctttacctgtgaagctgcagcctgcttcccagctcgggggcgtgtacaggagactggacctggggcagcctcagaatgcctggctgcctggagctctcctcgcgtg

SEQ ID NO: 26623 - DNA, 895 bp, Artificial sequence
  DNA replication origin
aggccctgaattccgcgttcatcttatcctgaggtctgtggggacctgttgaaggactggggcaggggacggacgcgggcatccttccatttggaacagccattccggcagcatcaggatggggcggaggcaaagcggggagtgggcgaggcaagtggtgctgtaaacctgtgcgagaagggggcggtgactctaagggcaggaaggagccctggtcacacacacactcccacgcaaggtaggacgcgctgggctccttctgaggccaaggggaaaggacaagagccctccaaattccaacgggggttagacagcatggggaggagacacacacaccctgacggccagagccgttcgggattctttcttgtcttattcagagtaatattttgttggggaaaaaaaagcctgctgcaaaaaaataataattcttctcattagtaatgataaaaatcaaactttgatcccttcattttacgaattgggaaattattgcccccaaaagggcatgaccaaagtgacgcgtttagttaatggagggaaaattgctagggccccgtttcttgagtcctaattcagagccaaattctttacattcgagccaaggtgttcagagctgggaaggcaggaaatagagtgactgtgaggaactgtctcttctttccccagagcagggagggggtgacaaatatttgaagaggctgtccagatacaggcgtttccctaaatttcagtcagcctgtttgtttatcgctgcctctaaagcttgcctgcaggggttgttttgaaagtgcaggtataccgagaggacaatgaaggaggtggcagaatgcaagctccctgccccagagccaggcagcaccagggctgggtgcagagcgcttcgtgggagcag

SEQ ID NO: 26624 - DNA, 1122 bp, Artificial sequence
  DNA replication origin
ccgcggcgccccggacacacccactgggtagcccgcgccagcccgccccgccggccagagagcgggagccggagcctgggcagcggaagccgggtcggggccgcgcgggcggcgcgcaggggacgcggggcgcgcggctctgctcacctggcggtccgcgtcccggagcgaccggcggccgcctcgcctcgcctcgcccccgcgtggttcccggcgccgggcagccccgagcgccgccgcatggacggccgccaccgccgcccagccgccccgcgcccgccctgcacgggctcccgctgtgccccgattccgcgtcgggctgcgcgggcggccagcggttcaggcgcgcgcggagagctctggctcagagtttgcgatccgagagcgggatccgcgctccctcggtccttcctccctcccctcttgcggcctcccgctgtcatctggagccgctcctgccgccccctggcggcgaccgcgggaagggccggcccccatccgcacccctgaccccggaggtcaacaacgggatggtccctgggtcccaggggaagagacatcacccagtaggagggagtacggtctagacagaggccacgagggcgggagggggcgagagtggagagtggcccagctggccagggtcgtctaagtgagaggaaaagggagagggcggttgagaccaggccctgaattccgcgttcatcttatcctgaggtctgtggggacctgttgaaggactggggcaggggacggacgcgggcatccttccatttggaacagccattccggcagcatcaggatggggcggaggcaaagcggggagtgggcgaggcaagtggtgctgtaaacctgtgcgagaagggggcggtgactctaagggcaggaaggagccctggtcacacacacactcccacgcaaggtaggacgcgctgggctccttctgaggccaaggggaaaggacaagagccctccaaattccaacgggggttagacagcatggggaggagacacacacaccctgacggccagagccgttcgggattctttcttgtcttattcagagtaatattttgttggggaaaaaaaagcctgctgcaaaaaaataataattcttctcat

SEQ ID NO: 26625 - DNA, 940 bp, Artificial sequence
  DNA replication origin
ggccgccggtcgctccgggacgcggaccgccaggtgagcagagccgcgcgccccgcgtcccctgcgcgccgcccgcgcggccccgacccggcttccgctgcccaggctccggctcccgctctctggccggcggggcgggctggcgcgggctacccagtgggtgtgtccggggcgccgcgggctgcgccgctccgggctcggggagccagcgcgcgcctggtccgtgcggacggctgcgcctccttctctggttctcttccttgctgggagtcttgctctgtgctggcgccggcgctcatccctccaccctcgactctagggacagtcttaaactctagggacaatccacctcagtcgtccccgggtcggggccccgtgctccccgggtcgggtcggaggggaccggcgagtgcacacccagcccgtgcgccccccacctcagcctcgcctccctcccgcctggggcccgagagccgggcaagtctcggtcagcgctccttgagtcctggcctggggcctcggatctgtgtgtctgtctgtctcagtttagttgctgcaacccagcgagcgcctggagcccgagtggatgggttgtttccgccaactctggacacttcctcaagtgcagcctaagtacctgcggccccttggcgcacttacagaagtagcttttgcacagcgagctcaccttggagctctacagatctggaagttaagttttctttttatttgaaataacatcagccctcacttgggaaggggattttagggcgttctcgggcccacctaagtatctggaatttgtggtctagtaagttttttaagcagtccgcacccagcaccgtacctcccagcctcctttgccgtcttactaaaagtgcatgcttgcttctcttcctgtctcctttgcgatctctaccacgctgcgcttcgccctttt

SEQ ID NO: 26626 - DNA, 913 bp, Artificial sequence
  DNA replication origin
tagtgaccttgtttaaaaatagcctatgtcaacagccactagtgatgcaccaagaagcaaactggcctccctggactctgcatggatgccacagcacattagaggcagactcagggataccactcggggtccccatgtgtcctcccacaatcccattccctttggaccgtttctttttggatctttgctccctatgattttgtgccccatccctttcctcctttcagtttccgtccccttcctcctttcaattgcgatggccatgctctggggactagattcttttgcttttctcttctctgcacaagtcagaactggggctttgcagagaaggctgagaggtgttcaggacatgcctggcttatcgtagagtaggttttctcaccctagacactgttgacattttgggccagataactgtgtgtgtgtgtgggggggggtgtgtgtgtgtggtgtgtgtgtgtggggtgtgtgtggtgtgtgtgtgtgtgtggggtgtgtgtggggtgtgtggtgtgtgtatgtgtggtgtgtgtatgtggtgtgtgtgtagtgtgtgtgtgtgggtgtgtgtgatgtatggtgtgtgtggtgtgtgggtgtgtggtgtgtgtggtgtgtgtgtggtgtgtgtgtgtgatgcatgtgtggagggtgtgtgtgtgtgtggtgtgtgtggtgtctgggtgtgtggtgtgtgtgtgtagtgtgtgtgtagtgtgtgtgggtgtgtgtgatgtgtgtggtgtgtgtggtgtgtgggtgtgtgctgtgtgtgtgctgtgtgtgtgtgatgcacgtgtggggtgtgtgtgtgtgtgctgtgtgtgatgcatgtgtggggtgtgtgtgtgtgtggtgcatgtgtggtatgtgtgtgtggtgcatgtgtggggtgtgtgtgtgtgtgtgt

SEQ ID NO: 26627 - DNA, 1539 bp, Artificial sequence
  DNA replication origin
agctccttgccacctggcagagcaatgcattagtcgcactgtctgtggtgcagagcagcgtgcgaggcaggggcagggacaggggcagatactgggacagggacggggagcggcacagacaagggcgggcgtgtaccttctgtccccagtgacttcgaggccctggggctgtgggtgccggctgcctcgcagcaccgtggggccctggcggctggcgtccgtaccggccagcgctggcgtctcgtcgcggctccggtgcagtggcaccgacgtgcgcaccgccgacaccacgtggtccgcgaaggcgcgcgcaggggcgccaggccgctggccgccgcgcaggcggtaggagcggggcaggcagggccgcgtctgctccatcacgccgccgctgcagctacgcgagcaggccgaccaggggccccaggcgccccacactcccggggcgccgccgccgccgtcgtcctcgggggcgccctccgccgccatccgctgcgggacctgcggagacagaggcaggttaggggaccagaacaccgctcctctcttcacccgaaaagctttgagcagggtcgacttatccatcaggcacaagtaggcacagtctgtttcaaagataagtattaatacaatccagcctggcttagagtcggtttttggaggaaagagggccccgcgaaggcaaaaatgcctaggccccgcgaaagtcataatgcggccctggctttgggtgtcatggccttggagggctcacgcggtttcaggagtcccctttaacctccaactcggtcttccggattcccgccagagggactggacttcccataaactgcaaggaagacatgccttgtgtcaccctgccggaaaggcaaggaactggatggacactgtggttgagaggccaccgctttagagccagactgcctatgattacacccctgccaccacttcctagtgtgtccggagtttgttccttccggtgggttcgtggtcccactgacttcaagaatgaagctgcggaccttcacagtgagcgttatagctcttaaaggtggtgtcacggagtttcttccttccagtgggttcgttgtcttgctgacttcaagaatgaagccgcagaccttcgctgttgagtgttacagctcacaaaggtagcactgactcaaacagtgagcaacagcaagaattactatgacgagcaaaagaacaaagcttccacagcatacaaagatacctcagcaagttgcggctgctggctgggagggactggagggactggagggagtggggcgggtcgccagcttttagtcccttatttgtccccgcccacatcctgctgattggtccattttacagagtgctgatcggtccattttacagagtgctgattggtgcatatacaatcctctagctatacacagagtgctgattggtgtgtttttacagagtgctgattggtgcatttacaatcctttagctagacacagagccctgattggggcgtttacaatcttctagctagacagaaaagttctccaa

SEQ ID NO: 26628 - DNA, 1218 bp, Artificial sequence
  DNA replication origin
ccggacggggcggctggccgggcggggggccgacccccccacctccctcccggacggggcggctggccgggcaggggggctgaccccccacctccctcccggacggggcggctggccgggcagaggggctcctcacttcccagtaggggcggccgggcagaggcgcccctcacctcccggacggggcggctggccgggcagaggggctgaccccccgcccacctccctcccggacggggcggctggccgggcggggggccgacccccccacctccctcccggacggggcggctggccgggcagccagccaagattttttaatacagattttttttcctttaaaaatcaggattgctgggcgcagtggctcacatctgcaatcccagcactttgggaggcagaggcgggcagagcaggtcagaagctgaggaggtcagaagatcgagaccatcctggctaacatggtgaaaccccgtctctactaaaaatacaaaaaaattagccgtgcatggtggtgggcacctgtagtcccagctacttgggaggctgaggcaggagaatggcgtgaacctgggaggcagaggttgcagtgagccgagatggtgctactgcattccagcctgggcaagagtgagactttgtctcaaaaaaaaaaaaaaaaaaaaaaaatcaggatctgcgtcaggtctgcaagttgcaattggtcaataagtctctcacaactctttcaatccataggtttcccttccactgtctttttcattcttgcacttaaaaagtttttggttgcggtggtggggtggaactgagtcatttgttctgcagttgcccatagtctggattttgctgactgtgctcccacggtgtaattcgtgttcctctatgctctatatctcctgaacattggaagttggacctaaaagaggccttaacaggtgcagggtttttttttggttttttttgtgagactacttccggggggctgcctctcttttggggatgttagtggccactgatgtgcaatgctcagatccatcagtttacagggagtttagaattctaattctaattctatcatattccctcagcacctttactctttggttacccagtggtatgtcgtttaagaaagaaagcataaacacttgaatctttcccttcatttacgggttttcataataataagttggttccctaacatcctatgatgatgactta

SEQ ID NO: 26629 - DNA, 1143 bp, Artificial sequence
  DNA replication origin
gccagccgccccgtccgggagggaggtgggggggtcggccccccgcccggccagccgccccgtccgggagggaggtgggcggggggtcagcccctctgcccggccagccgccccgtccgggaggtgaggggcgcctctgcccggccgcccctactgggaagtgaggagcccctctgcccggccagccgccccgtccgggagggaggtggggggtcagcccccctgcccggccagccgccccgtccgggagggaggtgggggggtcggccccccgcccggccagccgccccgtccgggagggaggtgggggggtcggccccccgcccggccagccgccccgtccgggagggaggtgggcggggggtcagcccctctgcccggccagccgccccgtccgggaggtgaggggcgcctctgcccggccgcccctactgggaagtgaggagcccctctgcccggccaaccaccccgtctgggaggtgtgcccaacagctcattgagaacgggccaggatgacaatggcggctttgtggaatagaaaggcgggaaaggtggggaaaagattgagaaatcggatggttgccgtgtctgtgtagaaagaagtagacatgggagacttttcattttgttctgcactaagaaaaattcctctgccttgggatcctgttgatctgtgaccttacccccaaccctgtgctctctgaaacatgtgctgtgtccactcagggttaaatggattaagggcggtgcaagatgtgctttgttaaacagatgcttgaaggcagcatgctcgttaagagtcatcaccaatccctaatctcaagtaatcagggacacaaacactgcggaaggcggcagggtcctctgcctaggaaaaccagagacctttgttcacttgtttatctgctgaccttccctccactattgtcccatgaccctgccaaatccccctctgtgagaaacacccaagaattatcaataaaaaaaataaatttaaaaaaaaaaaaaaaaaaaaagaatggactttcccaggccagctgtggtggctcacgactgtaatcccagcactgtggcaggccaaggcgggcagatcacctgagatcaggagttcaagaccagcctgaccaacacggagaaaccccg

SEQ ID NO: 26630 - DNA, 863 bp, Artificial sequence
  DNA replication origin
cggctgccccgggagaaatctcctcaagccagagcctgtgctgtgaggggcttcgggaccttggggcagctcctgagttcagacagagttcaggaagggagacaggggcacagagagacagaggttcatggactgaggcaaaggctgggccaggctcagcaacccaggcctcccgcaggcaggcagaggctgccctgtaacccatggagaccagaccaacagctctgatgagctccacagtggctgcagctgcgcctgcagctggggctgcctccaggaaggagtctccaggcagatggggcctgggggaggatcccacaggtatggcttctcctggaggtagggttgggtctgggcccttggggagcagggtaagggccagaggttcgcagggaccatggaaggagccagaacaactcagacccagccccgccggctgtgggcaagggtggggtagcctgtgggtaaacccagaatcctagaaacacggtggggcggggatgggggttgggggcgggcaggctgcagagccaggacaggacagcctagccgatggggaaggaaagaacagagaagcgcccttagggcttaacagcacagaggtccctagtggcgttgacaagaatgtttctgtgggatgatggagcctgaagccacccacagagaagggatgggagctgggaaagtggagctagggctcggactcttgctgaaaattggccattgagggaggagagagggcaaggaatgggggtgggggctggggtgtggatgcacagtgagggagacacttctccagatggaagagtcacgcgtgggttcgttcaaatgcgggtgagcggggcctgaggactgggaaaggg

SEQ ID NO: 26631 - DNA, 1212 bp, Artificial sequence
  DNA replication origin
ggggtgagggggtgctcaggggaagaggggcttgggcaaaaatgtccaagcccatggctcagggcatgggagggacactgacccctggggtctcctcttcacctgcaggtgccaggtgggggcagggatgtgccccgtggacaaggcccaccgcaaccagtgccaggcctgccggctgaagaagtgcctgcaggcggggatgaaccaggacggtgaggcgggggctggcccggggggaggtgacaagaaatgggcagcgggactggcgtgtcgtcctgacccttcctgcctccccagccgtgcagaacgagcgccagccgcgaagcacagcccaggtccacctggacagcatggagtccaacactgagtcccggccggagtccctggtggctcccccggccccggcagggcgcagcccacggggccccacacccatgtctgcagccagagccctgggccaccacttcatggccagccttataacagctgaaacctgtgctaagctggagccagaggatggtgagtgggagagcagctgagggcacagcagggcttggcttcccgggtcacagcagggctgcagcgccttgccttgatcctccctcccccggggctccaagtactccctgccacctcccgagaagcaggcgctaagatcacaacctcctcctccaacagctgatgagaatattgatgtcaccagcaatgaccctgagttcccctcctctccatactcctcttcctccccctgcggcctggacagcatccatgagacctcggctcgcctactcttcatggccgtcaagtgggccaagaacctgcctgtgttctccagcctgcccttccgggatcaggtacctaccggcctgcctgctggggagctaggctgggctggggtcaggcggcccactcgagtcaaccagacagggcacacacatccccacgccagtatgaatgcacacagcttggatggtgatggctggggacacacatacctctgattcagcgatggctggggtgcatctcagggatggtgacggtgggggtgcatgcatctctggcacagggatgatggtcggggtgcacacctaggagatgatgatggctagggacctacagggcccagggtcttcttaagttctggaagaccctcaggccctgcagacattctgtgggtaacaagtgacctgcacaccctgaacaggctgagtg

SEQ ID NO: 26632 - DNA, 953 bp, Artificial sequence
  DNA replication origin
accccacggagtttgcctgcatgaaggccttggtcctcttcaagccaggtaactgagtctctgcccaaaccttgagtgggaattctggtgacttccatctgcctctcactctccctccactacccccatgtgtgcagatgtgtgtaggcctctatcctggggggtgggaggagagtggtgaggctggactcccttctccttggggccactcctggttgactgtgaggggacagggcaggctgggagcccctgggagaccctgagccccagccggagcccctggtggctcctctgggcctggcagagcccaccccacagggccccaggtccatgtctgcagccagaaccctgggccaccacttcatggccagccttataacagccgtaaacctgtgctaagctcactggtgctgcttctccccagagacgcggggcctgaaggatcctgagcacgtagaggccttgcaggaccagtcccaagtgatgctgagccagcacagcaaggcccaccaccccagccagcccgtgaggtgacctgagcatgcgcccacccactcatctgtccctgacctctaacctttctctgcctctcccacactctcccagagctcactgattagacagcacaagggtctcagttcaacagcatacagccaacatctatggtgtcccaggcacagtgccaggccccgggagtggggaccaagatgtacataagacaaagctactgccttctagagacaaccggcagtgacctcactgaagacaaaaactgccctagccaggtactgagggttgcatgaatctgcaggagacagagatccccttgcatgggaaacataaagcagaattgggagggactttgtggagacagggctggacttgaaaggaagaagaagtctaaaagaaaacatcatttgcaaagggagagaggggcaagcatgatatgttgt

SEQ ID NO: 26633 - DNA, 1344 bp, Artificial sequence
  DNA replication origin
acctccctcccggacggggcggctggcctggcggggggctgaacccacctccctccctgacggggcggctggccgggcggggggctgacccccccacctccctcccggacggggcggctggccgggcagaggggctcctcacttcccagtaggggcggccaggcagaggcacccctcacctcccagacggggcggctggccgggcgggaggctgatgccccgacctccctcccggacggggcggctggcctggcggggggctgaaccccccacctccctccctgacggggcggctggccgggcggggggctgacccgcctacctccctcccggacggggcggctggccaggcggggggctgacccccccacctccctccgggacgcggcggctggccgggcggggggctgaccccccccacctccctcccggaccgggcggctggccggcggggggctgaccccccccacctccctcccggacggggcggctggccgggcggagacgctcctcacttcccagacggggtggctgccgggcggagaggctcctcatttctcagacggggcagctgccgggtggagggtctcctcacttctcagacggggtggttgccgggcagagggtctcctcacttctcagacggggcggcggggcagagatgctcctcacctcccagacggggtcgtggcggggcagaggtgctcctcacatcccagacggggcggcggggcagaggtgctccccacatctcagatgatgggcggccgggcagagacgctcctcacttcctagatgtgatggcggccggaaagaggcgctcctcacctcctagatgggatggcggccggtcggagacgctcctcacctcccagactgggcagccaggcagaggggctccccacatcccagacgatgggtggccaggcagagacgctcctcacttcccagacggggttgtagcgagccgagaccacgccactgcactccagcctgggcaccaccgagcactgagtcttcacatctgttatagctcagagtgatctgcacgcctcggcctctcaaagtgctgggattccaggtgtgagccaccacacctgtctaatttttctattttttgtagagacaggtttcaccatgttggccaggctggtcttgaactccggacgtcaggtgatccgcccgcctcggcaccccaaagtgttgggattccaggtgcaagccaccacacctgtctaatttttctatttttttagagatggggtcttgctatactgcccaggctggtctcaaactcctgacctcaggtgatccgcctgcctcacctcccagagtgctgggatt

SEQ ID NO: 26634 - DNA, 939 bp, Artificial sequence
  DNA replication origin
cgtccgggagggaggtgggggggtcagccccccgcccggccagccgccccgtccgggaggtgaggggcgcctctgcccggccgcccctactgggaagtgaggagcccctctgcccggccagccgccccatccaggagggaggtgggggggtcaggccccgcccggccagccgccccgtctgggagggaggtggggggggtcagccccccgcccggccagccgccccgtctgggaggtgaggggcgcctctgcccggccgcccctactgggaagtgaggagcccctctgccaggccagccgccccgtccgggagggaggtggcggggtcagccccccgcccggccagccgccccgtccgggagggaggtgggggggtcagcccccgaccggccagcggccccgcccgggaggtgaggggcgcctctgcccggccgcccctactgggaagtgaggagcccctctgcccggccaccaccccgtctgggaggtgtgcccaacagctcattgagaacgggccaggatgacaatggcggctttgtggaatagaaaggcgggaaaggtggggaaaagattgagaaatcggatggttgccgtgtctgtgtagaaagaagtagacatgggagacttttcattttgttctgtactaagaaaacttctgccttgggatcctgttgatctgtgaccttacccccaaccctgtgctctctgaaacatgtgctgtgtccactcagggttaaacggattaagggcggtgcaagatgtgctttgttaaacagatgcttgaaggcagcatgctcgttaagagtcatcaccactccctaatctcaagtacccagggacacaaatactgcggaaggccgcagggtcctctgcctaggaaaaccagagacctttgttcacttgtttatctgctgaccttccctccactattgtcctatg

SEQ ID NO: 26635 - DNA, 834 bp, Artificial sequence
  DNA replication origin
aggaggtgaagtaatactacaagacgacatagttatatccactagtgcaacgtgatttaatccttacagaggtccctaaaacatcagtgctggacaacctcacacgttctacacagaacagacaagacgaggtgcaggctctgtgaccttataatggcacacacacaactggcctcatgcttccataacttcactctgcctcccacttttttcagcccaacccctccaaacatgggtctcggtcggtccccttaagccacaatggagggaatacattaggctaagcaaatattccctcaggatttcatggcaaagccctttcaaccaaagaaaggatcgcgactaaggagaaagataacaaggtttgcttgaggagaggtctgttgagagaggctacagtcggtggtgggagagaagccaaagtctgtgacggtgtctagagggactgacaccacatctaccgggagtaagaacaccatgacagcggctatctgaaagccgtgatggctagggttagtgctagtcggcttggtgatgagcgagctgggaggggttctactaagaagagtagggcgaggggcacatgggggacgcaatgggttagggggcggtcgagactttgcctgagaactgtaatcacgtcagcccaagggaggatgtaacgtagtctagaagctccattaagagtcctaagggactctgaggggtactaatggggtctgctgggttggggggaccgtgacagaatctccggggaggctggagggccggaatggtgcccggccaatggaagatacagggggtggggtctactggggatccggggccgtgatc

SEQ ID NO: 26636 - DNA, 1144 bp, Artificial sequence
  DNA replication origin
cgcgttctgcccacggggcaggcacttcccggccgccggaatgcgggctccgggccagagctgcaccgcgcgcccaggcgtctcccggggcccgcgaggtgttcgcactaggaccgggtgtcttggctgagtctgctgcgacctgggggatgagggacggtcccggcagcatcggggcaaggaagggcaccctcctcgggacgccccgcatggcccatctccgcctcgccactctgttcatcctttcatttattcattcatcattcgttgcccgcggtatcgactcccagtcctaattgcccccgacccaaaggttggatttccctgcgtcccctggagggccagactgtttcctctcgccgccgaatccgtattgtagcggcccgcggctgcggggaggcagctcggagctgtctcagcacgacgcggcctcccccgggcgccaggcccatcccggtcgggcgggctggggccggtctcccggcctcgagacctggtccaaagtcgccctgggagaaagggataaggaggcagggcagacaggagctggcgctgcacgtaacatccagaattgtggtttctgctgcttgaggtcttagggtcctgggagtgacattgtttgggggaacctgtcaattcctgccccggtccaggttccaagccgcacagcctaaggtcgggtacagcctggcatcctcggccagctagcactggggcaggtaggatgaatgtgtgagccttgtgtccaaatcagcccgagacacacagggatgtggaccccagcgggactccctctgccttatactcagagggactggtggggctccaccccgctgtcgtctgtgtctctgctctgcttgccgccccactcactatgcttgattgtttaaaggtgcccctccttgcaggggccaggctcctagggaacgagagagggtaccctcgcaacctgatgtcttcaccccatgtccacctgtagccggctctaaagtctggctcctttcagagcaaagacttatggccttgctgggagaggtagaatagagggtgtctatcccattcttcagtgaggagtcagtatgcccctccttcttttttcttttttttttttctgagacagtttcactctgtcacccaggctgga

SEQ ID NO: 26637 - DNA, 1209 bp, Artificial sequence
  DNA replication origin
ttgcttctctagctctctaggcctctccagtttgcacctgtccccaccctccactcagctgtcctgcagcaaacactccaccctccaccttccattttcccccactactgcagcacctccaggcctgttgctatagagcctacctgtatgtcaataaacaacagctgaagcacctgtttcctctcttttctgctggggagggggaggtggttgaaccctgccctctgagcaggctgggaatggctgcagcctcgtgccccgcagtgggagctatggtggtgtcacctgccatcctgcccacctcctggtgcagaggcgctgggaaagcagtagcttactatcttagggttacaggttgcccccttcagtgctgcggggagactttaatggcttacgtgaaccgaagatgggaaagagcagggacaaggcctccctcccactctggtagataaacccaaattgcaaagtggccttggccatggttcttccactttggtcttcctgcattagcgtatcccttatgggggctgtaggaggagtcagctctgggcgcctgagactgggtttggctcccaggtcctcagttgtggacctaggctccccttgggacccctcctgtttgctggtgccctcccaccatgatgctgtagtgccaaagggctgggggagagagttgggaatgggaccaaatctggcctgcgcttttcctctcccctgaccacactcccaaggaccaagtgtcctggtggggatggaagaggaaagggcctgcaggccaggcaaaagctcattgtcacactgagcgcacgtgcctctgcttccctgcctttgatttgtgtccaccttcagcccctttgcagactcctccaaaagtgtatttccttggagaaactgcaatgttaactccggcaaaagtgcgtgggagcatcctggctcccgggttcgtggtggtgacttggctgtcagaccatggtgttcaatatcccctttggtgttccccactgacggtaaaattgaaacttatccggagctctatgttgggaagggttaggttggagaggggccggaattggttcctgcagagggacccaagccgcaagactaggacgacagaagcgtccagaggggacacaataccctcgacgtgagggacaggaggtgccgcgccaggccctggcctccgggacctcccagtccggggaaccgagc

SEQ ID NO: 26638 - DNA, 828 bp, Artificial sequence
  DNA replication origin
ggagggctgggctgggtgccccgcgcggcgggcgggatgcggcggcccgggggcagctggagacttacgtaacgttggcctgccccgctgccgggaggcagggcggttgcccctgcggcgcggtgccgtcccctgtggccgggattagatgggcggcctgcgagggcctgggaatggctcggggcccgagagctcgaccggcccttgccgggtggccgccagggaccacgctccatctcgccgcggccgggctgcacgtagcggccgcgcccagggcccaccccgcttcaccgggcgatggccttgggcctcgtaacgggcgggataaacctctgcaggctttgctggggcctcctggccctcgcccgttccgcgcctctccggcacgtttctttcttttcctttcttttttctttcttttttttttttttaattatccggcacattttttaacaaatgcgtcctgattgtggaacgcggaggccgcggggtggggtggggatctggttacggagggggcaggaaatctgtcgcgttcactgaacgcaaacggtgtgggtcaagggctgtttgggggtcagagttagagaccaggatgactagacgagtcatagcccaccgagctcacaatcttaaaatgtatctcctgtaatgctgggagtggggtacgagcttcctgctgtgggagggagggggacaggaagcctcgtaaggtctcaccaggtggcaagcacactggattagaagatgcaggaaagcaccttccagtctgaagatcatttaaagactcagtcatgtaagggcatcccttggcttcttaatctacgt

SEQ ID NO: 26639 - DNA, 1025 bp, Artificial sequence
  DNA replication origin
agggccaggaggccccagcaaagcctgcagaggtttatcccgcccgttacgaggcccaaggccatcgcccggtgaagcggggtgggccctgggcgcggccgctacgtgcagcccggccgcggcgagatggagcgtggtccctggcggccacccggcaagggccggtcgagctctcgggccccgagccattcccaggccctcgcaggccgcccatctaatcccggccacaggggacggcaccgcgccgcaggggcaaccgccctgcctcccggcagcggggcaggccaacgttacgtaagtctccagctgcccccgggccgccgcatcccgcccgccgcgcggggcacccagcccagccctccgcccgcccgccccggacacggggcctcagcaccgcccgagcctgctgggagctgggaggcggtgatggaaaaggggggtgggaccgcgctcggagaccggagcaagtgggcgggcgcgaccagagcagagagggagggagggagcggacacgccaggcgaggaaggggatgcgggggagcggacgtgaccagcaagcagggggaggggcggcgagagggaactggggcgcgggaagggcggtcgcgcatgaatggagaatggacgcgggaggggaaccagaacgcagtttcaatgagttacacagaaagcattagaatcaggggacacgcacagcttgaagaggagggggtggaaggaccagacttaaggaggaagaggggaaaacgagcacggaacaggcggcgcggagaaaggggaagcaagggtggaatcaatcacgagggaccgagagaaggcaggcgaggatggaggcgcattgaggattggggcaggaggaagaggatgggaccagaatgagggggtagggctggggcgggaaaggagccggcggacccgcctgatctggaaggaacggcgctggggacttctgaagagcaggccccaggcgtgaggagccgttctcctctctctgagctccactgcatcccagacgccctggatcc

SEQ ID NO: 26640 - DNA, 1213 bp, Artificial sequence
  DNA replication origin
tgggcccgatctatgccgcccggccgccgggcctgagtgaagcctgtccagcctaggaggggccctcagaacctcccggtccaagcctctcacttcgtccacccctgcggagacggggcgagccccgcacccttcccgtggcccggccgcaccgccctgtgcccgtggtggcggccacacaggccagcctggcgagtactcacggcgaccccgggccgcgcgcggccgcagccgacgggacgagcggcccgggacgccccgcgggggcggagcggcaggccaaggggcgggggccgggcctggcgggcgaggtcgcgcaccccacgcctcgtcgttccgtcacgggcgcgctcagccactctgcgcacgctcgcgcggtgacacgatggcacgtggcccgctcctgaccaacagcctgacggcctgctcctgggcgcgcctcagcagccgacgccagccttgagacgcctgcgcggcggtcgctagtcgggaaagggtgcggagtggggggtggcgcctgcgccgtgggtaggggaggcagtggagaaggaagagggactctgggggagtgcggggagccttccaaaggagaatacttgcatttagcgccccgagtggttgggaggaacaagcaggaagggcaacccaggttgcctgtaggccgggagggagtcccctcgccggaggttggggccggcaggtagagactgagggaagtcctgaggccttgctgactgcaggattctctggttcgacaatggaagtcgaacacctcgggcttttaaaaattctggcatttaactcatttgttccccggtagctgcagcgtgatggagagcaccctggccttctagtcaatctgggtctgaagcttgggttcggcacttattgatggtgcagccttaagcgatgactttcactttgtgaatctgatttctcctctttgaggtggagacagtaatatgtgtttcacggagccgttgtggtgaggatgaactgagatagtgttaggttgaaccgtaggaaattgctatttttgcagtttataaacagtcagataccttcaatttcatacgattccaactaatccatgtaaagtaaccagcagagtacttgggactaggaagtagttcatacatggaagctgtaattgtggttattgtggttattaaccctagacatggccagatctccttcatccttattagtcttg

SEQ ID NO: 26641 - DNA, 1836 bp, Artificial sequence
  DNA replication origin
tccagccccgtcaggccagttccatcaaacacatacccctccactgtttgtgtggatacagagtcataggcagatggcctgagattcctaaaggtgtgattcttggaaggataggaagcaactctgagtgtgtgtgcagggtcagtgtgttgatttggatgtttccgtgtttttcctggcatgggttggctttctccctccacagctcccattctggtcctcagaaccatagttggagttggaggggatctttggtctcagaaccagactcctcctgccctggccagactccaaagctctgacctagctggccacattcctggtggacacatgatcatcccaggtaaacctgaaataaagctcgttctttttttttttttttgagatggagtcttgctctggggcccaggctggagtgtgcagtggtgccatcacaattcactgcaaactttccctctcggattcaagaaattctcctgcctcagcctcctgagtagctgggattacaggcacccatcaccacgcccagctaatttttgtatttttagtggagacgggatttcgccatgttggccaggctagtcccaaactcctgacctcaagtgattcacctgccctggcctcccaaagtgctaggattacaggcgtgagccaccatgcccggccaaggcttgttgttggcctaaacttaggcccatcactggtttgtgaccctgttttgtgccatacattcaatctcaggaaatcactgcattatggaagggcaatcgtagggtctgtaggaaatcctttatagtcagaggtgggagaggcctaggggtaggttctcagctcaccaaaacacttgctctggttggtggctcgatccacaaagactttagcagagacaacggctccaaagggcaggaatgtctgtatgagttccgcatcaccaaactcctgaggcaggtgatagatgaagaggttacagccttcggggcctggaggaacagtagcaagctggttcaggggaaggaccctgagtccagccccaccaggttctgctgtccagcccccagtccctcaccttctctctgctgctggggcagggctgaaggctgctggggaaaagctgtgctcactggggcataggccgacggataggctgctggagacagaggtgggagtggacagtgatccccaggagcccttccccaagcagggccccaactgcctggccgcttttgaccaattcagcccagtccaccataaccctcaccccaagagaggtcgttctgggggtaggaggggatgggaggatcaactccttggaacagagcctaaatcccccacaactctccctatttctttctagggcccttcaacctcccccaggccgcgtagcgccaagtgaaacctgcgtagtggtgcatcccagcgtaggcctgctgcagggggtcagccacgccggggctctgggctggggagagaggggcgcgaggcccacagtgaaggcaagcgggcgagcagagtgggtgagaagctcagggagtgtgggaggtggacggcggctgtgagagacagcagggaaggagggggatctcttcccagggaagccaggccctaaccccccaccccccgctccccactccatttcggggggatttgggcggagcggggggcccacctggataaggggagagcccgttattgtagagcgtgtcggagcccggctggccattggtctggggggtcagagggccgaatccattgaccccgatgggcgccggaagacctgggagggtgccagggccgctgccaggcggggagttggctgctgatggcggaaaaggtctg

SEQ ID NO: 26642 - DNA, 1813 bp, Artificial sequence
  DNA replication origin
ccccgcccggcccctcccaggcgcgccccagtccctgggggccgtacctgccgcgggcaacagaggcgcagctaccaggctaaaggccgccacgtgttgcatctgggccgccactgccgccaccgggcctaggcctgggccctgtgccgccgccagcagggccgcctggtgctgcaggatctttgagaggaaagatgggcgagagtggagggccaaggggcaggcagctgcccgtgctctcagccccaggcctggcccacccacctgcgcgccctcgcacgcaggtgcccggtacctaccgccgtggtgtaggcgccgcaggcccctagcggcagtggcgcggggtggaaggcgcccaggtggccggccatctgctgcatccgccgcagcgcgcgctcccggtcggtgtccgccagcttgaccacgaggctggacgaggcgccctgggcagggcaggggaggccgtggtgaccggtcctgaccctggccccggcccggggccgagcgcctttcccatcaggtcctttcgcggggcaccgagcacactcggggaggagaagcccgtccccaccccactggcctcaccctcagcccagggaacccgccctcaccgccatggtccggctgccgtgcagaccccggatggccgcctgagcttccccttgactcccgaacttcacaaaggcacagcctggggcaggacagagggagcgggtggctcaggccacaggggccaaagagttatgtggcccagagtgaggaagggtcaccaggaaatcccggggtcagctcaggtcacctttactggtgccgtcaggactccgcaggaccgtgcactcctcgatgtggccaaagggctggaacaggcgtctgacgtcctcctcaccctgctgcttgcccagcatccccacaaacagctttcggtcctctggggacaaagccaggaatgacctggggaccccaagtcttcctagacccccgagagtagcctgaggaacttaggaaggcagctcaccagtctcactctgggaagcagagggagtgagaaggccctgggcttccagggttggttttcattgaggggcaggatctggggaagggatctggagaagggagctcagctcagctttccatcaggaaaacctgggtcctggggaaacccagagaggctcagggctgctcttgtggggagtaatgcagtcttgatatctctggctgggtagagccctatatgcattgttttacatgtttgacctttctgttcttagaggttgggaaacgctgttttggaccatttctgtactattaaggaagcgggtgctcagagaaagcctttctattcagactgggtccagagaagagaagtacatccttgctggtcagcctgatagtgctggctagaatcaatgccccttcctgctaatatcaaggagggttctggatttagaaacagcacagaaaacagtcctgtcatcctactgcctcatctttaggcactgagcactggcatgatgaatccttaccctctgcaccacatccaacctggatgcccctcccaaaggcctacagagagcaggaccttggtttcctgagcctccaacattagcatttttcctactacagttgctgaacccctgacccctttccttaactcccacctccaccaccctgtcccttcagcaagcttctagtgccctgtctgtatccttccctctgattcccctgtcctcttgccctgatgcctcccaaaatgttcatgctatgagagaacaagttctgcctatagacctggattgccaccagagaaccagtc

SEQ ID NO: 26643 - DNA, 889 bp, Artificial sequence
  DNA replication origin
gaccctcccggcgccgcggccatgtccccgccctgtcagccctcccgccggtcccactggtcccgcctgtcccgccgtcccctccctggaccggtggcgagggccagggggagggggcggagcccgggcggagagggcggggggctgcccagggggcggggtccgggtggaggggcgtagagggggtggggcgggcaggaaaggggcggggccggggcggggcgggcccgggccgaggtggcggctgaacgctggggtctggcttgaggtccccgtgcggctctctctgggctcccgcccgagctctcccagagccgagccccgagccccagcccccgtgcttggtgacgtcaggcagctggccgccgagtctacgcaaatgatttgcataatgaggaagcagccgccaatcagagtgggagttgactgggctcgccgggggcggggggggcggctgggctcacgcgctcctgctcgccatggcaaccggaccctcgaatgccctgtgtgtgtcgagtgtgtgcgggcgtggccgtggatcgcgcgtgtgcgccttgggccgcgtgaggggaagcagcttcgtcatgcgtgatggtgtctgccggagtcggggctaatccccaccgcacacacaggcacacacaggcaaacgcaggcacacgcaggcacacacacctccaaacgctggtgcgtttcctgcgggggtggatggggattcctcttctctattcccactatcgagccagtccctcggagccaatcccaccccgccccatcacacatctctgtcttcggtgtctttaaccactttcttacccctgagcctcagacacattcgtctcccttgcagccttaaaaagaaaggaagaataaaataaaaaccccttaa

SEQ ID NO: 26644 - DNA, 1833 bp, Artificial sequence
  DNA replication origin
ttttctattccacaaaaccgccattgtcatcatggcccgttctcaatgagctgttgggtacacctcccagacggggtggtggccgggcagaggggctcctcacttcccagtaggggcggccaggcagaggcgcccctcacctcccggacggggcggctggccgggcggggggctgaccccccacctccctcccggacggggcggctggccggacagaggggctcctcacttcccagtaggggcggccgggcagaggcgcccctcacctcccggacggggcggctggccgggcagggggctgaccccccacctccctcccggacggggctgctggccgggcagaagggctcctcacttcccagtaggggcggccgggcagaggtgcccctcacctcccggacggggcggctggccgggtggggggctgaccccccacctccctcccggacggggcggctggcctggcgggggctgacccccacctccctcccggacagggtggctgctgggcggagacgctcctcacttcccagacggggtggcagcagggcggaggggctcctcacttctcagacggggcggttgccaggcggggggtctcctcacttctcagacagggcagctgggcagagacgctcctcacctcccagacagggtcgcggccaggccgaggcgctcctcacatcccagacggggcagcagggcagaggcgctccccacatctcagacgatgggcggccgggcagagacgctcctcacttcctagatgggatagcggccgggaagaggcgctcctcacttcctaggtgtgatggcggccgggcagagacactcctcactttccagactgggcagccaggcagaggggctcctcacatcccggacgatgggcggccaggcagagacgctcctcacttcccagacggggtggcggccgggcagaggctgcaatctcggcactttgggaggccaaggcaggcggctgggaggtggaggttgtagcgagccgagatcacgccactgcactccagcctgggcaccattgagcactgagttaacgagactccgtctgcaatcccggcacctcgggaggccgaggctggcggatcactcgcggtcaggagctggagaccagcccggccatcacagcgaaaccccgtctccaccaaaaaaatacgaaaaccagtcaggcgtggcggcgcgcgcctgcaattgcaggcactcggcaggctgaggcaggagaatcaggcagggaggttgcagtgagccgagatggcagcagcacagtccagcttcggctcggcatgagagggagactgtggaaagagagggagagggagaccgtggaaagaggggagagggagagggagaccgtggaaagaggggagagggagagggagagggagaccgtggaaagagagggagagggagagggagaccgtggaaagaggggcagatcattagagaaattaaaaccacaatgagataccatctcacaccagtcagaatggctactataaaaagtcaaaaaaataacagactgtggcgaggttgtggagaaaaaggaacacatacactgttgatgggagtgtaaattattaattcaaacattgtggaaagcagtgtgatgattcctcaaagacatgaagacagaaagaactaccatttgacccagcaatcccatttttgggtatatgcccaaagggatagaaatcattctatcatagagacacatgcacatgtatgttcactgaagcactattcacaatagcaaagacatggaatcaacataaattcccaccaatcgtagactggataaagaaaatgtggcac

SEQ ID NO: 26645 - DNA, 856 bp, Artificial sequence
  DNA replication origin
tccgcccagcagccaccctgtccgggagggaggtgggggtcagcccccgccaggccagccgccccgtccgggagggaggtggggggtcagccccccacccggccagccgccccgtccgggaggtgaggggcacctctgcccggccgcccctactgggaagtgaggagcccttctgcccggccagcagccccgtccgggagggaggtggggggtcagccccctgcccggccagccgccccgtccgggaggtgaggggcgcctctgcccggccgcccctactgggaagtgaggagcccctctgtccggccagccgccccgtccgggagggaggtggggggtcagccccccgcccggccagccgccccgtccgggaggtgaggggcgcctctgcctggccgcccctactgggaagtgaggagcccctctgcccggccaccaccccgtctgggaggtgtacccaacagctcattgagaacgggccatgatgacaatggcggttttgtggaatagaaaagggggaaaggtgagaaaaagaatgagaaatcggatggttgctgtgtctgtgtagaaagaagtagacatgggagacttttcattttgttctgtactaagaaaaattcttctgccttgggatcctgttgatctatgaccttacccccaaccctgtgctctctgaaacatgtgctgtgtccactcagggttaaatggattaagggcggtgcaagatgtgctttgttaaacagacgcttgaaggcagcatgttcgttaagagtcatcaccactccctaatctcaagtacccagggacacaaacactctgcctaggaaaaccagagacctttgttcacttgtttatc

SEQ ID NO: 26646 - DNA, 1244 bp, Artificial sequence
  DNA replication origin
cgccacctccacggccgctgctatcgctactgagccaacaaaggggcgtgcgtcaccgcgtcgcgctgcgtcgtcgcgtcactcctctttgcgtcactgcgccccgccccaccgcccctgcgtggagcccggggagaccccacggcccggccttcctgggcctgggacccgaggggagccgagcgggaattgctttcctggttcgatccgctgccgctgtgagggccgagcggaaacccgtagaccttttatgtgaagagattgcggcctcctggtcaccagtcaccgagagagggacccctggaccgcctacgtggtggtgtctgccgcaggccatagggatccagcccacttaggcagtcccttggggacgcggccttccctccggagcggaaaggcgcttcccgcccgccctgcggtaatcccggaagccctcagccgttaagctaaaatttctgttgctttggctactgatggaaacctgttgtaagtggaacctctaaactgtatgacaggtgaacccactttaggtagctgtgtgattctgtccacttgtacagacgtgcagtggtttttaagtctcctataatgacgtcattttaaagaggcatttcctccaccccgctgacaagagcgcctcttgagggccctaaacaatgtaaacagcgatgattttcatgaattgagcactgtgtaagggctttacatatattctgtctcatcttcacggagccatagtacccattttatacctgaggaacctgaagctcagaaaggaaaagggacctggccaagaccacataacccttgccctattttaaccgctggatgccccaaaacatgaatcataaaaatgctttgtaatgtagatatattatgtactatgtagtacataaaagacatgaatgcttcaacaaaatacaggcaataatagaaatatctacaagggccaaatgtagccagagagataatgcttgaatctcatctgaaagtgtgctatgtgagctgagtgttgatgaatggctaggagttcaacagagaaggtagggaagatggtctagccgcagagaacaagcaaaagcgcagaaggtgtcaagtaagtaatagtttggggagcttaaagtgcatggagggtacatggcaaaatattaggcaagttagtcaggggtcatgtcagttaagagcattttatgcctaagagtgggcttaaatctttgcaaacaggacatgcgagccagagaagt

SEQ ID NO: 26647 - DNA, 1330 bp, Artificial sequence
  DNA replication origin
ggaggccggagcggagccgcgtctgactgaggcgggcagcaagcggccccctcgctccctccctccctcctccgcgccctccccgccgccaccagccgtcaaacgccaaccgccgctcctggggaggagccgcggctcgcggggccggagccaggcctgcgtccggacatcagccggagccggagcgagagccggggcctcggcgtccccgccctctccccgcctcggccagcgtccgccgggcccccgcgcgtcgcgccatggactcggacgagggctacaactacgagttcgacgaggacgaggagtgcagtgaggaggacagcggcgccgaggaggaggaggacgaagacgacgacgagccggacgatgataccctggatctgggcgaggtggagctggtggagcccgggctgggcgtcggcggggagcgggacggactgctgtgcggggagacgggcggtggcggcggcagcgctctggggcccggcggtggcggcggcggcggcggcggcggtggtggtggcgggccggggcatgagcaggaggaggattaccgctacgaggtgctcacggccgagcagattctacaacacatggtggaatgtatccgggaggtcaacgaggtcatccaggtgagggtggccgccgcgccagctggaccgggcccgacgggggagcggattcaggcggcacgcgcggtcccgagggacaggcctgggcctggtgcgcagcctagcccggtgcctcccggccttgtcttctccgctgcctctgctggggatagagggtgtcgaaagcagaggttcgccgattagccgggtgtggggaggtgcgctgggggcggtgcttcccaagtcctgctatggcggaggccttcggtcgcctaagccttctcttgcgggcaatttctgccagtccctgggccgggtgtcctttctctggccgggcgatcgcctactggggcggggcggaggaggtggggtggagaagaggagtcaggaagaattgggccctgacgggacttaccccggccgtagcctcatttgagcacttttggaagggattagagtaggcctaagagcagcttggtgtacagttgccccaagtgggcaccagttaataaagaaatggatcttggcagtctcaagtgcctacttaaaggtgggggaagggaagtatttctcggaagaggtgctgatgggccttcttttcagatggtgaggcttctgcttacatcttttttatgtctttgctgtttgggacctaattgctactttttctagtcgtagcagatgacttgcttgaagctgttggaatagttactgca

SEQ ID NO: 26648 - DNA, 1082 bp, Artificial sequence
  DNA replication origin
cccattctcccattaccacccagagatactgtcaacgttttgagctcacaggggaagtgtaggcttttcacactgtcgatgtctatgtgaagggagtaaggcagcctgaaacctcttgctcctaggtcccatggtccccatttcccttctagctggaaatttgtgctgtgaccagaggaaccagaaatggggtgagaatgcttaggggactgggttataagatcaaaggccggtcttgcagcagtaatgacagttcctaggaggactgtgacatcactacattccactcctcctgggggtgggggaaacctcatcagtgcaatggctgagttgccgatccacgatgggggaggggggacgtggggctgggacccaggtccttggagatgccagtccagagagcccagggaggtcgggcttgggtcagcaggaggggagagcagagtctgctcagggaaccccaggagtcaccagcccaaagtcaccccgggatgactggcgatgctggggggttggggctgggggacccaggtccttggagaggtgagcccaaagaacccagggaggttgggcttggggtggcaggacgtgagggctgaatatggagcaggtatccccagtagtcatccgcccaaagtcaccgcagggtgattggcgagggcagaggctgggctgcttgctgaaggggcggggctgactgacaagacgttggtggggggagtccagaggcgccggggtaggggggcccagcccggtgtgcctcaggagtggtatggactctgggagtggtcttgtcatcagaggggatctctggctaggttggggggccatgacctttttcttggctttttacctttttcttggctgctgccaatttattctgtcgagattcttctaacatcatggggtggggagggaggtagggttggggccacatcagcgaacacctccagtcacctacaaggctgctgtgtgactgagccagaggaggcgtaaccagggccacactagaatgcagaataggggtgtggccttaatgctccaatcccattggtcaatgagaaagatgaaagggaaaggag

SEQ ID NO: 26649 - DNA, 911 bp, Artificial sequence
  DNA replication origin
caacaccgcagtgccaggcctgggactgaggcgtggggtcccccctcgctccgtcctggcgccgcccgtcgccccgccccttggggggccccgtggcgcacccttgtgacgtagcgcttgtgtcgacatcggcgcgcgccgagcccggaagaggcgcgggctaggaaaggagttggttcgcgcaggtgcggcgcctgggtccccatggcgctgtggcgcggctccgcgtacgcgggcttcctggcgctggccgtgggctgcgtcttcctgctggagccagagctgccaggctcggcgctgcgctctctctggagctcgctgtgtctggggcccgcgcctgcgcccccgggacccgtctcccccgagggccggttggcggcagcctgggacgcgcttatcgtgcggccagtccggcgctggcgccgcgtggcagtggggtgagtgccaacggggcctgggtctctgagcctccgaggtcggccttggaggtcgggcggagccgcgcagaaacagggcttctcagaggtccccgggaggcgctgctgtccgcgctggccccttggcgagaagtgtcggacgtctgagtggaacccggttcgtcaccgctgctctttccactcggctggcctctgcgcctttctctcatcccggtaggaccagccctaacagcttcttgctaatcccgctttgtctgacacctttctccgagccttcttcctcgttccaacttttagccccttctcttctggcgactgttgttttgcaatcaaagatacttgaccttacccactatgacaacactcttcctctttcttctgaacttcttgaagacgcgtgatgtctgcctttacccactttcgaaacgccgtgtagtctagaaaccacacgactgtactgcaactcctctcaga

SEQ ID NO: 26650 - DNA, 894 bp, Artificial sequence
  DNA replication origin
gagaccctccgcctggcaactgccccgtctgagaagtgaggagcccctccgcccggcagccaccccctctgggaagtgaggagcgtctccgcccggcagccaccccgtccgggagggaggtgggggggtcagccccccgcccggccagccgcctcgtccgggaggtgaggggcgcctctgcccggccgcccctactgggaagtgaggagcccctctgccctgccagccgccccgtctaggagggaggtggggggccagccccctgcccggccagccgccccgtctgggaggtgaggggcgcctctgcccagccgcccctactgggaagtgaggagcccctctgcccagccagccgccccgtccgggagggaggtgggggggtcagccccccgcccggccagccgccccgtccaggaggtgaggggcgcctctgcccggccgcccctactgggaagtgaggagcccctctgcccggccaccaccccatctgggaggtgtacccaacagctcattgagaacgggccatgatgacaatggcggttttgtggaatagaaaggggggaaaggtggggaaaagattgagaaatcggatggttgccgtgtctgtgtagaaagaagtagacatgggagacttttcattttgttcggtactaagaaaaattcttctgccttgggatcctgttgatctgtgaccttacccccaaccctgtgctctctgaaacatgtgctgtgtccactcagggttacatggattaagggcggtgcaagatgtgctttgttaaacagatgcttgaaggcagcatgctcgttaagagtcatcaccactccctaatctcaagtacccagggacacaaacactgcggaaggccgcagggtcctctgcctaggaaaacc

SEQ ID NO: 26651 - DNA, 1267 bp, Artificial sequence
  DNA replication origin
ccctttctattccacaaaaccgccattgtcatcatggcccgttctcaatgagctgttgggtacacctcccagatggggtggtggccgggcagaggggctcctcacttcccagtaggggcggccgggcagaggcgcccctcacctcctggacggggcggctggccgggcggggggctgacccccccacctccctcccggacggggcggctggctgggcagaggggctcctcacttcccagtaggggcggctgggcagaggcgcccctcacctcccagacggggcggctggccgggcagggggctggccccccacctccctcctagacggggcggctggcagggcagaggggctcctcacttcccagtaggggcggccgggcagaggcgcccctcacctcccggacgaggcggctggccgggcggggggctgacccccccacctccctcccggacggggtggctgccgggcggagacgctcctcacttcccagagggggtggctgccgggcggaggggctcctcacttctcagacggggcagttgccaggcggagggtctcctcacttctcagacggggcggctgggcagagacactcctcacctcccagacggggtcgcggccgggcagaggcgctcctcacatcccagatggggtggcggggcagaggcgctccccacatctcagaggatgggaggccgggcagagacgcttctcacttcctagatgggatggcagtggggaagaggcgctcctcacttcctagatgggatggcggccgggcagagacgctcctcactttccagactgggcagccaggcagaggggctcctcacgtcccagacgatgggcggccaggcagagacactcctcacttcccagacagggtggcggctgggcagaggctgcactcggcactttggggggccaaggcaggcggctgggtggtggaggttgtagcgagccgagatcacgccactgcactccagcctgggcaccattgagcactgagtgaaccagactctgtctgcaatcccagcacctcgggaggccgaggctggcggatcactcgcggttaggagctggagaccagcccggccaacacagcgaaatcccgtctccaccaaaaaaatacgaaaaccagtcaggcgtggcggcgcgcgcctgcaatcgcaggcacttggcaggctgaggcaggagaatcaggcagggaggttgcagtgagccgagatggcagcagtacagtccagctttggctcggcatcagag

SEQ ID NO: 26652 - DNA, 1067 bp, Artificial sequence
  DNA replication origin
ccttgatttcaggcttgtggcctccagaactgtgagagaaacaatttatgttcttttcaggcactaagtttgtggtaatttgttaagtcagccctaggaatctaataggacatggtgtatctcttaccattggtattaccattctgtctccagagaggtagaaccgagagagagacaggagcagggaggtgcgggggtgagagagggaggaggagggaaggggaggggaggggagggaaagggagggcaggggaagggaggagaggagagaagagggagagaagagagggagagaagaggagaggagaggggaggggaggggagaggagaggagagaggagaggagagaagagagagagagaagagaggaagagaagaggggaggggaggggaaagcaggggaggggaggggaggagaggagaggaaagggagagaagagaggaagaaaagtggggaggggaggggagcagaggagaggagaggagaggagacgagaggagagcagaggagacgagaggagaggagaagagagatttattaggggaattggctcttatggttacagaggctgagaagtcttacagaagactgtctgcaagctggagaaccagggacgctgttagctcagcctaagtccagaggtctgagggccagaggaaccaacagtgtaactaagtccaaggctgaacgcccaagaacccagggggctgctagtgcaagtcctggggcccaatggttggagagtttggagttctgatatccaagagccggtgaagaagggtgtcaggccccgaagacagagagaaagtgaactcacctttgcctttcctctgctttttaattctatcttggcctcagccgacggaatagtgtgggcccacattgagtgaggatgggtcttcctaacccactccatggattctaatggcagtctcttctggaaacaccctcacagacacacccagaaataatgctttactagccatctgtacatcccttaatccaatcaaattgatacctgaaattaaccatcacatcctccctttccttttaacctatttgtgtc

SEQ ID NO: 26653 - DNA, 1261 bp, Artificial sequence
  DNA replication origin
tgtggagccggagtcggcggcgggtggcggcgcctggaacctggagaccgacccaccgcccccccccccccgccccggaatgtactgactccccttcttcgctctcctcccctccccgcccccttgcaggagggaggcgccctggagtctcccctccagcgagaggggctgcgcgggccgggccgggccgggctgggctggagcagcggcggccgcgggagccgagcttgcagcgagggaccggctgaggcgcgcgggagggaaggaggcaagggctccgcggcgctgtcgccgccgctgccgctcactctcggggaagagatggcggcggagcggggagcccggcgactcctcagcaccccctccttctggctctactgcctgctgctgctcgggcgccgggcgccgggcgccgcggccgccaggagcggctccgcgccgcagtccccaggtaagcggcgggcgcgggcccgggggttcgcgggggcgcggcaccggctcaggcggccgcggctgcggtgtttttgtttaggatccaggaggaaacgtgcaggaacttctctgcctcggctccggttgccgaagagaaaggggatcgcgcgtggtggggaggagaagggcgagagggggcgccaccggggaaggggcggctgccggggggcaggtcgggggcgcaggggtctagttcccagctttgtacctggaggcaggttcacccctcgcctctctcccctcccccaggctcatcccacttgtaagagtgggacattcttgtgctcacactagcaccagtagaggccactacacacctcattaaataaacaatcagacggccaattcattaattttcaggaaaggaaaggggagggggcttgagctcctggttccctggccagggatttcccagcttccgaagtctcgaggaagagctggctagtctcgagggactcctcgcgcggggattggagcccgagtctgcggaagagcgggggtgtcagaggggcacaattgcccgctcacaacccctggtgttgatttaacgatgaggacgccttggagagcggctcggagtgatcgtatctgttagtgtttccgttatgaaatgcctcttctttcctggggattacaactatatttacagcctattaaccactcttaaccaagggaattgtctaagcatcagattttaggtacttgtacaatgttttcagatggcattgtataaacattgaacctcaaaagccattttcagttctttttt

SEQ ID NO: 26654 - DNA, 1269 bp, Artificial sequence
  DNA replication origin
ggagagtctgcgccccgtcctgaggcagggctggctgagacgcggagatgagcttgaggtcctgggtgaggcggccgggggtgagcgggggtgtgccccggcgctgggggacctggggtggtggggggctggatgcaggtggcaggagcaaggatccgtgggagccagaggcccggggcggggcactcgggaaggttcttggggggcctgggctgtggccaggggggctgagacctcctcggggagtaaagcctacaggggaagcccccccagaggcccctgccacaagggacggcggctcaggctgccgtgggggtgtctctggcgtgctcagtgggccagtggccagacctagggacaactccccgggaggctggcccagctgcccggggctagatgacggggatctggatgagggtgggggtggcaggaagtgctccgggagtcccaggcctccccgggccccgggtggcgcgggagatggctgggcagcctgcggggagcgggcgcctggctgcagcggggtgagcaggggagagtcggaggaggacagggagccacccagcgccttgtggaagtggccaaacccggctatggtggtggcggctacgccagctgatggtgtgggagccgagggggagccacaggccccggggggtggggaggagctggatgagggcaggagtgggctcagtccagcgggggcagagaatccagccagctgttggatgtggaaggaggatgaagacggtgtgtccacctgggacgggctgctggcgggcgaggcggagcccagcgcagaagggatcagggactgcagccgtttcaggtgccttggcgtctgcccggcaccgaggttgcccagcccagatcctgggggagggcggaagatggcagcaggcaggcgagggtggtgggtgagggctatggccacagaagtggtggcagcggcagcctgcagtggtgcctggatcagcggggtccagatgacgggcgtgggggttggggtggcagaggcagcagcctggacgcggtgcgcgcagtgggccatctcccggtcatgctgcacaatctgctggatgatctcattctcctggtagttgaagacgccggagttgaggtcgtgctggactttgtggaggaggatggagttcttcttgcctgggccacagaacaagaacaggcactcagggcagagcggggaaggagatcaggtgcagacctggcttaggcataaaggagccctgccctcctcccccaacacccccc

SEQ ID NO: 26655 - DNA, 953 bp, Artificial sequence
  DNA replication origin
gcgctgggtgaggggcacgaaagcgagagtgtggggacggtgacacctccttcaaggagcttggtaagagataagacagcaggggttcagggagggatttttttttaagtttagagagcttaaaaggaaaagctgatgggaaaggatcagtggagagagacagatggaagagagagagggaatcttctgtagattaaggtccctggggaggaaaatggggatggtatcaaaagggcaggtagaagagccgctgattcccctgtgactgggaagaggagatgggattggggagatgcttcaaggtggcagaaagaggaaggggacactggcggctttgcttttctctgtgacgtagaaagtggtgttatctgctgactctgagagaaaaagtggtggtttcagagctttgaggagagaggaattaatttgaaatagcagctatggggaatgggcaggaaagtttactaggttctcctggaaggatcaggggacagagatgagggctgtgaatgaggccatgatgatgacattgaggcatgaggagctaagaaacttggatatttagtaggactggtctgaggttgtgggattctctacacagctcccatgtgaacatgaaaagggttgatggtggtccttgcctggggctgggatttcatgacggtgccaggaggaggggcatgggagttaaaggcgttggttttagagaggcgaatgagctggaccatcgtgtctggggtgaagggtggttgggaggatgtaggagggttctgatgagaggatcagaggagtcagcagactggatattcccaggactctgaaaaacaggtgcagcacaactgaatagaagagccggcaggaaagaagggcagggtgtacaagaggactgcagagatgcagcaccggaggtggtgacgtggtcaagtgtgtgctttggaatggaccattgaggt

SEQ ID NO: 26656 - DNA, 1040 bp, Artificial sequence
  DNA replication origin
taactttcctgccttgcgctgggagctccaagagaggcagggcgcctctaggctccgagacacccccaggccccctcctgcaccgcgctgggggaactttcctctgggttcagtcactggtcttctcgggtctgggctgcattggagacagaatgaaaaggtgttctgagcctggcctacccctgccggcagccaggatagggctctgccaccttaagccacatattcctcctcccccttcaaggctgcagagtcaggatggccatcctagaggcagctccgggtcattcagcctgcagagcagggccgtgaagagagacagacctcttagcaacgggccagctccttgggtgctgacagcaggcatttatgtctgctttctggtgccctgggaagctgcggccgggtccctggaggaccgaagtcactggggcctcaggccgggatgaaaaccccctgcacccaccgtaaccctgagctcagctcctcatgctgagtggtgggccaagagcaggcaccctgggcagctggcatccagagcggcagggctgaatgaccttgctcatagtgatgggtgaagatgcctggtgttctgactgatgagcagctgtcctgtgtcccatgcttgtccagtggcccatccataccccagagacccaagctccagcatctgcttggtctctcatgggccactcgtgggtccccaaacaaggtatgactgccagtcagggagagggaccctgcccccttccacatcacttgagtcggatgccactgaacagcagataccactgggagcttgtgggcatatttgtgcaaaaagagggattgttggttgtttctagggttgggatcagggatgcctttacctaagtcaaggtcctaaggttccctagtgcccctctgggctttcgtgatgcatgagattgtgatgaaggtctgggaaacacttttcaagctgggtttaattctctcattctctctttctctgggccctgccgcctacttatctcccttccttgcctaccttagttgcctgc

SEQ ID NO: 26657 - DNA, 1013 bp, Artificial sequence
  DNA replication origin
ccccagccgcaggagcatccggctgcggccactgccctcgccctccccctcggcggccgcgggtggcacggagtcccggagctcggccctcggggcagcggacagcgaagggccggcccgcggcgcgggcaagtccagcacgaacggcgactgcaggcgcttccgcgggagcctggcctcgctgggcagccggggcggcggcagcggcggcacggggagcggcagcagtcacggacacctgcatgactccgcggaggagcggcggctcatcgccgagggcgacgcgtcccccggcgaggacaggacgcccccaggcctggcggccgagcccgagcgccccggcgcctcggcgcagcccgcagcctcgccgccgccgccccagcagccaccgcagccggcctccgcctcctgcgagcagccctcggtggacaccgctatcaaagtggagggaggcgcggctgccggcgaccagatcctcccggaggccgaggtgcgcctgggccaggccggcttcatgcagcgccagttcggggccatgctccaacccggggtcaacaaattctccctaaggatgttcggcagccagaaagccgtggagcgcgaacaggagagggtcaagtcggccggattttggattatccacccctacagtgacttcaggtaaggggccacagcgatgatcctgtgggtgccctgcgcggtggcaggcatgcctcctcctgaccctgcctcccagccggagttaactttcctgccttgcgctgggagctccaagagaggcagggcgcctctaggctccgagacacccccaggccccctcctgcaccgcgctgggggaactttcctctgggttcagtcactggtcttctcgggtctgggctgcattggagacagaatgaaaaggtgttctgagcctggcctacccctgccggcagccaggatagggctctgccaccttaagccacatattcctcctcccccttcaaggctgcagagtcaggatggccatccta

SEQ ID NO: 26658 - DNA, 1745 bp, Artificial sequence
  DNA replication origin
cgggcccggctgggcgcggggaccccgcgctcccttcttgcctccctccctccctctggcgttcaggggcgcggcgcgccgcccggctccaggcgccccgcccccgcggggaacaatgggcgccggccggagaggctctgcggccgcggcgctcagggaaccgctccggagtgcagagcgcacggcccgcgcgggtcccgggcgtgcgtcccgcgggagggctggctgtccgtctgtctcgccgcccgggctttgtggctggccacccgcgagctcgcctcgcctcctctgccccggcccgtccggcccgtcccggggctcccgccgcaaccgagcggagcccagcgacccgccgggcttacatcagcggccgcctcccccgaagcgccctccggcagcgctcgggctcccgcgccccggaatattcatgaagccgccgcagctcgcgggttgccataggagcggctccagcagccgggcctgcctacctgggcttcttaaaggggcagcggcgcacgggccgggggctggaaaggggcggggggcgggcctggcaaggggcccaggttagaccctcgctagaccttcggggccggggtgagaggtatccacactgctgcgcccttaaatctctttcctgggctaagctgggagtgcgccccaagtctgaagctccggcttcagttgcgaattccccatcctaagattgaagggtggggggtggcttcccaatttctccatcaccaagctctgggctcgcctttccctggcatttttgcccctcagctgggtctccgactttcctcttgggaggcgaccgggttcgtctggatgcagagtcccggccttcccgcaaccctcctggagagggggcttccggaaatgcgccgcgtcggggaggctcccacggttttcctgtgacatgggcagggtgcgaaccccgcgccagtctttcccctgcaaagcctcgcagcagccaggcaaggagggcgtggggaaacagggagacacgcacagggcgcgcgggtgggacccagcccttcgaggtaagacttcgaggaaatgcgccggcaacagtgacggatgcgagatccgaacgccgacctccgcacgcgcctctccctcggtagttccgagaaagggacaagccggctgcagcggggagcggttgggccggttcctcggacgccccagcactctggaactggctttggagccccttctccctgtgttcccatccacattatgacacctactatgtggacccacgctgggtgagttcctgttccacccagtcccctacctgcacccccaagcagctgcacagcccccactcccttccagtctgcagcccagcccccttccccccaacccccgccaaggatccaactgtgtgtcctctctcccagtctctcccagtgtacagtgtccgggcttatggacagatttcactagctcagcctaaggtatagccctaccccctccaacaccatggacagcctgataccccagattagctcagaaatggatagggggacagattgggcattaaggggaggggagttgtccagagaaggctggagccgaggttaatgctggagcggacacacagcaaagtctcacaggagggaggcaaaaaggtcccctggctctgccatctctctgaggaataacatcaagtttttcttcaaatgatttttttactctcattcttagcccaatgtgaccactttcgcctcctccat

SEQ ID NO: 26659 - DNA, 1614 bp, Artificial sequence
  DNA replication origin
gccgcccacgacccggagcgaaggtctcgcgaggcctgggcgctgcggcggcaggaggaggacggggaaggacggagccgagccgcggctgcctccctcgctcactccctcgcgcactcgcccgccccctccctccctcccctcccttccccggccccggctctggccccggcccattcgctgttgggtcttctgctagggaggatgtcgggttcgtcgctgcccagcgccctggccctctcgctgttgctggtctctggctccctcctcccagggccaggcgccgctcagaacggtaagcggggcgccgggggcgggccgggcgggggttgaggggcgccggggccggagggggcccggctctggcctgaggagacgctggagctcggggaagggggccgagtgggcgtctgaggggctgcgggtccgagaggaggtaccggctgcgggtttgaggaggcgcgggtgtgaggaccggaggctcctatccgagcggcgggggcgtccggggtgagcccgaggtgttgcccactcggaggctccacgtcgtggggctcgtcgtgccgggtcggcgaggggacacggaggaagccgacgtggggagctggagtagcgggggcggatgaggagggggcgcagctcttagggagggtggcacaagaccggcgtttgtgttccgggcgacggggatggtggtgtccgtcaggccccccgggagctggggtcgtccaggattctactgaggccccgtaggactggtgacatccttaaaaataagggggaaattggggggaagagagtcctgaggaacactaatggtgagctgagtactagagaccaaaggagggggtaaagaatcagggaaccttggatctagggatagagggaaggtgggtgggaagatgagggagtgggttgactgcagtaggggacctggagagagaagcagcagtgtctccaaatgagctgggggaagagggctgggtttgctaaagagggtggagtgctgggcattctagggtagtggttgggagagcaaaaaggagtttctaaataaggagaggaaaatgagcagaggatggagggaaagggttggaactgaggtgggggaatatttattagagaagtaaggaggcctgggtatagagatgggggtgggggaagacgaaaaataagggaagggagtaaaatgcaggaagtcgggggtgtaatgttggtttgcagtgtggaggataaattagggaagggaggagttgggatgtggcaaatgctgtatgatattggtcgggcctttgggaaaacagggacacatagctgcaactaattgcagtggtgggattgagggcagtgactggcgacagggagatggggaagtggatttttgagatttaaaagtttcaagacagaagagacgttatttccgaggaacatgaaagtggcccctgggaggtggtacagtagaaagcagagaattactgggttttgaattgaagctcctttgagaagatggagaagtggtggggaatcatgggcatagggacctaaacagagcagattctgattgaagacatgtgttagcattcagctgctgaattgatctttcacaagtgagtc

SEQ ID NO: 26660 - DNA, 1083 bp, Artificial sequence
  DNA replication origin
ccccggcgcccctcaacccccgcccggcccgcccccggcgccccgcttaccgttctgagcggcgcctggccctgggaggagggagccagagaccagcaacagcgagagggccagggcgctgggcagcgacgaacccgacatcctccctagcagaagacccaacagcgaatgggccggggccagagccggggccggggaagggaggggagggagggagggggcgggcgagtgcgcgagggagtgagcgagggaggcagccgcggctcggctccgtccttccccgtcctcctcctgccgccgcagcgcccaggcctcgcgagaccttcgctccgggtcgtgggcggctgaggagcgaccgccgcaaggatcgcgagaagaggcggctccgacggagactcccgccccgcggactcggtggccccgcccctgcagaggctgattggcctagcgcgaggtaggtcacgtgccgagggcgcctctggccatgtgacggggcgaggcgggactccgctagctctctgggcagtggggagctgggaagtccttcagtttactcctctgtggcccgggagcacccataaataagaggaagctttggaacacagtacatttcctccacccatcctgcctttcatttgttagcgctcttggctacagagtttcatacaccgtgcctcctttcctccttcctctctttgtccccgtcctgctgtttcttccttctggactttgaacatagacctctactggtaactggctccaacctccttctctcatctgctgttttttccttccaggaaaagtggtgcgccccctgtgcccccgttaccttgtgctttcctgcctggacatctgctccctttgcctgaaatgtcctcctttgccgcctctgcctactccccctcccaccccacatctgggccttattttagcttcatagactctcagggcctgaagttcagctagcctaattgcatgttcattgacacaattctacaaggaagtcgtgtatgaacttacatgaagactcctaagaagcgtcttaatgcggaaaacatttattgagaacgtgctgtgtgccag

SEQ ID NO: 26661 - DNA, 789 bp, Artificial sequence
  DNA replication origin
ggggagggcaggggagcaggagcccggagggaaggcgccctgctcagctcctgcagccctgagcgggaacgtgcggacctccgcgggatccaggcccggcccgcagcagacaaaggccgccccaccccgcgccgcccgcgccacgccagcactcaccgcgccgcgccgactctgggactcagggacgcggcccagcctggctcagtcgccgccgcagcgaggcccggcccgaatgggggccgggggcggcccggggagtccgaggggcggggcgggccgcgccggagaatccgcctgaggcccggaaaggcggctccggtgcgtccctgaggccggattggccccgcggtggcggctgctgaccgaggcctgagccagcccgctgggcagagcacacggcctggcccccgcccccgccccgccccgcccccaggcctgaccctggcggggaaaaccctcggctcccggagcagggcgctgcccatcccccaccccgttcccacacttccaagagccgaatcttcctttctgcgagaggggataggtgactgactggtcatcgactggcggcagaacagggctggaatcctgctgtccaaccccagtcttgggttcttcctccacaccatgctggcaccacagcccagaaagggttaactcgactgcgaggaattaagagctgcaaggagctctctataaatacagtgtcgtgggcgcctgagccaaccgcaggacaatttccactgagctggttttcctcttttccttccacccacggccatccgacca

SEQ ID NO: 26662 - DNA, 1728 bp, Artificial sequence
  DNA replication origin
ccggagccgcctttccgggcctcaggcggattctccggcgcggcccgccccgcccctcggactccccgggccgcccccggcccccattcgggccgggcctcgctgcggcggcgactgagccaggctgggccgcgtccctgagtcccagagtcggcgcggcgcggtgagtgctggcgtggcgcgggcggcgcggggtggggcggcctttgtctgctgcgggccgggcctggatcccgcggaggtccgcacgttcccgctcagggctgcaggagctgagcagggcgccttccctccgggctcctgctcccctgccctcccccaggtccgggcggcccccctcgcacaggagtcccgggaaccgcgggcgcccctcctgccctgggctgtggggcccgcggagagctgggggctcccggatcctaccccgcccccctttcctcgggttgagaggggcccgggcgccgtcggacctgcagaccccggaagctgcggaccgggccgggtgggtgaatgcgcttttgcaggccccgggtctggagcgggcatgggggcagatctgtcccgtgttgaagcttaacgaagccaccggccggcgctgggaggttagcggggtctcgggtcctgcagaggaaaacgcccagctccgggaggggagcggcggggagggaaggcgagtggttaggcgtgtccactctgcagggcccagcagggcgaaggtgtgggcgactggtgcacttccacaggcagccgtgggcagcatgaggggtcagattccgggaaggacaggtagagacggctggcaggggccacggggtgaataggtgttgggggtggggagggaattgggatgggcagtttgggcttgggaagcctcagggaggtggggggtgaggtgggatggagaggagatgcgggcgacggtggagggaggtggggaccccgagtgggggcacactagaagggaggggattgaattccagcgcccagggccctccctgcgaccgtttagctagcgaattggcaggtttggcagcctaaggcaggggatttatttctaagccaaacctgctctaatgagaaaagcgtgatagatgactcagatatgggatctatcactgagggaaaacattaagcaaatagtaaagcaaaaaagatttgtgtgtgtgtgtgtgtgtgtgtgtgtgtgtgtgtgtgtgtggcgggtgggggggtgttagttgtcttaatttagaaaaacgatttaccttcaaattggatgtggataattgtaaatgagtctgatctcttcattaaagcccggggtccttttcttataagcatgtcttcagcagttagtttctatattagaaagtaatgaagctgctttgtctttaagagagttctttatttagtgcggcctcctctagttccctctggcctcccagaagtccctaggaaatctgatgctgtgcagccttccttgtagtgtgggggactgcaaataggtgggacagtttgaggctgaggggaactgaagtctaaacttgaagtctaaacctgtccgatgggttgagctgatctgagtgcagggcaggatggagggctatggggctgtagggtatgaagtggctcatttcaagggagtattttgggtgagtacattttcctgatatctggagttcttgagattaagcactaacacttagggtaactgttgaccgtggaaatttacatacgtcaccgtcagct

SEQ ID NO: 26663 - DNA, 826 bp, Artificial sequence
  DNA replication origin
agcgtgagcctgtctgtccatgtgcagataccacaggatgaatgtggatgagtgtgactggaaggtggtgggagtgtaaggccaagtgctacaaagggatgagtgtgtgccaacaagtgtgcctgtgaaagtgtaagtcagtcacgtgtgtgtgagagagcaggccagagcatggaagctgtgcggcacaaatgtaggcatgccaggggcgtgcatggcactgggggtgatcgtgcctgccttggagtgagtttgaagcagctgccatttgcggggctgagggtcagcccgagctggcattggtgactggtaagtgggtgagaggacattggtgggtggtgagttgaccctggtgggtaaacagatgcatgagagtagatgggtagtcagaggctggggatggctggaggttgggaaggagagggaagaagagtggtcagttggcagataggtgagtacttgtgaggtagacaggtggaaggatgagcaggtagacggctggttggttacatctgttggaggttgatggttggcagggctactgagcgagcggatgggtgaggtgatgggtgggtgggctggtggagggtaggtggatggtctttggctgggtgtgtggcgggggctccaggttgagtggatggtctttggctgggtgagtggtgggctccaggctgggtggatggtccttgactgggtaagtggtgcactccaggctgggtggatggtctttggctgggtgagtggtgggggcgccaggctgggtagtttttggctgggtgagtggtgggctccaggctgggagccccttcatgttgtcacaggc

SEQ ID NO: 26664 - DNA, 1135 bp, Artificial sequence
  DNA replication origin
ctttgcaactgcctaggagttgtgaggggatccctgctgccttcccccatcccaagggcatctcttacccttagtccctgcagagtcatccccctgcctctgtgttcaagctcaggcagagatcagctctgcacacccacaggcacttcaagacctggaggccactcctgggacccaaggtccctccccctcctctcctgtgtcctcaccttgaccccctctgctagactctgtctccctctgggtgtcccactctccacccagaggcagaggaggctgggtggcagggggcaggggctggttgagggccgcccagggccagggtgggctggggggccgttaaaatgtggagctctgcccagccgaggggggctccgtggaggcagacgcagtgtgtgcccagctggggggagtatgggcaggcctgcggccacgtggtaaacgatgaacattcggggcgccccggacctcgggcagcccagtgacgaccccagcagtggtggtgagcgggagcggattcgacagcgcatgaagatggtcatcgggcagcttgagggcatccttcgcgagctcaaggaggtggccaaggagctgagggaggtaagtgaggggtgaggagggaccagacagaccctaagccaaccttcttgggtttggcacaaaaacgtactcataaatacgttggagtgtgcaaagctgcgtgcacatgtgtcactctactggggaccttctttctccttgctctcctttccgcaaatctgctttgctaaaaatctcatcagaccccaaggctggaggggcctcggtgttgtagaggttacttgagcagcatgtcagtgggcctggagctctgggttagcacaaagggctgccaagatggccagtaaggactgaatcccgccacagcttcttagtggaagacaaccttctgggacccaagctgacccttgaacccaccatctgtctcccagactctgatctggtcacaagggaccctgggagagtgcagatagttgtgctgaggtggtttccactgcttgaggcccagctcaaagcatatccctagaaatcacacagatactgagaacccttgatcttggaaaaatttaagccagctatgtcctctttgtccggg

SEQ ID NO: 26665 - DNA, 772 bp, Artificial sequence
  DNA replication origin
cagatgtctccggtcacggctcggaggacctccctgaggcccggggccgaagggtccagagagagaagcccgccctagggagccttgggggccccccaactccgtcttggggcttggcccccgacgctgcttggagggaaggccggtgcccccaccctcggtgagtccaggagtgggggttctgagggaaggcggggctgggggagggagggtccgctgggaacgagggcaccctgggggcgctaggagggaggatgggtgactggagaggccctctggtgaaccagcctgggcaggcctggctggggggaaggtggggggggagggcgggagctacggccagggtgccccgtagcaggctgaggacttctgcttctaaagcaggggctccctccctttccctctagaggaggggctgtgctgtaaaccgtctgcctccaccacccctccccacaaagaaaaaaaaatccccagcgaggaagggtgcaggctggcgagaggagggaggcagcggcattgccggctggtgctgcagcctgggagggctgacgccaggctcgctctctccgcagggggctgccctcttccaatccagctccctccccagagctgcccatatccggagccccttccacatctggaagaccctggccaccatccctctgcaggtgtcagttgcatccagagacctctgcctttgcaactgcctaggagttgtgaggggatccctgctgccttcccccatcccaagggcatctcttacccttagtcc

SEQ ID NO: 26666 - DNA, 2096 bp, Artificial sequence
  DNA replication origin
aggcgaggggaggaggcgcggcgaggggaagggaggggagggggcgagcggcgggccgggccgggccggggcgcactaggctcgcagcctccgctcggctccgctacctcccgtccgttcgctctcggctccccgcctcagcagcccccgggcgccgggtcgccgccggtggggcaaacaggcgccgggtcggggctgggcctcccttcaccgcctcgccctgccctgccccgccgggctcccggggcctgggcccgctccccaagcgccgcggcgccgcgccgcccgcgccccggccgcccccggcccgccccgccgccccccgccggactggccgcccgggcgggcgctggctcccttaaaggccgcccggctcgcttggctccgcttgcctcggcgctgtcagggaaggggccggcccgccgcgccgggagggagcttttaaagcgacacacacgcctcccaaccccgagggccaagcgtgcgagccaggggggtctcgccacccgggcgagggggaagggtctcgctggcggggctggaggcggactgaccggaccccacgccggctgacctggggcgcggagggacagcgttctggggacttcgttcctttcccacctctccagacacccccattgcccccttcccctactgcactgcccccaagcttcccttttggccacgtttcccgcatccagaccctcccttctaccacccacataacccagcccctgaccttgcctgaaatcacattcattcagaaaatagaatactgccaacctttcctgagaacctactgtgtgccaagctctgggtcggcagggctgggggttggaggctgtcttggacacccatcgtttccttcagctattcaacaattgactcatgtattagaggccttctgtgcatcaggttccatgctaggctccggggccaccagagcatttcaggaagctcacggctcggggacactcctgagtcacaacagaggcaaattctggaagcaatgttaacaggggagtagggaagtgtgggttgggtggtgcagttcaggccagggcctggcgggttctgccaggtaggccacccctgagctgaatctcaaaggaggagtaggagtgactgtcagtgtggggggttggggatcagcattccaggcagggaggagggtgggagcacaggctcagaagcagaaatgggaggaggggagtttaagttaactggggccttttagataccattttgactgcagaccacagagagactcagagaccatggttaggagcttagattttatcccggggcggagggagctttgatattgggaggaacctgggcctgcttgccttctcaggaaacccctctggggcattgtgagtgggtgtgaggaggtgccaccgagatagagcagttaggaggctatttcaccgttggccagaagacagtggagtctatgaatctatgctcatgagagaggctggggcttgagagtaacattttgtttgtttttttttttgaaccatcattagaggggtgagatgaacagggacgctgcgtagaagtaacaaaagcagtagttctgggctggaacctcagaaaagagtccatgagtgagagggaggagtgattagaaagataggagaagaaccagaaagtggagagttatgtaggcccagtaggaggagtttgggagaagcaagtgctcatcagtgtcgaacgcggcagggagtggctgtgagagaaggaacagaaagtgtctatttgtcttggtactcaggaggccacgggtgacatggcaggggcaattggttttggagggtagaaggtgacaggaaccaaactgttgggcatcgaggactatgtgcccaacagtgaggaacaggagtgagtacagatgacattttcaaaagtttaagtggcggggaagcagagatcttgaactagaggcagaggaggggtcaagggaggtggggctaggtggtggttttaggctggcccatgggggacttgaattccagagacagtgatggtactgtgggtgctaatgatgttccttggtctctgagttatctcagagatgtattcacaggggg

SEQ ID NO: 26667 - DNA, 1100 bp, Artificial sequence
  DNA replication origin
agtttctttaaacaatctctttttttgctatacatttaggctgtttccaatgattgttattataacatccacacatcatctttgcaaatttatctaattattgccttatgataacttcttagaagtaagatttctgagaatgcacttttcaaagatttttcttgtattgttcagctactcttcaggaagttcgtgccagtttatactctcatcagttgtttaatattattgtcccacttactatgaatgctctagctctatctcagctgtgccttgaggtgttaaagaaagagctcctagggccagtttggtggcaacagtagccaattagtgtgagattatccaaaggatacagaatcccagggagcaagaatgggggccgtgaggtccagctgtttcactctatgtaggttcttttatggcctctcttgaaggatttgaaattgattgcttgattgattttatgaaggaacacattatttccctccaaatgatggtggtggcgatgagtgcatggtcatgatgataccaatgtgtggtcatgacagtgtgatattgatgagggtatggacaatggtagtaacaggttaacagtggttctgacggtgagtgcagtgccaatgatggagatggtggtggtgctggtgttgacaataggatggcagttatggtggtggtagtggtgacaatgttggtgatgatgacttatgatggtggtaagaatggtgatggtaactgtggtggtaatagtgagttcagcactgataagggagatggtggtggtggtactgacagtagggtggtaggaatggtggttgtggtcacagctatgttgtgatggtggttaagaaggtggtgagaatggtgttgacagttggtgatggtagaaatggtggtgtggcattgactgtgggatggtggtgacaatggtgagaagatgtgacagtggtgaggggcagcgtgatagaagggggatggtggtggttcacgatagtggtgagtggagttggtgctgatgggaagcctggtgctgatggtagtgctggggtgttgtggaaacagaaaggtgaaagtgcatagatgatggtgaaggaatgcaa

SEQ ID NO: 26668 - DNA, 972 bp, Artificial sequence
  DNA replication origin
agcgggcggggtccgagccctgcccgggctgcgcctgctgcccgtgcaccagcacgcacaggcaggcgccccacaccagggcccccagctgccggctgcctcgggccagagccatggtgacccctctgcagaggcctggtggacagagaggctctcaggagtggccccctgggcgtgcttctcttcccacggcctcgaggacaggaaggctccttgcttgccccagctctagctttgtccatgctggccttgtcccgagcgggacggctcctccgatgacagcatttcaaggccaaggggtcagggcagggcaggggcggtgcccagggctgcacgaggctctccgcagggcaccgggcgggcaggaccgcctgtgggccttacatggccagccccgcactggctggccgctcggctggcgctttcccactctgaatgaataagcaacaggctgggagcgtcgggaggcttcggcctcctggtccgcctgctggggcctcctccgcggggccctatggcccgccggcttttagctatgcgccggtcccacagctgcagtgctccctcagtccctggagttcccagccaagccacagacctgcctctgaggaagggaatcgagcagggagtaggaggggacctctggggactcgggcctggtaagtggggctctggcaggcagaacggggctggggtgtcagcaccaccccgcccattcctctctgctttggtcacagcatccctggtctccaccttgctcactggcttctcgtttgggctggaatgggcctctgactcctgtctgccccagcctccttcccgtactcccgggttctcccttttccttgttccctaaagccagtgctaattaagacacaccctctttgcatgttccttccaccattatcccacaccctcaataggaagaaaaaaaaaaaaaagacacaccctctttgttggtgggcctcctcg

SEQ ID NO: 26669 - DNA, 1080 bp, Artificial sequence
  DNA replication origin
tacccctaccagccccgggcgcgctacgaggagtacggcggcggcgaagagctgcccgagtacccgcctcagggcttctacccggcccccgagaggccctacgtgccgccgccgccgccgccccccgacggcctggaccgccgctactcgcacagtctgtacagcgagggcacccccggcttcgagcaggcctaccctgaccccggtcccgaggcggcgcaggcccatggcggagacccacgcctgggctggtacccgccctacgccaacccgccgcccgaggcgtacgggccgccgcgcgcgctggagccgccctacctgccggtgcgcagctccgacacgcccccgccgggtggggagcggaacggcgcgcagcagggccgcctcagcgtgggcagcgtgtaccggcccaaccagaacggccgcggtgagtacggccccggcgcccctccggccgcgcgtacccctggccactggaaactgctccgggccccccgggcccctccttagaacttcctggaggcctccccggagctgctaagcacggagcagcgccccctcccgacttcccccgacccagccaacagcacccccctggcatctcacctcccagcttaacccgcacccaggcatcatcagtgccaggggttggccaggcaggtgtgggctctgatcctggctttggtggagggactagccgagctttgggaggaggctcgccttctgcacttggcttgggtcatctgaggacaaaaggaaggagcccctcatccaccttctccctcatttcaatgagggcatctccttccccccttagagatgttctatgccagctcacagggtgaggcaaggagcatcagaaacctgagtcttcagggccagaaaggccttaagggatgcccctggaggtgtggcaggctgcccattactgggcatgtgtgaggttggcttgagtgcgcaggaggttagaggggagcgtgtgctccaggcaggagtccggacttcctcaggggagtctgcaaggctggggcaagagagaccagtcaggcactggcctgggtgcagaatttcaggggctac

SEQ ID NO: 26670 - DNA, 1571 bp, Artificial sequence
  DNA replication origin
aggactggagacagctgaggggtcagaggtggggtgtttctgcttactttgatttattctgaggcaacaaagagccccagggaggagtttgagcagggaggtgatacagcagacttgctttaaggcaagatcctcctggctgctgtggatgctggattatagggggctgaggggagggatggagaccaaggaagacattgtttcaaaatacagccaaggaatgatgcagctctggcgagggtggaggggagctgtgaagccaagatccactgagggaggcatgcctctatcaactgtactgagccacaacagggcactagagaagtgcaagcaccaggctcggggctgcctcgatgtgtgcaatgatatgagagggggcgggagtggggaggagtcaggctcctgaatggatgagtgtggcattcactagagaggacacacgggggtgggaagggagggatggcaacttttttttttttttttactactgtaagcttgaggtgtctgtggggcagtcaattgtccagtaggcagctggagaaatggcccagggtacagaagcatcagggctagggcaggacattgtgaataatcagcatccacaggcagcagacagcccagatggatgagctctcccagggaggtcacagatgagaagaggccagtgatgaaaccctggaaactcaagggcaggagaataagtggcagtaaccagggatgacagggaaggaggaagtacagggggttctgggggctgggggctgggtcgaccatgtcaaatgctgccaccaggtgatgtaagggaagggctgagaggtgcccactgggctggcatgtgggaggtcactgtgatgttggccagcgctgtcttgggagcccaaggaggccaggatgaaggatgtaggggcaggggctgggagcatggatgaaagtcttgcagaagaaaaggggagaaagggagtgggagctagagggcactgtggcaaagggagggcacatttctacacagaaaggagaggtgacagagagagagtgcatggagtggagggaaggcatcctgggatagcagggggcccacagcactgcgcagtacagggatgagcctcagagaggggaggcagaagggcaaggaggcaggaaagcagcacagaggcaggtgggtttgaaggggtgaaactggaggaagcagagtgctcatcctagagtttttctcctgagtgttaggaggcaaggcctgctgcagagagcaatgagcagtggtggggctggaggagggcagtgaagggctgaggcagctggcctggagcactggcaggtaaggagtggtaactggctaaggaaggtccagcaagtgagaggtggggactctgatttctctagaagaaaatcaggcaaaaaggggcatgtgaataagtgtacgcctgaaccagggcctgagggcggtgtgctggacctcctgaggttctgtctcaaccacaggcacagctctcactctaccaggtgctcactcagtctgggaaatgggacttaaaggactctcacatcctggtgtggaactgacctccccaaac

SEQ ID NO: 26671 - DNA, 1084 bp, Artificial sequence
  DNA replication origin
cgattctcggtttagatcttggagtgcgtgaagagaagctgaaggggaggcgtgagccagttggctgagtcccttgagctgtccgaaaggggaggtgccggctcagggcccgcctctggagaggaagtgagacagaagctgggggcggttctagggggcagagaggccgactgtgggttttaaagacacgcccagagcggggaggaggtagaggcggagagctgcagacctaccgctgacttacggtaaagcgggagaggtagggcagagctgcaggggggcagccctgctcccggctttgatccattcatccgttcacactggcactgcttcgtgccacgtcctgccgggagctgggcgtacaaagatgagccacacgcagcccctgctttctaagagccgtagatgtaatggaagagcaagcctgcaaacggagacattctggaaaggagagcccacagctgggacctgcaaaagcagtggaaattcaccagggatttagggttgtaggtggtggggtacgggggacacttgaaacagaaaagatagctcttgcaaaagcctgtttgggaactaattttggccattttcagatttaagagggaattcatgagaaatgatacccaaggagtgtgctaggacaagatcctagctgaggagattgaaccagttctgtgagtgatgggaagttgctgaaggatttggaaccagggaacaacacgatcagctgtgcatgatgggacagtcactctgacaacctaggagcaggtgccctggtctaggacagtggctgtgggatgcagaggagggacttgattcagagatcctgggaagccagtgactggaggtgagggagcaggatgatgccttgagtgacagctggaaaggctggtggatctgaggtggtgggggcaggagggagggggagagctggagagcgggtatgaagagggtgaggggagagccagctaggtcttcgccaatggaaaagcatgtcagactcccagctggtaaggggaaaggggcacagttccaggtgacctcactgggtcagcgccccggcttcaaacttaaaccatcgcaa

SEQ ID NO: 26672 - DNA, 1497 bp, Artificial sequence
  DNA replication origin
cgtgcgcgctccttgacagcagccacagtgagctcaagtgcgacatcagcgcagagatccagcagcgacaggaggagctggacgccatgacgcaggcgctgcaggagcaggatagtgcctttggcgcggttcacgcgcagatgcacgcggccgtcggccagctgggccgcgcgcgtgccgagaccgaggagctgatccgcgagcgcgtgcgccaggtggtagctcacgtgcgggctcaggagcgcgagctgctggaggctgtggacgcgcggtaccagcgcgactacgaggagatggccagtcggctgggccgcctggatgctgtgctgcagcgcatccgcacgggcagcgcgctggtgcagaggatgaagtgctacgcctcggaccaggaggtgctggacatgcacggtttcctgcgccaggcgctctgccgcctgcgccaggaggagccccagagcctgcaagctgccgtgcgcaccgatggcttcgacgagttcaaggtgcgcctgcaggacctcagctcttgcatcacccaggggaaaggtaagcacgcacgccaccttcctgggcggcctgtgcctctgctgcaccctagggaaggcgagtcagaagagatcatctccatttgacagaaaagaaaactgggtgtttattcagtctttgggggttggtaaggtcttaggttccagggcacaggataagggggagatgaggccctgacaaagggctgcagccacccagaggggacacattttactaatttacaagactctgtggattgacctagcgatgactcatggggaacacgtgaaagttgaaaaactgcaaagctgagaatcagacccagtatcattttggcgccagagggaccaagcacttcaggaggttctcttaagccaccggtgtctcggaacagagaagtcaattgggacctggggttacggtagaagggggctaagaaaacctcctggggatggttggatgcttacccaaaaccatacagtggctcagtggaggagatcccttgtctgcaggatgacctgctgtctgccaacctttgcgcgccctgcctagtgttggacgcttgagaggtaaggagacacagactagtttctgatctcaaggagccagagccacttcacgtagctggagaatgagacagtgctcagctctgcaatccaaatccgggagatgtagcagctgtgtattagctggaacaggggggctttcaaaataaggggtagggggagtgtgccagagagtctccaggagtctttgactaaatctccaagctggaatgtgagctctgagcagctagtataggatgcccttactgggaaaggggagggaggctatggaatctgaaggcacctgggtagggtgccagtgacaaagagcttatttacttctcctggagctggacatgggtcatgaaggataatcttagagggcctggacctgtgccttctccacctaggtagtgaatgtcacccatat

SEQ ID NO: 26673 - DNA, 1063 bp, Artificial sequence
  DNA replication origin
aaccaaaccaaacccattctcccattaccacccagagatactgtcaacgttttgagctcacaggggaagtgtaggcttttcacactgtcgatgtctatgtgaagggagtaaggcagcctgaaacctcttgctcctaggtcccatggtccccatttcccttctagctggaaatttgtgctgtgaccagaggaaccagaaatggggtgagaatgcttaggggactgggttataagatcaaaggccggtcttgcagcagtaatgacagttcctaggaggactgtgacatcactacattccactcctcctgggggtgggggaaacctcatcagtgcaatggctgagttgccgatccacgatgggggaggggggacgtggggctgggacccaggtccttggagatgccagtccagagagcccagggaggtcgggcttgggtcagcaggaggggagagcagagtctgctcagggaaccccaggagtcaccagcccaaagtcaccccgggatgactggcgatgctggggggttggggctgggggacccaggtccttggagaggtgagcccaaagaacccagggaggttgggcttggggtggcaggacgtgagggctgaatatggagcaggtatccccagtagtcatccgcccaaagtcaccgcagggtgattggcgagggcagaggctgggctgcttgctgaaggggcggggctgactgacaagacgttggtggggggagtccagaggcgccggggtaggggggcccagcccggtgtgcctcaggagtggtatggactctgggagtggtcttgtcatcagaggggatctctggctaggttggggggccatgacctttttcttggctttttacctttttcttggctgctgccaatttattctgtcgagattcttctaacatcatggggtggggagggaggtagggttggggccacatcagcgaacacctccagtcacctacaaggctgctgtgtgactgagccagaggaggcgtaaccagggccacactagaatgcagaataggggtgtggccttaatgctccaatcccat

SEQ ID NO: 26674 - DNA, 858 bp, Artificial sequence
  DNA replication origin
cagggctgcggtgggctggggaggggggtgtcccttcccagcacgccctgcagggctgtgcgttctggtgtcgggttagactagcaggcggggcgggggggttggggcggcggggcgggggagactagggcttatatcagcccagatccaggcaaaaatggtagggagggtgcggcgctctgctaacactatcaattatgcatcatgttgaacgtggcttcggggaggaggcggctagcagcggggggtgcgggagggaagggtccgcgcgagctcggctgcgcgcagctcagcgggtcccgctcgaagtctgtcggtgccaccgcctgcatttgcaaaaagagtttaaaggcaaagacacgccttccccccccacttcagccgcgcgcctttccttcccccaaattcctcaaagatggtttgtctcacgtgttgcagggcgtaaaagcggcttgcattcaattagcagcgaagctcgcgggcgctggcgggacaggcgcgtgagggtgagttcgcgtgaatgtgtgtatgcgtgtgcgagaggagaacggtaagtgtcccgggtgcaggtgtgcccgtgaaaatgcgtgtgaatgtagcaggggctgaacacattgatgcgattattacctgaccatggatgattgtaaactgtgaaggtcggctatggggagggtgtgagggactgtgtgcgcgaatgtgtttgaacgtggggtgggggaggtggtgtgatcagggacagtaacaatgccagcggctgtgtaaatgtgggggtacgtgggttatgggggtgcagtaggctgcgaagagcccagccaggacagtgggcgtgggatgccccttatgaccgacgtgtct

SEQ ID NO: 26675 - DNA, 775 bp, Artificial sequence
  DNA replication origin
acgtgggttatgggggtgcagtaggctgcgaagagcccagccaggacagtgggcgtgggatgccccttatgaccgacgtgtcttggccttggggagggtctccgtggctttaacaaaagtagaccaagcaggaggcgggagaggctatgcgcgtccccgccaggcccgggagtgcgcaaggactttctccaacctgcagccagagaggtgggggaaacggacgcaaaaggaaaaattgaagtggtactttggggccaccaagtccccaaacttacctgtccctttctttgccccccgccccccgttttccccacagccacaacacatgcgtgtatcttgcttgggctatcttccctgctctgccacgccgggtctggagaaggggtttcagccccaggacatttactgagagtcggcgaatattgggtaagcaatgggggccaccccacaaccttgacccaggtggggttaggtccagcctagggcacctgatggggtgcggggctggtgggggtgctgtctggcaggaaccgggaagggagggaagggaccctcccagaagagcaaaggcagagtgaaggagcaggttcccaaagacaagttgtgggaggggctctgccaaacctgacaggcgctccaaatgggggcagggagtctgtgcaagttcgtttgtgtgaccgggcttaaggtgttatggggagggggtccttaggcaccgcagagctgtggagaaaggcgcagaatctttcatcttctccagcttcattagctagtg

SEQ ID NO: 26676 - DNA, 881 bp, Artificial sequence
  DNA replication origin
cctgacaggcgctccaaatgggggcagggagtctgtgcaagttcgtttgtgtgaccgggcttaaggtgttatggggagggggtccttaggcaccgcagagctgtggagaaaggcgcagaatctttcatcttctccagcttcattagctagtggcagccccatgacctgttggctgaggacgcctctgcccaatgggagccgcctgagggacctgagaggaagctctagtgaccgctttcccaacacacctggtccaaacatgggggagaacctccttccccgtaaggaaggttggcagagcagcccttcttctcccctcacaggagctgcagccccgggcaggtgactttggccttagatgcagtagggcatggggatgggcttccccagatcccacatctcaagtcgtgcagtgcaggtcctcctattgcttctctgctgggtttcggtcacagtggagggctgtatgcacacacaggcacatgcctgtgttcttgtgggtgggtcggttcgtgtgaggacttgtgtccttgtgtctgtcaattgtcacaatggacaggaaagcgctttgtaccgtggtggaaaacacgtacaaatgctggttaagagaacaatgaggtctgcagggtctattgtgtccatgtctgggtgcatatgtgtttgtgagtttaggaaatgtgttgtgagcctcctaattgagcatcaggtcctctaaacccctgcagaagttggcggtttgattatgaagccccgcgtctgtttgtattgttgtgtgcctgcatgggcgtgtgtgcgagtgctgtgcgtgggacaaaggttccagggaggacagccagtcacggacaaaaatgtccttcttgggtaggatccatttcaccagg

SEQ ID NO: 26677 - DNA, 1372 bp, Artificial sequence
  DNA replication origin
ggcaacagcgtcctgccttccaaacccgagggcaaaatcaaaggccaaggcctggccaaggtcagcattctcggggagaccgagacggagccggaggaggacacaagtgagggagaggaggccgaagaccagatcctcgcggacccggcggaggagcagcgctgtggcaacggggacccctctcggtacgtttctaaccacgcgttcaaccagagcgcagagctcaagccgcacgtcttcgagctgggcgtcatcgcgctggatgtggcggagcgcgaggcgcgggtgcagctgactccgctggctgcgcgctggggccctgggcccggcggggctggcggagccccgcgacccgggcggcgacccctgcgcctactctatctgtgtccagcggggggcggcgcggcagtgcagtggtcccgcgtagaggaaggcgtcaacgcctactggttccgcggcctgcggccgggtaccaactactccgtgtgcctggcgctggcgggcgaagcctgccacgtgcaagtggtgttttccaccaagaaggagctcccatcgctgctggtcatagtggcagtgagcgtattcctcctggtgctggccacagtgccccttctgggcgccgcctgctgccatctgctggctaaacacccgggcaagccctaccgtctgatcctgcggcctcaggcccctgaccctatggagaagcgcatcgccgcagacttcgacccgcgtgcttcgtacctcgagtccgagaaaagctacccggcaggcggcgaggcgggcggcgaggagccagaggacgtgcagggggagggccttgatgaagacgcggagcagggagacccaagtggggacctgcagagagaggagagcctggcggcctgctcactggtggagtcccagtccaaggccaaccaagaggagttcgaggcgggctctgagtacagcgatcggctgcccctgggcgccgaggcggtcaacatcgcccaggagattaatggcaactacaggcagacggcaggctgaacctccgcccgtccggcccgcccattcccgacctccacctagggtgcctgggagcagcagtctagggctggcaggacttatgtcccccgtccccaaccttcacctactcctcccccttactactccccaaccttgactaccagggacttctattagggagtgggccgatttcaccagtccctgctacccacggctgccattctccctgcgggctgaatccccttccccgccaagcacagtgtttatcttaccccatgcaagactccacccgcagacggtgggcgatatctatgtccctccattcccgtcgcgattatctgcgaaatccaccccgcagcccgcccca

SEQ ID NO: 26678 - DNA, 801 bp, Artificial sequence
  DNA replication origin
cacccgacccagaccctagctggaaagcgccggaggcggaggaagctgactgtggcctcccgggccgcggctctctggagggctcgcgccctagttcgcacaaagcctgctcgtgactgtgcgactgtgcgacgggatccggatggagccgagcccctccgtcctcgcgtctcggtcctcgcgtcgccccgccccacccgcccctgcttcggcgggaatcgtgtttgcccggcgtgtagtccctgacaagcgtgccctgtaggagaaaagtctgtgtcctgtgaagtgtgaccgtgtagtgtaggggggcgggcgggggggcggatgggcggggagggagggaaggggaggggcgcggcgcggcgactcggggcggggttcttttttccattttgaaagaaagcgtcggggttggggtggggggagtttcagtcctcgggatcagccctctccgcgaagcgcagcacaagcgcgggcctgggacggagtagccccccggagcccgtgcccttttctaaacgcgtctgtatgcagtcaataaaacaatcgatttgaactgggctcggtgactttttgtcaggggacagagggaggaggcctgggcgatgaaggaggaaaccgcggaaggaaggagcccccccagagcctcccgttggaatcttttgagtgatttcctgtttgcgtgaccatcctgtgatttttttgccaggtgtttgcacccagccctgctcttagtgtctccaactccagggtggggtgacaaaaaacgagggcaggctgcaagtgagtagggggaggttg

SEQ ID NO: 26679 - DNA, 789 bp, Artificial sequence
  DNA replication origin
ggagggaaggggaggggcgcggcgcggcgactcggggcggggttcttttttccattttgaaagaaagcgtcggggttggggtggggggagtttcagtcctcgggatcagccctctccgcgaagcgcagcacaagcgcgggcctgggacggagtagccccccggagcccgtgcccttttctaaacgcgtctgtatgcagtcaataaaacaatcgatttgaactgggctcggtgactttttgtcaggggacagagggaggaggcctgggcgatgaaggaggaaaccgcggaaggaaggagcccccccagagcctcccgttggaatcttttgagtgatttcctgtttgcgtgaccatcctgtgatttttttgccaggtgtttgcacccagccctgctcttagtgtctccaactccagggtggggtgacaaaaaacgagggcaggctgcaagtgagtagggggaggttgcaggaaaggaaggcgggtgtctgcagaccctgaacacagggagtctgagtgtgcgtgcaagtatatttgcactcaagggtgtgcggcaccctctttcacttgagactgtctgtgtagtggggtgtggctgtatatggtgtcacactgcccagtttctgtgtctccacatcagcctttgagttccctgagaagccggtgggaagaggatgggattcatagggacaagaccgctgtggcttgcacaagagaagtcacaaataacacaaagtacagagcgggcaaatgatgtaaagcaggaaagggggagaacctggccaggccgat

SEQ ID NO: 26680 - DNA, 986 bp, Artificial sequence
  DNA replication origin
ttgaatgactgccttagctgacagggtccaagccgaagccccttgtagggtattggaaggacagagaccctcacagttttaggggcctaaacctccaccagggacagtggcctgagaactgctttctaccttcttctgcctctcgccccttcctccaggctggggcagggtcctgctcctggggagggagaatgcggaggagccctcctccctggcccagaccttcccttgctcaccctcaacctcactccaggaggagcaggaggcaggcggggctcctcttgcctacccgtgggtctggtttgtgtttaaagagctaatttccgccttgtgggggtgagttatctccttgtgaaatcaacttgtaggaacaaaaagggtttaccaatgagacacatgttgcctccttcatggaaaccctaggagaagaaacggacagattccccttccctgcctccgccccagcccagccccagcggtccgtctcactcggttgttgctgtaatgctggtctcctgtctgtgtgcggcactgcagatgtggcgggcaggggcttgggagctctggggcaggcgctgaaggcaggtatgtgtgtgaagtcaggtgcgggggtgggggtggctcctggccacacccttgcagggctcaggccgccaatggtgctggggcctcctcccccaggaggggggctttgtcaaggattatggtgtatttccatcaccgaggcccaaaggggccagaaaggggcaggctgaggctgggggaggggctcaagggagcccagctgggagggcccaggcaggcagtgcggagctggccgtgggctgcctaccctttcatctctgcaactccttcctccctgggcctcccttctggtgtgtctgtgggtctgtctaggtgggcttgggaaaggggaaggaaggggcgtctctttaggcagctcagactggacaagccttctttgaaaatggtcctttgaacacacg

SEQ ID NO: 26681 - DNA, 819 bp, Artificial sequence
  DNA replication origin
tgtgtgtgtgtgtgtgtgtgtgtgtgtgtgtatgctggcggtgggcacagcctcagcagaagcatgctgcctggacggggctgacctgctcgggcctgaggcccagagggtgggggctgggagtcaatctctggcacgtgcctgtagaggggcactggtggctgggggaggggtggcagcagagtctctaactcgagttaagagagagattaatatattcaatccgctccagggtaattgagggaacaattggagtgtttttctaaagcccataaaactgcctcatttgcaaggaggagctgactggcctccagtcctctgtgtttggtgaagcgcaggaaaggaggaggagggggaaccccagtacccaagggctgggacatcagcctgggaggggctggcagtcctgatctaacctgttctcaccttccccacctcccaccactttgttggtagcagcccaagcattgctttctagagcctctctttccccacctgtgaaatgggccagtgacaactcccctcaccaggagagcagagggagtggcagaaggggaggcttcagaagatgagggaaaccagctaacccaagggtccagcactgaggggatggggcatgaacgaagaggtgcccagttccccagccacgccagcccccactcacacccccgtgctgcacccctgagattaaacgggcagtaaagagtaaagttaatgaaatccacatcatgtgcctctccctgcttgaaccattccagtctccagggcaatagaaatagtgtatgcaatcgcgagcaataaaaggcataatgaatttaa

SEQ ID NO: 26682 - DNA, 1582 bp, Artificial sequence
  DNA replication origin
cagttgctgaaggccatgtccacactggggccatggagcccagaccagcccagaccgtccctgcttgtgatggtctcccatctacaccaaggagatggcagtgacatctgtgacagaggagagcttacaggagtctcttttcctagccccaggtctaggaagccttcctggaggtggtgatagcctgagctcactctaggagggtgagcaggtgttacccggggtaggggagagggctcttgggcagaggagacactgtggcaaaggcagggaggagagagagtgtatgatcaggaacaaagtcggtgacttcctggagggcagagtgctggttggggagtaagtaggggtgtggccaatctcaggagcttggattccatcctgcaggccagtgaagggcctaagctggagggggtttgtggcaagatgcctcaggccaccaagatggacagagaaatgaatggaggcccagagcagggagccagggacccttgctgggtggaggcagaccaaggaggactcagcatgacagagtgaagtgaacaacgaagaggagggttggggatggcagagcaggaggttggcagggggctagggtctttgggtggaggaggtgcatgcctgtagtgtggaggaggaggaggtgggggaggagggggaggagtgggagaagtctggggccttttggtagaggtgcatgcctggagtgggaaggaggaagaggggagaaggaggaggtgggggatgaggagaggaggagctggggtctttgggtggaggaggcgcaggtctggagtgggaaggagggggagctgggttgggggaggagcgtgttaggggtgaggtacctgcagggcctcaggtgcaggaggccagcagtggctgatggtgatcaagcctggagtgaatcctggtgggggacaggtggcaggacagccctggttccattggagccttgggaagggagcagattttcagcgtctggcaactgtggagtgaggagggggttcaaggacaaggggtggtaggagaggagctctcaggactagcgcaattgccagagaggtaggaggaaaagcggcgagagcaggctggcaagagggcttcaaaaggaggacaaccaccttccgcttgagtcttgcggcttggatgatggagatgaacccgccgctagagatggtctgaatgggacacaaagcaaaactcaccttcataaaaacattaaagaactggcaagtgagtgaggaattatggggcagagataggggcaggtggagacccatacagcgggatacttcagagcaataagaaaccatgatgtgggtgaacctcacatacatcaaggtgagcaaaagagccgtgtgcaaagcaatgtgtatgtcacggtgccctctccatgaaggtaaaaatagaaaatttaggccagagtgattcgagaggcatgctcaggtagcgacagtataaagaagcaaagcaggtcaggcacagtggctcacactttttttttttttttttttttttgagatggagtctctttctattgcctaggctggagtgcagtggtgtgatcttggctcactgt

SEQ ID NO: 26683 - DNA, 1360 bp, Artificial sequence
  DNA replication origin
gacatgggagcggtgggggagccagagacagacctctcagcacccctgggacaggaggggctctcagtctctgcaggaaagaaagcaagacattccataggcaccataggcaccaagacattccaaaggcacaacattgatcagagacttaagactatcctgaaggctctccactcatctcaggagaaatttcccaggccttagttgagcattgaaggtcttaaggacttaaggacctggctcctgtgcccctttctgctttgttttacccctcccttctgtcctctatcggccactctgaattccttggcaaccagactattcacaggcaactctaggagagagatactattaagacaacgatgcacagagaggttgagcagcttgcttaaggccacacagtcagtgagtggaggagcaggggatggaatgcactggagccctgcccctaacctccacgctatgctgctctcaggacacatgggagggggcgggtttaggcggggagagcagggaggggccttttcagaatttaggggacagaggatggtggcctgatgggcagggctcggggtctgggaagagaggggtggggtttggagacacttggaagaaggagcagggggagcagcagtttgacgctttgaagactggatgaaaggggcctggggtgaggggcaggggcagaggaagctggtggggttggatttgggtgtggcatgggtgtgggcctgggggccacccagatggtcgagttgtgggaggtgggatgctggggctcaggagtggagccccttgggattgccagctctgtgcctaggactgagtgtgggcacctggcgggaggtggtatgtacagtgagaagtcccagggagcctccacatcagggctgtctcagaaactggtggggctaaggaaccaggcgaggtttaggggagctggacacctgtccaggagaggaccagtaggggggacagtatccattggcacacccagggcagagggagtagtagccccagagacttgagatgggacctgtgggtagaaaaaaaagaggaggtggggcgtgatgactcatgcctgtaatctcagcactttgggaggccgaggtgggtggatcatgaagtcaggagttcaagaccagcctggccaacatggtgaaaccctgtctctactaaaaaaataggctggctgtggtggctcgtgcctgtaatcccagcactttgggaggccgaggtgggtggatcatgaggtcaggagtacaagaccagcctggccaacatggtgaaaccccgtctctactaaaaatataggctgggcgtggtggctagtgcctgtaatcccagcactttgggaggc

SEQ ID NO: 26684 - DNA, 820 bp, Artificial sequence
  DNA replication origin
gccctgagattggaacagcagctggatgcaaaatcatcaaggaggatgtggactggatgtgggctctggaggactggcttcctctgagtcacgggtcagagcaattggtgccactgaggctgcccctgtaacctgttggaggggtattgagtcttgtgtcttgccttgatcttgaggccccaggggcaggttgcctggtccccaccacagagcccaaccattaggaggctccaaggactgcagatgaaaagggtcacagagaggagctagagccagatggggtggggtgggggaaaccgtgggacatccagctggctggggaacccactcattcacagcacgtttactgagggccttctatgtgcctagcactgactctgccacatgctgcagagacaatggagggtgaactagaccaggccctggtccctgccctcctggagcttcagctgtagtacaggaggcaggcactcatcactaaccacacaactaaactctacaaagggctcagagaggggtgcatggtgccaggagcacatgtaatgggggatttgacttaggtgagaggtcagagaaagctcactggaggaggtgacatgggttgaaacctgaaggatgagtaggtacctgctaggcaaagcaggggtggtaggggaatgctaggcagaaggaagagcagaaacactggccaggtggtgagcagggggtgcagaggggctaaggggaagccagagtggctgcagtggacaccgggacccaggagtcctgcctttaccatcagcttggtgaaaaagcccctgaagaggagatttttgatctg

SEQ ID NO: 26685 - DNA, 913 bp, Artificial sequence
  DNA replication origin
ggtttgggctggagctagcacagaagcaaggtctgccaggggccaggaaaggcaggaggctgacctcagcttgggggatggggtgggagggtcaagaggacaacaggcgagggaggcagcggctggtctgagtgccccgaggagcctgcccaggtgggaggctgccagccaggccctgggaaggggacttctggggcactgcaccctctctgggagtaccactgagcagggcgggcaggaaggctgggcttattgcgtttcaggaccagtcacttcctctctctggaccacacctttcagatgagctcaccacctacttcagtgcccagcccaccctgatgttgcaggagcaaataaggtgatgaagactctgaaaagcagaaatgtggtattattagtagacttcatatttgacttgctaattcacttcctaaaaatagctacatttattatagcatggggagaaccctatgctagagttggcgccctggattcttggtgcggctctgtgacagctatgctgtgtgaccttgggctgggtcctaaccatttctggtcgtctgatttctaggtggaggctggatagtccctgagggccataggccctgagattggaacagcagctggatgcaaaatcatcaaggaggatgtggactggatgtgggctctggaggactggcttcctctgagtcacgggtcagagcaattggtgccactgaggctgcccctgtaacctgttggaggggtattgagtcttgtgtcttgccttgatcttgaggccccaggggcaggttgcctggtccccaccacagagcccaaccattaggaggctccaaggactgcagatgaaaagggtcacagagaggagctagagccagatggggtggggtgggggaaaccgtgggacatccag

SEQ ID NO: 26686 - DNA, 2469 bp, Artificial sequence
  DNA replication origin
aaagctaaagtaaaggtaagggggattggcagcccgtgtccaggagacatctgaagttttaagtgaggtggtcagggaaagcgtcatcaagaaggtgacatttgaacaaagactgaaagaaggtgaggggcgagctgtgcaggtgtttggggaagggcactccaggcagagggaacagccagggcaaaggcccggggctggggcgtgtctggcgcgttcgaggaacagcagcggggaggctgtcacccctgtccatcagtgcctgtctcttcttctggaaacagggaagggctacacttcttccatttggggttaggcccagctgtgtaatctgctttggccagtgagatacgagtggaagagatgcgtgccacttccgagctgaagcatgcaggagtcagcgagtgattccacattcccttcaccctgcctggaagcaggtgatgctccagatgtccccgacatggtcatgagagaggacgatgcagcgtagccctccctgctgaccctcatgacgtgaagctggaatgagaaatgcccctctctgttttaaggcccagtgagtagggatggtcaccacagcacaccccagcctgcctcaactgataccccaggggaggcctctgcagtgcagccagagagaggagggtgcagggaggagagcagaggatgcaggcaaggaggccagggcacgcaataattccccggcttttcctgagagcgacacaggagccattgggaagcgtcaactggagaggtgcgatccagtgacatatctgaacaggacggctctggccactgtgctgggaacacctgggggcaggagtgaaaaggtgggagcagggagaccaattaggaagctcctgcaatgatccagatgagaaatgatgggggcctggcccagggtgggggcggcagtctgactctgggtctcctttgagattagagcagtagggtttgccagtggatgggagagggagaggggtctgggatgcctcgaaggcttttggtctgagcatcaggaaggagaaagctgccagccgggggtggggagaatgcggtggtgggggaagcgggttggggtgctgtggggagcgggagctggaacggctgagatgcttgttatacatccaagtggagtgtcatgtgggcggctgaggagaggcctggctgggggagggaggacagtcaggcgtctgtttgggtgtggacagtacagacagcatctaacggcttgagactggatgaaatcaggaggggtgaaagctggtgcccctttcagcatctgggctgaggacaagggagagagaagggagggcatctcaagggacatcctggaggtggtctggacctcaatagccagagggtggggggcttgaggatgcaggaggaggggcaggctaggggtgggagaggtctgtctcccagggtggaggcaagggaggggagaaaggccaaggacagacccctgggtggggcttctttgagggtggccccaggaggaggaagtggaaccttgaaggggacagtgatggagtgggcagggaggtgacaggaaatctgggtgggcgtttcaggagccaggagtatgggcacatgttttaagaagagaaagaaaaaagggtctgtgctttggaatggtgttgaggagtggaggcaggggtggcagtgaagtgccccagacataacagcagagaggtgatcagtggcctcggtgggatgttggggcaggggttagatcccaggaattaaggggatggggaggagggggttaatggaggcagtgggtggagaccgtgctttccagagccgagggcagaggctggaggtgtgggggtgtggggctattgagagaggggtcctgtgggatgggaaagactcaagcagctggtttgatgcccagaggcagcagtaggcggtgggggaaggctgagaagccagggaggccaggcagaatgtcggcaggtgccccacagcctcagtggctcctgagtcctgaggaaggaggggagacaggctaaggtggtgatgggagggggaacacaggcagaggcaaggaggggcagaggcaggagtggagggagcgtcagccgctttgatagataactgatgagaccatgtggtgagaaacccatagaacacaggggaaggcctccaggtagggcaggcctgcaggcacagaggtggaagcaggagtgtacgggggcaggtgggtggccttggcaaagtcatggaggcagggaagcctgtgggactttggggagcaggatgagaggggcccagaagagagaggctggggcctgaccatggagaccagcctgccaggcatgggcatctgtgagttgctcagcaggctttgggtgctgctggaatcttggccaagctctgcctgatggaagatgcccactgtccctgcgtctacctcctgcttgggcttgggagggcctccaggcgttcacatcctctcca

SEQ ID NO: 26687 - DNA, 834 bp, Artificial sequence
  DNA replication origin
gctgacgttgccttctgatctcgtttttcagcagcccccaggtctccgtggctgctgtgcagaaacgcgagtggttgggggaagtccacatgatgctggccttgaagagcctcctgccagccaggcctcaggagggctcacttccccattgcagaactcctgcggagacccaggggcaatttctggtctttagcacagggcctctgaggggctggcttttcctaggggctgccctggtgctgtggcaccgtggggtgggggatttcggcaacgccaggggctcgacatggctgaaacttctttggacagctcagctaccccaggtagaagcctctgtccctcccggagccaggcctgtcccagcttcgaagtcagatgttgggacatgctgtatgcctttgggacgagtagccccgtgggctcagagctctgacagtgaacccagatggggttgctgtgaggcactgggcgggtctaaacaaacaaggtgctgtgtgagtgcataggtgcgaacaggctgctccaagggactcttgaattgtctttgcggacaagtgggagttagctggaaaagaaggagctgcgtggtcagaggcgtggaggcaggcagtggaataacccatgtggagaactgcaagcatttccacatgactgactggagtgtgagggggtgtaggagaccggagggcaggcggtgggcagggggctggagaaggaccctgagggctcagccaaggagcaggacttttcctgaagcagcagaggcagagagccaggcccctcctgagccctctcacttctgtgcagggacacctcccagtgaagtaggcctgg

SEQ ID NO: 26688 - DNA, 1220 bp, Artificial sequence
  DNA replication origin
actcatttctccctcccactgaccccaggggacgaggtgtattccaccatccggaagcaggaatacaatgggaagatccctcggttccgccgcatccggggcgagagtgagctgtacaccagtgatactgtcatgcagagtgagtcaggctccggctgggctgagggtgggcaagggggtgtgagcacttaaggtggcagatgggatcctgatgtttctgggagggctccctgagggccgctggggccatgcaggaaagcaggaccttggtataggcctgagaagttagggttggctgggagcagaggaacagacaaggtatagcagtgggatgggcccagccctcttcaggaacacaaacagagggagccccagacccagtgcagggtccccaggagccaaagtttatcctctgctgagttcacgtggaggcagcccccaactccctcctcatcagggctctgccaattgagcagaagtgacataggggcccccagggaccttcccccagtccccaggcatgaagtcattgctcctgggccgatgacatctttgtaggaagagggcaaaacaggtgtggggtggaggtgcagggtctagggcccctcggggagttggacctgatgttctgagtcctattccagatctgatttgccatggtttgtgcagacccgaaggagggaggagagtgtgcagggttgggatggtctcccgggcaagcttcccagccttacgcccactcgcctctgtccctggcagacccacagttcatcaaagccaccatcgtgcaccaagaccaggcttacgatgacaagatctactacttcttccgagaggacaatcctgacaagaatcctgaggctcctctcaatgtgtcccgtgtggcccagttgtgcagggtgagcaggggcgtgagggctgctggctacgtgtctgtgcatgaataggcctgagtgagggtgagttctgtgtgtccgtgtgcatgtagaagttgtgtggatgtatgagtgggtctgtgtcagggactgtgggagcagctgtgtgtgcatggagcatcatgtgtctgtgtgtgggtaaaggtggctgagctcctgtgcacgtatgatggcgtgtgagcgtgtgtatgatggggtgtgtgtgtgtgtgtgtgtgtgttttgcctgtgtgaatgtgctgtgccacgtgtgtgggtgtgtgagtcagtaaatgtgtgtctgagt

SEQ ID NO: 26689 - DNA, 1695 bp, Artificial sequence
  DNA replication origin
gctggcacaccagagccggctgtaacgctgcggcgagcgagcggcgggggccggagccccggctaagtcgcaccaagtccctggcagccaggagccgcaacgcccgggcgccaggggagggggcgggcccctctctcggccccgagccactctgggtcctctggctcgggggcttcggcggaggacctttccccgcctgggaccccaacccgggtaccctccttttgagctgcgggctctgctggcgcgcggggcgcaggctgggccggcaaggggggcgcggaccccttgccgccgccgccgcgcttcggcagcgggaacaaagaccccgccgcctgcccccgcccccgccccggcccggagctcgggccaggcaagggggtgggcatcctgcagcgagcggcgggacatggtgcggtgcggcggcttggggtaccagggcgctgcctcagcaatgccgggaccggccgctccccccttgcccgcacgtggcagttgtcaccagaaatcggctccagcgttggggggcagtgcccgttgggtggggcacggccgttgggacccccaggcggtggatctagggcgggggtgcagcctttaggccagggtagataataagaacctgggggactggagtctcccccagggcacctcagtttagaccctgtactatgggacagaaagccggttaggcgggggtttgaggctttctgccgcgaggaactgatctcccctcccctgcattgcacacaaatgcctccccgcccccagtccgattcggctctgtccccaaatttggcgtgtctgcggcccccctgtcgtgatggtgggggactcgcagtgggggctgggggaactggtcgggtctggccccaccgggagccttttgatgcctttggcagtttgcagggattgcgggagtctgagcattatctggggcaggtattattagcagaggggaaaaaaaaccatacacaaaacgagtggcccgaactgccgcagtagctgagggaatgtgacttgcccaaggtcactgagcagtgtgggagcccaggtgcaggcaggggctctgatctggcacaggaccagtccaggttctgggttagggaggggagaaggatttaggtggttcagggaccatgaatgaggtgctctggggaccagctcggctacccagcctgaggtgctcctggaggaagccgagcagtgctgctagagctccggccgcctgtacatggaggaggcctgcacacccctctgccatcccagctccagcccaagcttcctttgccctcccagcagctttgccttccctcagtctccttggctgtcttggacatcatagcgtgtgggcactctggaggggacaaatggccacatctgagtgttctggaatctttccctccatcaaaccccttgcattttgactctgtttgcctgtcccaaagtcttcccatgaccccccacccccaccccacttaatgcacacccacttcttagcacttaatgcatacatcccatcctgggcacttagttcccaccctgaggctatttaaagttgctttcagtcctcttacccacttttcgaagctcccagcacagctccatggcctacccccccgcccgcagttcactgctgtagccacactggctgtgccctctgcttagtaatgcactgttgagccccgctggctg

SEQ ID NO: 26690 - DNA, 1679 bp, Artificial sequence
  DNA replication origin
gagtggaggactggcagagatgaggtaggtgaatgtgggttatgtgttgtgagttgccatgcacatgggcagtgttatcattgattttgaatccatttgaattcttagttccaaaaggcagagacaggtgatttcttagtttgccctagctttgcatagagaggacagacactgagggcaatacctgtctagcaggtgaaaccgaatgtccatcttagaggctggcctgggccaggctccactgctggcttcagggccacaggcttaggtgcaggcctgaggaggagctcttagactgtccacagcctccctctctggggcagtgtgcccctgtgtatcaggaggctgttggcttcacccagtgggccaggaacctcactctgcactgtctctggaggtaccttgagtttaccttcctggcctgctggggtgcctcaggactctgagggaagaaggaggggacaactggaagcaaaatgtagaatggtaaagccaaacttcttggtagcaaaactttcctggttccaggaggtaaaaacaacaaccaaatggtcctggccccatggagcagggcagagggcagagggcagccagcccaccgcctttgctggtgtctgcagtgcgtgaatcgtgtctaggtctgtgagttctgaaggttggatgttcacctctactccttcctcggcctgtctcctctcagtgcagctagacatccagtaaacactagataagtacttactgagctgggtggattttccattcatggttccctggggcacaagtggaagtggtaggtctgggccctgtctggtctagagagaggagacccttttacaaagggcaggcacgtagttctgagaggaggagctgatggcagagctggctggactgctcaggtaactgcagagggtctgggcctggaccccccaagggagtccccactgaatggtcaggttgcctgagatagctgagccctaggcactttgcgggcagagatccccttaagctgctttgaccctccctcccccacagtgagtggggcacgggggatgctcccctctctacttggggaaggggccttcctaattatatccccctccactcacatggaaatgagtttggattttctgagcgtacaccagctggcttggggggaggcagcccagaaggctgctggctgggaaagggaggagaaaggagagggaggggaaggagccaggccaagatgaaaaatttccagtgttctcccaggcaaagcaacagcgggtccctgagtgctccccacatatcatcgttgtgcctgctggtaggctcagcagggagccgtgtccacttaggcgaacgcatcctccgaggaccatagtcctcagggtgcgaaccacttagctggccatagcaaggttgttgggtgttggactcctctgcgcccttggagagaggtcctccacgacttctacgccaatctttttacggggtgcggggagtggaactgaggcccagagaggggatagggcctgccgcccctggcagaagaccacaagtctggcttgtccgcagctgggctttccccgtagagttgcccgggagagggtggcgaaggttcccccagcagttccgctctcgctcaggaaagccagtgaggcgagaaaaggctgcgaggggcggggggaggggcgggg

SEQ ID NO: 26691 - DNA, 2312 bp, Artificial sequence
  DNA replication origin
cagttcccagaacagagccgtccccacggtttccctttcccttctttgttggctctttcctccaggggcttggcaagttggctttgcttcctgtggccatgttttgagtagtctatgttgagtctgataagtgcccccactgagcctggggctttccatgagccaaggactctttcctcaccattgtccctttcatcctttcttcttatttttattattttttttaaaaaaatttattttttttgagacagagtctcgctctgtcgcccaggctggggtgcagtggcacgatttcagctcactgcaacctccacctcctgggctcctgcctcagcttcccaagtagctgcgactacaggcatgtgccaccatagccagctaatttatgtatttttagtagagatgaggtttcgccgtgttggccaggctggtttcaaactcctgacctcaaatgatccacctgtcttggtcccctaaagtgttgagattacaggcatgagccaccgcgccgggcctcctttcatcctttcaacaaacattgactgagcctccactctctgccagataaacatgacggtatctttgctctgacaatgctgtgttgttggtaagatggacaaacagatgattgcattaaagcctaatgagaactgggcgaggcaagtctaggggctgtggcgctcacaggagagggggctaacgtgggctaggggtgggggtgtgagggtgagggaaagcttcatggagaaagtggcactacgctgagacctgaagggtaagggagaattgggcacgaaggtatatgtactgagggggctgggagtggggagcaaacctggcttttgtagccctgtttgtcagggtggcttgcaaggcaagtgggtgggcagaggctagatcatttgaagctatgtaaggaatttagacttaccctggacaatgggagtcacagaatggcaatcgggagagagtccaatgtgtgttttagaaaggtcattctggctgctgtgtggtgagtatagtgggagtagaagactgagggagggcaggcatgaggaagccggggaggaggctgtggcagtgatccacttagagctgctggtaggctgacctgacggcgtggcagtggggaaggagaggaggaggtagagaggctttaggagttagaattgataccagatctttgggaaaggcgagtatactgttgtctccactgaacagatggggacaccaaggttccaagggttgaaatcatctgcccacagtctcatgggcaggaagtggacaagtggtcccagaaactcaggtctgtcttactccagagctggtgcccttcctcccactgcccttggcctctgaagtgtggaggaatgggagatgatgagggcttagatccggctgaggagctagggctttatcctgagggcaaagagcacccctgaggcagctgcaggcagggcagtgggggaccagatctgtgtgtgagataatctgacagctgtgtggaggctggatttgtgggaagtgagatggggtaggcgaccagctaggaggctggctggatcctccagatgggacatggagggggcctcaactggagctgctgcaggggagctgggtggaggggagctgctaggtgtgaaggacagactagctctgggggctgaaagtggggaggcaggcaggatgtgagcaggcggatggtggtgcagcagtaagaataagggactggggtgacaatttggaatgaggtgccataggacagccaggtggggatgtgtataattaaagacagttggatgtctttgggctgaggtagtgatcaggaagttctaagttgaacactgggcctgtgtcatgtgagaaggcaattaagcttttcagagaaaggtagaggaaaagggatacccactaaggagttcagctttatagaaaatggtgactgatagatgtgaggcatggaacgggcgcaggatctgctgcttctgggaaggtgagagcaggagtcagcaaagctgagggagtgaaaggacctggacaaagagggcatgctcagtggggtcagatgccacagacaaacctagtaacagaagggctgaccttggacttgttgacttgtgccttggtgaccttggggagacattccaatggaaccggagccagatagcaggggttgaggactgaataggtgaggggcagtggatgcagagagggcaggggaccttgcttgtgagggagaggatagtagttagaggagagatgggattgagtgtgagtttttgcagttcagcagaggtgaagttggaagtgat

SEQ ID NO: 26692 - DNA, 1167 bp, Artificial sequence
  DNA replication origin
gcattaaaattgtttttataaattgatgcccacatcaacatggacaaatatcataatcgttatgctgagtgagagaaaacagactcaaagggctacatactgtattgagaggtgacagcgtgctggcagtcctcagagccctcgcttgctctcggcacctcctctgcctgggctcccagtttggcggcacttgaggagcccttcagcccaccactgcactgtgggagcccctttctgggctggccaaggctggagcccactccctcagcttgcagggaggtgtggagggagaggcgcgagcgggaaccggggctgcgtgaggcgcttgcgggccagctggagttccgggtgggcgtgggcttggcggccccgcactcggagcagtcggccagccctgctggccccgggcaatgagggacttagcacccgggccagcagctgcggagggtgtactgggtcccccagcagtgccagcccaccggcgctgcgctcaatttctcacggaggcttagctgccttcccgccgggcagggcttgggacctgcagccccccatgcctgagcctcccacccactccgtgggttcctgtgcagcctgagcctccctgatgagcgccgccccctgctccacggcgcccagtcccatccaccacccaagggctgaggagtgcgggcgtatggcactgggactggcaggcagctccacctgcagcgcaggtgtgggattcactgggtgaagccagctgagctcctgagtctggtggggccttggaggacttttatgtctagctcagggattgtaaatacaccaatcggcactctgtatctagctcaaggtttgtaaacacacctatcagcaccctgtgtctagctcagggtttgtgagtgcaccaatccacactctatctaactgctctggtggggccttggagaacctttatgtctagctcagtgattgtaaacacaccaatcggcactctgtatctagctcaaggtttgtaaacactccaatcagcaccctgtgtctagctcagggtttgtgaatgcaccaatcgacactctgtatctggctactctggtggggccttggagaacctttatgtctagctcagggattgtaaatacaccaatcggcactctgtatctacctcaaggtttgtaaacacac

SEQ ID NO: 26693 - DNA, 1300 bp, Artificial sequence
  DNA replication origin
actccccgcggaagtgctcacaccggaacccctctgtgtccgcactttgccattggccgaggcttccgcccgcttccattcgcttcctcccacaactcagtcgggctgcgcggtccgtaggagtcacttccgcctcgtcccaccccgccccccggtccctttctagcagcttccggcttcggtcccgccccgccccctgtggccccgccccgcccccgcccccgcccctggctggcggtccagccccgcggcgccgcttccggtgcgggccccgccccggctgtggcccccggctgcggaggagtccgagacgcagctgccgcgccggggcctgagctgccgcctcctccgccgcccgaaaacccggagtgccccgcacaggtaagtggcccgggtccgggctccctcaggcatggcgggagaggaggctgcgacaggtggaggggccgaggccaggagccgaggcaggtgtagagagagaggggaatgcgcgagtcgggggcgcggggaccgcgaaggaaagtgagagcgccgcgggagccccgagcgccctgtgcccattagggcatttgagataaagcgtttgagataaagcgatgagaagggtgaggggccctggagctgagtgggcgcgcagataggtggggcgggggccatcggaagagccagcggattggctgggagggttggtagaggtaaaaatgatagggctgaatggggggaggtgaataaagaatggggggaggcgtgcaggggtgaccgggaaggtgggctgtggggcttacaggggcccggggccaaaagaatccggcagcaaaagcaggggaatggtcagcaggccgggttcaaagctgcaggtagtccgttgtacccggcttggtggtccgggaactttaggggaaatgggggaggggcccgtgtgaagggatgaagaggtttagatttgagacataagttctccaaatgtaggcaggtggcattgtttggatcgctggctgcttagggactgcgggaaaatgggctctttgggggagggtgtgtgtattgagttgtagaactgagtcatctcagtcttactataagaggctgtgggagggacacctccccctctgctggggacagcattcagagaagatggtgccacaagacaagaagcagttgttcagtgactggcaggacttggttgagaagttattccgatcgtgattgattgactgtaatgactatgaggacatttaaaatgaacaccgaattatttgctttattctgtaattttctttgacccaaattgttttcattt

SEQ ID NO: 26694 - DNA, 727 bp, Artificial sequence
  DNA replication origin
tttccagggaggtgaccctggggccaaggctcagaggtgaattaactgcctccagagaaggcaaagtcagatgaggcagacagaggagacagtaaggacaatagaacaaggagggcatcagagcagctgggcctggcgggcagtgaactgagccctaagcttggtggaagtggaggtggggggcaaaagggagaccaaaaggggtgagaggagctgtggggtttgggaggatgcagggcagcggcacctccccagtgcccttgagatatgctacagacctcaactccacagaggctgaggacccagacaggagcttgggcctgaggggcagtggaggtggagcaagcctcctctgaggtggggatgggagtggaggagttacccaaacctcacctgggggcagatctttctccaagtttctgaaaggtgtgaaagtcacaaaagaatgaagctctaagggtagaatctcaggcaggatggcctccaggctgcaaagtgtggagagggagacagctgggagatggcttctgttccacctcagaaaaagagagttgcttcgtggctgggaggtagggactcctggattctcagtggtgggcagttttgtgggaaggtgactaacttaccccatcagagcctatagctcagggcagggctggggacagaagcttctctgagaacatccatcccggggacagaagcttctctgagaacatccatccctcag

SEQ ID NO: 26695 - DNA, 855 bp, Artificial sequence
  DNA replication origin
gctgcaaagtgtggagagggagacagctgggagatggcttctgttccacctcagaaaaagagagttgcttcgtggctgggaggtagggactcctggattctcagtggtgggcagttttgtgggaaggtgactaacttaccccatcagagcctatagctcagggcagggctggggacagaagcttctctgagaacatccatcccggggacagaagcttctctgagaacatccatccctcagggctagtatcctggagccatggaaactcaggcaacactaagtggtgggaggaggagacaccagagaggcctcctactccacctcatctgagctgatgaaaccccgagatggaacctggctagtgtggtcgaggccatgggtaccaggcaggaatggcatctcagatggcctgggatttttcaaaatcttcagcttttgagataggaccttagggggcaggacctcagcagccaatctgggtcacccactgtacactgaagcggctcctaactttcttttttgagacggagttttgctctcttgcgcaggctgcagtgaagtggcgcgatctcggctcactgcaatctctgcctcccgggtttaagtgattctcccacctcagcctcccgagcatctgggactacaggcgcgtgccaccacgtctagctaatttttgtatttttagtagagacggggtttcgccatgttggccagactggtctcgaattcctgacctcaggtgatcatccacctcagcctcccaaagtactgggattagaggggtgaaccaccgcgcttggccgattttttgtttattttttgagacagggtctccttctgtcgaccaggctggag

SEQ ID NO: 26696 - DNA, 771 bp, Artificial sequence
  DNA replication origin
cactccccgctccgagcgcctcttccgcttccggctgcgacctccgcccgtggcagccccgccccctcgcgtgacgcagccgtcgccagcctcggctcgacccggctcggaggcctggccgctctagcccccgactcgaaggctccggggcaccagccctctccgctccggcgggcgccgcggcctaggagactagttccgggagggccgaggggacgagcctggcccggcccgcctcccgccgtgtcgcggcgcacgtaggtcccccgacctgacaggtgcgcggcccgggccggctgggctctcagagccgagaggtggggccccgacctggccgtggggctgggcccgctccgtcgccccgaccccgcgtggtccgccaactccctcctgcgcgcggagaggacgggcattgttctcggggccccggagagcgcgagagcggcctgaggtctgtgtgccggagctcgggaaggcggacgcgactccgcttgcgcgaaacgagcgaacgacacattattatcttggtgtgtgcgggttttttgaaagccgtggtggcgctcccagctcgccagtgcgtgcggggcagtttctgggaagataccctagagctactctggcggggccggagtctggagggaggagatcccctctccttgagccccctcctgtggagcggcttcctgccggcctgcgtggcctctcagttaagactcccccgctagacaaaagccccgccggctgcgtctctgggccactggacagccccct

SEQ ID NO: 26697 - DNA, 892 bp, Artificial sequence
  DNA replication origin
gcgctctccggggccccgagaacaatgcccgtcctctccgcgcgcaggagggagttggcggaccacgcggggtcggggcgacggagcgggcccagccccacggccaggtcggggccccacctctcggctctgagagcccagccggcccgggccgcgcacctgtcaggtcgggggacctacgtgcgccgcgacacggcgggaggcgggccgggccaggctcgtcccctcggccctcccggaactagtctcctaggccgcggcgcccgccggagcggagagggctggtgccccggagccttcgagtcgggggctagagcggccaggcctccgagccgggtcgagccgaggctggcgacggctgcgtcacgcgagggggcggggctgccacgggcggaggtcgcagccggaagcggaagaggcgctcggagcggggagtggggcctagctgcagccggagcctgggagacggtaagtgtgggctggggtccgcggcggcgacagcggcggcggcggccgggggtgagtcggcggggcaggcgcgctggtgccattcggtctcggcctactccctttctttctcctcttcggcccatatcgggccgcgacctctcacccctgacccgctgcttctgccccggagggcggtcactgcagaccctgacctcgaccccacggtgttgaaggcggagcctgaacggcctctggggccgctcaagggtccagtttgggctctgtgcctgcccgcggaatggggtcggggtccgacgtagaagagccagagaagcccttcagacccctcccctacccctggcttcaggcttagtccgcagatgactcctcccttggcggcctggagtttgattctggcccagtccggctttccctctgtccc

SEQ ID NO: 26698 - DNA, 990 bp, Artificial sequence
  DNA replication origin
gcggcggcggcggccgggggtgagtcggcggggcaggcgcgctggtgccattcggtctcggcctactccctttctttctcctcttcggcccatatcgggccgcgacctctcacccctgacccgctgcttctgccccggagggcggtcactgcagaccctgacctcgaccccacggtgttgaaggcggagcctgaacggcctctggggccgctcaagggtccagtttgggctctgtgcctgcccgcggaatggggtcggggtccgacgtagaagagccagagaagcccttcagacccctcccctacccctggcttcaggcttagtccgcagatgactcctcccttggcggcctggagtttgattctggcccagtccggctttccctctgtccccgggtctcccctcggcgccactggtggcggttacaggggatgggactctgagaccccctgggacctggggcggcaggaagggacgcgaacgagggcgcaggctcccctgtgtgttttgttgtggtggtagagccactccagcccggaggatgggctaggccaagctgacagttcaaatcccctggctgctcctccgtcccgcccgggagtctctagctttagttccgggtgtgggtgccctgatgtggagctggggtggaaattgcctgaaccaggcccccatcagaggcggagttggcggccttccagcttcccttcttgatgcccttgaaaaggaggagcgtttcaccgttggtggtggaggcttgcgaggtggcaggtttgaggttgcagtggtagggcagtccagccaaaaataaccatgggtgctggggtggctggaatccgggagggcagccgctgacctggctggctgcacttctagtcagcccagttctctggccaggaacagcaaatgagaagccgacaaggcctgtgctcaaagttgacatccttggcttggttttcttcatatcacctttttcctcattgtgcagag

SEQ ID NO: 26699 - DNA, 1260 bp, Artificial sequence
  DNA replication origin
cttgattgaaggatcggaatggatggcgaaggggcaggctcgctgagcgctcactagcggctcctcgcagcctctaggatcgccttagtgctgattgcaacgcgcggtccctccagccaggacccaccggcccttgagggtccctcttggctcccggggtggctagtgctttgattggcagagcacagaaatccggcggcggggggccacggaaagactcgggcccagggaccacggagggggcacctggcgcggagcccccaccctacccccggctagcttgcgtgcgccggcgacatccctctagggggcagaggtcaggcggcccgtccccgccccacctggcccggaggcgcggtgcccaggcgttgcgtgagaaggaccggaggcccgcgcagccacccagccgacccattccccggcccggcgcgggggctcgcagtcacgcgaggggggagggagtcggggcggggctcttaaagggccagcctcgcgcgcggcgtggggttggggtggagggagaggaactgtcgaagggtggcgggtgcgcgattgaataaggggatgcggtgcaaagggtctaggtctgcgtgtggcttctgcctgcgaggagaggcagcctgcatgtgtccgcattttcggtccacgcctgtggcacgacacgaagccccagtgccatttggcatggcctagctgcctgcctccgacgctgtcccgccctccggaaccttcctgttacagggtttccaggaaaaaaaaagttgtatttgcgtgcctagctcaacctggccccagctaacatcgttacgcgccatccccgacgtgctccccaacccggtggcaccaccatccgtcgctggtccaggccagaaaataatcccctcacctcccattccggtcatatgcggcctcgtgcattgcacaaatatttaccaagcaactactatgtgccaggagctgttcggaggcgctggcgattgacagagaagggaacacagctgacagcactcctaatctcgtggagtttacattctgatggaaggagacaagtaatatgccccaaatctagagaatgtgagagggtaaaaagtgcggttgaaaaaaattaaacagaaaaggcgtacggattatgtgagggcagattgcaattcaaaacaagggggtcagggaaggccttgcggagagaggcaggagtgtggagtcaagaatcaatgtgcatagatatctggataaaaagtgtacctgggcaggtgcggtggc

SEQ ID NO: 26700 - DNA, 1017 bp, Artificial sequence
  DNA replication origin
gtggggcagagacgctcctcactttccagactgggcagccaggcagaggggctcctcacgtcccagacgatgggcggccaggcagagacgctcctcacttcccagacggggtggcggccgggcagaggctgcaatctcggcactttgggaggccaaggcaggcgggtgggaggtggaggttgtagcgagccgagatcacgccactgcgctccagcctgggcaccattgagcactgagtgaaccagaatccgtctgcaatcccggcacctcgggaggccgaggctggcggatcactccctgttaggagctggagaccagcccggccaacacagcgaaaccccgtctccaccaaaaaaatacgaaaaccagtcaggcgtggcggcgcgcgcctgcaatcgcaggcactcggcaggctgaggcaggagaatcaggcagggaggttgcagtgagccgagatggcagcagtacagtccagctttggctcggcatcagagggagaccgtggaaagaggggacagggagagggagggagagggagagggagagggagagggagagctgctaaagattcttattcctgccttcagagtggtgggagctaccaaagaaatttaagcaaggtggtgatggaatgagattttgcatttttgacaggaccactctgggtgccacaggatggagaagtaattggacggagcaaaaggcaaatgggaacctaggtggaggctaagtgctccagggagcaatgatgggccctggatgagttgtggcagtggagctggacagatgccaaagcagatgccaagcagagaaatgtgcctcctattcttagcacagtagcccgagtgaccttgcttctcttacaccccagccatgtctctatctcgcacagaggaagtctcatgtctctcaatggggtgctccctgcacatgcggcagggcgctgtgcctcatgggcatcccatccccctggactacatgccaggagaactccccagtcacatgacctctgcacat

SEQ ID NO: 26701 - DNA, 1000 bp, Artificial sequence
  DNA replication origin
acaaaatgaagagtctcccatgtctacctctttctacacagacacggcaaccatccgatttctcaatcttttccccgcttttcccctctttctattccacaaaaccgccattgtcatcatggcccgttctcaatgagctgttgggtacacctcccagatggggtggtggccgggcagaggggctcctcacttcccagtaggggcggccgggcagaggcgcccctcacctcccggacgaggcggctggccgggcggggggctgacccccccacctccctcccggacagggcggctggccgggcggggggctgacccccccacctccctcccggacggggcggctggcctggcgggggctgacccccacctccctcccggacggggtggctgccgggcggagacgctcctcacttcccagacggggtggctgccgggcggaggggctcctcacttctcagacggggcggttgccaggcggagggtctccttgattctcagacggggcggccgggcagagacgctcctcacctcccagacggggtcgcggctgggtagaggcgctcctcacatcccagacggggcagcagggcaaaggcgctccccacatctcagacgatgggctgccgggcagagacgctcctcacttcctagatgggatggcggtggggcagagacgctcctcactttccagactgggcagccaggcagaggggctcctcacgtcccagacgatgggcggccaggcagagacgctcctcacttcccagacggggtggcggccgggcagaggctgcaatctcggcactttgggaggccaaggcaggcgggtgggaggtggaggttgtagcgagccgagatcacgccactgcgctccagcctgggcaccattgagcactgagtgaaccagaatccgtctgcaatcccggcacctcgggaggccgaggctggcggatcactccctgttaggagctggagaccagcccggccaacacagcgaaac

SEQ ID NO: 26702 - DNA, 1113 bp, Artificial sequence
  DNA replication origin
gcagcccatcgtctgagatgtggggagcgcctttgccctgctgccccgtctgggatgtgaggagcgcctctacccagccgcgaccccgtctgggaggtgaggagcgtctctgcccggccgccccgtctgagaatcaaggagaccctccgcctggcaaccgccccgtctgagaagtgaggagcccctccgcccggcagccaccccgtctgggaagtgaggagcgtctccgcccggcagccaccccgtccgggagggaggtgggggtcagcccccgccaggccagccgccccgtccgggagggaggtgggggggtcagccccccgcccggccagccgccctgtccgggagggaggtgggggggtcagccccccgcccggccagccgcctcgtccgggaggtgaggggcgcctctgcccggccgcccctactgggaagtgaggagcccctctgcccggccaccaccccatctgggaggtgtacccaacagctcattgagaacgggccatgatgacaatggcggttttgtggaatagaaagaggggaaaagcggggaaaagattgagaaatcggatggttgccgtgtctgtgtagaaagaggtagacatgggagactcttcattttgttctgtactaagaaaaattcttctgccttgtgatcctgttgatctgtgaccttacccccaaccctgtgccctctgaaacatgtgctgtgtccactcagggttaaagggattaagggcagtgcaagttgtgctttgttaaacagatgcttgaaggcagcatgctcgttaagagtcatcaccactccctaatctcaagtacccagggacacaaacactgcggaaggccgcagggtcctctgcctaggaaaaccagagaccttttttcacttgtttatctgctgaccttccctccactattgtcctatgaccctgccaaatacccctctgcgagaaacacccaagaatgatcaataaaaaaaaaaaaaaaaataaggacatgcttgaagcctcctcaaaccacgagcaataaatccatcctgcactcttgaaaaaaaaaaaaaaagtatctttagcagaacctaccaggcctgcctgcctctagttctagtgt

SEQ ID NO: 26703 - DNA, 2195 bp, Artificial sequence
  DNA replication origin
gccgcggggctcctcgcgctccacgccccgcgggctccggcggccagaggctggctggggcgggagggacggcgggccgggttacggccccgacggcggcgcagccgggcggtcgcccggctcggaccccaccccggcagaagcccccgggcaaggcgcgggtggggcaggagcgggagggcggcagcgggctcggcggcggcggcggccaacctcggctcgcccagggctccgctgggaggaagctcgcaggcctggcgagaggaagcgcggcccggatcctccgcccgcggcagcgcgcctgcgcgagggggcctgcccggcgcgcggcggggcgtgggccggcggggcggcgccccctgccgggcgccgggggcactgcggggggtgtgtccgcgcccacgccctgcccccacttgccgcctggctgcgttgaaggctccgagggtctctcctcagccggcctgggagcaacctcccagccttctctggacgcagctttcccgctgcagaagcgctgggggccgggcctgggcccctctcctcaggtctgtttgtggagagtgggcctgattcgcagcagaaagccttcattcattcattcaccaacatttcctggcgctgacatcgtggcggagcctgctctggagtctattggcaagaccatttcactaccgtcaaggcgttctcggtcgggtgggggtaggctgacaggccgacagacaacggcaaggaaataattgatcaaagtggagaggtggtggacacggttcccaggaggcagaaagaaaactagggctaacggggagacctcacacctcacagagccgggaccaggcagagggaacagcatgcacaagggcggggagtgcggagggagcttggtggcttctgggatctaaatatagctcaggcggctgccgcttgcagtgtgggtgggggagagtggtgggagatgggttcctgcaaacaacaggggcaaaagagatccaaagagcctcatgggactttcttggagtttatgttcagcctggaggcaataaagaagttgtcagcagctctgtgaccttgggcaagttacttaacctctctgtgctttagtttccccatttggtaaaataggtgatatataatggcaccgacttcttaagtttttgtggggaggggaggaaatgagttaatacgtttaaagtgcttagtatgcagtagctggcacgtgaggagccctccgttaagcaagggctgttacatcactgttaacgaaaagcagggagatgacctgctctgagccacaggagaggacagcgtgctcaggcatgacaggggtgggagagtgcagggtggcgggggaacagaatggggatgcagtgatgagggtgagaccggggaacagaatggggatacagtgatgagggcgagaccagagactccagcgtagggaggaggtaaaggtgggggactttctagggactagaccctgaagcaagggtcaggcttgggtggacagagggaagaggcactcttggggttgggggggaggaagtggggcatgctgacaaagtcttggaacacaaaataagcatgaagaggcccgagggagcgagaagagggcaaacagccctgtgggagacggagctgggagacagtgtggctgcagattgttttaaagagcctcggatgccaggaggagttgcccccaaaaccacaggtcggccctctgacccagggcacccttaggccggtttcccagctggagccagccctttggagagggatgtcctttgaggagacagccagtaagtttcagagataggtgtggtgtaacagaaaaaagatgaatttggggttcaagtctccaagttaaatttcaacccgtccacttactagctgtgtgacttagggctagttacctaaggtctctgagctgtttcctcttttgtaagatcaggctcaaaatatacttctctcatgatagatagtgcagattcagcaagataacggcctgggggtgagggagtggaaagggtgctcagcagagctggtttccctttctttcctctgaggtcaagatggaatgataatatggggccggatggggggccgcctctcagcctacaagaaagcacttcagcagctctgcaaagccttctgggagggagaaattgacatctcccctcccctggctgaatcagcta

SEQ ID NO: 26704 - DNA, 1588 bp, Artificial sequence
  DNA replication origin
ggtactaggagcttgaaacaggccccctgggtgtccccactctcacaatgctcccatgtccccagtctgtagcctgctgccagtggagacagagcttccacggttcccatgtgaccccatttatatcctgaacttggctgctcctgtgccagctgggccataggtgtggcgagtgctgggtcaggactgaccaccaggttgtttcaactcagagccggggccaggaccggaccttcctgccacaccacacagatggccatacaccacacattccccacatctcctgctagctgacccagccacagctggagccggaagccctttcactccctccagccctctgcagggaagcacgtgctcaaccaacaaggtccctctggggccgggctgggggcctgtgtccccagtgggtgaaggtgcctgcctggtttccttccacccacagccatccagccctgtatagctggggatgaaaggacagccagcctaactccactagaggcctggggtagcaacttctccctttgagcctcggttcccgggtgtacaaaatgggcggggaagtgaactggtagttaagctccaaaaaatctgctggctggacacaccccttcctgacacctggtctgggccacaaagagcctaggagaatgggctgcccagggtgccagaaggtgggggcatggtgctaatgctccgttacctccccccgggcagaaggcctgcccagtttcccacccaaagatcccttggcttaggcctggtcttctgagaggccaagggtgacaggctcagtcctaggacctgggcttctaactgctcacccgaggtggctgggccctgggcttgcttgcagcccgcagggtcatggtggggtaatgagggaggggtcagaaccaagcaagccagggcacctgcggggaggccctgtacagggaagggcaggggagtccagcactctctctagggacctggcccatacggatcctcttcctccagactccagccacctcctactctgagctccacagagggggggactcgggatgacccgagaagacgagtccgtggagctgcagggcagtacctccctcatgcactcccttccaatttgggttctgacagtggctcctgggagaattcgaacccgtgcaagggagtaaaggagagaagggagaagtgggagaagaggggaatgggagtggacgcgacagtggcagcaacagagactagacgcgcgacctccaccctcttccctccaggggacactccgggacggccaggcactcacctctcttggggcactgcggtccgggccacctcgccgcgggcggcatcagcggcctgcgggacggtccatgcggtcaggggggaggggaggggcgcaggggtccccagggggtgcggtacaaagaggtatgggtgcaaggagaggggaggagggaccgccaggcagaggcagggggacggacgcacggcccgggtcgcggagggaagaaaggcgggggaagggggcgggagggagtcggggggaggaaacaatgtagccggcgcggccccggcagagttccgcttccgagcgccgcca

SEQ ID NO: 26705 - DNA, 1113 bp, Artificial sequence
  DNA replication origin
ggactgagcctgtcacccttggcctctcagaagaccaggcctaagccaagggatctttgggtgggaaactgggcaggccttctgcccggggggaggtaacggagcattagcaccatgcccccaccttctggcaccctgggcagcccattctcctaggctctttgtggcccagaccaggtgtcaggaaggggtgtgtccagccagcagattttttggagcttaactaccagttcacttccccgcccattttgtacacccgggaaccgaggctcaaagggagaagttgctaccccaggcctctagtggagttaggctggctgtcctttcatccccagctatacagggctggatggctgtgggtggaaggaaaccaggcaggcaccttcacccactggggacacaggcccccagcccggccccagagggaccttgttggttgagcacgtgcttccctgcagagggctggagggagtgaaagggcttccggctccagctgtggctgggtcagctagcaggagatgtggggaatgtgtggtgtatggccatctgtgtggtgtggcaggaaggtccggtcctggccccggctctgagttgaaacaacctggtggtcagtcctgacccagcactcgccacacctatggcccagctggcacaggagcagccaagttcaggatataaatggggtcacatgggaaccgtggaagctctgtctccactggcagcaggctacagactggggacatgggagcattgtgagagtggggacacccagggggcctgtttcaagctcctagtaccctggcggttccagtgtctttcttggttgtggccacagcaggaacagggcaaggacagcaggggtgaggttgaggcctggcaggatcctctggcccaggagagcaggcattgccctggtgggtgctgagcagtgtctgggctcccttggagctgctggcagttttgtcctgctgggtccctgctcacgatttagggtttttttgttttttcacttttttttctggctgtcctgacatgcacagtggaggggacccagatgtcctgggcctgtgagactcccctcacatggccccacacccagccctaacttccttt

SEQ ID NO: 26706 - DNA, 1144 bp, Artificial sequence
  DNA replication origin
tttttcccagcactcagtcaggtacaggcctggggaagtgggggagtctcaacaggaagggacccagggctcgttctccgggcagagcacctcacccaggctcacagaggccagctcagaggctgtgaccacgagggtgcgccagcaggtggctggagggggcccaggctgcacccgcccacgtgtcacctgccttgcaggccgcctggccatccggtacagaatgtattgccaagtacaacttccacggcactgccgagcaggacctgcccttctgcaaaggagacgtgctcaccattgtggccgtcaccaaggtaatcaggtgacgcccaccccaccatcccactgctgggccttccctctgcagggggaggtgggcctgagagcatgtctgggctgccctctccccaggaccccaactggtacaaagccaaaaacaaggtgggccgtgagggcatcatcccagccaactacgtccagaagcgggagggcgtgaaggcgggtaccaaactcagcctcatgccgtgagtaccacgaggaggggttggggagggaaggggccttggtcctcctgaaggagcatcaggagcaagcagggaggccagagtgaggggcttgggtgttggggagggcctcaggaggaggtgcagggtgcgggtgcgggacctcacagagcagggctgggggcagaggcaggagggtggcaaagaagggacagggagcagaagaagagggcctcaaatgcctgactgagcgagtgcgagccacgggtgccaagcagagggaaccccttcagaaaggggagccagggtcagtacctttgggccaccatgacctccagccctgctgctccccagttggttccacggcaagatcacacgggagcaggctgagcggcttctgtacccgccggagacaggcctgttcctggtgcgggagagcaccaactaccccggagactacacgctgtgcgtgagctgcgacggcaaggtggagcactaccgcatcatgtaccatgccagcaagctcagcatcgacgaggaggtgtactttgagaacctcatgcagctggtggaggtgagctggggggtacagagccttgctcccaccctcacacaccctaaacccatctggggccctggct

SEQ ID NO: 26707 - DNA, 1035 bp, Artificial sequence
  DNA replication origin
atgctgggattacagacgtgagacaccgcacccagcccagatctgcattttagaaagacctttttcactgcagtctgggagacggtgaggaggctgcagtcagcaggtagtggggaagaggaggataaaggggctgctgtcctattgagctgagcactgtctgccaggccctgttctaaatacgttccatgtaacttttcaaacaactcttggaggcatataccattaatgctcccattttacagataagaaaactaaggcttggcaagattaaggaaccaggtaacacggtatgaatggcaagaacaaatgtaagaacctgcctatggctagatgtggggatgaggcagagggaaggatatgggagcagttccactctctggtgtaagggggcggtgccacctgggagacctgaggcctggaggaggatgaaggggctggagaagaggaattcagtttggaattcctgggggccttagtgacatccaagcagagatgtccgctgcagagagacacattcattcaagtcttccaggagaggctggctagaagtagatttgagagtgtgcacagggatgtgcttgaagtcatgggcatggaggagcttggtcagggagtgtggggttgaggagaagcaagccctgaggcttatgggggtagggagggagagcagctggcaagggattagtgaagggagcagccaggggcagggggagaagcaggtgggccttggggggactcagggtacaggaggggtcggggagagcaggtggatgtcagcagcatttcaagcggcagagactgggttgagaagagtctcctaggaccaaagaacaggcatagctgctcaggcctttgcgagggcgttttccatggagtggtggggacaggatcgggaagccaagggcttgaggatccagtgggcttgaggggcttgaggatccagtgaggaggcggggacagaatggacaacctgtccaccagtgtggctgtgaagggaggaggagcagatggaggcaggtgagggcttggtgt

SEQ ID NO: 26708 - DNA, 1105 bp, Artificial sequence
  DNA replication origin
gtttttaccccttgctgctacctggatctcccagctgaaatcctagttattagtggcccaggagaggagaaagttggaagaggctatggaacagggttccgggagtgtatgagctcaacccctctcccgggagagcgaccccaccaccgcaggccctaatcctctgtcagcagtgcccagcggagctcggcgttgaaggaggcacgtgggggaggcgggagtggggagcgggcacgtggtccagccttctcagccccgtgctgccccccgcccccagtgaggaggggtttggggaggtgggggcgggcccgggcgggggcgggcggcgggcggtgccaagcgtggggcgcgggcccgcggcgggagctgtccgcgaaacctagtgctgaagtaggcgcggacgtgcccggtgcctggcgcgtggtagcaggcgcccggtgccccggccggcgaagaccatggcgttcatggtgaagaccatggtgggcggccagctgaagaacctcactgggagcctgggaggcggcgaggataagggagatggggacaagtcggcagccgaagctcagggcatgagccgggaggagtacgaggagtatcagaagcaactcgtggaagagaagtgagtgggatcccttcctggctccaacgacctcccctccccacccccacagctgctcagtccatccccgggccagcctcaggtcccaatcccttctcccctactttcctagacacggtaagagaccgggaggtgtcctctacactgcccccagacccatcctatctgacacccaaaaccccgctccagcatcatgctccggccaagggggagtggggggaggggcgaccggacgagggaccgaccggagcctgggacgaggaagggggtgcacgtgcgtttctgacgaaacgataatcccttaatccgatctggtcccagccgcctatgtcttccaactggggctcctctgaacttgaggctctgaaaaaagtggtgcagccgctcagagtcgcggagacagaccctgagatgggggcactcacaaacattgagcacttgtgtgcccgcagtgctgggacagagtttggggctggactctgc

SEQ ID NO: 26709 - DNA, 1360 bp, Artificial sequence
  DNA replication origin
tgtggggagaatgcaaagcagagccaggcccagccttcctaggagcatagtccagggagggaaataaggacccagaaacacgattctagctcagctcagggctccagcgagggtgcaccgggagcccagggatggaggcctcgctccccgctggctccatcatcctgacccatcctgttcctcctcggtctcagattccccacctgtccaacgcgtacctctggggttcctcgcagacccctgggctaggggtaggggtggaggagcccagtgtgatctgtccctgccgttcccttccctgcagctccccttgcggcccctgctctcccgagactgccgggacctactgcagcggctcctggagcgggaccccagccgtcgcatctccttccaggacttttttgcgcacccctgggtggacctggagcacatgcccagtggggagagtctggggcgagcagtgagcagacggctggggctggggtgggctgagggtgggctggaggtctccttgcccccgttggtggtgaattggtgactcacccaacagagacagagggcgggctcaggggagctgatctcccatcttggtgagtgtgggagggtagggaggtggacctgacccctgatctgcccatccccagaccgccctggtggtgcaggctgtgaagaaagaccaggagggggattcagcagctgccttatcactctactgcaaggctctggacttctttgtacctgccctgcactgtgagtcccaggccatgcctgaagcccgtgggtgcagcagggatgggagtcatctgtggctgcagtaggtggattccagaagttctctatctagaattttgtaggcgataaagcagagcgtaaacctggaatattgtgttttgagggattccagagggttcgttgtggggcagggaggggttcgcccagactcctcatatgacctcactttctgcagatgaagtggatgcccagcggaaggaggcaattaaggcaaaggtgggtgagagtccccatgaggaagtgggggggcagggggtaaggcccggagatctcgggggcctctggggaatggctctcttagaattggaacttcctctcctgcaacacagagctgggaatgggtcaggccagccacatttgccccctgacatgtttatagcttgaggcagtcactaacaatgcaaagggagaacttggaggtgggttctggcaagggtagctggtgagacagcccctcctcaggccctttccctgctacaggtggggcagtacgtgtcccgggctgaggagctcaaggccatcgtctcctcttccaatcaggccctgctgaggcaggggacctctgccc

SEQ ID NO: 26710 - DNA, 984 bp, Artificial sequence
  DNA replication origin
gatgtgagccggggaggcgagaggcaggcgggaatgggctctgaactgtctctcttcgtgggtcctgctcctcagctagcgccctgcaattcctgcatgaacggaatatctctcacctggatctgaagccacagaacattctactgagctccttggagaagccccacctaaaactggcaggtctgtgtctgaaacagcagggatgaggtttggagagtgcagaggcctccctctgcctgggctcactcagcagccctggttcttatggagccctctatagagtcctcaaagagtgacaggccgtgaagtctggggttgggccctgtcatcaaaaggtggaagctttctcaggctacccatgctcaagtccagcagcataatgggtggagttagggctcagtctgtggccagagttgggactcactgtgtgtccaggtttaggggtcaatctgggaacagtgccagggttcagcgtgtgacaagcatcagggatccctctgtgggcagggacaggacttggtctgtcatcagaattggggctcaagtctgtgactccatctgtggccacataggaggggtgtggtgggggagtaggaggtggtgacccttgataagatttggataattgacactggaggccagagactgtgatagaacctaagcctggggggacagtgagagggtgggggcttatgcaggtagctggtgtgatcaggtgggcttcctaggaaaaggtgcccaagggagctgggaaggatgggtaggttttataccccagaggcagatataggagggtgttccagcctaatgatgagcagaggcttggaaatagggttgatcctggcgggtctggagggtggagaggagcctggggtgaggctttacaagtcaggagctgaagcagctggaattcaagccctgctgcctctcctcttgcctgcagactttggtttcgcacaacacatgtccccgtgggatgagaag

SEQ ID NO: 26711 - DNA, 2038 bp, Artificial sequence
  DNA replication origin
aacttctaggctcgcggggcctccgtatccccacgtgggccctgcaggaactggcggggcgcgtgacccggcgaggcccagagacaggggaggggcgccgggagccgggcggatccgcgtccccgatgcgcgctgcatttccggcgggcggcgctgggggcagcgtggagccacccagtgctcggcccgccccgcaacccgccggaaccgccgcccgcagcgaggaagcgcccgcgcgggcgcaggcggccggaatggcggggcccggctggggtcccccgcgcctggacggcttcatcctcaccgagcgcctgggcagcggcacgtacgccacggtgtacaaggcctacgccaaggtgggtgccggccgatggccccgtgcccgcccgagctagctcggctggtgccggccggggagactctgagaggttagcgacagtgtgggaatagttaggggcgggaggccggcctcgccccagctgaccctcggcggaggttggagccgactgccacgcttaggtcttaaagagcgcacctgcacccacctgcagggtcagtggctgaagaacaggctcaaaacaggttacctggtgggctgggaggagtctgggactggagccagttgggaggcagagtgggcggttctagaaccctgagtgacatgcctctgccgggagcactccagaatgcaaagaaatggatcagctagccgagggttggagaagaccaggctgaggctgtgtcgggaagccaggattccagaatcagcattcctcactggcctcacaagggaaagctgggaagcccggtgctggtgtgcagtaggtagacccggggaggggcggggtgggggaacagagggaaccagatagagcctttccagtcagacaagggtcctggccccctcaaggcagagtccccaaatctcctgtctcgcagaaggacactcgtgaagtggtagccataaagtgtgtagccaagaaaagtctgaacaaggcatcggtggagaacctcctcacggagattgagatcctcaagggcattcgacatccccacattgtgcagctgaaagactttcaggtgtgagcctggggcggggccgctgccaaagggagctggagaagggacactctcttcaggccgcctctctgcctctaaacacagtgggacagtgacaatatctacctcatcatggagttttgcgcagggggcgacctgtctcgcttcatccatacccgcaggattctgcctgagaaggtggcgcgtgtcttcatgcagcaattaggtaaaggcctgtgacaccagcctgacactctgtcccttgttctctgccccccaccatcccacccctcccccaggcttagagccttggcacgcattgcagctgcctcctgcacagcctgaaattttatggtcctgtttatctcatacactcaacccttgctcaaggacgctgtgggagagatgagggggtaacccctctgtggggtgttcaggcttccatacatagaacataatataaggaccttgtagaacattccagagtcctgtaggtaggactcaagtgctgtgccaaggaaaagagcaggatctcaagggctggggcatccagagaagcttctgagaggtggggagacttgtgaaggggcagagggaaggagggtgggcactcgggtggggtggcaaactcctagaagtggtgtgatcttggtgcttatatggaaaacattagaccagccaggcaggaactggggttgtgcaggcttgaggaggcagatgtgagccggggaggcgagaggcaggcgggaatgggctctgaactgtctctcttcgtgggtcctgctcctcagctagcgccctgcaattcctgcatgaacggaatatctctcacctggatctgaagccacagaacattctactgagctccttggagaagccccacctaaaactggcaggtctgtgtctgaaacagcagggatgaggtttggagagtgcagaggcctccctctgcctgggctcactcagcagccctggttct

SEQ ID NO: 26712 - DNA, 1163 bp, Artificial sequence
  DNA replication origin
gcgggcggcggagcgggcgtgtgtgggggcgacggcgtccgggaggctcccagggcccctccccaggacccgcagctctgaaaggagagctactggcacgagaaggcgcctttggaagaggccgcgttggcttcccaggcctcccagctgcttttcacttttctgaggaagggccttgacctatttattgcatcttaactgtccccgctctccaatcttagcagcggcgcccagcccctaatcctgtgggctgccccgtcctcccaagtccaccagacatgtggacccgtgttgtctgaaaatgtttttatttttacttaagcacaaaaattgagacgtaacatatacatttgtacatagaggggaaaaaataccagaaaggagttcataaaaccccagccgctgccagtatcattcagtggctggggcctgcggctgtctcgggcccagagccggaggctagttttgtgggaaggcaccccagtccacacacccactcggcagcctcgagggacagggtgctggttttaagggtggactcctacgtgtcccatcacagtgacacaccccccagggtgtgaaccagactccactgggtattagggggccctccgagagatggcttatcagtccctgctgagggatgcggttctggactggctggccctgcccttcctgaaagtctggatgctgctgatggggagcatgggcggggcaggtggcatctgaggcagagacaaaggcagccgtccctcggttcggggaggggggggggtagtcacagcaaacagggccaaaccaaccacaccaggacaggcagaccccaccctcctagaagacgctggacgctaggcaggacagcttggggtcagtgtccttggtcccttccagtccccaaatcccaaccaacggcattgtacattcagaaagtctgaagagagtaaggctcagcaaggggagggctccagagggctcaaagtgccatcccctgcaggagggtgcagggggataaagggctattaatccgtttctcaggaacacgaggcagggaagagcttaaggcaaccagccttctctggatccgtttatgaggcagagaagagcttgaggcaaccagccttctctggaagcctggagaccactggagtgacctggggaacaga

SEQ ID NO: 26713 - DNA, 1267 bp, Artificial sequence
  DNA replication origin
acataaaattggaaggtgtcagattgataggcagttgggaaggactccggccacgcctctggctccgtagacgctccgcgcagccaagacccctgaatccccagcagagcgaagatgtggacggaagccgaatgcccacccaccgcactattgtgggctgggcggggggggggggggggggggcggagcgaccccggtgccgtcatagggccacgccctcgggggagggcatcgcgcctgcgccagaaccgctgcctcgctcccggaagtggagggtctacacgaagcgccgctgggtctgggtgcccggaggcagcagcgttcgcggagttcgcccgctggcccccgatcaccatgtcggctttcgacaccaaccccttcgcggacccagtggatgtaaaccccttccaggtagagcccctctcccgccatccagctctcagatttccctagggcccacggccgccgcccgggcctctcgctagagccgggagacgtggcgtaggagggacgggtcatctgcccaatgggagagcgggctttgaggtctggcctatcgtaacgcgtgaggggcgcgactagcagcaggtggaactgcagaggaggcggggcgctgaagtgttggagacagtggggtcttctagcacccggaggctgggctgtgctagggaaggggactggagcaggtacggtcggacccttccggaagtctcctagcgtcagggagaagcgaaatgtggctatcgcattccctcattcttggatagacacctgtcttgagtcactttagaagagggggtgacagcaacatatgaggaggtggtgaagcctctggtggaggggaaaaatgtgggaaaagcccaggacacctgccaccgctccaccaccagccaaactagtgtataaagtacaggagagcccctgagatttgtcagggaaagaaagatgggagagggcgggaaggtagcccaagttgaaaaatggccttgataagaattccacattttggccatgggtctagtttggagtgggttttgaccagataggagagcccgggttagggagagaggagaggtgcgggggactgtgaaaaattctggacccacagggaacgtttgtctgatggaactgtgtgtggtggcaacatagttgagatgcactgacgtgtgagctggcctgacttttttttttttttttgagacggagtctcgctttgtcgcccaggctggagtgcattggcacgatttccgctcactgcaacctctgc

SEQ ID NO: 26714 - DNA, 1153 bp, Artificial sequence
  DNA replication origin
ggaagttgcgcggggggaggccccgggggcgcgctttcaggtcctccactactcgaggcggcgggcagggcggcccgcggtcaccgggttcagtaaccagggtagggcaagggctaggccggggagagcccgccccggagtggcagcggggacccaggtcaccgcaaggacacgagggcgcgggcagtggcaagcaggggccttacccacggcggggccgggggtccgggcggagtgcaggaggcctcgagggtcggcccgggtggttgcggccacagcgcagcggcggagagcggcgcccagcatgacggcgatggcggcgcgcgggctgaggacagagagaagccggtgtaagctcgcgggttgctccggagcgggcgggggccggacaggctcacagcgggcggagcacgtaggcccgcccactgcgactctggcgcgtgggcgggaggagccaccgcgcggccggcggcggcgggggctacggcggcgcgctgaggacaaactgttagcctcgcgtcccgccttgtctctggtcaggtgacgtgcagctgccatcctgtaagtaggaatggaggcgagggaggagcaaccgaccgtgatcttgttcgagtcaggcccaggagggcacttaatcacctcaaaataggaatgacagcaataacaacaaactataataaaaaatacgtactttgcgcccgggcgctgtggctcatgcctgtaatcccagcacttttgggaggccgaggcgggcggatcacctgcggtcgggagttcaagaccagcctgggcaacatggaggaacccccgtctctactaaaaatacaaaattagccaggcgtggtggcgcaacgcatgcccgcaatcccagctactcgggaggctgaggcaggagaatcgcttgaacccaggaggaggaggttgcggtgagccgagatggtgccattgcactccagcctgggcaacaagagcgaaactccgtctcaaaaaaaccaaacaaaacaaaaacctactttgcttagccccgccttctcattgtggcataaaataaaacagcgaatgggggaaagaatgccgctggacgcggttgctcacgcctgtaatcctagcactttgggagcccaaggcgggcggatcacctgaggtcgggagt

SEQ ID NO: 26715 - DNA, 1328 bp, Artificial sequence
  DNA replication origin
cggctcactgcaacctccacctcgcgggcccaagtgattctcctgcctcaggctccagagtagcgtgcgccaccacacccagctaatttttgtatttttcgtagagacggggtttcaccatgttggccaggatggtctcgaactcccgacctcaggtgatcttcccacctcagcctcccaaagtgctgggattacaggcatgagccaccatacctggccatgtttccttttctccttttttttaaaaaattttatttttgagacggagtctagctctgtcacccaggctggagtgcagtggtgtgatctcgcctcaccgcaacctccacctcctgggttcaagtgatttctggctaatgttagtaattttaatagagatggggtttcaccatgttggccaggctggtctcaaactcctgacctcaagtgatctcctggccttggcggctcaaagtgctaggattacaggcgtgaaccaccgtgctcggccttaatttctttatggccagctgttacatagaaaggcaaagagaaaggttagagcaatatttttaggctttatggctggctttgggacaaaggggttctactttctagaccccctcttggggaggagggattctagtttctgtggcatgcctggagggagagtaaggggcaagagacaagagggcagaaggtcagagagaaactgcttcataggccttcactttgtggtattgttttctaagccccagcactaggttggtgggaaacggtgagggcaggtgctttgaaaacattttaaaaatccttttccccgccaggttcctacccactgaagccacactgctagggaggaaaaagagaagggcagatgctgaggccctggagagtcggcctgaagtgaggaagtggcacatgaatggccaccttttctttcctcagtgtgcccagggatagagaatgggagacagcaagacagaatacaatgtctcattaactctgggcagcatccagatacttcaggcctgggagaggtgtccttgactgcccaggggctcaaagttaggatgtagctagtgagataagatgcaacaactgtggaacttgatcaaccctatttcagagccatcgtggattcaggagccctcctgtaggagatgggaaacattcaggtgagagtcctcagaactggggatgtggcgaaaagatccttgactgccagcagcaacctaatttctgagcctctttcctaatctgtgaaatgaagtagtttaactcattttttatgcaagctggtttgtgatataagaatatgtactaataaaatcccttacgcataggcc

SEQ ID NO: 26716 - DNA, 1404 bp, Artificial sequence
  DNA replication origin
atcctacccacagagctgggggctttgtgccagccttctgggtaaggttcagtttattgtctggaggctgcagattcagggacctcagcagggtctgccaccctttgcagtgacctccaggagagttcatcgatgctgtccttccactccttccttcccctcccagaaaaacaatgtgccgctccctttcccttagtggcgatgtacaggggtacacgggcccccatttgcaacagcctctgaggccagggccagcccgggagggcggagtgggggaggagagaggaagaagccagggactgggcagtgccttgcaccattttgaagctgttcagtctctgtgcctgaccctgaagactccaaagactcaggacgcaaggctggaggggaggggagacacaaggggccaggcgagagctgtctctgcacaggcgggtggttagaaaaaaaatgggggacacagccatttttgtgcttgttttattggaagcaagactccagccagctgcagggctcaggggaggaggcctggagagttcagtcctgggtctccctctgggccagcagggggaaaaggggtgttaaaagagctagaaccctcagagatgctcctctgaagcaggggaaagaaaactagaaaggaaaactgtcccagggcggggagcggaatagggcccccacatctcagactctcctaccctcaagcagttaattctcaccccctgccttcctctgtcaacggtgggggtgattccaataactcttctcagcttccatacttcaggtgctcttcgtgaatgctgggtggctttaacccttgggggtcccaaacaagtttccagaatcccactgtccaccattctcccccaaagaaggtcccagaaaaggtgaagttccgtgtcttcacgcaacacgggcataagcagcaattatcgcacgaagtttccctagggtggtcggggatcctctcctgccactcctggggcccctctcttgtcgccttaaggtccatgctacctgtcttgaggagctgtgtccaggttgtgggctccggaggaccgaggagtgaaaggctggaggtacatctgaaggtggaggcgctggcggaagatcctgccggactaggtggcccacagtccggagtttcaggccgtctgatcctcgtccgcaacccctggctcgggttgcgatcgcttcgcggagccttctccagctgcgggttcccctaggctcctcttggacgctggcgcggctggcggggacgagggaccaggatggggattcgggggctggtagccgggctgtcgcggatccagcgcgtccttggaaagtaggatggcgaggccgggcacgttcttaagtacgctgagactagcggccggctcgccaggcgtctgaccctgc

SEQ ID NO: 26717 - DNA, 824 bp, Artificial sequence
  DNA replication origin
ctcccaaagtgctgggattaaaagcgtgagacaccgcgcccggcccctcccttctcttttttaaaacctgcgttcacctagcctcctttcgaaaaggaccccactggatctcaaggggccaatgttgcctgagcgaattccgcctgggaggaagggggcggccacgttggcaaggcatcgtgcctggctcaccctaaagcgcgcagctctaagggtgggctctagggcctgggtggagcgagcctaccgccttttcagaagaggtcacgcccgcttccccacgcgcctcggggaacagcctggcccaaagcctcactcctcacgtcccaggggtggacgggggtccgggagcctcgagctccgggcaggcgtggcgaggctgaagtctgggtcttccgcgccccgcgaggaccacgccgcgacgtaatcgcccgcggggaggcgcggagtggagccgcagccagctcctcccgcactctgctgaccgcgcactagctgtccttgaggcaagaatacttgggagcggaaaaaaggtgggggtgttccccggggcgggggaggaggggcaaggccccagcaagcctcttggaaatctctccctgggaggggacgaggggcggccttcagttgcaaatgggaagggctcggataccggatttgaagcagtgtttgcacggcaagcgcagcttttatttagactgccggtttgtgagggttggctctcagagcgctgatggcgattatagtggaacttcaccttcacctgctcatgcgccccgcagcgcgcccgctcccacgcccgcgtagctgaggacccagactcg

SEQ ID NO: 26718 - DNA, 1046 bp, Artificial sequence
  DNA replication origin
cgcatgagcaggtgaaggtgaagttccactataatcgccatcagcgctctgagagccaaccctcacaaaccggcagtctaaataaaagctgcgcttgccgtgcaaacactgcttcaaatccggtatccgagcccttcccatttgcaactgaaggccgcccctcgtcccctcccagggagagatttccaagaggcttgctggggccttgcccctcctcccccgccccggggaacacccccaccttttttccgctcccaagtattcttgcctcaaggacagctagtgcgcggtcagcagagtgcgggaggagctggctgcggctccactccgcgcctccccgcgggcgattacgtcgcggcgtggtcctcgcggggcgcggaagacccagacttcagcctcgccacgcctgcccggagctcgaggctcccggacccccgtccacccctgggacgtgaggagtgaggctttgggccaggctgttccccgaggcgcgtggggaagcgggcgtgacctcttctgaaaaggcggtaggctcgctccacccaggccctagagcccacccttagagctgcgcgctttagggtgagccaggcacgatgccttgccaacgtggccgcccccttcctcccaggcggaattcgctcaggcaacattggccccttgagatccagtggggtccttttcgaaaggaggctaggtgaacgcaggttttaaaaaagagaagggaggggccgggcgcggtgtctcacgcttttaatcccagcactttgggaggcagaggtgggcggattacttgacgtcaggagttcgagaccagcctggtcaacatggtgaaaccccgtctccattaaacgtacaaaaatcagctcggcgttgtggcacgctcctgtaatcctagctgctcgggaggctgaggcaggacaagcgcttgaacccgggagctgaaggctgcagtgagccgagatcatgccactgcactccagccggggcgacagagcaaagctctgtctcgaaaaatgaataaattaattaattaaataaaatac

SEQ ID NO: 26719 - DNA, 1085 bp, Artificial sequence
  DNA replication origin
tgagaaaaagcccccgaaaggctggaagttacgttggaacgggctggttgtggaaggagcgagctctccgtccccgggagtatgcaagtttgggctgcacgatcacttggaagggattgggcggagttctgtcatttggagaaagggtcctgggagcttcaggtttgtgtagggcgaggacggggcggttctgcgtccggccaggttggccctcgaggacccagccgtccccaacctcctaaactgctgtcggatgtagaagactcgcattcactgctctccacagtcggtgaagggagaacgccgaaaagggccgcattccctcctgccggtcccctccccttcccgcgctccctctgcagcacttaaaatgtaaatgtacatcgtgattagccgcggggtcgctaattacagctgaagccattcattacactgtcagcgcgcgtcgcagcccgccggctgtgcgctccctcctagccgtgaaggggtgtagggggtgggggcgggagatgcggggagtgagggaggaaggatggggtgctgtgaattagggtaatgtggcaggcctggaggaagctggagtgggagagagcgggcagcgagcggggaaaacagggtgggcggtgaaggacggggcggggtggcgaggagagaggagaaacgcgagaggcaggaaggaattggggcatgaagtagtgaggacacagggaaaggggctgtatgaggggggaaacagcgtaggggacagggcgaagggagaaaaagctgagaagagggtgggaaccccagggtggggccagagtcagaggaggggagcacagggctcaacttcagaaaggctggtaaattttaaagtagagcatcagtggtgcacaccacacaatggttagaaaagtggagtcagtgaagacgttgtgttaaaggagctgggtgccagccatacacagagtaggggggcatttatttccgtgtgtgtttatagatgtaaatgtatttttaaaatatctgcaagaaaacagcacactgacctcttgttaccgcatgaagttttcattaccttctttaagaaaaggacaattaaatat

SEQ ID NO: 26720 - DNA, 1290 bp, Artificial sequence
  DNA replication origin
gctctcccccagccccaaacagtaaaggtcacctccactcccacctctccagcagttcggccttcttcctgcatccaaaggtgaagtgtaggaggaacaaagctgcagccagcgacccccacacctctcgccccgcgcccagcttcccttcaaagctctcctcccagccttcatgcccagactcacctgccgcggccgttcggctgccgaaaggccgcagcgctgcgctgagctgcgctgcacccgagcgatgcggcgcggagccggccgcgagccgctccggggctgggggcggggagcgcgcgcgcgcgcgcgcgcgcccgaggccgtctctgcgcgcgcccgcgccgccactgcctgcagcagtcactctcgcgagacttccgctctgctcctaaggctgctcctcctgagctcgcgagaaggacgacccggccgccccggcatcttccaggagctgtccgaggtgctagttcccgggccccggccggatcaggtggttgacgggcacctcagggacaagagcctggcgtgtaggtggaaggaagagacccagagatgggagcctggcaccagcagccagagcctcagcttccatatctgtaaactggggagaataacctcctatacctatgccaggagcctctgggacgtgccagaaaggagtgagaaagagctgaaagcaggagagtgtggtgactgcggaaggtccttcagatctgcaggcgcagggggaaagagagaacagaggacggaagatcggagatgatattcagagaggcaaggacacagatccacggaaagacgacataggaggacgagaaagaagagctgcaaacagagacagagacacacggagagagagactgagatgagagctcaaggcctggagagaaaaaagacatggaaagataagataggtaagggagcataatgaagcaagaaagaggcaagaaatagagacaaattacgcaaaggagcagagagagagagagagagagaggagaggcttagaaaaagaaagagactcagaaaaaggaatgaaagagacagtgatatgcagagatgaataccaagagagagtagaggcaagggtaaatgtttaaaaacccagagctttggagggttgagagagacccacttggagagatgggctgggagtgaagacaggattttattgtgattggtgtttacatagtaaacctccgtgggatctctacaggcagggccagggccactgtctgtcctgccagccaattgctccttcccctacaccatacacccaccctc

SEQ ID NO: 26721 - DNA, 1482 bp, Artificial sequence
  DNA replication origin
ggggtcgctggctgcagctttgttcctcctacacttcacctttggatgcaggaagaaggccgaactgctggagaggtgggagtggaggtgacctttactgtttggggctgggggagagcgctcagggcgcacccaggccccccgagccccccaagcccccccattcccatctgtggctcccgcagagggaactgggcctttgggtgacgtcagaccctggatctggagcctgagctttgggccctccatcccccccgccagccccacctggcgttccctggaaaccggccttctggagatggcgtgcgcagccggggatgggggcgactggaagggggtgcccgtggcttcctttgggcctttccttccaactagcgcctgcaggtggacccgggttgacttccctcacctccctcgggcggccgacctttggatggcggacctcagccgccccagggttgcgaggcgacgggcgcgctggcccaggccaccaggcgggctccatcagggctttgggtggtgagttgggggcgccggatttggctcatttcaacgctggccggaggtcacgaggatggaggtgaggtgtttgtgaaccgatccttgtcctccgcctcggggagctcctggtctgtgggttgggggaaccaagtagagactcggactgagcattcactgtcacaggcggcttaaacaagtaatgtcccagcttcccgatggggagatcagtgagggcctggcagactttcccagggacacagagagaaagggaggcgacagctagcgaataggagacttccagaggtgatgggatttgggtgggaggagaggcaagagagggcattccaggagaatgtatgggcaaaggcacagggatgaaaacgagcacagctgttgggggctgagcctgggagctcagccatgtgactgcccatggggtggtggagtctggagaaatttgcaacctgtcccctacatgttctgcctcacggagcagggctctgaaagagggagatggttcttgcaggggcatgattggcagagagattttgtttggggctacacaggtcttgctaacttaggtttgttctgggcttggtgagccttagggcaaagtctctagagctgagagggggctgtctctggtgaatgggcccctgaaagagggtcttaggtttagcaaaccccttggagagttagtggggtcccaggaggggagttctagagagagaccttgggctctgtggctgtttctttaaccgtttcctgagtggccacctccaagcaagttccccaagtcacctcccctctctgggcatctctttctagcacctttctctagagatgaaataataggactaagtagtgacctcccttgaggatgctccttgttctagtttagagcatcccccctttcttctccctcttccttttcctttcctcccctatccctctgcctccctgtccctatccccacccctt

SEQ ID NO: 26722 - DNA, 1190 bp, Artificial sequence
  DNA replication origin
ggcagaaacaggaccaacacccgcaagcctccaacagcccctggggctccgtccagccgttggggtggaggggttggggggaggtgcaggggcgggcactgtggggggtggggcggggccggtggccgcgactccaccccgcgcccctagtcgagtaaacaagccacgggcggcgcctgggggccgctcctgcaagccggggcgctgggttacatcacggttccctggagactcccgccccagcggccgggtccctgaggcccgcgcccgcccgccgcctgtgtccgagaagcagagagctggcaagggcccgccagggcgggaaggctcccacgttttctccggaggcccctgggactttgttgcaattgggttcagcccgggcatgggctgaacgtggacgcgcgggaaccgcgcctcggtttccccatctgtgaaacctggaggctgtattaggattctgtgcctcctattaggattcagctgggggaaggagagcggcagccagggccagggccagggccagtcccaggcaggctgtgactggagccgggctttctacgttagggttttggtgggtacccgctcagccacgtgccagaatgcaccctccctctgaggggacatggagaccactcgctgggccaaggcacagcaaggacgaccttgtatcctagcattctcctgtccccacttgctgctggacacggaccctctaggtaaaattcaacaatagttcctgccagccaccctcacggcgggtttgtgccagtgctttgggaaagatgttgggttgcccacttaggcgggagggagatttctgctcaacatcaacaactcaatctaccacggagcctgagccactggtctggaggaagctgcgggggaggcaggggtcgtgggcacccagcttggggacactcaagcagagtacgggctaggcacggggaagaaggtggcagagggcatgcttgccagcgtctccaggagctgtcctgccctggggttccatgatttaatgattctgcacctgcaccatctgataaggtagccgcatatgactgttgagcacttgaaatgtgtgggaacccactaggagccccagagttggcataaacattattttaagctgaagacatttgagattcaacagacgcagaaaaaagcctcctaggagcttcctttatctg

SEQ ID NO: 26723 - DNA, 957 bp, Artificial sequence
  DNA replication origin
aacttgcctttgctagtctggtgaaagagctaggtataaatagaaaccccaaagcagtgggtgccaggcacaggactggaggctatgaggggagcaggggtgactgaatacccccaccccaatactacccccaaggcatctgcttattctggacccagaaggagaggctgggggcatttctaggtatcctgtggataccacagaggttatgcacactctggcatagtaagccaggcagagtggtctgagggaagggagtggggatgggggagggggtagaagagaaggtagggaaggaagtgggaggagggactgagggggagatggagaacgggcgggggaaggagggaagggagggagggagaggtggaggggaagggaggaagagggggagggggagggagggaagtaaggaaggaaggaaagagggagggagggaaagaaggaagtggggagggagggagggagggagggaaggttggttgccggccatggttgcacgtgtgtgcctggctggttctgtgtccctctgtgtgtgtgcatgcatgtgttcgcatgtgcatgtgtacatgagtgcaacagttttttctccttggtcctctaagctcctgtgagtcctgccgggccaggaagtctccatttggggcatggcattgggatcccagtcaatagccctagacttgtccactggcattgggggtgggcaggagggttggacaggcaatggggaggggtaggagcagtgaagccttcaggcttggggtggctgggaggggcagtgaatgccccaggcaggcctatactctggggggctttcttggttgttccaggccagacagtccccaacacgcatgtgtattccaggctgcacggaccagctgggatccttccccaccccttaggcttactttctccagaagcactgggcattgctgtgcccattctgcactgggttct

SEQ ID NO: 26724 - DNA, 1996 bp, Artificial sequence
  DNA replication origin
cgccacccgccccttctccacgcgccgcccgcaaactcggcccaagtttccgcgcccgccgagcgggcgagctcctacctgcagagcgccaggactcccgccgccgctaccccaggcggcctccgcgtccgcatcctccagcgtctctcaggccgcgggtcctagtccgaccgggccctgcgcgggaagtcgcagtgagcaccaagcccggagcaaccctcctagctgccgttcgcgccgccgctgggcgccgtctgcggtcccgggcggggcgggctgggggcggggcgggggcggggcgactcgcagggttggggaagagcccggccccgcctctgggagcctgcgctcctgtgggcagcgggtgcggagggcccgcgtggggccagctcgctaggagcgggctgcgggcgctgtgcaccgcccgtaaccgccacgctccacgaaccagtgcccggcgggcccgtcacgcgccctcagtcgctcccttagatcgttcattcactgccacttgctgcgatgtgaccttgcgcctgccgcttgacctcgctgagcttcagtttccttatttgcaaaagtggaattctgtcttcctcatagcggtggcggtgtaagcttggaaaagggtgtttgcaaatatctggcacacagtaggtgccggcattcccctgtccagcactagtgtattagggggctggagaagggctccttgatctgtcccctcatttcgttgtagtcaatgagggcaatttccagactcctgctagggcacggcaactgtctgaggaagcggcaatctccccatccctggaagggccgggaatgagggtgctgggggatttgcaaagtagcctgggtgaggctccctccatgaggcagaccggcgcgcagcctgtgaggcgggtggagtggagcacgcccagccaggaatggtgtgttgcaaagagaggctggaggggggaaggggtgcctctccctggaccatctgactgtggatgagagcccctcagtgctgctactttatctgaaggaatctggtccgtcaaagctcctgggctgcccgaggactgggaacaggtgtgtgcagtggggaaggggagggcaggtggacatgccaaaggtcagagtcagttcaggaagcaaaactatcccctcagatcccaaaggtaagttctgcctgagtcagagcagagcaggcctgaggctgcaggttccaagaatcaccaagcagctggagcagctggagctgaggaggaggggctgggcgctgcaggtaggaagaggaagtgaggtcacctggggagcgggggcgggaggtggggggagagtgtcacttcatttagagctggaaggaccttagaaatagagtcgggaaccatatagggagagacactcagagagggttggggctttccccaggtcactcagcaggctgggacaaaatcccagatctcctggctcccagcctggggcccttcctgcagccacaccttagcgtcaggaaaatacatctgcgcgcggacagctaggggtcacaccaaacatcatacccttaaccccagcctgcagccccgtgggtcacaggctattcactgctcttgccccttaccaactctgctcgcccctcctcctccagcaccgcgccggcgaccctgtccctgccctgctagtggggtggaaggagggctgtgttcttagcccttggggtctaggacgctcaggttgtgtgctcagatgtgcccagtggtctctccaatttccctgagttggaatgggacccaaccaggccaggatgagcagccatctgagacaataggggctagttaagatttgcagcactgctgagccttgtgttaattcagggacacctcacacagacagcagccccactcaacagtatgtctgttccttttcggcatcacttaaacaccctggactgccaaagaaaggaggcaacactgggggacttgggagctactttgtaactttctgagcc

SEQ ID NO: 26725 - DNA, 1222 bp, Artificial sequence
  DNA replication origin
gggacaagggggcactggagggctgggcctgggggcgccgggcgctgaggcaccgcggggccctggacgcgccctgctgggatgggacggccctgcggttttctcgccacctcttgactcacccctctggcctcagcccaggctggcaggatcgccctgaggcggaggctgcccggaccctgtcgccgggccgcccctgttccgggacctcccgccggtccgcgggcgtcggtgtggggctgggtgcgcgggcctgcctgcgtgcacacgtatgcccggggcccgagcgaggggagagcgcagttctggaatggcgtgtgtgcagatgtgggccatgcacgtacgtgcaggcacgggtttgcatgcgtggcggcggcctgtgtgtcagcctgctggatgcacgtgcgtctcggcgccgccgggaggggcttggggacacccggaagcccgccaggtcgggtgcggcggcagcctctaagcgaaatcggctgtgggccctaggcacccgagttatgttcagggcgggtaggggaaaggggatagagaccgatcccgttcgctttcccctccactggagactttgggctgccccaggttgggttgtagcgtctggagagcccagagcctcaggtagggaaggtgggagatgggagaacactcggcgaggcccgatccagccctccgggagaatccagatgctggccacaattgggcaggaatcgcgctcttcttcctggtctttgccatcggccatcccgaggcccctagaaggtgaaagtgggaacagagagctgtttcctttcccactgcgtaaggcaggggcggtgctgcggtggtgggctcttctccgggaccctggcctgggtgctggctgagtgacgttggagcttggcagagaggatcaacagagctgcctctcaaggatgatctgagcctgctccctgggcacctgccctttccgagagcttgcttgcctcagtatgggtcagggaaggaggcacctacattttggcaactgtcttgagtggaggagtcgtctcccttgagagagtgtatcctgggctttccacctcctactggcaggagatcaggtcattcccacacccctaagagttctctgttggctccctgaagccgccacccctcccacaaagactcctgagggtcccaggtggtttcctgtctattgactgggtcccagataggggcctcaagaagtctc

SEQ ID NO: 26726 - DNA, 1073 bp, Artificial sequence
  DNA replication origin
gctggctgagtgacgttggagcttggcagagaggatcaacagagctgcctctcaaggatgatctgagcctgctccctgggcacctgccctttccgagagcttgcttgcctcagtatgggtcagggaaggaggcacctacattttggcaactgtcttgagtggaggagtcgtctcccttgagagagtgtatcctgggctttccacctcctactggcaggagatcaggtcattcccacacccctaagagttctctgttggctccctgaagccgccacccctcccacaaagactcctgagggtcccaggtggtttcctgtctattgactgggtcccagataggggcctcaagaagtctccagagcaaagggtattccatgggctgagacccaggagagagggactcctggggtgggggtggggacccagcagaccccaagaagcatgtgggggaggtgagaccaaagtcagtacttaacccagagtgtcccaagggtggaggtggggaggatccacacttcaaaaccctacagttccttctcacagcattgctgtggagtgagatgggggctttcacccctcgatagcaggtttctatcataggacactgctgttgggactgtcacctgtgtcctaatggcccctctgtgtcttctctaggctggcctgaggtgtggggttctgtccaggagatgaaccagcttgctttctgggtctgccttggtggaagtgggcattggcccccacactagccttgtgttttctaaccccaaaatgtgccggtctaactcagcctgtggctgtcattggctccaaccagaagaggcaaggagagggctggtccttgcttgccagtcactgaaacctgtgacactttgccctaatcatagcaagattgagctaggtggtcctttctaagctactgagagtttccaggaatagggtgctggctgggggaggtagaggtaggtcagtgtggccccagaagacaggcttcagatgagcccctaacgggttactgggtgcctgctgccctgaggggcctcagtccccatccttccttggtcttgtcttag

SEQ ID NO: 26727 - DNA, 1176 bp, Artificial sequence
  DNA replication origin
tctggaaggcaccaggctgtggcacagcccgcacattgttctgggaaggtggtgtccctccaagcccaggggatgctccatagagagagaggtcatcccgggcataaggaaaactcagtgtctggggggcaaagtccaatgggcaccgtggagtgagaggcggctccagcttgaggcctggagagggtgctgggagaggggcagaggggtaggggtaagcgtccagccccagtgggggaatgtaaggtgcctgggctgcctgctgcctcaggtaggggctgcccagcccaccagcctggtacccggtccccttgtggccccccagaggctgcagtgggagtgctgggctgtagctgccctgcttctctgggtggcgacaggctggagggcaaggcagggcctgtggagggtggggtggtgggtggtggggtggtgggtagtgggtgggcccggtgtcctgacagggtggccccaggggctgggccagctgggtccaaggacttgagggcccctcagacattgcttgcttggagttcctagggtaaggacctgtgtacctggaggccaggaagcccgtgctgtggatggtctgatatttctccaggaagggctggcatggggagaagctccctgaggagtctttactggacccctcagctggcaccccccgcaagaaggtgccatccagagtctggcccttgctaggagctggggccagagagcagggtgggtcagctgagggcaacaggggcccagtcgccagagtccagtcaacatccagtggcctcttcactgctccttcccccagacaagttgagagcccatagcacagagggttgcggtagacaggtttgggtgctgccagtggtgggcctgggtaggagtgagcctggggactgaagggcaggagctcaacagggctggagtcctgcatcttctcagggccttctgctggcgagcggtagaacaggcagttggtcagcaggttgtctgcctgaagtgggggtcctgccataccggtagagtacaagggtgggtatggggtccaggacgccaactgctcagactcggccttaggagtacctgccatggggcaggagaagtaggaccccttgtaggtgcagggatcctggttaccaacagagtggggcaggctgtgctcgagcccggagtctg

SEQ ID NO: 26728 - DNA, 718 bp, Artificial sequence
  DNA replication origin
ctgcacctcactgccacaggcccttccccatcccaaccaggtaagggcccggggcaaggctgccactacggggatggaactaggaacagtttctacagggaagaggctgggcagtggaaatgggagagggtggaattgggggcagcagggagagaaaaactagagggggcctcaggctgcaatgccaggtgtactgacgcaggaggggcaataacagaatccacttggtcccatcaccagatccctagctgaagaagtgtgatcatacacgccacacaacacttcggcagttgtgtggtcctccaggacattaaaagaaaacaagctggagaacagcaggcacatcatttagtagaggaaaagcaaaccacaaaacaatgcgacttatgcgcacacttctgtgtatgtaagggccggggaggactgcaaaactacacgttcaaaaaggcagctgtggccctcaccaggtctagagcatgaggagctttgtgaaagggggtgcccttcactgacatggaaaagaactggttgtgggaagtgagctgaggggaaggctcgggagtgtgatttgggatgagttcagtgtgggagagagacccaggggctgaggcccagcatgcagtgggttatttagggctagagctcacaaaggggatgctaggctggagatcagggaaattatctcagctagaaaacagggcctaaccagagtgccgga

SEQ ID NO: 26729 - DNA, 1193 bp, Artificial sequence
  DNA replication origin
tggttggaggcagcagaggcacagggacaccggggagaggggctgtaaagagaagcatttggaacaggggtgggagagggagaaggggaggcctgttaggagcagggcagtcgtccaggtgagagaggtctggatggcaggccaacatggcagctgtccaatgcagagctgagaatgactgcattggagagcgattttcaagaaaacggcagagaggaaaaaacctaggaaggctgggtgtttgctgcagcctctgcctcctgggctcaaaccatcctcccacctcagcttcccgagtagctgggactacaggcacacactaccatgccgggctaattttggtatttttggtagagaagggatttcgtcatgctgcccaggctggtcttgaactcctgggctcaagcgatcctcccgcctcagcctcccaaagtgttgggattacaggcatgagccacgacgcccagacagaccttgaggctttcagcagaggatgactggcaggttatctctggccactgtgtgaggaacagcttgggcggggcctgggaatcccaggtggtccgtgagggaccattgcagggaccatgccaagatgatggagggtggacgagggtaggtggtagggtcagagagggggtgggttagggcaggagggaaggtggggggtggcacgtgccggccttccatgcctctgcccatcctcagctccagcccctctaccacgaggccttccccggcttccagggcatcggtgtcctggtcttcaggtgagtgcacgtggctctcagggcccacccatcacccaccagctgctctgacccttctcagccacaaaggcactgtcccagatgcctagctctgcccgtcccaccccctgttcaggagcacctggggacagaggcaggaagagccctggacaggcagggaggaggcccacgtctgattctgccactggctatgctgtgtgacctcatatgccctttggcctgccctgagccctgattccagctgcaggatgtgggcaggaacatcaggcattgtctgagtgcagtggggaaggcagaggcagcaagggcagcaggcttgtaaatgacatgcaaagggatgcaaatcccttgggcagggccctccactctaagcgtctgggggaagaggatgttgagggagaccgagaccatatttgccagcgg

SEQ ID NO: 26730 - DNA, 850 bp, Artificial sequence
  DNA replication origin
ggatttggttttggctgcaggaactctgcctcgctttgccttactggccacctgcacgctggaggaggggccctcacctggtggtggatgatcttacgcagcagctggtgcttccaggaggcagggttcaagagtgcagccgagaaggcttcattggtgattgtgaaggtcacggagcgcgtcatgtgactgggtcctggggtagaggagactgagtcctggaatgagaaggtctggctgcgataaggcagggcggaagactggatggggtcagcacccccagggacccttggggagctggggctgggtggggcagagggaaggcgggaggaacatctgagagggagggtggctgtggtggctgggctggcagggacccctggcccaggctggactgtcccctgaagtgtggctggctctgcaaccatcaagggtggtagggtgggtgggaggctggaggatcagtgggagaatctgtgcttgtgtgtgggaatagacacagaagggtctgcagaggttctggctctagtacttacaggggaaactggggccaggattggggatagtgatgcagttggtgactgaaatggccattgtggtggggaaagtgacagtgacagcgacaaagatggaacaatgtgtagtggggacgaggacggggccaacacaggtgagaggcatggggagaaggacagtgatggctgtgaaggtggtgctgctgagggcgatggcaacgtcaaaggaacactgggccccgggccccggctggaagccacagcctctctgggtgaccctgaatcccctatgaggactggggagggacctacaggggtaagaggctctgtgacag

SEQ ID NO: 26731 - DNA, 782 bp, Artificial sequence
  DNA replication origin
aggctggaggatcagtgggagaatctgtgcttgtgtgtgggaatagacacagaagggtctgcagaggttctggctctagtacttacaggggaaactggggccaggattggggatagtgatgcagttggtgactgaaatggccattgtggtggggaaagtgacagtgacagcgacaaagatggaacaatgtgtagtggggacgaggacggggccaacacaggtgagaggcatggggagaaggacagtgatggctgtgaaggtggtgctgctgagggcgatggcaacgtcaaaggaacactgggccccgggccccggctggaagccacagcctctctgggtgaccctgaatcccctatgaggactggggagggacctacaggggtaagaggctctgtgacagccaacgtgttaacgatcgacgcaagcacaaatgggctggggggttctgaggacacagccttccccgtggtccctggagccaatgtcagcgatgaggaggcttctgggccaaagctgctagcccctgacgcaggcagcatccaggcatggggactgaaggtgtgcctgcttgggagccagggcatccgcggtggggatcccaatatgggtgcagaggtggtgggggcagaggatgttccagatggctgctgggtaggtctgggggtgccagaggtcctcagggttgcaggggcaagagcatgaattgtcacagacaactcaggggcctcactggacttttgcccagacccgagataccttgggccaagagaagctgatggtgg

SEQ ID NO: 26732 - DNA, 909 bp, Artificial sequence
  DNA replication origin
tcatgcctataatcccagcactttgggaggctgaggcaggcagatcgctttgaggtcaggagttgagaccagcctggccaacatggcgaaaccccgcctctactgaaaatataaaaattagctgggcgtggtgggacatgcatgtaatctcagctacttgggaggctgagacaggagaatcccttgaacctgggaggtggaggttgcagtgagccaagatcgtgccattgcgttccagcctgggggacaagagcgaaattccgtctcaaaagaaagaaagaaagagagagagagagagagagagagagagagagagagagagagggagggggggggagggagggagggagggagagagagagggagggagggagggagggagggggggagagagagagagagagagagagagagagagagagagagggagagagagagacctaagcacttagaattttaggagttggagcagacagtgattcaagaatcaggcagtgccagacagcgagtggtttggagctcgaggggaaagcttgtataaggtgcacacaaaagcaaggcaaagaaaacatttgattggttaaagtggagcagtggccttaatgtccttagaagtcagttggtggtttctgattggtgaagtccctagttagtgattagtgggtgatttctgattggtgaagtccctagttagaggttagttggtggtttctgattggtaaaatccctataggacagttggtgttttctgattggtgaagtccctagtgagaggttagttggtagtttctgattggtgaagtccctagttagaggttagttggtggtttctgattggtgaagtccctagatagaggttagttggcagtttctgattttgtaaaattttgttttctaggatatggctgt

SEQ ID NO: 26733 - DNA, 1085 bp, Artificial sequence
  DNA replication origin
aaacccattctcccattaccacccagagatactgtcaacgttttgagctcacaggggaagtgtaggcttttcacactgtcgatgtctatgtgaagggagtaaggcagcctgaaacctcttgctcctaggtcccatggtccccatttcccttctagctggaaatttgtgctgtgaccagaggaaccagaaatggggtgagaatgcttaggggactgggttataagatcaaaggccggtcttgcagcagtaatgacagttcctaggaggactgtgacatcactacattccactcctcctgggggtgggggaaacctcatcagtgcaatggctgagttgccgatccacgatgggggaggggggacgtggggctgggacccaggtccttggaggtgccagcccagagagcccagggaggtcgggcttgggtcagcaggaggggagagcagagtctgctcagggaaccccaggagtcaccagcccaaagtcaccccgggatgactggcgatgctggggggttggggctgggggacccaggtccttggagaggtgagcccaaagaacccagggaggttgggcttggggtggcaggacgtgagggctgaatatggagcaggtatccccagtagtcatccgcccaaagtcaccgcagggtgattggcgagggcagaggctgggctgcttgctgaaggggcggggctgactgacaagactttggtggggggagcccagaggcgccggggtaggggggcccagcccggtgtgcctcaggagtggtatggactctgggagtggtcttgtcatcagaggggatctctggctaggttggggggccatgacctttttcttggctttttacctttttcttggctgctgccaatttattctgtcgagattcttctaacatcatggggtggggagggaggtagggttggggccacatcagcgaacacctccagtcacctacaaggctgctgtgtgactgagccagaggaggcgtaaccagggccacactagaatgcagaataggggtgtggccttaatgctccaatcccattggtcaatgagaaagatgaaagggaaaggag

SEQ ID NO: 26734 - DNA, 1033 bp, Artificial sequence
  DNA replication origin
caaacccattctcccattaccacccagagatactgtcaacgttttgagctcacaggggaagtgtaggcttttcacactgtcgatgtctatgtgaagggagtaaggcagcctgaaacctcttgctcctaggtcccatggtccccatttcccttctagctggaaatttgtgctgtgaccagaggaaccagaaatggggtgagaatgcttaggggactgggttataagatcaaaggccggtcttgcagcagtaatgacagttcctaggaggactgtgacatcactacattccactcctcctgggggtgggggaaacctcatcagtgcaatggctgagttgccgatccacgatgggggaggggggacgtggggctgggacccaggtccttggagatgccagtccagagagcccagggaggtcgggcttgggtcagcaggaggggagagcagagtctgctcagggaaccccaggagtcaccagcccaaagtcaccccgggatgactggcgatgctggggggttggggctgggggacccaggtccttggagaggtgagcccaaagaacccagggaggttgggcttggggtggcaggacgtgagggctgaatatggagcaggtatccccagtagtcatccgcccaaagtcaccgcagggtgattggcgagggcagaggctgggctgcttgctgaaggggcggggctgactgacaagacgttggtggggggagtccagaggcgccggggtaggggggcccagcccggtgtgcctcaggagtggtatggactctgggagtggtcttgtcatcagaggggatctctggctaggttggggggccatgacctttttcttggctttttacctttttcttggctgctgccaatttattctgtcgagattcttctaacatcatggggtggggagggaggtagggttggggccacatcagcgaacacctccagtcacctacaaggctgctgtgtgactgagccagaggaggcgtaaccagggccacactagaatgcagaataggggtgt

SEQ ID NO: 26735 - DNA, 1816 bp, Artificial sequence
  DNA replication origin
cggatctcatctccgccttggcccctgctgtccctctgtcccagacacttgagggagacttcctgaccccccatctgagggagcaccccctccgcacacgctgtctctttctccaggctctcccaccatctgaaagggtcttaggatcgcgtggccgcccctccctgcgcccccctccccccacacttaggacccgcctggatctggccgctcaccaccgagggaaagagcgaagctcggcctggcgcgggggagcggcgggagcggccgaatcggccgcttggccgcagcgagaaccgggcctgccccacggaccggacatccccgcggccgcccccgggtcagggcaggggccaggacgaggcgggcgggctgccgccatgcgctggagccgctccccatggctccgcaggaggacggcgggcaccaggaagggctccccgagctcctgccccgggcctgggggagggaaagggcccgcggcagcgcctggtccctggggtggggggtatcgactcctcacctccgccctccctgctttgccacttgcctctgtccccgggcggttcggaatcggaggcgaaggtgtgccttaagtggaagggggcacttagcgacggcagacgcccgtaccttgccccctccacacctgggagccgcccctggcctggcacccacagggctcgttttgcgggagaacgtgaggctccaaatcctagttttggggaggagcggcgctctcgggcccgtcctccccatgcccccgctgcgaccctgtcctcggttaatcctgactcccctcctcctcagggccccccaaagctcatcttctccttagccctacagcgcaccccccacaacccgatcctgcacgccccctccccgggaacccgcactccgttccgctcgtcgccactgcagccactaaagggttaacgccagaacgggcggtgcccgggagcgcgctgggagccgctgggaggtgtagtccctcagggaagcggtcgcgattcttcggggtggggtccccgagcttggggggttccaggctttggggcaggcttcggggcagttacctggctgggaggtggcggaagaacctgacttcccactgcctggcgccggcgagatgcgggggcaggtctgaggccccgggtcgccgctgtctctgcggttgggggaagtcacccagctagcgtgggacagggtcggcacccccagcaggaaacagcagcgacgagccagagcggagtcgcctgcagctgcgcgcaggacgtgcacaggtgcgcggtacgcacaggccctagggacccggtggggatcttaagcaccaacgaacagtcagacctaactcataaacaaacatcatcacggcctgccctgtcagaagcgcagccaagcaacaacaacaacaaaaaaaggcgaggaggtagacccacttgagatggttctgttgcggagagtctctgaaatcagaaagcgccagtccgcaaaaacgaggaaacccgacgtgtccggcggaaggaaccgccagtacaaaggccctgaggcgagaaagagattggtcactgaaagaactcaaagaagtcctgtgtggctggagtatagctgcgggttagtgctggcaggtgaagacagagaagcaaacccaggtcaggtccggttgggcctcgggagggcctccgtgtggagtctgcacttcattctaagtgtatacctaacccatcgccacgatttcccctccttcacactaccctgctacgtctccttattaggcgtaataaaattatgtggctttgtaagaaattggttttta

SEQ ID NO: 26736 - DNA, 1442 bp, Artificial sequence
  DNA replication origin
tcacgttctcccgcaaaacgagccctgtgggtgccaggccaggggcggctcccaggtgtggagggggcaaggtacgggcgtctgccgtcgctaagtgcccccttccacttaaggcacaccttcgcctccgattccgaaccgcccggggacagaggcaagtggcaaagcagggagggcggaggtgaggagtcgataccccccaccccagggaccaggcgctgccgcgggccctttccctcccccaggcccggggcaggagctcggggagcccttcctggtgcccgccgtcctcctgcggagccatggggagcggctccagcgcatggcggcagcccgcccgcctcgtcctggcccctgccctgacccgggggcggccgcggggatgtccggtccgtggggcaggcccggttctcgctgcggccaagcggccgattcggccgctcccgccgctcccccgcgccaggccgagcttcgctctttccctcggtggtgagcggccagatccaggcgggtcctaagtgtggggggaggggggcgcagggaggggcggccacgcgatcctaagaccctttcagatggtgggagagcctggagaaagagacagcgtgtgcggagggggtgctccctcagatggggggtcaggaagtctccctcaagtgtctgggacagagggacagcaggggccaaggcggagatgagatccgtgagtgaggggagccgggaagaagtaaggctgcagccgcggccccgcaaggattgggactttcgtctaaacgcggtggaagcccatggaaggaagcggttagcagcaaggcagagtcctgctccctctgcagccccagctcccagcgccctgggctttccaggcacctgtccgggtaggggattgagggccgtggccaggcccgcactttcctgccagccgcagctggccacatgcccatctgaccctccgagttctcctctaaaaatggggctgacagccgctacctcacaaagtccacaccgggctcaacccgctgccttcctccccaacaggactctgccaccctccctcaggatgcctgagggccccgagctgcacctggccagccagtttgtgaatgaggcctgcagggcgctggtgttcggcggctgcgtggagaagtcctctgtcagccgcaaccctgaggtgccctttgagagcagtgcctaccgcatctcagcttcagcccgcggcaaggagctgcgcctgatactgagccctctgcctggggcccagccccaacaggagccactggccctggtcttccgcttcggcatgtccggctcttttcagctggtgccccgcgaggagctgccacgccatgcccacctgcgcttttacacggccccgcctggcccccggctcgccctatgtttcgtggacatccgccggttcggccgctgggaccttgggggaa

SEQ ID NO: 26737 - DNA, 1331 bp, Artificial sequence
  DNA replication origin
acctcacaaagtccacaccgggctcaacccgctgccttcctccccaacaggactctgccaccctccctcaggatgcctgagggccccgagctgcacctggccagccagtttgtgaatgaggcctgcagggcgctggtgttcggcggctgcgtggagaagtcctctgtcagccgcaaccctgaggtgccctttgagagcagtgcctaccgcatctcagcttcagcccgcggcaaggagctgcgcctgatactgagccctctgcctggggcccagccccaacaggagccactggccctggtcttccgcttcggcatgtccggctcttttcagctggtgccccgcgaggagctgccacgccatgcccacctgcgcttttacacggccccgcctggcccccggctcgccctatgtttcgtggacatccgccggttcggccgctgggaccttgggggaaagtggcagccgggccgcgggccctgtgtcttgcaggagtaccagcagttcaggtagggccagcaccaggtgtgatgaacatagtcgcgggctccacacctgactctcttagtgccttcttggccaacaaggggcgagtccctgccccttctgggcctcagttctctcatctgcagatcaagacagtatacctgtcctgggtcagctccctgagccagtgggcatggaaactcaaaactaattgggggccgggtgtggtggctcaagtctgtaaatcccagcactttgggaagccgaggcgggcagatcacgaggtcaggagttcgagaccagcctggccagtatggtgaaaccctgtctctactgaaaatacaaaaattagccgggcatggtggcacatgcctgtaaccccagctacttgggaggctgaggcaggaaaagcgcttgagccggtgaggccggggttgcagtgagctgagacagcaccattccactccagtctgggcaacagagcacgactctgtctcaaaaaataatgataataataactgatgggggaggagagaggagagccaagaggaggatgggtaggtactgccctgaggacatgtggccagttagtgtcagagaagctggggctcccacccacaatcccacaccacctctcagggctcccaggaggctaagaaggtggaggggctttaatatggtaagtgaggctgagcggaattgtttcaaggggatggggaggggactatctcatgacatggcttccgccttgggctttgtggtctcccacatccggcctgcccagtattctgtgtcctgtggtctcctctgcgccacttccctgcctgcagtagggtgtaacagcccca

SEQ ID NO: 26738 - DNA, 993 bp, Artificial sequence
  DNA replication origin
gagggctgcctggccgctccgcggcacagtccattccctaccccctcctccccggcccctgccctgcccgcggcgggcactttgtcccgcggcccgggtggctgcagcttaggtttctccccggaaggaaagcttgaggcgcacggttgcggtcggccggctgcgggggaccaggggccacacctgccgcggaggttacagtcggtaaagtagagcggcgacacgaacttctccacccgctccagcgtggtgcgccagtgcttcaaggccggcgcagccgccatcgccgggctctcgctcctctttccggaaggcccctggcgctaccgttccgctccacggcaggaaaccaaaggttccggcgtccagagggcgcctcccagtcccgggcagcttttcttggaacaccggcggctctcggaagcccagctgctgtctgaactttgagccgagttggaagctagaaactgtttttgaggctctcctatgttgtccgaaatagtgggccgcagggaaaatctcaaaataaaatgggaaatttgacgattagaactctcgaaagtctcaagacagagacttaggccattcggcaagacaggcgggagcctcagctgctgcagacccagcctcagaagcagcaaccgggagacctctggctctagctgtcggtgaacacggaaagtggtgtttgcttaacgtggagccagactacccggaataggtgttttcataccggacggagatcagggtgttagtgagcagggtggtagagctttacgcccaagttactacgacttactcgattacacgctttactgaatgtatattgctaactcttgcacatcaccagaaactctggagtttgaggtggcagaacagtcatggcattgacgatcccaatggaaaaatgtatttcaccatacaggactgtagagtcccgggaagccataataccagaaacagacctccagtttcattctcatccctagtact

SEQ ID NO: 26739 - DNA, 1017 bp, Artificial sequence
  DNA replication origin
agacgggcgggaggtgtgtggttgtgtgaggggggtggggggcggagcggggtagctctccgcgcgggagggggaggagagcgtagtcccggtgcgcgcggaggggggcgggctctcgcgccgccgctcagaggcggggccggcgcgcgcgtgcgattgtggagaaaggggcggggccggcttcgcgctgagtgcagtttgcggccgaccaccccctcccctcctcctggggtgggcggggcctcgggctggcggccgcgctctggcctgctggggtcggggaggggtaggggggggtctcccgcgtgtagattcagggcgcggcagggagggggcgtgaagtctgagttcctccgccttcttgggatccggttggccggaggggccgtactgatccgtgatgccactccccttggccgtccccccctgcaccccgcccaggccccgggtttccgcctccttggcaatgaggaggtgctagggaaagcccgctgtcgggtctggctgggagtctcggcgcctagatctgccccgccctatgtctccgtggggagggaggggcacccgccgactgggagctgtggaggtgtcaggacttactcttgtggctgggtcatgccttctgcctgggggcacaagggccctgtgccggagctgctttctccgctttgctccatgcagcgtgtctggcaccgtgcagccaggagagtgggagcatggtcacccccactcccctcttggttgtaactattggggcgaagtgcccaaggtcctcttgtaggagcgtgcgtggctggtgctggaaccctagatccgcggtggtgatggtaggggaggggcagggagtcatcagagactagaaatgtggcggagggaaaaccttccctggggttcccttgatgttcagttaccgtggctgtacggggcggggcttcctttgagccaatgggtggtgggtagtagacttggcgtctgtttcggtgcgttaggactttaaacgaagttagccttgaaaag

SEQ ID NO: 26740 - DNA, 1114 bp, Artificial sequence
  DNA replication origin
tctactccgccggcggcttgtgcaacccgcctgcaggggagctgaggggcggacccctttcctctctcccacccacctccggctctcccggaggccccgccttctcttgtcttccactggctaggcgagactccctttttttctccttcttggatgtggattggatgacattctcccgagctccgcctatcgggaggccgggctggagtttaagttgctaggatttttttttcgcggagggaggagggacggttcttgcggatgacgtgaggcgcaaggtcccgcccccgcctctgattggtggggcgggtagcccggcctcctccggcggagagagctgggaggggaagtccacccttgctccccgcctccctccgctcttgagcgcgctccgcacatgtgtgaggcccgcctagctccttcgaactgccctcccgcccggaagtcctaggctcggcgcccttggcgaggggggcggggagagccgagaagccacacaaaggttccaccgaggctcgagacctagtagccttcggggtgaagccaggggattacagtgcggagtggatttcgggagcgaaactccggaggttctgctgggtttgagatctgcctttcggggccggggccaagtactaaagttctaaccctgtcgcttggctatttccgtgccccttgacttccctgagcttaagctcgagaactctgcagacgctgcaagtgtctgttctttcctaggcatggcagcggctgtccttagttggctgtatctgagactctgacaacctagtgccctggcctggggcccttaggcgagatcttagcgcaggtggtaccctgtgttcacgggaagtcgtgggcggcctaatgctggcttgggttctgagtagttcttgataccatggtgggaatgccctgtggtactcagtctagtggtggaaggcggcgcaaagttaaaagtagccgtgggtcagttctgctggagtgccgcttcctcctaacctccgagcagtttggccctggggtcgcttcgttggtctgacttatttttagagctctgtcctggggcagggcttggctactggcgaggctgctcccacctgtcggctaccct

SEQ ID NO: 26741 - DNA, 1790 bp, Artificial sequence
  DNA replication origin
gctcgctaactccagctctcgagcaactccgagcgccgcgagctcagtgggccccgccgaccatgctcgagccgccgccccctgccgagcccgcacgccgcagctccggcccggttctagtcggtgtgcggaatcccccttttctttccagtatttttctttttaaaaaaacggcacaacaggagtcgggggtctcctgcccgccccttctccagtccgccgccaaaacctaccgaaaccgactgctcggtgagataaactaggctacacggccggcgcagggacgaccccaggccaggcccacccctctcccacggctccggccaggctgggaaacacacacactggcgagcgggcggcgccaagagctctccttcctggcctgtccctcgcctacctcggccgcggaactccgagcctcccctcagctcggtcccagggcccgcagggcccacaccacgtcgggccggccagaccgagcggccggcggactagccccccaaacgcctgagattggggggaccaaattaaaagcagctgtttaacataccttccgagccaggcgaggagtcctgaatgggggggaacgccccccacgggctattggctccccggcgctcacgtcagtcaccctgggcccgcctccgcccttcgccccgcctcttccccttcattgaacgccccctccttccaaaaaatataaattaattaattaaactaaacgcgagtgggagacgcatccgtggtagaggcccatatagctccctcgccgccgactcgagtttcttgaggtcctcggactggggggaggccgcctgggactcggagatccgctgggtggacgcggaggacgagccagcggagctacccggccccaacttccttcacacacacaacccatttggaactaggtaggagagaagggtaggagcaccctagtcactggctggagtgggcagactcctgtggctgtgtgacctaaccgtgttcggtccgctctgttaggcgactaaaaatgagtgatgcaaacaggaagccctgcgtccgcgggcaacaggcacttgcctgagcacctactgtgggtgaggcagacattcatacgtacctgctgctgggtgcaattacagactggatgacatgcttactctacccctccaagggctccagattcagccgaggagattctacgtaaggaactaaggcaaggcaggaatgtgtatgaaaataggaatgtgtatgtaaataggagctcagagaagagagattccttttcgctgaaggagaattgggaaaggtttcatgaaggaggtggcattcaagttgggtcttaaagatttcatccagcaaattggaggggcaggtcattttcatcaaaggacacaaaggggtgaatgcaaaaaaggaccttcatatgtggctgtagtaataaaaaaggaggggtggggagatggaacaaacagtttaagacttttagttgagtaaaattcttggacgtgcgcagcagaatgtgcaggcagcacggtcacaaggcccacagacccagaactatagtgtaagatgtttggcaccctggcagaaagatgggttctgacgatgcactgagagagaagtgcctataggcagcaaggggaggcccagaggctgttgtaatactgcgtttggagactgcagaagtgcctcttgtggaaggaatagctggggaaagagaaggcttcttttctctatcaaagccacccaatccgaaagctttccccaccttcagcagccctcaagtcaaagctttgactcag

SEQ ID NO: 26742 - DNA, 850 bp, Artificial sequence
  DNA replication origin
gtgccgtccgggaggaggtgggggggtcagccccccacccggccagccgccccgtccggaggtgaggggcgcctctgcccggccgcccctactggaagtgaggagccctcagcccggccagccaccccgtccggagggaggtggggaggtcagcccccgcccgccagccgcccgtccgggagggaggtggggggtcgccccccgcccggccagccgccccgtccgggagggaggtggggggggtcagcccccccgcccagccagccgccctgtccgggaggtgaggggtgcctctgcccggccgcccctactgggaagtgaggagcccctctgcccggccagccgccccgtccgggagggaggtgggggggggtcagcgcccctgcctggccagccgcccctccgggaggtgagggggcgcctctgcccggccgcccctactgggaagtgaggagcccctctgcccggccaccaccccgtctgggaggtgtgcccaacagctcattgagaacgggccaggatgacaatggcggctttgtggaatagaaaggggggaaaggtggggaaaagattgagaaatcggatggttgccgtgtctgtgtagaaagaagtagacatgggagacttttcattttgttctgcactaagaaaaattcctctgccttgggatcctgttgatctgtgaccttacccccaaccctgtgctctctgaaacatgtgctgtgtccactcagggttaaatggattaagggcggtgcaagatgtgctttgttaaacagatgcttgaaggcagcatgctccttaagagtcatcaccaggccgggcgcggtggctcacgcctgtaatccca

SEQ ID NO: 26743 - DNA, 1491 bp, Artificial sequence
  DNA replication origin
gccgtgtctgtgtagaaagaagtagacatgggagacttttcattttgttctgcactaagaaaaattcctctgccttgggatcctgttgatctgtgaccttacccccaaccctgtgctctctgaaacatgtgctgtgtccactcagggttaaatggattaagggcggtgcaagatgtgctttgttaaacagatgcttgaaggcagcatgctccttaagagtcatcaccaggccgggcgcggtggctcacgcctgtaatcccagcactttgggaggccgaggcgggcggatgacgaggtcaggagatcgagaccatcctggctaacacggtgaaaccccgtctctactaaaaatacaaaagattagccgggcgtggtggcgggcgcctgtagtcccagctactcgggaggctgaggcaggagaatggcgtgaacccgggaggcggagcttgcagtgagccgagatcgtgccactgcactccagcctgggcgacagagcgagactccgtctcaaaaaaaaaaaaaaaaaaaaaaaaaaagagtcatcaccaatccctaatctcaagtaatcagggacacaaacactgcggaaggccgcagggtcctctgcctaggaaaaccagagacctttgttcacttgtttatctgctgaccttccctccactattgtcccatgaccctgccaaatccccctctgtgagaaacacccaagaattatcaataaaaaaataaattaaaaaaaaatacaaaaaaatagctgggcgtggtggcaggcgcctgtagtcccagctacacgggaggctgaggcaggagaatggcataaacccgggagatggagcttgctgtgagctgagatcgtgccactgcactccagcctgagcgacagagcgagactctgtctcaaaaaaaaaaaaaattcattcatcatcagccatcatggaaatgcaaatccataccacgagatactaatttatacccactaggatggctacagatatcaaagatagataatactgttggcaaggatgtggaaaaactgaaaccctcatacatgtgtaaaccctccttatacatggctagtggtaatgtaaaatgctgcagttactttagaaaacagtctggttgttcctgaaaagattaaacagttaccatatgacccagcaattccactccttagcaaaataacataggtgcatacaaaaacttatacataaatatccatagcagcattattcgtaatagccaaaaatggaaacaactcaaatgtccttcaactgataaatgaataaaagtggtatatccatacaatggaatattatttggcagtaaaaagcagtgatgtgatgatacatgctatgacatggatggacctagaaaacattatgctaaatgatagaagccagacacaaaaagctacatagtctaggattctctttgtatgagatccctagaacaggcaaatctatggagataggaaataaatcagagtgggtt

SEQ ID NO: 26744 - DNA, 1392 bp, Artificial sequence
  DNA replication origin
gggctcctcacttcccagtaggggcggctgggcagaggcgcccctcacctcccggacggggcggctggccgggcggggggctgaccccacctccctcccggacggggcggctggccgggcggagggctgaccccccctcacctccctcccggacggggcggctggccgggcggggggctgacccccccacctccctcccggacggggggctgaccccccccccacctccctcccggatggggcggctggccgggttgggggctgactcccccacctccctcccggacggggtggctggccaggcagaggggctcctcacttcccagtaggggcggctgggcagaggcgcccctcacctcccggacggggcggctggccgggcggggggctgacccccccacctccctcccggacggagcggctggccgggcggggggctgacccccccacctccctcccggacggggcggctgccgggcggagacgctcctcacttcccagacggggtggctgccgggcagagggactcctcacttctcagacggggcggctgccgggcggaggggctcctcacttctcagatggggcggatgctgggcggagggtctcctcacttctcagacggggcggctgggcagagacgctcctcacctcccagacggggtcgcgaccgggcagaggagctcctcacatcccagacggggcagcggggcagaggcgctccccacatctcagacgatgggcggccgggcagagatgctcctcacttcccagatgggatggctgccgggaagaggcgctcctcacttcctagatgggatggcggccgggcagagacgctcctcactttccagactgggcagccaggcagaggggctcctcacgtcccagacgatgggcggccaggcagagacgctcctcacttcccagacggggtggtggccgggcagaggctgcaatctcggcactttgggaggccaaggcaggcggctgggagatggaggttgtagtgagctgagatcacgccactgcactccagcctgggcaccattgggtgcttcttgctaacatcctatgctctgaaatttctgaaggtctttggtaccaacaggataaccctgttggacatatttttggatatttttctgaaatgcaagttttttttaaaaaaagtaggttcaaaataggctactctctattccagtactcagtgtgagtgctggtctgttcatttgggcagtttctccccataacatttatggtataacattacttcttgaggaggggtatgtggtacacttaaaataatccacagtcagagagtacagttgcctcataggactttaaccccttgagattttcattctactcaaatcctatcacaaaaccatc

SEQ ID NO: 26745 - DNA, 1035 bp, Artificial sequence
  DNA replication origin
ggggctcagccccccgcccggccagccgacccgtccgggagggaggtggggggatcagccccccgcccggccagccgcccggtccgggagggaggtggaggggtcagccccacgtccgggagggaggtggggggggtcagccccccgcccagccagccgccccgtccaggaggtgaggggcgcctctgccctgccgcccctactgggaagtgaggagcccctctgcccggccagccgccccgtctgggagggaggtgggggggtcagccccccgcccggccagccgccctgtccgggagggaggtgggggggtcagccccccgcccgggaggtgaggggcgcctctgcccggccgcccctactgggaagtgaggagcccctctgcccggccagccgccccgtccgggagggaggtgggggggtcagccccccgcctggccagccgccccgtccgggagggaggtgggggggtctggccagccaccccgtccgggaggtgaggggcacctctgcccagccacccctactaggaagtgaggagcccctctgcccagccaccacctcgtctgggaggtgtacccaacagctcattgagaacgggccaggatgacaatggcggttttgtggaatagaaaggggggaaaggtggggaaaagattgagaaatcggatggttgccgtgtctgtgtagaaagtagacatgggagacttttcattttgttctgtactaagataaattcttctgccttgggatcctgttgatcggtgaccttacccccaaccctgtgctctctgaaacatgtgctgtgtccactcagggttaaatggattaagggcggtgcaagatgtgctttgttaaacagatgcttgaaggcagcatgctcgttaagaatcatcaccactccctaatctcaagtacccagggacacaaacactgcggaaggccgcagggtcctctgcctaggaaaaccagagacctttgttcacttgtttatctgccaaccttccctccactattgtcctatgaccctgccaa

SEQ ID NO: 26746 - DNA, 936 bp, Artificial sequence
  DNA replication origin
tttcagagagcatcgggctgggggcaaggtcacagatcaacagcatcccaaggcagaagaattcctcccagcacagaacaaaatggagtctcccatgtctacttctttctacacagacacagcaacagtctgatttctctatcttttccccacatttcccccttttctactcgacaaaaccgccatcgtcgtcatggcccgttctcaatgagctgttgggtacacctcccagacggggtggtggccgggcagaggggatcctcacttcttagacggggcggctgccgggcggaggggctcctcacttagacggggcggccgggcagaggcgctcctcacatcccagacggggcggcggggcagaggcgctccccacatctcagacgatgggcggctgggcagagacgctcctcacttcctagacgggatggcggccgggaagaggtgctcctcacttcccagacctggcagccgggcagaggggatcctcacatcccagacgatgggtggccaggcagagacgctcctcacttcccagacggggtggcagccgggcagaggctgcaatctcggcactttgggaggccaaggcaggcggctgggaggtggaggttgtagcgagccgagatcacgccactgcactccagcctgggcaacattgagcactgagtgaacgagactccgtctgcaatcccggcaccttgggaggccgaggctggcagatcactcgcggttaggagctggagaccagcccggccaacacagcgaaaccccgtctccaccaaaaaaatacaaaaaccagtcaggtgtggcggcgcgcgcctgcagtcgcaggcactcggcaggctgaggcaggagaatcaggcagggaggttgcagtgagcagagatggcagcagtacagtccagcttcggctcggcgtcagagggagaccgt

SEQ ID NO: 26747 - DNA, 867 bp, Artificial sequence
  DNA replication origin
tcccaaggtgccgggattgcagacggagtctcgttcactcagtgctcaatgttgcccaggctggagtgcagtggcgtgatctcggctcgctacaacctccacctcccagccgcctgccttggcctcccaaagtgccgagattgcagcctctgcccggctgccaccccgtctgggaagtgaggagcgtctctgcctggccacccatcgtctgggatgtgaggatcccctctgcccggctgccaggtctgggaagtgaggagcacctcttcccggccgccatcccgtctaggaagtgaggagcgtctctgcccagccgcccatcgtctgagatgtggggagcgcctctgccccgccgccccgtctgggatgtgaggagcgcctctgcccggccgccccgtctaagtgaggagcccctccgcccggcagccgccccgtctaagaagtgaggatcccctctgcccggccaccaccccgtctgggaggtgtacccaacagctcattgagaacgggccatgacgacgatggcggttttgtcgagtagaaaagggggaaatgtggggaaaagatagagaaatcagactgttgctgtgtctgtgtagaaagaagtagacatgggagactccattttgttctgtgctgggaggaattcttctgccttgggatgctgttgatctgtgaccttgcccccagcccgatgctctctgaaacatgtgctgtgtccactcagcgttagatggattaagggcggtgcaagatgtgctttgttgaacagatgcttgagggcagcatgcttgttaagagtcatcaaccactccctaatctcaagtacccagggacacaaacactgcggaaggccgcagggtcctc

SEQ ID NO: 26748 - DNA, 1265 bp, Artificial sequence
  DNA replication origin
aaaaggatttcctcccggaagagagcggcagttcggagagatttttcttaaggaagcagaagcggcgtttgcggccgctgcaggcgccgggccctgccggccacactatgcgcgagccggccccgggctgctgaggcgcggggacgcggaagcggaggccgagcgcgccgggctcccgcgctcgcgagcgagttttgtccgcccggcggcggtggcggggggatggagcccgcgaccgcgccccggcccgacatggcgccggagctgaccccggaggaggagcaggtaagcgggcccgaggccgccgcgttgggtgtgtccgggcccccgaggcctacgccggcctctgcctcccgagtgccggctctttgcagccacggggccgcagccccccgctcccgtgcccggctcgcgggcctccctcaccggcgaccgcgccccaggccgccaccccctcgtcgggggacccacgggaccctactcccgttcccgccgcttctttcgccgaggcttaccagcctcagacggtgccctccgcaccccaccccctattccaggggcaaagttccttggatccaggggccttcttcccgagatttgcagaaccgctgcttgcccccggcccttccactcccttgtaaatgttttccgtgagggtttgtggcttttgaagggcaggaaaagccccagtttggggggtgcttcctgtggggattatctcccttcccgaggagagggctgagagtattggatgcatagatgccctagattttcagaggagcctcttaggtttctcaggcccacttgggcaggttatggaagatccagcccttctcgtgttcctaaagtccctggccttgacccccctattcagctatcccagacggggcgcatctcctcacccgcgcttccctaccctcgtctcatctgactgtctccatctttctgaagcttacattgagctctattgttccttaaaagcctatgacctttagttttcagaaggaagtggtttgctgtctcattttgggggcccttgtaactttccctcccgcacattccagctgcggagacagggaccactcctgaggaagatgggaaggtctgctagcttagactgggaaccctacgggcttttcgctgtctcttccttggcactgcccataccccgccatagctatgctcgattatagtcatagtctgattccatgttataaataaaaaaaataaaaataaacatgaaaaaagaaaaaggcaaaccatgc

SEQ ID NO: 26749 - DNA, 1238 bp, Artificial sequence
  DNA replication origin
atctcctggggaagaaaaagtgcaggcgaagagctaacagccactcgggatttaaaaggaaataggaaatcaggaacttttagagccgggagcgaagggtcggcggaaatttcccgaaggccgccgaccccctcggcgccccgcttcctcggccgcgctcccgctcctccacagcgccacagagctcggggccgcccagccgggccgtcctcgcggacgctggccctgcgacctgcgcggctgcctcagccaggctcctcgcgggcggccgcagcgaaagggagggagtggagagggagcgagggaaacgcgcccccctcctgactcacggccaacgctgcggccgccccgcggccgcccgagccccccgcggctccattgagaaactgagcgtctcattcacaagctggcggcgaggagggcccggcggagcgaggacgcagtccgggagggggagacagagaggagcccgggcgggggaggggaccgggagggggaggggacccgggcggggaggggaccctagctggacggaaggcaactcgactgcgggagggagaaaaaggaagaaaagagtatttcgtgaggctcagatcctcggaggaggaggagaatacgttcgtttgcaaattatctgctgactggcacctctcctggggttaacttgccgctgccacctacgcgtgagaaacccacaatcctcaactatttgtcgcttgcagcctgaaagaccctggaaaggttgcctgccaggccaggatgcttaggtggaaggaatcgcacctgcctccctctctctccctccttactggctgcaccctgtaattcatctccagtgtcgctaattttaatcccccatagaaacgacatcagactccgaacatcattcaggaatgacgcggcctttgcagacctttgattttcactagggcaagtgcagcaaagggttcaggattaggggtacagtcttggagtcatttggggaggaatggggcatagagaaggcaaggctgggtctggtacgttgttgcattattccaagccaaagataaatattccaaagggacccaaagtccacaactagttccaaggctgaagccctggagccagtcctgagggacccaaaggaggggccttcagacaacaggaaggtgctgtgagttgtgatgctcctatgattttttttttatttttttttttgagacggagtctctgtgtcgcccaggctggagtgcagt

SEQ ID NO: 26750 - DNA, 884 bp, Artificial sequence
  DNA replication origin
aggcaggaagatcacttgagtccaagattccaggagtttgagtccaggctgggcaacacagtgagacctcatctgtacaaaatataaagaaaatcagctaggagtagtgatgcacacctgtagtcccaggtacttgggaggctgaggtgtgaggatcacttgagcctgggaaataaaggctgcagtgaactgtgattacaccactgcactccagcctgggcaagagagtcagaccttgttgaaaagggaggagaggggaggggaagggaagggagggaaggtgtaggggaaaagaggggtgaggggaggaggggggaaggaaggggaggggaagaaaaggggaagggaggaaaaggggaggggagggaaggaaaggggaggggaggggggagaggaggaaaaggggagggaggaggggaaggaaggggaggggaagagaggggagtgggaggggaggggagagggaggggaggaaagaaaagaaaaagccaaaaataaagctaccaatccccctcctaggtatataccccaaagaaaggaaatcagtatgttgaagagacatctgcactcccatgtttactgctgcactattcacaatagctaaaatttggaagcagcctaagtgttcatcaacatataaatggataaagaaaatgtggcacagatacacaatggagaactattaagtcataaaaaagaatgaggccgggtacagtgactcacgcctgtaatttcagcactttgggaggccgaggggcagatcacttgaggccaggggttgaagaccagcctagccaacatgatgaatccctgtctctgtttaaaaaaatactaaaaatacaaaaattaaccgggtgtggtggcgcatacctgtaatcccagct

SEQ ID NO: 26751 - DNA, 1172 bp, Artificial sequence
  DNA replication origin
gcggcgcgtgcgacggtcacctcggtttgggtgagtccctgggttcgagcccgggccccgccagctgccgagttgcctctcggtgccggactgtgactccctctggccggccctgcactctggcctcctgggacgtcatctggagggatagagccaggcctgggactccttttgggagagtttccgttcttctattccgtgctgtccggccaggacccctcagggacttctgtggggcaggggcgaatcatgcatggcctagatgaccccatgcctagaaaaaggcagtgcggggcggtggcggcgcgcacggccgagtgaagcagatagcgtccccggggctggagcccggtagcaggggtagggaaacgcggaggctgccaggatgcggacccaggggacgcgaggcgggggcgccggatggggagacgcgaaggagggggaaggggatgggggagggggctagacagggagggagggtggagcgtgggcggggcctggggcgggtcggactttagggagttggagcgggggttactggtgctaagaccacctggggctaaggtccgaacacttggaggcagcaccatccaaggaatgggttgaaacagcaggagcccggcggggcgcagtggctcacgcctgtaatcccagcactttgggaggccgaggtgggcggatcacctgaggtcaggagtttgagaccagcctgaccaacatggtgaaaccccatctgtactaaaaatacaaaaaaaattagccgggcgttgtggcgcgtgcctgtaatcccagctactcgggaggctgaggcaggagaatcgcttgaatccgggagatggaggttgcagtgagccgagatcatgccactgcactccagcctgggcaacaagagcgaaactctgtctcaaaaaaaaaacaacaacaacaaagaaaaaacaaaacgaaacagcaggaacccgccaagaacagccttgaaggaaggtaaaggaaccgccccagtatccaggacatcagtttttcttttttttttctttttgagacgaagtccaggctggagtgcagtggcacgatctcgactcactgcaagctccgccttacgggttcaagccattctcctgcctcagcctcccgagcatctgggactacaggcgcccgtcaccatgcctggctaa

SEQ ID NO: 26752 - DNA, 1106 bp, Artificial sequence
  DNA replication origin
ctgctgaagcaggtggacttcctgaactgggaggtcaccgaccacaacctgcacgagctgcgcgtgctgcggcgttaccggctgcagcggcgggaggactacacgcgctacaaccagctgagccgtgccgtgcgtgagctggcgcggcgcctgcgcgacctgcccgaacgcgaccagttccgcgtgcgcgcttcggccgcgctgctggacaagctgtatgctctcggcttggtgcccacgcgcggttcgctggagctctgcgacttcgtcacggcctcgtccttctgccgccgccgcctccccaccgtgctcctcaagctgcgcatggcgcagcaccttcaggctgccgtggcctttgtggagcaagggcacgtacgcgtgggccctgacgtggttaccgaccccgccttccttgtcacgcgcagcatggaggactttgtcacttgggtggactcgtccaagatcaagcggcacgtgctagagtacaatgaggagcgcgatgacttcgatctggaagcctagcggatctcccactttgcatggctgtcttttacagatgggaaaactgaggcctgatgctggagattctatgagggtgctctcctcaagggtatcagacggtcgtaggttcttaagaatttgattcatcagtggcaggccatgcatagagccacgggaggtgcgtccttgttttccagggaatgttcttagaacttggactactgattattaattgactgtgccttgggaaacagtgggaagtaacttggtgcagcactggggtattgttggcttcttgtgttggaaactttgtaatgtaaaaggaaaaactggaaatccccacgccctgtttccctttatcgtcttgtggttggactggttcaattcgtttaactcgaattcttgctcctggccgtggttaagctgtgtacagatgatggagagtttggcctcaagtttttataaactgagcgagactagtgttcaggatctcctcccttgtttaaatgtcaataaatgccccaactgctttgtaagtgcaactttttaatctgtctggttttctttttttctctagagacggagtcttgctctgtcacccaggc

SEQ ID NO: 26753 - DNA, 957 bp, Artificial sequence
  DNA replication origin
tggcgctcagtccgggaggcgagagggaggaaacgacccgggaacgagggggcccgagagcctccggggctggtccctgggaccgccacctcccctcctctccctccgcctgtccgccctcgccgggagacacctcacgcccccgtggttggagcgcccggcgggggagcttgccagctgccgctgcctcgcttcctggactccgtcatcctcctgccttttccgtgacgcaaatggagtaaaactccgaaagtttgcaaagcgtggggctgcaaggagcaccgcgccagagccaggatcgggagatcggggtggggggaggggggtgcgtggaaagccgccgcgccagctggggttggggagcagagtcgcggactcgccttcccaccttcccattccccactcctgctccgcagggacgggtcgtggcgcagctcagagattgttttccggaggaacagaaacggcctgcgcgttccaggcgtctgacctaagataccgagagctgcgggtgcagcaccctagccagacagggcgaccctgccctgggcgactagcttggaaggagggaaagacactactctacatctgcagcgacagggaacaagtctaggtgccacccggttccgtgttgcttagtacagcagcggggactggatgttctgtgctagccagcggcagcaaggagagaagtggtcaggtagagaatcttcgagaagaggcaagtgggatctgaccctcggtcagcatatcgggaacactttgggcattgattctgctaggcactgtgctgggcactggggagtagtacaccacaaggcagtcggggtttctatcctggggggcttacagtccaccctctcttgtctttaatcaatccattctgtctcagtcattcattcagccaagtcatgcactcaagaaacattaactgagtacctactctgcaccaggccc

SEQ ID NO: 26754 - DNA, 1207 bp, Artificial sequence
  DNA replication origin
catcattcagtctcagtttcctccagcatcactcaagcgatggttaccacgattatacatggccacgagttcacgagtgtggatgctgtcactgcctcaggccggctgcatcctcaaagccacacaggtcagccaggttgggtgggcctgagtgcacaagagctaccattttttcagtcctctgtgctggtaccacgactgtttggaaggtaggaactcctattgtcaacattttccagcagacggtggctcagaggcattgagtcactgcgagattgcgcacctgccccatggcaggcctgggctgaggtctgcctgcacttggagccgtgcccttcccaccgcaccaggctgccttttgaaggctggggggctaggcgtggcgggggccactgtcctgctgcagtgtgaacacaagggtgctgggaatcgaagggaatggggagggagaggggcaggtggccgtgaggggcaggtggtgggtattgggtggaggtggctgtgttccttcaagtcagtgggtgaaaggtcagagggcttggcccacagagagtgctgagcaaatatttgtggagagataattttctggaaggcccgaggctggggcatggggtcaggttctggctgtggaggagggggctagacaggtgaggccatgggcagcgagctgggggcaggagcaggactctggtctctgagaagaactcaggagcctccttactccaggagacaatatgggggcagtgagagctggcaggaaaatgtcgagactcggggaagggggcttgtgagtgctgagccaaaaagggctctggccctggggctgggctggggtgtcaggtggggcaggcagaggtggggtgatggagtctctgcctgcatctggtacctggagtgtgtggacccacctgtgtggttgcaggtgcctgtcagtgtgtgcacctgtacctacctgcgtgtatgtccctgtggtggcgctggcgcttggtatctatagtcattcagccacacgagcttttccctgtgtttctcagcctggaaaagacaattcctctccccctgaacctcaggcccaccttgggctcatgcctggctcctctctttctctcattccacatcccatccacaagcacagccttgttagtccatcaaatgagaccccaaatgtaatgctctcaccacctgggtccaaaccactaggcttacc

SEQ ID NO: 26755 - DNA, 1384 bp, Artificial sequence
  DNA replication origin
cacccccacaggcgagccaggccccatggcatccagccctgagcccgctgtggccaagggaggcttcctgagcttccttgaggccaacatgttcagcgtcatcatccccatgtgcctggtacttctgctcctggcgctcatcctgcccctgctcttctacctccgaaaacgcaacaagacgggcaagcatgacgtccaggtcctgactgccaagccccgcaacggcctggctggtgacaccgagacctttcgcaaggtggagccaggccaggccatcccgctcacagctgtgcctggccaggggccccctccaggaggccagcctgacccagagctgctgcagttctgccggacacccaaccctgcccttaagaatggccagtactgggtgtgaggcctggcctgggcccagatgctgatcgggccagggacaggcttgcccatgtcccgggccccattgcttccatgcctggtgctgtctgagtatccccagagcaagagagacctggagacaccaggggtggagggtcctgggagatagtcccaggggtccgggacagagtggagtcaagagctggaacctccctcagctcactccgagcctggagaactgcaggggccaaggtggaggcaggcttaagttcagtcctcctgccctggagctggtttgggctgtcaaaaccagggtaacctcctacatgggtcatgactctgggtcctgggtctgtgaccttgggtaagtcgcgcctgacccaggctgctaagagggcaaggagaaggaagtaccctggggagggaagggacagaggaagctattcctggcttttccactccaacccaggccaccctttgtctctgccccagagttgagaaaaaaacttcctcccctggttttttagggagatggtatcccctggagtagagggcaagaggagagagcgcctccagtctagaaggcataagccaataggataatatattcagggtgcagggtgggtaggttgctctggggatgggtttatttaagggagattgcaaggaagctatttaacatggtgctgagctagccaggactgatggagcccctgggggtgtgggatggaggagggtctgcagccagttcattcccagggccccatcttgatgggccaagggctaaacatgcatgtgtcagtggctttggagcaggttaggctggggctcatcgagggtctcaggccgaggccactgcggtgccagtgcccccctgaggactagggcaggcagctgggggcacttggttccatggagcctggataaacagtgctttggaggctctggacagctgtgtggtgtttgtgtcttaactatgcactgggcccttgtctgcgtcggcttgcataca

SEQ ID NO: 26756 - DNA, 986 bp, Artificial sequence
  DNA replication origin
aagctttggggcgctcctcactgagccagcagcagctccgggtggtttcagatcgggaggagccagaggcagcataccgcctcatccagggaccccagtatgggcatctcctggtgggcgggcggcccacctcggccttcagccaattccagatagaccagggcgaggtggtctttgccttcaccaacttctcctcctctcatgaccacttcagagtcctggcactggctaggggtgtcaatgcatcagccgtagtgaacgtcactgtgagggctctgctgcatgtgtgggcaggtgggccatggccccagggtgccaccctgcgcctggaccccaccgtcctagatgctggcgagctggccaaccgcacaggcagtgtgccgcgcttccgcctcctggagggaccccggcatggccgcgtggtccgcgtgccccgagccaggacggagcccgggggcagccagctggtggagcagttcactcagcaggaccttgaggacgggaggctggggctggaggtgggcaggccagaggggagggcccccggccccgcaggtgacagtctcactctggagctgtgggcacagggcgtcccgcctgctgtggcctccctggactttgccactgagccttacaatgctgcccggccctacagcgtggccctgctcagtgtccccgaggccgcccggacggaagcagggaagccagagagcagcacccccacaggcgagccaggccccatggcatccagccctgagcccgctgtggccaagggaggcttcctgagcttccttgaggccaacatgttcagcgtcatcatccccatgtgcctggtacttctgctcctggcgctcatcctgcccctgctcttctacctccgaaaacgcaacaagacgggcaagcatgacgtccaggtcctgactgccaagccccgcaacggcctggctggtgacaccgagacctttcgcaaggtggagccaggccag

SEQ ID NO: 26757 - DNA, 940 bp, Artificial sequence
  DNA replication origin
gggcaggggtgggctggccccatcagacatgctcagctggaagatgcctgccacgctgctcccgttggccacgaaggccagccgccctgaatccacatcggcttgcgtgaagcgggtcacgggccccaggccaccacccaccaggctgaggaagccgttgtggggtgcccgctggacctcgtactcaatctccccaggagctgagtctgggtccaccacactcagctgggcccgggagatgggggcacgagagcctcgggtgagccggagtgggacagaggcctgtggctgagggggccgctcatttacatccctcaccgtgatggcaaaggcctctgaggtttggggtccagccacggaggcccctgctggcccctggaggtgggcacgaaagtggaagccatcctgctgggtgcccccaccgccgtgggcatacactagctgccctgcagccagctgggactgcaggaagtggggctgcccagcatggaggggctcctcggacaccaacagctggccccggctggggaactgtgtgacctggaagagcacatcatgctctgagcgctggggtgatggaacgctggccaagagattggaggcatccagagcagccacggtgatcctggcccgctggccctcggggacccagagacctgggggtgggacataggctatgagggtccagcccactgaggggagagtgatggaccctcagctgggggtgcctcagggcaaggatgtgcctccccccaaccatcaagccaggtcctccagggtggggctcagggttcccaggaggataaggactatgtccccgctgtgatgtcaaagcttccccactcaccctccctgtgacttcccaggtcctgggggctgagacaggagctgctgaccctggcctcgtgtcccctcctcctgggcctctcccattgtccct

SEQ ID NO: 26758 - DNA, 956 bp, Artificial sequence
  DNA replication origin
catgctctgagcgctggggtgatggaacgctggccaagagattggaggcatccagagcagccacggtgatcctggcccgctggccctcggggacccagagacctgggggtgggacataggctatgagggtccagcccactgaggggagagtgatggaccctcagctgggggtgcctcagggcaaggatgtgcctccccccaaccatcaagccaggtcctccagggtggggctcagggttcccaggaggataaggactatgtccccgctgtgatgtcaaagcttccccactcaccctccctgtgacttcccaggtcctgggggctgagacaggagctgctgaccctggcctcgtgtcccctcctcctgggcctctcccattgtccctccccacaatcttgccagcttatcatgctgttcacctttgttcttccagaggtggctggggcgctggggacaggcagcctcaaaagacacagccacagcaagggtggcggccacgtcccgggcaggcggcgaggacagctggagctctagggtatcatgggcctcccaaaagggctcggggggcatctcatgctcatacagaatattcccagcgtagacctaggggagacaccatcgtggggtgagaggcaggtccagcctgtgttgtccagacactgagcacttttgtctcctcaggccccactctgggctctcctgggtgtgcccaggtctgtgcgtgtgacccgctgtctccctcactaactcactgggtcacatcaggcaatgcagtgcagagctgggctctggagccggagcctgggctcaaaccccaactctgccaccctggggaaatcgcctaatttctctgacctctggggaatgcaatgatctgtctgtgctgctctctaaagcgagtacttcctcttgtgcacaggatcctatcccctcttgccttctgaagacaccactt

SEQ ID NO: 26759 - DNA, 1305 bp, Artificial sequence
  DNA replication origin
tactattgggcaagtcctgtttttctctgagaagaaaatagttcccagtgtttcctaaaaggggaaaataaggccgggcgcggtggctcacagctgtaatcccagcactttgggaggccaaggcgggtggatcacgaggtcaagagatcgaaactatcctggctaacatggtgaaaccccatctctactaaaatacaaaaaatgagctgggcgtggtggcacgcatttatagtcccagctactcaggaggctgaggcaggggaatcgcttgaacccgggaggtggaggtggaggttgcagtgagccaagatcgtgccactgcattccagcctgggcgacagagcaagactccgtctcaaaaaaaagggtgggtggggagcaaaagataggccaaaagaacacattgtgattggaggtggagaaaaccgtttttcttcctggagcgaagaatattctttggtgttgaactgcaggcagcaccatagaacagcaggtgtgtctggagtggaggtgaggggagttgaggtcgcaggggtgatatggtcacagccaggccttagtggtcagatggggagacactgcactatgtgagccaaagagccccataatcttccctttcaaaaggctcactctggctgctgtgttaggaacaaaatgtaatgggcgggggactgcagctgggacacaggaagctgttacgataatccaggtgagagatgcggtggtttgagggaaagagaggatgcaagggtggttccaagggtgtggcctgagcccttgaaaacggagctatagtctctgaagcaggatgactgtaggaggtgggggccgatcgggagtgcagccggggcaggttgagtttgaggtgtctattagatatcggcagaggtagctggaaacatgagtctggggttcaggggagagcaggctaggctggagctacaaataagggggtctcagcacagctggcatttgaggccaggagactgaataaggactcatggagagtgcctgtagacagaaaagagcctggagacctggccataagatgttggggagaagaggaggaccagccaggagagtctgtgaggtaggaggaaccccagagtgaagtatcccagagcctgtggctctcttggaggaagggttgcttggcggcaccagtgccactgagcagttaagaggaggctgagagccgaccgctggatccaacaacacggaggcctctggtgcccttggcaaaaggagatgtggcgatgggggagcaaaatcctgggtagagagacccaagaatgcctgggggag

SEQ ID NO: 26760 - DNA, 1090 bp, Artificial sequence
  DNA replication origin
cccaggtgggtgtgctgatcatgggcattcctgggtgccaggagctggggcggagctgagggtggcatgccagggtcacgctgcctctttgcaaacacaggcctggacctggctcccagtcaaaatctgatatccccttttgcctctggcagggtccgtccagccactcagcagtcagaccctcagggccagctccagcgcaggcactgacccccagctcctgctctaccgtgtggtgcggggcccccagctaggccggctgttccacgcccagcaggacagcacaggggaggccctggtgaacttcactcaggcagaggtaagggcccaactttgcagccaccactcagatgcccccagcctcaggtggccgctgtgccatggacatcatgtggacatggatgccagctccagcatcactggcagcagacgttcccgggcctgccattgtccaggcgctagtgtcctgtcctccaggagccgccaggctggcagggcaagttcatgttcccagaaggagggagaaggatgcagaaagtcggggatacagggccctagagcagggctggggtcttggggtatagcttccagaaggaagctacagccggacccgagggtctggagagggggcaccatgtgggggcactagtggtaccccagtagctgatgaggggcagtgcttggtgggggatggagttggacgtgaagcagcggctgggcctgtgggcagaggtgtgagcctggggctcaggtcaagtgccagccagaggcagagtggatcctaggggcagatgagctgatgaaaggcagctgagtcagccaagagggtgaagctgctgttcatccgtcctggtggcttcagagaccaccaggaagaattagagctctcagccatgggtagcagcagactctctgtgataactgtgccatgggggccagcccagtcatcacttaaatgaacaccactcgctgaagacagaacaggagttgttccatagcagggcagagcggggcagactcttccatgggccatcccaggcaggcggcacatgtgatgctcccgccaggaggctgcatgggcatctggacc

SEQ ID NO: 26761 - DNA, 1692 bp, Artificial sequence
  DNA replication origin
ccacgtctaaatgctgcagagacctctgtcggggtcagggcagcaccaaaaactcttgagccaagagacacacactcaggtcagctgaccttctgtttagttgcctttctggtcccttgcaaggccaagggggccagggaggaaaacagtttcctcagctattggctgggccctgaccctggtcactggcctcagctaccatcctctaaccaagcgctttgagtcacccacgtagaggggcatgtgctggggaacatttccagttgagggaacccgtctggaagatgagtggaagcaggggcaggtggggtgggagaagctgagcttggtccacagaggctgataggggctgcaccctgggctcccagccacatgtcccaaccctggggccttgtggagcacagaggaagcaggaggggaaatgagaggttttgagggaagaagcagcccagagtccacccaggcgggagggctgggccgggggaggaggaagcggggcctcaatggtgtctttgtggaagtcttgctgctccccaggcctcaggcgaggagggtggggtggctgcggtggggagcggttccaagaggcttttccctgccttataatcttccctcttggacagggagatgggtgggtttccaggctccatccgtaccctcctttcccccactttcctggccctagaggacctgggaccctcacctcagtggacccaggctggggtagggtttctggcagggaagagaagagtgaaggaccctcacttggcactgggcctgcacagccccccagccctagcagggctcctgggaggcatctcccatgttacaggtgaggaaactgaggctcagagagggcagtcctccgtgctagcctgtggagcagcggcagggctgggacttaagctcctgtgggtgtggctccagagctaggggctgtgggtgtcagcagggcacatgcaccgtgtgtgcacccagagaggcgtggtgggtttgcttgctgcctgtgaatcggaagtggagcatctgccaatggccccagtgggaggagggtgtgagagctggaccccagcctggggaacacacactctttcccttcctgtcccctgggactcttctgtcagggccgggtggagggggcagcgaggagggggggacagcgaggaggggagggaagcatctgctctccttgggcggtttggcagcccctcctctgtggctctggggctggccgaatcgggagggcccttctgcaggggctggcgggggatgactaggtccagaagccagtgataagtgccagccctgcccactggtgacttggaggtctgggaggagggtggagagacaggggtctgggtgggagctgcccccaggaggctgagggccaggctctctcctgggctgtgtccaggaccaggcagcccatggctcatctctgagttccccttggctctggcagcagaaactgctgaagacagggctgctggggcggcgtctcggggcttccccagcctggcgggctgggtctggagatagtgagtgtgtgagttgggatgggggaagaacagaggaaatggtgactgtgggtctggacggctgcctggacctgaaatctggtggcacaacttgtgcacagtagccttgtgtgcctcctcctcagttcccccatctgaatacagagggtgggct

SEQ ID NO: 26762 - DNA, 936 bp, Artificial sequence
  DNA replication origin
aggacatttcacaggtggacaggagagaagagctggcccagcagcaggcccagcctgagcgaaggcagcaggtcggccctgctaggtgtgcacggagtcagtgcagagtctagtgagacggaggcgtggagtgtccttggaagagagcaagagaccctgcaggcagagttgagggcaccctggccttcagtgccacccgggggtgggggcctgaccctggggcaatgggagccaccaaaggcaagggaggctgagggagtggctttcagtttgggttaactggggctgctattagcaaagggagtcaggagattgattaagccagaccgaggacggtggccagccgccttatggatggaccagggagcaagagaggaagatgaagttgaaggagaatttggggactggatggatggaacctgagtattaatcagcagtggctgtggggagggaggaggaggagagttcagtgcgaccctcagatgtctactcagcaacaggtggacagtcgggccttcacggggctggcgagccagctgtaggggagagtacactgagtcctccttgctttgggtggggttgggcttgggggttcctgtgggtgttcctgccatggacatctgagggacactggcagtgggcctggagccctggagagttggtgccagtgagagagacgtggtgcattagcagaggctgggcctgaggccgggagagaaaaggagggccagagggagtgtggtggcggtgggcacagctccagggggggcccacaggctgcaggcttccaggcagttggcaggtgggggtgctaggcaggaacctattccaggaggagtcaggcctgcccaggaagagaggtctcagtctcgggatctctgatgggcctgggtagcccagagcttcactagcaaggacactgaggtttcctggtgc

SEQ ID NO: 26763 - DNA, 803 bp, Artificial sequence
  DNA replication origin
ggtaaaggagaagggaaggagaacagagcaggactggagagatgggcagacagacagagagacagggtaggaaagacagacagaaagagatggaggaaccacagccaggggtgggaaaggacagagagatggagagagcgggatggggggatggactgagagatcgggggtgctctgcagcccgggtgaccctgcgcaggggcagacagaagccgtgaggggagactgaagtgtggcttccgtcccatagagtcttcatggtgctccaggcagcgtggtcagagtccgggtggagccggtgaggagggaggaagcaggcgtctctgtggcctcgcccacccccagcctccagggtctaggggctggagaccctccgttcccggcagtctccacggggaaggcccaggcctgttggaggcaacgcaatgcggtggggcagagcccagattgaccttgtcaccaagatccccaagggctgtcttgggcacggccgggaccttgagggacaggtctggtctctggcttgttatggagtgagttccctaggcctggagggctcacaagctaaggctatggcctggactcacacctgctgccagcctctacgcagacccctcccttggctgcgcttgtaggggctgtggggtaaccgtagcctggggcatgtgtcatggagccacaagcagtgactcagacagttaaaaaaggagcagctctgagtggtgactcaattggctctggaggggctgggtgggtctggctggtacaagatggggtggtctgggtttatttttggcagggcg

SEQ ID NO: 26764 - DNA, 974 bp, Artificial sequence
  DNA replication origin
actgaaaggcagaatgtgaggggttgaagtgggacccaggttggggagtacctggcagggagggcttgtgtgttacctgggtggggactcagaactgatgggggtatcttagtgagcagggccacagggacaccaggtacaagaaattgaagcagggtagatcctgctgcctctgaggatggcttggggggaccgatggtgctcgggacaggcactgagccttgtgtgcaccttgtgtgccaccccaggcctccggagcagggcagggcccaggggccagagcccttggcccagcccacccggactcgagaaaaactgttctagagcaagtgtaacggagcctccctccctacgcctgcccgcccgggcaggacaagaagggccttttagtgctgcccgcctggggggcctggggtgggccatgccaggtgggccaggcggctgtcgatgacggcaggaggggagtagggtgcgtgtggagctctcagaggaagtgtataggctgtgtctgggaactgggcgtgctgcccaggaggggcgggcaggggagggggagttggaaatagccttgacgtccgcacttactggcgcacacagatgtgggcacacacacttgcacacggccactctcacagacctggacgaggtggctactgcctctgtctccaagtcccctaccttaaagatctgggccagtggcacttgcggggaaggaagtgagcacaggatggggacaggggtgccacctgaggtgtgtcttctattcaaggccaggggcaaatgaacaaggggcctgtgggcatgggactgaggcctggtccctccctggtccctctgctccttcactgcctttccccctgactcccgccccatccagctctcctcttgcctccaacatgccctccgccccagcatatgtcagttcaatagagccttccagagttaaggctcttcctccagctgcaggcttaggg

SEQ ID NO: 26765 - DNA, 1276 bp, Artificial sequence
  DNA replication origin
ccttcccatccaccaaggcttggtttgaggcccaccctgtgtcctgccccagcttgcccctgcttttctcccctctgtacttttcatccagatttttgctgtttgagatttaatttgcctttctgcctcctgaatgagtctcagttcagcctctcaatttcccgtgcccctgcgagcctagcaccatgcctgcatgctgtcagggctaagaaggtatttgagaatggctctcagttgaagcccaaggaggtgggggtactggaatccctccttggctggaggctggggcctgaatgagctgaccaccctggtcaccttggatgctcccttcccatctccctggcggcccagcccatccctcaggccctgagatcttaggggatctggtccctgcaggaacagggagcctggagatccagccctgattcaccccgcgggggtcctcccttgactcacttcccttctgggaaccatgtgatgccctcttttagagctggcttctccatctgaaggagagaagggtgtggcctgggcccttgtgaaggaggctcaggccctgcctttgctccatgttgctcttgggaatgatctcgaaggtgtagctgaagcactgaatcacacgtgggtagtgatgatggatgggccctaaggccacagttcttatggcataactagagctgccttcgctgaaggaagaatgctgtcatgttggggtttctggcatcgggacagagaggggatatatcccagcacttctcggaaagcgaacttccattcagcctctgctgggtcaggcatcagtgctgggatgaggaggtgtggcagggggtggtccagagctatctgtaggacaagccccgctgaggggcaccagctctccctctaggaggctgagagtgggtagtgggtggggggtcctgcctgtcaccaacaggaggagggagaggagagaatgaagaggggaggtggcagatagacggatctgcaaggaagcaaggggaggaaagaaggggcagagctggggggcagctggaggggtgtgggggtgctcctcacaggggagggcagggtggctcattcctcgtttcccaccttgtagcactccccattcctggcccagggcatctgaagctggaggacccacttctcactgtcgccgggtccctttggaccccaacatactcaccccaaacttgcctggcaaacaaagctcggccagcattggggtggccccactggtgtctcagacaatccaaacgggcaaagccacgcccta

SEQ ID NO: 26766 - DNA, 1416 bp, Artificial sequence
  DNA replication origin
gagtgtcccttggaagcagctgccacctgcaggtggcgggcgtcgagttaagcctctttcgggtggagcagtgggcctggagccaactcaggctgagtcaagtgtgagagggaggtgagaatggagatgactggaaaacacctctgtggggaaggtggtctgtgggctgggcagagagggacaggcagtgacggagaagcatgtgggcttgggggacagtttgaatagatagaggggacttaggatatctagagtgtgacaggagggagccagatgagaggcgcaagtccaaggagaggggtgcaatccacagtgtcccaggcgggacgtgggagccgatgacaaaagacatggcggttctgaggctgtgatggggggtactcgtcagagcccagcctgatggggcaggtggatgggggggccggaaggatggccaggcgaacagaggagagtgagccatgcaggggatgatccctgggggtgggggagagggggagggcaggctgcccagaggtgggggtgggtggcaggtggcgaggagggcaggtccaaggttctggccatgagactgtcctgacagctttagctgcctgatgcagatggacaacgcagacctgggggacgcagtgctgggatgttccaggaaaggggctggatgaggagggtggtgaaagctggaggggcctgaaggatgacgcagaagtgcagggagtgcagggtcagcactggggtctcagagatggggggcaggggatggcctcccagagagactggctgtcagtgctgtgggaggtggtgagaagcccaggattgcagtgggggaccggcctgtgagggagtggagtggaggtgtttgcacatgaggaggtctgggaacggggaggccagggcattggtggtggtccctggggaggcctgagctatcagggtcatggcaggagttggggtggggtggaggtggcctcgagccacggctgctaggtttatgagtagggacccagggcagccctgaggagctgaagggggacacacctggatgccagtgccccagaggaatggggcatttgatggggagggcacagtctggggaccaaggcagccagagacccacggcactgtggactctgaggcatgagggatgtgaatgtcggagcagccagctttggacagggccgagggccacctccaggggtgagctgggtctccatcagagctggaggaaaggaagcatttggaacaaattggagtggcttgtgacctgctggggtgcggggtggcctagtttcctgaagagctgtgcaccaggatgatggggcagaagcagtgagggaggaaggcaggaggctccccgggcctgaaatacttggagactgcccgctcaccaggaaggtgggggtcccagccccagatccggcc

SEQ ID NO: 26767 - DNA, 1174 bp, Artificial sequence
  DNA replication origin
tgctcactggtggagagttgcccgccctcccgttccttctgctccctcttcctctccacgcccacatcctcccagctggcctttctctcccccagatcctctcccatgaccaggtttcctctctctctctctctctctctctcgctccctgtgtccctgtgacctacttatgctctagaataatgatcgacattttcaattacccccaaagtaacagccgttcttggggcctggcggaggacggctgcatgggcgtgggcacgggcgctggtttgagtgtggggcctgcgggtggtgggggtggggacgcccatggtcccactgtcctttgtttgctttttctcatccggagccttcaatttttcctggaagattggaagcacgtttcccttcaggggaggaagggagataaaacagagaaataaaaactgtcatcattctcttgtaaacagcgtagagccaagtgggggctcggcaggagagagcgacatgagggagaggccaggacagagaaagggggccgagagggatggggtggggaggtgagcaggagccccccctcaaggccgggtgggtgggtgtcctgcaggaaagactgatgggaggggaatgaggcgaggtgaggctgatccagggctggggccaggttggggggttgcggtttgaggagacacagtgtctgctgagtgccaggcaggccctgggaggcaggcgctattctccgaatcccaccctgcgccaggctctgggggtgctgaggtgagtgacagacatgtctttgcactcttggggcataaactctattggaaacaaagcggtggcttcatgtgttcagcacttatatcaattgaggctcagagagggtgggtgacctgcccgatgacacacagctggaggtgaggagaccaggatcccagccaggtccgtgtgaccgcagtctcctttcacaccacctccgctgtgggcacacttggctcttgcgtgaccttgagcaagtcctcacctcttggccatcagtttccccatctgaaaagcagccagcatgctggctctctgcagggctgaggggagcatcagatgtctggatgtgaaggacgctcagctctggctctctggcgagttggcggggggacggaggagcaaagaccaccggatgctgggagagggactggcc

SEQ ID NO: 26768 - DNA, 1300 bp, Artificial sequence
  DNA replication origin
tgcagaagtattttcctgggaagatggatcatagcttttattagattctcaaaggggtctgtgagaatcttagtcttcttaaaggctagatagaagttggggtagaagatggtagaagttggggcatggccaggaaaagttagggctggtttgaatgataagagactgaatttgtaggctgtggggagctactaacttactgaggtaaattggaaaagtttatttgtcttcttaaaggctaaggactataacatgatacaaaatctcagaagtagatggaaataaaaactttcagtagacttaatgtgtccctgtgttgttctgtattttgtcatctaaggggaccagtagcccagggatctcttgtagattaggaagaaagagacaggtgtcagggttgggtaactctaggtaagactggaaaaggaaaatgcggagcccctttctgaaaaattacgaatttcaaaatggcgacaccagaatattaaaccaagctcgaagcccttctaagctgggagcactgtgcaactacataggttggacgcatatgcagctggtcctgcctcttgcacttacgattgcacacactattgtctgccaaattgggatgtattcctttggactgctatccagacctttattcattttttgagcacctacaatgtgccaggaattgtgctagtggtggggattccagataagagcgagcattcaattcaatcatatcgggtttctactatataacaggtcttgttctaggtcctggggatacagctctgaacacattaacacggggcagagacaaggaataaatgggttaaagatcagatagtgacaggtgcccaacaaaaacttagcacaggacgatgtgacacagggtgactatttgaaatgggttgtggtggggggtgccggagatgatatttgagctatgagtttagtgaaaatagtgggcagccctagctccatgggggtgtgggtggggagggttatcttaagcttgggaaacaaggcaaaataaggaaaggggggagagagagactatatacggcagagtgaacacaggtggtagctaagggaagggatgaaatcatgggacacctccaggcaacagcctccaggggctaaaccatcgtcttgggtaaatggatggtttgagagcaaaggcgggagcagcgagtccggtgagaaggtcctcacaggaacccaggctggtgagaaggtcctcacaggaacccaggctagcgaagcggtggctcggactagggtgaaagtagcggaggtaacgctgggtgagccg

SEQ ID NO: 26769 - DNA, 1063 bp, Artificial sequence
  DNA replication origin
ttggaagctggacgagctgcactgccagttcctggtgccgcagcagggcagcccgcactcgctgccgccgccactcacgctccactgcaacatcacggtgaggcgcccggccgcggccccgcggggcagggcgaggacggagagggggcgcttcgagtcccgggacaaaggggagcctgccccggagaggctccggctccccgggcggggcaggcccgcccctttcccccgcgacttgcccatcccaggccgggctgggactgcgcgaggcttgggtgggaggaggcggagggcgcgtctttccggcttctcgccaggggctggcttgggggcttctggcccatctcggtccccgtctcctagccccgaggggggagtccgcggcggcccaagcccttgtggggtccatggccgccctcagccggcctgctcccgggaccggggcggggcggggcggggcggcgcagctccggctgttgtttgagcccaggccggcaaggggaacggcccttaagttttaacgcctcatttttcagtcggattttccttcttcccgcttgttcagccaattgtttttaagtttgcgtttaaggagaaactgacaatgagaatggactcgttgacggaggaaaagttggaatgcagactctggtgctgtttgagcgacccctctcccccgggcctggctgcgcgctgctgtgttctggaaaggagcatagtaccgtcgttgcggcaggtggtgttgagtgtgtattcgtgtggcccctcccttgtgtgtaagcctcgaaaatggataggtgaaaggagatacgcgccagggctgctccccggaaagatcacgtatgtcacaaagccgaaaagacacttttaaaaactcactcattaagcggaaatctcattagaaacccaaggcttggtaaaggaattgaagtattaagtttctccataaaagtgtatcgtgaagctattcgtcgtgaaattgatgtaggatattggtccaaactgcagaatattctcttggttataataggcgtcaaggtggtggcttcgggctccttttcaa

SEQ ID NO: 26770 - DNA, 1217 bp, Artificial sequence
  DNA replication origin
gccagggggatgaaggtcagcggcaagatcccagcccttccgagcacgcatcctgcaaaccttgaccggtccccccaccccccgccccgaccacaagactcgggcagtgaggcaggggaagctctggccgcggccggctgcgaggacacatacctgctgcccgggctcgggattcgctcggctctgcagcggcgccggccgcggctcgcgctcccggggctcccctctccgcccccccgccccctcgcggccccgccgctccctccgcccctccgcccaccgcgctcgggggcgcgcgcgaggcctcgcgccggcggcttggccgagcccgcgcctgcgccctcgcctcccgccggccgcgcgcgcgcgcccccgaggctgcggaacggcggcgcggctgtctaggaaaccgcggcgtcggctggcaggggctggcggcctgagctgggcagggggcggaggcgggggctcggctgtctccggggctgccacgcagagcgggcttcgtggcgtgggtgagggggtcgcggggcagggtcggggcctgagtgcgagcgtgtggagaggcgagggggccgcgaagggtgggtttgacggggacgcaggcggggcgcagaagcaacaagtgcggaggccgagggcgtcgctcggggaagcggaggacccccgcgggatttcgtacagctgagaatgggaacctcccgtcgctttggcgcagcgctttgcagtttccagagctctttcccagttgctccgtttcatccgcgcggggcgcccggtgagggagcggatggcacgcagtgcccgctgcgcttggaggccaccgaggggaaaacacctctttctgtgtggccggagtcatagcacggtcagagtgccttgactctcagttggctgcctgggagaaaaatacctgtcagtacattcatttgatggcctcagctcaggacccttgtaggaccgtgtttctcctctttttccgtttttcgttatctgactcttaaaaaggctttttacacgtccccatctcctttccccgtgaaatcccagtaccgcagatacactgtcgacctgcttatgtgctgtatgtgttatccgtgcttgatgcataaaaagtaacattgcgccccttggaggcagcatcgccccggtggagaagcctgtcctagggccatgattgccagttaccgggtgggttaaacggaaccactgagcaa

SEQ ID NO: 26771 - DNA, 1336 bp, Artificial sequence
  DNA replication origin
tctgcgccccgcctgcgtccccgtcaaacccacccttcgcggccccctcgcctctccacacgctcgcactcaggccccgaccctgccccgcgaccccctcacccacgccacgaagcccgctctgcgtggcagccccggagacagccgagcccccgcctccgccccctgcccagctcaggccgccagcccctgccagccgacgccgcggtttcctagacagccgcgccgccgttccgcagcctcgggggcgcgcgcgcgcggccggcgggaggcgagggcgcaggcgcgggctcggccaagccgccggcgcgaggcctcgcgcgcgcccccgagcgcggtgggcggaggggcggagggagcggcggggccgcgagggggcgggggggcggagaggggagccccgggagcgcgagccgcggccggcgccgctgcagagccgagcgaatcccgagcccgggcagcaggtatgtgtcctcgcagccggccgcggccagagcttcccctgcctcactgcccgagtcttgtggtcggggcggggggtggggggaccggtcaaggtttgcaggatgcgtgctcggaagggctgggatcttgccgctgaccttcatccccctggccgggggagccaggcgagggtgcgtggggcagcccagggcttcagctccagcctggagacctgcttcttgtcacatgcttcttatttatttttgcaaactgccctggttcgggtccagctgcagatgccttacctcccattctttgcctccgtgtgccatcttgcatttattaataaaacatgcaagctggaggggggggttgctgctggggggaatcccattgcagtatggcaagcgggcgcctattttcggttttcagacgtggtatagaggtggaaatcccacaccctgaggatttgtggcttggttggtcgtgaccacttcctagtgggcttcccccgtttgtcgggaggtgccccagcggcagaatgggctgtctggaagggatggtgggtcttcaccgtcaggccagaatccccttcaggggacaggtgcaagctagggcaggcagttccctgcttgctaacttgccagggaggcttaaacctagaaaattgtctcccttgatggccgagaaaagatggccttcaacagaatccctgggacttgcatactcaaactcattacggttttgcatctgaacatgactaaagctagccacctgttggaagtcagaccccatgaaacacccccgtaatctagctcacccatccctgtttcacagtcaccaatactgagctagcaataggcccatatgggttccctctatcctctttaat

SEQ ID NO: 26772 - DNA, 1030 bp, Artificial sequence
  DNA replication origin
ttgtccttgggagaaaatgaaccagggggctctgcatgtgggcactgggttaggcagggacctggggaaaggtggagggctgaaaatgaggattaaatgaaaatctttccccctaaaagtgggaccctctgccctattcccctgccctactcccagcacagaggcaaccaaaattatagcctcaggcaggaagctgaaaacctgcagtcccagagaccgaacctatagacactgacattgggaggctgtccagtgccaggttgctgcctggccaccctgttgttggtgaatgcttttagttgtatgtgttttacgttcataaaagtaaaatcaacaaaatattaaaataaatacacaataatatcagaaggtgataagttcaatgcagagaattcagataggctgatgcaactgagtgcctggggggctgccctaggtggtgggtcagggaaggcccctctgaggggggccaccgtgtgatctgggacagaggaagcagctgagaacgcggccctgagaccagcgcatgcttggtatctttacagaaccagaagaaggattgcgtcttggggtcaggtcacgggagagaggatgagacaagttggtcaggtgggcagggccagatggtgcacgtgctttgtaagccaaagctaaggagctcgggctgtctcccaggtggggtggcgaaccatcgaggtttatggacaggagtgtcatgatctgacctgggtgtgggagagtccccctgagtcctgttggagtgatggcagagggacacagaagccacggctgtaggggccagagctggcagtggaggtggagggaggcgggacagctgctggacttgggggatggatgggatgttggggtgggggaaagggaggaagcaaggaaggtgattgcatttttggctccagctaaaatgagataaaaacacttgaggaacaggtttggagagacagtgaggagtcctgctttgaccagattgattttgcaactcctgtgaaagtgatactgtcgtggaggcatt

SEQ ID NO: 26773 - DNA, 1345 bp, Artificial sequence
  DNA replication origin
gggcgaagagctagaactgaatttgcacccagggctcctgactccccgtccagtggcctttccacaaaggaaacacgttgtgtttcctctcccgggcatccgtgagatgggggccagactgcaaggcacctgagacgcaggatcgcacaggttggaaaaggctccgcaaccgtaagaagctcttgcgaaccgcgatgctgggagattcctaaggaatcatccagctgcgggaggctcagcccagtcctccccaccccgcccccatgcaggagcaaagcgcccagaggtcaggctggaggcccccgccggcccctcgccgctgattcagccttgcccgtctccctccgcagtttgagatccggcagctgcgcgcgcacctggcgcagcaggacctggacctggctgccgagcgcgaagcggcgctccaggccccgcacgtgctcagccagccgcgcagccgcttcaaagtgttggaggccggcacgtgggacgaggagacggcggccgagagcgtcgtggaggagctgcagccctcgcaaggtaagcccgggtctccacccggccccagagtgtcacggccggggatccccctcgcctccctctcgcgccccgggactgtgcgcagagtggatggggttcctttcaggtgtgtgcccctccttcactcgtgattgggggacacgctcagatcagtagcctcggtactgcctgtcagagcccaggagagagcatgtagtccagccaccgacccaaactagaaatgactcgtccccatttcatgcctgtggccactggcgtgcgttgtgtgtggtgtcttccctgtcctcgcggtagccggaggaggaggtgtgacttttctgttgtatggctgaagaaaccgagacccaggaaagccgtccaaaggcgcatcgctaataagtggcagagccaggcttccagacagaggtctggggcttcctactggactaccacctactggggcccaaacaagtccaggcccggggccacagtagcccagagcttgagccttgcagacggtgagaattcacgagacggtgatgttggtggagatgggaacacgagcgatagcccagggtagggtcctgtatggaagggagttatttcgagattcaaatcccaactcttctgtcagccagttatgtgatgggactctcttggggccttagttttgccagctgtcaagtaggagcagtactgaggcttcctcacagggctgctgcgaggctcagaggtttcgggaattgcacggggccacccaagccaggaaatggtggtactgggctgggaactcgggctgtgggacccaaaaccccagcttcatcca

SEQ ID NO: 26774 - DNA, 800 bp, Artificial sequence
  DNA replication origin
gctgtaggagaccgtgcctttgtggaaggaggccttggtagaactccctcccagttctccaacatcactgccctgctttgaggggtattatgcctcatcttgttaaactcaagtgtaggcgtgtgacacgctttggccagttacccatgagaagtgacctgtggcacttctgggcagaagctttatgagctggtgctttaccctggcaaatgttctaggatagatggtgactgttctgtcaactgggtgctggagtaacagtgatgacccaggagcagagcccccagccaacctacagtgggcttttgtggctttgtttgtttaaaccatcgagatgcagggttatttgccacagctgcctaacctagcccatcctaactcaggaaacttggtgtgccagggcagggaacttgggttccatggtctgaggaatgactcagtttcagatggactggcaggggtgggggctgcggggtgggatgatcagagcctgcttagcatgcatcacaggatcagaggatgctcagagctctttgctctaggtgagatgtaccacggggctgacctacagagggtgcagggtggggaggtttctccccaaagttgtggaggactgggagagaggtctgggctggagacggtggtctttgaaaccagcatattggatgaggctttgagggaggagagaagagggatgaggccttagggagactaaattgtggaaaacaaaaaattcaaatgcattactcacatggcccaacataatattctagccttacaatggagcatacaaggttttg

SEQ ID NO: 26775 - DNA, 877 bp, Artificial sequence
  DNA replication origin
ccccgcgtgtggcccttggcagcctccagggtcccaggagagctttgagatggctgtctcccctcatctcacccagcccatggcaggctctaggcctcagggaccctgtgcagcttttgctctttggattccaaagatctgaacttgtcctccagcatgggcacagtgggctggaagtggatgacaggcctgatctgaaagacagtgaagccctcctggttcttctggttgaacagacttaccctgtgttccagctcggggctggtttgggccgagcccgctgggctgggccgggcgaggggggctgggtccaaggccttctgggaagggcaggggtcctccgacagggaggacagcaggtcctggactgtggcctcctccacctgctgctgggatggcagcggcgggggagaagggccgggctcagaggacggctcctcgcgggcagtgctgcagtccatggaggagcccagcgtctggctgctgtcactctgggcccgggtgactgagctgcgggaggcactctccgaggtggcgctggtgccattaccgccgagtttgaggggcatgtccagagagaagaggtccgaggagatgttgggctggtgaatgtctattgcggccgtggtgaccatacacacagctggctctgggacaccgctgtctgcaaggtaggaggggatcttggtcacacttcaacctctgccacacctgggggccctgaagagagcaggtctgagccgggcggtgggcaatgagtgtggctaggctgtaggagaccgtgcctttgtggaaggaggccttggtagaactccctcccagttctccaacatcactgccctgctttgaggggtattatgcctcatcttgttaaact

SEQ ID NO: 26776 - DNA, 1908 bp, Artificial sequence
  DNA replication origin
tggcggcctgcccgcgcgccccggccctgcccagggagaaggccatccgcatcccgcacgggtgccgcagcgctcccccgggcccgggaatgcccgcaggcgggtcaccgcagtctcctggtggccacaaagtgtcctgggcgcgcgccggagccgtagcagccagggagatgagggcggccgcaggcccagcgctgacaccgccgcaccttgggcccgcaggctgttcggcatcaagtgcgccaagtgccaggtgggcttcagcagcagcgacctggtgatgagggcgcgggacagcgtgtaccacatcgagtgcttccgctgctccgtgtgcagccgccagctgctgcctggggacgagttctcgctgcgggagcacgagctgctctgccgcgccgaccacggcctcctgctcgagcgcgccgcggccggcagcccgcgcagccccggcccgcttcccggcgcccgcggcctgcatctgcccggtaagcgcgccggggcctgtgccggggtgagcggggtgtatgtgcgtgcgtgtgtgtaggggtacgcttgtgtccctaacgagaagttgtcagttgtgtgtggttccgtctgccgggatagtgtttttctgtatcagtgcggaactgtgtgctgggaacaaggctgtgtgtattctcgtgtgctcgggagaaactgcgtgtgtatgagtgtgtgagcacggagaattgtgcagaatcgtgttctccatgaccaggaacatgcagggcacagtgctaggagcagaagagtggatgacaacagggaatcttaagtggtgtccgtcttggggcttgtattaggaatttcttggaggaatatgtgttattgtcagagggtaaggtttgcccaggggtatgtgtgtaagtaacacagctccaaactgggagctgggcaggagcttggtcagccaggagccaagaacccaacaaagaggggtttttgccatcttgttttgaggcccagtttgatgaacaatttagccaggttcttctgggggagggggagtatcaatgcatagtggactgtcactggaatattctgggtcctaatcagcagctgcccagagatggggtctgagtgtataatgggcaggtacggctgaacagaaacagaggtgcctccaccccaggcaaggcagtttcccccaggtagccataggcctgcagcacagatccgtagaccaggctgggcctctgggtgctgtgtggccttgccccgctcctcccctctctggatcttcacttcctccctatagaaagaggaaactgggctggatgggctatttgtaaatatttgtccagacctagaaattcgtagaggggaacataaaccgaaatggtgcagtacagatccacggtatatatgggtcgggatcaaatggagatgtgaaatgggagcaagcgggtattcagtgcacccccatctgggatctcggagaggctcccctttgtttgtttcgggcttcagggtgcaggctctggaatcagtcactgtttccccgggatggagagaacctggggccaagcgaggagagtgccagcggctgctcagcaccttggtcggtgggaggccactgggctggggaacctggagccttgaggaaggagacaggggccgaagcccaagggcgggcaggaaggaactgttgcaagccctggaggcccgtccataaccgtggatgagtcttctacacatgtggcctggccctgtccaaatgggctctgaaggaggggaagggccctcgtaggcccccggcatattcgcacctcccacccagtcccctgggcagcgcctcgccctgggtccacgtcggtccctttccctctccagagtcctgggcaagcctctttcctcttcctctgaaactccgacttcttccggagg

SEQ ID NO: 26777 - DNA, 1518 bp, Artificial sequence
  DNA replication origin
acaagcagacggagaagacgacccgcgtgcggactgtgctgaacgagaagcagctgcacactctgcggacctgctacgccgccaacccgcggcccgacgctctcatgaaggagcagctggtggagatgaccggcctgagcccgcgggtcatccgcgtctggttccagaacaagcgctgcaaggacaagaagaaatccattctcatgaagcagctgcagcagcagcagcacagcgacaagacggtgagcagccgctgggccggaggctcgagtcgggtgggggctgcgcttccgccgcggtatctgcgtgcccttttctgggcgagccctgggagatccagggagaactgggcgctccagatggtgtatgtctgtaccttcacagcaaggcttcccttggatttgaggcttcctattttgtctgggatcggggtttctccttgtcccagtggcagccccgcgttgcgggttccgggcgctgcgcggagcccaaggctgcatggcagtgtgcagcgcccgccagtcgggctggtgggttgtgcactccgtcggcagctgcagaaaggtgggagtgcaggtcttgcctttcctcaccgggcggttggcttccagcaccgaggctgacctatcgtggcaagtttgcggcccccgcagatccccagtggagaaagagggctcttccgatgcgatcgagtgtgcgcctccccgcaaagcaatgcagaccctaaatcactcaaggcctggagctccagtctcaaaggtggcagaaaaggccagacctaactcgagcacctactgccttctgcttgccccgcagagccttcagggactgactgggacgcccctggtggcgggcagtcccatccgccatgagaacgccgtgcagggcagcgcagtggaggtgcagacgtaccagccgccgtggaaggcgctcagcgagtttgccctccagagcgacctggaccaacccgccttccaacagctggtgaggccctgccctacccgccccgacctcgggactctgcgggttggggatttagccacttagcctggcagagaggggagggggtggccttgggctgaggggctgggtacagccctaggcggtgggggagggggaacagtggcgggctctgaaacctcacctcggcccattacgcgccctaaaccaggtctccctggattaaagtgctcacaagagaggtcgcaggattaaccaacccgctcccccgccctaatccccccctcgtgcgcctggggacctggcctccttctccgcagggcttgctctcagctggcggccggtccccaagggacactttccgactcggagcacgcggccctggagcaccagctcgcgtgcctcttcacctgcctcttcccggtgtttccgccgccccaggtctccttctccgagtccggctccctaggcaactcctccggcagcgacgtgacctccctgtcctcgcagctcccggacacccccaacagtatggtgccgagtcccgtggagacgtga

SEQ ID NO: 26778 - DNA, 1370 bp, Artificial sequence
  DNA replication origin
acttgtggcggttgagcggcggactccggcctagggttatgcgggcgagggcgcgccccgctcccggaaccagccttggcctggcgcctgccgagccccgagccccactctcgctcggcgccgcgggccctcccggcgcttccttccccagcggtccgcggccctgggtgaggctcgaagccccgcgcgctgcccctggccctgcagcacagcagtgaggccaaccccggccagagcgggcggccgtgacgggccgtgccccgcgctgtccccggagtggatgcgcgacgtgatcaatccgcggcatttattaattccacagtctagacagaggcgggggccgggcggcggctgcttatctgcgtttggcatcacctgcaagcgatacaccgaggggccgcaacgagcccccgctaggagcgcggctgccgggaaaataagtccacccagaaccagtctggcgtgtccttggtttattttctttccagaccgaagtggagggggtcgggggtggcccgggtgggagggagctgggaatggcccctggatatgccgtgcccaggtcacttggtgtgacatttcaaacccctgcgacttgttttcttgaaaactggctttagtgatcgcaggaaataaccgagagatactgaatctccagtaggcctccgggcaaccgcgcatacacaaaaacaaaaaaccccaaaagaaagaaagaaaaaaaacccacggaggctcaggttttactctttacaaatatttaaccctttggcagcctgggacagttcttttccaagaccagccttcacttagtggactgagggagcttcccgactaccagttagtccaccgctgttgtaagaacatctggcgttgagttgtcgtttccctgtccctcgagttaagcgacccacaagcatatccttctttgtccaaggtttgttttgaaagtgggcaacgccctaactgggtaggggatagttgccatcttagcttaggtaggggctggcaaggaaaacgtgtctggggggccctgtagtcttcagatagaaaagtaggtgccttctgttagccatggctgcttggatggccaaaggccactgtgggtttttcagcagcgcttttagcagaattccttcacactgcccccaccccacttgcagatgatggaaggcttgctggcaattactgaaagaaaatgggaggtgggaaaatggagctgcatttatattttacttcctgaatgtcaaggtgatgctggcacaaatattaaagggaacattccccttctttgggatataggaaatgctgctgcaaacttagagataagggaagagatatgcagagttaatgaggaccagctttacctctca

SEQ ID NO: 26779 - DNA, 1332 bp, Artificial sequence
  DNA replication origin
acctgtaacaatgacaagtgttgtattttatacttactgaacttttaatatgagatacccaattgcatagtaaaaaattcaataaaagaggccataggtggaaagtgggagttatttagctagattcactttagaatacgattttctcagaagacttaactattaatttggatagctctatgcaattgaggaaggaaagggattcccagagatagacagtttatggctataagtttttacacaaaatttaatacatattgaaagactgcataattctgggaaattcagagtccctgtggcagtattcccaacaaactttaatatttaatggattgtggaacagaaatcaggctttgtgttttgaatatggaataacaaagctcaattttgtcagagctgccaatacagggtttaaatggatattgtctaagattgttctctagaaaatttgaggttctacctcttctgcctaggggaggacacagatggccacacatttagttagctgtgctttctcatgggtgttcaccaaagagagtaagagaattagccaaatagcagcatgctagagagagaaacaatggatgaatatttgcagagaagttcccaggggagtggtgataaaagcaggaaattcagagtttatgaagctgatgcgggaaagattagaggcttttaaatcggggtctgattgatgtaaaagtaaactttcttgaaaatactgggattcagtgcagtaatgaggattgtgtggccaagtacagactagcaccttgttgatggagactgtgcatgaaagatgcagatgaatagagctagattgagagtagtaatgagagcaagaaagggcacaaggaaatactccattgggatccagatgtggagttgggtagggagcggctcaatgtatacaacacatttggggccccagcaacaatccagccagagaggcgggagtgcaaggtgaatccagccatccgcctcggtacctcctggtccggaaggtcagagccagcgggggagtgggtcaaggcgtaagcccaggggccggcaggagctcaggaaggccggttccccgttgggaaagagcgtgtttaagttaaggcgtggtttgagagtagctaaccagagatcaggtcagctgttagggcgtgggggagggagggggcagggagcagggacgaggaagtggaagaataggggattgtgaggagtgatttctttccagattatcgagactcaagactttccagaacgtggcaaagagccctggaagaaatgtcccaggaacgccgcggtcaggaccgaggctccccggggccaggttcaggg

SEQ ID NO: 26780 - DNA, 1014 bp, Artificial sequence
  DNA replication origin
catataggcctcctcctggcgcgcctccgcaccgcattggtggaccggcccccagcccgtccatgggcgttgtggccgccaccgcaggttccgcctcccgttccctccgccctcaacgtacgtcgcaccgcctctctgtagccgcccgcggagcatcgcagccggcccgggcccccgccagcctccctcctcgcgtccctcggtgtcctccgcgggccggcgcgatgcggctgggcccgaggaccgcggcgttggggctgctgctgctgtgcgccgccgcggccggcgccggcaaggccgaggagctgcactacccgctgggcgagcgccgcagcgactacgaccgcgaggcgctgctgggcgtccaggtgaggcggccaggccggtgctgggagggccgggcctcgcaccgcggctgccgcgggctttgtcccgggacaaaggggggcggccgggcgaggcctggcaggggcggcctgacaatgggggccgggcggcgcggcactcgctctctgggggtcctggggcctggaaagcctgaggagatagcacggcccaagagctggatcccttctacccctcagatcatggagggtgtgtagggggtaggggccttgaagtgcaggtgcgggtcaccccgaaaccctttggcaagggggtcttctagtagccctgtttttctccaccattttgccccactgatagtaatgcttggccctcctgtgtgtcgcttccccctaaaggaagatgtggatgaatatgttaaactcggccacgaagagcagcaaaaaagactgcaggcgatcataaagaaaatcgacttggactcagatggctttctcactgaaagtaaggactgccctacacgactaacaatggagacaaacacaaatatgttaagcagcggtgtctgctgaatgtatagattgctagtgtcccaagttggaagtcctgtgagaaggagaaaaggacatggagaataggctttatacttacaaatctttagacactgag

SEQ ID NO: 26781 - DNA, 840 bp, Artificial sequence
  DNA replication origin
tggttccacagagaggactcaagcctcagatggcctgttaaactagggacttggtgtctaggggtcccctgactcaagtactgctgcgatccatgtataagcaaataaatatgggatgaagatgacttacagctgtctgagatggcccagggtaagtgttgaagacagagggccaagaaggcaaagacagacttttagtttttagagaacaaatgtgcattaatgtcagatgagcgactctttgttcacctgggctgacaggaccttgagattagaaatgagtttccagagtgccacagttctcctccgagtcccagtctgatggcctctgccgggccttacagggcccctcacctgagcagcccagctggccgagtcccagagatgcctgggctgggctccactgtgctgggaggcccacaggcccgtggctgacagggaccccatcagagccctgtgagcttccagggactcccaggggtcccactgaagggacaacacaggcactggacaaggacacactgtgcatgagtgtggtacctgccctcagcaatactgaccacgaggcagctactgtctgtcatgaagatgaggaaggtgaagacaagagaggtgactctctctaatgttgtggggcgtctggcttttgaccaaggtctgtctggcttgaaagctttgttcttttaaataggccttctcaatgatgaggcaggaaagcaccccactgcctgagttccccgcctgcttcccctccttcactctcatggggccagcccaatccccacttctttctcctgtgtcatgaaaccaaaacatgcagaaaagagagagagggctgga

SEQ ID NO: 26782 - DNA, 1493 bp, Artificial sequence
  DNA replication origin
aagcgcctcagtgaggccttcaagaggacaaggccttatgacggctgcttcctgaggtgccccatggaggggaccagatcatttgcttgcagattcaatgacccattacccagcacctttaaagaagccagtcacactggtcccctctacttcttacaacagtcctctgagacaggaattatcatccccattgtatagatacggaaacagaggcacagggatgctaagtcaatgggtagcaaccaggctccttccaccgccctacagtcagtaccccacagtgggactcctctccaccattactggttggcaaagtgaggcaggcaaaggaccaaacactcaggtacaacttgatggatggatggatggatgaatggatggatggaaggatggatggatgggtgggtggatggatgggtggatgggtagatgggtgggtggatggatgggtggatgggtagatgggtgggtggatggatgggtggatgggtagatgggtgggtgggtggatggatggatgggtggataggtgggtgggtggatgggtggactggtggacaggtggacaaatggagggatgggtgagtgggtggatgcatggatgggtagatgggtgggtggatgggtggatgagtggatgggtaggtagatggatgagtgggtggatggatggatggacagatgggtggacggatggatggatggacaggtggatgggtgaatgggtgggtgggtgggtgggtggatggatggatggatggatggatggatggatggatggatggatggccagagccctcagtaaacaaggcggttgcttacccagagtatttgggaggaggtgatagggagggaagggagagttccaagccaaagctgtgagggaatggcctaggaaaagtctcacctggagatctctgtggggccatcagaagcagagggagcactagtggctggcatttcccagcccaagccaggactcatgggggcagagacagggaggccaactccaggacaatgcaaggaaaggcttcccaggagcctgaatggctgtaggtatggaaagagggtggggggctttgacaggtgaggagcgcccatcactacagtctgtaagcaggtctggttccacagagaggactcaagcctcagatggcctgttaaactagggacttggtgtctaggggtcccctgactcaagtactgctgcgatccatgtataagcaaataaatatgggatgaagatgacttacagctgtctgagatggcccagggtaagtgttgaagacagagggccaagaaggcaaagacagacttttagtttttagagaacaaatgtgcattaatgtcagatgagcgactctttgttcacctgggctgacaggaccttgagattagaaatgagtttccagagtgccacagttctcctccgagtcccagtctgatggcctctgccgggccttacagggcccctcacctgagcagcccagctg

SEQ ID NO: 26783 - DNA, 1446 bp, Artificial sequence
  DNA replication origin
tttgtcttccagaaatcagtctggggccccagtggatggtcaccatctggctaaagggtcccttggttctagagtgacccagggtcttcccaccaaaataaaagtcctccccactgcccaccccgccgggaggcagcctggactgtaggttcccgctgtgctctcctcctcctgacctggacccatctgttttgcagctccctgagggcctcctttgactccttgaagcagcgtaagtcccctaccctggggcaatgggatcttttgggactgcgaggctggtggagggtttggggggacagaagatgaggtgttggggctggggctgggctggcccacacgggtgagttgtgggtggctgaggcccatcagatctgacactggggaccagtatccatgctctgcccccagaaatggagaatgtgggcagctcacacatccagctggccctgaccctgcgtgaggagctgcggagtctcgaggagtttcgtgagaggcagaaggagcagaggaagaaggtgaggcaggtgcagggggcgggggagctgctcccccattgccagcctctcagttgctgtgggggtagggggctgaccttcctggtagagccagtggagggcggcaggggtggtggtgggacagcactccaggctttggggcttgagggtgatctgaagtgggtagggagggcagaggcctggccgctggcactaaggccaactcttagtcccagagccccatggaaggtccttcctgtcgagctgcctcacgcctaggaggatcctactacagcagactctagagggtctgtggcaacttggcagtgtccagaggaggcagtctgagttgtgggggtcactggaaactggtcttgagtccaaggatcagggctgattgtcctggaaaaaggcagacttgcagccagtcaccccacaggactgcccaaggctgaggggtcagacacagactggggtgggagagttgtatggcattgcttagcatccaaaggtacttctcacccatatgtagggcatggctgtcccgagacagagtgactgcatggaagtgaagtccccatcatgggaggtgtgtaagcagaggctggcagatgcttgtcagggaggctgcagggctgaagttggatataggttccctggagggcaggcaggacgcagactggcctggaggctgggcttgggcctgtgaggatgggggctgagcctctcagggccttagtgatgagggtggtgccctgcacagggtggcagggcagcacacagatccgcttcttgcctggggaggaaggatcgttgtgaagtggccaaagaattgaaaatgaaaagtcacaactgagccttgaaggggaagaagctgtacctgaggctggggccaggctaggcctgggtgtcctggccataccacttcccatctctgtgcctcagtttc

SEQ ID NO: 26784 - DNA, 1399 bp, Artificial sequence
  DNA replication origin
cctggggaggaaggatcgttgtgaagtggccaaagaattgaaaatgaaaagtcacaactgagccttgaaggggaagaagctgtacctgaggctggggccaggctaggcctgggtgtcctggccataccacttcccatctctgtgcctcagtttccctctcacaggatgggacacatatgtctacctcccaagtgctgggagctcagcccaagccatgcgcccctcagtctccacagacagggctccagctctggttagcagctctgctggcagaaatgtagcgtggctgcccgtgccacctgcccatctgccagctgggctttcaggattctaaatgtggggttctgagcagacagggggtccccagaagccagcccaggcttgaggtgccggagcaggcaccctctctgagctgggacgtgcccgcagagcctgcagagaacctgccaggaaggagggaccccggccctgctattttgggccctcctgtggccagaggagctgcactggctgcaaaggctgttttggacagagcattctttctccaagtggccagggccccgcaggcagagcgctgtgttgtagtgtgtgccatgtgtgtctgagcctgtgtgtgtatgtgcgtgtgccacagagcaaggacatgtgcttacaggatggtgcacacgtgcctacgctcccctgcatatgcctgtgagcatgtgtccttgtccagccctgtgcacttgggtgttttgtgctgtgtgtgtgtgagtgcctgtgcctcgctggtctcccagctggcacagaacccctcccctgagaccccaggcacaaactggctcagttctcctcctacctcataacccagtcgctgtcctggctgttttgccttctctatcagaacaggaagcctgggaggtgaggggaggctttggccccagacctcggcacaggggcccagtggccactgtgcctgcatgtggcctgtggttgtgtgtgggtgactgtgggagtgtgtacttgtgagtggcatctgtgggtgtgcacaggaatgcctgtgatcatgcgtgtgggcagctagggatggggcctgtgtgcctccgagttaatgtggaactctgcatgtatgtgtgtgccagagtgtacacacacgtgtgagcgactgtgatgcctgcagaggctcagggatgcaggatgaacgactgtgtgcgcacgtgtgttggggtgggaactccccagctggagacgaagctctggccaaggtctgcagcaaggacctcacggcacacccatgccctgtgattctctgtggccttccattgtgagggtcactgtgaagcagcaggctctgggggagggagggcagcctgtcaccctctctccagagccaggagaggtgctgcgcctcatcccaggg

SEQ ID NO: 26785 - DNA, 1865 bp, Artificial sequence
  DNA replication origin
ctggtgggtggggcaccagcagggacaagagtgttggtaggattcgggcatcaagtgaaggacagaggcccagagaaggctatgtgcacaagtcctgggctctgaagcccgatggcctgggttcaaatgcagctgtaacctggggcaagtactggaccttttagtgcctctgtttcctcatctgttaagaaagggaacagtaacagcagccacctcggagggcagctgtgaggactgaacacatgaagcgccaagaagggctggcgaatgggggaacacagcgtttactttgacggcacatatctggaatgagagcgccgcgcccatgattgtgcagccagggggagtgtgtgtgtccccagggtgaggaggtgtgtgtggggagtaccgcccaggcctccgccctggtcggacggggcagccaggcccacatacctgcctcggtggccgagtccttgcactgcctggctttgttctgactctgaggaaacagaggggaagcagcgctaagcccctgccccaggagccagggcccaccccagcagacctgaagtgactgtcaagcttccccggccaccctggggggaacattcaggagccaactatgggcagatgccatcatccacaagcaacctccgcccacagaggaccacaggctagctccatggaaagagaacgaagacaggaaccgagcccaggaggatgcctgtgaagagtgagaccacaacccacaggagaggtgcaactactgctgagccccctggctgggacttgggctctggcccctgactgactgcccccagctcaccctcaggccacttccctctctgggcctcagccttcctgtctgtgcaatgagtgatgtgtttcctgggctctgggagctctgatacccccactctggcctaggggccacagcatcaggagcatgggctctagaccacctgagttgggggtcccttttctgctgcttcctggctctgagaccttagacaagtcacttactgtgagcctcagtttcctctctgtgacatgggcctactgagcccttctccaaggttgtgtgagggttggcgtctgctctcatcaccctgtgggcctcagtgggcctgcaccgaggaatgggtccctgagtgccgcctgacggtggcaaaggggatccagctgacctgcctgtccatggcctgaggttctctccaggaaacccatttcacagatggggagattgggggtcagagagggctaagcagcatccccagatgcagatcttgcctgggggtgtctacggcaccccttccttgcctcccccactgcccccagccctgggcgacccacacggcccagcagcccagcgcaccttctccacctgcttctggtggccgttggcgctaatgcgctcgaaggcctgctccgcgtcgtccgcgtcccggcacttctgctcgtatgtcttcttggactgggggtgtggaggggcgtgacttgggggctgcacagccctgttctgtggtccccgggagtgaggctcccttagcccagcctccctttttccctggcgagggttgcgggtggagtgggggcatcctcaccagggacagggatctgggggtccggaaggagatagagaaggcgtgggggctgctggtagtcctgctctcaggccctccccactgaggacagcgcggcctgccccgggccccgcctcctgggctgtgctcttcggcgagggcacgcccctcgccacgcccctcgccacgccgcgccctcttaggagcccctctcccttcctgtccagcgtctcgcaggatcaagctcaggggtccctcctccctccacccctggagtccccagctgacttcatctgccct

SEQ ID NO: 26786 - DNA, 847 bp, Artificial sequence
  DNA replication origin
tgccaaaggcattgggagtgggtgtggaggagagggcccctggccattgaccactcctcagtcctgggagtggccaagccggcccacctcacaccctcctgggatccccacccggcttcggagccaggcaggcccaggactgtaaggggcgggatgggggacacagtggtcctcctctgctgggaccacactgatgagctgctgcagggcactgctgttccccatggggaggggggagagagaaaggagggaggggggagagagagaaaggagggagggggggagagagagagagagaaaggagggggagaaaggagggagggggagagagagagaaaggagggagggggagagagagagaaaggagggagggggagagagacagaatgcccatctttataccctgatctttacttgagcaaaaaattgggttcagttaagcaagcatgagacatggacattctaatgactcatgtgtggcccacactgtacctgatgatgggggtgtggtgctaaaaggggcctcaaagagctcactcagcccaggaggacagacagccaccctctaggccctgagatgtgaggcagtaagtggggggagtggttccaggggctggtgcaggccatccagcagaggggagggtggcttgtctgggaagtggtgactgggctggagagcaactctggaagaacacagggagcagatggacaggacttggtaacttacgggatgggagatgggtgggaagagagggaaagtgaggaggtgaggagtgacttcggagcccagacttgaagatgggctcctccccaggtggaggagctggaggggagtggtgcgggaaca

SEQ ID NO: 26787 - DNA, 1328 bp, Artificial sequence
  DNA replication origin
tccagtcatttagaaatgtaaatattattctgggctctcaggttgtagaaaaacaggtagctaaccgttttgtgctcttgggccagagattgctgactcctggtttataacgagatgctatgagaattaatgacttaatcattgtagaatacatttctctttatggaataaaaaatgttatggatgcataagtagcagtaggtatatagatacgtattaaattagcaaaagatgcccttataatggtcagattcacaaatcatgccacatctacaaagagaagactgatacgacttttgctaatggaactggttctatatgtgcatttcattcttcacaataaactcaagaaactgaaaaaataaaataaaataaataaataagcctgtaactcaaattaaagtataagaaacactgctctaattggaaaagaagaaatcacggaaatgccaatgtcgcctgggtgtttgccaacagctactacctcccagttaggactcttcacacacaaacgccccgaaggactctggcaatacaagtgtgtagcaagtgctttttaacatataaccatccttttatgagacagctgtcaggatatgaagttttatcccttgttggggggtcgggggaggaggaaaggattctttccagaacaggtgtgcgtatgcgtgggagggaggagctgaatggggaggaggaagaggcacagtatggttaaccggaatgttcaaggagtgctctggcgactgtggacagagcaatctgtccagggcactcaagtgtttaaggaaatgacaagttcagagaggcaaggtgatttgggaccagactgaggacttctgctccaagaccaggggaaggagttgaaccttattctaccgctgaagcttctgttttccttattttcagatcaagtgatgtgatagaggaaacgttttaaaagatttatccgggtgcaaagtccagatgggctggagggtggagagacggataggaacaacttaggttactataaaagtccctgatgagataaggacccaaactaagatgacataaacattcctttcaaagagggtgtaccccttaaaaattcataagccaccttttattgaaagtgaactcatcactttcaaaatcttgtgacatctccatcatatatttaaccaagagttataatctcacagtttggtcacccccatgaccaaaacaaatagaccgatgttcttggtcaatggattatttggctcctcgagttgaaacccttcattttctgggctggtgacagtcagccggttctccacacacaaagggcgttaagtggaaccccc

SEQ ID NO: 26788 - DNA, 777 bp, Artificial sequence
  DNA replication origin
acctcatgtcatatacccacttgcccgtttgtttatggtctgcctcctctgcccgaacgaatgtaagccatggaaggaaggatacgtcttgctcacagtggaatatccaccaccgacaacagtgaggcccagaggggacacgcggcaagtttgatgagtgaataaatggctgttgctgctgcttggtgtaaatgcacaggatgctgagattaacaggtacttctgagagtgcctgggaaaggtgatgagtgggggagattgcatgagagcgagctgataaagaccagtaaatggaaatccttacgggcgcggtcaaggagggagtgcaggattataatggcaggaaagacagcaaacagaggcagtttattgtgtgactgatgatgtgttttttgcactagaccacttactatgtgtggctctgggcgaacttcttaacctttctaagcctcaattacccgatcagtaaaatgaggctgataaccatagtgccttccatccagggttgtggtgggggttaaatgaactaatggagcctggcaccgggtgagcacccaataattaattgctatgacggattcaagattgggggaagaatgtgaaatgttgcaatgcaaagagatgtttctgtaatcgttgcgaatcttggtccaaaacttactaccctggaatagaacttgttcccaaccactcacccacacaaacatgtctctgccttgctaacgccatcaccagccttttctcctctctgactcttctgaggtctagcccagcgcc

SEQ ID NO: 26789 - DNA, 1374 bp, Artificial sequence
  DNA replication origin
ctgggagaagagggaaaagcttcttaattctgcttttcagggcctactttcctggcctccttgagaaggatctcggtttgcttcctccatgttttttttttgtgggagtctcctggagccagtagatgacaagctcccaagccatgttccatttattttcccagagacagggccactgtggtgtgtagtgacagcttgcctagtgccagcccctgccccaaagtcagggcatgttccagtgggaagggtggggtgagaatgtcccaggggctggataagcatctggaacagcctgatgaaggataggacagagtgggcagaggtcccagagccacacaaggcagagctagagagaaggccagctgtggccacaaaatgggagagggaccatatgtgtcgggggggggggtggggggggtgtgtgtgtgcgcgcacacacacgcacatgcggtggggagggtgaatttcttcccttctctagccatccacagtcttcagctggagctacccaggggtgggctctggtgggctctggcaggctctgggcgagtcagaggcataagcctgccctgggagctctccagcatcagaaaagtgcccagtggcacagaagggcagagtggggccagatactcataggaagcacccaaagggcagggggtagggagaagtctgatggggttggggaggaggtgggctagactgaggccttgaagggtgaatatagtcctgccagagatagtgggggcatgtggacgggaaagaatgtgcctctggggttcctagcaaactagggatttgcagagaaagggttcctattgaagaaagaagctctataagcagtgagcttgcttcttgggtggcagagcctgggagccaatttctagggttagtggctgcccctgtgaagacacttttctgtgtcctgtgtcctcgagagaaccaggagcaaggcccaggcagccttaatcacagcagccatcaactaccatgtgcccgaagtcctacacatgtggctttccggatactccatggcagccctggcaggggtgatgcagacctggtcagttcctgaggcctggagagggaaaggacttgcccaggatcacacagggaggcagcgggtttgaaccaggcccttcttgctatactgtgggatctgcaaaaaagcagcccagcctggactcctcgcctactcccactggagagcaggggccctgggcatggatgagaaagggacaagctgccaaggtccaaggcccccatgcttctggggaatgatgtttggtgctggaaggccttttgatttttcaaaggaaaacctagactcttgttgcctgttacaatggataatttggggtaaagagtcaagca

SEQ ID NO: 26790 - DNA, 1097 bp, Artificial sequence
  DNA replication origin
ctcacgcgccgtctgtgggaccagggttgccgcgggttgagggcgctgacccgggggaatccgggcggggcggcgcgggttctgggtggcggcgcgggttctgggtggcgccgccgccggggctctggcggccggtgcgtcccgcccggcgcgggctctagctccccggccacccccgcgccccgccggtgccgcgcgccccctgccgcccctgccccctccctcggcggcggccccgggagcgcgacgccccccagaggaaggaaagttgggacctgccgcgagggacgcccccgggcgcggctgggaggttgcgggggaaagtgaagcctggaggagctggacgcggggaggccggggcaggaggggcttctctggctcctgccgggtccacacggtcagcccgctcccgcacccgggagcatcggcgcagcctcgccggcagcgtcgggacggagccgggtggctccctgcctgctcccttcgcgccgcggctggggagcccgcgaacgtgtgggctggcggggtcgtttgggggttgtgagtggttcggctgctcagtttttttcttttctgccctttgacccatccgttcttgcaacttttctttcctccttcgatggggacttgccgtctgaaccgcgtctgccccctcccctctcgtcgcatgcaccatccgtctgggagcttgatttcgttttttcctcctttggctacgttaaagattgctgagagcaccgggagagaccctcctcccccgcctgcctctggcctgttaaatgttactttttgcgattcgttgttttttaaagatccaagttcaggaatttgagagctgtggaatggagttattggaaggctgacgttgagggggtagtgatgagttagaggaaaactatgatttcatctttattggccttgctatagaaaacctaattgattttttttctgcctctgttgaatgtggtaagatcatacgttgaattaaatacttagagacttacataaaagactatttttaggtcattggatgatgtacgtgaacagcttttcacctgaattgggattgccttgaggattctgttttggggcctact

SEQ ID NO: 26791 - DNA, 1191 bp, Artificial sequence
  DNA replication origin
gccccggcggcggcgccacccagaacccgcgccgccacccagaacccgcgccgccccgcccggattcccccgggtcagcgccctcaacccgcggcaaccctggtcccacagacggcgcgtgagtagaagacaaccgagcggacgcggacagccgggccgctgttacctgaggggcgcacacgccgccgcggcgaccaccatcaccgtccgtcccgtccccttcctggtgaccacggccgccgccgccgagcaactgacactgactaacaacaactaactaactactcgccgcggccgagtccaccgcgcgctcccggccgctcgccgcccgcccagcccaccagcctgcccgcctcctctcggccccgcgcgccgcccctccgcgcgcgccctcgcccgctcgccgcgctcctggagccgtgagcacgcgcgcgctcacgggccccggtcgtctcccaggtctccctcagccccagcgggaggagtcaccgccaggcccctcctctctgccttccaacctccagaggacgagacctaaagggtgcctgattggctgcggagggcggggctaagacaaggggcggggctgccgagaccttgggcccgcgtgagggaaaatttgggttcgattaagccgcagaggaaaagaccaggggagtctgggcccatttgggcgtcggggcccgctaggtcagccgtcatcgaatacagaatatgttttcgaggacgctaatatgtagtcatgaccaatttcagttcttctactttctgcgggccttcgcaataaaaaaaaaaaaactacatctcccagaaacctccacgaaaataaggctcaccttgcgtaaccacgtagtccttcgccgcattggggcaaaataatcccttcatttttgtgaaggtaccgtggaaaatatttcatttttcttctcaccggagcaattgtaaatgctatgcggtaagaggagttacctgtggaaaggtggttaagagattaggtaaagaaaaggaaaggacaccaaaataaagtgctgcggaagaatttttgtccagctgtgagacgacgagtgcgtgaagtgaaggcgattgagaggggctgagggaattgtcctctgtggaagggactttcttttggccctaggccccttcctgcccctgtcgtcagcaggtcagtaagcaaggcgagcttggggg

SEQ ID NO: 26792 - DNA, 1083 bp, Artificial sequence
  DNA replication origin
ccacccagtttctaccacccaagccaggagggctgcccctggagagcaggtgacagtgcccatcatgccagactggctagtggagggaagtggggacaaggcacagctgccttctagaccctatcagacttcagaaaaggagtggggtgcattgggtatctgcaatgtgcccgtccctggctgcaggctttaggagtcttgcctcacagaatctttccagcaatcttataggtcaccatttcacaatgagaaaacaggctcagagaggctgagcatcttgcccaaggttgcacagtgagggaagaacagagctggaatttaaaccccggcttgcccagttccacggagaaaccctggatggcccagctccgtggctggtactggttgtaaggaatctcattattttgggacacaaaaccagcatcaggagcagcacaggtggtagaatctcttgaggctccacttgggagggtggggtggggcacggagcccagcacggagtctgtgtggctttggggaggggtgggcaagacatcagtattcctgctcactctactgtggcccccaaggtcaggagacatcatcattcctcagttagaagcgggcagggagcctcagggcggggaggattacccaggtaatccagcctgattaccagacctagcagaacttcatctggatgctggaggaggcagctgtggggctgaggccggcagcacagtcaatgaacacccagccccctgacctggtgtgagctggggtccactgccagcctctgaggaagtccctattaaagaggagaggcaggaggggtgggggaggacaggaccactcgggatcctcagaggaggcaagggaggctgccctccttgccagtgcatctcagggtagaaacctggcagagccatctgtccacacccctgccttagtcctcagtcctgccctgttagcagaagggaggtgtttcagagtggggtgagatgctggggctgcccagggagaggacagaagggctgctcttgtctgtggcaccctcactggcggggcttcttgctctaaccctgcgtctctccagagcagggt

SEQ ID NO: 26793 - DNA, 730 bp, Artificial sequence
  DNA replication origin
ttcaagtgtttcttgagcaacgactttgtgccagggacagtgctctagtgatcggtaaaatagacgttggtttcttctcagggctaatatctgttgaaagagatggatattagacaaaaaaaaaaaggaataaatatgtaataagttaggataagtgctctaaaggaagagtgtagaaagagaaagagaaagggaggagcttttgggggttcaggaaaacgctcttttaggggaaaggaaaggcctgggttgaggcctgaagtgggatcttgctgggggcacagcaggggtatttcaggtggagggaacagaccatgctattcaaaggccttgaggcagcatggccagtgtggctggcaggcagggagctgcggggatgtgtggtgaaccggcccagagaagcctcacaggtgctatcagccaccttaggagctgggaaggattataaggttttaagggaggggtggtggtgaaatgagatctgattgatggctttgaaagatctcgctgcttggctgagagaaacttgcagaggagtgagagcgggtgagtagctgggggaggctgttgcgttcattctggggagagatgacagcagcctgggacaggacagtggtaatgtggacacggagaaaaggaggggttgggagagatcctaaaggcagacaggacttggaattcggggtgaggaagaaaaaggagtcaatgaggggccagtgaatagaggaaa

SEQ ID NO: 26794 - DNA, 1251 bp, Artificial sequence
  DNA replication origin
cctgcctcccacctccaacaagctcagcactttccctgctcactcaggtccctggctgcccagtccaggattgaggctgcagctcaggccccgagttccccgccctgcccacaccctgtgctgcccgggttcatgtggggcccgcagagctggactcctcctcattgagattctgccccagggaagggccaacacttaccaggcactcacgataaggcaggtgctgggctaagtgctttcactcattaattaacaactcgatgagaaagatatgattatcttcctccctgctttacaaatgagcaggctgagacccagagagcttgagcaacctgcttaaggtggcacaactagcaaatggcaggggggtgtgaacccaagactgcagaccctgggttctttacgttgcagcctgtcccctcctctccctgtgcctcagtcccaccgtctgttcaatgggcagaatatcacctgtgtgccatgctgccagaggtatgggagaactgaataagattttagaagacagggcttcagcaaaggtcctttaagccagagcccttgtcctcactgccagggaggagcagggggaggctggagcgcacagcccgcaaagacttgggcagacagaatgtgtgaaggaacatggtcagctgtgcctcatgctggaggaggaggaggagggggaagaggggggacaaaggggaggagaaggaggaggagggggaggaggacaggcctgtaggggttgagactgagacctttgctggaggcctttggtggaggtgagcggaaggcagctgtccaggctgcacggagcaggctcatggcaaccacgtgtggaggatttcagctggaaggggagaaaggaaggagggaggatggaatagagtgaggagagggctttctgatgccagaggaaataaggcatgcttgggtcagagcaggagccacccagagagggaaaggggacacctcctcatctcccagtcacacagcccttgctggtggctctatgaccattaaccattgcctgctcgccatggcccctgcagtattcatgttgtacccattttacagaggagaaaatagaggctcagagaagcaaagctccactggttctcccagcctgggggtgcttggtctggagttcacaggttctgctctctgcctgcccacctgctctctgtgattagagaagtacaggtagaggtcttactttttgtacattgtcacactattctcccagagctt

SEQ ID NO: 26795 - DNA, 936 bp, Artificial sequence
  DNA replication origin
tccctcgagtgcccgctctatgccagccagccccagagacagtcaagataagtgcattccaggatcaccgtgcccagccgagggggaaggggctgaagtctagcccatgctccacttgccaagccttgcaccacaatgtgaggctgtggccacccggagaagggtgtctctaattctcacaaaggcagtgtgcgggctggcagacctggtccctgccaggaggagctccttagtggtggtggatggaccaggactagggctggggcctggacggtgagagacagatcagtgaaggtaaaatcactgctcagtgttggagggactgacgggggtcaggccaggaatgccggaagagctggcccaatctgagcatccccaagaaggtgctgggagtagccaggttcatgttgggaggtgtgtggggagtggggggtggtaccagggaacagccctggcaagggcccagaggtctgggcagcatggctggatggggattttggaggggagggggagcaggcactggggaaatgggcagggcacaagtacccagctggggggcttgcaggcgacacaggaaagcctagaggattctaaacgggatctcagagggcagcaggtttgcattttagagcaggctctgggtccagtgtgcaggttgaattggaggagccaagaggaccactaaggcccccaggagagagatggagtgctggagtggggcaagagttaaggggtgtggtgtgaagaccactgggacacagatgtttcctgagttgggagggaggagccaggttctagcgggatggataaagtgggggtgctgcaggcccaggactgagatgtggggcagagccctgggagcagaacagatctgagggccagggaaacaagggtgagttggggcacacctgcctgagcggtgtgtgcagtctgcca

SEQ ID NO: 26796 - DNA, 1302 bp, Artificial sequence
  DNA replication origin
gcacatgcaggtgggcgggcatggagtcgttgccgcccgcgttggccgcgatgcacaggtacgtgccgttgtcctgtacctgggcgtagcgcacctccagcgtgccatcagggaagactgtgagccgcccattgctcttggctgagaccaggtgctttcggggtgagagccagaggatggcgggcggcgggtcgccatcggcccggcacacaaactgcaccgtgtggccctcgtccacaaacacctgctgggccttgcggtcccggatgcgggcgcggcggcaggtgaagtagttgggcagtagcacatcagggaagtccttgaactccttgccctggacaaactcgggcgtggcgcacgtgggctgctgccggttgaagttgagccgccagcggcgccggaacacccacaggagccgacagtcgcaggccagcgggttggagtccaggatgagtgtctccaggttgcccaccgagtggaagactgattcctccagtgtggtcagctggttgccagagacattgagcacgcgcaggtagttgaggccgcggaaggcatagggctccaccacggccagctgcccgcccaccagctggatctcctgcagccggagcagctcatgcaacatggagccctcaatggtgctgatggggttgtaggagaggttgaggaagcggagatagactaggtggcggacggccaggtagggcacagcggtcagattgcagtgtgtgatggacagggacgtcaggttgaggccgtagaggcagttgggtgtcatggtgtccaagtagggccagtgggagatctccaagaccttgagtcggtacagcctcttgaaggagtagtcccggatggcattgatgttgaggtgccggagcctcaggacgatgaggccgtgcaggtgggacagcgcctcggtggggatggaggtcaggttgcatttctccagcgtcagctgctccaggctgttgaggccgctgaaggcgcggtgagagatgtagacgaggtcattgtcgccaacctccagtgacttgaggttgtacaggtcctgaaacatgtagtccagtaggataacgatcttgttctcgctgatgtccagcttggtcaggttgctgaggccagtgaagacgcctagcgggatgagcttcaggcggttgctgcggagacccagcgtccggaggttgaagaggttgttgaaggcgccgggctccacggcgctcacgatgttctcgttgagctccagctcctccaggtgcgggaagctggcgaactcgtcctggttgagcgttttgatgcggt

SEQ ID NO: 26797 - DNA, 961 bp, Artificial sequence
  DNA replication origin
ctgggactcctaatggcttctctcttagcccaaatcctgaccccagtccctggactccttttaaagatgctccattctggctttccagggctaatccccgctgaggtgtgaatggctgataatggcataaggtaggagctgctaatgggagaaataattccgttgctggccagtctaatttggggggctgcctcctggcccatggggaggtggtgaggcaaccctgagagttgcagtcctgcgcccaggctgagctcctgcaggagaaagcctggcggactgcgcggctgggggccaggcagccagtgtccgccgtctccccgggggttggtccgccccgcccccacctgcctcccctttcccctcctcctcctcagacccccatggggacagaaaaaccaacgtggaagaaaactgaggtcatgtcctttgttgtgtataattctttatcttcctcttgctctcggttctggcaaaaagttgttgggcccccggggtgtctgtgtgtgtgtgtgtgagtggcctgtgtgtgtgtgtgtgtgtgtgtctgtgtgtgagtgatgtgtgtgtggtctctgtgtgtgactgatgtgtgtgtgtggactgtgtatgtgtggtgtgtaagcagtctctgtgtgtgtggcctgtgtgtgtgtgtgatgtgtgtgagtggcctttgtgtgtgtggtgtgagtggtcactgtgtgagtgtggtgtgtgtgtgagtgcggtgtgtgagtgtggcctctgtgtgtgtctgtgagtgatgtgtgtgtgtggagtgcgagtagtctgtgtgtgtggcctgtgtgtgtgatgtgtgtgagtggcctctgtgtgtgtgtgtgtgtgtgtgtgtgtgtgatgtgtggcctctgtgtgtgtgtgtgtatgtgtatggtgtgtgagtggcctctgtgtgtgtgtgctggttgcctctcctcccccactccccggcccc

SEQ ID NO: 26798 - DNA, 1106 bp, Artificial sequence
  DNA replication origin
acagctctactgagcccacagcacccagggatattcattcgttcgcttgttcgttcattcattcattcattcattcttccacaaccaaacagaggtcagcatcaagaatgccttaaatgtattgggaaatgaacctgccttctcacactctttctacaaagaaccttccctgattctggagtcccctgctctctgtgtctctgcagtctgctgcttccctaggactcagccagtctccctctcttcctaaagcacctctgacaacctcaacccccagggagaaatctcacccttctctgagtgcctgtgtgggctactgagtaccctgtctgtctcttctcaacccctgcctggggcatctttgacatcatctagctctgtgcattcatgcacagatagtccttgccgctagccaatagctactcccttgtacctccaagggtctgtcccatcccaggggccaggcaggagggcaaaaggaagggtactaggattgctcagggtgttcaaggcagatcatgcttagcccagagccgagcaggcagcttggctaggatgtgcagaacaaatgcatgcgtgactgggctggtacaatattcagtgcaaacaagtgtggttctatgctgtgggtgactggagaaggaggggcaatgacttgaagcaggcagagaggcttcttggaggagggggtcaggagaaggagaggaaaggaccttttgtgaggggatgcggggccaagccaggtgaggatggggggatacgtggaggaactggtggaaacagaacagaaagcctccagagactaaccatggaggtgggtggggctggaaggccacttccacagagtgccacacacaggacagctagcccaagagactccagccagcaagctaaggccctgactctgaaaccaccacacctactacccaccgccccccacccttccctggctccacttcccctaccctccactggacacgctgcctcatgcctccgtgggaccctgcacgaatgactgcactgccttatctcccaacaggaacacgccccaaccccaattgtgcttctccagatatctgcggctgaaggcgcctgaagagcagcac

SEQ ID NO: 26799 - DNA, 1350 bp, Artificial sequence
  DNA replication origin
ctccacaagctccagcctggatggcagctccccaccacacacaagcatcgcccctttccagctcctgcccagtgaaaaggagatggggagtagggagagtggaaggaagggagttggggaccgggagcgcccaggaacgctttaggggcctcccctttgtctgcgttcagcccgggcttctcacctcctcttgccccacttttcattctaaggcagagcgggtgggaggtgggaaccagctgagaagagggaggtaaggagggagcctcctgctccccctcacacccttttcggggtgggctgtgggctctctgctctcaaggcatgccaggagatgtgaccctccgggcggatcccactttgagaaggaggggtggggccaggccagtgggcagcccctcccggttcctgctggggtcgcagcccagcctggtccagcctgactgtgcctgcacctcctctttgttctcagaggccttggggttggggtggggcagaagggggcctgagaggatgggaagagctctgccctgagcgggtgggagtgcaggaggccctgaggtaggggctgtggcatctggacagccccttcctgctcgcccagccctccctcagtcctctgcttggtttgggcagccagagggcgcatagcccagcctggcccgcggctctgggctcaaccctgttggtcattatgccagtggcttcagcactggtgcctcccatgcccagggagcaatgagccgggacacccaggcggcagagagcctggggcttccccagatccagcgcagagtgtcagtgaggagaagagggccagctgctcccagaccctttgtccttgtataagccagggaggagctcaaaatcctcacgcctctgggaaggcactagcagcaggtctactgggatggcatgcctgtccttcctgctttctacccgtggcccgaggtgggagggagggtatagggtggcaccggggagagaccaataactccttggaaccgtgctgaaagagggcacagactcacatcggggatcccagcagcacccagctgcccctcctggaaggggcttagcgaaggcagggacaggcaccctgtggtgttcttgtctctgcccccctcctcaccccctgacaatttaagtgtgagcccctgggtagggcttagttaaagctgcagtgttccccaggttctggagttaaagagtgggaaccagcttttagggggatgggcatgtgctcaaagccaagggccctgtgtgactgggagggaggtggagagacttaccccttgcgatagtcctctttcatctgggctcatcttcatcctctgtcctctgggcatc

SEQ ID NO: 26800 - DNA, 757 bp, Artificial sequence
  DNA replication origin
cccgcgtcgggagaggggccggagcggcgcgggtggggactccgcgccctccggggccgggaccaggacccaccgccgccgccgccgcctgcgctgtcgcccgccgcccgctccggctcccgcgccggctcccgctcgggctccgcgctctgcagcggcgcggggagggagcactaggagcgagccagggagggaggagggatcgagggaggagggagcgagtgagccgcgggagccgggcgggggaggagaaggcgcggccgcaaaacctggtgatggtggtggtggggtggggggtggttcgtctcctttcagcggagggggcggagagcgaggggcgccccagccgctgccctgcacgcttagggcagcgaaacaggcaggggtgcgcaggcgaggggcgcaccagccaggcgctccagctctgcacacggccgcgcccctccgggtccggggctctgggcgagtcccgggccagccgggtgtcggggagtccggcgtgcggtcctccctgggtgtatgcgcgcacaccgttgtgtgtgatttttgtgttgccacatgcgtgtgcatgtgagcgcgcgagtgtgtttacacgtgttaactgggctgtggacgaacacacgcacgaggacggacagggctccctacacgaacagggttgtttggagggcggcatggggaggccgaccgggagcccccgtcctggccctgtcccctcctctcgaaagtccgcgaggctagagggcccacattctag

SEQ ID NO: 26801 - DNA, 825 bp, Artificial sequence
  DNA replication origin
ggcttccctccctctgtcacaggggaacaatagtgcctcccccagagttgctggagggtgaacgtacagttcacagtagagcatagcatggacgcctgctaggagggactctagctaggcctaggttgaggatgggcatagacataggagacaggagaaagtgctccagacaggactgtccagagcaacggtgtgccagagagactgagaagtacccagaaatggtgcagctggaacagaaggtctgtgcaagcctttgggctgtgtgtgaggctgaacagcgagaaacaaggtgctgttgggggtggggagaggtccctccgtggcaaccaggcatctctgcaatgatgttgcgcaggcttcctgggagagggggtgtcactggaactgggattccagcgtctgccccagaatccgagaggctttgggctagatcccctcccccagcctcagctgcccctgtggactcaagctattaggagtattcatgtgctaatgggttgttcccagcaggggaggagggatggccgtgccgggcggtgtcagcattgatggttattctaataaaactggcttggtggtaaagggcgtctggcttcaaggagatggagggggtagtatagggaaaaaggtgaggtcctgagggtggtaacctactctgcaggctttgccaagacatccctgctggcctagtttctgtatctgaggatcaaggaggatctggatctccgaggagaggtcccattccttgggcccgtctgaagttgtggccccagccgaggatccccgggaccattccgggaggagggaacagtcaagcccagg

SEQ ID NO: 26802 - DNA, 1157 bp, Artificial sequence
  DNA replication origin
cttttggagacaaagggaaaggggaatggcttggatgccattgacagtggagaaccgaggccaaggggctcttcctcccagacacagctccgtggtcatccctgctgcctccgaggcgcggagggatcattgtgggcaccaaaataccccaccctaggaccccagcttcctccggtagcacctgggggttagcggggtggaatgagtgggctctcccccatttctccgccgagatcactgaggcagggagcaggtgagtcgggggcggagagatgtggtggccgcgccttgcctgcgtcagtcaccgcaccaggaatagccctcgcccccgcccccgccccccagcgggtctgcgcgcccgccgggtgcctggcggagcctttacgcaggagccagcgagcgtctattcctgtcgggctggtgggaggaggcggcgcgggagggcgggagcgcacgggtagctcacaaacagccggggtgggggggctggggagtctggggaggggtccaggcagcgcggagttgagggaccggggagtcgcctgcgctgggctctggcagggagggggactcctgtgctggcctccctgcttcacctcccacctgtaagtccttctgccgagcctgccccctgctggtccattcagccatagaagacgagtccagttccctttccgtggcttgctggctgtgtgaccatgggcagagcctggaacctctctgggcctgggcttccctccctctgtcacaggggaacaatagtgcctcccccagagttgctggagggtgaacgtacagttcacagtagagcatagcatggacgcctgctaggagggactctagctaggcctaggttgaggatgggcatagacataggagacaggagaaagtgctccagacaggactgtccagagcaacggtgtgccagagagactgagaagtacccagaaatggtgcagctggaacagaaggtctgtgcaagcctttgggctgtgtgtgaggctgaacagcgagaaacaaggtgctgttgggggtggggagaggtccctccgtggcaaccaggcatctctgcaatgatgttgcgcaggcttcctgggagagggggtgtcactggaactgggattccagcgtctgccccagaatccgagaggctttgg

SEQ ID NO: 26803 - DNA, 1126 bp, Artificial sequence
  DNA replication origin
gattgttctgtaccttgatggccatagtggttacacagccacacgcagttgtcaaaactcatagactgtgcactagagagggtcagttttactgtggggtaattatacctcaataaacctgatggaaaaagtttgctgtgggactattgaaacaaggaaaaccaaataacaagtcagtctgtcagggcagtgagacacggtgaggatggcttcctccagggtggcctatggaggacattggagactgtgagaaggaggtggtcacagagctttctgaggaggtggcaggtggctgtgtggtctggaggggaggtgagggtggcccacaggtcagggctgggttgggcagtgccctgtgggccaggttaaggggcttcaccctcctctgggcatggtgggtgccactgagggcataggcagagggtgattgaagcacagttgtgggcaggatggtctgggaggagggtggagggaggagggaggaagggagacagcacctgtggccatgtctaggatgagtgatgggggtgtagtgaagaatgaggaagggtggatcggggtgtcactgagagggtgttcccaaggcggggtcagctgccagagaccacaggctgaggcgggagagctgggggtgctgatggggtccttggggaccttgctggggatcttgagcggtgctggggctgaggacctgtaagtgaagcttccaggaggcaggggacacatttgttggtagcagtgggagtctcagagagaatggggtggggttgtccatctgtgtatctgtgcacgtgaacaaaacttgcagaggtgggctgacctttggaggacatggagagacagtgagaagtttaggggcttagacggggccttgaatgccaggccagggagttgatgctcctgagggtgtgatccattaagggctggccactccagggtgctgggaagtgggtagggatggcactgaggagcatgtgctgtgctgggaggcagcacctgaggcccactgggctgggcaatggggatccactgtggggagctgtgctgaggtgggcctcacctggggtagcaggaagccctgtctttgccccactaactttcttgctcttcccgcacagtgcatgct

SEQ ID NO: 26804 - DNA, 658 bp, Artificial sequence
  DNA replication origin
ggcttctggcatactgagactgggcagtctgggagggcttctctgaggaggcgtcttatcccattatcagatggataagaaggagctgtgtgcaaggagcaggaagagcattccatgtcctggagaaccttggtgtgttcaggagctggaaggaaacttgtggggtaacaggaagagaaccagaggaggtggggctgggtaggtggtcagggctgggtcagacagagcctgaggccaatagtgaggagggtgggtgggttttggtctaagagaaagaggaagttgctggagggttttaagcagggaagggacctaatctaacttagggttcaacagtgctgccctggctgctggatgaagagcagagggacacagggacacagaagagtaaggtgggccactccagggggtctggcaggccgtggtgggcctggcccaggacaggtgccgggttgggtggggatatcacagggaggcgaggtttctggtttgggcagctgggttgatggtggagatgtttgctgaggcaggagccctggagaaggagtggtttggggacgaggaacgatgaggtgtttatgggacatcaaggggagatggtgaggatatcaggatcttagttgtgacaacaatgggatttatatgttattatccccat

SEQ ID NO: 26805 - DNA, 951 bp, Artificial sequence
  DNA replication origin
gtgtgcctgtaatcccagctatttgggaggctgaggtgggagaattgcctgagcctgggaggtggaggttgtaatgagccaagattgtaccactgcactccagtctgggtgacagagtaagatcctgtctcaaaaaacaaacaaacaaacaaacaaaaaaccaaaaccccagcataatgaaggaaggggatttttaaaggatggcagataccagaacacaattgtttgctgctgggaagaacaaaagacccagaaaagagggagagacaggtgatgttgaaagataatgtaatgatgggagggagctgaattcctgaggatgaggggtgggttcagagtccaagtggagccattaacctttaacagcagcgagacccctcatcaggcaggaaggggggtgcaggccgaagctggtgggcttctagaatgtgcaggggcagaggactggggttcatatttgctggcttctgcttccccagtgaaaacaaagtgaggtctcagtggagagtgatgggtcacatggaggaagggaggcaggaggagagtggaggtggggccactgccaggttggagagtggggaggtgaggtggccggtggctggagctgggactgctgggcagtgctggaattgctgcaggtttgggattcaagctcacagagggcacagcctccacggtggggtcatttctctagctgtatttggcctcccagctataagtgccaagatgttggttggattcatccaggttggggttttatgaaagtactgcttagggggaggggggcaagatatttgagcatccattatgctgatggaccatggaactcaagctcaccaagggcagtgagggcggaagggcagtgatggaaggtgaggtgcgaaggtctcggtgcagtgaggattgtaaggagaggagctggagggccagctgggaggtttgaccaggagc

SEQ ID NO: 26806 - DNA, 1158 bp, Artificial sequence
  DNA replication origin
ggaccataaagcagcaaacttttaccactggaagcagctcccagccaagacgtggggaaatgatcatgtcatcgagtcatctgggtatcagttattgtttgggggaaagtggagtgtgtgggcgcgtagagacgtgcgcaccctcccccgtgcccaggcaagccaggcttatcgcgggaggaagagaggatgctgctgagagggaggagagcagggagagctcacccattcactccacagacattactgagtgcctgccacgctccaggcactggctgtgcacgcttctcatgccattggggcaaacagagaatgctaatggtgcagtgatgggatgaatagggacagctggtaagactgggcaacggggccctcaggtgagggagcacctgtgggaggaccgtgagggggatgaggaggctatgtggcaaagggcagtggcagggggagagagggccaaatgagggcatttgcatggcactctggggctgtgggatattttccaaggggcagggggccgtgaatgagcttgggttaagcaagggtggtgacaatctgatttaagttttaaaaaagatctctccagctgctgcaggaagggccaagtagggaaagagagtgaggcagacatgatggaggcctaggtcaaaatggtaaccatggtgatgggggtggcagaccccatcatggcagcagaactggggacagggagaaggtcatggagaaggcaagaaggatcctcaattcctggcttgagccgctgcggtcatcctctgagatgtggaggtgcagtggaggatcaggagttcgtttttgaccacctccttctgcagaggtgtcctattgacagttgtggtcacaagcctggagctcaggggagaggtctttataggggatggggacgtgggaaccagcagctgtagatggtgtttaaagacctgggcaaagccaaggaccaccaggaagcgacgtgggtggtggagagaggaccaagtcctggacgctgggatcaccaccatgtagagttgagggaggagaaggaaccttcacaggaggctgagaaggcacacctagggggtgcgaggaaagccaaaaggatgtggaatcccagaagccaggagagggttcctaaaggaagggcaaactcagtcagctgcg

SEQ ID NO: 26807 - DNA, 1038 bp, Artificial sequence
  DNA replication origin
gctggggtgtgagcacaggagcacgcggacgttgtcacgtctgcctggtctccactctgagatctaacccaaggaggagcgggtgcccgagaggggaagggagctcaagaaaaaaaaaaatagcttgcttgacttaattatgactgattgtgacagcttacatctttagtctgaaaagtatctatggggtaaggactgcttttctcaatcgggataattatgttaattaaaatgctttctttacagcagttctgattaataaaaacagttccactgctctctttaaacactctaaccttctgttgcatggggaaggaggccctttctcaacaatttatggttcttcatgcagattccaaaaggcgacctgctgccgggtggcctggtggcaggcactgcgctcacacacgtgggggcggatgcaggcagaggggcaggtgcgtggacctggcgggcggcgggactggccattggggcgggacaggccggggcactgcttggcagagtcggctgcagaataaaaacgccgtttactcctctaattgctgtttatttcctctggacagcatggagataattaacgagctcccaattaagaaaaattacatgtgggggactgaggtgtcagggccaggatcggtattggagtggaggggtggggtggggctggtggtaggagcaggggtccttggtgaagccaagggggtggtggtgtgtgtgctagaagaggtggatgcaagtcagcaggaggggtggtgaggcaggggcttcactgccagggagactgagtggaagggaacaagagctttgagcatagcttcactgtccccagcctcagttcctctctttgcctaagttagaggtcacaagtggtggctcagaggcagaatctgtctcatagttgtgtgtgtgtgtgtatgtgtgtgtatgcatgcacatgtgtataagtgccagtctgtgtgtgtgtgagtacatatgtgtgtatgaaagcgtgtgagtgtgcgtgtgtgtgtgaatgtgagtttgtgtatgtgtgag

SEQ ID NO: 26808 - DNA, 1504 bp, Artificial sequence
  DNA replication origin
gcctgagttcacatagcttgtgagtggccaagtggggatttgaacctgggccacttgactctaaagccagtgctcattcctctttcctctgccaggcagggccccagcttgcctcctgccatctccagagggttgccacgccctgtggccctagggcaaggagctcctggcatatttttgttgggggacagtctagttcctgggcctcctgataaacccagagtccagcccagaggctcagccaggttatgtactcagagacgggctgcgagtgagctgtcttccctggccggtgtgctgagctttaccgggccatttaaaagctgacaacacattttgcaggctcctatttaagatatactaaaaaataagcaccttttcagggaggaaactgcagcatgtcggggtgaaatatgtccgtggtgtcacctacacacatgtcaccctgcaggtgcagagaggggtgggagcatcaagcacccagcctcaccccccaccaggcagcctcggaaggtgagcaggtacttgatgagcaagtggatttgtcagcatttctggctctgcagcgggaagagggaggtcacgctttggggggtcatgttagaggttggggtggataggggcataattagggggcaggggaagttacctgctccaggctgcccatttcagatggagaagctgaggcccggggtgggaggatgaagttgcgaggtcatacatcctgagagctgccccaagcctggtccccaagcccaaggccaacgctatgcaggaggtgctcctgtcttcctctgccccttctcatcccacctcaaaacagactttctcagacttagggcaggcctggaccaggagccaagcactgtggtaggcactggggatacaatagtaaacaaataaaaaacacagtcaatcaaaccgggttcttcatggagcttctgtagttgaatggaggtgacaaataaagaatgccaacaatgtcgtgaagctgcggtgtatctaccaccaaggggcagatgtggggtgctgtcagggtatttaagaggagacccaccaggtcggggaggcagggaagggctttgggaggaggtgacaccagggctgagcactgcaggatgaatgtgtgagccgagagggtgggaggcagtggctgggggaagaggggcagcaggcaaagggaagagcacataccaaggccctgtggcagaggctccaggggattctgaaaggccagtgtggctagagtggagtgagcttggggaggtatggctggagggggttagggccgggtctcacgagggccatgaagcggggtgactggggcgggagggttagacacttggatttgtggtatggacagatttctggctgtcacaggaggaaacgaccttggctttgagtcaggagtggactggggagtgggtaggggtgaatgtgagcattgaggcaggaggggcggtggctcagaccatggtattggtcaggctgccctctggctctc

SEQ ID NO: 26809 - DNA, 1300 bp, Artificial sequence
  DNA replication origin
tgaatgggacaggttggcaggtgtgagagccgcagactccctggggtgggggctgctgggcctgttatcccagggaggctggggccccactgctgtgcagtgtgcgctgctgcgccagctggccggacctcagtctcgcttccacctccctgcctttgcagtgtgtcctgcctgctgggcatgccctctggctcctgcctgcttcttcatatgggaggcagttcatgtagggagtaagaacacaggcttcggagtctggtagagttggctgtgccccttccttccttccttctttccttccttccttccttccttccttccttccttccttccttccttccttccttccttccttccttcagcaaatatgtattgactgtctcctgggtgccaagcactgcacatagtacagaggtgaatccagaggtgaacaaggtggcttcgggccctgcctgccttatggagtttatgttgtgatgaggaggcagacaggaaacaaggccacacataaatagacaatataatgtcaggcggaggaaatgcttagaaaattgggagagactggggtgcatggtgggcattttacctagggtgcctagggatggtaagagggctcatttgaatgggatggtaagaaagtctgggggaagaacctttggtagaaggagcgagagggcaaaaaccctgagactggcccgtgtgggaaggaggccaattatggtggaagatgatttctgagaggtgggcagggcctcgaaggctttggagagagtttggacttcagtctgtaccatgggcttatggcagggagccacagggcctgattctctccgtcatcgtgctgctctgatagtttggggccagaggtggaggcaagaagctgagtgagggaggaggctgtttcaataatccaggcaagagctggccagggcggggcagaggagctgggggaagcagtcaggttctggatgtgttctgggatagacctgatagggtttgctgatggcttgggtatgggccgagggagaaagagagaagtcaaggctgagggaaacataatttggggataaaaatgaagagttctgttttggacaggtctgttagatgagcaagcggagatgacaaataggcctctgaacacgaactggcattcaggagggagctgaggctggtgagagggacctgggggcacagcaggggtttaagctgaggagtgtgcagacaggatgggatggagaggatgtcctggtgagccctggggcctcggatgcttggagggaagttaggtaagaggggagaa

SEQ ID NO: 26810 - DNA, 1032 bp, Artificial sequence
  DNA replication origin
gatcaggtctcagaattgcacaggctcacgtctgctgcacgtgtaggacatggcaggtctttgtgaggtacccgcaccgggagagacttgctgatggctgctctttcaggtcctccctccccgtctccttttccagggaatgcctctgtccatggggtggggttggggcatgaggtgagtagataaacagccgtccagcactgtcgagtggggatcctgtcccccaggggtgggtgggggctgaggtgcttggcagtcttcccccagcctctctccatggcaatcctcctgcctccatccttgcctccagttggcttcgacattgcccagctcaacctggggtatggctggatatggggagagtcagaccctgatagctcctcccatgggaacgtgccttctcactccctggctgaccctggccactccatcagccatcaggtctgccagagcacgtcccagggtgtgcgagtgggaggcaagaaagggcccagtcacaggggaggctggggggggaccttggcaggacttgaagctaattactgtgggtaggtaggagaaggcaagtggccctgccagaggtggggatgggacgagtggggttttcctcctctctttgagctcctggcaaatttctgctcatctaagcctcagccttggcacagctccgctggaggcctttgctgcctttaggcagccaatgggggcttcccaccctgggccccaccctgtcatggatagcctcttctgtggctctgtggccctgagcctggcgtggtgctggctgcggccagggtctggagcagggaggccagagactcaggtaagggttgcacaccaggacccataaattgtccctgacagcagtgggagccattgaagggtcctgggcagtggaggctgggatgacagcagggttctatggaggggacagggcagaaggccctgcagtgatggggctgcagtgggctgagagaaaccccaggcagggggacctgtggccacacccctgctgccccgcaaggctgcagt

SEQ ID NO: 26811 - DNA, 1040 bp, Artificial sequence
  DNA replication origin
atcaagtgcacaataaatgtaatgcacttgaatcatcccaaaaccatctccccaaccctgggctgtggaaaaattgtcttccacgaaactggtccctggtgccagaaaggttggggactgctgtagtgggggagagagatattaaacaagataaataagcaaaatatgtactgtgttaggtagtgatcatgtcaaggagaaacaaatacaaggagaagtggggaaaggaaatgtcagcagtgggggtgcctctctgagaaggagacttttaggtaaagtggggtgttgaggtcagggagccatatggaagcctggggagaccattcaaagcagaggaaacaggggcatccaggtgggcgtgtgcctggcctgtgtgaggagcagccaggggagaaggaggaggccagaatgggtggagaaggcggtgggcgtgagtggtaagagaggggaggaattgttgtcaaggagcagatgggtccagaacttggagatcgctctcagggctttggcttttgctctgagtgagactggagtcaccgcagggttttagcaaaggagtgacatgccatgacttgggttttaaggattcctctggctgctatgtggaggacactgtgggaggcaggacagaagtaggaagccctagggggaggctgttgaaataatcccggagggagatggtggcttggtctgtgctggtggccgtggagtggtgagaagtggttgattctggatagattttgaaagttcaacaaacaggctttgctgatggtggatctgctgcaggatgagagaaagaattggccccacagtttttggcttgggcagctggaaagatgggagtaacctatctgatctgagaggggaagtcagcaaaatcagctggggtgaaatgaggcactcagctgtggtcatgtgaagtttgatgtgcccgttagttgtctgggatgcggtgttgagcaggtatctgtggcaggcaaaacagtggctttcaatgatatccaggcccgcaaccctggaacctgtgaaatctaccttac

SEQ ID NO: 26812 - DNA, 1341 bp, Artificial sequence
  DNA replication origin
ccctttcctgagcagaagaggtgctgaggccctaccaaggtaggggcaggagactttgggagcagggaccctgatccttctcacctctcccgtctggcttggagccagcctgccctttcattcacaccttcattcacccgctcatcacttgatgaaacacctatgaagcactgtatccccagcagctagaacgttatgcacactgctcctcccctcaggtagcttcccatcttgagggagtgacagcatggcaaacaggtaatttgggtaacctcagactgtgctgagctcgggagggaaacgacagggccgtggaatagggagtggctggggctgaatgagcagctccgatgggcatccaggcgatgggcatccaggcaggcctctctgaagaggtgactttgaggctgaaggggctgaatgtcaaggcaaaggctgggaggtgggaagtagctggctgtgtctggagaccaggaggaagacagtgtggctggtgggtggggagtgagggagagagcggggacaggggtgggaaacagccttagccgccctgctgaggagcaggggggtgctctggaggggattaagccagtgagtgacagggcctgatttgtgctttccaaattcctttctggcctctgggtggagagaatggattagaggctgtggcagggagagcagggacccttgaggggaggtgggtgcagggacccaggagagaggtggagtcgtggccacagggtgggggtgcagatggcgaagagtgggtggctggggaaggggttggagagtggctatggggtgggaaggctgagagtcctggtcggggcgggttcaatttggcccaagtggcaccgttttctgagatggggaatatggcgcaggtggaggtgcaggcatcctggtttggacttgccgggtttgaggagccagtaagccaagcaagtggagcatcgggccttcggtcagcatcggggaccttctcacttctggtccaaggtcaaaggctttgccctaatatgtgggtcatctcattgccagcccatttttcagatgaggacactgaggggctcaccgcagtctttagactgcacgtggccttctttcagatccctgcgtggagcggagaaagcaagaccctgagtggtgcctgataggaaggtggcaggaaaactcggggagtgggagcctagagccacctcctgctgacgcacatgtgtatgcgggcacgtgtgtgtgtgtgtgtgtgtgtgtgtgtgtgtgtacgcgtgcgcacacttgagcatcgtgtggagcccattaacaaacagagaaataaattaacaagtattcaacccacca

SEQ ID NO: 26813 - DNA, 1806 bp, Artificial sequence
  DNA replication origin
cagggccgcaggggcgcaggccggggagccggtgtgtctgcccgccggcggcgcggcgcgcgcggcctctgattgggcgggagcctcgggggcagcggcgggggtggggtgctgggtgcgcgtccgtggggggcgtgcacgcttggggctgggagggggcgtgctcggcagcccaggccgcggccccgcctcacccttacctgcagctgcagccccgacgacttgcagcaagtttgtggagcccctggggcgcggcgggccgggaggggtggggacggaggcgctttgagggtgcaactccggccttcctttccagagaagagaacgcgaggggagtggggcgggggcgcgggccgggccgtctggcgggcggaggggtgcgcctccagctcctcagtcgcgcagccgcccgctctctgggacacccacctaggcccgcggcgccgcgctggagccgctccgggcgccagactactatgaccccgctagggtcaggcaggaccgcgcggggacagctcccaggcccagggcctgggatgtctttgcaggcaggaggaagacaccaaggttcagttgggggagtgcggcgacgtgcccgggcgtgtatgtgtgtgtccccgcgccttctgctcctcaggacggtggctggaagaagggaacttgccgcaaggcgcgccccacccgacctggaccctcaggagctcccaagaggccgggggcgtctccaggtctgccggcctggtgccccatacctgcttggagccatgcccccgcgtgcctcactctacattgaggttgtggctgtgctttgtaccctctcccattgtgagtctcctcccacactctggacctgtactggctgcctgagggaacctccccacacccctaagtgccaacccagccagtcctgtggaagatgggatggaaagctgtggtccaagatggtgcctctgagagggagagaaccccgtgtctcctggagtgagaggcccaaggaaggatctggggtcaggactcctgcaggttcctcatcctccttgtttccagggcaggtttttcctcctctaggaagccttctctggttgctcctgagtccttccagcttggacttccctggggttgtaactgctgggatcccaagcagcccccatccatatgccttctttcctgccactcgcctgtgaacctgtgtggttagaagtcttgatctcagcctggatgctgtgtggaggggtgtggtggctggaccagtcagtatctacctgggtctctggagtatggtaatgtctatggtaatatcagctttcaggcttaaaccttacttccacctccattatccttctggaatctctcagccactttgtgagaatgcaggaccggtgggcaagttgcttatccatttcacagaggaggattttgtggcagagatggaggtagttttctaagtcttaggacagcccttttccactgcgagggtatccgctgaccctggtctttggtgaggcatggaggacacccaggccttctttattgacctggcaggcgggctcctgctgcgtgtggcacgtttactgggctggcggctgttctcagctggaggcagttgaacaaaagctcctgacctgtgggaccttttgaccctagcttggttaaatatgtgcttcctggatttggggccagaggctgtcagtgctttgcttgatggtttggaagcccggctcctgtcatcctctgcacagctctgggagttcactaccatcccagggatccgaatcactcccgcccaacctggcactctatgctggg

SEQ ID NO: 26814 - DNA, 1678 bp, Artificial sequence
  DNA replication origin
ctccccgctgctctccgtctgtctcgccgccgccctctcccgcgccccttcctccccaccgccctgcgctgcctctcacattctccgcattacagcgggtgccgcccgccgctcgcggggcccagggttcgagcgcgcagtgggcggcgaggggacccgccacgcccggccccgccgccccctccgctctccgcggctccgcggctgctagctccggcctggcgctagggtggcgacgtcccgcgctagcctcggctgccgctgacagctctcatctcgcccgggcttaaagggatagcgcacccggctcgaccggccccacccgggggccccggggaagggacctcgctgcgcgggaacagtccggggcggtggcacagccggggccgtgcgggcgacgccctctccgccgccgtggagcccggccctcggggctggaggtgagtcaaggagaaggacggtcagaccacgccatccagggggcgctcagcggccaagcctctgggccgacaatgggtgtgcggcggtgtaggctgagcgccctggactgcgtggcgggggatgggggtcagtgaagctgccgtctgagtctgaactccaggtgaagacacctgtcatgctgggaggacagggctcacgggctggcgtcccgctcctgctgtgtgaccttgggcaaatgccgacccctctctgcacctcagtttaccccctttgggaagggcatggcttccatcatttctgagcccatgcccagctctgatatggtgttaggtccccatagaagggggagtcccaaggtagtccctcagcccccagagtcccacctccttgcctgtgagagctgaggccaccgctgagactgcaatccttgccaccccggacactcaccaggactggtctgcctcctccttccaactgcctcatcagggaaaccagggaacgaggtaaagttgagtcagtacagggacctaccgtttgcagagctccctcacatccaagatctccctggaccctcatgacacccctgggaagtaaagtgcacccctacgctcccggtcagcctgatcctggacaagtctagcacgtgagcatttcgtcttcagggccccctccccacccttactcccacccaggctgtcccttgctctccagagggatgcattttgcccattgttcaggaagtttctgtcatatgccccatcctgtgctaggtcctggagacacagatgatttagacacattcctaccttcagaaaataagaataagggaggtatgatagagctgtggtgggtggaggaggtcctggaggaggtgacattgaagccagatagtgaaggatgagtaagaattggccaggcagaaaggaacacgaagggtatcccatgccaaaagaagagcatgtgcaaagacctggaagtgggaaatggagtgatgggtgttttggagggaagagaagctataaatccttgatttgaggagtttcgactttgttctggggcagcagcagagctgccacttggcaaatctaggcagcagcccccacccccacctttcagccgtcacagaggtatggctaagggcttcccaaacccagcagcttttgccagaggccaccccctcttctgtttctcccctctaagcccagacccacttctgcacccatatctacagccagac

SEQ ID NO: 26815 - DNA, 898 bp, Artificial sequence
  DNA replication origin
aggagcagaaccaaggtgaggaactggttcagccaaagtctggtctggacccaatcccctggggagctctggtgcttgcactgcactgcagagttgtcagggcacgaggggcggcttttgttcctggatctgcctgctgaccgtgggttgcacctggggaagagtaggcaccccccccccaggcatttcctgatgaccaaagtttggtctccactggctgagggcactgctccctagaagggcacagctgtgagttgttaacagccaacaccacccgcagctagtagacaaatgtcctggcttgaaaacggagtctgggtgaggcatcaacagcacctactacagatggactggagcaggggcctagtggggttggagagaaatgggtggattcaagagcggtgccagaggtagagtggatagcacttagggagtggttgggtggggtgggcatgggggtggatacaggggactcccaggctactggcttgggtgactgagtggctgggggtgccaggttggaacagagatgtaggggccatctgtgtggagatgggagaaggtgggcgggctcgtgcgggtgggcaggaagggagaagagccggagcacagagtcctgggcaccccacaggactggggctggcagaggacagggagcccaagggcagtttgagaaggtgcggccaggaggacaggaggaaaactagagagggtgaagtcccgacatcacctcttccctcctccatcctcccagatgggttggcctcagtcatcacctgtctcctccgtcagtgcatgtttgtggatgaaggaaggagactgctttgaggagcctcaaaagactgtgatccccttgaaggcggggattgttgcctgtcaatttgattagcattgtaga

SEQ ID NO: 26816 - DNA, 1386 bp, Artificial sequence
  DNA replication origin
ggagaggggagaggggcagcaggagggtgaaggtgaaggagctggtgtgggcagtgaggaggctgagggaccctgggcccaggggcattaaccttttcagcttagggcaggcccagggacctcatcactcagccccaatcccagaaccagacgggacgttcaaggtcaagtggtggggctggcacagaagtccacccgcagtgccccctccacacagctctggggacagggcatgcacagctttcacctgctcccaccgagtggaaacctgccccccaaccccaaacctcccacgctcagtcccacttctgctctgtgcctgcattggcttagggccttggggactctcctatcacaggtccggggtgggggcgacacagctgcccagggaggcccctgctgggcaccaggacagctcctcccacccctgccctgacctcagcaatgagacagagtcagggagatggaggtggacaaggacaggggctctgagggggagggaggatgtgagtcaggagagaggggaggtggggcggggtgggagtgaaatagggagatggggggcagtgagagagatggggagacactaagcaagagatggagaaagatgtgagaggggccgggatggtgagagtcagacccagagacacacagagaagacgctagagagaaccagagaaacaaaaaaggtctgagggtccggaaaggcagccgggctctgcaactctccctggtcaggagggagtcaccttagggcctggggcatgaccctggcctagagaggatgctgtgtgaccccgcccaggcaccccacctctctgagcctcggttgctggtctataaagcagggggaccggccctgtctccgagagggccctgaggctccacaaggaggctggcccggtccctttcttccctctactcccccctgagtcatgcaggcctgcagaagggggtggggggctcccttccagggccctgagtgggcaaaccaggtgaaaggaaagttgttgtggggctggtgtcatgtgctgcagccatgagcatggagcgatggagcgtttgccctgaatattgaaaatgcataaatatccatttttaggcaccaaggcagatataaatacagaggggagggtgtgcagccctcagccgtaatttactggctctgctacctgcgggggcttgggcacttgtgcttgaccatcaagaggcttttccagatggctttatgaccgccagtggccacctggatcccttctcctggagaagtggctccttgggatctgccggctggggtgaggtggggcaaggcagggggtatcattcctaggcctgctccgtcctaggcctttggggcctctcctgccttctcctcctccagcatct

SEQ ID NO: 26817 - DNA, 798 bp, Artificial sequence
  DNA replication origin
gaggaagagggagcgggagaaacggcaggggtgggcaactccctgccagtgagcaaggccacgcggcccctgaccccaggactcagggggatgtgtcctcccaccagctcctgaccccaccctgtaaggagctggtggcaggagctcctgtttagtcctcctgtgcctgagcagccccgagggtgggcatctctgagtgctgggagcaggagtggggacctggcttgtcttcatgggagtgccctctcatgaccacgtgcacagcgcccagaggccaggccccaggctggagggctgagagcagccagcggtcccctctcctgggggaatgcagggactcttctgacctccctcccatcagccatcccacctctctctggatgtggcggcatctcatggtttgtggacttacttctccagggcagtggggggcgccagtgagcctgggtgggtgcatatctgtgcaggagatgagattcctgggagagagggacggggtggggtggggggagtaagaggtgtggctgtgcatggcgtggggcctgtgcgcatgtgtggtataagtgtgggtcgcgtctgctttttcccgtgactagcatgaagcatgcgtttgaaggcagtggtggtaccaggtgtgtgtgtgtggagtaaggtgtgggtctgtgcatttgtgtgtgtgtcttgctccacgtgtgtgcggtaagggacatgtgtgtgtgcacagcccctacctgtgtgcctccagatggtgtgtccatgtgtccctgcaggcagggcccctcttctgctcctggccca

SEQ ID NO: 26818 - DNA, 1072 bp, Artificial sequence
  DNA replication origin
tagcaccatgcctgcatgctgtcagggctaagaaggtatttgagaatggctctcagttgaagcccaaggaggtgggggtactggaatccctccttggctggaggctggggcctgaatgagctgaccaccctggtcaccttggatgctcccttcccatctccctggcggcccagcccatccctcaggccctgagatcttaggggatctggtccctgcaggaacagggagcctggggatccagccctgattcaccccgcgggggtcctcccttgactcacttcccttctgggaaccatgtgatgccctcttttagagctggcttctccatctgaaggagagaagggtgtagcctgggcccttgtgaaggaggctcaggccctgcctttgctccatgctgctcttgggaatgatctcgaaggtgtagctgaagcactgaatcacacatgggtagtgatgatggatgggccctaaggctgcagttcttatggcataactagagctgccttcgctgaaggaagaatgctgtcatgttggggtttctggcatcgggacagagaggggatatatcccagcacttctctgaaagcgaacttccattcagcctctgctgggtcaggcatcagtgctgggatgaggaggtgtggcagggggtggtccagagctatctgtaggacaagccccgctgaggggcaccagctctccctctaggaggctgagagtgggtagtgggtggggggtcctgcctgtcaccaacaggaggagggagaggagagaatgaagaggggaggtggcagatagatggatctgcaaggaagcaaggggaggagagaaggggcagagctggggggcagctggaggggtgtgggggtgctcctcacaggggagggcagggtggctccttcctcgtttcccaccttgtagcactccccgttcctggcccagggcatctgaagctggaggacccacttctcactgtcgccgggtccctttggaccccaacatactcaccccaaacttgcctggcaaacaaagctcggacagcattggggtggccccactggtgtctcagaca

SEQ ID NO: 26819 - DNA, 865 bp, Artificial sequence
  DNA replication origin
gtgaggggttgaagtgggacccaggtgggggagtacctggcagggagggcttgtgtgttacctgagtggggactcagaactgatgggggtatcttagtgagcagggccacagggacaccaggtacaagaaattgaagcagggtagatcctgctgcctctgaggatggcttggggggaccgatggtgctcgggacaggcactgagccttgtgtgcaccttgtgtgccaccccaggcctccggagcagggcagggcccaggggccagagcccttggcccagcccacccggactcgagaaaaactgttctagagcaagtgtaacggagcctccctccctacgcctgcccgcccgggcaggacaagaagggccttttagtgctgcccgcctggggggcctggggtgggccatgccaggtgggccaggcggctgtcgatgatggcaggaggggagtggggtgcgtgtggagctcgcggaggaagtgtataggctgtgtctgggaactgggagtgctgcccaggacgggtgggcaggggagggggagttggaaatagccctgacatccacacttactggcgcacacagatgtgggcacacacacttgcacacggccactctcacagacctggacgagcatggctactgcctctgtctccaagtcccctaccttaaagatctgggccagtggcgcttgcgaggaaggaagtgagcacaggatggggacggggtgccaccctgagctgtgtcttctattcaaggccaggagaaaatgaacaggggcttgtgggtctgggactagagattggcccctccctggtccctctgctccttcatcgcctttctcccggactcctgccccatccagctc

SEQ ID NO: 26820 - DNA, 1014 bp, Artificial sequence
  DNA replication origin
aggcagagagggccctggggacgggtggggtgctggcggcagggagcacttctgactgccgtggaacccggtaaaggagaagggaaggagaacagagcaggactggagagatgggcagacagacagagagacagggtaggaaagacagacagaaagagatggaggaaccacagccaggggtgggaaaggacagagagatggagagagcgggatggggggatggactgagagatcgggggtgctctgcagcccgggtgaccctgcgcaggggcagacagaagccgtgaggggagactgaagtgtggcttccgttccatagagtcttcatggtgctccaggcagcgtggtcagagtccgggtggagccggtgaggagggaggaagcaggcgtctctgtggcctcgcccacccccagcctccagggtctaggggctggagaccctccgttcccggcagtctccacggggaaggcccaaggcctattggaggcaactcaatgttgtggggcagagcccagattgaccttgtcaccaagatccccaagggctgtcttgggcacggccgggaccttgagggacaggtctggtctctggcttgctatggagtgagttccctaggcctggagggctcacaagctaaggctatggcctggactcacacctgctgccagcctctacgcagacccctcccttggctgcgcttgtaggggctgtggggtaaccgtagcctggggcatgtgtcatggagccacaagcagtgactcagacagttaaaaaaggagcagctctgagtggtgactcaattggctctggaggggctgggtgggtctggctggtacaagatggggtggtctgggtttatttttggcagggcggggctggggccagggggtggaagatgggaaccgggggtggagaggagccgctgctctcatcccggggggagccccagggctccatgccaacttaggaaagtggctttccaatgccagggagtcctggcaggctgggctgct

SEQ ID NO: 26821 - DNA, 1791 bp, Artificial sequence
  DNA replication origin
gtctaaatgctgcagagacctctgccagggtcagggcagccccatccctccttgccccaagaactcttgagccaagagatgcacactcaggtcagctgaccttctgtttagttgcctttctggtcccttgcaaggccaaggaggccagggaggaaaacagtttcctcagctattggctgggccctgaccctggtcactggcctcagctaccatcctctaaccaagcgctttgagtcacccatgtagaggggcatgtactggggaacatttccagttgagggaacccgtctggaagatgagtggaagcaggggcaggtggggtgggagaagctgagcttggtccacagaggctgataggggctgcgccctgggctcccagccacatgtcccaaccctggggccttgtggagcacagaggaagaaggagaggaaatgagaggttttgagggaagaagcagcccagagtccaacgaggcgggagggctgggctgggggaggaggaagcggggcctcaatggtgtctttgtggaagccttgctgctccccaggcctcaggcgaggagggtggggtggctgcggtggggagcggttccaagaggcttttacctgccttataattttccctcttgtacagggagatgggtgggtttccaggccccttccgtaccctcctttcccccactttcctggccctagcggacctgggaccctcactcagtggacccaggctggggtagggtttctggcagggaagagaagagtgaaggaccctcacttggtgctgcccagccccccaggcccagcaggctcctgggaggcatctcccatgttacaggtgaggaaactgaggctcagagagggcagtcctccgtgctagcctgtggagcagtggcagggctgggacttaagctcccgcgggtgtggctccagagctaggggctgtgggtgtcagcagggcacatgcaccgtgtgtgcacccagagaggcgtggtgggtttgcttgctgcctgtgaatcggaagtggagcatctgccaatggccccagtgggaggagggtgtgagagctggaccccagcctggggaacacacactctttcccttcttgtcccctgggactcttctgtcagggccgggtggagggggcagcgaagaggggatggaagcatctgctctccttgggcggtttggcagccccgcctctgtggctctggggctggccgaatagggagggcccttctgcaggggctggcgagggatgactaggtccagaagccagtgataagtgccagccctgcccactggggacttggaggtctgggaggagggtggagagacaggggtctgggtgggagctgcccccaggaggctgagggccaggctctctcctgggcagtgtccaggaccaggcagcccatggctcatctctgagttcccctcggctctggcagcagaaactgccgaagacagggctgtcggggcggcgtctcggggcttccccagcctggtgggctgggtctggagatagtgagtgtgtgagttgggatgggggaagaacagaggaaacggtgactgtgggtctggacggctgcctggacctgaaatctggtggcacaacttgtgtacagtggcttgtgtgcctcctcctcagttcccccatctgaatacagggcagagggtgggctcaccccacaggcagaagtccacgtccagggcagatgcctgggtcagggctcacacccccagcacacacacagggctcagagccatgtgcttccatgctttccctggcct

SEQ ID NO: 26822 - DNA, 1984 bp, Artificial sequence
  DNA replication origin
gaagctgtgtgagagagggagctgtggtcaaggctcagactcttgcctggaggaggcgaggtgccgcaaagagggacgggtgggttgcagaaaggggtccatgctggcgcaccctcatggttctgctgtatggtgctgcctctgagcactgcccgggtcccagtgagaggtggcagcctgctggcagccctcacagcccggcgcctcctcggccttggcgcccactctggccgcgcttgaggagcccttcagcccgccgctgcactgtgggagcccgtttctgggctggccaaggccggagccggctccctcagcttgccaggaggtgtggagggagaggcgcgggccggaaccggggctgcgcgcggtgcttgtgggccagcgcgagttccgggtgggcgtgggatcggcggccccgcactcggagcagctggccggccccgcccgccccgggcagtgaggggcttagcacctgggccagcagctgctgtgctcgacttctcgcccggccttagctgcaatacagtgatgggaatggaagaagacagctaacatgggagaaaattattaaaactgagaaggagaaatcaagatgccctcctccataaagactggattcacatacagaccaaggcctgaggaaggagacggaggaggaaaactcgagggagacagagaaggcgggacgttggcagcaagcctgctgctgtgcacaggagtgaggaggggacgcccagccagcctgctggggagggagggccctgctccaagacgaagccagacttctccatcaccgcccctcggggtttggcaccacggggggagatcctggctccaggtctgggcaggcaggggtgagggaatctgagggggctgtgggatggggtgctctgggagggccaaggccgggatgaagggctctctgtctcccctcatgggtgtgtatgtggcggggcaggggtggggtcgtggcccacctgggggctgaatgccggctgtgtgagagcatggacgggccaggtgtgcttccccagcagcagaccctccctgaggtcacctggccctctagacctcaggtcagtttccctccccttgcaccttcaagggactcccctattttacttccgacagcaatctacttccaacccagcaggcagggcatgggcgagtgtgtgcgggagtgtgggtcagtgtcacatgtacacacgtgtgtggcggcaaggcacgcgaggagggcatgcactgggtccatggtctggccccactgtgggccctggatactgaaccattactgggggtcccctccccagcacattggtctccctgggctcctcaggcaagggagaagctgtctggtgtgcctactcaggggtgggcccctctcaaacctcctcccagcagactccccaaggctcagccacccacactgagctatcaccttcccccaaccctgttagtttgagggtaacaagggggtaggttacaggggagacttaaggtcagactaaggggagcgacctgcccagtgatgacactggggtcaccagggcccaggcctagatggctcatcactggccagggtgggctgcctgggagacgctcacacacctgcagacccctcagggctcactgctctttagcaactcttcctggctgcttccagactgggattccaccacccagggccatccccgcagcccacagactgcctgctcctctcctgtcccgtgagctaccgaaatgcagacaacagtacgttagttaagggccaggcatggtggctcatgcctgtaatcccagcactttgggaggctgaggcaggcggatcacctgaggtctggagttcgagaccagcctggccaacatcgcaaaaccctgtctgtactaaaaatacaaaaattagctgggtgtggtgggacacacctgtaatctcagctacttgggaggctgagacaggagaatcacttgaacccagaaggcagag

SEQ ID NO: 26823 - DNA, 1625 bp, Artificial sequence
  DNA replication origin
gttcctgggtgccgggagctggggcggagctgagggtggcatgccagggtcatgctgcctctctgcaaacacaggcctgggcctggatctcaaagggtgatggccccttgtgcctctggcagggtccatccagccactcagcagccagagcctcagagccagctccagcgcaggcaccgacccccagctcctgctctacaatgtggtctcgggcccccagctgggccggctgttctcacccagcagggcagcacaggggaagccctggtgaacttcactcaggcagagataagggccccactctgcagctaccactcagatgcccccagcctcaggtggccgctgtgccatggacatcatgtggacatgggtgccagctccagcatcactggcagcagacacccccaggctggccatagtccaggccctggtgtcctgccctccaggagctgccacactggcagggcaagttcatgttcccagaaggagggagaaagatgcaggaagtcagggatacagggccctagagcagggctgtggtcttggggtgtggcttccagaaggaagctacagccagacccgagggtctggagagggggcaccatgtgggggcactagtggcaccccagtagctggcaaggggtagtgcttggtgggggatggagttggaagtgaagcagctgctgggcctgtgggcagaggtgtgagcctggggctcaggtccggtgccagccagaggcagagtggatcctaggggcagatgagctgatgaaaggcagctgagtcagtcaagagggtgaagccgctgttcatccgtcctggtggcttcagagaccaccaggaagaactagagctctcagccatgggtagcagcagactctgtgataactgtgccatgggggccagcccagtcatcgcttaaatgaacacctctccctgaaggcacaacaggagttgttccatagcagggcagagcggggcagactcttccatgggctgtcctgggcaggtggtgcacctgatgctcccaccaggaggctgcgtgggcatctggacccagcacatgacagtgagttctgggtagggcgcgttcttgcgggtgcagagctgactctgtcactcaggagccacggcacgtgatactgccccaagtacctccagaggggtccccccgccagcccttgaaaatggcagagcccacccctagccccctttcctagctcccttgctgggcagggacctcgtgaacctggcactctccctcctgagaggcgcagatggtattcagcaagtgcaaagccaaagtccccgcccagcaagtggctcagatggggagcctttggacagctggaaggaggtggctttgacaggtggaatgaagtctcttgggcttctcacatcaacaccccccagtgccgggttctgtatttccctggctccccactcctgctatggccccctccccacaatgagatatttgtcaggctggtgtctatagctgctgcgtaccctcagttgctgggagcctttgtcaagaatgcccaagaatggggagggcacaggaccaggccatcagcaaccctcttgcactctatagtcccacgttactcagagcttccccgtgc

SEQ ID NO: 26824 - DNA, 1104 bp, Artificial sequence
  DNA replication origin
tctctctggagagtagaagcctgggagaaaaccaaaccaaacccattctcccattaccacccagagatactgtcaacgttttgagctcacaggggaagtgtaggcttttcacactgtcgatgtctatgtgaagggagtaaggcagcctgaaacctcttgcccctaggtcccatagtccccatttcccttctagctggaaatttgtgctgtgaccagaggaaccagaaatggggtgagaatgcttaggggactgggttgtaagatcaaaggccagtcttgcagcagtaatgacagttcctaggaggactgtgacatcactacattccactcctcctgggggtggggggaacctcatcagtgcaatggctgagttgccgatccacgatgggggaggggggatgtggggctgggacccaggtccttggagatgccagtccagagagcccagggaggtcgggcttgggtcagcaggaggggagagcagagtctgctcagggaaccccaggagtcaccagcccaaagtcaccccgggatgactggcgatgctggggtgttggggctgggggacccaggtccttggagaggtgagcccaaagaacccagggaggttgggcttggggcagcaggacctgagggctgaatatggagcagggagccccagcagtcatccgcccaaagtcaccgcagggtgattggcgagggcagaggccaggctgcttgctgaaggggcggggctgactgacaagactttggtggggggagtccagaggcgccggggtaggggggcccagcccggtgtgcctcaagagtggtatggactctgagagtggtcttgtcatcagaggggatctctggctaggttggggggccatgacctttttcttggctttttacctttttcttgactgctgccaatttgttccatcgagtttcttctggcatcatggggtcgggagggaggtagggttggggccacatcagcgaacacctccagtcacctacaaggctgctgtgtgactgagccagaggaggcgtaaccagggccacactagaatgcagaataggggtgtggccttaatgctccgatcccattggtcaatgaga

SEQ ID NO: 26825 - DNA, 1012 bp, Artificial sequence
  DNA replication origin
accacgaggcagtgagcatggaggcgggggccctggggagggcggcccaggcccggctggcacatgcttctgcccctgcctcactctttacagccctcgggcatgctgttgcttctgggaccagtgaccagcctgctgcccctgctggaccttaggtgggtaccactacagcttagtaggagtgccctggcatgctgaccaccccacccacggctcattgctgtcctggaggaactggaggaaggtttggggccctctgggggcagcagtggctggggagaattgagccacgcagacttgcagggctggggatgacccaggcagccacgacttgggcagaagcaatggagggaggcaggacccgtgggacctggggcctctagccaggcaggggagatggggaggcaccaaccctccagttctccagtctgggtggccttagggcaggtggcgccaggccagagggccaggatgagcatacagtcctgattgggatgggggtgggggggttgcacagggaagaagggcaaaggtgatggattctggagtccagcagggagagaaagagacactctgagatgtagagaggctgggagaacacaaaaggttcaggaaacagggccaagactactgaaggcaggtgtggagaggggctgggagggtggatcagaccatggaatcccgaagcccagatttcagagggggcctggcagcttggagacccagggtggagtgggtgtttgcgtggtctcctaagtcccccgaccagtgacaggcccctggccctgcccagagctgcggagaagaaagccaaggtgaccagacttctactgagaaccctggaatcctcctggaatcactcagactgcccatgctggctggaaacagatcctctaacatgggcgttggcagatgagcagctgctggatgcagtcctagtgcccaagatgaccacgtgccaggctggtcccgggtgcataccctctcatttgctcctcacaacatcctgggc

SEQ ID NO: 26826 - DNA, 944 bp, Artificial sequence
  DNA replication origin
aggcatggtggcgtgtgcctgtaaatcccagctactcgggaggctgaggcaggagaactgctggaacctgggaggcggaggctgcagtgagctgagatcacgccattgcactgcagcctgggcaacagagcaagactccatctcaaataaaatcaaataaataaataaagacagctgtattagataaaatgggtttcctagctttggaaggtaactgcccagttctccagtttcactttgtcatcataatagcatttgaaggaatgctgaaatgtatctcagattcccgattctgagaccctgaggacactgagtgtcaaccatgggaagactgaggggaaaaggggaagactaagagacaaagggggagactgagatgtggggagaccaaggaacggcaggggagactgagttgggggaggaagaccaaggggcgggggggtactggggggcgggggggagactgagaggcatgggggtagacggaggggcagaggagagactgaggaacagtggagaggagacaaagagacagagagaggggagactgaggagcatggggggagacgggaaatacgggaaggaagagtcggagttaatgaaattgccctactttttataaacagttcagggaaataagtcagtgtggtgaggggcctgggctggtctccgggacgctgcagaaatgcaggtacaagacctgccagaactgagcaaggacaaaatcgagggggagctgtgtcccctggaaggagaacaccaagagctggagcacactgagcacgcaccgcaagccagcacccacctgcctcatccatgtaccctcccagcgggcctgggacacagggcaatcgctagcctcatctcacagatggggaactgaggctcagagaagcaaacttccaaacccatggtagcccagcagtgagctgggagctgaagcc

SEQ ID NO: 26827 - DNA, 1463 bp, Artificial sequence
  DNA replication origin
cctgatgtcaggtgattcgccagccttggcctcccatagtgttgggattacaggcgtgagccactgcgcctggcctaatacgggtgtctttaaatggacaaacttgaaaaccaacaaatagacttgcagcactagacatttggggaattgtctttcagcaaattggctgcttcgcaggtggaccacttgggagcctctgcagaggcaagtgccctgtggtggctggaacagacaggggttctttgtctcaggcaggaagttccaggtgcacagtccaagctggcgggacctggaactgactggacctcagccacatcgtccttgccacagcagcctccccttcactcctgcttgccacagatggtgtcctcccttccagggctcttgcagtgttctgggcaggaagaaggagaggggaaagggctgaatcccagcaagggacttgtgcctttttctcccaagccaggactgtcccagacccccctagttgcaagggagcgtcagtggggtgtgttttcagcaggtcccattgctgccttgagcaaaattggaatctgttggtgaggaaagaggggaatgagtgtgggactggcagctcgggggagggacaacttactctcgggaccacggggcagggggtggagcagagaaggcagagccaccagcagagggggtcctgcagctgggcttcaacaggcagtatggaagtgagtgtccaaggtgaggagcgtggctgtgcaaagtccccagggtgggcggtggcagagggtgtgaaggacaggagcagtgccaaggctggtgtgggggtggggagcaggggctgtcccttcatgccccatttcttgtccagacgttctctgagccattgggaagggtgtggatggtgggacggccttgacgccacggctgggtttgcatgctagcagcagctggcatggatcgagctcttaggatgtgccgggcaagggccgagcctacacatgcaagaacacatgcagtcctccctccagggcttggaggaggcaggattgttgctcccacttcacagaggaggacactgaggttcagagaggccaaatgagctgcccatggtttcagctaggaagcagagggtctgggcacccaacccactaaaactccacactctgccacccctccaggcacagccagaggggaggctacataggagaaaagggggtgtatgagaaccaggaggacagcgaggaggtgacggtggaggtctgccttcatcctgacacaggcagtaaggtgctgttctggcagagagagtgtctttgggtcttgggcggtgggcacctgggtgccagtcccaggctgagccccatggcccctaggtgtgcagaggcagagtgtgtactgctcagagcggcaggcaggacctgtggacgaggagcactgtcatcccctgggccggcctgatgaccgccagaggaagtgcagcg

SEQ ID NO: 26828 - DNA, 1749 bp, Artificial sequence
  DNA replication origin
ctgtgctttggaatggtagatgctcatttatgtaaaatcataataaatgttacacaaactgttagaataaaaaaatactttttttgaggggggaggaggtccccagcctgccgctggatagtgagagggggttagcaccattagggcgtagggcgtagggcgtagggggcaggagctccgccacagcccatggtgggcactgaggtctgttggtcggtctgtgcatcctggcacggtcagtggcaggcaacccgctgatggcctcgggagcgggcgccgtggctgggcggagagcacgagcggcagcagtgggtgcggacagtgggcagctggcagcagcccactaggtgcagcgtctcgcagaacctgaaggacaggtggtcccgcttatagcctggagtggggggagtggggggagtggggggagtgggggggagtggggggggagtgggggggagtggagtggggggggagtgggggggagtggggggagtgggggggcgggggattggggggggtgggggggcggggggggcatcagaacctggctccccaccccaaccaccttaaggaggctccagcagctccccaccaagcagagtgccccggtttcaaggtcacacgtctccagctgttgctatttctgtcccacctgctcatggccaaccccaggattcaagaacgggcgctgctgggctgaagtttctggaggaaaggtcttgagaccccaccctgaccccctcacatgcccataaaagagcctgcccagggtgacaccctgccaccccatctccatacttgctcacccctggtattccccgacagatcctggcacagaactgaggtcccaggggcctcctgccagcctgcagcaacctctgccgtccactcccgccacctccccctgctccagtgcacctatcctgccaggcctctgtgaccacctccagccacgggggctgtacacagcctcgggttctgagtcacagggtcccatctcccaggccagcctcccacttctcaggtgggccacaaagcctagagtgagtgggccttacaggccatcagtggaaaccagggactgagcccaggcccagtggggagggaggccagctgcaggctgtgcttgtcagggctgaggcttggctgggccctcctgccccatggttatcagagctattttgggatgtggcttgtttccagcctcctagccttgctcctgctgctgccgctgctgctaacaaaccccaggccctgcttactccagcaagaggagcaggaggacagcagccagccctgggcctgggacatcccccaggcccggcagagggcacgaggcagcaggcaggctcctccaccccagctccaggcagagctccaaagtgcacatctgcaggcctgcatcctggtcgcccggggtgacctcagacaagctgcttcacctcttgggcctcggttctctcctctgtcaaccccacctccacagcaaacggatatggccatgctgtgtcactgcagtgagcacacacacacgcgtttcccagctttccacatgtcccaccaactgtcccacagaccagcagaacatctgggaattccagatctcaaagtccaggacaccttcccagcccccctccactgttcactgatggcagaaaactcacttaggacagcttctagttcagccacctaaccagcccccatagcccactccctgcagcccactcacacccgcccctgggagacctt

SEQ ID NO: 26829 - DNA, 1113 bp, Artificial sequence
  DNA replication origin
cagcgcgtcctgcggactcttgaaatagtaaaggtagcagcggcgcgcgtcgaacacgaaccagcggctgcggtagccacgcagggggcccttgcccgacagcttctgcagatagccacacagccgcgctggctcccgcgccggacccgccccgggctccgcggccgccccctgcgccgcgccctcgccgccgccgccgccctcctccgcccgggctccggcccccggcatcgctaccgcgcgccaaccgtaggcgcccgcgccctgcgcctccgcgccgcggccgctgcgccccctaccccctccgcaccgccccttcgctccgcacggcccgcgggcgcgcaaagcaccctgggacttgtagtctcgcccccgcccgcccgccggccgttgccccctcagcccccggaggcagggtcctgcgaccagcaccccgcgggtcagttgccttcgtgccacctgggctccaagtcctcgccctgccggatgaagcaatggtctatttctttatggcagtgtaggtacatgggagtgtgcatctctcaaaacccagcggagtgtccgcttaaaactgcatttcacactgtgtatcttattctaaaaacttgatatttaaatctccctcctgccagagtctcaagctaatattgtaaaaatgagacagcctattgcctggtgctgagtgggtgctcagtaaatatttgcagaattcatgaaagccaaagcgtttcctgcctctccagacctcagttcatttattgaattcaacatatatttattgagcgccttctgaatgccgggtacggttctgtatgccaggccctggcggatacagcagtgaacaaaccaatcattctcctgccctcgtggaggttatattctagtaaggcagggaggtgacacacaagaaagcagataaaagtaatgtgtgctatgttgtataaatgccgtgatgacatgtaaatgattaccgcttaaaatagcacctagtatttatcagtgctttatagactaacttatttgaacactcacaacctgagaaggcaaatctattgctttgtaataaagcaaagagaaagaatgaataagaccaagtatttgctagcacaacag

SEQ ID NO: 26830 - DNA, 1619 bp, Artificial sequence
  DNA replication origin
tgcctcctctgggccccactgggcaaaacccgacctatcttcccaaggcctgctcaagtgctgtatcgtttctggactttgtcccccttccctgctggcctcccactgcccactagtgcccttccctagaacacactccaccacctgcctctatcacaagggccacacactggaggtgagagtctgtctctgagtgtctgagactgagtgccttgggaacaaaaagcacacatggcccagcccagcccactcccaactaaagaagtgagcctaggagtcaagattcgaaatcctgtgtgagccctgaatggctcctcagcctctgtttacacgtctgtaaaatgggctaataatccacctcactgtgatgatcaagtgagttgatgcgtagagggcatcaattactgtgcctggtacacagcaggtgctccataaatgcgtctcccctcttccttcccagggcctcacctggggagctgagaaatccattactgacaactagggcttctaggaggagaaggggcctttgttttaccttcacccacatcagaggacccacacttcacacctgctttccttcacagccaaagtaagcactgatgaaggcaacaagtgcctatggagaccctgttggtgttcctcctgcccagttacacaggccacaacacaatcctgccccctccgcctggggagtcaggggagaggcatcagatgtgggacttgaagggtgaaagagatcctctggaggggggaaaggcatccaggcccaggaaatggcatgggcagagggagagagggagggaggaatgagcctggtgagctggagcaactgcaaatggttttaaggcggctgccatgcagagggcagggaagggacctggggagactgaggctgcagagataagctgagcaattggccagggctccgggtaagccaaggggttgggcttcatcctgcaaccacagcgaagtttttacctgggtgggacggtattgggattccagatctggaaagctggctctggaggcaggaaaacctagaaaggtctaaggaggtggctactgagggcctaagggagctgggagaggtggccctggaaggctgctaccgggcttgcgttcttgctccagttatctccatgctggggtcagaaggagcgaaccccagccgataaacaagacagtcccaagggaagactgcatgtggggactgatgcaccccactcctagaccagacaggacgccagctctcatttctgctttacagagactcgctctcctgggctccttcctggggctggggggcagggagcggggagggcggtcctccgtccagcctagtttactgactccctctccgggccagatgggcgctggaatgggtggctggagaggggttcgggtcctgcctagggcgagagtagctggagagaggcgcgcctgagaggttcttccaactggaaagagctcttattccaccggtggggaaactgaggcacggcgaggggaagtcaccggcccaaggtcacgcgtcgagctgaaggcagaggcagggtttgaacctgggagagctggctctcgggaggcctcggccagcgaccgagaaaagggaggggcgg

SEQ ID NO: 26831 - DNA, 1240 bp, Artificial sequence
  DNA replication origin
gccagcgaccgagaaaagggaggggcggcggggcggcggggcctgtgttgggggccgggcgcgccgagctcacctggtagttgtctagctgctcttcggtgaagatggtctgcttgttccccatggtggccgccgcgccgccgctcgcccgcccgggctccgactcccatcagcggccgccagacccggagccagcgccccgtgcccgcggccctcggcagccccgcggctggcagcggcccacggtggccggacccttcccgccccgcagctcgcctggaggaggcgcgcgggggtctcggaggcggggacgggaacccggagcggcagcgactccgccgccggcgggaagagggcggggcacccggctccgcggctgcagcgcgcccgggtcccggcaggaggcgacctggccccgggagacgctgcccggcacgaacccttggctcccgcggccggaagtgctgggggcgcgcgggggtctcggaggcggggacaaagacccggagcggcggcgactccgccccgcagcaggaagaggtgtgagcccgggtcccgccgtgggagtccaggtcgcacggcgtgagggtgcggggcctgggaaaaaaccctctcgaggcgggcagtggggcgagtggcgccccttgacctggggcgggggcggcagcgaggactgtgagtgcgtggatctagctggggccgggctccgccaccgtctcgcgtcgcgaccttggtcaagcccttacccgggccctgtccctctggggagaaggagggggtcagtcaagctgacatctgaggccctcccggccaggcctcgggaagcccatctggcctttgggcgcggcctaggcagggcatctcagaccttctgtgttccttagggagcaggacaggatttacttggcttggttacaaacgtgagacttgagaggatttaaaggacttgactgtgtccacagaagtgtgacaaaggccaagacattttttggagcttttaagcagatgccattgtaagggaagcaggactttacctctgccctcctagggtctttggctgggcttgagaattaatttggcataagacagattaaggggagaaaaacagatttaatacaagttttacatgacgtggaagccctcataaggaaatgaagaccctgagaactggcaaaatctaaatacttttttttttttttgagatggagtctccctctgtcgcccaggctggagtgcagta

SEQ ID NO: 26832 - DNA, 794 bp, Artificial sequence
  DNA replication origin
agtgagggctgttgagtgaccaaccccttctcctccaaggggattctctgactgaggggaccctgggagggtggagcctgcaggtcccctgcagtctgggtgggggctctgagaggggcatgagggtcccagtccctgcccggctgacctggcctgtctgcctttgacctggagctcggcctgaagcaggcccacagtgtggccatcctcggcttcaactccccggagtggttcttctcggcagtgggcacagtatttgcagggtgagtggcgggggcagggacggggtctccagggggttggcagtgggcagagggtaggggagggtccttatctctttttagcagcccccacccactccccaccatcctgcctcctccctggggccttctggtggacctgcatctggcgccctctctgcaggggaggaggtgctcaggtgccttgggagcccctcctgccaggctatgggagctctctgggtctgggggctacagatgtgggggtgggggaagggggtggcccctctgcacctcccctaaggtgaatcttcctgggtctcctacagtggcatcgtcactggcatctacaccaccagctccccagaggcctgccagtacatcgcttatgactgctgcgccaatgtcatcatggtcgacacgcagaagcagctggaaaagatcctgaaggtttggggaagaggcagtgggcatggggtcagatgctgggtatccccatgcacctccactccaactcacacggaaccttcccgccctccatccagagtgtcctca

SEQ ID NO: 26833 - DNA, 777 bp, Artificial sequence
  DNA replication origin
caagggggcggcctcggggcggcgggacagttgtcggagggcgccctccaggcccaagccgccttctccggcccccgccatggcccggggcggcagtcagagctggagctccggggaatcagacgggcagccaaaggagcagacgcccgagaagcccaggtgagcggctgggccgcgccggacgggcgtcgggggtctgggccgcgaacccgccgcggggccgccggaacctccgcgaaggttctaggcctttgtggcgtcaccgtctccttgcggaagcttccgccggcgccgaataaaacccgccgcggaggagccggtggctctagtgcggtggagccaggcgtggaagtcggtccggcgcggggcggggggcgggcgggagctacaagcggcggcggcggcggcgaccgtgaccgtgacgcgcgagcgggcggcgggggcgcgggccaggggcgcgggccagggtgccggcaggggcgtccggggcgctctgaccggcctcgcccgccccccccgcagacacaagatggtgaaggagacccagtactatgacatcctgggcgtgaagcccagcgcgtccccggaggagatcaagaaggcctatcggaagctggcgctcaagtaccacccggacaagaacccggatgagggcgagaaggtgcggggcggcgcggggcacgggccgggctcccgaggggccaagggttattaagccaggagcattgaaggcgacgggaaacctgagccgcgtttgttggggaggctgtcgccagg

SEQ ID NO: 26834 - DNA, 1176 bp, Artificial sequence
  DNA replication origin
gcggggggcgggcgggagctacaagcggcggcggcggcggcgaccgtgaccgtgacgcgcgagcgggcggcgggggcgcgggccaggggcgcgggccagggtgccggcaggggcgtccggggcgctctgaccggcctcgcccgccccccccgcagacacaagatggtgaaggagacccagtactatgacatcctgggcgtgaagcccagcgcgtccccggaggagatcaagaaggcctatcggaagctggcgctcaagtaccacccggacaagaacccggatgagggcgagaaggtgcggggcggcgcggggcacgggccgggctcccgaggggccaagggttattaagccaggagcattgaaggcgacgggaaacctgagccgcgtttgttggggaggctgtcgccaggcgcctcggggccaggccgggcagaggtggcgggagaccctgggcgccgtgcggcgcggtcggtggagggcgcttcgcccgcggaggaggcatgtggtgcggcacttgggtccctcgcgagtccctgccgagcccattcattcctccattcgctccacaagtgtttgggtagcccctgccgtgcgcgccggactagttctcatagggtgtgttggttccctgtgggagaggcggcctgggaatcgggaaactgaggcacacacaaacagttgtttacttgctgggaacgactggctcatattctctgttgatgcataaaccctagggatgagtgtctttaatctgagctggtaccttggacaaacgccgtgcctctcttgagaatgactagctggatttgttctgtgcacctactgcctacctgataaaagcgtcagatagtgaataatcccattttctttattaaacagggacacggacatctgcaacctgacatcagcttgtactcatattctgggttttcggtgacaagtgacacacagttgatcataagtaccaatcatagactgaaaatgctctgcattttagagacagaagttaaaagcttttccatcctgtttacagaaagtttgctttttatctctaaagaggctcatgacccacctgaataggtgaattgaaggatgaggcattgcaaggaaaggctgctaaccctcccgttcctcctttcacttcttgccattttcttacaaaactttggttgttcc

SEQ ID NO: 26835 - DNA, 1341 bp, Artificial sequence
  DNA replication origin
caccacccattttaaagcgggatgtgggtgtcctgagggaggtggaggctccccagttggagagcgggtgcccgcacctctggaggctgaggcacaactgggctgggagttgagcgcataccgagtaggggctgcgggggagcgggggcagggccggcggggcggggccagaagcccggcggggttgggggcgctctcctagtgactcaaggcgcgcagcgctgggcgcaaagcgccagtctccgccttgcgagctcagagtgtgcccgctgcgccgccgctgtccgtacctgccgccgccgccaccgccaccatgcccaacttcgccggcacctggaagatgcgcagcagcgagaatttcgacgagctgctcaaggcactgggtaagctggtgcagagggcgcgccccgacggggagatgcggcccggaggtgccctggtcccggaagtgccccggtcctggagggggtggaagttggggagcccaggcaggagggagtccccggggcaatagatcgccttgtctcccaggcgcaccgggtctcggagaagctggtagagatcccggaacccacgcgttcagcgaacgtttgctgaatgtttggcgccctcctcgatggtgcggactttatctcgtgctagatcatagcgaggagagattactggagagcaaggaggatcagggacttaaatttggagactcaaatttgggaccaggctctgccacgaattcactgtgcaactcgaggaaagtcacttaccctctctgtgcctcagtctctcatctcgaaaacaagggcgagggcagggaaacgagtggatcaattttaaggcccctttctaaagttagggtatgaccagtgcccgaccggtcccgagactggcggcgaggccccgtgacccaagcctgtggtgcaccctgcgcaggtgtgaacgccatgctgaggaaagtggccgtagcggctgcgtccaagccgcacgtggagatccgccaggacggggatcagttctacatcaagacatccaccacggtgcgcaccactgagatcaacttcaaggtcggagaaggctttgaggaggagaccgtggacggacgcaagtgcagggtgaggccccagagccactacagcgtccccgtgtccccgctcggtgcccatggcccactgctgctggaggaacctgtgtctccctttgcagcctgtggcgcgccttccttgcagggtgtgtacactggctgtttgcagagggggtttgtgcatcctagttgcccctggctcaagacaaagtattaccttcattccatctcaaccccatccctacgctgcctcccggggtgctaac

SEQ ID NO: 26836 - DNA, 1126 bp, Artificial sequence
  DNA replication origin
tcagggtgaccgctgagcctgacactcctgacggcccggccgcccctgagcacccggggaacatcggggagcttgtggtgatgtaacctctgccctggatgctcacccggggcccagagaggacgtggagcccctccctcaggctgtgaggggataccgccggggctgcatgctccacagagccaggaggagcgggcaacaggcagcagcccagccctcctgggtgcagctgcagccgcccaagttgggtttgtggacccagacttccgtgtgctcttgggggcctgggaaggccctgcactgcccttgcaggctcggaagtgcctctttccactgcctggtctctccccactgctggcacctgctccaaccccagagtggggttgggactgagcccaggcagggtgtgcacatgcttgcgccctgctgcctttttcccctctggactttggacaatgaggggtcggggagtgaggggctgagggtggcttggtgctggcctgcaggtgcccattggtacaagcagcctgggtgccttggtcagcacagcaggcagatgggctcctgggtggaggggggcaggtccctggtgaggctccactttcaggccaaggaaggtctgaaggctggggactgggctgccaatcctatggaccagagtggagacttgtgtcttttctggcccgcctgtgtctgcccacggaccaattggtgctcacttccttccctctgaggcccataaaagccgtgggctcagccggagcagagcagagctgaggacacagggatgactggactaccagctggagagaggagctaccctctctgctaggggccgaacactcctccggacaccctggctacagtgcaggttcttctctgagttgttctcttgctcaataaaactccccctcatcttgctcaccctccacttgtctgactacatcattcttcttggttgcaggacaagaacttaggactgcaggacaagaactcgagacccacacaatggtgaggctaaaagagctgctgtaacacaaacaggcctgaaacataccccttgcttgccacgttgtgggcaaagagctgtggcccttcagggagtccagacctggtccgtcagcca

SEQ ID NO: 26837 - DNA, 905 bp, Artificial sequence
  DNA replication origin
ggaagaagggggaggccgggcagggaagacggggaggaagacaggcggactggcaagggaggaaagaaggaagcaggctcgcgcaaatatcgcgagagcagcagagccagccccgggtctgcgctcgcgggatttgtcgcctaactcccgcgagatcgtcggacaggaaaacaaagaaagggaaggggcggagctaaccagaaagcgatttctcgcgccgtcgccgctgttctcgcgagcgggggcggagcgctggggaggctccagtgggggcgttggcgtggctagtttggccttcgcagcgatccgttacttagttgcggccttaagttttctattggggtcatgaattcgagcggtgtttgcgttcccgcaaggtgtctgttggagtcagggtcggaatcggaactgctaggagaaagagctcaaggagaaccgctttcccctaactataaagccttgcattaacttgtcagacgtgggcggcccacacgcgtgttttcaagtgggggcggccatactgatcgggcgcgtgggaggcgctcaactgttgaatgaatgaattttttcttaccctccggtagcttccgtgattgccgacttcttcccagtggcagttaacacatgcttaagcctctccatccttccgcctcagctcctccggtccctgtgttctccacctacccagcattatctcctgtcgcagcaacttaccagaaagagtcgctcatactcggctctcccccacccacttcttatcctcttccagtctggcttccactcccagaaatgcctttagccaaggccagctataactccactttctaatctcacatatctcaatcttgactggttctctcccattgttgaaaaatactcttccatcagcttctgtgacttcagac

SEQ ID NO: 26838 - DNA, 939 bp, Artificial sequence
  DNA replication origin
ggctgctgtcccggcgggagctgtggcgcggagcggcccctctgctgcgtctgccctcgttttgtctcacgactcacactcagtgctccattccccaagagttcgcgttccccgcgcggcggtcgagaggcggctgcccgcggtcccgcgcgggcgcggggcgatggcggcgcgggggtcagggccccgcgcgctccgcctgctgctcttggtccagctggtcgcggggcgctgcggtctagcgggcgcggcgggcggcgcgcagagaggtaagcccgggctgcagaggggcggggcgggagctggcccggactccacatcgcggtgcccaggaagccgccaggcgacggccgccggaaaacctggttgcgaggggaggtgggtttttttctcctgggggcttggagtgaggtttcagtttaaatgtccagatttgctcatttaaatgcagagaaagggctacttgggtgggttttctttgttgttccacgacctgcatcgctggagactacgaggctggcttagcgtatacttccacacaactttttcagtaaaagatgccactcttgtccagcagggctttcctgtcctggtggcagccaagcttcccattttgttgcccatttacgggatatagagactctggggttcattctaggggttgggacttatcttccacctcctgcccgccgcctcttcctccatccctgtcccctacccaccgcagcatttgaaaacctttcctttcgccggagatgaaaggtgtgtgttgtagcaggctaggcggccaacttccctggcttcggggctaatcgtttgcatccagagttcctcactagctccttagagcacagcttttttcagcctgctgtttttcaagaggttttggacaggaatggaaacaacaaaagaaatcgcgtagtcctacatgtttcaagt

SEQ ID NO: 26839 - DNA, 1437 bp, Artificial sequence
  DNA replication origin
ctggctccagcccggcggcgacttgggtggggtggctttttccctttcggctcacctcccacccctagccaccaccaaacctgggagtcactgagcgggcgctggtacgcgccgggtgatggggaggtcgagaccgggtccttcgtcttgggcgcaggagttggggattcgcgtccccgcgctgcccgtcgccctgccccgcgcactggctcccaaactggcgcgcccaagcctcccgctccaccgtctgcatcccgcccacctcctcatttgacggagatggctgaagacttggccaaggccacctcgggaagaggggagtcgcttcgggactggggctggagctggagcgccagcctctcctccggttgtagcctcctagcgctcctggctgcgtcgctgagggaccctccaccgggagagcgcctcctgtcttcctcccgctctccagaggagcctgctgggggaagccggccctggcccgccgctgggaggctcttgggtgcctgggagggctggtgggtagcgagagtcggggaccgggcaaggctgcagggaattcctggagggcccaggccggcggtctgtcgtgcggctgtgagctcagagcgctttccgccctcggtgccgaggcctgcactactcagaacgccatacgctctcaaccgacctcctgcctgggacccttctttcatcctggggaaggagagtggggagcaggaaaaatcctatttcaagacctgaggaagttggattcaacttcctagaggattctcctcccgcttccccaagctgcccccagatctgtacgtgggaatcagaagacagctgacccggtatgcctcacttgtgctggggtgtggcttaggaacaaagaggggtgcccaagggttgcagaggtcagagtctttcatcaggatatgaagacagcatcagcaagagctgggggtcacacgagatcacgggagtcacacagtgccttggcttctaagagggctggtggccacccctacagggtggaatgcaggagaggcccagacctgggctgtgttctcccggaggctgggaggtagaagacctgggcctgggcgaccgtggttggccctgcccctgggagcggactggccatctttccatcgtggaagcagtgagtggctgtacccaggcagacagcatttgccccacacccccacccggcagaaacaacccaggaaaagattgcgaatagttcttgacctcttaccgcagcaccaagctgtgcacttccttcacaacaaccctttgaggtggatacgtttataatccttattttgactggtaaagacacaggttcagagaggttaagccacttgcctaagctcacacagcttacaagtgatttgtcaggatttgcaccagatctgtccaactccagagcccaggcttgcaaccactgtg

SEQ ID NO: 26840 - DNA, 1936 bp, Artificial sequence
  DNA replication origin
cgaatgaacctgagatgactcatttgcctaaaagcgtcttcgaggtgagggaaggcaaagcccaaggacctccccgctcaagcacatgctctttccccaacagtagagggatcctgcgctagcgtccgccgccctcgagggctcagtctccccagctgtaccaagggtgcccgcactgtcctgcctgccttccttgggggaaggttgcgaggcccgaagagatagggaagccaggcggcaggtggggtccagaccacccagggggcgtcggggcggagcagcgggcccagtacatccctgagtgggcggggctcggcggggctctccgcggggtcctagtgagcgccgccccgccagcaaacctcgggggccaggaccggcgctcactcgaccgcgcggctcacgggtgccctgtgaccccacagcggagctcgcggcggctgccacccggccccgccggccatgaggcgcgcgccttccctggtccttttcttcctggtcgccctttgcgggcgcggtgagttcttttcggggaaggagggaggggcgcctgggttgggctgaaaggggctggactggccacaggtgggagggaagggagggtgccctgcgcccgggggagtggcccgagattgtcccggccagatgggggcgtgggcagggctgagcccactcgctgaggcagcgggggcgggcctgcgtgggtgggtctgccaggtttggagtgggggccgcctcttctcggagccgctgccagggccagggccaccctccagggcgagtgtctgtgggctgggcagtgggctggatgacaccggctttgcaggcaccgcgggtcatccccagcagtctgggaggctgggagtataccgactcccgctcccaacagggccgaggctccttccttgcctaagaggtgactttcttgaagcgtgggtgcagaggagccggccacctgggcggtgtaggcgcttgggagcgaatctgctgctcagccttagagagaagtcccctcccacacagcggtggtagagatggggacactgggccgagaaggaagggggcttgcccaaatcagcagccctggaatgttttgtgctttgggggtggatctcccagcaaacacattttatggcaccgctgcctctggtcacccacccgaggtgtgccgggcctggacagccagcttgactgagggccaggctggtgaagttgggcctgccactcaggaaggagacccagcccttctccaggtagaatgcaaatgtgaggactgccttctcagggcctcagtttccccacctgaattccaagggcccttctagctcctacagtcacccaggcttttcctccaagccccagtcagcctagaggaccagggctacctcttccttggatagagacccaccataggggaggcaggaggtaggagtcagggaatatataaggagctaataatctgagaggaagccatagctggaattctaaactgtgagtgtgtgtccagtttgggaaagcatatccaatctaaaaatttacattgaaaaaatggaaagatatacccatcattttggaatacaaactacagaaagtagtttgtactactcctataaagaggtggagctctcatcaaagatggtgtctgcaggcagtctgtgtatcgtggctcttctactagctgggtgaccctgtgccatttctttcaccatcctggacctcaggttccccatctgttctatggagagaatgtgccctgcctacatatttggagacttggatgtgtgtgggggccagtggcagtgtttcttaggtgtggtcctggggcagcctgtatcaccctgtacagatttctgggtcccaccctaggcttacaggatcagaatctctgggaataaagcctaggaatccaggtgattaatacacatgattgaagaag

SEQ ID NO: 26841 - DNA, 1913 bp, Artificial sequence
  DNA replication origin
aacctggcagacccacccacgcaggcccgcccccgctgcctcagcgagtgggctcagccctgcccacgcccccatctggccgggacaatctcgggccactcccccgggcgcagggcaccctcccttccctcccacctgtggccagtccagcccctttcagcccaacccaggcgcccctccctccttccccgaaaagaactcaccgcgcccgcaaagggcgaccaggaagaaaaggaccagggaaggcgcgcgcctcatggccggcggggccgggtggcagccgccgcgagctccgctgtggggtcacagggcacccgtgagccgcgcggtcgagtgagcgccggtcctggcccccgaggtttgctggcggggcggcgctcactaggaccccgcggagagccccgccgagccccgcccactcagggatgtactgggcccgctgctccgccccgacgccccctgggtggtctggaccccacctgccgcctggcttccctatctcttcgggcctcgcaaccttcccccaaggaaggcaggcaggacagtgcgggcacccttggtacagctggggagactgagccctcgagggcggcggacgctagcgcaggatccctctactgttggggaaagagcatgtgcttgagcggggaggtccttgggctttgccttccctcacctcgaagacgcttttaggcaaatgagtcatctcaggttcattcgcatggggtttgctgaaagaaaggacactgctgggtgagccgacgcgagggagcgctgctctctgcagactttgcagggaggacacttaggaaaagtgagtggaatctgggagggtgaatagctcagggcccctcacccagcttgggggctggggaaggagcagagttaaaagggaatggggctggagtgggctggcctcgtcctcccccatgggccttccaatctgggctgaacagaggccgctcaggtgattcaagcacatccctctactagccagggtgtccttgacgcgtttttggaatcagtaccattcccttgcgggtggggggacagcccccacctcgggaactgcagcctcaattctggatctagaagggcctctggcagcttctccaactctctcagtccggtcctcatacctgctcccttgtgtgggccctaacaggcaaatctgacaactggaggaacaagacaggaagggcggggtctaagggaaccgcctgtaaaaaggcagctttgccaccttatctccaggactctcagtcttgctttcatattgctccccccacgtcattttgctataatctgacatgttgacatatggtctttaaaagcaacaacaacaacactgttgaagtgaagcggacttcccctttgggatgctttggagaagttaggattgagggcatcctctcttctccaaactgcagcagtaataggtaagatatgtaaagtaaataaagacatggcaaggctggaaaataggataatcatctccatgaaccaaaaccagaaaagaaatgcaaagtggttggaggctgaagagcctggagcctgttgggctttggaaaccaaagacagtggcaggtcctttgggataagcggggaccaaaagactcttggctagaagctgggagcttgggtgtatgccagtacttgaaaggatgctgggagcgggaggcctgctgctgatccgtggtctgtatccctggctttatcggatgtgtacatccccaatatacccaggacaggagcttggaaaggacataaaacctggaggccactgcagagctgtaaaagttaggctagcaaaggggatacgatgaaataggtttttatagagctttgacatgtattttctttaaataaaaagaagagctaattatctattgagaataatataatcttggtac

SEQ ID NO: 26842 - DNA, 750 bp, Artificial sequence
  DNA replication origin
ggggctggtgtgacctgggagcaggactggcatcagaggtctgtgggggtggcttagaatgccccagggaggtgggtggatggaagggctttgaggcagagggaaagaggtctgtgccagcagatggcaagttttgtcatctccatagcctcagggtccccataagcaaagagggaggagtgctcgttgtcagccacccacagtgctctctatgtgaaagtggcttggaaactggctaccatcgggtgcgaggaatcattagcagtgaggccatggccatgggaagcctgagaggagctgtgcatcaagaggagggtttttttttgtgcggggggtgggtagcgggggaaatccagaggctcttattgcctgcttcatttctcagctgagccccagtccccggcacccccagcagggacctctgagttggagcagctacaagatgaggccaaacagctgaggaaggaagtggagggactggagggaaagctccaatcccaggtggaaaacaaccaggccttgagtctcctgagcaaggaacaaaatgagaggctctgagagcaggaggagcggagggtgcaggagcaggagagactgtgtgagcaaaatgggaggattcaggagcagcagaagaggctgggggaggagggtgagaggctgcaaaagcaggagcagaggctatggaagcaggaggaaaggctgcaaaaggaggaggagcagcacgaaagcaggaggagaggctgtgggacc

SEQ ID NO: 26843 - DNA, 1058 bp, Artificial sequence
  DNA replication origin
ggacacattccccatcatccagaaatgggtttgattctcagccaagggacaccagggctggtagagactgtcaggccacacagctgcctgcacagcacccccatgcttggtggggggtgggagggatggcggggggtgggacggtgggggggtgggacggatggcgggggctggctgtccacaggctgggcatgacaggcaggctcactggaggtggcacactttggaggggcagtgtcaggggagaccttccttttgttgggccacaagactccacaaggacagcacggtgactgattcccagtgctagaggcgaggtggtcggccatatgtaggtgtgtgtgtgtgtatatatatatatatatatgtatatttatatatatatttatatatatgtatatttatatatatatttatatttatatatatatgagtatttatagctatttatagaacaaggcaggggcataccacagaggggccacaagttttcagcaatggtcacacctggatgtgtcagctcaccactacaacagactaagtcacagatgaagggggctggctttggggctggggagccactgtcaagtcacaggacacccgcccaggcaggcttggaaagggaggtctctgagaagaggaggatctgtttagaggttggagtggggctggagctctcaggatgggatggacttgcctaacccaatcagttggcagttggagaaaagcagagagaaaataggagagagaatagcaagcagagagctggtgatgcaagcgcagagcacgggcatgtcgcagcagctgtgggagggccggggaggggagcgcgcaggtgcgggtgtagcaaaggttcctggaaaagaggggctggaagggaaaggggaggaagatggagggagaagccagagcttcacaggtagtgcctgggggctgcggcagccctccccagctcacacacactggcctctcccatggcacccaggcagtgcacccacacttcagaccaatgctcagccgctttgggcttctctcttctctggtcaccctgccttcca

SEQ ID NO: 26844 - DNA, 906 bp, Artificial sequence
  DNA replication origin
ccaggcagtgcacccacacttcagaccaatgctcagccgctttgggcttctctcttctctggtcaccctgccttccaacccactggcccagggccacctcttgcttggggagccccacccaacagccacctggcctgataaggaacactgcttgaaccaaaatggtgaagctataagggatggatggctggagtgagtaccagaggcccctctggtggtgagaaagtccagggtcctctgaagggaccctggggaaggcagggagggcaggtagccggatgccactggccatagacttataagtctaagaggggagcctcagctggttgcggggtgaggggggctgcaagtttcatagctgaggctgggtccttcctgctgggaaaagcagaagagggagagtccatggcaggagaggcaggtgggctcgctaggcggagctcagctgggccagcaggcactgtggtccccttggctgaatagcacaggcgacccctaggagcaacaggccaaggtgcgtgagcctgctggtcggcgatagtgcttcagtgggggccagggaccctgccttcagtcacacgctagcagctgcggtggtacctggcagggagggaagggggctgtgtgtccctgcctggcctgtgaagtgtgttgtgggatgaccgtgtgtatgggactcttaaggttttatcctagatcaccagggattgccaacagatagaggaggtgggaccctgactatcacccctcctctgcagtgggtttgactcttgacactcccaggctgggatctggataccctgacctggcagcatgactcagactgcacgacaggtacagcgtgcccaggatgacgttcctagacctctagctgcctcagagtccagccgcacacacaaccccgtc

SEQ ID NO: 26845 - DNA, 1426 bp, Artificial sequence
  DNA replication origin
agcacccgttctcgagtcctggggttggccatgagtaggtgggacagagacagcaacagttggagacctgcaactccggttcgggagccgctccagaaactggggctctctgcttggtggggagctgctggagcctccttaaggtggttggcgtagggagccaggttctgggtaccccaagctactggttctgatgcctctctgcccccccactccaggctgtgagcgggaccgcctgtccttcgggttctgcgagacgctgcgcctactgggccgctgccagctgcccaccatccgcacccagtgctgccgctcgtgctctccgcccagccacggcgccccctcccgaggccatcagcgggttgcccgccgctgactgcgccaggatgcacagaccgaccgacagacctcagtgcccaccacgggctgtggcggagctcccgccccctgcgccctaatggtgctaaccccctctcactacccagcagcaggctggggacctcctccccctcaaaaaaggtatttttttattctaacagtttgtgtaacatttattatgattttacataaatgagcatctaccattccaaagcacagcgtgacttcgtcttggatttggagaatcttaaaagtgagaaactcttccccccacccctctgcccaaaactccaccgccacagcacctcggcaggcgtggcttttcacctgctcctctgggacagatctgcagggggcagcgtagaaaatgagtccctgagagcatggcatctggtgaggcacggaaggcctcagaagctggggggctgctccccagggagggctgtctgcagagggtggggttctgggggcaggaaggtcttccgggcaggggcacggcttggcccttacttgctgcctgccttcagctcaggctcccagccttccctggggccccactctgtggtcctcagagacctgttccacagggattgagcccaccatgtcacttgcagggactgccccctggagtggtggggactggggcccccatggggacctccctggccctgtctgttctatctgttgactcttctgcaaaaagcaggcagagaggggaagagcaggctggccagctgtgccctactgtgtccccacgtgtcccttcatctctgtgcccagagatagggctgggctaattgtcactgcctcaggttggcccctttcccaccaccagccccagctacaggttcctaccacgctgatctatggtccagcacctggcacctgcctacccacagccccttcccctcccataaaatctagtcccatggagccagacagtagtgcccacagcagggaacagatgggcatgaaggtgctttgaagagggtcctggcctgaccaggggcgggaggctggggaaggggcggacactgtccccccaggc

SEQ ID NO: 26846 - DNA, 1985 bp, Artificial sequence
  DNA replication origin
tcccccacagccactgtcatccccaattgcaaggtcagggagagggcctggggctgaccctgccagtctaaggaatccagaagccgtggcgtgaagagctgtgtcccctgtgctattggctgtctgctccctgcccctaggacagagtcctcagccagggccctcaagctggcattcagggccccctgcaatctccccggtctgccttctccccttgtccaacgctgccttctctacctgtgccagctcctgggcagccctcattcaggctcagagtggcccctgccatgcctcgctgccctgcctctggcatgggtggtcttcctgcctcaaacctcaaggcccagtggcagcgcccccaccctgtcctgcctgccctcagcacgcacccagccagcatctcagagcactcctatgtgctacctgagctgggtgctggcaccacgtctctcacctttatggctagggctggccacagggagcggggtggttatgatcccagtgggggaggaccagatggggcagagaacagaaactgaggcccctgggggcctagaaccaaggacggatggcccaggaggctctgggcttgcaaggtctcccaggggcgggtgtgagtgggctgcagggagtgggctatgggggctggttaggtggctgaactagaagctgtcctaagtgaggagttttctgccatcagtgaacagtggaggggggctgggaaggtgtcttggacttggagacctggaattcccagatgttctgctggtctgtgggacagttggcgggacatgtggaaagctgggaaactcgtgtgtgtgtgctcactgcagtgacacagcatggccacatccatttgctgtggaggtggggttgacagaggagggaaccgaggcccaagaggtgaagcagcttgtctgaggtcaccccgggcgaccaggatgcaggcctgcagatgtgcactttggagctctgcctggagctggggtggaggagcctgcctgctgcctcgtgccctctgccgggcctgggggatgtcccaggcccagggctggctgctgccttcctgctcctcctccccagggaggtctgctggagtaagcagggcccgggtggcagctgggggctgtcagcagtggcagtggcatcaggagcaaggccaggaggctggaaacaagccacttcccaaaatagctctgataaccacggggcaggagggcccagccaagcctcagccctgacaagcacagcctgcagctggcctccctccccagcaggctgggctcagtctctggtttccgctgacggcctgtaaggcccactcactctaggcttcgtggcccacctgagaagtgggaggctggcctgggagatgggaccctgtgactcagaacccgaggctgagtacagcccctgtggctggaggtggtcacggaggcctggcaggacagatgcactggggcagggggcggtggcgggagtcgggggcagaggccgctgcaggctggcaggaggccccgggaccgcagttctgtgccaggatctgtccgggaacaccagggatgagcaaggatggagatggggtggcaaggcgtcgccctgggcaggctctttaacaggcatgtgagggggtcagggtggggtctcaggacctttcctccagaaacctcagcccagcagcacccgttctcgagtcctggggttggccatgagtaggtgggacagagacagcaacagttggagacctgcaactccggttcgggagccgctccagaaactggggctctctgcttggtggggagctgctggagcctccttaaggtggttggcgtagggagccaggttctgggtaccccaagctactggttctgatgcctctctgcccccccactccaggctgtgagcgggaccgcctgtccttcgggttctgcgagacgctgcgcctactgggccgctgccagctgcccaccatccgcacccagtgc

SEQ ID NO: 26847 - DNA, 2051 bp, Artificial sequence
  DNA replication origin
ccatgctgtgtcactgcagtgagcacacacacacgagtttcccagctttccacatgtcccgccaactgtcccacagaccagcagaacatctgggaattccaggtctccaagtccaagacaccttcccagcccccctccactgttcactgatggcagaaaactcctcacttaggacagcttctagttcagccacctaaccagcccccatagcccactccctgcagcccactcacacccgcccctgggagaccttgcaagcccagagcctcctgggccatccgtccttggttctaggcccccaggggcctcagtttctgttctctgccccatctggtcctcccccactgggatcataaccaccccgctccctgtggccagccctagccataaaggtgagagacgtggtgccagcacccagctcaggtagcacataggagtgctctgagatgctggctgggtgcgtgctgagggcaggcaggacagggtgggggcgctgccactgggccttgaggtttgaggcaggaagaccacccatgccagaggcagggcagcgaggcatggcaggggccactctgagcctgaatgagggctgcccaggagctggcacaggtagagaaggcagcgttggacaaggggagaaggcagaccggggagattgcagggggccctgaatgccagcttgagggccctggctgaggactctgtcctaggggcagggagcagacagccaatagcacaggggacacagctcttcacgccacggcttctggattccttagactggcagggtcagccccaggccctctccctgaccttgcaattggggatgacagtggctgtgggggaggggaaaaagccaccttccctgagcaccacctggatccccacgcagtgctgcgtgcttcatgcccagacctcatttatgcaaggatggggcttggcagcccctttattcagcacatgaaggccctgagagggaaatggagcccaaggccacacagctggtgaggggagcctaggtgacactccagggccaccccatttcctgccctcagcacttccgggagcagctggggctgcaggaaggaagtgtatgactgtgtgtgtgtgtgttggcgtgtgtgtgtgtgtgcgcgcacgcacacatgctggaggcggcggcaggggtgtccagaaccacctctacctcaggcccttccaccaggacccagctggccaggaaaccccccaccactgggattaacaggaccctggaagggaggcccttcctgcctcaaaccccattacctcattagcaggaccctggaaaggaggcccttcctgtggttccattgctcactctaggcagtcctctagccagggaatggacaggccagggctggggacagggactcacccaggcccagttttcacacagcctcagggacatccctggtctcactgtgggaagactgagacctagaggagaaagagcttacccaggttcacacagcaaatcaggggccagggccactccctctactcccccaaggtcagacagctgcctatgggatgttgtgtggccgggactccccttgactgactcccagcacagcccagcctccagcatggcatcctgtggcatcaggattttcagtggccatgtggctcctgagcccagactacagatggaaccagccagtgccgtgggcacaatggtttgacgaccccatttccccatcaccctccccaccccacctcacttcagcagggagcctggggtcaggggactcacggggaggctcgacgggctcacaatcctcggtgccacacggccgggagctctcaggccaggcctcgtggccacactggtcactgtcttcctcgggcagccctgtctgggtgttgacacacttgaccaggcgccgctggacaccaccaccacaggggcctgagcactgaggggagcgggggaggaatgagtgtctccagggccagccctagcagtgggggcagggacacctcctctgggaagccgtccctgcgccctgtgcctgactggcctggccttg

SEQ ID NO: 26848 - DNA, 1412 bp, Artificial sequence
  DNA replication origin
cgtgggcctggatgcctttcccgccacacacctcacggggtcacgcctgtgggcctgcacatggggatgtgtccatacacgtctctcggtccccagtgctcccgcagctgcggcggaggttcctcagtgcgggacgtgcagtgtgtggacacacgggacctccggccactgcggcccttccattgtcagcccgggcctgccaagccgcctgcgcaccggccctgcggggcccagccctgcctcagctggtacacatcttcctggagggaggtgaggcctggccgttgagttggggggaggggacgccctcagaccctggctgtgccctgactccttccctgcccacccagtgctccgaggcctgtggcggtggtgagcagcagcgtctagtgacctgcccggagccaggcctctgcgaggaggcgctgagacccaacaccacccggccctgcaacacccacccctgcacgcagtgggtggtggggccctggggccaggtgagccgggctgcggggaggagcagggagcaagtgcttggtggcgcctggtcagtcttgggttgggtgaaggagctgtggagtgtgtgctgtgagccaggctctttgtggccctgtcactggacgaggccccgcccggctggtgctcacacctgccagggagaaacagacaaggaaagggcgcgtgtgctgtggtgtcagggaaggccttccaaggaggggtctggggttgagacccgagggaggagtcagtgatgccaaggacagggatcgaagggacatcaggtgtgaagtctgaggcaggaatgacgagcttgagggggccggggagcccggcaaaggccagcggcagaagggggcgtaagaggggcctcagatgggcaggacaccttctgctgggcctgtttggaactgaggggttcagaaatctcagatttgggccctgagctgggtcctggagtcagctgggccagcgtttgcgtctttgtccgactggctgctgagtgactctgggcaggttgctttgcgttgctgggtcactgttttctcatctgtaaaactggaacagcttaggagaggagggtcaggaggattaaatgaaggaacgcaacgaagcacagggccgggcacagcatgacactggcacagactcagtgcatgtttagggctgataacaacgaagcctggcgggctgggccccggctgtgaaactgtctcctgccctcctgcccatgggctgcggcaggtcctctgccctgtccctcgggcacagcggtgtctcgcccacatctctgcccactgctgcatcagggctccatcccggcgcccctgcccaggcttctcaggcatgtcctgtgtgaggggctcactgccctgccgccccgagggctgtcccacggttctcacgccccttcc

SEQ ID NO: 26849 - DNA, 853 bp, Artificial sequence
  DNA replication origin
cgcagcccggctcacctggccccagggccccaccacccactgcgtgcaggggtgggtgttgcagggccgggtggtgttgggtctcagcgcctcctcgcagaggcctggctccgggcaggtcactagacgctgctgctcaccaccgccacaggcctcggagcactgggtgggcagggaaggagtcagggcacagccagggtctgagggcgtcccctccccccaactcaacggccaggcctcacctccctccaggaagatgtgtaccagctgaggcagggctgggccccgcagggccggtgcgcaggcggcttggcaggcccgggctgacaatggaagggccgcagtggccggaggtcccgtgtgtccacacactgcacgtcccgcactgaggaacctccgccgcagctgcgggagcactggggaccgagagacgtgtatggacacatccccatgtgcaggcccacaggcgtgaccccgtgaggtgtgtggcgggaaaggcatccaggcccacgccccagcccgggggaatagctgaagaaccccagcgagaggccaaggctggcaggccccaggcaaaaggtggcatggccaggggctgccacgggctgggacagacagagaaagggaggaacaaaggcaagctggtgaaagacaagtccagatggggtcaaagatacagaggaaaggagacaggccaagccagacaaagatgagaagactcccaagagattcagaatccggtgtgatcgggcacacagatgtgcagcctggggccctccccttccctgccgctctcagaacacaggccgtggggaaccagggctccaccccatgccctgggaatgcctgtcct

SEQ ID NO: 26850 - DNA, 1473 bp, Artificial sequence
  DNA replication origin
aggccccctgtgctgcccaggaatggggcccggggtcccctcatccccctaatcctgggaacccctgccccaagagaggctagacagacggcgcctgtgtcccactctgctcattttcagatgaggaaatagtcaccaaggtcctgcgcaaactccctgcccgcccagcccacaccacttgcctcgctccagtttcccgcttgccagccggcgttcctgacaaccaacgggtccgcggggggccccgcttcagccaggctgggagccagcggctgggtctcagggactctgtggctgttggcggggctgtcccaagctggtgtggacagcagcctagagctcaggggcacctcagggctgagggactcaggctgacccttgggtcctgggttcagggcaggctcaggcatgtgcccgaggccagtcagggttgtggggaggaaggtcccccacactgccacagtctgcaggtcccatgagcctggtcctggggttgggaaggagggagtccccggctccagggaactgtccctgaccttcatctctggcagaggggctatgggaggaggaaggagagaagccaccccaacagtgggccacagttcactgtccacaggccccaggccaccctccagagctggctcccaggccactgtgcctcctgtccacagctccgccacgtcaggactaggagaggagtgggtgctgccaacaggggacaaagggggcagcgtggagctgggtctcgggggcaggtggggtgctcctcggcccttgggttcctcatcatccttgaaaacctcattggtcctgtcccgccatggagggggcagctggctctggctgtccttgccaactgggaaatcattttggctctcaggggtggcaggtgtctgcaggccatcagtggaaaccctgggccaggacaggctggggagcccaagatctggggcccctatgggggtgtcttcctcaggcaggaaattgatcaaagggttcccaggggtctgctctgagggtgggggtggggagcggccggcctggctaggccaagggctcggggaccaaggtcccagtaccccctcctccttggctgcaggaggctctgtggcaggcacggggctacccgtggagggcgcagcaggatggctgtgtggtgggggtgtccggtcccctgtccccgccaggtctagatcgggctcctcagagggcccgtaggacagatcctcgtggaaattgatgaaattgtagtcgtagtagaagtcgtccacaaacacgggccccggcaggtccagctctggagcctcctcctcaatggcgttgcccatggtgcctggcttgggtgatgaggcgggtgaagggcgtggggccaggtggtgcgggatgaagtcagcctcgttgaagagctcgtggctggaggagccgctgcctgagccttcagggcccagtgtgcccaggggccaccgacagagt

SEQ ID NO: 26851 - DNA, 802 bp, Artificial sequence
  DNA replication origin
ccaggctgggcttccaggccctcggcatttgggtagagctgggactgaggccagtggttgattctccagagctccaagctcaggtaagtgtcctgccctcaaagcctggtgacatggcacagcccctccgctcctgccagcctcccctcaggaaaactgagcatgacctaaggcctgtttccacatccagggacccaaagaggaggaccacaggtgtccaggctggcctaggctggggtgaggggtaaccgggggttggggcttcagccttgggaagagaataaaagcccggctccctctgctcctccccagggcctccagggacccagatgtagggacctgtggcagacccaggatgcctgggggtggggagttggcgggggatggggtggggagttggcgggggatgggggtggggagttggcgggggatggggtggggagttggcgggggatgggggcgggctcacctggcagggcagggctgctcgctgcacttcctctgttggtcatcaggccggcccagggggtcacagtgctcctcgtccacgggccctgcctgccgctccaagcagtacacattctgcctctgcacacctaggggccacggggctcagcctgggactggcacccaggtgcccaccacccaagacccaaagacaccctctctgccagaaccctcccagaacagcgccttactgcccgtgtcaggatgccttactgcccatgtcaggatgaaggcagacctccaccgtcgcctcctcactgtcctcctggttctcacccgccccctctcctatgta

SEQ ID NO: 26852 - DNA, 900 bp, Artificial sequence
  DNA replication origin
catttggggaactgtctttcagcaaattggctgcttcgcaggtggaccacttgggagcatctgcagaggcaagtgccctgtggtggctggaacagacaggggttctttgtctcaggcaggaagtcccagatgcacagtctaagctggcgggacctggagctgactggccctcagccacaccgtccttgtcacagcagcctcccctccactcctgcttgccacagatggtgtcctcccttccagggctcttgcagtgttctgggcaggaagaaggagagggaaaagggctgactcccagcgagggacttgtgcctttttctcccgagccagtactgtgtcccagacccccctagttgcaagggagcggcagtggggtgtgttttcagcaggtcccattgctgtcttgaacaaaatcagaatctgttggtgaggaaagagggggacggatgtgggactggcagctcaggggagggacaacttactctcgggaccacggggcagggggtggagcagagaaggcagagccaccagcagagggggtcctgcagctgggcctcaacaggcagtatggaagtgagtgtccaaggtgaggagcgtggctgtgcaaaggccccagggttggcagtgacagagggtgtgaaggacaggagcagtgccaagcctggtgtggggatggagagcaggggctgccccttgatgccccatttcttgtccggaggttctctgagccattgggaagggtgtggatggtgggatgatgtgtcggtggcccccggacacactgggccctgaaggctcaggcagcggctcctccagccacgagctcttcaatgaggttgacttcatcctgcgccacctggcctcatgcccttcacccgcctcatcacccaagccagcccc

SEQ ID NO: 26853 - DNA, 1131 bp, Artificial sequence
  DNA replication origin
cacgtgcctgtaaatcccagctactcgggaggctgaggaaggagaatcgctggagcctgggaggcggaggctgcagtgagccgagattgtgccattgcactccagcctgggcaacagagtgagactccatctctaacaaataaaataaaataaaataaataaaataaaataaaatagcaaaataaaataaagacagctgtattagataaaatgggtttcctagctttggaaggtatctgcccagttctccagtttcactttgtcatcataatagcatttgaaggaatgctcaaatgtctgtatctcagattcccaattctgagaccctgaggatactgagtgtcaacaatgggaagactgaggggaaaaggggagaactaagagacaaagggggaaactgaggtgtggggagatcaaggaatggcaggggagaccaagcagggggaggaagaccgaggggcgttggtgggggggactagggggctggggggagaccaaggaatggtgggggagaccgagctgtgagaggaggactgaggggtgtggcgggggtactggagggctggagggagaccgagggatatggtggggagaccgaggggtatggggggagaccgaggggtatgggggagactgagaggcatgcggggagactgaggagtatgggaggagacagagggccagaggggagactgaggagcagtggggaggagacagagagagaggggactgaggagcatggggagagagggaaatttggggaggaagagtcagagttaatgaaattgccctactttttataaatagtttagggaaataagtcagtgtggtgaggggccactggactggtctatcgagggggagctgtgtcccctggagggagaacgccaagagctggagcacactgaacatgcgccgcgagccagcacccacctgcctcatccatgtaccctcccagcgggcctgggacacagggcaatcgctagcctcatctcacagatggagaactgaggctcagagaagcaaacttccaaacccgtggtggcccagcagtgagctgggagctgaagccagtgtccctgtccagacactaagcccctgcaggtggggctgtgcctgccccacttctca

SEQ ID NO: 26854 - DNA, 1751 bp, Artificial sequence
  DNA replication origin
agtttatgcaggccaggccctcagccctgcagctcatctgtagtgggcactcagcgggaggggcttggtggcctcagaggctcaacaaaggtctgagatgagacggagcagctgggaggatgggacagcactgaaggggtggcctgacgtgagcgacttcacctctctgggcctctgtttccccatctaaacgggggggtgggggtgcagggggtgtgaagatctggtgagaagcagaggcaagtggtactgtagaccgaggcactacccggctgatcttcacttcaggaggccacccggggcaggcatggggttcacagccagccccacccagggccctgcgcttacccaagagtggcctgtgcccctccctgcctcctggcctccaggtctgagctgggtgggggccagcgaccctggcctagatgcggaggatttcaggagctgtgctaggtcagacctttcagctggctggggccctaggcacttcctttagacccgggctgggggtactgccaccaggaggaaggctgaggactcaagggctcgttaggatgctggtgtcatgggctggagactcggagcagtccctccagccagtgctagtcatgcctgcagcttgtcccagcttctcaacagccctctgcagaagcagccccaaccccactttatacatgaggaaactgaggcccagagggtggccgaagacttgcccacggtcacactgtaggttgggggcagagctcaggcttcctgctgccacctccccacaggtccttacaaacagggagagtgtgtctgggccagagggtgggcagcccaagggaggggagcagcgtgcacaaagctgggcagcagggatctcggggtgtggatgcaggaggaagttgcttgctctgggctgtggccatgcagtagcactcactgggccgtcactggggcccaccccggttctccccacaggcccaaatacaaaggcagatactgtgtgggtgagcgcaagcgcttccgcctctgcaacctgcaggcctgccctgctggccgcccctccttccgccacgtccagtgcagccactttgacgctatgctctacaagggccagctgcacacatgggtgcccgtggtcaatgacggtgagtgctgccccccatggagacattgaggcttagagggctgggggtgtgtgggtccaaggttaccctgtgatgcgagcaggaggcccagtcttcaccccaagcctgggccactcccactgtcccctggggctgctgctcgcccctagctccccagtctgcagccttgcagatagctatcagcccagccggagcctccagcatgttggtgctgcttgggagcctccagcctgccatggatgtgtgtcacggaggggtcttcctggtggcctccatactcccgccccagctgttgctgatgactcttctacttgggccctcagtgaacccctgcgagctgcactgccggcccgcgaatgagtactttgccgagaagctgcgggacgccgtggtcgatggcaccccctgctaccaggtccgagccagccgggacctctgcatcaacggcatctgtaaggtgtgcctggttaggaagaggctctcccagcactgcctgcccccagccccactggcaggccccaggttctctcctgggtccctcctgatcctcctcgggccatggcgggccccaggttctctcctgggtccctcctggtcctcctcgggccaccctcccca

SEQ ID NO: 26855 - DNA, 1035 bp, Artificial sequence
  DNA replication origin
tgttgggatgcactaagcccccagggtgggaggaagtgacacggggagataggggcccagttgccagctttgtcaggcccaggagttcccctcccatggacacagtactttaccatgtttatatccaccatttcatttgccctttgaggtccccctgtgaggcaatttattcctatttttagtcagggaatctcaagatcagaaaaggaaagtgaccaggcagagccacacagcacagatctgggacagagccaggaggcgaattcaggcccctggcctctgatccctgtgtggttcccagtgccccagagagagctcactgaggagaggccctggagacgtgtgccctgggcctgtccactggcagctaactccaccccatctgggcctccagtgtacccagagctggagtctcgacgggagcgttgggagcagcggcagcagtggcggcggccacggctgaggcgtctacaccagcggtcggtcagcaaagagaagtgggtggagaccctggtagtagctgatgccaaaatggtggagtaccacggacagccgcaggttgagagctatgtgctgaccatcatgaacatggtgagtctgtgtgggccaggagcgggtggcggggatggtgttggggggtggggtgcaaagagtgggtgcagggcaggaaggctgtcaggctggaccccagacccaggtctaggccccaagtaggaagaagggtatccaagctcctgaggccaggaaggggtgggggtcttggcagctagtcactatgagagagcctgggcagagggctgctgtggggacaccatagggtgtcatgccactaggagggggagcaggagtgggagactgaggcagccacaaccctgtgcttgcctggggggcttgtagactagttgggtccttcatgtttccctgcacagatacttccttcctttgtgtcaggacctgtgctagatgctggaaacacagaaatgcctgatcagactacactctgcctgagactctgcctgagacatcagcacacat

SEQ ID NO: 26856 - DNA, 949 bp, Artificial sequence
  DNA replication origin
ggcaaatgaaatggtggatataaacatggtaaagtactgtgtccatgggaggggaactcctgggcctgacaaagctggcaactgggcccctatctccccgtgtcacttcctcccaccctgggggcttagtgcatcccaacacaggctgaccccaccctctaaaccccagcctggggaggctggccaagacccagcccagcttgccctactgggcctgctcccctgacccaggctgctccagatcagaagaggaagcacatctatgaagctgaggaaactgaggccaagaagcatgcctctgtggatatgtgctccagcaaatgcagtaccagagctgtgggcagcctgagattggcttgctagccaagcattccccaaaccccagcaacccttagcaggcagctcctcacctggactggccggcactactgctgctctgcagaggaggcactgggtaccacactccaggtcccaataatagaggttagttattctagggtgggagcagggtggtggtgggagggaagttcctggctagtggccctgttggagctgggcacagctcacccggcctgggcactggaggaagaacggctggcagagccaggtaccataggctgttggcggggagggagcagagggaggctgagccccaacgtgggagaagtaggtgagatggagcgaggaaggtcagtctaggggattgactggggcaggcccgaaaggcagaggacacagtcttgtggcacaattaagggcacaggctatggtaaagtatccatctgtctgtctgtgtcatctggtctaaggggcactgggcatggggatgttaaggggggcttctagaaaggccccttcatgtccccaggcccagcacccacccgagaactgggagcagaagagcataccttgcactccacaggtgcttggagcactggaatcaccccgc

SEQ ID NO: 26857 - DNA, 896 bp, Artificial sequence
  DNA replication origin
atcacttgagcccaggagtttgtttgagaccagcctgggtaacatagtgagatcccatctgtattaaaaaaattaaaaataaaaaaaaattagccaagtgtggtggcacccacctgtagtcccagctacttgggaggctgagatgggaggatggctcgagctcaggagttggaggctgcagtgagctatgattgcccacctgcactcctgtctgggtgacagagcaagaacccatttcaaaaaaaaaagcaggggcaaagaatatagattcttgccttcctagactacactgggagggaagggagaaaacaaataaatagaaaaaataatgaaaatgctaagtgatatggtatgtcaggagtgctgtggggaaaaataaagcaaggaagggggatagggagagctagggagttgcaattttaaaataaagtcgttagaggaggcctcattgagaaggagacatttgaacaacaacccaaaagtgaatggtttagccatgtggaaaacagagagaagagtgttccaggtgtagggaacagcaatgcaaaatcctgaagcaggagcacgtctggcctgtggaggaactgcaaggaggccagtgggtggagtggagggaactaaggctgtgtagctggacatgagattggagaggtcaccttgcctagggcctcatacaggctagaactttgtcttttgctctgagtgagatgggcgccattgcaggagagacgatgagtagagtaagacgatgagcagagtaagacgatgatcgcgctggttttgaatgaatctttctggctgctttcccttggtgaaaacacgaggggaggggcacctggggtaggcaatagtgaaaacagagagacctgttaagaagttaccgcagcaatccaggc

SEQ ID NO: 26858 - DNA, 1233 bp, Artificial sequence
  DNA replication origin
ccgagtgggctggacggagcgcggtttacccactgaggatttggtttctcacactccttagcgaggctcgcctggaaagcgggctggccgggacacagccggcgagggcgccaggtcgcaggtcttcgcgggaccccgccgcccccccagctcccgcccaccgcatctgggctgctggcgcggcccctggcggctcggggggccgggtcttgcgcggtccttgcacttcctgcctctcccttccccaagtgtgaagacgccgggagtggagcggggagcaggagcttcttttcccggccatgggttaactctccccgccccgccgggccggcctccgacgagcctctggcctgcgtccagactcttgtttggcggcgacctgccgggcggccgcgctgctggcgcgtccgacgcagccggcctgggaattcagtaaccgaggatgtaggagaccccaggcccggtgctcagggagctcccagtcaggggagccggtggatagtggggagagtcctgcaatagagccgaccggcaggctttgtaggagaggaggggcatgaggttggagagactggaaggatggatggattctggatgagctagaagggcgtggagggagtggggccctcccctggggagcatcagtcgggggactggattagggttgcttgctgggatggggtcgacctgcctccccactggagggattgtgacgagaaagtagtctgggcgggaaggatggggacattgactcttgatcttagaggtttgggaagccgttgaggggagcagctgatgaaagcagtgttttggaaagatttggtctagcagccatgcgcagagcgcagagggagcgaacatttaatgagcacctactgtgtgccagcctcacgggttcttatttctcatcatctccacaacaaccgtgcaaagcaagtgatggaaagtccttttatggaccagcaaacaggctcagagtagagcgacctgtggggttggactcctgagcttcctgaatgaggcttgtgttttccactgtccagagctgggggctgaggaggatgaaccgggcgatgggaatgggagagcaggaaaatgcttccctcaggacttgggtcctggccccctggcagctgtgggaagagttgggtgcggtcaacctcgtgggattcttatgaggattaaatgagatattgaatatgtcagttgctcaggcaggacacagtgactaca

SEQ ID NO: 26859 - DNA, 1577 bp, Artificial sequence
  DNA replication origin
aggcctggcccagcctcaatctcctggactcaagtgatcctcccacctcagccccccaaatagctgggatcacaggcatatgccaccatgctgggctaatttttaatttttttgtagagacggtgtttcactatgttgcccaggctggtcccaaactcggggctcaagtgaccctcccacctcagcctcccaaagtgttgagattataggtgtgaggcaccttgcctgctttttgtttgtttgtttgtttttccctagagacagtgtctcagtatgtctcccagactggcctggaacttctgggttcaagtaatcctccctcctcagcctcctgagtatcactgggactacaggcctgtgccactatacccagctattatcagtatctttaataggaggaagacaagaatgtttttagactgacggtcaccaacccaaggagaccaaggaaagcgggggacacctggagcaggacctttgaggagacaggaggggagggagccacagagccctggtggaagcattgtctctgactgctggagggcacctgtttcactgtgtccagatggagggagaagtgagtgggtgccagctacaaaggctcattgtatgcagtgtgcatggtaggatgtggtggtctgaattgtccatgtcactgagcagcaagaccagctggtgtaagcagtggggaagaaatgcaaggtggttgggtaggggccaggagtcaagcagtagatgtagctgggagggaagtaggtgaagccaggaggggctggtaggttgggcgaagaggaaggtatcaagggactggaggaagagcaatacatagtgggactgtgaaggtggaaaggactgcagagtcgggtctgacaggggggcacctgagcttcggatttccaagatggagcagttctgagggatgacacagcccaggctttggccctgagacctgatggctgaggtggagtggaaggtcactggagatgagatggaggaagtaggtgaccctgtactacacaaattccctagaggacagacaggttgagggtggagaggaagccagaagtgagcttccaggaattgaatgaaagggcccaggagattggacaatgaggaggtgtgcgggcctcagagggcagggggcacacaaagactaaccaaggggaggaagctgaccgcaaccgccccgaggacaagacgggcgtcctcggtacagggccatgtttagtgacggcagaagggagaaaggaagctcctgggagcacagggggaaggggagccggaagccagagccagggctggggccacgaaggacagacggccggtgttggaggcggaggctggcctgggatgtgaggctggggttggccggcctccaggctccccgggagcccctgctgaaagtctgtgggcgctggcctgggcgaagccgcggtcccccgcctgtgggctcaactctgcgctctgcttcaagcaaacgcactaggagaggagtcaggagacgaggaactgcggggccccacctcgcgcgggcaaccgctgtctgtccagggagggcccaggcctgtctccgcaga

SEQ ID NO: 26860 - DNA, 1409 bp, Artificial sequence
  DNA replication origin
cggccatagcccagagcaggcagcacacacagctggcccgtgatgcgccccgatggctcggaggcagcgcgccagtcacaatgcaatagcgtgccacgctcatggcactgaggaggaagatgctggcatacatgttgagcacggtgagcgtcagcatcaccttgcagatggcacccccgaagggccagctaaagtcgcgcgccgtgtccacggcccaaaagggcagcgttagcacaaactgcaggtcagtggctgccagattgaggaggaagcaattgagcagccagtggcggcgccactgctgggacctcacccggactagcaccagccgttgcccaccaggcctacagcgcacagggcccagtaggcgcccgcaatcagagcccgcagcgccggcgcccggacggcccccgccaccccgtccaggccatgcaggctgcggggactccgggccgggctagtgttctctgatccgttgcccagggagctgttagggagcagcccccgacgcctcttccggccagctgaagggaagcacggcccagacagctcgggcgattcgaccctgcctctggcggatgccatcgccgttgatggcgatgcagggatccgctcagatccactccaacaccggcagccgctgggagagaactagggggtctgcagtgcctcgcggcagcacctttaaaaaactggggaaccacctgctagcctgcgattggccagctgcacccgtggcccaccccaaaggcctccgagctgttatttccagtagctgcttcttcacccttgaattagcgttgaactggggaccctttgcgggtgaactgagacgcgggggccggaagcccgaaccggaggaaacagcgtctgcaattcacccaaggtgtgggtccgcagctgccggttcccgcccgaggacgcagctccagcttcccagtgcctcccagagggactctgatactcggggggcgctgaagggaggtcatataaattcttcccgtggaggcagtgcgcccctccacctcccctgtgggccccgagatagccaactgaagaccaaggaggggtgcccaagtccgaccagtggggcctggcagccccctgcccgccagccctgcttccttgaacccctgctcctgataaggcatttctcctcccctgctttagccatgggtacccttcattcccaccttcactgtggtctgctctgcaagtatccctgatcttcttcccaaggtcagccgcactgcttacaactgggctgaagacggagaagcaactaatctaggagcagtcagaggaagagacatgcaaacagggtttaaaagaccagtgctgggccaggcccaaaggctgatgcctgtaatcctagcactttggggggccaaggctgcagatcacctgag

SEQ ID NO: 26861 - DNA, 1273 bp, Artificial sequence
  DNA replication origin
gggccgtccgggcgccggcgctgcgggctctgattgcgggcgcctactgggccctgtgcgctgtaggcctggtgggcaacggctggtgctagtccgggtgaggtcccagcagtggcgccgccactggctgctcaattgcttcctcctcaatctggcagccactgacctgcagtttgtgctaacgctgcccttttgggccgtggacacggcgcgcgactttagctggcccttcgggggtgccatctgcaaggtgatgctgacgctcaccgtgctcaacatgtatgccagcatcttcctcctcagtgccatgagcgtggcacgctattgcattgtgactggcgcgctgcctccgagccatcggggcgcatcacgggccagctgtgtgtgctgcctgctctgggctatggccgtcctggctacggcgcccaccgccctgttcgccacggcagctagggtggggggaaagcactcgtgcctgctgcgcttccccgccggcggccccaaatggcaggtgctctaccacctgcagaagatcgcagtagccttcgtgctgccgctggccacgctgggcacctgttcgctgctgctgcgcttcctgcgactgtggtgcgcacgctggccgtcgagggtcaggcgccgactgcgttcccgagtcacctgtgcgctggcctgcgtgctactggccttcgtgctctgctggctgcccagccaagcgttcacactctgaggggtgctgatcaaactgaacgccatgcccttggaccgcgcttacttcctggctcaggcctacctcttcccggtctccatctgcctgacgcactgcaacaacagcctcaatccgctgctttactgcctgctgcggcgccacttccgacagggccttcgagagctgtgtagctgagcccagcggccggtgcccctccgagcaagctcccacggcagcgccccagcggctgcactcttccaatgagggccgcttgtcgctgcgtcagtatcaagggcatggggtaaagtggctcatatctggttggggcgatgacgtcatgaagcagggtccgacgtcaaggccggtattctggggtctctcagaaggtcagggttggtccattggtggagattacttaagattgagagtacaccattaatctgtgtatcctaaggtgagtcccatctcctctggcttcagtttccccatttgaaaagtttggggatgagatgaatcctggggactctgccaggtctagcactttgatcctcctagcacagccttcgc

SEQ ID NO: 26862 - DNA, 1550 bp, Artificial sequence
  DNA replication origin
gaagcttccagaagcggaccccagttcccaccctcttgctgatcctaaagcctttctatgcaaaaactagcggaatgctattgaatgtaggtttccgagccagccctattctctccgactacttcaacatcaacgggggcttatttgcccaagggacgtcgcaactgggcctttcccattctattatcactggtggctcaccacccccactctcccccatcgccagctccgccttaacctcccacgaaatcaaatccccgctttaccaacccgcagcagccgggggcatggagagagaagcgggggtggggtggggtagggtagccggcccctcccccacccggggggggggggggggcgcctccaccgactccgaactaccagtcccggcgtgccctggggcggcgcgggcgcaggggcgcgtgcgcggcgggctgtcgttggctggagcagcggctgcgcgggtcgcggtgctgtgaggtctgcgggcgctggcaaatccggcccaggatgtagagctggcagtgcctgacggcgcgtctgacgcggagttgggtggggtagagagtagggggcggtagtcgggggtggtgggagaaggaggaggcggcgaatcacttataaatggcgccgaagcaggacccgaagcctaaattccaggagggtgagtgtgcgcctttgggaaaaaggcacctaacggcgcaggagatagaggcgggctcgaggtgattgaggcttgagggccgggggcggcgcgggctgcgccctgagaaggcggcggtcagtgctttgtgcggggaaagcgcattgcggatggcaattccggtgcgtcattgtgagaaagcgctttgtgaagcgagagtgctgcgcaggcgttagagtgggagagagagcgtttggcgcgtggcacaccctcgtcaagtgtttgttattgttctgaggaagagggcgcggagagagcagcctattgtagggaggcgacgggagcgccatggcggcggttaggggaagtgatgtggcggcggggggggaggggcggtggctgtttcgggcggtcctgcggcgcgcccggccgcttgggcagctacgacgggtttttcggtgcttcctggagccccggggtggttgcgttcggtggcaactcagctgcggatgggggtgggtttggcgccacggggcgggagaagtgcgttgtaaaatggccgttgcaagatggcggcgccatcatggccgccggcgtctcggtcccgtatggaggcacagcttacgggcagatgcagcgcccccttccacgacgaccagaaggttgccggggccctccgcataccacagagtggtgggtggggacagaaaaaaaaaagtgagatgagcgttttcctccgctttgtgttgcctggaggcatcactctgctattcttgggcgcagtgccgagatcctatggtaatgtgagtgagctctcgctttgcagttgctcgtaaaaagtaaataaaaatgatctgaatgcagtgttgacgccgtttgcatttgtaagtcccattgcctcgacgtc

SEQ ID NO: 26863 - DNA, 1005 bp, Artificial sequence
  DNA replication origin
ctactccctctttcctggcaaggagagagccaccttcctgctgcaccttctgtaggcaacagtgtctggcagactttaacacagctttgctttgttgccactgcatttattaaatattactttatacctatggcaaaaatacaactttttctgtttacaaaagtgaactagcctccataaggaaattccaagaaattcaagagaacaaactgcagtggtcaggtgtgaattcagctgatgtgtaagtgggccataggctcgcgccagggccaggtgccgggatccaggcagcatgcataactgtcccttggaagccctgtttggcagggagcaggttggcaaagaggctgcttctctacagtggcctgagggctctgacagtgggagggcgacagagcccccaggaggtgggggggatccaacccagcgggggggggggggagggtgggcagggtgggtcagggaaggctccctgtggaggcggggaacgcccatggaactgcgaacccttctgcgtggctggggtgggggctgcagggtggaacggcggggacgggtttgatggcagatgagtgtggaaaaagagggaggaccagatcatgagggtccccctcagggtaggaccctgggaaagcagggacactggtgtgttcaaaggttggcgttggcaagaggagtgtttcagaaggcagacagctcccagtggaagctggaacagtgtgtggggggttagggggtccaaggacaatggtgaccagggcagagcctcagggagggagaggagagcacagacgtgagtgacattagtgagtgacgttaacgggcagcaactgatgaagggagggaaatgaggctgcaaaccaggcaggcgaaaaggtgtgggtgagagaaaccccatagtaaagaggctaaagcttggtttttctgaagaagcctggggtgactcctccagcacaggatcctagtgtgtgagggcagctactcttctccctattttacgtcttc

SEQ ID NO: 26864 - DNA, 1723 bp, Artificial sequence
  DNA replication origin
ggccaggagttcaataccagtctggccaagatggtgaaaccctgtctctactaaaaatataaaaagttagctgggcgtggtggcgggtgcctgtactcccagctactcaggaggctgaggcagataactgcttgaactcgggaggcggaggttgcagtgagccgagattgcgccattgcactccagcctgggcaacagagcaagactccgtctcaaaaaaaaaaaaaaaaaaaaaaaaagaagggagagtaaaagagacagggagactgagttggagtctgggctttctcccgaaggccgcatggagcctcggcggcattctgatcgaggcaggcgtggggtctgagctgggtttgagaggcctgggggaggccaccctcaggggtctggatggaggccccggtctgagtggtcagcgacacagatgggccaagggagtcatgtgaggtctgtggtggtcagcaggctggcggcagggtggggtggagagggggaccggcccaacaggactgtggacacctgggaaattctgagggaggccagtgctgctcatcaccacgaggggaaataaaggaggagcaacaggtcttggggaaagacaaggcacttggctgtggccaggctgggcggaggtgatggtgggaggcccagcagccttgatagggtaggggtgggggtgggcccccaaagggtccttggcacaagaggccaactgcatggacagaggcgagaggatggcgctcgtggcaggagggagaggagccaggaagatggggcaggtggggggaaggaggggtcctgagaagtctggctcgggaaggaaagagatggtgccgcagagcgggtatggggtgagaatgataaagaggcccctggactggtgagagcagtgggctcaggtgggtggaggaggggaaggaagaatttggagagaacagacaattgtgagaattccggcgggagggaggtggggggagaagggatgtcttccaaggctggggagggagtgaagctaggcatgctgtacgccaagaagacagagtggaggctgttggagttaccttgccctggtaggggtaggtgtcttcacccatgatccccttgttgtacaggatatactcgaaagcctggctggggagacccctgcaagaagtacacacaggtgagcccacctggggctgtcctgatagaggcggggccctcggggactggcgtggcgagatatctggcctggcaggctggggacttggttgggcatgtcccagtggcagagggggtctctgagaggcccagccttgggataagactcagcaaactcagatgaggccaccggagtccaaggaccagcccaaacatgcctcagtgggatagagaccccttaaggccagccgctctgtcaggagtgcacagccccacaccatggtcaacagcatcagcccagagcactgtcatcgccacagccgagcccctgggcaggtgcttcccaggcatgactccctgacccctcgtgtcgaccctgtgtggtggatgctgtcactggctgaggcaaagaggctgaataacctggccagggccacacagctaaagctgggaagtggttccaaaagtgggtcttttctacatcatgtggcctcccagaataaacaaaaactcagcagctgcccagcaatccccgtcccttctctgtttctctccatagcattccgcaccgcctgacctagtc

SEQ ID NO: 26865 - DNA, 1147 bp, Artificial sequence
  DNA replication origin
cctcccccagctgagagagatatgtgaagggaagagattgggtgaggccagtgtcaacctagggtgatgacctgggaggcaggtaggggacttaagagacatttcagaagtagaagctggaagactgaaccagcaaggtgaggaaacagagatgaacctgagagaaatccttacagcagccaccagcattgtgcccacgggggtgactgcctgaccagcagaatctgacttaaccctgctagcgccctgcaagcaggaaccctcgccattcccactttacaagcaatgaagccaaggcttcgagaggggaagtgacttgcccaggtcacccacctggtgtgtggcagagctgggatgtgaaccaggcaggcaggctgcagccccccacacctaatcctcatgttattctggaggtgttgtgaataagggggctaggcagcggcaatgaactgttagaaggtggggaaatgggtggatggggcgggtcccccagagtctggggtgtcaggggtgtctgggtggggttgtctggcagttagttggatgtctgagcctaagtggaggtcagcactgggctagggtttggggagctgttagtttaacaggactgggcagaagagactggaggtggaaaggtgagagaaggttctaaaaacagaactttggggcatccttctgcagggaaccagtagggaaaagaggagccagtgaagatcgagaaggaagagagccagaagactgcagaatggggtgggggactccaggccctggcagaatggtggggattggccaccaagaggtggtgattgggagtccacaggcactggtcagaggccacctgctgctcctgctcctttgcaagcctctcaggacttgcgaggctcagaatgaatggatctggaacagggcttgcgagcctcagaatgaatggatctggaacagggcctgcgaggctcagaatgaatggatctggaacagggcttggtaaactgccaaggcacctggggactcgggagctctggcagggtcagcagaggaaggcagaaggcagggctgtctcacggcgtccccatcactgatgtcctctgctctcccctggcctttccagggtgcctgcggcagttgctggactttctccaccactggg

SEQ ID NO: 26866 - DNA, 1388 bp, Artificial sequence
  DNA replication origin
ctgggagagggagaggccaggctgagacctccccgcgcggtgccagccagtccaggcagatccaggactcagccaggcctgatacccagataagcccttcctcccagaggagataagggagcgacgcggccggccgacaggtgaactagagctggcgagttagtcggcgccgccccctcccgcgagcccggcctcgggggagtaccgcccaccccgccccgcgctcgctccgccccgcgctcgctccgccccttcgcgctcccgccgctcctccacgctcgtgccgctccccccccgcgctcccagttgacgctctgggccgccacctccgcggaccctgagcgcaagagccaagccgccagcgctgcgatgtgggccacgctgccgctgctctgcgccggggcctggctcctgggagtccccgtctgcggtgccgccgaactgtgcgtgaactccttaggtacgcagagggcgcgccgcccgagagggtgctagcaggccctagagtggacgctgggagaacttggccaggggcgcactgggctccggaggaacggggcagagctttccccggtgagaggccaggaactctgcgtgctggcacggggaggggtaaactgcattataggcgggggttctcggagggtgggcggcttgtaggaccagaggagcagatgggctgagtgtccagggtcccacctagccaggtggctctccagcctagaataccaaaggagcccgcagctccttccgccttcctcaactggggacacagagtgtcacacagaggactctgatctgtccctgccagaggtgagcaaggacgtcccagccttctctagcagcttcccccgggacttggcacacaggggatccccgtagtgtcttgggagtcccatctgtagagtaggttggacgggctgtttggaacagtgaatccctgtgcaacggcaccagggaaagcactcagaccaacagcgcttttaacagcaccccagggcccatggcgtcaggtggagccccaggactcctcttgttggccagattggctgcgactggtccagcttcgtgctgcccttgcatcctgtctactgcccgggctcaggcacctcccctggctgaaggcaaggagcctgctcttccctactgcctccctcctttcctactgtccctggtcccagcctcagcccacaggctctgaacttaaagaccacctgcccccttcaccgagaaaagtagccaagaaacaacccaaggagccaagaacctagggagggggggtgccctgagctctggaggaacgggacagggctttcccccagctagaggctcaggggatgggacagagatcactgaggctgaatctgggccagagggttgcctcattc

SEQ ID NO: 26867 - DNA, 2911 bp, Artificial sequence
  DNA replication origin
accacggagaagccctccagccagctggagccagagggtcagacaaactcaccatgaaaagtgtgtgcaggtagcaaaggataaaaagcacacaacggagcatcagaaaagcccatgcatggggggagtctctattctggtgccatgctcagggccaggtattttacctataattatatttaaactgcatgaccgtatctaactaccctggaaagcagggatacttgctccattttacagatgaggaaactgaggctggtgggggggaggcgggggggaaccatttgcttaggtcacacagtgaatctgtagtagggctagaaccaaacattggtctccaattaaccaggtcagtgccctccacatctcagcacccaggggccctggcctgctggaacgatccacaaaggagggtcaccagggacctagcgcaggaggcagctctggggcctgaggtctagcatgcagagctttcaattctgacatcctccaagtggctgggatgggcagaggggtgaagcattccaggtacacatgaagggcaggacatctgcctagaaggacacctttatcccaaggccagcgacttctgttccaaatagtaaccgagcagggtcttttctgagacatatgcctcaaagcacagagagactggtcacacccagagaggggcatccagacagagatggagtcacaacctaaggaagatctgctttatctgaaaaaaggtgcctgctggagctcaccctggttccatggagattccatgtccacatgccacactggccacaggagaggagagagactgtgggggaggctctttaaatgcagatttctgagccctacccagacccagtaggtcatatcccaggaaagaagtccaggaatctgcttccccaggtgcctgagacacagagtctgggctagaacatcaggggatgaaacaccagtcggagggaggccacgagagagctcagatctggctctactcacaggttggaaagatgcatttttaaaaagagagggaagggcacagaggctcacatctctaatcctagcactctgggaggctgaggcaggaggatcacttgagcccaggagtttgagaccccatctctactaaaaatacaaaaaaactagctgggcgtgatggtacgagcctgtggtcccagctactcaaaaggctgatgtgggaggatctcctgagcctgggaggccaaggctgcagtgaactgtgatgatgccactgaactccaacctgggtggcaagagagccaggccctgtctcaaaataaataaataaaaatttaaaaatgaagagacagagaaagagcaagcccagagcagagagcactgcagtaggtcaaggctgggttcagacactctctgcgcacagactgggaaagttaccatctactcttgtggcctcagtttcctcatctgtaaaatggggggtcaacaacatgccactttgcaaggtgatgatgtaagtgaagaacagggcatcactgggcatttgaggctacggcacaggctggtctgaatcaccctctcctcacccaaagcagtgacagcaccggcctcctcagcctggaacgcacgttcttctgtctgtctcacacccagacccttacataccatcttctttagctttgcaaactacagagaatggccctacagctcttaatgtagcttcctcagcagaaagactaaaatgtctgttgagggggcaaaacaattcacaaggaggtcgtctagcttcttcagttgtaagtccactccaagcaaaagggaagccagggaaatgtggttaaccagggcagggagacgtggggagtgtgggggaaagtctgaggtggagacacacagggacatggggggtatgaggtggggacaggcagggagatgggggtgcaaggtggagacacgcagggacatgagggggtgtgaggtggggacaggcaggaagatgggaggtgcaaggcggggacaggcagggacataggggtgtgaggtggggaaatgcaggaagatggggggatgtgaggtggggactggcagggatatgggggtgtgaggtggggacaggcagagacatgggggtgtgaggtggggacaggcagggacataggggtatggtggggataggcagggagatggggggtgcgaggtggggacaggaagggacataaggctgtgaggtggagacaggcagggacatggggggtgtgaggtggggacaggcagggagatggggggtgcgaggtggggacaagcagggacatggggagtgcgaggtggggacaggcagggacgtggggcgtgcgaggtggggacaggcagggacataagggtgtgaggtggagacaggcagggacatggggagtctgaggtggggacaggcagggagatggggggtgtgagttggggacaggcagggagatgggggggtgcgaggtggggataagcagggacatgggggtgcgaggtggggacaggcagggacatgggggtgggaggtggggacaggcagggacatagggggtgggaggtgggcacattcagggagatgggggtgtgaggtggagacaggcagggacatagggggagcgaggtggggacaggcagggagatggagggtgcaaggtgaagacaggcagggacatggtgtgaggtggggacaggaagggacatgaggggtgcgagttggggataggcagggagatgggggggtgcgaggtggggacacgcagggagatgggggacgtggggatggcgacaggctgggagagggagaggccaggctgagacctccccgcgcggtgccagccagtccaggcagatccaggactcagccaggcctgatacccagataagcccttcctcccagaggagataagggagcgacgcg

SEQ ID NO: 26868 - DNA, 966 bp, Artificial sequence
  DNA replication origin
gacatagggaggccagtgtattgggcacaaaggcctcgtggaaggtctgctggatctgagtgagggatgctggaaggcggtgggtaaagggacaactgtgttggtcttgggaggagcctgttaggaacaagaatcctcccccatcaccacctcaggaccacctgggccacacaggaggagagcggtcaacccctcaggcagcaggtgctctgagagatgactgtctcgtgtgcctcatgccttcacttttccatgctcactttaccctgtccagaagtcccggctgggctgagcacctgcaagcagcccatctgccgggtcccaagggaagtggggccatccctcctagactaagtgtctcccttcctcccatttcctccacagacgggcactgaggtctgcaccaaggcccttgctacacgctgagatagaaaggcaggaaacacggttcctgacgtcagggatctccagcctaagtggttccaagtcatgtgaatggagcgaggaccgtggagaaaaacagcctctgtgtgtgtgccatgtgggtggtgtgtgggtggtgtgtgtgtgccatgtgggtggtgtgtgggtggtgtgtgtggtgtgtgggtggtgtgtatggggtgtttgtggtgtggggtgtgtgcatgtgtatgtggggtgtgtgtgtgtgtggtgtgcctgtgggtgatgtgtgtatgtggtgtgtgtggtgtggcgtgtgtatgtggtgtgtgtgcgtgtgcctgtgtgggtgatgtgtgtgtgtgtacgtggtgtgtgtggtgtggtgtgtgtggtgtgtgtgtggtgtctgtgtgtgtggtctggtgtgtgtgtggtatgtttgctgggtgtgtgtagtgtatgtgtgtgtggtgtgtgtttggtgtgtgtagtgtgtgtgtgtgggtgtgtgtgtgtgtttgtgtggtggctgtcggtgagtttttcctggcagagctg

SEQ ID NO: 26869 - DNA, 753 bp, Artificial sequence
  DNA replication origin
ccactccaggggcctctgctttgagctgtggcaagctgtgcccctcccttacaatccccatctgaactcaagctttgtcaggggttcagcgaactcctggtgaggggcaccctcagccctgccctgtctgccggtctggtgcactgaagagccaggcctcacctggacagctcctccagtttggacttggcgtagtccaggctgttgcgctcaacgtgctcatgaggcgtgtgggccaggagctcatggagggtcaggatgtacctggggatctgcgggcaggtgggagaggtgagggtggagaaagagccagggaagtatggccggggagcaaggcaggggcagacagggagtgagcaagagagagagagaaagagggagagggagagggagaggaagggagggagggagggagagagggagggagagagaggtggcgagggcgggggaaagggggagagagagagagagagcgcgtgagcatggggtgcgggccaggggagagagagcacgagggggtggtgggagagagaaaatggttcttttagcccagaggacttccatgagcagaactgaggaaggagataggctgccctttggtcacagactctaacttggaggctcttccagggtcttgtctagggctctgctctggctgagggtggggtggggtgctcaggagccaggagagaaaggtggcgtggacaggcccacagtcagcttgccctgcacccagcattgtcggctgctggc

SEQ ID NO: 26870 - DNA, 1181 bp, Artificial sequence
  DNA replication origin
ctggacacacgtccagccaaaaatggtgctcccaacccccactcccaccgcccagccctaatagccccgatcgtctgttctacaccgggaacgtgtaattccccgcgcttaggcatgggaagggcaagacggaggcgtccgagcgctgccagcccttgcctcgccgcagctgagggcggagagcggtctgcgctagctcctcggagttgggctggggttatggggctacacgggtcggttcggtaccatcgagcggtggtgggctcccagctggcggccgccggagcaacaagcccaaagattcccaaggaccgctctgatgcgccggggctagggccagggctgctgcggaggcagcgggacgaagtgggcgcttctctcctcccccgccccctgcgccgccgccgccgccgcagtcgcggctatagcgctgcgctctggtttcctgagctgcaaggctgaagagccaggcctggctctaacagggagcccgggcggggtgggggtgagcctctggcgtgaagggaggaggggcacctgcagagagagccacctttaagcttggtgcgctttccaaaagcatctggtccagtcccttgccactaggaagataaagcagatgatagtggatcctaaaatgccactgcaggcaggaaccttccatccatagggcctaacggctggtgattgcctagatggggacactgaggcccagagagagaaattcacttgcccagcgtcatgcaagttgttgaggccgtcccaatgttctgaaaagacaaccgagatctcaaaagccactgctgcatgaagacacagactggtggtgattgaattggttgaaataaaagcatcgcttgaagtcttcctcccaattgtcaggacagagatccgagctcagtctctctagcacatctcttccttccctaccttcagccaatgggtgttaggagatagtttctgaggactgggaagtgtggacaggaatttttgagggtgggtccctggggatgacaagccatgtggtgagcaggggctcccagatggaaagaagagcaaagagcaggcagctccttaagcttcagctcaaatggagcctggggaactcatgtggaagagccagtcccaggccagactagagaatttgctctcagcccttcagaacttgcccctctccagcc

SEQ ID NO: 26871 - DNA, 784 bp, Artificial sequence
  DNA replication origin
aagcgcgtggggtctcgctggcctctgagcaccatgcagaaggggatccggctgaatgatggccacgtcgcgtccctgggactgctggcgcgcaaggacggcacgcgcaaaggctacctgagcaagcggagttcggacaacacaaaatggcaaaccaagtggttcgcgctgctgcagaacctgctcttctacttcgagagcgactcgagctcgcggccctcggggctttacctgctggagggctgcgtctgcgaccgcgcgccctcccccaagccggcgctgtcggccaaggagccgctggagaaacaggtgaggcgagcgtcgcgtcctgacctccctgcgtcccggccgcggccctgggggctcagggccttcggctggctgatggcgcttgaactttggcccctctactcttggcgccctaggcgctctctgcaccctcagcgagaggggaggcttgctcccagccaggcgagtgactgcggcgggcagagggggcagggattgagggcggggagtagatgtgggctgcggctgcccttcgccggacgagccccgtgggaggcgggtacagaggggccgacacctggagatgcagaggaagatggggtcctaaggaccagagacgatgagtctggacacacgtccagccaaaaatggtgctcccaacccccactcccaccgcccagccctaatagccccgatcgtctgttctacaccgggaacgtgtaattccccgcgcttaggcatgggaagggcaagacggaggcgtccgagcgctgcc

SEQ ID NO: 26872 - DNA, 1460 bp, Artificial sequence
  DNA replication origin
tctgtacaatggagctcattggggaaaaaaataaacttactacattgggttgcatgacgattcaatggcttaattgatctaaagcacttagaacagtgccccttccctgaagttttcttggcttctgtaacagacttccgaataaaagagtttagataaagaaaggccagattaagaacctcaatcctgcaaactctgcttccatgaagagagcaaatgagaagaaaagatggtgatagtgtagggaaaattaagactgaatgaaaaggcttagccatctagcctattttcattatttgtgaagaaaaatcagcaccactgagtccttggggtccctaggactggaacgatggcactagagggaggactaaggttaacaaggccagttcctcccccaaaatgctcccactccaggaacacaggcctgcctcactgtgctcaggacaggggcagctccattcctccacagcagagcttctctgtggattcttccgtgacctacacagggctgcctggtttccaagcccttccctagggctccaaactagggtgtgtgtgtgtatgtgtgtgtgtatgtgtgtgtggtgtgctgcatgtgttgtgtgaggtgtgatgcgtgtgtgtgtgcagcccaggtttggtctgtgggaggggtgtgttatgtggtgtgtgtgtggtgtggtgtgtgtggtgtggtgtgcatggtgtgtgtggtatgtgtggtgtgtggtctggtgtgtggtgtatgtgtgggtgtgggtgtgtgtggtgtgtaggggtgtgtaggggtgtgtgtggtatgtgggtgtggtgtgtgtagtgtgtgtggtgtgtggtgtgtggtgtggggagtgtgggggtgttgtgtgtagtgtgtggtgtttgtatggtgtgggttgtgtgtgtgtgtggcggggggtgtgggggagtgtggggggtgtgtatgtggcatgtggtatgtgtgtggtgtgtggcatgtgtgtggtgtgtgtgtggtgtgtggtgtgtgtgtggtgtgtgtgtggtgtgtggcatgtgtgtggtgtctgtgtgtggtgtgtgtggcgtgtgtgtggtggggtgtgggggggtgtggggagtggtgtgtgtgtagggtgtgtggtgtgtgtttggtgtgtgtggtgtttgggtgtgtggtgtgtgtgtggtgtgttggtgtgtggtgtatggtgtgtgtgtgtggtgtgtggtgtttgtgtatgcggtgtgtgtggcgtgtgtgtgtgcgtgtgtggtgtgtgtggtgtatggtttgtgtgtggtgtgtgcggtgtgtgtgtgtggtgtgtgtggtgtgtgtgtgtggtgtgtgtggtgtgtgggtgtgtggtgtgtggtgtgtatctgtgcgtgtgtggtgtgtgctgtgtgtgagtgtggggtgtgtgtgtgtgtgtgtgtgtgtgtgtgtgtgtgtgtgtgtgtcgggggaggggtat

SEQ ID NO: 26873 - DNA, 1053 bp, Artificial sequence
  DNA replication origin
gaagcgcagagctccgctggtgccacgtctatccccttacatcctcctaggacccggtcggtagtcgtcgccccagcccgccgggggcgcagcgcccgagccgcggccctcgagacgggaccgagagcatcatgggcagcactgtcccgcgctccgcctccgtgctgcttctgctgctgctcctgcgccgggccgagcagccctgcggggccgagctcaccttcgagctgccggacaacgccaagcagtgcttccacgaggaggtggagcagggcgtgaagttctccctggattaccaggtgaggccgggcgcccggcagcgctcccttctccctccactcccaggtctcacctggacactggctagcccctgactggaggcgctcgaattagccacaggctacagggaggctgcatggggtgggagtccccggagaccagttgacttccccgtgaggaggaaggtttgggtcatcagggcccacccgagacgagcctggccagcgaggaggtagtcagcgccgcaggtgcgagcccgggatggggacgccagggcggatcccgcagcctggggagctggccaaagagatatccgcaggcccccgagacactaaccaacggcagttctgatcggctggacacaggctctctaaccccagtctcttagaccaccttgtgccttcgagtactgaaaaatggcagcaagaggaagtgggctcatagttttagtttattcctcccctctccagcgtttaaagttggagtgaggtgagggcagcagaagtgagaatgggcactttggaaaggagggatcagtgcagccattgaggcctggcggtgtttacaaggagcggtgtggctgcaagacttggctcttgccatatggcttagaaaagctcagttcctgtattcctgtctcctttgagagatcccgtggcccacaggtgacaggagcaggtcttgagtgagtagtctgccccgatatttagtgagcaggtctagggttgggggccaagtgggcatcatactcagacagctatctgcttgtggacg

SEQ ID NO: 26874 - DNA, 962 bp, Artificial sequence
  DNA replication origin
ttatcatctataaaagtgtaataagagatttcatagagtttttgggaagatgagataaatggaaagtggaagcctcataacaggtattccgcaaaagtttgtgactgaaaatggcaggctgaaagaaaaaacaaaaggaaggaagaaaagggagggaaggagggaaggaggaaggagggagggagggggaagaaaggagggaaagagggagggaaggagggagggaggaaaggggaagaaaggaaggaaagaatgaaggaaggagggagggagggagagagggagaggagggagggaaggggaagaaagaagaaaaggaggcaaggagggatgggggaggtagaggagggagggaggaaggaagggagagaagaaggaaggagggagggagggagagagggagaagaaaggaaggagggaaggagggagggagaggagggagggagggggaataaaggaaggaaagaagggaagaagagagggaggggagggagggaggaaggaaggagggagagaaggaaggaaggaaggaaggactttcatcttggcatctaggcataagcttgaatgtaccagtgaacaaggaattgggcacgggaaaactgtttcctcctctgggctgaaaggctgagctgtaatctccttttggatcctgagagaagatgttgctttgctggccgacaaaacggcaagcagtacacatttttacaatcatgtcattggcatgggtaccccgtgattagtgcttagcagctccctctctgattctcctctgagctgcccaagaatcctgtatctgtatttctcctgggtactccagggttgtcacctgccaggacagcacttagtgacttcaccctgaacccagagttttttagatctcattctattaagcctcagttgtcctgtatcttatataagcacttaaaaggatatatgtcatgcacaaataaatctcagag

SEQ ID NO: 26875 - DNA, 1201 bp, Artificial sequence
  DNA replication origin
cggccagggccagcgcgccgcggctgaagggggcgctcggactcctctggggcggcgcgcagccgggacagtctcgcatgacgcccgcgctccagcggccccgggacgcggcctcaccctcaacccctggcggtctcagcctcggtctttgtgtctcggtcggcgtcgccacgtcatgggcttgcaggctgggagcagcgcgggccgggaacgcggctggggagagctgggctgggcttctccaccgccgcccgcccggggcgctcaagctggcggggcgcacgggcagcaactgagcgcaccctgggggaccgagggggcggtcccggggaggggcgcggcgtcgcgccaagggggtgccctgccagaggctgcggcggaggaaagtgggagtcagagcgccgccggagccccgggaaggcggtgtccgttcggtcccaggtcgcggctgcagcgccgaggggaaagcgagcggaagctgcgcgctggagggagcccaccacccggagccacccgcggggttcgcgtctccccactcccctatgctgaaggtgactgcggcccccagtggcaagcaggggcgaagagtgtcctcggctctcctcttcccagggagcactcggggcttcggactctgcagtggtttgcaaggccagggccaagtggtcacttcactcactgatttcttcttttggctggtgtcggcttaattgggatccagattggaaagactgtcacgtgaccacccctccctgtttctctccccccccacacacacacacatactcactcattcacacacccccaaaccccacgaaactgggatgggtttccaaaagcttactggatacatggatcagaaatggaggccttccgtgtcaccctgtgtgctggagtggagccgaaacacagcagctgcctctggtggccccatctagacagatcctgtccctgtggctggggaagctcacgttaacagcactttgcatccccaagacaagaacaacacaaacaaaaagggtgagggagggaatcatagtttcggggccatggaatctcatttcaaaaggaaagcaacacccccacccccaccaccccacctccttccctgccaccgagttaccgaacagagctgctaaggagcatacctccccagggacagagccctctcgggggctgtggcggcttttccctggccagc

SEQ ID NO: 26876 - DNA, 1659 bp, Artificial sequence
  DNA replication origin
atgacgtggcgacgccgaccgagacacaaagaccgaggctgagaccgccaggggttgagggtgaggccgcgtcccggggccgctggagcgcgggcgtcatgcgagactgtcccggctgcgcgccgccccagaggagtccgagcgcccccttcagccgcggcgcgctggccctggccgggactgcagccaggtgggcgccgcgcgtgtgagcgccgcgcgtgtgagcgcagacctggactcgggcggcggaggcgaaagtcgctccatccgcggggtgcaaccctgggcgcggaatccgggctgccgggtgacagtgaccagctgactctggagcctaccggaggcgcggcatcggaggccgtgcggaccactgccgaacagccgctggagacccgcagagaagggcgggccctgcgcccggggcgcctcggaggtaagttcggagagcccgggccgggcggagggcgggagcgcacgagtgtgtgtgtgtgtgtgtgtgttcgcggtgtgcccgcggctcggtgcacacgcgcgcgggttgtaaagtcaggagctgcgggagcgcctccctgcctcggcttggccccggagcattgcgggccgcggaggtgtgggggcccttgtcgctgcgctcagggcagcggcggaaaaggtgtgtgcggatgcggggcggggccgcacctggtggacagagcagggattcgggaagagaagccacggaagatgatcatgcagtttggggcaagttttcctggttgagcatcgcttcaggaaacggtgttttgagggttaaatatgtgagctatctgtgcaaaaagcctgacacatcagaggcgcgaagtaagatggaaagctggacaagccccaggtggaccgaccggtgcatccaattcttaaattgagatttccagtcacgttgatgtggaatgggatcgttgttcttcccgagggtttgataaggatgctcaacttcacctgtcagaaagcacgggagctgggcctggcccgcggggagcgtaagctcgctcacacgcggtccaactcaggcaaatgcagcatgcccgacctgctctgccgccatccctccgaaagcgataatttccttgggctaccgaatccatcagagtagtcatttgtcccctcgccggcggtgcggggagcgtaacatttgagtagcctaactctcacagcgcgcactccagcattgttttgctggaagattgttactgtggtaagcggctggtagcctgtgttaagcagcagggaagataaggttgtgttcaggtgcgcttaattcagcgggaattaagttatgtttggtgaagatctaaggagaggaaaaatccagagtttctgctataaacaatgtacatctatcttaaaggcttctcacccatttctcttgtggatggagccatgtggttgggaggtggtagaaccatgccgccatccctgaggctgtggttggaggcctcattgctgggctctgcaattttatgctctgtgatattatgcatggcatgaagagttgctaggaggagtgtggaagcagcttatgtggccagttatgcatcctttattccagcaaacgagctgccactgctacctctctctgatggagagggacggtaaatggcccttccttgtcatttctcagac

SEQ ID NO: 26877 - DNA, 1275 bp, Artificial sequence
  DNA replication origin
gggtgggtagtgagtgtgtggggtgtggatggggtgggtagtgagtgtgtcgggtatgggtggggtgggtagtgagtgtgtggggtgtggatggggtgggtagtgagtgtgtggggtgtggatggggtgggtagtgagtgtgtcgggtatgggtggggtgggtagtgagtgtgtggggtgtgggtgtgggagagtagtgtatggggtgtggatggggtgggtagtgagtgtgtggggtgttgatggggtgggtagtgtgtcgggtatgggtggggtgggtagtgagtgtgtggggtgtggatggggtgggtagtgagtgtgtggggtgtgtgtggggtgggtagtgagtgtgtggagtgtggggtgggtagtgagtgtgtggggtgtgggtgtgtgtaggttgtggggtgtgggtggggtgggtagtgtgtggggtgtggggtggatagtgagtgggtgggcgtgggtggggtgggtagtgatgagatgtgggtggggtaggcagtgtgtgtgtgggtaatgagatgtgggtggggtaggcagtgtgtgtgtgggtgtgtgtgggtagtgatgagatgtgggtggggtaggcagtgtgtgtgggtagtgatgagatgtgggtggagtaggccatgagtatgtgggatatggtggcagtcagtcagggaatgttctctgtgttgtgtgggactgagacgtgggtagatagtgtcggatgtgggttaaggtaggtagtctgtgggctgggtggttggctgtgggctcccactgtttgtgccaatgacatcggagcgctgactgccctgtgctatgacagatggtttactgctgctccccttcctctagcctgttgcccctgcaggcatggccagggtctcatttatagttttgtcctggtgaggagcacagtgtctggctcaggttgggtgttccctagagctattgggtgaaagacggaaagaacacggtgattctgaagacgctcagcaggtacgggagaagcctgactctgtagtcacagcaggaaggaaaaagtatttggttatttagttttccataacctcagcctgagccaacagtatactatggccaccaaaaagatccttagctgaaattatggtgtctagaatgaggaatggaactcctgttcttttctgcacttcaggggaaggagacacaatgtgagaaatgcatgagccaattggaaattatttaaagaaccatggatcattagccccaaggtgtgtctagtccagaatttcccagttagccgtc

SEQ ID NO: 26878 - DNA, 1688 bp, Artificial sequence
  DNA replication origin
tgttttaaaaccatcccaggtgaatcttacctggttgaaaactcctgcgtgataagcgctttagccaaggcacaggcggagggctgttgagcaccacggagggaacagaggagactctgggacctggcgagggactggggcagaagggctgttccaggagccggcgtgggtgagcaggactgcgggaggatgtgggcagccgaggcagcaggcctccaagcagacgggtctgcgggagacacaggggaggggaggcctgggctacggtgttggcttgggcagtcagttgggcccgatgggggcctgatgtgctgcaggcaatccccagtctggcctcatgattttcggatctctgctgctcaccggctcctcctcctgccagcttccctgccgcgctgggcatggctgttcctcagcaaggagctctgaagccaggtgggatggaagtcctgtgattggcctctcagagtctttgcggagcttttccacatgggggtgggggtgacagggtgctgcagtggctgtgtttgcaggtcttgttggcaggcaatgtgcggcatcatggggtcagcttcccaaacgccagagaggggtggatttgttggctgcttagcccccaaaatatgcatggagatgtgctgggatgttaagaaagtttaaaccctgaggacagagctaagagacacttaggagagaacagagctaagagacacctaggagagaaagagtgtggagattgtgagtgagcctgtgtatgtggtgtatacgtgtttgtgaatgtgtgtgtgtgcagaggtgtgaatgtgtttgtggatgtgtgggagcttgagtacttgtgtgaattgtgtgtacacatgggtgtgtggaagtgcgacagcgtatgtgtgtgcagctgtgtatgagtgtaggtctgtgtgagtgtgtgtaggtgaatgtgtgtgtgcttgagagtgtgtatgaatgtgttgtgtgtatgtgcatgagcgtgagtctgtgtgtttaggtctgtgtgagtgtgaagctgggaagctgtgcaagtgtctggatgtgtgtgtctggatgagtgtgactgaagctgtgtgagtgtgtctgggtatatgtatgtccctgagtctgcatgactgaagctgtgcaagtgtgaagctgtatgagtgtgtgggtgagtctgtgtgagtgtgtgtgggtgtgagtctgggtgtgaagctgtgtgtggatttgagtctgagtgtgaagctatatgaatgtatgggtatgactgggtgagtgtgtgggtgtgtgtgggtgagtctgtgtgtgtgagtgtatgggtgagtctgtgtaggtgtgagtctgggttagtctgggtgtctggatgagtctgtgtgtgtgtgggtgtgtgtctgggtgagtgtgggtgtgggtatgagtctgggtgtgtgtgtgtgggtgtctggatgagtgtgtgggtgtgggtgagtctgtgtgggtgtgtggggggggtgtgtgggtgagtgaagctgtgtgcgtgtctgtgtctaggtgagtctaagtgtgaagctctgtgggtgtgaagctgtcagtgtgtctgcatgtgagtgtatgggtgagtctgtgtgagtgtgaagctgtgtgagtgtgtgtaggtgtgtctgggtgaatctgagtgaagctatgtgaatgtgtctgcgtgtgagtgtatgggtgagtct

SEQ ID NO: 26879 - DNA, 1098 bp, Artificial sequence
  DNA replication origin
ctcatttatttatttatctgaaatataaatgatctcatttgacagataaggaaatttggaatcagaaaaggtgcctggcctcccaaatccacacagccagaaggtgaccaggcaggaggcagacccatgcctgttgactccaaagcctgtgtgatttcttccttgacgtgctgccatttactgctggggaagtgggaagcagggggagggggaatgacccaaggatgtgggaggtggaagggacagggaagctaggaatttcatcatttgctgagagagacagggaagggggtaagagagagggtcttcaatagctggggtggggaactcagcagggagcggggtggggcaggctccctggagggagcggggtggggcatgagggaggggggtggggcaggcagtgcccaaggcccagctgaccaggggctcatggggcccagtttctgcctaacaaaagggctcagagccccagccaggaactgggggcctcagactcagaggtacaggggaggagccgggacattgcctccattaggaattacggagtctcacttgtcccttctcctattttggccagggtgtttctgtgtgtgtttgtgagtttaagtgtgtgactgtgtgagtatatgtaaagtgggaatatgtgtgagtgtatatatcagtgtgtgttactttatgtgtgagagaatgtattatgtgttgtgtgtgagtatatgtaattggtgtgtacgtgtgtgtgattgggagtacatgtaagtgtgtgtgactttggatctgtgtgagtgtatgtgtgactgtgttatacatgtgagatgtgtgtgaatatgtgtgagagtgtacatgtgtctgtgagtgtccgtgagtgtgcctgggtggttgtgtgtgtgtgggtgtgacagtgtgagtatatgtaagggggtgtgtgagtgcatgcacttggcaaatgggaaaagagaagcttccctgggccagcagctggaatgcaaatgcatccctctgaaataaatcaactgtttgcaccatgggccacagagtcaggctggccttgagcatttaacaggcttccagaggctctcaggctctgctccccatgac

SEQ ID NO: 26880 - DNA, 985 bp, Artificial sequence
  DNA replication origin
gggaccgcacgagggctgggtcccaagggccagaggcgaggtaagcgcgcggcgcgccgcgggcccgcgtcccggaagcggggtgggggcgcttccccgagccccgacccgcccctaggccgcggatccacctgggagcggccaggggcggagaccgaacccgagggcgcccagggcgccgagggcgggactggactcggcttgggcgtgagatggcggcggcagcggtgagcagcgccaagcggagcctgcggggagagctgaagcagcgtctgcgggcgatgagtgccgaggagcggctacgccagtcccgcgtactgagccagaaggtgcgaggccgcccgtagcggaagccgcggcggacagaccctccgaaggcctggcggccagcgattgctgatctgtgcatggtccgtgctggcgctgggctaggcgcccccccaccccccggcgcgcgcacgtttcccctcccggcgcgcgcacgccccctagtcgtggtctggacgctcttggcactatggcggggagagggcccggtagtgaaagttgtggggctaaagagcgagaggacggcaggggttgacagatttatctctgggaggggagtttgtttgcatgggtggctcttttggtgctcgaaaaccctccgtggggatgacggtgctgtggtgagagcacggtgagaacagaaagttgtggtagaggagatgggtgaacacctgagtgcccaggttccctcagtgaggcctaaagttaatgagctacgagtaagactccggttatattagtaaaatggccagagaaagatgcaggtgctttagacgagggaacaccaaaaaaggtgtggagatgccaaagggcagaactcagaggttgactggacttcactaagcatatggagggctaaggctgtgtctcagtagctccagggcctaggcttttcctgtctcagagttggtcaacattaaatgctttttcttgagtg

SEQ ID NO: 26881 - DNA, 1084 bp, Artificial sequence
  DNA replication origin
gctcttcccttgttgctgcgagagcgagagggccgcgggcggcggaggcagcggggccgggatggaggacgttaactctaacgtgaacgcggaccaggaggtgcggaagctgcaggtgccggtgaagaagctggggaagcagcacgaacagccgaggagccgctcgcgctgtgctgggccccggctccatcgcggttcgccggctcctccactccctcctacggcgcggggtcccctcggggcttccccttgggtctcagcgcaaagtcgggcggcggggccggatggacccgaggcggacgaataacgaggagctgcgagacgccaccttcttgctggcggcgggggagggcggcttgctagacgacctggagcgtctgtcaggctaggaggagggggaggagagctggtgagcgccgggcgccgggcggggctgggcggggacgccccggtggcggaggacgtcccggaggatccctctggtcgggcgcctggctttgtgtagccagccaggtccgctctcggcgggtactcgtggtcttgctctggcagaggggaggtcagttggagttgggggttcgaggcttgcaagtacagggcttgtagctccttctctggattgtggaccctctgggtgctgggccctattggggttggtgggttggttggatccagaagggctgttcgccgtggggaggagtcggaggtgggaaactgctttgtaggcagggattctgctttgtataggagaccagctttcggatgctggtctgggcattttggatgttggggaggggtttggcttgatgaggtatcaccaagttcggggggtgcagaccaaagtcgccgacgtctatgcagcggttggtgtttgggatcaatttctagcgtggatggggagaccatgtggatcagcactcccctttaggtagtggggtaaagcttgctctgtgtgaagaggtcagaggatggtggtgttttgtgtgaagaatcaagggtgaaacaagagccctggctctgatattttaaaacaagaattgagtctggcattttgcagagctctgaattgacatttatcacatct

SEQ ID NO: 26882 - DNA, 1630 bp, Artificial sequence
  DNA replication origin
cctgcccgcccccacggcctgtccgggtgacacagcagggaccccggaggctcctacctgacttttggtctcaccgtgaacaccccgcccccgaaccccgagccctgcccctcccccctaccctgacccccgccagctccaggtcctccacagtctcgcccgcccttccagagccccgccccgcccctggccccgcccccgtgggcctcaggtcctccagtctctcctccctccctgagccccgcccctccccttgccccgaccccgcgagccccaggtcctccacagtctcaccctccctccctgagccccgcccctcccctcgccccgcccctcccctcgccccgccttgcaagccccaggtcatccagtctctccctccctccctgagccccgcccctcccctggcccgggtacccgagagtcccaggccctccagtcttgcctcactccccgagccccgcccctcccctggccccgcccccgtcctgatccccgccctgtccgcgagtccacgtgggggagatctggttccagcccccgctcggggcagctagctggtcctaccgagagcaaaccccagcttagcatttaaggctctgccctgcatgactccagcctcgctcgccccggctgctgccctgctcttcagctcaacagaactcttgtccgcttcctggaaacactttctccccaagagctgctccctgagcttcagaagaacacccagtcgcgtcctttctgccttcataccatgatgctccgtccagctatgacacttccacttgtatgtcagagaaggggacagttaggcctgtttggaaggcttcaattaatgagaattaatattctaaaaaatataactcacctgtttcacatgccagtagtaaaatgacgttgacaagatgctcaaccttggacaagttacttaaactttctctacctcagcttccttctctgtataatgttgatgataatagttcctacttcacaaagttgatataagaatggaatgaattaatatttgtgaagcacctagaatagtgcctggcatatacaggttatgtgtgtgtggaaagagagagaagggagggaaaaagaggaaaggaggggagggggataaaggaaaggaaagataaaagagaaataggagaagagagagagggagaaagaaaagaaggaagacaggaaagaagggaaaggcagactatcttagggtgggttcaaggtgttatctaatcactcatgtgcagtcagctgcagttttttgagaccatgccacagccaggacacttggaacacaccggagagtgtgtcgttgtgttattgttggtgtgaatgattcaggtacacttttaaacagccaggatgccggctgaaatctagaaaagtagacgatagtctgggcaagggttccctgaagatccttgaggaatgtgacacagtgactgctgagttagggaggctgctccgcatttcagcttagggagaagaggctggaagatggcaggataatgtgagctaagtgggcttgaaaccagacggcttgagaggagcgagtacggcaagcagggcccgctgttgagccccccttcctagcccctgagatcactctggtgcctgtccacca

SEQ ID NO: 26883 - DNA, 1510 bp, Artificial sequence
  DNA replication origin
gtgagactgtggaggacctggggctcgcggggtcggggcaaggggaggggcggggctcagggagggaggagagactggaggacctgaggcccacgggggcggggccaggggcggggcggggctctggaagggcgggcgagactgtggaggacctggagctggcgggggtcagggtaggggggaggggcagggctcggggttcgggggcggggtgttcacggtgagaccaaaagtcaggtaggagcctccggggtccctgctgtgtcacccggacaggccgtgggggcgggcaggggggcggggccgggcctgaccacagcggccgagttcagtcctgctctccgcacgccaccttaggcccgcagccgtgccgggtgctcttcagcatgtccttcatcccggtggccgaggattccgacttccccatccacaacctgccctacggcgtcttctcgaccagaggcgacgtgagcagtggggctttggcgtccgggcgcggggagggagtggagtggagtggagtggagtggagtggagtggagtggaatggagtggaatgaggggcgggatggaggcttgtgccatttttctcttaagattcgttccgtgagagtgcctatgggctcgagtcccgcctcgtaactttctagctgtgcacgttgtttaacttttcagcctcattgtccgcaggtttgctgagaattaaatgcaaaatgaaatgaatcgtgtcactctcccagacaagcagagcaagcaggattctgttaccggaagctgcagcacacaggcatgctgcctactccgaggtggttgcggtgtgtttctctcgcccaagaggccaggtcagggctggtggttcatctcgctggatagcccctaaccctagaacccgggaaatgataacccggtatgcgtagcaggtcagaggggcacgcgcgtttcttggcttagagttgtgagatctaagatggcaagtgtctctgcctatagctgaaattctttcagctcctggtgtgggctccctggcattcccctactgatcagaagaaagagggcagggaaacaaactttgactaagtcagtgtagtctgattggtagaaagaagtatttgaaaactgggggtttatcagcaaatagataataagaggttccctaggttggaaaagcagattcccttggatttgttgatgatatttttggcttagatttctgctcccaactttaaaggtaaactcctgattcatctctgtaagccatagaaccccagaatcaggaaatgtttgctaaacgaggggcctggcagttggcttcttcttggaaagtggggttccctccttcccccatggcttgtcattggatgcaagtggctggccttttgtgggcctgtctgcggtaagtgctttggtctagaagagtcaacttgtggtttcacatctggccgggctgaccagatgttgcaaggatacagaaagtggacactcaatcccctggaggacacaatctgaggca

SEQ ID NO: 26884 - DNA, 1228 bp, Artificial sequence
  DNA replication origin
gctccgctcagagccccctctcggctgctggcccgggctcgcccgcgccgctgggggctctgactcctgccgagccgggcctgggcagcgccccccgcgccccgcgagcccgcgcccccgtcaccgggaaacgccgtagccggcgatccgcggtcgccctgggctcggcgccggcccagccaggaccccgggagcgcacgggacgggcctcgccaggtaaggaccgcgggagcatcccgggacccgctgccgcggcgcctgcggggctggagcacagcattgtcggtgccgccggggcgtcgcgcgggtcaccggccgcaggcggaggatctgctcgctgaagtcgggccgagccctgccgcggcggcgaggagacccgcgtggacactgggaccgatcccctcctcggcggcactgcgcccggggcgcgcctcggtcggcggggagggccggacccgcgcggcaggggacagcagcctcggtgggagccgcacgggagccgcgtcgcagcggcccgagttccactgcggggctcggggctcagaaaccgggagagtgtggtgctgtgctcaggcaccctcgctgttctgagcctcacctccccattcggggatcctcggcctctctgccattgaggggtttggggagtgtgagttgaaactgaatcaaagttagaaagtccttctcgtcacgttcagtgcctaaaattccctctcctgtggctgacagtcacatagaacagattttttctcaatgtaactgatgaaggtcagcacggatgtaacttctggggaaagttctgctggtggcagcctttctaaagaaatgtcaagtctccgttggattttgttctcatctgtggcaaaaaccctaatccacgctttcatatatttttccgtatcagtggaggcgtagacctatcctgggttctaatgttttggggaatgtattatggagccgaatttggtaagagtctccgtgcccgcagcaaaagttctggaaaagaacctgttagaaaatccaagctgatgcaccgcctcaccaggcgtgcaatagggccacagtggcctgtcaggatgtggctcgggacccaggaaaaaagctccatcgaagcctgtgctgccttcgtggggagaagttccattctaacccactcgtgcatccgccggcaggttcttctcagttctcctctgattctaatcagaggattcgagtttctggattaaca

SEQ ID NO: 26885 - DNA, 1950 bp, Artificial sequence
  DNA replication origin
ggaggaggaggccgaggagggggaggaggaggagagaaaggcggggacggcgagcggccgcggcggcggggagagcggagggagcgccgcccgcccgcgccgtcctttgtgtggcggcggcggcgcctgggcctgaccgggtccccggggctgagcgccgggctccgcgccgcccctcccgcgcccctgccaagcgggcgcctatcctctccgagcaagatggcaaccccggcggcggtcaaccctccgggtgagtagcggcctgggccccgccgcccgccgcagcccgcaggccttgcccggggccggagcggaccaggcgcgccgggcgcccccgggggcgcggagccgcagctcggcgcggtgggtggtggagcggctgtcactacgcggcagccgcagcatcagcaccagagcggcatctgcatcccaatcgctgcccatccggtcccgggcaggcgccggtccggacccgcgggcggccggacgctggcctcgcatcctcgggaacccgaagggcaggcccgggagcccccgaagttctgaaaataaccgcctttgccttccccatcccacgcatttttctcttccggtcccggcttttgtggcatcacggcgtcagccagtcctggctggtggagggctccgcgctgacggagggaaaagtttggagctgggattcaacagggtacaactcccgggactctcccctgcccgccccgcccactaagcgctggtcctttgcgccctttgcgactggctgctgtgtgtcctaaccctccgggggcacaaaacacccagcctgtggtcaccagcgtggagcagccctggtcctgcccaggtgacatcctctgctttctggtctgacctgtccccagggtgcagtctgtgacaactgagctcattaggaaatatttcaaaaatggaagagttcttgatcaagtggcaacattgacttgttttggtattgtagtagggaagttccgttttcactgggaaagttccctacctgatgagcagggtgtgggagaagagaaacgtgaacatctaagctagtacaaacttttgggtgttgtgcagaggctgctgtgggcacggcaggttgctgggtccctgtggaagatgcagggagagtcacagagggcggcccccaggaaattcccagcagagggaggtcatgtgttggagatagggagggtcgggggaggaacagcaatgcctagcaaagaaaagtgtctctcatcatagaattaggaatgaaagatccctttcatctaaggcggccagggaaggcttctggagattggacatttcggctgaaccttgaaaacgggaatgtttgaatatacagagccagtagcagaggggcattgcaggcgtaagtaacagtggacttgctctaagcaagtgcagaggtcagtgagtagttggtgcactggggatataagaggcagcagtgggatttaacactgagttgtttggatgtgaccaggctttaaaggacagactgaggagtatggactttctctctccacattaagggagagtcctctgcacacttcctaagaaccagaaaaataaaataaaatagaaaagagagagagagacagagagagagagagagagacctcaatggtattgaacaaggaaatcgcatgatcactttttctggaagactgatttgtcagctatgtctaggaaacattctaaggagggaacaagacttgagacagggaggccagcatgaaatgaggcaggtgctggggaggccagaattggtggccatggctggaccagagaggaaggaatgcaccactgggcgggtagaagagttccagatttggcactgattagatttggagtaagagtaaaggaggaggccaaggagagacaaaggggaggtgtccatggagacaccaaggtgaagagcctgtgtaattccaaggaagg

SEQ ID NO: 26886 - DNA, 874 bp, Artificial sequence
  DNA replication origin
ggccgcccatcatctgggatgtgaggagcccctcctcccggccgcccagtctgggaagtgaggagcacctcttccaggccgtcatcccgtctaggaagtgaggagcgtctctgcccggccgcccatcgtctgggatgtggggagcgcctctgccccgccgccaccccgtctgggaggtgaggagtgtctctgaccggccgccccgtctgggaagtgaggagcccctccgcccggcagctgccctgtctgggaggggaggaacatctccgcccggcagccaccccatccaggaggtggggggcagcccccgcccggccagccgccccatcctggaggtgggtggcagactccgcccggccaggcgcccagtccgggaggtgaggggcgcctctgccgggccgccccgtctgggaagtgaggagcccctctgcccggccgccaccccgtctgggaggtgtacccaacagctcattaagagcgggccatgatgacgatggcggttttgtcgaatagaaaggggggaagtgtggggaaaagaaagagagatcggattgttactgtgtctgtgtggaaagaagtaggcataggagactccattttgttctgtactaagaaaaattcttctgccttgggatgctgttaatctataaccttacccccaaccccgtgctctctgaaacatgtgctgtgtccactcagggttaaatggattaagggcggtgcaagatgtgctttgttaaacagatgcttgaaggcagcatgctcgttaagggtcatcaccactccctaatctcaagtacccagggacacaaacactgcggaaggcggcagggccctctgcctaggaaagccagagacctttgttcacatgttt

SEQ ID NO: 26887 - DNA, 1487 bp, Artificial sequence
  DNA replication origin
ggcgagggagctggcaggcgagcgcggagggcggctgcagcccgcccgcccggcggcaggaggaggcggaggcggaggagggcaggaggcggggccggcccggcgggcgcggcgctcggagcccgggcgggtcagcggcggccccggaacccaggcgaggcgcgggcggcccgggcccgcgcgcggcacacaaagccggcggcggcgtccatggccggctcgtgcgcgccgccccccgctcccgttcccgctcccgcacgcccgccgccgccgccgccgccgccgccacttccgggttaccgcgcggcggcgccgccgctgggacgcggcgcagagccgggcatcggggcggggcgctgcgggcaagggcgcgggcaccttccccggcctgggaagcaccttctcgacctgcggccgacgggggcttccaggcggctccggggcccggagaagctgggtgccggggctgggggctctgcgcccggacagctgggccgatctgcagaggggaccctggagggggtgcatgtgtcccggggtggaccgctcccctcccctccccctgggattccctcccccaaatccaggtttctcccgtggatggaggttcttgggagtctactgaaaaggaaactaaggggtggacaagagttggaatgtgcccgaaatatttggctctcgtgtgtgctgctttctgaactggctcagtaccaaaagttctcagcaccgtaaggggtaccggggttgtgggatagggtggtcatcagtgtgtttcttattaggagaggctgtttctgtataggtagcaacagcgtttcctttctaagggcatggttttacccttagtacatttctgtatctataaaagtcagctgttagaacaggagggtactgtatttagcaacaaaccatgttgaggttgtcatttctaatcccacgtgtggcagattttccggtagtaagtatatactaggtatcgtttacagtgtttgtgtctctagagttgttttgggtccaggatttttcagtggtcttagtcatgaacgattcttatactgctttaaatctactgtaatcttggcagccacctttacatgatttttcaaatataactctcggtgccttgaaactgtgctctggtgccagtttccacagagccttctatacttcctttttcccgcctgatttggcagctgaagaattccctttcaggaactgacaggagatacccttcctggactgccagcagggcagctagagactgggaggttggcacaatccctacgctgggtctgttgttttaactcacagatgtcctgagaattttacctttcgttgtgactttccacaggacgaatattttgagcaccgtcatctaaatgaattgccgatactgatttcattaaccttcaggacctcgcttttaattttttcttttttaagagacagggtcttactgtattgtccaggctggactcccaactcct

SEQ ID NO: 26888 - DNA, 1342 bp, Artificial sequence
  DNA replication origin
gcccggtgcgtgcagcctgcacctcagcgagcgcgccgactggcagtactcgcagcgcgagctggacgccgtcgaggtcttcttctcgcgcacggcccgggacaaccggctcggctgcatgttcgtgcgctgcgcgccctccagccgctacacgctgctcttctcgcacggcaacgccgtggacctgggccagatgtgcagcttctacattggcctcggctcccgcatcaactgcaacatcttctcctacgactactcgggatacggcgtcagctcgggcaagccctccgagaagaacctctacgccgacatcgacgccgcgtggcaggcgctgcgcacccggtgagcctgccggggtcgccaggcctgacttccagctgtggggaggcggggtgggggtctcttggggcccctggggcggcctgccaggagaggggcccctcctccggggctgagggccagcggagagccccttggccgccgtaaattcgcttttcttgtcccaccctggcttgctcccaccctctccaaaaaccgcgccagccttcaggttcctggagagctcggactcagagaattttgcctgctttggctcgcctgtgtgtcgccggcccaccggctgggtcttttgtggctccggtcaccgcgagtggcagagtgtgggtgcttaagtaccgggcagaaagaaacaacttggttcgagtttcgtttgtacgagctgaagtgaccttgggcaaggcacatgggtttctagactcagtttccttccctgtaaagtcagtgggcgagacaggatggcctctaaaagactttctggttgtaaagtgcgggcaggacaatgtctgggcaaccttggaaacagctggagcgtcaggtggagcggggagtttgcctcctggtggggcaaagtagtggcactgtggggcaggaagttagctggtagctgtgggcctggcaccttccacacggcctccataacagtccaggataagtttgaaacttgcaggggctgggaaatctctgaccttaaattagcattcacagaaggactgaaaagtgtttagggtgggccatctgtgagccaggcacaaactgggggcatggtttaggggttagacctggttgttttataacaagcaaaccaaaaacctgacttttattcactattagacaaaagtcttatacatgtgcaggtcaggttacctgtttgtgctccagtttgggtatctgtgacctttccgacctgcctcatagcagtgatggtgaaaataacctgaggccatgtctatgatgagatttgatttcttcagatgaaagagtccccagaggaagtacaccgggc

SEQ ID NO: 26889 - DNA, 1212 bp, Artificial sequence
  DNA replication origin
ctcagccccgctggctccccgcgccgcttgcgctcgccaggctctgtccgatagcaccgcgctgggctctgcttgagcgctagctccccggccctcagccgagaggccgcttttatagccacttttactgactcctcccccgaggagcccctgacgcccgcgcggcaccgaagctccctccctcgccccccgatgaaacttccctccacgcgcccccgccttgcccaagtggggcgggggccctgtgcccgggccggaccggggcgggctctggcggcggctctgggagacgcagacctgagcccgcggagcccgggtgcgcagagtcccgcccgcagcagccaggtgagggcgctggaggccaggactcggtggagcggccgcggcggaccgcggagagcaagtccccgggcctccaaggagccagggtcgcccgtgccccgctcgcgccccggggcgccctccgaggcaaagaggcagtggaggacaggagaaaaggtctgcgcctgccacagaatcgccgcgagtcggggtcccaggctaagtctcaggatctctttttaactcagcagcaaaagagtagcccgagaaagagattttggtattggcctagcagttaatccgagaggaagatgcttgggtgttcactgaaaggcaccttggtttgaaactggattcagacatgccagttacaactgtgtacaggatcttaacccctcccagtctcagtttcctcatcaggaaaatgggttctgtgatgcttcctcactagaatggtgaggcttaaatgagatcaggaaagtccaagttctaagcacataataggtgcttggtaagttagaaacattccctgtgggtaggagggctctgtgcctctttaactggacaggccaaagttctgaagggtcaaagcaagaaggtgcggctggtctagacattccctcgcgggaggaaacagtaccagtaggaaaagttcatcacaacacatccctagggcatatggagtctcctctcaactctgccgctaacctactgtgtgaccagggccagctacttcccctgtctgagcctcagggtggtttttttgcagggaggtgaggagtgtttgtttttcttgttttgttttaatctgtaaaatgagggcgttgatacctgctctctgcctcttccacctttcagagtgtgactcagccccctttcctggttagcaga

SEQ ID NO: 26890 - DNA, 1083 bp, Artificial sequence
  DNA replication origin
ttgtgcgttccagagaaaaaggtcggcctctgacggaaaacgaaaaatgagcactcagggacccacccagccgggacagagcgcctcagccggaccaagaggaggagccagtggggcggggccaaaatggcggaggggcggggcttccagaggcgggggttaggaaatggtacggggcggggcccggtaggctagcgagggccgggaggcggggcctcggaaaggcggacaggaaggcgtgtgcaaggcggggtccggcccgcgcaggtcgggtaagcgcgtctagggcgctgcgcggcgcagcgaaaatggcggcttccaggtgggcgcgcaaggccgtggtcctgctttgtgcctctgacctgctgctgctgctgctactgctaccaccgcctgggtcctgcgcggccgaaggctcgcccgggacgcccgacgagtctaccccacctccccggaagaagaagaaggatattcgcgattacaatgatgcagacatggcgcgtcttctggagcaatgggaggtccgcggcgcgcgcacaccctcccggctcttctctgtgcgggaccctgttccctatgaccccttacctgttctgtcttgggacctttctgaccccctaacctcctctactcatgccttgaatccttactgacccactgaagccactgttgaccctccattcctcctctgacccgcgcgccctgctgaccctcgctccagccctctgtcattccagtgccctgttcctcctgccatttctcaaaccacttcaatcacggatctgcccctcactgttcagctttgctctcccttcacccttcagtgccctggttgtctttgcgttgattcttgtggtcagtgagccctgcaaacagggagagtgacctttcccaatctactaaagagcatttccttctgttttgcggtgagtgggtgggagagtgggttgcagtgaagatggtcttccttaatggttatctcagctgtcttctaaatcagtataattttagacttcctattttggtatatgtccctgctgggaattttgtgctttttgtgggtggatttattttactgagggg

SEQ ID NO: 26891 - DNA, 1016 bp, Artificial sequence
  DNA replication origin
ttcacctcggagcgcggccgtggctgcgccgccgcccgcaggggctgccggaggcttttcctgttcccgtccgcgcctcgcccccgggctcgccgccgccgccgcctcggccgtaacctccctggagcctatagaaatcttttgtgtggcgtcaccgcctttcgtttaaatcccgcttcctcctctcgcccttcctcccgccccctccgccgctcccggatgcttgcgcgatgcgctgctcctcccccgggaagctgggtggctgcgggggacgccgccgcccaacgcggacgctgccggcgtggggccggtggtcctgaactcccccgtggtcctgggccgagagactgggggagcggacaggggaaggcctgctccggcccgggggctctgcgcacacccatgggagaccggggcgcagccgcccgcgggccttacgtaagctcttagccggaccagggggctccacgcttcctccccgccaagagagcaagtctaaaaggtgacctggcttctgggctgaagggaggaggacactggatttcggcccctggtgatttgctggggccggtgggtcgtctcggtctgcgcgacttcgcccggttttccaacgccccctgccctttgttgtgtttgatccacttccacgatgggtttccgaccagcagtgcagtgtaacgaaaagaggaaaagagcactggatggggagtccgaagagtggtgctagatgcctgcccgttcctcccttgaaatacgccttatgcagtgagagcgcgggttctgaagcagatttcctaggatcagcctttctcaagccatttatgagttccatgacattgttcaagttctctttccaagtatccgtcttctcttctagaaattagagattgtgcacaggctgcttgagtacttggttcctaaacagtagctgttagaattattatgagccctgatcagcgcactttgccctctcataacgtctatttattcgtctgtataatggaataatagtggct

SEQ ID NO: 26892 - DNA, 698 bp, Artificial sequence
  DNA replication origin
gaagcggcccatgttgagctggctctgcacgtcgtgggtgaggatggagagccccttggtgcgcgcgatgatggtgtcccggcactgctcgaaggactcggcgccggcaccagaggaggcggggccctcgaagagcacgggccgcgcctcgctcgacagcagcagcaggtcagccaccagctgcatcttgcccttgcagtggtcgcagacggataccagcctcttccgcggctgcgagctggccccgccgatggcgctcgcaggagccggagaagccgcctcgccagtgggcttcccggcgctgccgctagccatcgcgcccggggggcactggcatgccgctggggagcccgctaccaccgccgctgccgcggccactgccgccgccccggcggccgtcgcgactcagctggccaaggccgcggtgccttccccgcaccatcatgccatccaccgccgcgggcagagggcactgggctgcggcggcgggagcccgggcggcgcggggtgggcccgagggcgagagaacgcggaaggctcttcggggcaaggggaggggctgcagctttcggcctcctagagggcttgcaggaaccatgaaccggggcagagcaaactcactgtccgcgctcctcgtcgccgggctgccaggaaagtcccttctgctggttcgccgccgccgccgccttcttgggcat

SEQ ID NO: 26893 - DNA, 1040 bp, Artificial sequence
  DNA replication origin
ctggtggagctgggcgacctggtggtgtcgctgaccgagtgctcggcccacgcggcctatctggccgctgtggccacgccgggcgcccagcccgcgcagccgggcctggtggaccgctaccgcgtgacgcgatgccgccacgaggtggagcagggttgcgccgtgctgcgcgccacgccgctggccgacatgacgccgcagctgctgctggaggtgtcgcagggcctgtcgcgcaacctcaagttcctgacggacgcgtgcgccctggccagtgacaagtcacgggaccgcttttcgcgggagcagttcaagctgggcgtcaagtgcatgagcaccagcgcgtcggcgctgctggcctgcgtgcgcgaggtgaaggtggcgcccagtgagctggcgcgcagccgctgtgcgctcttcagcgggcccctggtgcaggcagtgagcgccctggtaggcttcgccaccgagccgcagttcctgggtcgcgcggcagctgtgagcgccgagggcaaggcggtgcagaccgccatcctgggcggcgccatgagcgtggtgtcggcctgcgtgctcctgacccagtgcctcagggatctggcgcagcaccccgacgggggcgccaagatgtcggaccacagggagaggctgaggaactcggcctgcgccgtgtctgaaggctgcaccctgctatctcaggctttaagggagaggtcttcgcccaggactttaccgccagtgaattccaattctgtgaattagcaccccacccccataccccttcttccacccccagactaaaggaagatacttactctctgcccctctccatttataccaaagaaatcataggtgaaaccccctaccctccccaacgttaaatgctcgagaggaatcttccacaaggcagggccatgcacgcaacctgcacacgcacttggagggcccaggtgtctctccaccagcccccatgcagtagggactggaagatatgtcatctgctggttgtgttatcactcccaccccctaccccagcccgtcttccg

SEQ ID NO: 26894 - DNA, 980 bp, Artificial sequence
  DNA replication origin
gacaagctaacatgtggcccacgatcccctcctggacacaagagggcatctcgaatgctcttcccacagagactggacatttctctaatctttttcagcacagggctccggagaaccactacccattgacagagctggggagacgagtcccatgcactgtccgtccgggctggagggatgtggcgggcgactgagtttccaggggtgctgaggcacctgtgggtgctcagggaactaagaaccaccttcttaagacattttttattttaaagtatttaatgggccgggcgcagtggctcacacctgtaatcccaacactttgggaggccaacgtgggcggatcacaaggtcaggagatccagaccatcctagctaacatggtgaaaccccatctctactaaaaatacaaaaaaaaaaaaaaaaaaattagccaggcgcgatggtgggcacctgtagtcccagctacgcgggaggctgaggcaggagaacggcgttgtgtccggaattggtgggttcttggtctcactgacttcaagaatgaagcctcggaccctcgcggtcagtgttacagttcttaaaggcgacgtgtccggagtttgctccttctgacgttcagatgtgttccgagtttcttctttctggcgggttcgtggtctcgctggctcaggagtgaagctgcagactttcgcggtgagtgttacagctcttaaggtggcgcgtctggagttgttcgttcctctcggtgggctcagtgatctcgctggcttcaggagtgaagctgcagaccttcgcggtgagtgttactgctcataaaggcagtgtggacccaaagagcaaaagaacaaagcttcttgtggaaggggacccgagcggattgccactgctggctctggcagcctgcttttattctcttatctggccccacccacatcctgctgattggtagagcccagtggtctgttttgacagggtgctgattg

SEQ ID NO: 26895 - DNA, 1592 bp, Artificial sequence
  DNA replication origin
agcgcccgctgcctttaagaaaagatgcggatggcctgagtgaccgcggtgtggcagaccgggcactcgggctcgctcttctcacagatgcgattggcgcactccatgcagaagaggttgtggccacagggcaccagcgcggcaatcacttcgctctcgaagcacacggagcagtcgcggctgcctttacgccgaagcccggaggaagaggatgaagagctggaggaggagctggacgaagaggaggagcccgacgtgtccgacggctgcaagccaggcagctgtgcccccagcccgttggcataagcggcgtaggccaggcctcctccacccgggtcgctgcgcacccggcgagccaggtggtgctctcccgcccccggggccatgtgcaagggtggagacaggcgcgggcagctggtgccagggtgcagccggcggtgcaccaatagccccaggttggcgttggagggcgcactggcgccacccccggggaagaccacggaggaggaagaagcagacgaagatgcagaagaagagcaggaagaagataccggagctgcaggtccgcctcccggggaccgctcgaactgggcccagataagtggtgccccaggtgggggagcgggagccgggtcaaaagtgggctgcagctcggggcagccgtcgggggatggcactgaggcttctccccccgctgtgtaggtgtacccattgccgttattgttattgtttccgttgtgcgcaaagctcagggcggggctaggggggctgtagtccgccaggcgctgggtagccgctgcgctgctgctggtcccgccgccgaaataagagtctgtggaagcactgccaagcgagctggagctgtcgttgcggtagctagagaaaggcttgcggccgggggtgggcgtgatgctgggggtgggcttgctccagaggctgcctgggccggacccgccggacccatgatgcagatcgaagcccacatcggtgccgttggcgtggaagtcgttctcgtctgtgagctcaatgatgccgccggtacgcagagcaatgtgcgcctcaatctcctctcgagcgcgatccacgttctctggcatgccggtcacctcgaacaccggctccttatcccggctgggcgtcacgatgtacgtgtgcgtctgctgctggatgcgcttgattgtggcgcctttgggccccaccacgagccccaccacgcggtagggtacccgcacttggatggtggtctgcccgggcaggttgggcggcccaggcaccgcgccgttgagtgccgtgttcttattccgggaggcgcggatcatggagaagtgctcggcagcagagatgatctccctccgagccatggccacatcctccttcctgcccgtcacaacaaagacaggctcctccccgcgaactggggtcttgatgtaagtattggtcttcgcccgcagcgctttgattttacaacctacgaaccagggtgcggaggagggagtgggagagagagacagacacgcccattatcctggggtaaccgcggggaccggggacagcccgcgtccaggacagcgagacggcaggacaagagatgg

SEQ ID NO: 26896 - DNA, 1247 bp, Artificial sequence
  DNA replication origin
agtcaagaggcggggaggagaggaggaaaaagcgctgagtgagggcgggcgggcgggcgggagggagggagtggaggagccggggaggggctccttaaagaaacgcttctgtcgctcgcctgctcgcttttcgctcggcattgcggccagccagccgggcactcggggggcacgcgcggccaccgctagagctctgcccccaccccacccgccagcaggtctggggtggggacccaggtgggggctcctgcagccactgcccggtgcggaccgcacggagcgacccactcctcccagcaccgaggaagaagcaacggagccctcagcaggcgaccggcctccccgcccctgaccacccgcttcccggctgcctttgtggccgcagcttctcgccgccgagccgagggccggcgggggcgcggcgcgcacggccgagcgatgcccagctcgctgttcgcagacctggagcgcaacggcagcggcggcggcggcggcggcagcagcggagggggagagaccctggatgaccaaagagccctgcagctcgcgctcgaccagctctccctgctggggctggacagtgacgagggcgcctctctgtacgacagcgagccgcgcaagaagagcgtgaacatgaccgagtgcgtgccagtacccagttctgagcatgtcgccgagatcgtggggcggcaaggtaggtcgaggagggatggggaggtgggtgggggtggtgtagggtctcaggccactgcctcgaggggaaggcgtgttcagtatcgggatccgcggcgtggggtgccttggggagagaggaagagccgcgcgatgggccggcgccccagacaaagaaagtgcaggcaggctgtctcccggagccgcgccgctgccctggcgggatgcactttcttctgctaaaatcactgccttctcccctaacgccccccaaccagcccacctccagaaagacaatttaaatgtaagatgcttgggggagggggcctttgatcagtcctttgggaggaggaaggaggaggagtgagcataggatgggaggaggattctggatttctgcaaagcggaatggagcccagaggaggaacaatgggtcccgggactcacaccccaccccctacccccagtcgaccagcgctgaggcatcgcgacttcagctgccttccccgagccccttccccgtgtcttcagagctgacggcgcgcccagctggatcccagcggcatctccccaga

SEQ ID NO: 26897 - DNA, 1068 bp, Artificial sequence
  DNA replication origin
cggggcggggccgcgggcggggccggcgcgcgctccgcagcgcccgccttaaagggcccgcccgctcctcgcgcgcactgcgcatgctcggccgcggggcacggaggggagggatgggaacagcgggcgcgcacgcccgcgccgcccgctggcgctgtggcctgcgtccccgcggtggcggcgcggcgctcgtgcgcgtgtcagaacccgcagggtctcggcccgggcgccgggcgtgtgctggacactggtgccatgcattccagaggtcgccagcggccgggcgggccgagctcgcgcggcagccagcttttagctttcccatcctcagtttcagggccagttgggcgaagtgctgcccaaggagacagaaatgcaggcgcgggcgcgcgcgcgcgcggttgccagtgtgggcgggcgtgtgcttttgtgtctcgtgcgctcccgcgcaggtggacaacccgcgccgggagtcactctgcccgtgcgccccaagacctggagtcccgttttccgtgtcggagggctcgggtcgcccttttgggcggactacagactcttctcacagaggaagctttggctccacggatggtttatttggagccactaacgggacttcctgaggaccgctcttttagagcccggctccaggcatcagagttgggcgcgttttcttttctcagtcaggcgagggaggagacttagggacaatgattgtcctcggctgataggtacatccaagtgtcccgagcctgccagtcccgcattagacaacaaagagaggcgttagcggcggcgggggaggggcgcggccgggaggaggacggggcgggctgcggcgagcgcgggggtggggggtggcgctctctctccgctcgctcaacccgcggcctcctcccgcccccggcctggcgcgcgccaatcgcctcccccagcgatagtgtcagtagcattgtggtgtcagctcccgcctgtgacgttgcgcctccctcgtccccctccggagtcgtctggctgcagaggctcagtcaagaggcggggaggagaggaggaaaaagcgctgagtga

SEQ ID NO: 26898 - DNA, 1754 bp, Artificial sequence
  DNA replication origin
acgcaggccacagcgccagcgggcggcgcgggcgtgcgcgcccgctgttcccatccctcccctccgtgccccgcggccgagcatgcgcagtgcgcgcgaggagcgggcgggccctttaaggcgggcgctgcggagcgcgcgccggccccgcccgcggccccgccccgacgggaggtgagcgctccctgcccggccgctctttgtgcgcttctcggggtgggggtggcggcagagggaggttgcgacggcacttgccggcgaggacggcgagctgcgccccctcccggatctcccagggaccgtctccgagtgcgagagagaaggaaggaggatttgaggggcgggccggggcggtgcgcgctggtcctctccgcgcgcatccccctccgccgcccactagggcggacgccccttcgggccccgcgcgctctgctgtcctttgttccgggagccgccgggctcgccgcgccctttgcgtcccgctgcggatcgttccgcagagcggctgggcccgcggttcatagagtcgcccaagatcctcacagagggacgtcttcccaaaacaatgaggccatgcggccgcagccgcacacgggctgactggggagatctcgtggtgccgcggggcggtcccggggctcgaaggcagaggctcccctaggtgtgccctgcctgaccccggctacaggaacgagcgctgtgggcctcggtttctcacccgtaaaatgaagaaaataatccccgcctttaccacctcgtgggtcgttcggaagattaaatgcgacagtggatgggcgcgcgcttacaaatcagtagacagttccgcaagcgcctttacttttgagaacgcggtggtgcagctcccttcaccgcttgcttacctggagctgtcttgggaaagaggtgctgattatttccttggggaaatgggtttagaagccacttacagtggttatttcctcaggatgtttacgtcagcttcccggagcctggtgtgtgtttttcttaaaaaggaatgttcgatgggaggaggcaggtgggaggatggtgccgagtcctccgtgaaaaccaccacttagagctccagtaggaaattactgtattcttttgacccggtttatggacttggaatccaactaacttgggaatgagggttcttgccgagatggagggttttgagtaaggggtcctggctggggagagccagagatgaggcccagcctcccgcgctcacgcaaggcctgtaaacagaaagcagactggaaaggcgcttggagcatttccatctttttaacacaaagggctagtttctcgcctcttagctctgtttctttgaaatttcatagccttcggattgggcctgctgaggtttcttttttttttccaagtagaaaatatggtgacagtaaagttgttcctccgctgataaggagctgtgcacggataatggggtgtagggagaggttgcttctgctagggagcttggccgctaatagtttcagacctgccataactccttctccttgcatctacagcgataagaattcagatggattaattctgaaacgtgtttaaacttagaggattggatatttcagaggagtccctgggtggctgggtcattacccggaaggtgaatgcaacatttctccaaggtgacatgtttaatgtcattcttccctgctggatcctgaaggcaggacttgtacttggctgtaactgccaatgttcaatgaaatcatacatcttcaccc

SEQ ID NO: 26899 - DNA, 977 bp, Artificial sequence
  DNA replication origin
tgtaatcccagcactttgggaggccgaggtagaaggatcacttgagcccaggagtttgtttgagaccagcctgggcaacatagtgagaccccatctctattttaaaaaaactaaaaataaaaacatattagccaagtgtggtggcacccacctgtagtcccagtccctccctacttgggaggctgagatgggaggatggcttgagctcaggagttggaggctgcagagacctatgattgcacacctgcactcctgtctgggcgacagaccaagaccctgtttccaaaaaagctgggggcaaagaatataaagatttttgccttcctagactacattgggaggggagggagaaaacaaataaatagaaaaaataatgaaaatgctaagtgatatggtatgtcagaagtgctatggggaaaaataaagcaaggaagagggatacggagagccagggagttgcaattttaaaataaagtcattataggaggcctcattgagaaggagacatttgagcaagaactcaaaagtgagtggtttagccacgtggaaaacagagggaagagtgttgcaggtgtagggaacagcaatgcaaaatcctgaagcagcagcatgtctggcctgtggaggaactgcaaggaggccagtgggcggagtggagggaactaagaaggtgtagctggaaatgagattggacaggtcaccttgcctagcgtctcatacaggccagaactttgtcttttgctcgagtgagatgggcaccattgcaggattttgagcagagaaggaccatgatcaggctggttttgaatgactctggctgctatattgaaaacatgaggggaggggcacctggggtaggcaatagtggaaacagagagacctgttaagaagttaccgcagcaatccaggccgggcagcagtggctcacgcctgtaattccagcactttgggaggctgaggccagcatatcccctgag

SEQ ID NO: 26900 - DNA, 1081 bp, Artificial sequence
  DNA replication origin
gcggaggctgcagtgagccaagatcgcgccactgcactccagcctgggcgacagagtgagactccatctcaaataaaataaaataaaacaaaataaaataaaataaagacagctgtattagataaaatgggtttcctagctttggaaggtaactgcccagttctccattttcactttgtcatcataatagcatttgaaggaatgctcaaacgtctgtatatcagattcccgattctgagaccctgaggatactgagtgtcaacgatgggaagactgagggggaaaggggaggactaagagacaaagggggagactgaggtgtggggagatcgaggaacagcagggcagaccgagcagggggaggaagaccaaggggcatcgggggggactggggggctggggggagaccaaggaatggcgggggagaccgagccgggggaggaagactgaggggcgtggcgggggtactggagggccggagggaaactgagggatattggggggagaccgaggggtatgggggcagaccgaggggtatggggggagactgagaggcatggggggagactgaggagtatgggaggagacggaggggcagaggggagactgaggagcagtggggaggagacaaagagacagagaggggagactgaggagcatggggggagactgagggaaatatggggaggaagagtcggagttaatgaaattgccctacttttcataaatagttcagggaaataagtcatgtggtgaggggcctgggctggtctccgggacgcagcagaaatgcaggcacaaaacctgccggagctgagcaaggacaaaatcaagggggagctgtgtccactggagggagaacgccaagagctgcagcacactgagcacacgccgcgagccagcacccacctgcctcatccatttaccctcccagtgggcctgggacatggggcggttgctagcctcatctcacagatggggaactgaggctcagagaagcaaacttctaaacccatggtggcccagcagtgagctgggagctgaagccggtgtccctgtccagagatgaagcccctgctgg

SEQ ID NO: 26901 - DNA, 1486 bp, Artificial sequence
  DNA replication origin
caccttcccagctgcccctccactgttcactggtggcagaaaactcctcacttaggacagcttctagttcagccacctaaccagcccccatagcccactccctgcagcccactcatacccgcccctgggagaccttacaagcccagagcctcctgggccatctgtccttggttctaggcccccaggggcctcagttcctgttctctgctccatctggtcctcatcccctgggatcataaccaccccactccctgtggccagctctagccatgaaggcgagagatgtgatgccagcacccagctcaggcagcacacaggagtgctctgagatgctggctgggtgcgtgctgagggcaggcaggacagggtgggggcactgccacttggccttgaggtaatggggtttgtggcaggaaggccacccctgccagaggcagggtagcaaggcatggcagcgaggcatggcaggggccactctgagcccaaatgagggctgcccaggagccagcgcaggtagagaaggcgcattggataaggggagaaggcagactggggagactgcagggggccccgaatgccagtttgagggccgtggctgaggactctgtcctagggtcagggggcagacagccaatagcacaggggccgcagctcttcaggccacagctcctggattccttagactggcagggtcagccccaggccctctccctgaccttgcaatgggggatgacagtggctttgcgggaggggaaaaagccgccttccctgagcaccacctggatccccacgcagtgctgtgcccttcatgcccagacctcacttatgcaaggatggggcttggcagcccctttattcagcacatgaaggccctgagagggaaatggagcccaaggccacacagctggtgaggggagcccaggtgacactccagggccaccccatttcctgccctcagcactgctgagagcagctggggctgcaggaagtgtgtgagtgtgtgtgtgtgtgtgttggaggtggggggttgggatatccagaaccacctctagctcaggcccttccaccaggacccagctggccaggaaaccccccaccactgggattagcaggaccctggaagggaggcccttcctgtggttccattgctcactctaggcagtcctctggccagggaatggacaggctagggctggggaggggacagggactcacccaggcccagttttcacacagcttcagggacatccctggtctcactatgggaagactgagacccagaggggaaagagcttacccaggttcacacagcaaatcaggggccaaggccactctctctactcactggaggtcagaaagctgcctgcaggatgttgtgtagctgggacttctcttgactgactcccagcacagccaagcctccagcatgggatcctgtggcatcaggattttcagtggctcctgagcccagactacagatggagcc

SEQ ID NO: 26902 - DNA, 1942 bp, Artificial sequence
  DNA replication origin
tgcaaggtcagggagagggcctggggctgaccctgccagtctaaggaatccaggagctgtggcctgaagagctgcggcccctgtgctattggctgtctgccccctgaccctaggacagagtcctcagccacggccctcaaactggcattcggggccccctgcagtctccccagtctgccttctccccttatccaatgcgccttctctacctgcgctggctcctgggcagccctcatttgggctcagagtggcccctgccatgcctcgctgccatgccttgctaccctgcctctggcaggggtggccttcctgccacaaaccccattacctcaaggccaagtggcagtgcccccaccctgtcctgcctgccctcagcacgcacccagccagcatctcagagcactcctgtgtgctgcctgagctgggtgctggcatcacatctctcgccttcatggctagagctggccacagggagtggggtggttatgatcccaggggatgaggaccagatggagcagagaacaggaactgaggcccctgggggcctagaaccaaggacagatggcccaggaggctctgggcttgtaaggtctcccaggggcgggtatgagtgggctgcagggagtgggctatgggggctggttaggtggctgaactagaagctgtcctaagtgaggagttttctgccaccagtgaacagtggaggggcagctgggaaggtgtcttggactttgagacctggaattcccaggatgttttgctggtctgtgggacagttggcgggacgggggaaagccaggaaactccagagtgtgcggtcgctgcagtgacacagcatggccacatccatttgctgtggaggtggggttgacagaggagggaaccaaggcccaagaggtgaagcagcttgtctgaggtcaccccgggcgaccaggatgcaggcctgcagatgtgcactttggagctctgcctggagctggggtggaggagcctgcctgctgcctcgtgccctctgccgggcctgagggatgtccctggcacagggctggctgctgtcctcctgctcttcctccccagggaggtctgctggagtaagcagggcccaggcggcaggtgggggctgtcagcagtggcagtggcatcaggagcaaggccaggaggctggaaacaagccacttcccaaaatagctctgataaccacggggcaggagggcccagccaagcctcagccctgacaaccacagcctgcagccggcctccctccccactgggcctgggcttagtccctggtttccgctgacagcctgtagggcccactctctctaggcttcgtggcccacctgggaaatgggaggctggcctgggagatgcgacctgtgactcagaacccgaggctgagtacagcccctgtggctggaggtggtcacggaggcctggcaggacagatgcactggggcagggggcggtggcgggagtcgggggcagaggccactgcaggctggcaggaggccccgggaccgcagttctgtgccaggatctgtcggggaacaccaggggtgagcaaggatggagatggggtggcaaggcgtcgccctgggcaggctctttaacaggcatgtgagggggtcagggtgcggtctcaggacctttcctccagaaacctcagcccagcagcgcccgttctcgagtcctggggtcggccgtgagtaggtgggacagagacaccaacagttggagacctgcaagtccagtttgggagccgctccagaaactggggctctctgcttggtggggagctgctggagcctccttgaggtggttggggtggggagccaggttctgggtaccccaaaccactggttctgatgcctctctgcccccccactccaggctgtgagcgggaccgcctgtccttcgggttctgtgagacactgcgcctact

SEQ ID NO: 26903 - DNA, 1061 bp, Artificial sequence
  DNA replication origin
ccactgtcaatgtctatgttaagggagtaaggcagcctgaaacctcttgctcctaggtcccatagtctccactccccttccagctggaaatttgtgctgcaaccagaggaaccagaaatggggtgagaaaacttaggggactgggttgtaagatcaaaggctggtcttgcagcagtaatgacagttcctaggggcactgtgacatcattgcattccactcctcccaggggaggggaccacatcagcgcgatgcccgagtcgctgctccacgatgggggagggaaacacacggtttcgacccaggtcctcagagacgccagcccaagaagcctagggaggtcgagcttggggcagcaggaggggagggcagagtctgcagtagggagccccgggagtcaccagcccaaagccacccagggatgactggtgagggcagggcctggggctgggggacccaggtcctgggagacgcaagcccaaagagcccagggaggttgggcttggggtggcaggaggtgagggctgattatggagcagggagccccaggagtcacctgcccaaagtcaccctggggtgattggcaagggcagggactgggctgcttgctgaaggggtggggctgactgactaggctttggttgggggagcccagaggggctggggttggggggccccatctggtatgcctcaggagtggtatggactctggcacaggtcttgtcatcggaggggatctgtggctgggttgggggccatgacctggtgtgttttacctttttcttggctgcggccaatttcccctgttgtgttttttctgacatcgcggggtggggagggaggcggggttggggccacatcagcgaaataccagtgagcactgctcaatgcctccagtcacctaccaggcagctgtgcaactgagccacaggtggcgtaaccagggcaccaatggaacgcagaataggggcgtggccttaatgctccaagcccattggtcagtgagaaagatgaaagggaaaggaggcgtggccaggcgcagcatgtccagagggacctgtgg

SEQ ID NO: 26904 - DNA, 828 bp, Artificial sequence
  DNA replication origin
acaagtgctgcgggcgcgagggagcggttccccggggccgacgcggacggtaaacctgtccggcggcgcccgcctgctggggcctctccgctgtttctcgcgggcgcggcccggctgaaactgcgaccgtcggaggcgagcggccctctgggacccgtgcagccggtccaccttgcagctatactttgagactaaacaatttttttttttttgcaaaggcaaaccggtatgtgaagttgaaaaaatcaaaaaccctcaaattttccttctttttttttttttttttttaaatcaagaaagggggtagataggtttgttttgttttggaaatagtttttatagcagagtgataccgtcacatttaatgatcctactgtgaattcaagaattcacgatgaaagttggattgagcggtattttggtgttcattctttgctgatactcattaatgaagttagttggagaatttattgcttcagtacagtaaaaaccagtgtgcctttttttttgttactactcccccctccccgcattgttttatttttcgaagaagcactttattcagtttttctaagccacgggattgcccagatgaggaccaacggtgcagttcttgaaaggtcattattggcaagtttgtgagggagctaagatgagttgagataaaccagtgttactgttcttgtattctgtcgtggactcttggggatttgcaggctgcattaagtacaagtctggtccagttttgggtgcacgtattccactgaatttggttcgtctggcttattatatgaacatgattctgtttcacttccccagatggaacta

SEQ ID NO: 26905 - DNA, 1061 bp, Artificial sequence
  DNA replication origin
ttaagggagtaaggcagcctgaaacctcttgctcctaggtcccatagtctccactccccttccagctggaaatttgtgctgcaaccagaggaaccagaaatggggtgagaaaacttaggggactgggttgtaagatcaaaggccggtcttgcagcagtaatgacagttcctaggggcactgtgacatcattgcattccactcctcccaggggaggggaccacatcagcgcgatgcccgagtcgctgctccacgatgggggagggaaacacacggtttcgacccaggtcctcagagacgccagcccaagaagcctagggaggtcgagcttggggcagcaggaggggagggcagagtctgcagtagggagccccgggagtcaccagcccaaagccacccagggatgactggtgagggcagggcctggggctgggggacccaggtcctgggagacgcaagcccaaagagcccagggaggttgggcttggggtggcaggaggtgagggctgattatggagcagggagccccaggagtcacctgcccaaagtcaccctggggtgattggcaagggcagggactgggctgcttgctgaaggggtggggctgactgactaggctttggttgggggagcccagaggggctggggttggggggccccatctggtatgcctcaggagtggtatggactctggcaccggtcttgtcatcggaggggatctgtggctgggttgggggccatgacctggtgtgttttacctttttcttggctgcggccaatttcccctgttgtgttttttctgacatcgcggggtggggagggaggcggggttggggccacatcagcgaaataccagtgagcactgctcaatgcctccagtcacctaccaggcagctgtgcaactgagccacaggtggcgtaaccagggcaccaatggaacgcagaataggggcgtggccttaatgttccaagcccattggtcagtgagaaagatgaaagggaaaggaggcgtggccaggcgcagcatgtccagagggacctgtagcatcataaggaaagctgc

SEQ ID NO: 26906 - DNA, 966 bp, Artificial sequence
  DNA replication origin
tgcaaccagaggaaccagaaatggggtgagaaaacttaggggactgggttgtaagatcaaaggccggtcttgcagcagtaatgacagttcctaggggcactgtgacatcattgcattccactcctcccaggggaggggaccacatcagcgcgatgtccgagtcgctgctccacgatgggggagggaaacacacggtttcgacccaggtcctcagagacgccagcccaagaagcctagggaggtcgagcttggggcagcaggaggggagggcagagtctgcagtagggagccccgggagtcaccagcccaaagccacccagggatgactggtgagggcagggcctggggctgggggacccaggtcctgggagacgcaagcccaaagagcccagggaggttgggcttggggtggcaggaggtgagggctgattatggagcagggagccccaggagtcacctgcccaaagtcaccctggggtgattggcaagggcagggactgggctgcttgctgaaggggtggggctgactgactaggctttggttgggggagcccagaggggctggggttggggggccccatctggtatgcctcaggagtggtatggactctggcaccggtcttgtcatcggaggggatctgtggctgggttgggggccatgacctggtgtgttttacctttttcttggctgcggccaatttcccctgttgtgttttttctgacatcgcggggtggggagggaggcggggttggggccacatcagcgaaataccagtgagcacactgctcaatgcctccagtcacctaccaggcagctgtgcaactgagccacaggtggcgtaaccagggcaccaatggaacgcagaataggggcgtggccttaatgctccaagcccattggtcagtgagaaagatgaaagggaaaggaggcgtggccaggcagcagcatgtccagagggacctgtg

SEQ ID NO: 26907 - DNA, 1181 bp, Artificial sequence
  DNA replication origin
gcggtcacgtgcccgcgggcgtggggcctcgtggaggggtggagggcgaggggggcagggagcctcctcgtgactcagggcctttgggcttaaaggcgccgcagccctgcgggggcggccggtggggcctccgagccgcactgcggcctccaggcggcctcgagcgtctgtccagacgggagctgaccggacataaaggagcaccggcgcccggaacgtttctttctcacactgccgtcgcacgggagacccgaagccgctggcgctggaagctcacgccccctgcgggtctctttagcacccggcgcgcggtgggggcgcccgggcgggacggggcggggctgctgacggcgtagaccccgtgctctgtggagagccccacgacggcggcggtcgcggcacctttaaggtggagggctcaagcccctcgtgcggcttcccaatcctgggcaggtcacgtggcttcacaccttcgcttggcgccggagagggagtctcgggggcggggctggccaggtagtgtggcgcgagggcggaagactggcggggcttcgtgcccgggagacccgccgggctggcggcattgaggtgggtcctggtcatgggcgggagagggttaggcttgcaggccgcggaggtggcgtaggcggggagcgacccgagcccactctgggctgtgctgttcggaccctcagcctggcgagtgggtgcatgtggcctggcgttctggtcattctcctcagtgccggacgaggccaggtgcccagactcaggggcggcctcaggtttggcggagcagcggctggggccctggacgagtcgccccccgtgatgacgagcggttgggcgggcctgtgcccgcctggagtcacctgagtgtggggggactcacccacaaaggggtcctcaccttggggtgtcccacccggcgtcattccccgaggctttttcatgtcatgggttcctcagcggtcgagtcgaccgaggctttgctgcctcattcctagaggacccagggagaccagaaggctctgtgagcggccccgcgttgaccccgtgaccgagaaaagccaggcagacgcctgggctcttgggcgctttcgtgggcgcgcgcttatttttcgggggcactttgctccctgcagccctggccccttgcaccgtgctctcagctgggggaa

SEQ ID NO: 26908 - DNA, 1332 bp, Artificial sequence
  DNA replication origin
ccgcccctcctagcaggccgagccgaggagggctccgccgcccacccggaacccggcggggactgccgccgctgctagccacagctgccccctggggggccagagacctaagcctgagcgcgccatcacctaagtgacccttgccgagtcactgtctgccctgggcctcagtttccctcttaacgaaagagggcacgatttacaagcccctgcgagcggcggcgatcgcttcgtcagtagagcctcgtgtccgcgctccttctcttccagtgatctctccagggcgagagcctgccctggcatccttggtcggaactgtagcccctgggctccaggaggcgcactcactttagaccctctgctccgtgcgctgcagagggggccgcgagagtcaggaagttccagaaagttccaaagacatcactggtcctctttggaccggagttctccggagaaaccgcttccggcgctcctgacacactgagatagaaagtttcacagaaatagggcaagggatagggcgagggctccagggcaggcgtcctagggcacctggcgcaggggcggaccggaaaccccaggcaaacgcagagtcggagatggcattccaggcggaagatcaagcaaaggcagagagggaggacggcaccgagcggctccctctgaccaggactgaggatgatgcgacctgataccgccggagggaagcctgggcccggtttgtaaggggcctttattctgcagacagcaggaaaactattagagaattgtaaaaggggttggcagttgtcgggtctgttttaaggtgttgctggagacatagaagaggttggacagaaaagggggaaaacaagggactggagtggggaggaaagggaccagagtttattgaacattgctaagtgttttacatgtgtcatgttatcatgatactatttaataagcactaactatgctccggtcctctcctggcacttaggaaggatggtgctgccgtcttcctgggcttgatctaatggctaaggggagagggacaggtaactgtcagtttctgcctgaggtgatggagaaagaggaagctgatattatagtctagtgtttcagaaggattaaggggggaagggtggtgagcataagagtagaagtccacgagggggtgagtgacagtgggagttggccagtctccatccacttggtctacttacaggagcttctttgggttgctgaggtcatgggcagaaagggtgatgactacagggacaaggcaggagcaacttcgctgggacccctacctcttgagccatgctttctccaggagtagcctacttgagt

SEQ ID NO: 26909 - DNA, 1163 bp, Artificial sequence
  DNA replication origin
aaacccctgctgcagagccgcagcgccgcggtggtgatggcggtggcgcagctctacttccacctggcgcccaaggcggaagtgggcgtcatcgccaaggcgctggtgcgcctgctgcgcagccacaggtgcgctccgcccccagccccgccccctccctcgcctcctgccccgccccacgggctgcccggctccgccccctcacgcccaccagccgcttccacctctgcccacccgctccacactgaccgtagtcctgccctccgcactggtcctctccccgcaacgacttgccccaccttttcccctcatccgctgacccttgccccaaccgaggggcccggggtgctctgacccgtcctctccgcagtgaggtgcagtacgttgtgctccagaacgtggccaccatgtccatcaagcgccgggtgagcctgcgacggcgggctgtcctcgctgtccgagggccgcttctgcgggcactggaggcgttgtcggggctgggaccggggccggggaaagggaagatggaggaataccctggctgtgcagaggatggggcaggggaggctccaaatacagatagggagcagggcctggatcctgaggggccgctgaggggatgtccagtggaaaaagagctagtcagatctgagatggacgagggaagacttgaggagtggagggcagtggtgaggaggcaaggatcctgggcgctgggtcaggataggaggggtgtctctgggcagcgaggcaggcctggggcttcggtggagctccctagctgcctctcttgtgccagggtatgtttgagccctacctgaagagcttctacatcaggtccaccgaccccacccagattaagatcctgaaggtgagtgagggacagaagtgcatgtgcttcccagccctccccaccccatgtacccactcaaataactcacagtggcccccctggtgcctgcctattcctggggctgagcccaggagcccatgactgccccagctggagctgtttgttcagggagctgggctaaggagggtcagggggagaagggaactgctctttgcctagtacctggtatacacctgctactcttcataaatgaagtaacctgatatcacctcataataatcccaggatgtgtacattatattccttttat

SEQ ID NO: 26910 - DNA, 1087 bp, Artificial sequence
  DNA replication origin
tgaggggaaaaggtggggcaagtcgttgcggggagaggaccagtgcggagggcaggactacggtcagtgtggagcgggtgggcagaggtggaagcggctggtgggcgtgagggggcggagccgggcagcccgtggggcggggcaggaggcgagggagggggcggggctgggggcggagcgcacctgtggctgcgcagcaggcgcaccagcgccttggcgatgacgcccacttccgccttgggcgccaggtggaagtagagctgcgccaccgccatcaccaccgcggcgctgcggctctgcagcaggggtttggtgttgcgcagcagcagccggtggtcggggtccatgacatagggctttcgggagggggcggccgcggcggccgtctcctcagaccccgcgcccttggcctcgtcctcctctgagccgtagaaggctttttccgcgttctcctctagtagggattcctggacggggagaccgacgggtctgtgggcgcctccccgggacacacttcggcccgctctgcctgggctgggcccacttacgttctgggtggggctcaggaactgcgtgcgggcgtagcgggtgagcatgctgatgatgaccacctggccccactcctccacgtcgatcagcaggttacagagtttccggtagtttttgtgaatcaggtcgatgcgctccgggcagacctcctcaaaggccatcaccacactgcccgccaccagctggggaaagaacaaagacgagagggtgaacgcgaagggtggaaggccggctgccggtcaccacccctcccggagcgcccctatacacgcaccgtggtcttgtcagccagaagcttctcaatgacttctatcagctgatccttctggtcagagtccaaactgagggagaaatcggtgaggggaatttgccactctcagccccagccttcccaatatctgtccaagccatgctcacctcctgcaccccagccttattgttctcctccatctctgtcagtcccccaaactaccctcctcaaaccctctgagaagcagcaggcaagacttaggaaaggccaggggtgggttgagaactt

SEQ ID NO: 26911 - DNA, 1008 bp, Artificial sequence
  DNA replication origin
ggtctgtgtcagtgcatattctgtgtcagtgcatattcgacagtcaatcttacctgtgctggctgctttaggcccagtggtcctgccccctttcattccccttctcctgcaggggcctggaatgtactcactaggctgggtggggaggatgccctggggtgtgtgcatttgacaggcgcatgtggcatttgtgggtgtggtgaggaagggaatacccagagttaaaggagattgggcaaacttggccctccttccacggaagcccagggaaaagccatcccagggtgactcctcagaagatcagaggacccttggggctggatatatttgatcttagaagcctacatttatcatcaaaaatctcaactaggagtccactgaccattttggtgaatgagactggagaggccaagtttggtccaagttatctgtgtattagatgtgatgcggcatgtgtgtgtgtgtgtagggggacgtgtgtggggtgtgtgtgtctctatgagggtgtgggggagcggggagaggtcttgtgatatatgtctgtaggggacatgtatgggatatgtgtgtctataagagggtgtgggagagtggggagaggtctcctggtggtatatgtctggggggtttgtaggtgtgtaggtgagttgtgtgggtggtttatgtgtgtagagtttttctgtgggaggtgtctgtatgtgggggagtgtgtttctctgggcgttgtgtaggcaggattttgtgggtgtgcgtgggtttatgtatggattctactagtgtctgcgggacctgtaggtatgtttgtatgagctgtccgtgaggtgtaggtatgtcgggggacatgggagtgtctgaggtatatgtgggtggtatcaatgtgtagttgtctgtggggtgtgcgtatgaaggatcctgacgtggagtgttgtgcattcatatctcagggaagctggtgcccagctctgtcatttttcctaggccctcggtgctgcccacgcctacccagct

SEQ ID NO: 26912 - DNA, 1342 bp, Artificial sequence
  DNA replication origin
ggtgatcagacaactctgaaacgtgggtgaataatcaagcaggcgtccccgcagtgattaaacaccaagggaagactgtcttcctgagtccgtgatcggcgccggagttttgggttcacagataaaatgcatttcctgtctctaccagaaaaggaaaggaaccgaaattaagagaagggagagattgaaagatggcaccaagattgaaaggagaaagaggttgagggatagtgagagaggttggagaagagagtaaaaagaggccgcttacctgatttaaaattggtgagatgttcctcaggctggttggtctgaggacccgaggtcattaggtggatctttatcatgaagcaaagagcaggaggacaggggattgatcttccaagggtggtcccccgatccgagtcatggcaccaaatttcacgcacgtccatgtgaagagaccacccaacaggctttgtgtgagcaataaagctttttaatcacctggttgcaggccggctgagtctgaaaaaagagtcaacgaaaggagataggggtggggccattttataggatttgggtaggtagtggacaattacagtcaaaggggggtgttccttggtgggcaggggcgggggacacaaggtgctcagtgggggagcttttgagccaggatgagccaggagaaggaatttcacaaggtaatgtcatcagttaaggcaggaacaggccattttcacttcttttgtgattcttcaattacttcaggccatctggatatatacgtgcaggtcacaggggatatgatggtttagcttgggctcagaggcctgacaaggatgttactcaggttactagttcctgcaactggatggatgatggtgttattcagtgtaattggaaataaagatgttacaagcaaatttgtggaaaattaatgttgagcccagctttggacatattgagattgtaaactctgagggacatattaccctattaggtagctggatattacgatttgggttccaggagagagattagggaattattaacatatgtatgttaattaaagccacagaagtgaagataactcagggaggaggtataaaatgagttcagacactgcacaagtctgaaccctgaagacaccaacattagaagtgaccagagaacagtggaaagtgtttcaaggtacccaagaggtgaactaaaggctgaaagaaaacaatgtaatttcaagaaggagggagtggtcagtagtttcaatgcccattaaggtcaaatcaaacaaggaaaaaaatcatgaccattggttgacaaagaagagctcaattcctttctactctattccccacctcct

SEQ ID NO: 26913 - DNA, 1465 bp, Artificial sequence
  DNA replication origin
acgatgctctagaggggagcacagatgaagaagcagtcagggacagtcgagtgtaatgggggcagtgggagcagggagaggacctagtctctggcgccggagagaaggaagacaggagcgtgaggtatgttccaggcagaggaaagggctttcaggaaggttgagagccaggccacaatctgtgtgagccactggactgaccagaaaagagggtggggaggactcctgaaggattctaagcaggcgacataatcagatttatattttagaaggacgtcaggctgctgcattgtggagaagagattggaggtgggccagattgaacaagagacaagggaggtgggtcttgaagttcacaggcctggcatgattgtggcctagaccaggggagaggcagaagatttgaggctgtggaagaggtggaagcctcagacctgatgattaattggatattgggtgggggtttagagggacagggggagaagatgaggattttcacgcacgtccatgtgaagagaccaccaaacaggctttgaacaataaagctttttaatcacttgggtgcaggccagctgagtccgaaaaaagagtcagcgaagggaaatggggtgggaccgttttacaggatttgggtaggtagtggaaaattacagtcaaagggggttgttctctggcggtggggggacacaaggtgctcagtgggggagcttttgagccaggatgagccaggagaaggaatttcacaagataatgtcatcagttaaggcaggcacaggccattttcactcttcagttacttcaggccatctggatgtatacgtgcaggtcacaggggatatcatggcttagcttgggctcagaggcctgacattcctgtcttcttttattaataagaaaaataacataaaatagtgttgaagtgttggggcagcaaacattttggcggggggtggtatggagagatactgcttctccatagccttgaagggctgcttcgagcgggattggggtggcgtgggaacctagagtgggagagattaagctgaaggcagattctgtggtaagggatgatattgtggggttgttagaagaaacatttgttgtataggattattggtgatggcctggatacggttttgtatgaattgaaaaactaaatggaataagagaaggagaaaaacaggtattaaaggactaagaattgggaggacccaggacatccaattagagagtgcccaaggaggttcagcatagccctgccagcaaagattatttatttactttaagagggagttaagactggcagtttggggatagcaccaggagatatcagctgtaatggtttggagaaacagtgtaaaccggcagtgtaaacaagagcagggcatgtatgagtagttgagtatggtgaataggagtatgactagtcagaagatagtagggatgacaagttttctggggcaca

SEQ ID NO: 26914 - DNA, 1451 bp, Artificial sequence
  DNA replication origin
ctgattgagaaatccgcgcgcagcctccgccgctgcacactgcagcctctgctgaacccctgccgcgccgccgccttcgccagcccggaccggaccggcccgccttcccttcctccgctccagccggcctccggccccgcaacctcctcctcggcgaagtctccctggccgccccatgtcggccgcccccgcctacagcgaagacaagggcggctccgctggccccggggagcccgagtacggccacgaccccgcgagcggcggcatcttctcctccgactacaagcggtgagggagcccgccaggaagctcgcgggagggttggggccggggaccgggcgaggcgcgcgggcaccatggacagcgcccggccccagcgccggccccgccccggccgcgccgaccggaagcccgcccggccccctcctgcggcctggagccccggcccagcgcgggcagcgctggcaccccggctccaggggccggcctaggacgcggaggggggcagataggggctggcgggggatgggccagctcagtttcgagaggagaaaccctccggttccaggtgtttctccggtttgcggcgttgcgttaggggttcccttcctttttcgtgctaggcgggttggcttcccaaaaatgtgggggaggggtctgagtcagcgaacttgagcttgagcctggggcctcttcaggaaggcgggccctggatgtacttgcacagcctcccagcttggccctgctgcaaattcatttcccctccctctggtccccatctccatctgaccctcacatccctgctcctggcattgcccctgtagttcagctccaccttcacaccctcccccacctttgattcgttcgtttgtttcttcatttgtttattcgtaaattctgcaacaagcatttatgaaaagccaactgtgtcgagtcctgaactagtcacggaatacaactgtgaacatgagacccttcttgtcctcacgatgctctagaggggagcacagatgaagaagcagtcagggacagtcgagtgtaatgggggcagtgggagcagggagaggacctagtctctggcgccggagagaaggaagacaggagcgtgaggtatgttccaggcagaggaaagggctttcaggaaggttgagagccaggccacaatctgtgtgagccactggactgaccagaaaagagggtggggaggactcctgaaggattctaagcaggcgacataatcagatttatattttagaaggacgtcaggctgctgcattgtggagaagagattggaggtgggccagattgaacaagagacaagggaggtgggtcttgaagttcacaggcctggcatgattgtggcctagaccaggggagaggcagaagatttgaggctgtggaagaggtggaagcctcagacctgatgattaattggatattgggtgggggtt

SEQ ID NO: 26915 - DNA, 1512 bp, Artificial sequence
  DNA replication origin
tcgccgaggaggaggttgcggggccggaggccggctggagcggaggaagggaaggcgggccggtccggtccgggctggcgaaggcggcggcgcggcaggggttcagcagaggctgcagtgtgcagcggcggaggctgcgcgcggatttctcaatcagggccgcgcgctgaggtcttaaaggcaccggcgccagccgagcggagggcgtgtccgcgaggaggcgacaggggcggtgcgtcagggcctggccccgcccatccctaggaaatgccctcttcagggcgtcttctgccctttaaagcgacttggctcgtctccagatctaaaggtgggcgagtctgctggacggacgctgggaccgtcttgcaggggatgtggaatagctgcccccacccccgaccacctggcctcggcgggacgggcctctggggctccgctctccccagacgcacgcgcggatgctcacccacgccgtggagggaaagcgggaactggaaagaaggctgtgcccgcaggctgggggttctagagcgggaaggggtcaccgcacccgaggaccggcctcagatacctaaggacgctccctttcccgccccacctttcctacaaaatctggcttggcagcaggaagccgaggagcttcctggaggtggcggaatttaaggaattaaggtcagggagctccgaggagcccttgggggcttagagagatgggaaacaggatacagaggacggtgaacatctaattaagctttggaaagtagtttaatgaatctttctgaagcctccacgtccacccaggagggccaaggtcatgcttaatccggggacacgtccacgtccattgacacctgaaaaggaagagaagggtctggtgtgaccaccagggctcctgagtcatgtgagccctccagttcagctcccgagcccgagtgacccctaggcccaaggaaggaaggcttggatccgatggaaagtagtgaattgggctgggggaagaggtaggatccagttgggcatcagttgaggtggctggagtcttttagctgggcatggggactggaggagttcctaaggcctgagtcttggtctgtaactagcatcccgaagtctccatgggcagaattggcgggcctacctgggaaggagtggggcccagaaaggtggagcttggctcagtagaaaagttctattgggggtaattctactggggtaaggttctattggggtaatgagaaggttctgttgggataacctagacaagtgggtgggtccgcttggttccggtggctttgtgcctgccagagaaaagtggatcttgaatttggagaaaactggcctgggtggggagtgggaagagaagggcctggattttgcagttgcgcgtttataaggcgctttggctagtctgctcaggaggtgggatgggtcctgtgcaggtagctgggccacgctcaccgacctgctggagctcccgtctatttgccgggggtccaggctgggacctgggac

SEQ ID NO: 26916 - DNA, 1342 bp, Artificial sequence
  DNA replication origin
cgttccagctgcccgcacagctcctgcagcgccgcctcgccgggacccgcgcgcgtcggccacagcagcgcccacagcccgagccccagaccccaggccccgccgccgcccacgtccagctccggcggcagccgcgggaagcagcgctccagaggcggccacagcgccgccaactgccggtgcgcgccgcggagccccgcggccgagagcaggccggcccagctggacggggagacggcggcctcaggcttgggctcgggctcgggccccaaccgggccccctcgcgcagccgccgctgctgcgcggtacggtcgtgacaagtcacagcgaacttgccctccgcgccgttccaggccaccaggaagcgcagccggtgcctctcgggctcggcgaagaggccctcccggaccggcacccagccctccaggctgtcaggctgctcgtcctccatggctgtcggcagcagcggccctagggctcggcgggcgcgggcctggcctcctcgcaccgcctgtcacgggacagtccgagccaaatcatttttcgctagaatcgaaaccgcgtcagtgccccagcagcaccctggcccccggcacttctgattggctggctgccggaggtggggcttacaagaggcattcggggttggttgggtgatagacgagagggccagcgacaaccaatgaaaaggtgagaaggtctccctcaggagtcaatcatctcgcaacctgttcaggagtctgggaaatacaactcttgcctcaccttttccacccaatacatacggacgttggaaaaatatctgttgaatcggcgagttattgtattagtctcccacactaaactatgaacttgagaacagggaccaagctgattttcttttctatcatcagggccctattgagtacatggttcacgcccttaagaatgtcacaaatgcgttggggagatgaaatataaactcgatagtcatttattgagggcctctaagtgccaagtactgggcaagaagccgcaaatttatttttgtcaattcaacaaacttttattgagtgtcggctgtgtgtcagtattgagggggtggagtaagagggggaattcagggcactgcagctcccaaccagggtgtttaaatacaatctgtgttctaactcttcactttagagttaaggaaacggaggcccagacaaacttaagatacaccgacactcgggctcgacatgcccccctggctacggaaggcctgtttaaggagatatcaggaaatccagtttacgtgtcagggtggagctaaatctgttcatgcaacaagcaccaagacggccctagtctctgcctagg

SEQ ID NO: 26917 - DNA, 2593 bp, Artificial sequence
  DNA replication origin
cgcatgtgcagaaagggagcagagcgttctaggtggaggaaagagcaggtgcaaagactgcaagtaggagggggatgtctggaatgtttgagagactgaagtcagaccagcagggcaggattgcagcaagtgaggggagggcaccctgtctcagattggagaaagacgtatgcgaggacgaaattgagctgaggcatggactggcggttttatttgatgggcagtatgattcaataaaagtgaaaggttttagcagggctgcagcatgatccttcttcagatttaagaagagcacacttctgctctgtgggggatgcagtggaaggggacaacagttgaaggaagcaaggagacccatcgaaggtctccaggtcaaagtggttgctggctgaggctgagaaggtcacagaggagacagaagtgggtgggttctacagaaggcttgcagatggatttgtaagaaccttcagatggatgagatatggcataagggatgagggagagggagagaataaagaaggcccctttgggttttaggttatgccactaggagatgtagggaagtctggaagaggagcaagttaggatgggggtgtgggagtcaaattcagtatcaacaggttcaggttgagggggtgagtggaggtggagctggggaggaggtaggtaattgtatgaatctgtggcttagccgagaggtcagctgggagaaggctagtgaggtcacccagggagggagggcaggcagagaaggagagggctcaggattgagtgtgtaacacccatcctttaggtggccatagaggaggaagagccagcagagaagatagaggaggagtggccagtgaggtgtggtggcctcagggtggccagtggagaagtgtcctaagcaggagagtttgggcattggtttgagcactgctgagatgggtccaggagccaggtgggttggaaggtgagtgcgaggctggggagcagggttatgtggaccacattttgaagaagttgactgttaagggagcagagaaataggaccatacatgagagggcgcaggtgcggagggaagcattgaaggcaggagatgcagcaggcgaggtgtgaggggagcgctgccagttgaaggcggggggcagaggagcccaggccttgagaagatgagaggctgtggttcagagccccagggaaggaggccaccatgacagagatgcaggcgggattggtgtggtgggaagacagagttcccatctgtggctcttcttttccatctgaagtatgaggcagggtcgtcagcagagagcgtgagtgggggacagggtgtgggaagctggaggagaaggtgatgtgaaattgttttccgggagtgggcggcaaggctaccagagaaacacaggcctgtcggccactgcagagtgacagtttgaggtcagagaacatgaatttaaagtgaaacttgtccaccctgttttgaccttgcccagtggcgtgggtgtgggtgtggaggaagcaggtggcagaaggcatcaggctggggttcggccaggcaggggggcaggatccaccggggattggtaaccatgagagaccatgggatggacatgggccctcccaggaagaaagggaggccgggaggtggctggtggagtggggaagtaaatcagtggcctggaggtctctgcgagatgggaaatgcatgtgcggggaactgggaggatgggtggtgtgggcgggaagcaagggatctgcagctcatgttttaaggtgatggaggattccagggtatggctgtgggtgagggtcactaaaggagcatggggaaggaggcattggagtggaagaggctgaggaactgagtccagggtgttgagggttatctctgtggatggtgacaggtggtgggcggaagaggaggctgggccaggagctgaagcccttggtgggtggcagaaagtaacgtggaggcaggcgaaggtgggtgggaacaggtggctgaatgacctcgcctccagggcacagagggactgcatgatgggggccaccaggatacccttccccctccctttctgttctgcatatgtggggggcggtggggagtgttgctctcagggactcactggtttccagtaaggcatgaaagtgaagagagtgttctggccagggatgctgaggcctgctgatttccagaaggatttcctgtgagtgtgggaggatagggagcgggaaggaccggctcagatttgggaacatccagggcagggagaactctgcgtgttgctgggtggcagggaagtgtggtgtccaccccttcccaaggtagagtgatggcacctattcatgtcttgggcatggggagtggggcgggtctttcgtgagtgtgagagagacttggggatttcgagtggaaggtgagctccctgtgagtcagccctggtgatgtggttgccaggatgctgcctcaaactctgaagaccttagtgaagtgtgaaagcactgtaggaaaggaggcagtgggcctgccccgctcccatctagaaccctgcgtttggttctgggcaccagaggtcccctaagtatagatgtatggaaggacatttg

SEQ ID NO: 26918 - DNA, 973 bp, Artificial sequence
  DNA replication origin
accctgaaggggtgaccctgaggccaaagtctgaaaggaaagaggaaggtaagagaattccaggcaggggaaacagcaagtgcaaggatctcaggtaaggcaagaaaaggaaaggagatctatgttagcagaacacagtgaggggcacagcagcatggcagggggagctgcgcccagcgcctggtcagtgggaggtatttaaaaaggggaatgacatgatctgatttatgattttaaaagctggtcacttaggcttctgtgtgaaaaatggactgcagacaacccagagtggatactggggggcctgttaggaaagaggtgatggtggctagagtgggaactatggctatggggtgaggtgaatgcactccagatatatcccggaagtagaatgcacaggacaaactgatagcctgcatgtgagaggttgggaagaggactcaaacatgactcttggcaaatgagtgcatggtagggccactgacttggatggggaagacggaaggcaggtgagagctggaaggcatatcaagagctccatgtattgacgagagtcagaagctccaagaaagatctgagctagaaattaaagtgtgggcatcatgggcatatcgatggcatttgaagccatgggagggtggggaggagttgcaggtgggacagtattacctaggaagacagtgtggacagagaaaaggaaccaggaccagtccctgggcaaccccatgattaggagtaagaagaaaagcaggaaacagtggggccagaggagctgagaggggtgttgttttgaggagagggagtggtcatttgttaggaatgctgctgagagaggtgaagtgaggtgaggctgagatctggcaaccccctggtcacccaagaccctggcagttttggtgcagaggtgaggcagaagcaagactgtagagtatggagagtgaacaaatggcaggagaaagtgaatggagccagt

SEQ ID NO: 26919 - DNA, 1478 bp, Artificial sequence
  DNA replication origin
gcgccggggctgagccgggcgcgcacgggccgccgcatgtgccgcgcggggagcggctgccgagcgggcggagagcgagcgcgagaggccccgtcggagcggccgccggagcagcgccggagatggggtgagtgagcccgcgccgcgcgctctccgcgcgcccctccggagggactgcggggccgcggctggcgtaaccgggctcggagcctcccggcgggccggcccccgcctccccaagccggagcgagcgcacactctgcgcccgggagtctggggccacctgacccgcgccctccgccggggcacgcggacacccagcaggggcaccctggcctgggcgcggagcccgtggcccttcccctcccatacagcccgggcacgggggcacctgacggggaccggtgccctggccggcctcctgcctcggccattccgcggtctcttcgcccctgggcgcagtcaactccagggcctgtgtgagtctaagcagtttgtcgttctccacgtttggatttattacaagcaaaatggaaatcgaagttttcctggaaataatcaaataataataaacctccagcgtaggaatagtggactttggatctgctttgagatgctgaagatgatggaagtctataaggaacctaggtgaggcttcagtctttgaaacaactgagtagatgctcaggagggaagttgaaatactctgtcgaagtgactaatgcttctgagtatataaagtaatttaagctttcccctcggcgtctctctgagcagtaggctctgtgagtctgggagccactgtgctaatagcacaataactccttacatctgctcactctatttgggcacacgttgacggtttgccatacgtattcaggggacacttatgtccactttacagatgaggaaactgaggcacaaagtggttcggtgacttcccccaggctgtgtagttgatgagcatttgtgtagcaggggtggccttgccactgcctgacgtgggcatggaggcgggtaagtgaaccagaattcctaaatctctctgttccctgctgctgaacccagcattcttccaacagcccttcgcaggactcaaatgcttctgctccaagggtctagagatcttgctttcctgtttgggatgggtggggcctgggaaggcaagagtgcagtggaaggagcaagattgtcctggtgccctggctcagcccccctgggtcagtggctttcttgcaccgtactccaggttaagtttctggagtcattttgcctggtgagtcttagccatgggagctgcagagtgtgtgaggggatcagaggcaggccaagaggaattttgaggaatggaagtgtgagggctgtgggccaacatgaactggacatgacagaggtgggtgacagagaggaggaggcgagatgagcagcgagggctgaagaagtgtgcttacatttaggagatttcacatgaacagcaa

SEQ ID NO: 26920 - DNA, 1153 bp, Artificial sequence
  DNA replication origin
ccatctccggcgctgctccggcggccgctccgacggggcctctcgcgctcgctctccgcccgctcggcagccgctccccgcgcggcacatgcggcggcccgtgcgcgcccggctcagccccggcgccgctccattccgcggggctgcgcggctgccactgctgccactgccgccaccgccgccaggcgcgggcgggcgggggctgggcggccgcgctggggcggtgcccgccccgccctccccagccgctacccccgcccggctccttacgtaacctcgtggcccccgggccgcggcagcgagccaagaggcggggggcgcagcactgtgtgcaccgtcccccgcgcagccgcgcagtcgccgcttttctcccgggccacccagtcctcggtgccggccccgcgttggcgcgcccccgccccacgccgacccggggccctggcgcagtgccatcaacatcctgcctgatggacttaaagtcccattcacacctggcggggactttagggctacctttactttgcagataagggaaccgaggcctggggagggtaagtgatttgcccaaggtcacacattcagattagagttcgttcgggtctccagagtctgagatgggcatagctgtgctcctccttaaagcccaccttcatcttcctgccagttgcccggccgagtggccttaaggtacccgccaccgtgaaatttcggaagccagcctggcagagaagagcctacaggccgcggcagatgctctgggctctttcctggataaaaatgagatgagggctcccacttgaaggggcagttttaaggcggcttcatcaagcttggttttatccttagagcgaggggaattaggatggcaaaagtagaacttgaagaagagcaggctctcttcgtcgcctttctacctatcaggtcctgagtttctaccaaaggctggcactgggactaacctaaccttcatcccccgggacttccacgggatcatcttctgctgggaacacaccgcccacataagcctggcatctcaggacagtaaaaaagtcaagggacaggtcgggcgcggtggctcacgcctgtaatcccagcactttgggaggccgaggcgggcgaatcacgaggtctggagatcgaggccatcctggct

SEQ ID NO: 26921 - DNA, 893 bp, Artificial sequence
  DNA replication origin
cagccccccgcctggccagccgtgccgtccgggagggaggtggggggtcagccccccgcccggccagccgccccgtccgggaggtgaggggcgcctctgcccggccgcccctactgggaagtgaggagcccctcagcccggccagccaccccgtccgggagggagatggggggtcagccgccccgtccgggagggaggtgggggggtcagccccccgcctggccagccgccccgtccgggagggaggtgggggggtcagccctccgcccggccagccgccccgtctgggaggtgaggggcgcctctgcccggccgcccctactgggaagtgaggagcccctctgcccggccagccgccccgtccgggagggaggtgggggggggtcagcccccctgccctgccagccgccccgtctgggaggtgaggggcgcctctgcccggccgcccctactgggaagtgaggagcccctctgcccggccaccaccccgtctgggaggtgtgcccaacagctcattgagaacgggccaggatgacaatggcggctttgtggaatagaaaggcgggaaaggtggggaaaagattgagagatcggatggttgctgtgtctgtgtggaaagaagtagacatgggagacttttcattttgttctgcactaagaaaaattcctctgccttgggatcctgttgatctgtgaccttgcccccaaccctgtgctctctgaaacatgcgctgtgtccactcagggttaaatggattaagggcggtgcaagatgtgctttgttaaacagatgcttgaaggcagcatgctcgttaagagtcatcaccactccctaatctcaagtaatcagggacacaaacactgcggaaggccgcagggtcctctgcctagga

SEQ ID NO: 26922 - DNA, 1333 bp, Artificial sequence
  DNA replication origin
cagggcaggggggctgacccccccccacctccctcccggacggggcggctggccgggcagaggggctcctcacttcccagtaggggcggccgggcagaggcgcccctcacctcccagacggggcggctggccgggcggagggctgacccccccacctccctcccggacggggcggctggccaggcggggggctgacccccccacctccctcccggacggggcggctgaccccccatctccctcccggacggggtggctggccgggctgaggggctcctcacttcccagtaggggcggccgggcagaggcgcccctcacctcccggacggggcggctggccgggcggggggctgaccccccacctccctcccggacggcacggctggccaggcggggggctgacccccccacctccctcccggatggggtggctggccgggcgggggactgacccccccccacctccctcccggacggggtggctgccgggcggagacgctcctcacttcccagatggggtggctgccgggcggagaggctcctcacttctcagatggggcagctgccgggcggaggggctcctcacttctcagacggggtggttgccaggcagagggtctcctcacttctcagacggggcggccgggcagagacgctcctcacctcccagacggggtctcggccgggcagaggcgctcctcacatcccagatggggcggcggggcagaggcgctccccacatctcagatgatgggcggccgggcagagacgctcctcacttcctagatgtgatggcggctgggaagaggcgctcctcacttcctagatgggatggcggccgggcggagacgctcctcactttccagactgggcagccaggcagaggggctcctcacatcccagacgatgggcggccaggcagagacactcctcacttcccagacggggtggcggccgggcagaggctgcaatctcggcactttgggaggccaaggcaggcggctgggaggtgtaggttgtagtgagccgagatcacgccactgcactccagcctgggcaccattgagcactgagtgaacgagactccgtctgcaatcccggcacctcgggaggccgaggttggcggatcactcgtggttaggggctggagaccggcccggccaacacagcgaaaccccgtctccaccaaaaccagtcaggcgtggcggcgcgcgcctgcaatcacaggcactgggcaggctgaggcaggagaatcaggcagggaggttgcagtgagccgagatggcagcagtacagtccagctttggcttggcatcagagggagaccgtgggg

SEQ ID NO: 26923 - DNA, 1026 bp, Artificial sequence
  DNA replication origin
tgggcggccaggcagagacactcctcacttcccagacggggtggcggccgggcagaggctgcaatctcggcactttgggaggccaaggcaggcggctgggaggtgtaggttgtagtgagccgagatcacgccactgcactccagcctgggcaccattgagcactgagtgaacgagactccgtctgcaatcccggcacctcgggaggccgaggttggcggatcactcgtggttaggggctggagaccggcccggccaacacagcgaaaccccgtctccaccaaaaccagtcaggcgtggcggcgcgcgcctgcaatcacaggcactgggcaggctgaggcaggagaatcaggcagggaggttgcagtgagccgagatggcagcagtacagtccagctttggcttggcatcagagggagaccgtggggagagggagagggtgagggagagggggagggggagggggagggggctcatttttatttatttgagacagcgtcttgccctctcacccaagctggagtgcagtggcgcaatcatggctcactacgtcgaactcctgagctcaagtgatcctcctgcctcagcctcgcaagtagctgagactacaggcacacaccaccatgcctagttaatttttttaattttttttggagaaatggggtcttaccacgtcgcccaagctggtctcaaactcctggccacaaactatcctcctacctcagcttcccaaagtgctgggattacaagcgtgagccaacatggccagccttaccttttacttttaaattatgttagccacatttcaagtgctcaatagccacatgtggtgtgagcagctatcacgtgtacatgccacccagtacggctgtagaagagaactaaaggctagctagcatttctgttgacttgactcactcccttattgtccacagtgccccaatccccctaggcatctctggggaaacctaaggctttgaaacagtttgaacgtcactgcgatagtaaaaacacatcacagattagtt

SEQ ID NO: 26924 - DNA, 978 bp, Artificial sequence
  DNA replication origin
agccgggccccgcggggccgccgccgccgccctcaccgtcctctctggggcccctgctccccctgcagcgggaacctctctacaactggcaggcgaccaaggcgtcgctgaaggagcgcttcgccttcctcttcaactcggagctgctgagcgatgtgcgcttcgtactgggcaagggtcgcggcgccgccgccgctgggggcccgcagcgcatccccgcccaccgcttcgtgctggcggccggcagcgccgtctttgacgccatgttcaacggcggcatggccaccacgtcggccgagatcgagctgccggacgtggagcccgcagccttcctggcgctgctgaggtgagcggcagcgcgggccgggccgggccgggccgggccgggccgggccgggctgggagatccccggggcccggcctacccggactcccggatgaccttgggctgggctcttctgacccgcccggggcctcagtttcctcccgagccgttgatgctccggagggtcgaaatcgaaatctgtgaaccaggacggctcagtcgccaactaaacgttagtgtcttcattaggcaagcgtgcgttttaccattgaaaggcgtttcgcattccaattatggattgtcgctcagacttcagaattagacaagtggcaaggatagaggggcagatcaggttgtcctgattgcccatttgcgaagttttatgtttttgtttgggggaagagagtagttgaaaaatcttgcaggactgatgttttggggttattgtcacccccttccccccgctttttttgagacaaggtcttgctctgttgcccaggctggaatgctgtagcgcgatcatggctcactgcagcctcgacctctccgggctcaggtgatgctccgacctcagcctcccgagtatttgggactacaggcacgcgccaccacgcccggctaattttttttatttttatttttggtagagagag

SEQ ID NO: 26925 - DNA, 1109 bp, Artificial sequence
  DNA replication origin
agaggaaggcgaagcgctccttcagcgacgccttggtcgcctgccagttgtagagaggttcccgctgcagggggagcaggggccccagagaggacggtgagggcggcggcggcggccccgcggggcccggctccgcctcagcccccgacgcctgctccccagctgcggcaggcccgagtgaggccatcctccagctgcgcggttgcccacgttatggacaaaactccgccgccatcgcccaggccgcctccggaggccggcgctgcctccctgccttccgggaaaggcgcttccgggggcctcgcgcctccgcaggcccctccctgaccgcgcgcgcccccgcacgcccgggttgccgctgtgcgcggccgcgggaggtgtaacaggactggactcccggcagccccagggcaggggcgtggggagctggtcctagctcagcgctcccggaggtggagcttctgcaggctgggtgctgccgggcctacgggcacccaccccctggctcagtgccctgggtattctgactcagtaggtctggggtagggcctgagaatttgtaattttaagatgcatcgtggatctgcaggcggctctcacggctgcctttttcttcctgcaggccccttatcaccaagtccagcgcccccattgtgtatctgggacatgtcccaaggcctgtcccgaggagtgttttgcctggaagtggaggggcaggaaagtatggccaagggaacacgtgagggaggggatgacatgacttcccacaaccctgtaccccaagcgtggccaagtcgccgctccagaaggccgcgaaacccgtggaaattccggaagcagaggtggaaggcttagaaccccagtgacctctccccaggtccgcaggtccctttcccttctaattgaccctttggttccgtcctctgggcctaagagacatttccttctactgcttccacccctgtatttgaaacccctcgtgcttgcccaccttctcttgtagcgcttttcagtccttgcactgaaccactgcctaagcttgaaatttaaaaaattaaaaactaaaacacacacacaatggaaaaggctgtattatcccttcccaggca

SEQ ID NO: 26926 - DNA, 1149 bp, Artificial sequence
  DNA replication origin
gcgggatgcggtgaagggcgagcggcgcggcggctgcgatgagtgcctctgcggccaccggggtcttcgtgctgtccctctcggccatcccggtcacctatgtcttcaaccacctggcggcccagcatgagtgagtgagccggcgcggcgggggtcgcgccgaggggcggcgggagttggctcgccgcgacgggagcctcgcaacttttccgagggggctgggaccgtccgccgcgggacagaggttcgtggccgcaggggctccccgcgcctggccagactaggggggcgccccaggggtcgcacgggccgggtcttggagccgggccctgaggtgcccaggctggcgcatttcgggatgttggtgccagcaccgcgccaggtgcccggggtcacaggcgtcaatacggccatgcccctgccctggaggggcccaggggccggtggggagcggaacaaacacggacactacgaacctggccgtgtcagctcgtttgtgccttgttctttttgcatctcacgggaacgtttccatgtatggactttcgcatacttatcatttcttattaattttagaaactgttgtgaatgactagcagaaatagcccggaaccaacaggcagagacgtgggttctaggcctggctttggcactgacggtgtctggcctgacggtgtttggcactgacggtgtggtctggcctcggttttccggtcaagtggactttgtgtgcgtcctattgtaaggttccaccgagacctctttgtgaaggggcgttgtgaatggagaagtgcttcccagtgcctgcgctggggtaggatggggacaggcagcagaggcagaacacttcaatgtgaaggaaatgggtggggctgatggagggggacagggcttgggttcgaagccctgcctcccactccactgcagggatcacggactaacctgcagccggcagctgaaggcctgagggtcgccgggtgttgggacaggcgccagcctctgttcctgctgatgttggttgctgtctggagggaggaggaagtaacctgctatgtctctcagctgttggtgctaaggaaattgcatcagtctgtaggctgcaaacccccttcagctggtcaggccgtggagtgtctgtacatagggtgg

SEQ ID NO: 26927 - DNA, 1260 bp, Artificial sequence
  DNA replication origin
cggagagaagggacagcttgggcaaaggcttggagaggagaaagagcatgtgcctctccctggggcaccaatctgcaaggatgaggctgagtttctatggggaggtggagtttcagatgctggcagggctttgcaggtcttgagctctgaggagcagtcctggaagagagagtcacgggccatcggagtgcagttggtacctgaatgtctgagaggagaagggcttgcctatgagaaggtagagagagaaaagggctgagcttgggactttagagaccatggccagaagaagagaagcccctgaagtggaccatggggggcaggccaagaggcagaaggaaaacctggagagtgggggccatggagcccagaggagggaggttttaggaaggaggcggctgacgagagggctggaggctgagttggcaagggtggtaagcattggggcagacggggtatcagaagggggactggggtgtaactgtggtggcaaggtctgcagggccaggctctggggacccagctgtgatagagaggagatggggcttggtccagcaggctgtgacaagttttggggagttttagagtagaggaacaacatgccaagagccaggccttgagaatctttatctggcaggaggagtgtcatgggttggaaggaggggacaaaggtagggagaccatttgggaacatagctgtggtccagtgagggacactgagggctagacctaatgctgtgaagaagagggagaattgccggggtgacatcgtagcaataaagttgatagatttgctgagagactgcataggagaatgaggaatgaaaaaatgaccatgtggttttgaccttggtaagccgaatggtttcaccattaatatagagaggccatggctggcctggtggctcatgcctgtaatctcagtgctttggaagacaaaggcgggaggatcgcttgacgccaggagttgagactgcagtgagcaatgatcaccactgcactctagaccgggtgacagagtgagaccctgtctctgtacgtacacacacacacacacacacacacacacacacacatacagagagagcaagagagagagaggcaagatggaaggctggttgaggggagaagctgatgaattaagagttcaggcgagttgaaaggacctgtggcctgtgcaccatgcagttaaagatgctcatcaagctaccaggagaggccagcactggctcagagagccaggtgtgttagcaatggaag

SEQ ID NO: 26928 - DNA, 940 bp, Artificial sequence
  DNA replication origin
ttcgcggcgaccaaggactaccaggaaggggagcggctgggatggcgcgtccgcggccccgcgagtacaaagcgggcgacctggtcttcgccaagatgaagggctacccgcactggccggcccgggtgagtaccgcggccgcgcgcgggcccgcccgcccaccattttccccttcatgatggcgcgcccgccccctttccccatcgcctcagccccgagcccgcagctcgcggccggctgtggtgagggctgagggcggcgcggcacgaagaagaccgggccggggctgaggcaagggctcccggcctcgcccgcactccgccagggcggccatccttccgcccactttcgaaggcgggtccggcccccgcaggcccgacgctgccttcctcctggaaagccggtgccgaccgggaagccacgccgccgggcagcgggcctgcgacggaggcttcggctccgggcagggtcattggtggataccctgggtcccgggcgaacgtcggggcaggtacggcagcggggtgagcggctgtccgcgagccggcgagtgccggcgggcagtaaatcctggaaagtggtagtggtcatccagaggccagcgggagcctcttggcagtcattcatccatctctttgccttctagacttgttgagttttccctgagcgcgattcccggtgccccgcctgccctatcattgtcctggggtacgtgcctctctggtgcccatcgttcttttaaaccgacctctgatagccgagagcttgcagcctacctctgactggtgggtccagcaagcttcttgtgcctttccacctccatatttgttttaggtagaatctcaaaccttattcttggcctcctgctacagtccacaatagctctctcttcctacataacaaggttgtcgttgggctctttttctagaaagcgtctgca

SEQ ID NO: 26929 - DNA, 1589 bp, Artificial sequence
  DNA replication origin
ctgccccaagcctctcaccctcaagtctagtcccatgctggccaccaaagtaatgtctaaacctgaactgtgatcgcatccctccattgtttactgccctcccctggttggcttccaactgacaacctttcccctctcatttctctcctcttccctatatccaccccgtgcccacagggaggctggactgtaggggcaagcaggcaacagctagggctttgacagctagtcagagggatgtgagtttgacatatgaggatacagaaatcattctacagcttcatgagcaatgcgtgacatcatggcagctgcatacggtaggttctaggagagagagatgttagcagatcatcacaactgaggcaaagaggacctagactcatcttccacagtgagaaaagaggaaaaaaacgaacctgtaggacaggtgagtacaggtcaataccaaaaaaaaaaaaaaaaaagaaaaatcatgagatgcaagtagtaaggaaatgcattagtaaagtaatgtaaaagcactgctaacaaagtaaacaatccacaggaaatctagagactttaaagccccatcataggaagcccagcaccacagaacaagagcaggagttaaaacacacacacaccattctacaaggccagagaggggggcggatggtggggaaaactgtagcttctgtaaaagggagagagaacagacacaaatgagaactgtccgtgtgacaaggtgagggccacagaaagcagcatttaggagctatgccagctgaccccttaaaggaggtgggttacagcatgattaaagaagcagcattcgttcattggacagactccaaacgattccttgaattattctacttactcctcacaaaagagagtgttaggaagattcctactctcaaaatgtctttgaaagcagccagctagggaatttagagtaaaatagtggtaaatgaacatgttctagagctaatgaactgtatatgtacatacatctccagaaagggatgctaatttcaaaaacgttgtccaaaaggttgccaggattggaaacaagtgaccggccagtgcaagtccttttcacaaacactgcaggcctagaaaacgcacacagagagaaacataatcgcttatggactttggactcatgtggatacaggttcgaatcccgtctgtgccactcagcaaatgagaaaacctcccatgactccgattaaatagctcgccctaggtgggtcacactgcattgttaagggcagacctggggcaagaatccaataaggtcgctgactccggagcggtgctctttccggcagcttggtgcccagcagagggtcccctcgcgccgccgtcccccaggcctggagcgcctttgtcccccactcaccagagagcagccgcggaagtggctggctgggggtagccaggagagggtcgagtcagcgggaggtgggcgtgggagcggggggcgcgagtggggagaacccccagagtggcacggacgggaggggaagggggcggccgggtggtgattggctgggctgcggcaggcagctccgggccaagaacaaaagagagcaggcggcggg

SEQ ID NO: 26930 - DNA, 988 bp, Artificial sequence
  DNA replication origin
ccgtgtgcggggcagatttgaccagcttcactgcggaccctggagtccttgtcgcggctccgcgcgaggtggcccgtctttcagaaagcgctgggacggggctaaggcgcttgggctctgggctggaagccgggccgagccgcgtccgccgctccgaggttttcctggagtgacaggaagtgggcctgggctgcggagcccgcggctgcgcctgccgcttccttcaggggtttgcatgggaagcgccgggacgggaagcccccggcccccgacttcgagctcccttaacagtcccgcccagcctggccttgggacctgcgagcgcgtggctcgcccgtctcgggagcgccccgtcggttccgtgctgggagccgggcggcggcggcgaggctgggggccgcgggcggagaaggaggaggccgctgcggggtctcccgctgctcctccggagccgccgcccagacccggagccccgccgccgcctggctttgccggagttcctcgggatttgtcagccagatgtgacaagattgtggcgaggcgagtgaaggagatctgatattaatcagcgcgtagctccgagccaaactttcacaaatgcggtgtagaaacatgttcttctcatttaaggcatctctttgtggctgcggggctgccaccgctccgagtctgacagttaagtggaatgccatctcccagccttaattgtgtgagtgaagttgtgtgtggttggggggcggggggcatcagacgctcgggggttcggtaacgtcccctggttttatggctgtgctcgcctcagtcctctgaaggccagggcatttaaagcggcccagacgcctggtctcagccaggcctcttgctgttaacacttaaggggcctaaaagaggccccaccggtgtcctgggaatccctgtcagggagagagagagtgtgtgtgtgagggagagagaacatgtgttactgcataggaccacagagcagatg

SEQ ID NO: 26931 - DNA, 1160 bp, Artificial sequence
  DNA replication origin
gcgccctcctaggcgggaagaaattgagccccgagagaggcccttcagggaacaggagtcccaaaggcccgggagcctcggggggccgcagcctccgcgtccccctccctccttccctcctctgcgcctccctacctggctggctttgtggaactgcttcttcagcccggccaccgacatcgcgactgcgaccggcaggggcggggtggtctcaaggctcggctgggccacgcggccgcgacgcgctcggggagcgggagcccgggccggtccccccgcggctgggctccgccgggcccgcctcccacggccacggccacagccacagccgctgtcacactcgcacacacgcgcgcacgccgatggcaacactgcgttccaaagcccctgcgcagcccattggccaagccgcggcgatatgcaaatgaagctgctggggccgcccacgcttcattgttgcgtggagacctgggctacttgagccgcgcagaagaccggcctgggaagctgggcgtggggatgtcctgggggtcgggggagtacagtcacacagtgcttcttgctgggcgcgggacgatatagatctagctctgagattgtcatgggtaccgggagagagatcagttctctctgcttctgtcttggtgccgaaccggctttggctcacaggcaacatcgcctccctccggcgcattttcgctcggtgtatgtttaagaaaggaaggctcagaaatgcgcctagggagggacaacaaatgcaactcgatgggggacctgtggtaggaggaagcggtctgtgggtggcgggctttcttctctctccacgcggtgctctgggtgcaatctgctcaaatgattttggtcttctgggagccctagagttatggagtaatttactaataaatacggtgctagctcacttggtgctctgagcccgctgtcaacggcactaaaagcaaccatctccaaggtgccataaagagctcgttgcatatccggcggagtccaccagaccaggaacccagctctctcggtaacccctaccagctgtgtcagttacagagtgtccatttgcacagagtccagaggtcgacgcactcacagctaagcccagccagggacatggagcattgcgttaacctcgtgttagagctatcccc

SEQ ID NO: 26932 - DNA, 1246 bp, Artificial sequence
  DNA replication origin
tggccgtggccgtgggaggcgggcccggcggagcccagccgcggggggaccggcccgggctcccgctccccgagcgcgtcgcggccgcgtggcccagccgagccttgagaccaccccgcccctgccggtcgcagtcgcgatgtcggtggccgggctgaagaagcagttccacaaagccagccaggtagggaggcgcagaggagggaaggagggagggggacgcggaggctgcggccccccgaggctcccgggcctttgggactcctgttccctgaagggcctctctcggggctcaatttcttcccgcctaggagggcgcgagggtggggtgaggggccgcctgctctctcctcggcgtcttggcgccttctccttcccattccctggcccccggctctgccctgggccgttgtaaatcggagagattctgcggagcggagggcagaggtggcggccgcggggactcgggaggcggagacggagtgggcgtgggggggcccctacccgcgcgaggggaggacgaccacagggagtacgatgccggcagggcctcccccgagtctccagccgtttggttgggagagcctcgtggggggcccatcctccaccggccaccggcgcctccagagatgctgtgtatttggcgcttggctgtgtcccgctgagctccccgcgcgcgcatcgaaatggccccgtctggactgtgcccggctccccggctggggctctctaccgcggtccttcccctccccaccgtcttcccggtgtcggcccggggctgggcatcacgcttctgctcttacagagctgacagcctgcaggggagacacggagacagacacgtaaacaaacagtgctagacacacctccacgcacagaggatgacaaataacacagtgggggcgtcagggagagcttcccggaggaggagacatgtcatttgagaattaagtatgaggaagaattatggctgagggtgtgggatgataggaggaaagccgttctgagcagaggaaacaggaaaacaggaggggagacatgaaattgatgtgtgtgtgtgtgtgtgtgtgtgtgtgtgtgtgtgtgttgatgacaagcaaatttgtttttcaacatcaacattgcaggctcttccagctatggcagagctcacgttgtaaaacctgttccccaccagcaccgctgggtctgttgcttctcaccacctctccccgcaaccccagcccccattttgctagagccaggg

SEQ ID NO: 26933 - DNA, 1271 bp, Artificial sequence
  DNA replication origin
gcaccgcgccctcggcttgagctggaggcgccgggggcgcgaagagacgccgtgtggggccaggcccgggccgctcggagcgcgcggggccgcggcgacggcgggactcggctggaacgctcctccgcccgcttcctggaagccactcctcgccctgggccggccgccaggcgttgtgccaagagccgggattgccgacgccgccaccgccgccgccggcaggcgcactggggaaaggcggccgctgcgccgcaagccagcctggccgccccgcctcagccggagccggagcagggatgccgtcgctccccccgagcccacccccggccccacctcccatagcctccacccaccccgcccagacccgggcgccagctctgcaaagtcaggcccagcagccacacagaggtttgcccggaaccgctggctcgtgcctaagagccataggcactcctggccaggcaggaccatagtggagaccaatggccctctcctggcctgcgcctcctccgcgcagcatagacgccacacaagggactgtggagcgctcactgcccagaggcctgggacctttggcagccagggaccacgaggatcttgcaggagcgcctcttaactgggtacctggcgcctccttgtctgagccgggcttggggaactgagagctccacaggtgccagaatcatgccgtgtccaggcctgggatttggggttggggggaagagtgtcgcggacaagagactggggtgagttgcctgtgtacttctggaggtgaggagaagtaaaaggaaatgtttgtccctgtccttgtcctagtcccagcaggataagccaagggccaggagattgatcttaaaggctgcattatgcccccacctaagtcctaccacagtcgccatttccttgggtgtctgtcgagtaccaagctctttgtgtctatctgatcttcacagcagcagtagttcgagcattatcccatttcacctaggataaatctgaggctgggaggataacttgcccaccatgagtggagaagccaggactggaacccctatctgcctctctctagagcctggactgttcacccctaaagttgttctcctgccttctctgtggttgctgcgttccggttactgctagagctttgccaagagcaattggccctgcctgctttcctcactcattcttcccttacttactctggtgacttcctctgaccaagaagaggatcttcaaggctgtctctccactctatgtaaaatgattggact

SEQ ID NO: 26934 - DNA, 977 bp, Artificial sequence
  DNA replication origin
gcggcgcgcgccctccgcctctgggccggggccagcgcagcgctctgcgcgcccggagggggcgggagaggcggggcagcccccgtcccagccccatttaacttcgcggcggcggcggcgactgcggcgccgcgggctggaggccggcgtcggggaaggtcctggtgccggattccgcacgaggtgttgacgggcggcttctgccaacttctccccagcgcgcgccgagcccgcgcggccccggggctgcacgtcccagatacttctgcggcgcaaggtgggtgcaccgagctcggcgcagggcggcccctcaggggtcgggggaaggcgctccccagagggagtaagacttggagcagtggcctctctaagcaagttgggggtctccaagcagagtcggggcgtgccacgcgggccccagggggcctcaggactggggtgctcctcactgctgggcacctcgggtcgggcgcgcttcgtgccgtcccggaaggttcagggagagtctttcggcggcagttcgcgggctgaggggcgttcttgattatgggggaactccacagggttggagtttttcaggattgggagttactaagcagaaacctcgcgggtccgaaggtccggccggttgaccactgggtagcgagcgcccagaacgccgggggttgaggcgacgcgcgatcgtggaaagtgggcgtgggggtgaccgggacgcggcggaggcactggaggagcgacttcgaggcagcgggtagtcggaggagtgtgcactcggaaggctggtgcgagcaggcgagggtggcgcagagtcccagggccccgcactggccgcctcccttcagccaggagtcgccgcctcaggtcggaaacagcagcacatttgcggatcacattagaccaggcccttaatgccttctccagatggagagaagccaccgacccgcccccggacaccagctccgccaaggcgcccgcga

SEQ ID NO: 26935 - DNA, 1140 bp, Artificial sequence
  DNA replication origin
gattatgggggaactccacagggttggagtttttcaggattgggagttactaagcagaaacctcgcgggtccgaaggtccggccggttgaccactgggtagcgagcgcccagaacgccgggggttgaggcgacgcgcgatcgtggaaagtgggcgtgggggtgaccgggacgcggcggaggcactggaggagcgacttcgaggcagcgggtagtcggaggagtgtgcactcggaaggctggtgcgagcaggcgagggtggcgcagagtcccagggccccgcactggccgcctcccttcagccaggagtcgccgcctcaggtcggaaacagcagcacatttgcggatcacattagaccaggcccttaatgccttctccagatggagagaagccaccgacccgcccccggacaccagctccgccaaggcgcccgcgaggcgaagcgggagtcgagtgtgacctcggcttttccagtctcgactcatactgatttccctgtaaattgacaggaaaagtaagggaaaaagtccccgcttccctcctggtttcagctgacctctgctggctggccctcacctacttttaggagattgtgttaggctggctcaggggctgtgtcctccaaacctccctgaacttagctctcaggcgtctctctgggtgtgggtcccggacctcgagggcgcacggtgtcatctagcgaggaaagccttgaactatcagaagatctgcgtttcagccctaaaatgtcactatcttgctgtgtgaccttaggcaggtcctttccctctctgggcggctttgttgtcttagactcatttttgccgcgagcagcagaagctagcctaaaccttggctctgtgctggcttcctgagtcaaatgccaatagcgacaccctgctgctgacagataggcttgggcagggatatctcagcttctgaagagctggaggtatgagatgcccactggagacaggtccagccctcgcctgactttgttgtggaccttctaaagggagcccagttagcctgcaccctgcagtaggcagcggcaacctgggccaacacaaacctttccaaaatagtatatgggcttcagggtccctccatctaatgggtcgcttaagtcacggtttactgc

SEQ ID NO: 26936 - DNA, 860 bp, Artificial sequence
  DNA replication origin
agggtttgttgtttggataagtaagtcacccagactagcatgagaaatccaaactgagtgcactgtttgaccacacccaccttctcttccctcctcactccctcccactacaacccatgaaggttacagtgggtcaggaggtcaaaatgctataagaaaaaaaattccaagatgagaaaggaaagaaggatggaaggaaggaaggaaggaaggaaggaaggaaggaaggaaggaaggaaggaaggaaggaagggagggagggagggagggagggagggaaagagagagaaagaaagagagagagaaggaaagaaagaaagaagaaagaaagagagagaaagaaaaagaaagaaagaaagaaagaaagagaaaagggaaggaaggaaaaggagaaggagagaaaaagaaagaaagagggaaggagggaaggaaggaagggaggaagggagggagggagggagggaggaagggagagagagaaagaaaggaaagcaggaggcctaggaagcaagcaggtggacctaatctcacctgcgcgtgtaagtgaaggtggccttacttctttgaggaagtaacaactgagctgaaggatatacaagggttagacgaggatggcagggggaggaacagtgtgtacaaagcagaggggatgttccaagcaaacaggacaatttatgcaaaggctgcagttgaagagctacttgaagggaaaggaaacatacaagcttcatcaataacacctggcctagaaatgtgctggacagcaatgcagacagtgttccagtgggcatccctaacagctacacacctgtgcccccacttgcccttgggatgtcccaccaagcacaacagctagcagg

SEQ ID NO: 26937 - DNA, 855 bp, Artificial sequence
  DNA replication origin
cggcagccaccccgtccgggagggaggtgggggtcagcccccgccaggccagccgccccgtctgggagggaggtgggggggtcagccccccgcccggccaggcgccccgtccgggaggtgaggggtgcctctgcccggccgcccctactgggaagtgaggagcccctctgcccggccagccaccccgtccgggagggaggtgggggaggtcagcaacccgcccggccagcagccccgtccgggaggtgaggggcgcctctgcccggccgcccctactgggaagtgaggagcccctctgcccggccagccgccccatccgggagggagttgggggggtcagcccccagcccggccagccgccccgtccgggaggtgaggggcgcctctgcccggccgcccctactgggaagtgaggagcccctctgcccggccaccaccccgtctgggaggtgtacccaacagctcattgagaacgggccatgacgacaacggcggttttgtggaatagaaagtggggaaaggtggggaaaagattgagaaatcggatggttgccgtgtctgtgtagaaagaggtagacatgggagacttttcattttgttctgtactaagaaaaattcttctgccttgggatcctgttgatctgtgaccttacccccaaccctgtgctctctgaaacatgtgctgtgtccactcagggttaaatggattaagggcggtgcaagacgtgctttgttaaacagatgcttgaaggcagcatgctcgttaagagtcatcaccactccctaatctcaagtacccagggacacaaacactgcggaaggccgcagggtcctctgcctaggaaaaccagagac

SEQ ID NO: 26938 - DNA, 1395 bp, Artificial sequence
  DNA replication origin
acttcccagtaggggcggccgggcagaggcgcccctcacctcccggacggggcggctggccgggctgggggctgacccccccaactccctcccggatggggcggctggccgggcagaggggctcctcacttcccagtaggggcggccgggcagaggcgcccctcacctcccggacggggctgctggccgggcgggttgctgacctcccccacctccctcccggacggggtggctggccgggcagaggggctcctcacttcccagtaggggcggccgggcagaggcacccctcacctcccggacggggcgcctggccgggcggggggctgacccccccacctccctcccagacggggcggctggcctggcgggggctgacccccacctccctcccggacggggtggctgccgggcggagacgctcctcacttcccagacggggtggctgctgggcggaggggctcctcacttctcagacggggcggctgccgggcggaggggctcctcacttctcagacggggcggctgccgggcggaggggctcctcacttctcagacggggcggctgccgggcggagggtctcctcacttctcagacggggcggttgccgggcggagggtctcctcacttctcagacggggcggttgccaggcggagggtctcctcacttctcagacggggcggccgggcagagacgctcctcacctcccagacggggttgcggccgggtagaggcgctcctcacatcccagacggggcggcggggcagaggcgctccccacatctcagacgatgggcggccgggcagagacgctcctcacttcctagatgggatggtggccgggaagaggcactcctcacttcctagatgggatggcggccgggcagagacgctcctcactttccagactgggcagccaggcagaggggctcctcacgtcccagacgatgggcggccaggcagagacgctcctcacttcccagatggggtggcggccgggcagaggctgcaatctcggcactttgggaggccaaggcaggcggctgggaggtggaggttgtagcgagccgagatcacgccactgcactccagcctgggcaccattgagcactgagtgaagcagactccgtctgcaatcccggcacctcgggaggcggaggctggcggatcactcgcggttaggagctggagaccagcccggccaacacagcgaaaccccgtctccaccaaaaaaatacgaaaaccagtcaggcgtggcggcgcgcgcctgcaaattgcaggcactcggcaggctgaggcaggagaatgaggcagggaggttgcagtgagccgagatggcagcagtacagtccagctttggcttggcatcagagggagaccgtggggagaggga

SEQ ID NO: 26939 - DNA, 873 bp, Artificial sequence
  DNA replication origin
aaaaaatggagtcaggccaggtatggtggttcaagcctgtaatgccagtattttgggaggctcaaggccagctgagtaacatagcgagacccccatctctacaaaaatcaagcaaaaaactggctgagcgtgatggcacatgcctttagtcccagctacgtgggaggctgaggcaggaggatcgattgagcccaggaggatgagtctgcaatgaggcatgatcatgttgctgtattccaacctgggtgacagatgagaccctgtctctttaaaaaaaaaaagaaaaagaaaaaaagaaagaaggaagaaagaagaaagaagaggaagaagaaggagaaggaggaggaggaggaggagaagaagaagaagaagaagaagaagaagaagaagaagaagaagaagaagaagaagaagaagaagaagaagaagaagaagaggaagaagaagaaggaaatggagtctgttttaaaagggcagggaggtggatagtgtaggaagagcctaaaggagatagacaagaatcctcaatttcatcattaatgcaaggacaagccattgaagggctttgaggaatgcaagaatgacaagctctgaattaccttttaacataatcactttggctgctgtgtgaagaacagactggagggaatcatggtgggagctcggagaacagaacagaaagctgttaatgcagtttagattagctaataaggacttaggctacaagaaaggcagtaaagatggaaagacgtgctaaattaaaagtaatctttgggagggaaaattgacaggacgtggcaatggatcaaatgtgtgggttgaaagaaaagcaagaatgatgtcaaagttttgggataagcaactagaagccat

SEQ ID NO: 26940 - DNA, 1083 bp, Artificial sequence
  DNA replication origin
tggcaaggttcctggaaaagaggggctggaagggaaaggggagggagatggagggagaagctggagcttcataggtagtgcctggggactgcggcggccctccctaccccacacacgctggcctgtctcatggaacccaggcaatccacccatccacccacagttcagaccaatgccagctccctcgggcttccctcttctgtggtccccatgtcttccaacgcactggcccagggccacctcttgcttggagagccccatccaacagccaccagacctgatagagaaggaacactgattgaaccaaaatggtggagctataagggatggctggctggagtgaatgccagaggcccctctgggccatcagaaagcccagggtcctctgaggaaccctggggaaggcagggagggcaggtagccggatgccattggccatagacttctaagtctaagaggggagccttaactggttggcggggggctgcaggttacataggtgaggctgggcccttcctgctgggaaaagcagaagagggagactccgtggcaggaaagggaagtgagctctctaggcggagctcagctgggccagcagcactattggctgaatagcacaggcaacccctagaagcaacaggccaaggtgcgtgagcctgctggccagcagtagtgcttcagcaggggccagggaccctgccttcagtcgcacgctagcagctatcatggtacctgggagggagggaagggggctgtgtgtccttccatggcctatgaagtgtgttgtgggatgaccgcgtgtataggactctcaggcttttatcctagatcaccactggattgctgacagatagaggacgtgggaccgtgactatcacccctaatctgccgtggatttggctcttggcactcccaggctgggagctggatacctgccctggcagcatgactcagactgcgtgacaggtacggcgtgcccaggatgatgttcccaggcctctggccgcctgagtccagccccccacacaaccccctccaagctcccagcccctacaccataaaccatgagctctgtgccctctc

SEQ ID NO: 26941 - DNA, 1033 bp, Artificial sequence
  DNA replication origin
ccactccccttccagctggaaatttgtgctgcaaccagaggaaccagaaatggggtgagaaaacttaggggactgggttgtaagatcaaaggccggtcttgcagcagtaatgacagttcctaggggcactgtgacatcattgcattccactcctcccaggggaggggaccacatcagcgcgatgcccgagtcgctgctccacgatgggggagggaaacacacggtttcgacccaggtcctcagagacgccagcccaagaagcctagggaggtcgagcttggggcagcaggaggggagggcagagtctgcagtagggagccccgggagtcaccagcccaaagccacccagggatgactggtgagggcagggcctggggctgggggacccaggtcctgggagacgcaagcccaaagagcccagggaggttgggcttggggtggcaggaggtgagggctgattatggagcagggagccccaggagtcacctgcccaaagtcaccctggggtgattggcaagggcagggactgggctgcttgctgaaggggtggggctgactgactaggctttggttgggggagcccagaggggctggggttggggggccccatctggtatgcctcaggagtggtatggactctggcacaggtcttgtcatcggaggggatctgtggctgggttgggggccatgacctggtgtgttttacctttttcttggctgcggccaatttcccctgttgtgttttttctgacatcgcggggtggggagggaagcggggttggggccacatcagcgaaataccagtgagcactgctcaatgcctccagtcacctaccaggcagctgtgcaactgagccacaggtggcgtaaccagggcaccaatggaacgcagaataggggcgcggccttaaggctccaagcccattggtcagtgagaaagatgaaagggaaaggaggcgtggccaggcagcagcatgtccagagggacctgtggcatcataaggaaagctgcccatgcaaccgctgtccccgc

SEQ ID NO: 26942 - DNA, 1031 bp, Artificial sequence
  DNA replication origin
gagtaaggcagcctgaaacctcttgctcctaggtcccatagtctccactccccttccagctggaaatttgtgctgcaaccagaggaaccagaaatggggtgagaaaacttaggggactgggttgtaagatcaaaggccggtcttgcagcagtaatgacagttcctaggggcactgtgacatcattgcattccactcctcccaggggaggggaccacatcagcgcgatgcccgagtcgctgctccacgatgggggagggaaacacacggtttcgacccaggtcctcagagacgccagcccaagaagcctagggaggtcgagcttggggcagcaggaggggagggcagagtctgcagtagggagccccgggagtcaccagcccaaagccacccagggatgactggtgagggcagggcctggggctgggggacccaggtcctgggagacgcaagcccaaagagcccagggaggttgggcttggggtggcaggaggtgagagctgattatggagcagggagccccaggagtcacctgcccaaagtcaccctggggtgattggcaagggcagggactgggctgcttgctgaaggggtggggctgactgactaggctttggttgggggagcccagaggggctggggttggggggccccatctggtatgcctcaggagtggtatggactctggcacaggtcttgtcatcggaggggatctgtggctgggttgggggccatgacctggtgtgttttacctttttcttggctgcggccaatttcccctgttgtgttttttctgacatcgcggggtggggagggaggcggggttggggccacatcagcgaaataccagtgagcactgctcaatgcctccagtcacctaccaggcagctgtgcaactgagccacaggtggcgtaaccagggcaccaatggaacgcagaataggggcgtggccttaatgctccaagcccattggtcagtgagaaagatgaaagggaaaggaggcgtggccaggcagcagcatgtccagaggga

SEQ ID NO: 26943 - DNA, 944 bp, Artificial sequence
  DNA replication origin
gaagggaaaggggaggaagatggagggagaagccggagcttcataggtagtgcctggggactgcggcggccctccccaccccacacacgctggcctctttcatggcacccaggcagtccacccatagttcagatgaatgctcagccccctcgggcttctctcctctctggtcaccctgtcttccaactcacggcccagggccacctcttgcttggagagccccatccaacagccaccagacctgatagagaaggaacactgattgaaccaaaatggtggagctatacgggatggctggctggagtgaatgccagaggcccctctgggccatcagaaagcccagggtcctctgagggaccctggggaaggcagggagggcaggtagccagatgccattggccatagacttctaagtctaacagggcagcctcaactggttggcggggggctgcaggttacataggtgaggctgggcccttcctgctgggaaaagcagaagagggagactccgcggcaggaaagggaagtgagctctctaggtggagctcagctgggccagcagcactattggctgaatatcacaggcgacccctagaagcaacaggccaaggtgcgtgagcctgctggccagcagtagtgcttcagcaggggccagggaccctgccttcagtcgcacgctagcagctatcatggtacctgggagggagggaagggggctgtgtgtccttccatggcctatgaagtgtgttgtgggatgaccgcgtgtataggactctcaggcttttatcctagatcaccactggattgctgacagatagaggacgtgggaccgtgactatcacccctaatctgcagtggatttggctcttggcactcccaggctgggagctggatacctgccctggcagcatgactcagactgcatgacaggtacggcgtgccca

SEQ ID NO: 26944 - DNA, 1078 bp, Artificial sequence
  DNA replication origin
tcaatgtctatgttaagggagtaaggcagcctgaaacctcttgctcctaggtcccatagtctccactccccttccagctggaaatttgtgctgcaaccagaggaaccagaaatggggtgagaaaacttaggggactgggttgtaagatcaaaggccggtcttgcagcagtaatgacagttcctaggggcactgtgacatcattgcattccactcctcccaggggaggggaccacatcagcgcgatgcccgagtcgctgctccacgatgggggagggaaacacacggtttcgacccaggtcctcagagacgccagcccaagaagcctagggaggtcgagcttggggcagcaggaggggagggcagagtctgcagtagggagccccgggagtcaccagcccaaagccacccagggatgactggtgagggcagggcctggggctgggggacccaggtcctgggagacgcaagcccaaagagcccagggaggttgggcttggggtggcaggaggtgagagctgattatggagcagggagccccaggagtcacctgcccaaagtcaccctggggtgattggcaagggcagggactgggctgcttgctgaaggggtggggctgactgactaggctttggttgggggagcccagaggggctggggttggggggccccatctggtatgcctcaggagtggtatggactctggcacaggtcttgtcatcggaggggatctgtggctgggttgggggccatgacctggtgtgttttacctttttcttggctgcggccaatttcccctgttgtgttttttctgacatcgcggggtggggagggaggcggggttggggccacatcagcgaaataccagtgagcactgctcaatgcctccagtcacctaccaggcagctgtgcaactgagccacaggtggcgtaaccagggcaccaatggaacgcagaataggggcgtggccttaatgctccaagcccattggtcagtgagaaagatgaaagggaaaggaggcgtggccaggcagcagcatgtccagagggacctgtggcatcataaggaaagctgcccat

SEQ ID NO: 26945 - DNA, 1271 bp, Artificial sequence
  DNA replication origin
ggctgtgggggtgacttagaatgccccagggaggtgggtggatggaagggctttgaggcagagggaaagaggtctgtgccaggggaggacaagtcttgtcatctccatgagcctcagtgtccccatcagtaaagagggaggagtgcccattgtcagccacccacagtgctctctatctgaaagtgacttggaagactggctaccatccgggtgtgaggagtcattagcagtgaggccaagtttgggaagcctgagaggaggagctgtgcaccgaagggaggatttttttttttttttgagaatccagaggcccttattgtctgcttcctttctcagctgaacccctggccccagagcccccagcagggccatctaaggtagagcagctacaagatgagaccaaccacctaaggaaggagctagagagtgtgggaagacagctccaggctgaggtggaaaacaatcagatgttgagtctcctgaacaggagacaggaggagaggctacgtgaacaggaggagaggctacgtgaacaggaggagaggcaacgtgaacaggaggataggctacatgaacaggaggagaggctacgtgaacaggaggagaggctgtgtgaacaggaggagaggctgtgtgaacaggaggagaggctacgtgaacatgaggagaggctgtgtgaacaggaggagaggctatgtgaacaggaggagaggctacgtgaacaggaggagaggctacatgaacaggaggagaggctacgtgaacaggaggagaggctgtgtgaacaggaggagaggctacgtgaacatgaggagaggctgtgtgaacaggaggagaggctacgtgaacaggaggagaggctgtgtgaacaggaggagaggctacgtgaacaggaggagaggctgtgtgaacaggaggagaggctacgtgaacaggaggagaggctgtgtgaacaggagaagctgccagggcaggagaggctgctggaagaggtggagaagctgttagaacaggagaggcggcaggaggagcaggagaggctgctggagagggagaggctgctggaagaggtggagaagctgttagaacaggagaggcagcaggaggagcaggagaggctgctggagagggagaggctgctggaagaggtggagaagctgttagaacaggagaggcggcaggaggagcaggagaggctgctggagagggagaggctgctggacgaggtggaggagctcctggacgaggtggaggagctcctggagcaggag

SEQ ID NO: 26946 - DNA, 1066 bp, Artificial sequence
  DNA replication origin
tctatgttaagggagtaaggcagcctgaaacctcttgctcctaggtcccatagtctccactccccttccagctggaaatttgtgctgcaaccagaggaaccagaaatggggtgagaaaacttaggggactgggttgtaagatcaaaggccggtcttgcagcagtaatgacagttcctaggggcactgtgacatcattgcattccactcctcccaggggaggggaccacatcagcgcgatgcccgagtcgctgctccacgatgggggagggaaacacacggtttcgacccaggtcctcagagacgccagcccaagaagcctagggaggtcgagcttggggcagcaggaggggagggcagagtctgcagtagggagccccgggagtcaccagcccaaagccacccagggatgactggtgagggcagggcctggggctgggggacccaggtcctgggagacgcaagcccaaagagcccagggaggttgggcttggggtggcaggaggtgagggctgattatggagcagggagccccaggagtcacctgcccaaagtcaccctggggtgattggcaagggcagggactgggctgcttgctgaaggggtggggctgactgactaggctttggttgggggagcccagaggggctggggttggggggccccatctggtatgcctcaggagtggtatggactctggcaccggtcttgtcatcggaggggatctgtggctgggttgggggccatgacctggtgtgttttacctttttcttggctgcggccaatttcccctgttgtgttttttctgacatcgcggggtggggagggaggcggggttggggccacatcagcgaaataccagtgagcactgctcaatgcctccagtcacctaccaggcagctgtgcaactgagccacaggtggcgtaaccagggcaccaatggaacgcagaataggggcgtggccttaaggctccaagcccattggtcagtgagaaagatgaaagggaaaggaggcgtggccaggcagcagcatgtccagagggacctgtggcatcataaggaaagct

SEQ ID NO: 26947 - DNA, 964 bp, Artificial sequence
  DNA replication origin
ccttccgcgcccctcccgccagaggtgagagtaaaatgtccgtgtcagggttcaaggccaagctgaagttgttgtcctctattttccacaagaaccaggagccgccgcggcagctcaggctccactgcaacatcacggtgaggcgcccagcggcggcttcacacggcagggcgagggcggagaggaagagcccggagtcccgggacaaaggggaacctgcccaggagaggccccggttccccgggccgggtgagcgcgcacctttctcccgcgactggcctggccccgatcgccgggactgcgggaggcttgggtgggaggagggggagggcgcgtctctctggctccttgctgcggggctggcttgggggctgccggcacctctcgccccagtcaccgcgccccgaggtgggagcccgcgtcgcccgcagccctttcggggcccatggtcgccctcagtcagccagcctgctccccgggaccgcgacggggcgtggcagggcgtctccggctgttgtttgagcccgggcggggaaggggaaaggccttcaagattttcggggttttggccgggcgcagtgctcgttcctgtaatcccagtactttgggaggctgacgcagctggatcgcctgaggtcaggagttctagactagcccggccaacatggtaaaaccctgtctctactaaaaatacaaaaattagccgggcatggtggcaggcacttgttgagatggagtctcactctgtcgcccaggctggagtgcagtggggtgatctcggcttactgcagcctccgtctcttgacagtccatgggttcaagcgattctcctgcctcagcctcccgagtagctaggattacaggctcctgacaccacgcctggctaacttttgtgttgtttagtagagacagggtttcaccatgttggccaggctggtctcgaactcctgacctcaaatgaccc

SEQ ID NO: 26948 - DNA, 1255 bp, Artificial sequence
  DNA replication origin
cggccacaagcatacacaggacacagcaaaggtggacttgactaatgcagcagggaacagcatgggtgggacaagactgtgtagactgggggagaaaggtcctgctccaaaaggctgatgatcccagtctgttactttagactgggtgatgagtcaggggaacttctttccctacttcttgccccatggggtctactgggaaggtcagcttcctttctttggactgttcctcctttgagctctgcctcaagagggaaaagcctggaaacctggctttctggggtccacacccataatgtcctagtcagacagtcacaccctaatacagtactgggtggtaattcctcccatgcaggatccggggatggccccagctgggccctcctgacattggagcaggggcccggctcacctggatttggggtgcggggcggctgaggctcacgcccagagccttctttagcaggaggattccgagcagatcatgactcagctgcagtcgctggtccctcagggaggtgtggggagctgtccccaatggggatgggctggaaggctccagactcttcttgcccatgaagtgacctggaaaggaggtgtccaggcacaaggaagtcaagcagccaggatcctacctcagaggaaaagttcctcatctctcccacgtttccgttcttgtagcgggaagacacttaaccttcctcctcttggtgcttccacctcaccaaggagccacaaaggtgtctgggtggtggcaaagcctgctccctcagcttttcctgaacaggtagagaggatggcacagctggcaggaaggtgggatggtccagggccagggagaaactctgctagttgtgtgggctgcttggacaagggacgaaaaagggcagggtaggaagtggagagtgaagaggcgcctggaaagtggaggtgcagcaaaaacacaccagcggttagaagattcggttaagtctcgcctaaggtaaggggcaccggctggcagtgggatttaggatctagcccagccctgtcttaaactggctgcgcgaccttagccaagtcactgacctgtccgggtctcaagtacatatctattaaattagatgagccccagggttttccacctgctccgacactagtgtccgtggctgaggagcggccagagggttgagaaggaaatggggtctgaactggatgaggggcgcttgcttgctccgtccccaaagacttaccggtggcccagaggttgcctcgc

SEQ ID NO: 26949 - DNA, 1711 bp, Artificial sequence
  DNA replication origin
caagagagacaggtctcagtgatcctgctagaagggagaggacagagaggggtgaagacaagagacaggaagtgaggggagttcttttttttttttttttcccaaggcagaagaatttttcttagtacagaacaaaatgaaaagtctcccatgtctacttctttctacacagacacggcaaccatccgatttctcaatcttttccccacctttccgccctttctattccacaaaaccgccattgtcatcatggcccgttctcaatgagctgttgggtactcctcccagaccgggtggtggccgggcagaggggctcctcacttcccagtaggggcggccgggcagaggcgcccctcacctcccggacggggcggctggcctggcgggggctgacccccacctccctcccggacggggtggctgctgggcggagacgctcctcacttcccagacggggtggctgccggacggaggggctcctcacttctcagatggggtggctgccgggcggagggactcctcacttctcagagggggcggttgccaggcagagggtctcctcacttctcagacggggcggccgggcagagacgctcctcacctcccagacagggtcgcggccgggcagaggcgctcctcacatcccagacggggcggcggggcagaggcgcttcccacatctcagacgatgggcggccaggcagagacgctcctcatttcctagatgggatggcggccgggcagagacggtcctcactttccagactgggcagccaggcagaggggctcctcacatcccagacgatgggcagccaggcagagacgctcctcacttcccagacggggtggcggccgggcagaggctgcaatctcggctctttgggaggccaaggcaggcggctgggaggtggttgtagcgagccgagatcatgccactgcattccagcctgggcaccattgagcactgagtgaacgagactccgtctgcaatcccggcacctcgggaggccgaggctggcggaccactcgcggttaggagctggagaccagcccggccaacacagcgaaaccccgtctccaccaaaaaaatacgaaaaccagtcaggcgtggcggcgcgcgcctgcaatcgcaggcaccgggcaggctgaggcaggagaatcaggcagggaggttgcagtgagccgagatggcagcagcacagtccagcttcgactcggcatcagagggagaccgtggaaagagagggagagggagaccgtggggagaggcagaggcaggggcaggggcatggtcaggggcagaggcagaggcagaggcgagttcttaaagggaagtgaaatgtgtcaaaaacaaaatgtgtgttcttcaagtttgcctgaggctttgatggtgtagatattatgtgggaggtaatttctgtttgtgctgtctttggcatggtctgggctgttttaaagtgtgcaaaggtcagcctccacttcagctcagcgtccctatgacaggctctagcttagtacaatattgccagtccgctctggagtccagcgatagaagaggaggataaagaagaaagttttacatttgctaaccacctattccgcccacatcgatggtaccctgctaattttctctttctgccgtgaatgcttatgatgtcaaagtagtcttttgcatggagaggaatttaagccctgggagaaaataggattt

SEQ ID NO: 26950 - DNA, 898 bp, Artificial sequence
  DNA replication origin
ccctctgcctggctgcccagtctggaaagtgaggaccgtctctgcccggccgccatcccatctaggaaatgaggagcgtctctgcctggccgcccatcgtctgagatgtgggaagcgcctctgccccgccgccccgtctgggatgtgaggagcgcctctgcccggccgcgaccctgtctgggaggtgaggagcgtctctgcccggccgccccgtctgagaagtgaggagaccctctgcctggcaaccgccccctctgagaagtgaggagtccctccgcccggcagccaccccatctgagaagtgaggagcccctccgtccggcagccaccccgtctgggaagtgaggagcgtctccgcccagcagccaccccgtccgggagggaggtgggggtcagcccccgccaggccagccgccccgtccgggaggtgaggggcgcctctgcccggccgcccctactgggaagtgaggagcccctctgcccggccaccacccggtctgggaggagtacccaacagctcattgagaacgggccatgatgacaatggcggttttgtggaatagaaagggcggaaaggtggggaaaagattgagaaatcggatggttgccgtgtctgtgtagaaagaagtagacatgggagacttttcattttgttctgtactaagaaaaattcttctgccttgggaaaaaaaaaaaaaaaagaactcccctcacttcctgtctcttgtcttcacccctctctgtcctctcccttctagcaggatcactgagacctgtctctcttgccccatccccaaactcccattccatacactggtgtttcttaaagcctagacctcctctgtcacaaccgcttgatggcttgttaaaaatgcagattcttggctgggcacggtgg

SEQ ID NO: 26951 - DNA, 1210 bp, Artificial sequence
  DNA replication origin
ccgagtagttgggattacaggcacgtgccaccacacccagctaatttttgcatttttagtagaggcagggtttcaccatgttggccgggaaggtctcaatctcctgacctcatgatccgcccgcctcagcctcccaaagtactgggattacaggcgtgagccactgtgcccagcctagtgagtcattctaagagtgaaagaataagaacttgcagcatgtatttatttagtcagacatatttattaatcccctactatgtatgtgcaaggcactgagctgagtgctgggaacagacaccatccagtatgaggcatgcattatggtatgacatagtggtcaagggcacagaccctaagcccagttctctgccttcaaacccctgccgggtgaccttgtttaataaagcaactgtactccacttctgttttatagggacaatactgacaccatcctcatgggctgctgtgaagattaaatgaatgcttcatgagagcttgggcttgatggcagaaatgagggaggagagagagggcagtaactatgcggagggcggatgagggcaaggaagaattttaaaggatgacaagattttaaagtaaagcaggagaggctgaaggtgcatcagtcatgatctgttctgtcccctaaggggggccaaatggtgggaggggagagatcgagagcaaacgcagagaggctggctttagctaggaagatacttccgcttgtgagctggaggggaggagtcaagtgtgggtgcaggtgctgactctgaagtaaccgcaggcaagagggaaggaatgtcaccaaggggggaggggtgaggaaaaaggaaaagttgtaacacactgtctcaaagaggggatctaggaagatgcaaatgtcagggattattcaggactggtgagctgataagggatactgatctgcctggttgggtaacttctggtggtcatgggagctacaggagaaaagcattaaaaaaaaaaaaaaggtggggtgggggaagtggtgagtgcagaatgtcacagtggtgaaatccggaagaatagagacaggggaggctggccattgtggctcacgcctgtaatccaaacactttgggaggtcaaggcaggtggattgctggagcccaggagttcaagaccagcctgggcaacatggagaaacccagtctcaataaaaaaattagctgggcattgtggcaca

SEQ ID NO: 26952 - DNA, 1637 bp, Artificial sequence
  DNA replication origin
actgcaggccagagtctcggccgcgcgcgtccccagcgccggctgcgggagccacaacatggcgacggcgatggcgggcggggctgcggctccgggggcggagcgggggcgggagccggcctggcggcgggacctggctggggctgccgcggcgggggattgggggggggggggggcaggcggaaggcgactcggacctgggcaccggcccaggacggtgcggtggaggggctgccccggcctgggcccggcctcccgcctcccgcctcccgcccgaggcgggctgcgcggcgcaggcccggcgacggcgacgacggcggcggcgggtagggcggggcgggacgcgacgggacggggcggggcggggacggcgccgctcagggctggacccccgaccccggccggcccccgcccggctccagtccccgccacccgtgctaggcaccctgtgcggtcgggcaggcagccgctgccagcgacctgggcctcttgtcctctgacgcgcctcggggcaggggcaggggccgaggccgcccactagaggaacaggatctgcctacgcagctgtctcgcccggcaaagagcgcccaggacccgggactgcgtcctcttcactgagacctggcgcatagggggcctagtcgaggctgttaagtgaaagcaagcaggggtggcgtgggcctggcgctcaggtgcgccctaaatgtttggtcatagctggctacaaggacattcgcgcaggcttggaggtgcggggcagcctgacgtgttgcctctggggtaaccgagggacgcgcggcaaacagagatggaggactggcaacgggtgcctcgaagaggtagactgggagatctctcagggttactggggaaacgatgactgtgcagggtgagaactcagtgagtctggcagaaggctgggagggtgaccggcaggaccttccaagaacccggcgtacctggaaactgggtccgcagcattagggcggcagcaaggtcagggtgtgggaacacggagatgaggccctggtgactaggagtgagcacacactgctaaccatggagaaattccttctccaggaaggagatgcaaatgtgcaagatggctggaactaacatgcagccggagcctgctgtgcaccaggcacagaactgagttgaagagcttgtctaaagagtatgttagccaatgaagcaatggagttaataaagggtgatgatttcaaatgtttggcagtgagagagagaaaagtaggcctggagctcaagaagtaccaagagtaaaggagaaagttgggtcctactgtggaagctgaggcaaaagcatcccttaagccgagaagtttgagttcagcctgggcaacatagcgagaccctccctctctgcaaaagagtaaagggaaaagttgattgttttttgttttttttttttgtctttggagacggagtttcggtctcgcagcccaggctgtagtgcaattgcgtggtctcggctcactgcaacctctacctccagagttccagtgataatccagcctcagccttcaaagtagctggaattacaggcgcacgccaccatgcctggctttttttttttttttttttttttttttttttgagagagagtttcgctcttg

SEQ ID NO: 26953 - DNA, 1285 bp, Artificial sequence
  DNA replication origin
cccgcagccggcgctggggacgcgcgcggccgagactctggcctgcagtcgccgccgccgccgccaggtaagcgccccccgcgggccgggccgagcggggcctgcgggccggggcagccccagcctgggcccgggaggatcgcagccgggaccgagtccgagcccgagccggggcccggccctgcagcctggcggaccctggccgccgccagaggcggcagccacttcccccgaccgccgcctggcgggcccgggccgccaccccaccccgcccccggccgtcgggcgccggccccttccgccgctgcgaccgccgctgcgaccgccgctccttggcaggccgggcacgctgctgtcctccgcgctgggcgggacgtgcggccgccctcggcgatagccggcggcccccagcccgggcacggataacggtgccactttctccctctgggacggcctgtcagcccgaccgtccccgccgcccgaagagctgtcgccgtcacagggcagacacttcggggaacgaccctctttggcgctcctcagtactcccctcccctgagcccaagttctgaccctgaggaaggtttctcccggagcagacaggtattcctagagctccagagttggggtcctcaggggtgaccaggcctgttgatcagggtgaaaattgtctctctgcaagggctcttcctgccaacgagggggttggcgggaggctcagtgtgacctgagggaggacaggagagcgtctgctggacagatggcctcctggccttggatcagcgtttgtgagggggaggggtccgtatgaccttaggtatgcctgctcctgagtactgcaggattattgaagctgtttagggattttaaaccattttttgagtaggccaaaggtggcattaaaggtcctggattggaataagtccacaggcccacccagggaagcatgtttggcatccaggactagtctagaataggactggcagtagaagaatgggacttggggagtaagacggtatttggcttatggtttgcccacttgagttcaggcctgtgctcatggagggcctgtagggtgcttctgtcgcgggtgcagtgtggtgcacagtgtggcagagtgcggaggatgtggacagacagattcctggcctggtggatgcttggtggtattttagtagtctgtttcctcaacctcactgttacgttacacagtgaaaggggcagaagtgtggtgctagtgcgtccattttgatcattttccaatttttcaactagttgtggcttt

SEQ ID NO: 26954 - DNA, 990 bp, Artificial sequence
  DNA replication origin
gcacgctgagcaggtagctccggctggctgggctggggatccacacggggccgtcgtcctcaccgtcgccccccgcccccgaccgcccacccgcgccccagccccggctgggggccctccgcgaccccatggcaccgccctccccgaccgccggccccgcactcgccgctgcctcgcctgtcctccaggccccggcccccgggcccctgcccgccgccgccgctcccgcccgcggctgacgcgcgcccctatttatagccggtggccgggccgtcgtcacctgctgctgtccctcccctggcctggcccgacccgggcagcgcggcttggagacgccggggggcgccggggcccatgtgcccgccccagggccggctccgagtccgctcccttggcggccctggtgtctgcagtagcgccgcgtctggagaggcccgggaggcctcgggaggaaggcgcagcgggtgtcctggtcatggaggacaggccccttcgtggagctcccgggacccggctcccggccggcctgctcatgtcccgtgtggcatatgaggggtccacgaggcctggccggggccaggggagccaggtcaaccgctggccagcttgggctagaccgcgggagaccagggagccaaagaaccagccctcttcctggcaccagccgtgactgaccctcgccttgcctcgccagtggctgttggcccagcacatagacaagccaagccacctccattagtgacctgagtccctgggaggccggaaccccgtgggatctctctcctgtctcccccaacacccccagtaactagcatagattaggggctcaattaacacttctagatcactccttcggcctccatttctcagcaccagagggggaaatgggctgagtcctgatacccagaaaaataatcaaatcatgcaacaatttccaagaactagtgccaagcactgccgaaacctggtctaaatattggaagtccccac

SEQ ID NO: 26955 - DNA, 1398 bp, Artificial sequence
  DNA replication origin
ggcgccccccggcgtctccaagccgcgctgcccgggtcgggccaggccaggggagggacagcagcaggtgacgacggcccggccaccggctataaataggggcgcgcgtcagccgcgggcgggagcggcggcggcgggcaggggcccgggggccggggcctggaggacaggcgaggcagcggcgagtgcggggccggcggtcggggagggcggtgccatggggtcgcggagggcccccagccggggctggggcgcgggtgggcggtcgggggcggggggcgacggtgaggacgacggccccgtgtggatccccagcccagccagccggagctacctgctcagcgtgcggcccgagaccaggtaagtggcaccaaggggcagggcggcgtcgggccggcgatgccctgggatcagtccctgtgagggcggcctggcccctggaggcctgggctgggcctgcgccctcgagccctctcagccccaaggcccagggcctggggacatggccgggctggaatggctttcatagccccttgtgacccctcctgatccatgcgcctcaggcctctggcaattcgaggctcaagagaggacaaaggctccactttggagtgatttcatggggtctgaaggctttccttatctcccctgccccctaccctgctactccctggcttgggattccacagctagcgataaggaaagccagagtggctgaaattcctccctggcaggaagggagggggagagcactggtggggacagggagagggtgctggggggctgcccagagtaggagctgcttagctcagggtggggaggttctccaggaagaaataaacctttgtaaataaggttcctctactgggccgaggacttgggtcctccccaggacctgagtgggggctggtgagatagggggtgggatgaggtactgtctggagatgttgggaattaaggacttgcagctctgagggagccaagtgccctgtccagtttggggaagtgaaatgccaagggaggtgtggaactgatgagcccttcactggtcttccaagagttcaagaggtgtggaagctttgttttagcagctaggccacccacagatataaagacacaaagacaatagacaggcatccaggaaatcaaaggcacacaggcacacgtggacaggcgcattgccatggagacagacacttcctgccccctgtgggcagctcagtttcccttcacttctggagtctgttttccaaagggaaatgtgttgagatagtggttgtttcatagcctgagaacttgacttgtgtattatgcagaaaacggccattcctccaagaggctgtccagagacctcttgttctccattcctaaaacagcataaaaacaggcatcgaggac

SEQ ID NO: 26956 - DNA, 998 bp, Artificial sequence
  DNA replication origin
agtgagcagtgggctatttatagaaaggggtggggagggactggagtgccagctacagggaccacaggcatgccctttgccccagccagtttccagatgccaggcatgtgggcagcacagcctgactgtgaccctcttctgggagtgtaggagttcacagccaaggggactgtgccccggagggagatggaagaagataatgttctctggggtgggaaagggggccagtggagagctttctgtgggctttgctgaggcaacagtgtttcatgggggagacggaggagcaggtgtgcgctgtagtgtacagcaggtggcaacttggctactcattcgatttttaacaaagctgaatgtccaggaaatgctggttaaatctgggtttatctaaggttctggagtcaggcatacctatatgcaaatctgactgccttaacatggcgtgatctagagcaagttgtaaaactggaagaataatcataacaatacctacttcgtagggctgttgtaagaatctggtgccctctaagaactaagtaagtggcagttgggatcagatatgactatggtgggaaacagaggcaaagtgtttttacttggtaacaggagtgccatcatcttctagggaacaggtagctgacagagaaaagattatgttttgtgtggagacaggggtagtggagtgtccactccccaaagaggcagatgggtggcagcgttaaggagcttgaggggtgggattgagagggcaggaaggaaacaattcgtcccttttggttatttctttatgtttcaggggcttggggggcattatttcacagtggttttgggagacagagtgttttatagtgggacagaaagaagacagtgtttcttatgagtggcagaaggaaaagtatttcaagagtggggctggggtggataaaatagatagaacatatttacactgagacaaatactggttatttatttgaagtcccaatttaactgggtgtcgg

SEQ ID NO: 26957 - DNA, 824 bp, Artificial sequence
  DNA replication origin
cagtgagggtgaaggagaggtttcccctgaggggcctggcctcctgggggcctctcaggagagcagcatggctggtcgactgggggaggcgggtgggcaggcagcccctggacaggggccctcagcagagagcatagcccaggagccctcccaagaggagaagttcccaggggaggctctgacaggtctcccggcagctacacctgaggaactggctctaggggcccggaggaagagatttctccctaaggtcagagcagcaggagacggggaggcaaccacacctgaagaaagggagagccccacggtttccccccgggggcccaggaaaagcctggtgcctgggtccccagggactccagggcgggagagacgctcccctacgcagggcagaaaggcgagcatgctggaggtgcctcgggcagaggaggagctggcggcaggagacctgggccccagccccaaggccggcggtctggacacagaggtggccctggatgaaggcaagcaggagacactggccaagcccaggaaagccaaagacctgctgaaaggtgagcagtggggagggagagggatggcttcacaggacagggccacagaaagcacactgctgctgctgctaacagcactaccccatgacagatagcatatccctcctcgggattcataaattaccttggtaaaggtacccttctctcacagcctttaaggcctggttcttgttttgattctgccactccacagagtggagataacagtaccgcctttgcaatggcatgaggcttaaatgggatggaatagatgaagtgcttagcacaggg

SEQ ID NO: 26958 - DNA, 1021 bp, Artificial sequence
  DNA replication origin
gcagggagcacatgcagctgtttcgatggatcggcacaggcctgctctgcactggtgagcctggggcccagcactacccaggacacaatgactcctgcctcagctatccatgtctcagggcagggtcattcactcacccagtcattcaacaaatggttgttgagcaccaactcaggtccagctcccttgctgggtactgaggcatctgttaagccaggccagatcttgttcccaaggcactccctcatcagtaagggaggcggaagaaatagtcccacataatgcagcatgtcatctgggaacaccaaggaggaatgggggatgatcagggaggacttccaggaggaggtgacattggagtctcacaggctaagtaggagttagccaggtggaggtgatagatactaaggagggcaaaggcactccacacagaggagtcacaggagcaaaggtgaaaactggcagggtgtgggtttcgataaagttcgacgtctgcactgtaaggtctggagggtaaagttctagacaaggagtgtcaggggatggggctggagagataggaaagggcccaggatggggagtgggtagggatatgggaggatgctcaaggacttggattttaccctcaaggccagagagagccactgaaggttttgaacagggaagcgtcaaggtggaattcacacggtgggaccctggaaggagggcaggaaagagggggagatggagacattgaggactgcaatgcctgtgtgagaatgaagctgtggaaggtgggcgggggcaatgggagaggtccttgggaagcaatgctagctgtacttggcaatgactgggtgtgcagcatgaaggaaaccctgaattagggctgccccaggggcctgctcgggtgataggaggatgatggtgtcttccacagagctagagaacatgcgtgcagagggagtcttggcaggaagggggataattaggatagtttgttggaggtaccactgccaggccatctgagggagagaggagg

SEQ ID NO: 26959 - DNA, 1564 bp, Artificial sequence
  DNA replication origin
gtcttgggtgactttgtgggtggcacacgccagtgaggtttgggttacttctgtcagtgtgacccattttcagtccactgtcacagggtacagaagtgttcagggacctcaaggtgcaggttagagccaggggaggaggggtggggtggaattgatgttaggtggttggagctgagaggaagcctgtgacttcctggagtgtcccaggctgaggttctgtgtatgggaaaaagtgggctgagactccagaagcaggcagatgactcctatttttcctatctgcttctgcatcattcatagccccaggtctctaagtctagggtcccaaaattgcagaactggaaattagttacagctttccgggaacagagagggtaagtgaccagctcaggacagcacaaggcagtccgggcagtcagcaaggtgtggggcggtgcacacggggcttttcaggccagctgatcccccagccctagtccccaactccttcatttagtgcatggcccaaggaccaacaagggaggcgggacgccgaggtcctgcctaggaggggagggccgagaggactagagctgcttggagccccagaagcggcaaggtcagcgccgggagtcgtcaaggccgtacttctctgcagggcggggaggagaggtcgcgctttaaacttccatgaactctgttggttccaagcattttctccatgaagtatcctttatttacaagagctccagattctacctggaaaaaagacctcttaaaattgcagagcaaaggcagaaaaaaattatacgatttaggcggaataaagagtgatgtttaaaaatcttttcctttgttttttaagacatcttcaccaagccagtagtacttttataaggcagagaagcataaatattaatattgcttaatgggcttaaacttggtaatagagccacgtgccagtggttcggggcagtttcgccagtaacgtgctctcgggttaccctgctcgggccagagatcgaggctccggggacccggcacctgaacctgtgctgcagtcccagcgcgacagcagggaatccagcccgcagcacgcctccgggtctttgcagtagccgggccaaggcgggagcggctgcctctcagggtcgctccagggccgcgctaggaaaggtgtggacggtcggagaggacaggaaggagccggctgcaccgcgccagggtctccgcaaaccgggagcccagggagggcgggaagactggcgggggtccgaggcagcccgctacaggatacgtgatggacgcccagagacaccgccctccagctggtgggggaggagccccagccaccaagaagttaagtgactggcccagttcacacagcaagctagtggctgtgtgcgtgtccggggtcctcatgggccccaggcctgcaatgcgtacgccccttcccctggctctgcctttggggtctcggacgcccgactagcactttggttaaaatgagaggaggacgggcgcctgcagcctgcccggtgctgtagctttgcggccgccccggcgcctgtgtaatccgaggcgt

SEQ ID NO: 26960 - DNA, 1346 bp, Artificial sequence
  DNA replication origin
gcggccgaggcgagcccggcgatgtgagaggcggccgtcggctcctgcctcaggaagggcatgttcggaggggcggcctcggcacgccacccgcctaagcgcccccttcccaccgcagccgccgccgccgcagcgcccgcaccgcgataaaaggggcggccgcgtttcctgacgcgagatccgcgctcgccgccgcccgcccaggcggcgatgacacggcgcccgcggcggcccggaggcgccgggtgggccgtttgctgaccggatcgcggctacccgccagcgtgtccgcggcgccgccgccagcatgggctgtgccccgagcatccacatttccgagcgcctggtggccgaggacgcgcctagccccgcggcaccgccgctgtcgtccggcgggccgcgcctcccgcagggccagaagacggccgccttgccccggacccgcggcgccggcctcttggagtcggagcttcgcgacggcagcggcaagaaggtaaggggcgccgggcactctggggccgccgcgaaactcgggcccggccagtaagcaactttcccgcaggggccgggcggggtcccccccacccggcctcggtgccctcttgtcccgctttggatggttctgattgacgccagtctcccgccttgccggggcagcgttcagagaaggaccgacccaggtcccgcgaccctgatttcctagggttgcgattaggacgccgcctgtgtcgcggcgtcggttttttggacacatccgactcccggagcggcggggcccgatgtgaagttgactgaggcgcttgcatcaatttcctctccaagagcgggtgtttgagggaaacccccaggatattctggcgcgcccctgcaatgttaaatcagtgtgaactttgttcttttcctgtggtagaaagggaagggcgactggcctcaccactcttttccctctgtcagctttgcacatgcagttgcaggttaccattttcttcgggactgctagaatgtaatctggaacatcagctttgcttcattgcacatgtatttgaggtccacgtttattagcatacatactgtatttaaagcatatgtaattagaaaatactgtgaaacgcgatttttgaagcattcagcagaacaaagttaatcttttattaagccgacttactgggacattttgtgactggggttttttgtttttttacattgcgtgtcttctccagcgcatgttgccttggcttatgttttgtcaaagtttctgggcttagtctttgttgaggttttctaaaggaaagttaaaaaggaaaaagaaaaacgtgatcattaaggcacacagcagcagctttcca

SEQ ID NO: 26961 - DNA, 1046 bp, Artificial sequence
  DNA replication origin
tgtctatgttgagggagtaaggcagcctgaaacctcttgctcctaggtcccatagtctccactccccttccagctggaaatttgtgctgcaaccagaggaaccagaaatggggtgagaaaacttaggggactgggttgtaagatcaaaggctggtcttgcagcagtaatgacagttcctaggggcactgtgacatcattgcattccactcctcccaggggaggggaccacatcagcgcgatgcccgagtcgctgctccacgatgggggagggaaacacacggtttcgacccaggtcctcagagacgccagcccaagaagcctagggaggtcgagcttggggcagcaggaggggagggcagagtctgcagtagggagccccgggagtcaccagcccaaagccacccagggatgactggtgagggcagggcctggggctgggggacccaggtcctgggagacgcaagcccaaagagcccagggaggttgggcttggggtggcaggaggtgagggctgattatggagcagggagccccaggagtcacctgcccaaagtcaccctggggtgattggcaagggcagggactgggctgcttgctgaaggggtggggctgactgactaggctttggttgggggagcccagagggctggggttggggggccccatctggtatgcctcaggagtggtatggactctggcaccggtcttgtcatcggaggggatctgtggctgggttgggggccgtgacctggtgtgttttacctttttcttggctgcggccaatttcccctgttgtgttttttctgacatcgcggggtggggagggaggcggggttggggccacatcagcgaaataccagtgagcactgctcaatgcctccagtcacctaccaggcagctgtgcaactgagccacaggtggcgtaaccagggcaccaatggaacgcagaataggggcgtggccttaatgctccaagcccattggtcagtgagaaagatgaaagggaaaggaggcgtggccaggcagcagcatgtccagagggacc

SEQ ID NO: 26962 - DNA, 1970 bp, Artificial sequence
  DNA replication origin
tcatccccaattgcaaggtcagggagagggcctggggctgaccctgccagtctaaggaatccaggagctgtggcctgaagagctgcggcccctgtgctattggctgtctgccccctgaccctaggacagagtcctcagccacggccctcaagctggcattcggggccccctgcaatctccccagtctgccttctccccttgtccaatgcagccttctctacctgcgctggctcctgggcagccctcatttgggctcagagtggcccctgccatgcctcgctgccatgccttgctaccctgcctctggcaggggtggccttcctgccacaaaccccattacctcaaggccaagtggcagtgcccccaccctgtcctgcctgccctcagcacgcacccagccagcatctcagagcactcctgtgtgctgcctgagctgggtgctggcatcacatctctcgccttcatggctagagctggccacagggagtggggtggttatgatcccaggggatgaggaccagatggggcagagaacaggaactgaggcccctgggggcctagaaccaaggacggatggcccaggaggctctgggcttgcaaggtctcccaggggcgggtatgagtgggctgcagggagtgggctatgggggctggttaggtggctgaactagaagctgtcccaagtgaggagttttctgccaccagtgaacagtggaggggcagctgggaaggtgtcttggactttgagacctggaattcccaggatgttttgctggtctgtgggacagttggcgggacagggggaaagccgggaaactccagagtgtgcagtcgctgcagtgacacagcatggccacatccatttgctgtggaggtggggttgacagaggagggaaccgaggcccaagaggtgaagcagcttgtctgaggtcaccccgggcgaccaggatgcaggcctgcagatgtgcactttggagctctgcctggagctggggtggaggagcctgcctgcggcctcgtgccctctgccgggcctgaggggtgtccctggcacagggctggctgctgtcctcccgctcttcctccccagggaggtctgctggagtaagcagggcccagggggcaggtgggggctgtcagcagtggcagtggcatcaggagcaaggccaggaggctggaaacaagccacttcccaaaatagctctgataaccacggggcaggagggcccagccaagcctcagccctgacaagcacagcctgcagccggcctccctccccactgggcctgggcttagtccctggtttccgctgacagcctgtagggcccactctctctaggcttcctggcccacctgggaagtgggaggctggcctgggagatgcgacctgtgactcagaacccgaggctgtgtacagcccctgtggctggaggtggtcacggaggtctggcaggacagatgcactggggcagggggcggtggcgggagtcgggggcagaggccgctgcaggttggcaggaggccccgggaccgcagttctgtgccaggatctgtcggggaacaccaggggtgagcaaggatggagatgggatggcagggcgtcgccctgggcaggctctttaacagtcatgtgagggggtcagggtggggtctcaggacctttcctccagaaacctcagcccagcagcgcccgttctcgagtcctggggtcggccgtgagtaggtgggacagagacaccaacagttggagacctgcaactccggtttgggagccgctccaaaaaccggggctctctgcttggtggggagctgctggagcctccttaaggtggttggggtggggagccaggttctgggtaccccaaaccactggttctgatgcctctctgaccccccactccaggctgtgagcgggaccgcctgtccttcgggttctgtgagacactgcgcctactgggccgctgccagct

SEQ ID NO: 26963 - DNA, 1133 bp, Artificial sequence
  DNA replication origin
tggaacctgggaggcggaggctgcagtgagccaagatcgcgccactgcactccagcctgggcgacagagtgagactccatctcaaataaaataaaataaaacaaaataaaataaaataaagacagctgtattagataaaatgggtttcctagctttggaaggtaactgcccagttctccattttcactttgtcatcataatagcatttgaaggaatgctcaaacgtctgtatatcagattcccgattctgagaccctgaggatactgagtgtcaacgatgggaagactgagggggaaaggggaggactaagagacaaagggggagactgaggtgtggggagatcgaggaacagcagggcagaccgagcagggggaggaagaccaaggggcgtcggggaggactggggggctggggggagaccaaggaatggcgggggagaccgagccgggggaggaagactgaggggcgtggcgggggtactggagggccggagggaaactgagggatattggggggagaccgaggggtatgggggcagaccgaggggtatggggggagaccgaggggtatggggggagactgagaggcatggggggagactgaggagtatgggaggagaccgaggggcagaggggagactgaggagcagtggggaggagacaaagagacagagaggggagactgaggagcatggggggagactgagggaaatatggggaggaagagtcggagttaatgaaattgccctacttttcataaatagttcagggaaataagtcatgtggtgaggggcctgggctggtctccgggacgcagcagaaatgcaggcacaaaacctgccggagctgagcaaggacaaaatcaagggggagctgtgtccactggagggagaacgccaagagctgcagcacactgagcacacgccgcgagccagcacccacctgcctcatccatttaccctcccagtgggcctgggacatggggcggttgctagcctcatctcacagatggggaactgaggctcagagaagcaaacttctaaacccatggtggcccagcagtgagctgggagctgaagccggtgtccctgtccagagatgaagcccctgctggcggggctgtgcctgcccca

SEQ ID NO: 26964 - DNA, 1053 bp, Artificial sequence
  DNA replication origin
cagtgtgcccctcttccaggctcctcagggcaggcagccctgctttacttgcccagcagccctctcctttggaccgcagagaagaaccgaggttgtccaggcaaccgccacctcaatctctgaagctgggggtggggtgggaagtccagggacagctcaaagggaagcagtgaccagggaggaagggagagaaaagcaggctggcttccagctggtccattccaagaagccctgttatgaccccctccccacaactctcccactgaggcctccggggtccttgtcctcggcagggtccagattctgtttcccaggaagaagaaagtttcccaaaggcatggggagagaggggtagcccacacatctgtgggactagggctgtgtagagcaagccattaccatatgaaaggaggaggccttagcgggggtgggaagggcccaggctgtcacttggataccaaaggcagctggggatggcggaaggggcaggggcgggcaggcagcaagggagggccccaaactggggtggagggggtaggctgctggggctctgggacccacatcctccccatttagggcacatgccacttcctcccacttgtcactcctctctggcccggggggacacccacaggggtggcaggacggcgctggaactggactgctccaggaccctctggatgatctgccactgtgcccctgaagaaacagagtcaaattttaaggacaaaggagtctccgaagactccaaagaacaggaactgtggcagggacggggaggtggggggcttggggaggcacttcttgctgtgcagaggctggatgagggggttgtcacccccaggcagggagttcagggagttccaggtctgaggtctaacaatctgcagctcagctcgcccgccctctgcttctgtggctgcttccaaggaaatcgcaaggcttgcacgctgcatgcctcctctcctcccaagctcctccctggctttttggtttttggggcctcctagtgtcctccccacacttcggtttaggtctctgtcttgcagcatc

SEQ ID NO: 26965 - DNA, 914 bp, Artificial sequence
  DNA replication origin
aggccaagaccagggggccagcatggttcggttctggttctggtgaggaacttcttcctggcttacaaatggctgccttctttgtcctcacacaacagagggtgaaggagaggggggtagagagaagggaggagaggggggtagagagaagggaggagaggggggtagagagaagggaggagaggggggtagagagaaggcaggagaggggggtagagagaagggaggagagggaggtagagagaagggaggagaggggggtagagagaaggaaggagaagggggtagagagaaggggggtagagagaagggaggatggggtagagagaagggaggaggggggtagagagaagggaggaggggggtagagagaagggaggagagggggtagagagaaggcaggagaggggggtagagagaaggcaggagatgggggtagacagaaggcaggagaggggggaagagagaaggcaggagaggggggtagagagaaggcaggagagaggggtagagagaaggcaggagagaggggtagagagaaggcaggagagaggggtagagagaaggcaggagagaggggtagagagaaggcaggagaggggggtagacagaaggcaggagaagggggtagggagaaggcaggagaggggggtagagagaaggcaggagaggggggtagagcagggtagagcactctgctgtctttccttataaggacaatagtcccatcatgaaagcttcattctcatgacctcatctaaacctaattatctgccaaaatcctcatctccaaaacccatcacattgggcattagttcttctgcatgtgttttgggaggacataatttaacccatagcaccttacagtaggatccttctcaataaaaaggaacaaaccgctcttacacacaaac

SEQ ID NO: 26966 - DNA, 1495 bp, Artificial sequence
  DNA replication origin
ttaaccttgactatgcctttagctccagccacctttttaagagtaaattgcagggcaggacggggagggctagtcacggaaggaaaccttaagccggaccaggtgtgaggaggggaggtgataaaaagattataggttggaggagcagaggctgaggaagaattgggacctagctcagcctggcgaggagcagcctgggaaggaagggagaggtcagatgggtctgtagaaaaggaagattagaaagactcagcgatgcttgggcttggtactgaggggacaggtgggagggaaagaaggaagatttgggacgagttgcactgggcacagagactaggaagggaatgatgtgtaaaagaatgcctggacatcaggcacctcagaccgtttgcctattttacaacaagaattatttagatcttgcaggatggaaaaattcaaagtgccattttctggctatttggaagtactgttgagtttgtattggggtcaagcggcattgcagaagaaaataaggcatttaggttttaggtcaggtgtgagttgaagaggttttaagtttttgagaacataggccaagggagtagaaggaggaatggagggtggaaggttgcccatagtgaaggaagcaagcctagggaaaagagagagtagagaaatggagggaaggggtttgggggttcttaccttccagaaaagtgggaaaaggggttggggcacagagataagaggtcggggcatggaaataagggatggggcacagaaataaggggtcagggaatggaaataaggggtcggggcatggaaataaggggtcagggcacggaaataaggggtcggggcatggaaataagggattggggcacagagataagaggtcagggtgtggaaataagggattggggtgcagagatatgaggttggggtacttgcccctcctctagaaaagcaggacttgccgctaagagtgagggagaaggggttgaggggtacttgtccctctcccagaaaagcagagaaggggtagaggcaaggagagaaggggttgaggtacttgccctgttgccggaaaagcagagaaggggtagagacaaggagagaaggggttgaggtacttgccccttccccagaaaagtgggacttgccactaagggtgaaggaccaaggcaggcatccctgtgtggtctgacacccttgaaacatgggtgtataatcagagaggcgtccctgcaatgattaaacaccaagagaagtctgccttcccagtccttgaccggtgctgaagttttgggtccacggataaaacgtgtctcctttgtctctcccagaaaatgaaaggaattgaaattaagagaagggagagattgaagagtggaaaggagaaagtggttgagggacagtgagagaggttggagaagagagtaagaagaggccgcttacctgatttaaaattggtgagatgttcctggggctggtcggtctgaggacctgaggt

SEQ ID NO: 26967 - DNA, 1018 bp, Artificial sequence
  DNA replication origin
cgccgcccgctgggcgcgcgtcaggctcgctctggctcgggagatgctctccggctgcgcattccaggtgactccggccctggcgaggcgcgatccggctatgcgtgtgtgtgcctctccccggagaggaccccggccgccgagggcacgcggggcccagctaccgcccgcctcccaaccagttgctggctcgtttcgatggtgcaaattgtttttttttgctccccactaaatagcaacagtttggccacgctcaagtggaataaagtagacgaggttcgattctttggcagaggcggcagcggcggtggcagcggcggcagcgcttagccggcagggaaggtgacagatagggactgctcgcgatccagccgaggtgtttaactatttccatttggaaacagcaaaacatgctgacaagtaaacaagttgcgagctggctgctcgcggggagactttggacgtgtggaggccgtcatggacgcctacctcttcccttcccctcctgcagcccgccctctccagccccattttgggcatttccgagacacccctttgccaccctcatctgcatctgggcgcctacagatcccttcccagtttgggctttgataactgctcggaactattccgagtcaggatggcgcagggagaggagagggcgtgtgttttgaggagaggggtttcttgtgtgatcgtgcggatcggttcatttggaacattcaactctggctggcttttgcttggttctgccccctccgagggagaccagtggtggcctgctcttttctccttgctatttttctttggtggggatggcagcagacgcaaaggagaggacagatcgagggctggggactggagagtctgctcctcttttctttcgttgacctcggccaggtgaccccttcctaacctaccaccctggagaagggtgtggaccatactggaattgctcagaggataattctcacctcttttcccccaaggcttccagcccttggggaccctcagcaat

SEQ ID NO: 26968 - DNA, 772 bp, Artificial sequence
  DNA replication origin
gcgagcagccagctcgcaacttgtttacttgtcagcatgttttgctgtttccaaatggaaatagttaaacacctcggctggatcgcgagcagtccctatctgtcaccttccctgccggctaagcgctgccgccgctgccaccgccgctgccgcctctgccaaagaatcgaacctcgtctactttattccacttgagcgtggccaaactgttgctatttagtggggagcaaaaaaaaacaatttgcaccatcgaaacgagccagcaactggttgggaggcgggcggtagctgggccccgcgtgccctcggcggccggggtcctctccggggagaggcacacacacgcatagccggatcgcgcctcgccagggccggagtcacctggaatgcgcagccggagagcatctcccgagccagagcgagcctgacgcgcgcccagcgggcggcgggcagcggcgagctggggcgggcggagggccggctcccggccgcgggtgggcaggagggagacgcagagcgcgggggaggcaggctggggagcggccgcctgacttacatggaagtgatattccttgagatgtccgtgatgttgatactggcgttcccattgctgttccctgaatcctgcccttccaggagggggaagaggttcccatcgtccggccgccggcaattgatctcagtcttgctgcagacacaatttgcagggcaagccagcacggagcccacatagtccagccagacgcttcccagcaagaaaatccgccagaaa

SEQ ID NO: 26969 - DNA, 795 bp, Artificial sequence
  DNA replication origin
gggagcactccccaatcacctccgccacgttcatttcacttcctaccgcggtccggattgcagcaaaaccgggtagcgcgagggccaaaaagtggaaaggagagcgcctttccgtgtcgtgcagccagctcgccaactctccctccccagccccgaccctcgcaatctcaaatgcaactttttcccttcggtctcggtttcccccgggctgcggctagcgggcgccgcgctgcgaggcgtggagcgggcgggctgccgcgaggctgcgggtggcggtgccggctacagccgcgagccggcgagtgggtgggtgggtgggtggggaggagggagaggacaggcggggagagagacgggtgtggggaggggagggagggggagattccgctctcctgccgctcccagcccgggcggggggcggggggaggaggccgcgacgagggaggggaggagggagggaggaagggagggagggagccgaggaagacgctccgataacccgtgcgtttcgtaaggctcggagcacttgtacatttctgcagccgcgcggcgagccattcgcggcggctgctgcagctcctactgcatcttccttctcttcctttcctcgggctccgggtgtgtgtatgtgtgagagtgagtgtgtgtgttttgcaggtgcgtggtgtgtccgttttaattctgcccagtaggtgggacttggtgactttagcaccattttttccttttccttttttttttttgcctccccaccgtctgttgcaaccctgcaaagtctcggagtcggagagcgcg

SEQ ID NO: 26970 - DNA, 993 bp, Artificial sequence
  DNA replication origin
ctccctcctcccctccctcgtcgcggcctcctccccccgccccccgcccgggctgggagcggcaggagagcggaatctccccctccctcccctccccacacccgtctctctccccgcctgtcctctccctcctccccacccacccacccacccactcgccggctcgcggctgtagccggcaccgccacccgcagcctcgcggcagcccgcccgctccacgcctcgcagcgcggcgcccgctagccgcagcccgggggaaaccgagaccgaagggaaaaagttgcatttgagattgcgagggtcggggctggggagggagagttggcgagctggctgcacgacacggaaaggcgctctcctttccactttttggccctcgcgctacccggttttgctgcaatccggaccgcggtaggaagtgaaatgaacgtggcggaggtgattggggagtgctcccaagccttgggtggggggcgctcccaagcctgggtgggtggggggcgcaggctcacggacggcgacggggggtgccggagcgcacagacaccccagagaagcacccagagccggggaccgggaccgcagacgcgcagtccttggtctgaatgacactcatttccgtaatctagagtctggggctctggtcttggctgggaggggactgcgggacatggcacgctaggtgccccccgtgcccgctgcgctttcttggaggtgggttttgcattcggccttgagcaggcatggatcggggaaggaagaaacaggggtcgaaagggctgcgctggagagccgaggtggccccgggcgagctgtgcgtgcaagagaaatggccgggggaaattgagatgcaaggggcatattttggcaagcgccacgccagcaccgtcagaggccggcttctcgggctcagctctcgggtgagctgagctggctgccgggtgagggggcgggcgggctgctttctccggattcgggggcgcagaacctcct

SEQ ID NO: 26971 - DNA, 1310 bp, Artificial sequence
  DNA replication origin
ccagagaagcacccagagccggggaccgggaccgcagacgcgcagtccttggtctgaatgacactcatttccgtaatctagagtctggggctctggtcttggctgggaggggactgcgggacatggcacgctaggtgccccccgtgcccgctgcgctttcttggaggtgggttttgcattcggccttgagcaggcatggatcggggaaggaagaaacaggggtcgaaagggctgcgctggagagccgaggtggccccgggcgagctgtgcgtgcaagagaaatggccgggggaaattgagatgcaaggggcatattttggcaagcgccacgccagcaccgtcagaggccggcttctcgggctcagctctcgggtgagctgagctggctgccgggtgagggggcgggcgggctgctttctccggattcgggggcgcagaacctcctccttccctcccacacaagcaccccttcctggtagggacgcaaagcaggtgcagctttcgacgagagctcagatctcatccgggaaagaagtgtgtgtggggggggccccgcttttgcgctggtagggatttttttcttaataaaacataaagatgccaagtgtgagctgtttgctgaaaaaaaaaaaaacgagcattcgctgtgggaaaggagaagaaagggttaggggagtccgagcaggcagacacactacagcattcacacgcagaagaaagcagggttctccttcccgagcttggaggagggcaggcgaggaagcaaaatacattgaattcaattcaactgcatccagtatctgaaaggagtctcccccgcccccctgtggattccgatgcaggtcatgcaacttgcaggcaagatgggggaaggggtatgccggtgtcaccgcctgccccaggcgcaaccacaaacaggccggtcgccttcgggtggcactgtcgcttggagtaaaaacttggacgaaaaaaatggaagaaaagaacatgcctatacaaggcagttttcccgacttcccgtcacgttccaccttcccttggccccagggagatttttacccccgtcgccattatggccttgtctccagactggcattttgccctcccaccagcaggcggggacagagtgtgaagacctccttggactctcaaaccacttgctactggccctaggccaatcctggctgtccttaggccactgggaatttccctgtcacttcaagtgccattctgggattggctttagaatatctgagagtcaggaaactgaggtgtagtcagatcctaacacttggcctctcttgggaggt

SEQ ID NO: 26972 - DNA, 961 bp, Artificial sequence
  DNA replication origin
ccatgtctacctctttccacacagacacagtaacaatctgatctctctttcttttccccacatttcccccttttctattcgacaaaaccgccatcgtcatcatggcccattctcaatgagctgttgggtactcctcccagatggggtggcggctgggcagaggggctcctcacttcccagacggggcagccgggcagaggcgccccccacctcccggacggggcggtggccaggcaggggctgccccccacctcttggactgggcagctgctgggcggagacgctcctcacttcccagatggggcggctgccaggcggaggggctcctcacttctcagatggggcggccaggcagagatgctcctcacctcccagacgggctggcggtggggcagagacactcctcagttcccagacggggtcgcggccggacagaggcgctccttacatccccgacggggcggccgggcagaggcactcctcacatcccagatggggcggcggggcagaagcgctccccacatctcagacgatgggcggccgggcagagacgctcctcacttcctagatgtgatggcggctgggaagaggcgctcctcacttcctagatgggatggcggccgggtggagacgctcctcactttccagactgggcagccgggcagaggggctcctcacatcccagacgatgggcggccaggcagagacgctcctcacttcccagacggggtggcggccgggcagaggctgcaatctcggcactttgggaggccaaggcaggcggctgggaggtggaggttgtagcgagcggagatcacgccactgcactccagcctgggcaagattgagcactgagtgagcgagactctgtctgcaatcccagcacctcgggaggccgaggcgggcagatcactcgcggtcaggagctggagaccagcccggccaacacagcaaaaccccg

SEQ ID NO: 26973 - DNA, 946 bp, Artificial sequence
  DNA replication origin
ccgccccgtccgggagggaggtggggggggtcagcccccctgcccggccagccaccccgtccgggaggtgaggggcgcctctgcccggccgcccctactgggaagtgaggagcccctctgcccgccagccgccccgtccgggagggaggtggggggggtcagccccccgcccggccagccgccccgtccgggagggaggtgggggggtcagccccccgcccggccagccgccccgtccgggaggtgaggggcgcctctgcccagccgcccctactgggaagtgaggagcccctctgcccggccagccgccccgtccgggagggaggtggggggttcagccccccgcccggccagccgccccgtccgggagggaggtggggggggtcagcccccctgcccggccagccgccccgtccaggaggtgaggggcgcctctgcccggccgcccctactgggaagtgaggagcccctctgcccggccaccaccccgtctgggaggtgtgcccaatagctcattgagaacgggccaggatgacaatggcggctttgtggaatagaaaggcgggaaaggtggggaaaagattgagagatcggatggttgctgtgtctgtgtggaaggaagtagacatgggagacttttcattttgttctgcactaagaaaaattcctctgccttgggatcctgttgatctgtgaccttacccccaaccctgtgctctctgaaacatgtgctgcgtccactcagagttaaatggattaagggcggtgcaagatgtgctttgttaaacagatgcttgaaggcagcatgctcgttaagagtcatcaccaatccctaatctcaagtaaccagggacacaaacactgcggaaggccgcagggtcctctgcctaggaaaaccagagacctttgttcacttgtttatctgctgaccttccctccactattg

SEQ ID NO: 26974 - DNA, 1338 bp, Artificial sequence
  DNA replication origin
gggcaggggggctgaccccccaacctccctcccggacggggcggctggccgggcgggggccgaccccccacctccctccagatggggcggctggccgggcggggggccgacccccccacctccctcccggacggggtggctggccaggcggggctgacccccccacctccctcccggacggggcggctggccgggtgggggggctgacccccccatctccctcccggacggggtggctggccaggctgaggggctcctcacttcccagtaggggcggccgggcagaggcgcccctcacctcccggacggggcggctggccgggcggggggctgacccccccacctccctcccggacggggcggctggccgggcggggggccgaccccccacctccctcccggatggggcggctggccgggcggggggctgaccccccccccacctccctcccggacggggtggctgccgggcggagacgctcctcacttcccagatggggtggctgccgggcggagaggctcctcacttctcagacggggcagctgccgggcggaggggctcctcacttctcagacggggtggttgccaggcagagggtctcctcacttctcagacggggcagccgggcagagacgctcctcacctcccacacggggtctcgccgggcagaggcgctcctcacatcccagatggggcggcggggcagaggcgctccccacatctcagacgatgggcggccgggcagagacgctcctcacttcctagatgtgatggcggctgggaagaggcgctcctcacttcctagatgggatggcggctgggcggagacgctcctcactttccagactgggcagccaggcagaggggctcctcacatcccagacgatgggtggccaggcagagacactcctcacttcccagacggggtggtggccgggcagaggctgcaatctcggcactttgggaggccaaggcaggcggctgggaggtgtaggttgtagtgagccgagatcacgccactgcactccagcctgggcaccattgagcactgagtgaacgagactccgtctgcaatcccggcacctcgggaggccgaggttggcggatcactcgcggttaggggctggagaacggcccggccaacacagcgaaaccccgtctccaccaaaaccagtcaggcgtggcggcgcatgcctgcaatcgcaggcattcggcagactgaggcaggagaatcaggcagggaggttgcagtgagccgagatggcagcagtacagtccagcttcggctccgcatgagagggagaccatggggagacggagagggagacggagaggga

SEQ ID NO: 26975 - DNA, 1149 bp, Artificial sequence
  DNA replication origin
acgacctccccgccggctggcgttctcccaggcgtgacgcgtgggaggcctgatctcaccgggaaggactcgggcgttggtcacttgctggccgcggcagctgggccgagtcccaacgaccagcgccgccccctctggccctggacccccgagcagagcgagggctggagacaggcggcgcccggcctgcttttctgcgggccggtagggcagggtcagcccagttcaggcgtccccgccgcaggccggggcggaaacaacgcgcggggacctgcgacccgggacacgcggcctcagcccgcccgaccccgccgccccggtgcagggtcctggatctcacctgaagccccgcgtgtctcttccggtctgcacgtggcgtccggaaagccggcagctcccacatgcccgggcaagcccggctccgactgcccgcctattggctcgctggacggcagcgcccgcccaagacctcttctgattggtcgagcctgcctggcagcggggaggcgggcgagagcagaaggggagggactcctgaagagggcgtaactcgtgctgcgagccggccatactggcgggaaattttaaagagaagggaagggagactgacctcctgtcgtccctgcccggtcccatcagtgttccccggctccaatccactcctctacctgggtcgggatgtgggctcctgtaagcctggtaccaccaaaggccgaatgacttactgagtacacccacatctgcagattgggaacatcggcccttacctcctcgggtgttctgggattcaaggaaataatatacacagtaggcactaaagagagactttgaaagtcaggtttcctccgtcagcgctgctttttcatttattcttttgcaacacttgactcctaagtattaagttcctacgtgggcttggcagtgggatgcacacaataaacacataagcatcctgagttgtttatctaacagcagggaaacagcaaggttaacagaaaattcagtgcaacatgaggccggggcgcggtggctcacgactgtaatcccagcactttgggaggccgaggcaggtgatcacctgaagtcaggagtttgagaccagcctgaccaacatgaaaccccatctctccaaaaatacaaaaattagcc

SEQ ID NO: 26976 - DNA, 1538 bp, Artificial sequence
  DNA replication origin
agttacgccctcttcaggagtccctccccttctgctctcgcccgcctccccgctgccaggcaggctcgaccaatcagaagaggtcttgggcgggcgctgccgtccagcgagccaataggcgggcagtcggagccgggcttgcccgggcatgtgggagctgccggctttccggacgccacgtgcagaccggaagagacacgcggggcttcaggtgagatccaggaccctgcaccggggcggcggggtcgggcgggctgaggccgcgtgtcccgggtcgcaggtccccgcgcgttgtttccgccccggcctgcggcggggacgcctgaactgggctgaccctgccctaccggcccgcagaaaagcaggccgggcgccgcctgtctccagccctcgctctgctcgggggtccagggccagagggggcggcgctggtcgttgggactcggcccagctgccgcggccagcaagtgaccaacgcccgagtccttcccggtgagatcaggcctcccacgcgtcacgcctgggagaacgccagccggcggggaggtcgtgccaggatagcagactttagttgttgtcgttgttccgtggactttttagcagcacaggggaccttatcgagccaggttttttcaggtttgggcgattatcagaattgtggcttgagggtaggggtcgtccgcgctctttttaaaaatctagattctcaggcccctttccccaaaatagcaattaggacggtgtgggagtgggcctgaaaatcagcctttcatcagatgtcatatggtaattaactacatttgggaagcccttatctaattcacagccctcggttgatggtgaagagacgtgacttgccccagatcatctagctacttagtgccagaggagggtctagaactgccctctgccctcttgatcagccagcaggttggtggctctcatgccaccgaggattctgacttcttggttcctttggggcctttgctccattgactctgcagctgggaccctttctttaggccagaccccctccctgcctgaaggccgggtgtctgacccccagagcgctgggtccaggctagagaaaggcttgtgtttgtccttgttgaaagggttgttttatctgagcggaacttctctccagcttcactgagctacatttgggtccccaaagaggtgtgtccttgatgactgttggttttgacgtgtcagcatgtagcaggaggagccgcggacaaaaccccacagaggtagtgaaggaattggcttttaatcagctggaagcatcggcagactagcatctcaaaatccgagcttgttgagtgcacagtttctgtcccttttaaggactcacaacactaaagattttacaagaaagggccatgattgattgagcaatctagggggtatgtgacagggactgcatgcaccggtagtcagagtgaaacagaacagaacagaacaagagatttcacagtgtccttctatacaatgtctgaaatctatggataacatcggttgctaggtcatgggtt

SEQ ID NO: 26977 - DNA, 1244 bp, Artificial sequence
  DNA replication origin
gcgctgcgcgcgtcctcagctctgcgagccccctctggagcggcggggaggtaggtgggcgggcgggcgggcatggcgcgctgtgacacatacatagggacgggcgggggaggggagggcccgtgaggggtgggggcgggagggggcgagcgcaaagggaaaccccacccccagggaccgaggggcggccgacagggggaggggaaggcagaggcgtctggagcgcgctggaccctggctccggaccggcgcgccgatggggaagccggcctgcgctcagggcgggagaggagcgctccccggggcggcgcggacccggcagctccggggctggcgggaggaaggcggcgcgagaagggctggagggcccgcatctgcattgcggtcggcagctccgcagtcggaggggcccaggagggctgcaccctcagagaatccccaagtgcccggactctgaggccgccgcggcgggacagggctcccgggcgcccggcggggttctgcagctgaggctggccacgacgcgatctaaggagggtgcagcccgctactgtcggccacgatttggaacgaccctcaccgaggagctggctgaaagtttttttgggggtggcgtacaccgggatggcaggggatggtggagagggggaggtaaggcgtcagcggggaggctcacggggagctgcgagtctctgggtcttcaaattccccgggagagaccaaggacatctcatatgaagcaggaattctccagtgtctctacagtactctttaataccgttttcaggaaaaggagaaaaagaactagcagcttttgaatccctcctatgagcccgttgtgtaacatacattaacatttcatttaatttttccaaagagcccaacaaggtaaatatggcaacttcccacctgcccctaaccaaagatgtgaaaactgaggctcagaaagtggtggagatccctcttgaaggtgggactgagttcgagtcccaggtcttgtgctctctgctacacaggctgctggttgagccacagcaccttcggaggactcaagctggctggtgaccttcagagttcttgtggaggaagctggtggtgcttcacaccaggatgtggtggccacagtcaggatggtggtggaagcttcctgaccctctcattgggcaagaagaggaagaagtggaatctttcgggactccccactacagagataatagaccacactttaatcagttccttgatga

SEQ ID NO: 26978 - DNA, 1247 bp, Artificial sequence
  DNA replication origin
gaggctgaggtaggagaaatgcttgaacccaggaggcagagattgcaatgagccgagatcacaccactgcactccagcctggcgacagagcaagactccatctcaaaaaaaaaaaaaaaaaagcaagcaagcaagctggggctcagggaggaccacaggtgggggatggggaaaccagcgcaatttaaatcccattcccatgaaacaataacgaaccacaccaagagttcccgtgaagaagataaatatattttggaagctgcctgtgtcctctggggtgaaaagccagcatagagggccccaaacgcccaccctgccaacccatgccctcctctgacctcgctccctttctccccatagacccgccccacccccttctgtgtcgctgggcttcaggacaaggggcaagagaggcaaccagggagacaaggggaagtgtcttggggacagggggccacagcagttgtggccacatggtaccccagggccgacgcagggccgacgggcaagaggctgttatctccagcctggcgcttccgggcctttcttgaggccaccatgggaatgtgatgtgtgagagaggggctaggagagacagagacacacgcacctgggatcggcggtccggacaggggcagggaaaccacacgccctactttgccctttcctgtccatcccagacctactcagatccctcagtgcctaagaaaacaggacagtgaggactgggggttaggggacggggcttaggggctggggcagggcccgtgagaggtggagggtgggaaagagggagggaggggtgactgtgtggtggtgctgcctctgaacaccctccccttccccagtccccagccctatggtgatttaaaggggctgagaagccaagaggcagcgggcccatggaaagcaggaagacctgggggtggcaggtggccactaacagcccagcagctccaggcgcagggcgatgcggttgtgccaggctacaggcaggatgcgcacatagcgagccaggatgggcgtctcaaacaagttcttcttgtgggagtggttgtcccagttgccagggaagatctagaggcagagcgggtgtcaggaggaccccgagccagcccccctcccctcagagccccaggccagactcccagggaagtaatgaaggaatggcaaagggtgggcagctggacagacacccaccttactgctgccagtcctggggtcctggtactcagtccagttcgcac

SEQ ID NO: 26979 - DNA, 940 bp, Artificial sequence
  DNA replication origin
ttgcatgcccagaggggctgtccgcgtgtgacctgcctggttatccactcggccacagaatggccctaggtggggtggcaacagcagttcccctgctgtcctccctccaggcccagctggagtccctcccacttagtgctcccaccccactaggactcctcatggggcaggcgggttgcccacatgtgggcccagggatgggtggagcggggggtcctaggtttctgaatccagcaggtcaatcgctgagcatcttgggtaggggacaggggacatcttgccctcctcagggagatgtggggatgggttctgaggtttgctggcctccagaaggagggggcggggggcttgagccagctgggtggcagcaggggccctgggagagagcaggtcaagtgagtaggatgccttttacctcccaagtggccctggggcctgtgccttggaccctgccctgaggccagatgtgtttgagatcctggtggaagggtgtgtgtatggtttggcggacgggttgctaaggcaatcagagccctgggtagggccaggtggagccactaacaagtatcctgggagctgaggtaacagtgagtgtgcctgagtgggaattacccaccttgacttctagcttctgggcctgggatcttccccaggctggatatggctgcacccaggaagaaggcaggggtgaccacacagcggaggaagccctcagagggaccttcgcagctcttccttgccttttacgtggtatgtttccttggagccaacaaggaccctgcgggcccaaagaatgcacactggactccttcagggtgtgagcgtggtggggtatggggatagtcttggaggcagactggggtcaaatctcagctcagccactggccgagctctggtcttgaggctctggcctcactttgcgcgttcccctccctgccag

SEQ ID NO: 26980 - DNA, 1477 bp, Artificial sequence
  DNA replication origin
aaccccgtctctactaaaaatacaaaaaattagccgggccgggcgtggtggcaggtgcctgtagtcccagctacttgggaggctgaggaaagagaatggcatgaacccagcgggcgaagcttgtagtgagccaagaccgcgccactgcactccagcctgggcgacacagcaagattccatctcaaaaagaaaaaagaaaaaaaaaaaaacctttttgcctccccctcagagtcacccatctaaggctggagagtcctcctgaaatctcaaagccccttcatcccactccagggaaggcaacaacaccattaatgagcgatctgccctcagagctccccctccaggggcctcaggagcttaaagtggctcccaaggagctattagtcattggctttaaatagcaggtaatccttcctctgacctggcaggcgggggcgagcattgacacagacagaggcttgggttgggaatggactcttccctcccaactgcaccggccctctccctacactgctccagggcaaaacggtccagtgggaaaaagggaaagggaaaggtgtactctacccagccacgttacctgtgtgtaagataggtatggtgtttcctccttctggaaaaggccacatcaccctgtataaaaacatctttgggacttcagagtcctgctctttcggggactttccagtaacatttggccagagttcaggttggggggtacagggaagagtagaaaggggctaagaagatccagctgtctttcatggtggccggggagggccaggagctcccaagttcctgggagcttggagcactctggaagctctagccccgagggtcaggcagatcacaggacatagggctggggctcagctgttacctaccttgcttcagtcaatcccatttctatgagaaaatgatggaggggccacctaaagagtcctggccctgactccctcccagcgctccacggtgaatggcacggggcatccgcaagtccagcctgcaaggggcccagctggcctccggaggcctcctgggaggcggaggaggaccggggaagatacagcagccggccaaggccgcgggagggagggagtcaggagactcccatcagcaggcagccctcttccaagctcctcgaagcctctgggtcccctcccgggccccacttacggcctgcgtccattgcaccgactccccggcccttcccttatgtgaccaggcacggacaattgggagcgcaaaaatccaatgaactgtccagccaactggagttggcagggagatggccaggacaaagttatccagacaagacttatccatactagagtcctagaatctcccaggtggaaggggttcgaaagtcaaacgcagttccctggcctcatttttcaccagggaaaagagaggcccgacacagcggattcctttgtcattatctgtaagccgcatccctgggggcggcagggctgtc

SEQ ID NO: 26981 - DNA, 858 bp, Artificial sequence
  DNA replication origin
agcccccccgcccggccagccgccccgtccgggaggtgaggggcgcctctgcccggccgcccctactgggaagtgaggagcccctctgcccggccagccgccccgtccgggagggaggtgggggtgtcagccccctgcccggccagccgccccatccgggagggaggtggggggggtcagcccccccgcccggccagccgccccgtccgggaggtgaggggcgcctctgcccggccgcccctactgagaagtgaggagcccctctgcccggccagccgccccgtccgggagggaggtgggggggtcagccccccgcccggccagctgccccgtccgggagggaggtgggggggggtcagcccccctgcccggccagccgccccgtccgggaggtgaggggcgcctctgcccggccgcccctactgggaagtgaggagcccctctgcccggccaccaccccgtctgggaggtgtgcccaacagctcattgagaacgggccaggatgacaatggcggctttgtggaatagaaaggcgggaaaggtggggaaaagattgagaaatcggatggttgccgtgtctgtgtagaaagaagtagacatgggagacttttcattttgttctgcactaagaaaaattcctctgccttgggatcctgttgatctgtgaccttacccccaaccctgtgctctctgaaacatgtgctgtgtccactcagggttaaatggattaagggcggtgcaagatgtgctttgttaaacagatgcttgaaggcagcatgctcgttaagagtcatcaccaatccctaatctcaagtaatcagggacacaaacactgcggaaggccgcagggtcctctgc

SEQ ID NO: 26982 - DNA, 1501 bp, Artificial sequence
  DNA replication origin
ggctcctcacttctcagtaggggcggccgggcagaggcgcccctcacctcccggacggggcggctggccgggcgggggggctgaccccccccacctccctcccggatggggcggctggccgggcagggggctgacacccccacctccctcccggacggggcggctggccgggcagaggggctcctcacttcccagtaggggcggccgggcagaggcgcccctcacctcccggacggggcggctggccgggcgggggggctgacccccccccacctccctcccggacggggcggctggccgggcggggggctgacccccccacctccctcccggacggcacggctggccaggcggggagctgaccccccccacctccctcccggatggcacggctggccgggcgggggggctgaccccccacactccctcccggatggggcggctgccgggcggagacgctcctcacttcccagatggggtggctgccgggcggagaggctcctcacttctcagacggggcagctgccgggcggaggggctcctcacttctcagacggggcagctgccgggcagaggcgctcctcacatcccagatggggcggcgggcagaggcgctccccacatctcagacgatgggcggccaggcagagacgctcctcacttcctagatgtgatggcggctgggaagaggcgctcctcacttcctagatgggatggcggccgggtggagacgctcctcactttccagactgggcagccaggcagaggggctcctcacatcccagacgatgggcggccaggcagagacactcctcacttcccagacggggtggcggccgggcagaggctgcaatctcggcactttgggaggccaaggcaggcggctgggaggtgtaggttgtagtgagccgagatcacgccactgcactccagcctgggcaccattgagcactgagtgaacgagactccgtctgcaatcccggcacctcgggaggccgaggttggcggatcactcgcggttaggggctggagaccggcccggccaacacagcgaaacccggtctccaccaaaaccagtcaggcgtggcggcgcgtgcctgcaatcgcaggcactcggcaggctgaggcaggagaatcaggcagggaggttgcagtgagccgagatggcagcagtacagtccagcttcggctccgcatgagagggagaccgtggggagagggagagggagacggagcgggagagggagagcgagagggagagggagagctgcattccttttcttaaagttcttaagtgatatactcaagatggagtactctgtaatgatctggccccaactgacattttccagctcaccttctgacccttctggacatgccctgaccaagttacctcaatgttgtgttcctgatacaatatcatgtcattatcttccatacttttgtctctttgcatatgtaattccttttgcatagaatgtgtttcccttgtcagcctggc

SEQ ID NO: 26983 - DNA, 1595 bp, Artificial sequence
  DNA replication origin
cccccattggtgctcactcctgggtcttcaggggcctggggaggggtctgccggttcaggctcggcgaagaaggtccgggatccgcacctggaaggagagggccgaggggcctgattacagcccgagatacccgagaggcctctgtgtttcggggctccaggggctcacgcaggaccagtgggtttaagttctagaaaggcagcttttgacccacttggaagcacatttaccgagttcggccccgcgaccggcactgttctaggcccttcgtgagcttttcccacagctagagctgtccagcagcgcaggaggctgcctgccaggccgggcagctagcgcctcgaccttggcgatgtccaagcagtggcctgatgacagccacctgtgtcggatgcttaggactcccaagggaggactgcatgacccatctgtaagggccttctctacccacaaatgcactctaagtggcctttgatgcctagcttgagaagagtacttctgggggtccattaggttccaagtggctgttgaattcacccataatgaattttgaggtttcagctctcaagagtgggtgttagcaaagagactggattatacaaaaagatagaggtttatttagccactgtgaaactccttgtatttgaactaccatggaccgctctcttaatcttcccaatctctcttttttggttgctggacctccagtttgtcagtttcacctgcattccagtaaccaaatccaaaggcatgttccaagaacaggctccacagagggacctggagagactgcaggtttggcagagtcaacaagatctgtgcccagagcttttcgaaggccgtttccttacagccacattaagcagagtccaaaagagaaatccttcactaccctctgtcatttgccggaatagagagaacataataatctaaaggtcaggaggcagagaaagaatcttaacacaccttgctgtgtgttttaggatgaattaatctttgaacatctagtcagaaagcagtccatatacagctggtagtcagcacggactgtgacattttagagctgaaggcaccttagatagagctcatctctatctaagtctaattaggtggactctcattcagtctcctcaatgcacaggtgaggaaactgaggcctggggtggtcacagggctggttggtcatcacaggcccatgactaagggttgatctcttgactgtatttagatctagccagtgcatgacttatttcactccaagcttagtttgcccattctcagtgttttaagttctaggggagtccagagaggttaggaggacagattttggtgcctgagtgcctggatttgaatcccagccctgcctcttactggctgtacaaccttgggcaagctacttaacttctctgtgcctctgtttcctcacctctaaaacagaaataataatgatacttatgttagaagattgttttgagaagtgcatggagttactacatctgaagcatttagaacagtacctggcacagggtaagcacaatagatttgctagatatgatattctgttgcctttttgtacatttttcttcatatccac

SEQ ID NO: 26984 - DNA, 879 bp, Artificial sequence
  DNA replication origin
ggccgcccatcgcctgagatgtggggagcgcctctgccccgccgccccgtctgggatgtgaggagcacctctgcccggccgccccgtctgagaagtgaggagccctgccgcccggcagccgccccgtctgagaagtgaggagcccctccgcccggcagccaccccgtctgggaagtgaggagcgtctccacccggcagccaccccgtccaggagggaggtgggggtcagcccccgccaggccagccgccccgtccgggagggaggtggggggggtcagccccccgcccggccagccgccccgtccgggagggaggtgggggggtcagccccccgcccggccagccgccccgtccgggaggtgaggggcccctactgggaagtgaggagcccctctgcccggccagccgccccgtccgggagggaggtgggggggtcagccccccacctggccagccgccccgtctgggaggtgaggggcccctactgggaagtgaggagcccctctgcccagccaccaccccgtctgggaggtgtacccaacagctcattgagaacgggccacgatgacaatggcggttttgtggaatagaaaggggggaaaggtggggaaaagattgagaaatcggatggttgccatgtctatgtagaaagaagtagacatgggagacttttcattttgttctgtactaagaaaaattcttctgccttgggatcctgttgatctgtgaccttacccgcaaccccgtgctctctgaaacatgtgctgtgtccactcagggttaaatggaaaaacaaaaacaaaaacaaaaacaaaacaaaacaaaaaaaacgaaaaaacaaaagccacagtggctcaggcctgtaatcccagcactttg

SEQ ID NO: 26985 - DNA, 1069 bp, Artificial sequence
  DNA replication origin
tcatcgtggcccgttctcaatgagctgttgggtacacctcccagacggggtggtggctgggcagaggggctcctcacttcccagtaggggcccctcacctcccagacggggcggctggccaggtggggggctgacccccccacctccctcccggacggggcggctggccgggcagaggggctcctcacttcccagtaggggcccctcacctcccggacggggcggctggccgggcggggggctgacccccccacctccctcccggacggggcggctggccgggcggggggctgaccccccccacctccctcccggacggggcggctggcctggcgggggctgacccccacctccctcctggacggggtggctgccgggtggagacgctcctcacttcccagacggggtggctgccgggcggaggggctcctcacttctcagacggggcggctgccgggcggcagggctcctcacttctcagacggggcggccgggcagaggtgctcctcacatcccagacggggcggcggggcagaggcgctccccacatctcaggcgatgggcggccaggcagagacgctcctcacttcccagatgggatggcggccgggaagaggcgctcctcacctcctagatgggattgcggccgggcagagacgctcctcacttcccagacggggtggcggctgggcagaggctgcaatctcggcactttgggaggccaaggcaggcggctgggaggtggaggttgtagcgagccgagatcacgccactgcactccagcctgggcaccattgagcactgagtgaacgagactccgtctgcaatcccggcacctcgggaggccgaggctggcggatcactcgtggttaggagctggagaccaacccggccaacacagcgaaaccccgtctccatcaaaaaaatacgaaaaccagtcaggtgtggcggcaattgcaggcactcggcaggctgaggcaggagaatcaggcagggaggttgcagtgagccgagatggcagcagtacagtccagctttggctcggcatcagagggagaccgtggaaaga

SEQ ID NO: 26986 - DNA, 1386 bp, Artificial sequence
  DNA replication origin
ataagagactcaggctgccctgaagagccaggactcttaattctgggccactgtaagtttctccccaacacctgcctgcctaaagctcagggtctgtgatcttaagtcaaccaagcctttgtcaactacaacatggggataaccattctagctcatgggactccttggggaacaaataagggaagcactgcttggcccataattatcactcaaattatatacacacacttttttaaaagcccatctccctgctacttgtaacagccctccgcatgttcctgtgaaggcagctatgcttctgggcccaagagtagggcctttagtcctccccactgtgaacatctcaacatactccctcccagagctctgagatccagagggtaagggtagccatggaagaaaaaacctgaacccagagagtgagtgagtgagtgagagagtgagtgagtgagtgagtgagtgagagagtgagtgagtgagagagtgagagagagtgagtgagtgagtgagagagtgagtgagagagtgagtgagtgagtgagtgagtgagagagtgagagagtgagtgagtgagagagtgagtgagagagtgagtgagtgagagagtgagtgagagagtgagtgagtgagagagagagtgagtgagtgagtgagagagagagaaagagagagagagagggtgtgtgtgtgtgtgttaatttttttcctgttttcccttcttctgaacccagactcttgaacccaaactctttccactagcctgagctgaccagccaggggaaggggtccctaggctccagccccttcctcccctgggcctaagccttacctgtaggggcagaccaccccagctgactccagggtggtacctgtcggcagcttggccaggttgtcccgccgcccaggcaccaagtagccccagccatgacgctctgagtagtgcagagggaagccatcccaggtaagtgccatgagtttaggtgtgacccgcatctgcaggctgaggaggctggggcccggggtccatgcagggtcgtctagccgggggcagagcttccggtaccatctacgtcccagcaggaagacagcagtgtcacgatggtaagggcagttgttggggggaaggttctctctctcacaatgtccccacccaccctccaaagccctggggctttctggtgaccccagcctacagccgccatcccctcctctgggatgctttagccaggacccccatggaatcctctagaagaatatttcaaaagcaaagacactaagtcagtcccactggactagtcagaagccaggacacaaaagcataccctgacccagggcagggctccttcccaagctccatttcatccagggtaactgaccagaggaggg

SEQ ID NO: 26987 - DNA, 1025 bp, Artificial sequence
  DNA replication origin
cccagcgacgggcagcggcggcggcagcagcagcagcagcagcagcagcagcagcaacagcagcctcagcagccgcaagtgctatcctcggagggcgggcagctgcggcacaacccattggacatccagatgctctcgagagggctgcacgagcaaatcttcgggcaaggaggggagatgcctggcgaggccgcggtgcgccgcagcgtcgagcacctgcagaagcacgggctctgggggcagccagccgtgcccttgcccgacgtggagctgcgcctgccgcccctctacggggacaacctggaccagcacttccgcctcctggcccagaagcagagcctgccctacctggaggcggccaacttgctgttgcaggcccagctgcccccgaagcccccggcttgggcctgggcggagggctggacccggtacggccccgagggggaggccgtacccgtggccatccccgaggagcgggccctggtgttcgacgtggaggtctgcttggcagagggaacttgccccacattggcggtggccatatccccctcggcctggtaagtaggggcagggttggggacataagcaggcatgggggcccagcttaatagtttgtttcagtgaacattttctgaggtcctgttacgggctgggtgctcacgtagggagcgctgatgtgttgaattaggactagacccctgtttatgtgggactcactttctggtgggaagatcacaggcagtaagcaaatacccaagtaaatgtcaggcagtaaaggccacgcagagaatcacagtagagcgctgtacatgagaccttcgggaggccacttaagatcacggtgatttggtgcctttaccccctctcctaatagcgtcatgagaagttagtctgaaaagtcatttgaacagtgtttctatttggggagctattaattattttgggcggtagaaagctcccttttgtgggactgtcccaggcagtataggacatttagcatccccagcctttcccataaacgccag

SEQ ID NO: 26988 - DNA, 1065 bp, Artificial sequence
  DNA replication origin
cgggacctagctgggtgcagacgggaagttgcggctgccagcgaagcggaccggccgggtggaggccacacgctaccccgaggctgcgtaggccgcgcgaagggggacgccgtgccgtgggcctggggtcgggggagcagcagaccgggaagcaccgtgaggaccgaggtttccggcggggtcggcggcggggaggccgggtcgctgagcgacggcgcggcccctccctctccagtcagggagcgaggcccggagcagggcggcggctagtcccagggcgcaccgcggcgcctctgccgggcgcaggcgggcggcggggcgcacgggggtggccgccgactcctcctgcaggacgctctcggccgggtgggccgtggtccgggtgtgggtgtgggtcccgggggacggcggcccaccctgcgggttcgaatccgggcgctggcacctctcgacgctaggcccgcgccggtcgcggtaatggcagccaccatttgccgagcgcttgccaagagcagggccgcacgacataggcgccctgtgtcccccagacagcagcccggtgtgacaggcagaatccgtaatcccattttacagaataggatatcagggcctaaggagctttgcccaaggtcacacagctcgagagagccagaagcggggttcaaaaccgcgtcgccctactccagatactgctctcttactcgctgccctcggcttccccacgtgggttcactgacgaagttgcgtggaccccggttcccccaggaggggtattgacgtttcccaagttttgaggcttaacggaaaatgcaactgaagcgcctggcacagtgttggggacgcagtaaatgctcaaggaatgatgattatggatacacctattacatatatggtaaaataacgctttatatcatctgtctcctttaggatttggggtggaaggcaggcatggtcaaacccatttcactgacaggagagcagagacaggacgtgtctctctccacgtcttccagccagtaaaagaagccaagctggagcccaaagccaggtgttctgactcccagc

SEQ ID NO: 26989 - DNA, 1506 bp, Artificial sequence
  DNA replication origin
attcgaacccgcagggtgggccgccgtcccccgggacccacacccacacccggaccacggcccacccggccgagagcgtcctgcaggaggagtcggcggccacccccgtgcgccccgccgcccgcctgcgcccggcagaggcgccgcggtgcgccctgggactagccgccgccctgctccgggcctcgctccctgactggagagggaggggccgcgccgtcgctcagcgacccggcctccccgccgccgaccccgccggaaacctcggtcctcacggtgcttcccggtctgctgctcccccgaccccaggcccacggcacggcgtcccccttcgcgcggcctacgcagcctcggggtagcgtgtggcctccacccggccggtccgcttcgctggcagccgcaacttcccgtctgcacccagctaggtcccgcggctacccgagaggcaagcgggagactcccagcgcgaccaataggagggccgccaatggagcggtccgcccgcggggggagaagggggacttctgggtgggctctccctgcggaacgcgcgaaccaaaggccaacctccccttctcaaggagcaggtggattggtcccgagctagctggtgggcggaggtgacgtttttataagttgctcaagagacggtaacaaccgacgggccgcgtggcctaatggataaggcgtctgacttcggatcagaagattgcaggttcgagtcctgccgcggtcgaagggaggttatgattaacttttagtttattcctccctcaggaacgaagtattgggacaatgtgaacgtagtcgccgccgattcccaccgcacttcaaagatgtgggaacgccaagatccgcggaagtaaccacgcccagcaagtccctgcgagattgcccgcctacgtgtctcagcggaggcacatttctaaaatgtaccaggtctctcgcaccccgacgcaggtggaggaaagtggagagggaggggcatcctgtacagaaatctcaatttatactcaattgatggttggcaagagttggggctcgcagccaaagcgaggctccctccctcgcccatccggtgctgcctcctcgtccagagcaattctgaggggtaaaaatgttgccttccgttgaacctgaatttgcccgcagatgctagcctccggcccacagcgcggctggagcttgtccccttccccagctgtttccagtctccgcatccgtcttgtgttgctccaggtgcttcaacagctctcagcgctcggtggttggtgaactgtggtaaagtgcacgcagaataaggtctacgtgattaagcaccgcctgggggttggggtctggaggcccagctgcacagatgaaagggaggctcagagacgtttgggaccaaccgagatcacacagctgattaggaataaaattcaggtcaagctgaaagtcggccgccaccgtccagcgtggatcccaggacaccgtgaacggactacagaagttgactttcgcgtt

SEQ ID NO: 26990 - DNA, 1428 bp, Artificial sequence
  DNA replication origin
cggaaccccagccatctcctggagaactttatctgattctccttgcggtctggtagacttgggccaccccctcccccatttcctattgaattcctggcgtctggtagctggcggcaactagggcgacctaccaacttttcccctgggcattttctcactcccttcaccccccagtgctttcttttcttctcccagcgctccttttgaaaggaggcacccaggccgagaacgtgttctgcagtttaactacttccaaattctttgttcaggtcaccccgggactccattgtccgctattgagagcgcgggcaggccgccgggtgcgcctctgccgtgcaggcctgaatccattaggccaccgatccggcccctgcggcccattgacgcgcctccctcgcccgagcgcctgtggcccccctcccttcccctccgctcccaccctcagctgccttttggactccgcggtggagtcacagaacgctgcgggtccgcccgcgggggttatttgggtctcgctctgtcttgaggggctggtcacggtgcagcctcggatgattcttgtgggctgtgtcctatcctgcaagcctcttccggggtgctgcccaaattctactgcttggctgctgggtactacttggacctgcagggcagattttgtgggggctgcagccccaaactcaggaatgggggtgggggaagaacagccagcaacatccttcctccagcttctccagctttccagctgctcccccacagcccggatttctgttcctctctttcctccaggcctgcgccctcgagcttccagtagggtcaagcctctcctgagctgggggaatgaaaggggggccatccagtttcagggggtagcacagcagggagggccggccggttcctgccccaaacacgcgctcatgacgccctcgaaggctggtctcctcaggagggtgactttcccccagctcactggaaaagaggcaagagtcgctctggcctcagatgcacgttccaggctcccagggtgacagggtacggctagggggaggaggctcatccgcccctgaagcctcctcctctcctgcctcaggactcagggagacgcagagcttgggagtccccagggggctcagctctgaggtgcgtgcctggggaaagtcgaggttcagaggagcagcgcccccagagccagtgtccagaaaagtatggcttgccgttgcgtatctttttctcggcgcctgaaggttccctaaccccgtagcgagcctgttcctcctgctgtggggttactgggtcactgagtccagggcgaacatcgacgcccagccacggggcttctcgaaatcactcgggcctctgctggggcccgccttctccagtctgagaatcggccaaacccttcccggaagcttaattccaggagagagccgt

SEQ ID NO: 26991 - DNA, 1101 bp, Artificial sequence
  DNA replication origin
caggcctggaggaaagagaggaacagaaatccgggctgtgggggagcagctggaaagctggagaagctggaggaaggatgttgctggctgttcttcccccacccccattcctgagtttggggctgcagcccccacaaaatctgccctgcaggtccaagtagtacccagcagccaagcagtagaatttgggcagcaccccggaagaggcttgcaggataggacacagcccacaagaatcatccgaggctgcaccgtgaccagcccctcaagacagagcgagacccaaataacccccgcgggcggacccgcagcgttctgtgactccaccgcggagtccaaaaggcagctgagggtgggagcggaggggaagggaggggggccacaggcgctcgggcgagggaggcgcgtcaatgggccgcaggggccggatcggtggcctaatggattcaggcctgcacggcagaggcgcacccggcggcctgcccgcgctctcaatagcggacaatggagtcccggggtgacctgaacaaagaatttggaagtagttaaactgcagaacacgttctcggcctgggtgcctcctttcaaaaggagcgctgggagaagaaaagaaagcactggggggtgaagggagtgagaaaatgcccaggggaaaagttggtaggtcgccctagttgccgccagctaccagacgccaggaattcaataggaaatgggggagggggtggcccaagtctaccagaccgcaaggagaatcagataaagttctccaggagatggctggggttccggagcagaactgagctttcgcccagggcagagagcacctccccccacaacacacacacgcacacatacacacacacggtcaaggccaggagaagcttccctagggctttggagctagaacaggaaccagtgagtggagggggtgtctgggcccctgtgtctagccctacatggcgctgcttccctccttggctcctctaacaggaggatagggctccctctttgagccctttcgcagagcttttgtttttccttccccatccagttcagaaagactgggttctctctctccaccccttcttcactccccac

SEQ ID NO: 26992 - DNA, 2190 bp, Artificial sequence
  DNA replication origin
agaggggggacgaatggcgttgcgactcccagggaaaagctgggaggcaagcggggcgtggggaggaaaggccaaggcacacggctgggcgcccctcacagccttcctccgccgcctccattccgcactggtcggggtgaaggggggggcggggggagccgcgctgacgtcactgcgggccgtgcccgcccgagaaggcggcgctgggagccgctcagagcccagagaagcggcgcgcggccaggagcccccgctccgccactgccgtgcctgcctcccgcagctgtctgccatgcgctcgccggggcaggggcgcccggagggcggctagagctgggcctgagcccgggaacgcgcctgatcaggggtggcggagccgcggtccccacagccgccccacccgcgccgctgcctcgctggggcccgggcccccttcccggtccgtaagtgccactgcccgctgtgtctcggcgaggctggggagcgagggctagggagtgagggcggtggcttcggccagggcagcgtcagggagctgggctggactgagagagggggctggggcatccctgcccggcccccttgggcagctcaggcagctggggcttccctttgccgctgggcgggatgagaggtgcgctcccactgcgggtgggaggcaggactcagtcatcccgggcaaagggttgtggggcagtgggaagcgcccagaggtgaggactttgggtgagcggaaaggggaagggcgcagggtcggctggaagttgtggggctgcagacaggtttagcagaaaggaaggtttctgaagtgaggttcctgtgagtcccaggatcgccctctccctagccactgcccccctaccccttccttcttatcccctcccccacaaaaaataataacctagaaagcagcttcctgaaaaaaatattttgagaaaaatgcaccacacagcacccgctctagacaagatttatgacgtttttccccctctgaaatgggaagttgttgggaaatcctattcactctgctccccactccgtgccccagaacaggcctctttgatctgtctgtgggcgtctctgcagcctcctccagcctaggctccactgagctggagaagaatatgggcagcggtggaggttgagtcaagtgaggggcttctttggaagaagggttggtgggggagttggtccagtttggacccgtcagagcagggaggtaacagaagctgggagaacttccagggtcagatcacagaagcagtactggagtccagaaaaacacactgaatctttgtggctgggcagaaatcgaggtgctgggcctaaagggagcccccttttgtgtccccatatcctggaggagggggattcttaagccatggaggggaagaggatggagtttgagggtctacctttcaatcaaggaacagtggccagaggttaggctaagtgggcactgagatgggggcatcatacagggtccacctcaggacttccattagcagtatctgctgctggagaccccagggaaggggtagtcctttgtccaggccttttcaggaggggtgttttcaggttcctgcccagtttaggcctccccagagcccacacctcagctgctgaggagagaggctggatgtgggagccagagagagcattaccgctcgactgaccacgtgtacatgaaggtgggtgtgcaggctctgggacctcctgggtgcagggagctgggtccatctgagctggcccaatgctgggtctctcagctagcagtcctgccggcctccagacaatagggagatcagcttaatcaaagcttgggcctgaggaaggaacaagggagggagggggcagtggggtgagggcaccctggacttagcctagattgtggctggagacactgtctcctaattaagaacccgtgggactcaggaaaggagcactagctccaggctgaattgcaggctgggtggctgcatctgcctggagtagcgcctggggagttccattggcctctggctcccagcctctagatcagggcaagtctggtctcagtagaagggtgcctgcgcagggctgttggctagggtcagaactgtccccctctcctgccacttaaccacttaatttgctatgtcctgaaatagaaggcacactcctgtgggttgttaggtcccccgcgctgag

SEQ ID NO: 26993 - DNA, 1488 bp, Artificial sequence
  DNA replication origin
tcacctgcttcggatttagagatgggatgaaattagaacaaaccacagacaagcaatggggaaagaggcatttgacaaaatccagaacttgacaaaatccacatgtgtcatttttaggggagtgtatggaaggaagagatttttagtaaaatcatgaaatcttttccaaaccatccacttttggccccttctttccaacccatcctgcaagggttttacctggctcagagtggcccagtgccccagaccccactaaaatgaatctgcacgggtacctccacctaaccccacagtgctcactgtagacagcagcagtgagagtctctgtgactcccgtgtattgactgctggaatctgggaatccacttgcccagtcccacataaaatctctccctagctgttgagcttaagatttttctgggggtatctaggagcaaagatattgcatttttcatactgaatcctttgcatcttggggatggctgacaggcggaggtgaatcatagggctcaaggctggagggtagccacagcagcaaggaagaagggggtgatggctggcatgagcacgaagtggtacccataggccactcacatctggaaggctgcaatggtaccaccaattcagctgccagctcagtttaggggtgattccgggagacccaaggtggcagtccctttccactgttgcggctacttggagtgagtagccaggtgtgtgctgagagctgaagaaggagagtggaggcatggctttgtgctttaatttttggtgaaatatgaatttaaccaggagccaagagagagcctaggacttctccaaggtgcttggcacaatcggttttacactcctagtgtgtctaggaaccgagagagagaagggacctagcagcttggtactcagggcccaggccagggcctcgcccaagtggagcatagctgaggaacctctgagtgccaggtgttatgggtgggacaccgacctgcgctcaccgggacacttaattcttcctccaatccctggtctctgccgcgtgggctagatctactgcaagtgctgggcatggggaaaggaagagagaagttaaaggtgaaatggcttctgctctcggcctctccgtgagcgctctcggccctcctgtggagatcgccacgtcctatcacacgcgtccctaaaccttgtcactcgagcattcttgtctcccaaactctgatggtccgcagtgggtactgggctccctgggccctgggaggaagacggaggagtttgggtgaaagatcagacggtgcgcagccctgaggcttctgagggcagagggtgcgcttccttgccctcggggcggggaagccgtgaacgccgaggccattgtaaggctgggtggtgcggagcgcgggaagggggctgggatttgaatgggagcctgtgattggccgatccctggactgacgtcacttccccgcggggcgattagcctgcgagaggagggcc

SEQ ID NO: 26994 - DNA, 1864 bp, Artificial sequence
  DNA replication origin
gctccgcgcgggtgccctacgtgagccccgggacgccgtcgaggcaggccggcagcgccggtgccaggacgcacggaacggggagcaggggagaaatgcgccgggagggcgagggaggaagggaactgggcgggggctgcgggcctaggtggcgggagtcagcgtgtgcgtgtgtctgtccatcccctctggctctccgcgtgcgccccaggatccgggcacggcgtccgctcaggctcccgcgctcggcaggcagcagcacgtggagcccacggcgcggcagcggcactggctaagggaggcccgtttctctctttggttatctagctgtatgagtgccacagagccgtcataaagctagataaccgaaagtagaaatgattctcacaacttctgcgtgcgagcgcccgccccaccgaccgccccggcccggcccgcaagagccagaggagccgagaggagcccagcgccggcccagcggactccagctcgacggagcggccgcgccccgaccaggtacctgacctcggctctctctctggggacacttgcagtgccagctttcccccagtcctcctctttcctggtcccccacccctatcccccagcgccggagcaggaaccccaaagtggagcgggccggggagagggagggggttggggttgcagaggggtcgctggaaggggaaggcgccagccttcgccttcaccccataaatcaggctggaacaatccgctcccggagccgtggacggggattttgggatgcaaatgcgatgggagagagacagcggtcggtagggggtgggtggagggagtgaatggggtgggctgggggctgccctgccgctaacaatgcggcctttatcgaattattcgacgagtcagcccctgagcgccattagcatacggctggggggttgccggagcttcgcccctcggtgaggtcaagttcttgataatttgatcacttttcacgggctctggcagctgcctttgtgtgcagttggggggtctgtgtgcagcgtgaagcggagcagaactggcggggagtgcgctcaatggcaaggggccagggcaggggcctccctccccgacgggtcggccctgccctgcatacaaaccaagagccggcgggtgggcgggaggaaccgagctcagtctcccgctacctctacgccagccccgaccgggctgctcctgcccaagcctccccaacttcccgcgaggttaaggtgcaggcaagctcccagagctccccctcctccctgccccaagaagtcacgacataagatgtattacaatgtctagcaaataaaaaagcaattgggggaaatctgaattcgttcccatggcaacccaatgcagcacacccggccactcaggctcccagcccctcttaactgggctcagggagtggggcttgcccctgctcagtgcgtgggggtcccggccccacacagtgctagggtccctctcgagtttctcatctgccttcaggtcactttccaccctgatgccttggcttgtcctgaagctcagggcccctgtagcttgggaaacctcccaagctccccagcgagtggctgtagaccaaggaagggaccctgcccggcttcagggaagaaaggaagaaaggtaggctcagactccccgattggtaggggggctttctaagtatatgggtatgtgagtgctatgatagacaggctgaaaggaactggcaccaccacccagccctgacccccatcccctcacccttttacatgagaggaaacagatctggggatctgaagtgactccctaagggtcacacagctcagaaggcagagctggaccccaggccaccttacgtacatcttgg

SEQ ID NO: 26995 - DNA, 1906 bp, Artificial sequence
  DNA replication origin
ctgggctgtcccgcggctcatggccaagcgctccttgcccagcccggaaccgggcgcccgagccagcgaacaggccggctcgccccagctggccgagcccgacccgccgcgcgctcgggccaggcgagcgcggcgcggcggattagccctgagcccgcagcctcgagggcgcggggcgggcgcgtttggggtatgagggcggggcgggcggcggccgcgcctctaatcccggcgctgcgtgtgggagcggccggatcagggaattagcgctgtaacttcggattagtaacgctcgctaaatgagtgcctaattccgacccttcatgcttttcagcgtcgcggctgagtcctaggaggcctcctggccaggctccctccgcgctctggtcccatttcccgggaggtccggccgcggccggcagagaactctccggcctgtggagatccggcctcaggccgcgccgcagcctcctctcggcagcgcatttcattggcccgggcagaggcccatgcagtcccacagcgttcggagttgggagttcgtggaccagagaaaaggaagccccggatgcctcgcccaccacggtggctgtactgatcgctgccctgtcagtggccttctgtgcgaccttccgtgagccactgggcctttttacaccatttctaggtgtaaaatgaaaggaatggggtgagaagtatccgagattctctaagattctggcttccaagctgcagcagattctcgggatctccaacgcctttttggatgaagaaagagtagcacaaaccggagacaaaaatgaagcccaaacgtggggagccagtggccagaggaggcttggggaaggccttcctggggcacaggaatggaggagacgagggactgagaaggccccagacccgtccggctactccaggtccaggcaggccagaagacgttgatgggcccaggcaccaattttgagtctgtgccttgggctttaagtgtccaaaggggattcgaacattgctctagtaggggcaggcattcgtaccaggaggccgaaatcggatgggttggcctctggcctctggcctctctccgagggccgtttaaggaaggtgtgggatgggctcctggagattagaactggcatgctcatcgccctccgcagccctgctgccgcgatctttctctgaagcgggaggtttgcatcaacagattttcgtagaaagcgggaaaatgccgcgttgccctcccgcacagactcctccttcatcagaccctcaactcgggtttcagacctgcccagatggtatgggacagtggtgtttaacaacaacactcatctgaactgtgtagacactgctgggaagctgcaaagccaccctggcaagtgaaggactagttcttgcaacacagcaaacgggtaggggtggtgggaggggaagatcgaagcccggggcccagggtttgcccacacccgttggccggtgagggaggaaggcagggagtgcagggcaagggggcaggaagtgctgctccggtttcctccgaaatgaggtcaccatcagcacacaggctcccaggtgcattgggaagggagggacggcccaagggatgcagcccatagcctcgtgaatcccgaaacactctagtcacccttcaccagcctcctgtcagaaaaaaagggaaactggcctttcaaaatggaggtggggtacaaagggattcagaaaaccttctgcccatgattatctctgaggagaaccggggaccaaagtaggagggcagctgactttccctgcctggtcttttgtgtgtattttttatttaattttactgtgaatgctaacacactcacagggttcacaattccaaaggtatacagtgaaaagtctccctctaccatccacctcagccaca

SEQ ID NO: 26996 - DNA, 1389 bp, Artificial sequence
  DNA replication origin
agggctaatccgccgcgccgcgctcgcctggcccgagcgcgcggcgggtcgggctcggccagctggggcgagccggcctgttcgctggctcgggcgcccggttccgggctgggcaaggagcgcttggccatgagccgcgggacagcccaggcgggacggatgcgccctccagggcccaggcgaggccgcgcggtgcagaaccgccgggatttctccaacccgggtatgcgcacccacagcagcggcctttggaggccgcggcgccattttagtggccttccttcccccttggcatctgtcgtgtatggtgtggctgggtgtccccagctccccccatcccgctctgactttggctgccccctccgccagcctggatagagtgaccaatcagctctgacctagggtgggatgcgcgtcaccatggcgacggctagggcgccctggcagtgctgcccatcgcagagggcaagtcttcactccgcctagatgggtgtgaagggaaggtggggacaggtgggggggaggggcggatggagggaggccgtgatgcctcgtccgcattcccaccccattttgcctagggtcagttcagctgggtcaggcaggggacaaatggatggtgtggaaggggcctgggtaggggcctgggtttgtcctggggcggctcttccacgagtcctctcatcccccccaggacctagctctggtataaaggctcatcttggtctctcatcctcttctatgtctctcttccaaagacagtggtgttcaggagcccccagacgcttccccccaattttcttgctgttaagtgctgtgattttagacaagtcgctttccctgggtcttagtttttgcatccagaagatgggctgctgtgcaggctcatgcctggaaagccttcagtgcacaccggctgttctgtcagtgttagagctccttctccctgggcaagacctttgggggcaggattcagaacctgaggatgtcctttctgtccagggcagccaagtttgggtgtctcgtggcttcctagagccagcttttcatctctcctccagacagctgggagaggagggaggatttttaaaaatagagccagggtgggggctgtggctggaacaaaaccttggtcagtggctctgagaatggggcgctgcagctcctaaagctctggctccttccttcaagcctggtctggcttaagcaccactttaagtggtcccggcattcactggccagcccctcaccgcaattgagccgcaggggtttgaaaagagggccagggcctcaatgacaggaccttgggccaggctaattggttttggttcaaggggatactggatttgtgaaaagctccaaaccgcctttcccacgccagagccaggc

SEQ ID NO: 26997 - DNA, 1135 bp, Artificial sequence
  DNA replication origin
atggctgcgtgggcacccggaaggtcgccgcgccaagggcccgctgagcccctcctcccattcgtccagccgcgcggcccacagaagcggaacgcgcgtcgagagcgccctgtccgctcgccccagacagatgcccggttattcattaccgcgaggcctagaggaaagagtggctgccgtcttcctgcccacagcccgccggaccctccgtcgcggctgcccggtccccggagccgcagccgccgagcccggctgtgcgtgtcgtggctgctggggagaaagaggcttccggtaagagcccccctgactgggctgcccaccccgggcaggggcggaaacggccttccccgcgtggggaacaatggcgttattttggagtctgcaaccgcgagcgcttcaagctctttgattattttcgaggagtgttaggtgcgtggctaactcccgcgttttcttggaaccacgaagcccaaaatggcgagcgggccgtggccgccctcctggggctgagtgtggtccggagcgctgagagtggccagggagccgtgggcctccatcgtccctgtggttgggactgaggaccggcctggaggctccattcacaccatcgcagggcaggctgggggtcagatgcggatgaagcgggccgggcagtggagctgcatgtttgagcttgccctctccaggcctaagggccagagcttctgctcttctgccttctttgctcctatcctaccctcgtgaataatttaagcacaatcactgtttttctagctgtccgcattgacccaccgcgacctcgaagcaggtcccaggcgtgtgcatttatatgcagagtgaccaagaaacttcagtaatactagtttgtgtctttggagtcccactttttgccagggctagtgctaacagcttcaggagaattcagcctcaccttgacaggtagggtgatgattcactatttgtggcttttgccgtagctaggatgtggcagagccggttgtggactcggggctatctgccccaaggcctgcgttcccaacctgtctctctgcacatacacaggaacacagggattcatcaccgctgtggtttcatctttcagataagcaccaagcctttcctgaatccaagtccc

SEQ ID NO: 26998 - DNA, 1393 bp, Artificial sequence
  DNA replication origin
tccggacaaagtgtcaagtacaagttcaagttcagggccaggcccgggggggggcgctgagccttacccggccgcctttgttctctggcataatcgctcccacgtccccctcccgggcggggcccagcagagacccccgccccgccccgccccgccgcgccccgcaggagcctcctcctcccgccggcgcggcgcctgtgccctggtcccggtgtccccgctcggtgccaccgaaggatctaggggctcgggccggggagggggtggaggggggagtggaggcgcgatacgaacccgtgggagcctccccaaccccgcagtcccagcggcaaactgtgcttggtcggacggatgcccgcgcggaggtaagagccctttgcgggattcgcccgtatccctgtgccccgccccccgcctgggactacgcgggccccaaggagcggggcggaggatggtgtgctgaaaaccggctgggcagccccgctgggcctccggtggggtggggggcgcactgtcgctccagggctctggggagtacgaggcctgggcggtgggtatggagggcaagtgcgcccagccgaggcccagtaagatcgccggcctttcccaaaggcgtttggctcacccatctctcctcggctagcctcttggtctccccttctgtgtttctggctctggctcttccttggctcctctcagattttggctggaggggatcctagttagaatctagctcagccaggtcctgaggcccctcgtgaagagccggagatgtgtgtgtggctcagctgttaggggaatcagctgtgcccactcactcccccatcccattcccagagcctaaaataaagtcctgggccaaatggtggttgctggggcggagtgggctgggctgggcagtgacttagtggcagtgcaggggccatacgagttcttttgtgtgtgtgtgtgcggggggacctcttgctgtccctgcttgcctagttcctggattccgtgcggtgacaggtgttagcttgtacctagctcatacctcacccagtgcactgccaagttgaaagggcacgggggcttcttctgagtggcccaaatcttgtcccctatacctgcctttcactctcaggtgcttgctttgaggtcatttatgtacccatgctttacatactcttctaacaaccacaatatttggcttctaaattcacagcaagttagaagtaacaaattagaagggggaagaaggccttttccctgcagctgtactgctcccattgtgcgttccttcccctcttctctgtgttgtcctgggatttctcacttctgggattttactcatgctgaattgccagcctacttgagtacattccttcccaactccaattggccaaactttgtc

SEQ ID NO: 26999 - DNA, 913 bp, Artificial sequence
  DNA replication origin
ctgtctcaaaaaaataaataaatgaataaataaattttaaatattagccaggtgtggtggtgcacacctatagccccaactacctgggaggctgaggcagggggaatcgcttgagcccaggagctggaggttgccgtgagccaggctggtagctgtccactgtgccatgagctcagaggggagtgagagggtggcaggtcaccagaagctagaaagctgccccctgaggcaatgcagctagagctgcacaggctctgtccacctgctgtgtcagggaggagggaggggaggaagagggagggcacagctggggcagtgggcacaaagccagcaccaggtcaggcaggcccagtgggcagatcagggtcagtggcctgggtgaggtctagggcacccagatgcccatgctcttcccaaggccactgtggcttcccactaatcctgggcatagggaggggtggagccaggagggcggagcaaaccttacagcctgaggggagcacctgtgggtggggcttgggagaggaactgagagaggaactgaggccgcacaggaaggagccggtcagtgaagcaaggctgagtgttcacttattcaacaacctttattgagcccctttattgagcatgatgatccaggcatcatgatatacagctctaaacaaaacacatgaccatccctgcctcacagagctgacattctggtggaggaggtgggcaataaacaagataaataagtacatcatagagatgagctgaaggtgaggaataaagcaggaaggtgaacagggtgtgctggggccgccattgcaaatgggccagggaaggcctcattaagagggtgacatttgagcaaaggcatgaagccaaccatgatcccgacccacctattcatgcttttgagtcaagttcg

SEQ ID NO: 27000 - DNA, 902 bp, Artificial sequence
  DNA replication origin
tcccaggcaccaccccagaggttctgattcagtagggaccgggactctgcaactgacaagctcccaggtgattccaatacagaaactgagttctggactgggcgcagtggctcatgcctataatcccagcactttgggaggccgaggcgggcagatcacctgaggtcaggagttcgagaccagcctagccaacatggcaaaaccctgtctctactaaaaatacaaaaaaaattagccgggctcagtgtctcatgcctataatcccagctactcaggaggttgaggcaggagaatcacttgaaccctggggcgggggggcagaggttgcagtgagctgtgattgcgccactgccctccagcctggatgacagagtgagaccaaaaaggaagaaaaaaaaggaaggaaagaaaagaaggaaaaaggaaggaaggaaggaaagaaggaaggaaggcaggcaggcaggaaggcaggcaggcaggaaggaaggaaggaatgaaggaaggcaggcaggaatgaatgaaggcaggcaggcaggaatgaatgaaggcaggcaggcaggaaggcaggaaggcaggcaggaaggaaggaaggcgggcaggaaggaaggcgggcaggaaggaaggaaggcgggcaggaaggaaggaaggcaggcaggcaggaatgaatgaaggcaggcaggcaggaatgaatgaaggcaggaaggcaggaaggcaggcaggcaggaaggaaggcaggcaggaaggaaggaaggcaggcaggaaggaaggcaggcaggaaggaaggcaggcaggcaggaaggaaggcaggcaggaaggaaggcaggcaggaaggaaggcaggcaggaaggaaggaaggcaggcaggaaggaaggaaggcaggaaggaaggcaggcaggaaggaa

SEQ ID NO: 27001 - DNA, 922 bp, Artificial sequence
  DNA replication origin
agagctgtgggtcctgccccagggtggtgctctgaacttccctctgaatttagcatcggtgctgagtttacatgaacaaatacacctcagcttaggtttctcaatgtgcgcaaatgatttcatgtatgatcgtgttgcagggtttatcacatttctaactgttgtggaagaaattgagctgatgtatgtgaagcaccataaatggtattatggttattctgggaagaactgatgggtgacagactggaagagaggtgtgaaagagagggaggtgacaaattcagatgacaattccagaagcggggaggggagttggcaggatgacaggatggcagcgctgttgacaaacacaaggcagtgggaagaggttgctgcgtgggagggaggtgctgggtctggcctggccgtggtgaatttcagatgaccaggggggtgagggctgggctggtgggcgggggttagggggagaaatggagcctggctgtgggggcttggagctgaggtctgagattggccaggcctgcaaatagagctgtgagttgcaatgtgggaatgaagggagagagagacacaagctgagaactggctgtgccttgaagctagcagagaagacgaaggacacgctggcagggaggtgggaggagcccctgggggaagacagcatcaccgcaagtggggtcctttcgatgagaagggtgtcagttgcctggtggtatagaggcgacatgctggcaggggcgaagctgaagaggaccaagggagccgctgctgcaggggaaggtgtgtgtggtttcagggctgccttggcctctgtgtggcctgagagcaggagcagggagccctcgctttcctggtccatcctccctgcctgtcccctctcaccctgctcttctccctgctctggtgggtgccctgtctctcc

SEQ ID NO: 27002 - DNA, 2147 bp, Artificial sequence
  DNA replication origin
ttggagctcttggatatattttgaaggtaaagccaacaaaatttgctgttagattaaatgtgtagagtgagctgtagggaaattgaaagtgactccagagacttttgccctaagctactggtagaaagcagtttctttctgagatagggaaggctgtgggagaaccaggggctggggtggtgaggactggagggtttgttttgggcatggtaagtctgagttgttcattagacatccacacatggtattgagtaggcatcaactatgcatgtttgagtttgggagatttgtctggactagagatgatgggagtcatcagtgatgttttaaagccatgagatgggttaagatcaccatgggggtgggcgtagatgggaaagagaaggggactaaggactaacccctgcaccctaatgttaagcagtctggggaatgaggagagagaaaccagcaaaggagacaaaagggggacagtcgctgagttaaagaaaacccagattgtggtaccctggaagccaagtgaagacaggaaatgcttggctgggttatttactactgacaggccaaggaagatgaaggctgggagctgacattcaactgagcaatgtggatgctcgggataccatcacaacgtgatggttgtgatactagttttggtggaattgtgagggtagaagtgtgagtgggaatacgttcaggagggactgtgaaaagaggaaaacagcaagtgtggacaattttttggagtagttttgatctaaaagatattagagtaatgaaaacagtggctagagagggaagaagagtcaaggtttttggttttgatttttagaaataataatagcctgcttgcatgttgatgagataatatggtaaaaattaatgcaggggatggagagaattgctagttagagggctttgaggaagtgcaagtggaggggttggtcttgggaacaagcacagttcatctgtgacaactgggggaaggcaaaaatgtaagggctgggatgccaaggtgagtgatgttggtgtgagtgtacggggttctcttccgattgcttcagtttttttagtgagttaggaagtgacatcatcagctgaaaatgaagacttaaggagatgctggaggctgaggagagaggggaggaggaagtggctcttgagagggtgaagatagcaggaaggtggaggaagtttgccgggatagtcgtgaaggtaaagtgagatccctctgtgggcttgcctgcctccagccacattcaccagctggcacagctgcagagtaggcagggagctggattaaccagggttgggattttcccaaatgagggtggtaaagctagagaggggtcagggattcaaaagtgtgaacaggaagagattacaggatttgtccatggaacgaggcagggtaaggagggaagtgaggacaacggaaggacaggcgatcagatcaatgggttataggggtctcaggatttctggagccaatctgctcaaaggagagagctaaaaaataggtggaggtggtcagaatggggtgcttgagatcatagagggtggtgaccagggggagagagtgactgaaggagggcaacacgctggggcaccagaggtgaggaattcaaggggacaaaggccagagtgttggtagcatcaaatgtgtgtatggaagttatccagagttaagactgagtagtactggagagactgacggtggtgagtcgggagctaacagtctttgaggagtaagggggaatgatccaggcttgttagatgactatgagcgtgtagcctttgatgtgagactcaaagctggatttttgtcgttattttcagcaggtagagggaaaatgatctggaagaggcaaggaggataccagcccacctcagggccaagtggaaaaagagcatggcgggggaacagcaagctctctccagcgctgcaggggaagcagtgtgttcagggcaggaggagatggaattgaggacataggggattttgctgatgagggtcagtgagttccagagggcagggtgggaggattttacgtgtggaagggctaggctgtggtgccaggatgggagacggaaggagcagtgaggagattccagtgggcagactggagtgacctgggggtctaggg

SEQ ID NO: 27003 - DNA, 1349 bp, Artificial sequence
  DNA replication origin
ccagcacaataagcaacctgtgaattgagccaataaaggctcgagggagagtggtctctaagctttccccaaagaaagggaacaggtctgacttcagagcgcgacgaggagttacccctgctgtggcctacagcgttcacaccgccgagcttctgtttcagttcctggtttatccacatgtaacggcccagttccttctccagagcttgaatccgggcctcatactgcctcctgctgtctgctaacccttcaccgaggtggtctagagtggaaaggtcgaggagagggtggtgagggctgcaggcggggcaggcggccagggctgtgggggtgggggctgtgggctgggtgggggccggggttgtgagcggtgggccgggccaccagggctgtaggtgcaggggctgtgagtggcaggggcggtggggggagggaggggggtgcagggcggggaagatgggggtgggggggatggagggggccggggttgtgagccatgggccgggctgctcacctcgactctgctgcaggagcagctgcatgttctgctcgtgctccttctgctgcagggtcagctggcggtccatctccaggcgctgccgctccagggccacctccagccagtacaccagcctctgctgctcctccagctgcatctccagttccgagaaggcaatctgctgctggtgctgctcctctcggagcgtcaccacctgtcccaagacccagccaggctcagccctcatcatgacccctcttcatccagctaatcctcaatcacagacacagtattggcacacttgccaccacggcactaagaaatcaccagggtcttccctgctgagccaagactcagcctcagacacctcagcagtgctctagttatcttccaacgatcagagctggctctcaccttatctgctatctctgccacaaaccctttcctagccacacactatggagctgggcagagcgtcaagttgtgggatttcatctagaccaacctcagcactatggacatctgggaccagataattcttggttgtgggggcctgtcctgtgtgttataggatgtttagtaacatccctggcctccacccccaccactgtgacaaccaaaagtatctccagccatggccaaatgtcacaaaagggcaaaaacttcccctactgagagctactattgtggccatggaccaccctgaggttagccaatcagagcagaagtggggggcgggtaggaaactgggtcttagtttcacaagtaaaataggctttaaggtcaggcggccctgcagatgagttggtcctgattctgtcccccagtctgggaggaaacgggatatccg

SEQ ID NO: 27004 - DNA, 898 bp, Artificial sequence
  DNA replication origin
agcttggacgggagaggggacaggaggggcagcagcgggggaccttggagccgggcgtcaccaggtcagcattgctcctggcgccctctggtggcggcggttggaggtggcggtctggcaggataggagtgtgatgggatctgtggggtgagtttgagtctgaactcctacagagttgttggggaggagaggagtatttgacactcctcattttcagcccagagacggtggagtggcctcagacctgttcctcagtttcctacactcctgcctgtcggggcattcatgcccccttggcacctggaccatgtcttgcagagcgaccggctgcgtgagcagcaggaggagatggtggaactgcggctgcggttagagctggtgcggccaggctgggggggcccgcggctcctgaatggcctgcctcccgggtcctttgtgcctcgacctcatacagcccccctggggggtgcccacgcccatgtgctgggcatggtgccgcctgcctgcctccctggagatgaagttggctctgagcagaggggagaggtgagaagagggtgaggctgggtgtctgtgggccctgctggactggtcaagttcggggcaggggaagggggcactggggcacgtgtcccccactcatgctttcatgggactggctgtgagatgcgagaggctgctttcagctgtccccagaggaagagccaagatttgaatgactctgggcctctcagaagggtgcagtgccatcgggcatccctggggtagctgaagatcgcttggaatgaggaggttacagagggggttcaggcttccggcatcgggtggaaaccttgcacacttctgcatacggagagctcatcacctttcagaccaccccctctgtctttggatggct

SEQ ID NO: 27005 - DNA, 1064 bp, Artificial sequence
  DNA replication origin
acttcaccgagtctcaggtctccagctgtaaaatagggataaccgtaggacttaccccatctcttagtggggatgttgtaagggctgagggtgtcacatgtgcctagcatgccggtgaagacgcagtaaattgttcctaataatagtggtgatattattaatacaaatacgatggataattacaagagatgacccaaatggcttgcagagggcacccaggccagctggggtctggggtttcctcccaccagtgggtctggagttcccactgcaggtagggcttggaagagtagatagaaagcagggctaaacaagaagaggccgggtgtccagctcgccctgtcaacccccgcccctgaagcccctctccctgccctataggaggatgagggggcgcagcagctgctgaccctgcagaaccaggtggcgcggctggaggaggagaaccgagactttctggctgcgctggaggacgccatggagcagtacaaactgcaggtgcggcgcccgcttcacagtgcggggaaggcttcccagaggaggatgaagggaaggcagagctgagtttctcaggatgggagggagttagggtagggtactgcggggtaggggtgtagagtcaggaggtgcacatgagcgaaagtgtggaggtgagcatcacaacagcgcaggtgggtgtgcaggaccgccaggcagggcagctttgctgggtggtgtgagcttggacgggagaggggacaggaggggcagcagcgggggaccttggagccgggcgtcaccaggtcagcattgctcctggcgccctctggtggcggcggttggaggtggcggtctggcaggataggagtgtgatgggatctgtggggtgagtttgagtctgaactcctacagagttgttggggaggagaggagtatttgacactcctcattttcagcccagagacggtggagtggcctcagacctgttcctcagtttcctacactcctgcctgtcggggcattcatgcccccttggcacctggaccatgtcttgcagagcgaccggctgcgtgagcagcaggagg

SEQ ID NO: 27006 - DNA, 1001 bp, Artificial sequence
  DNA replication origin
actcgctgggcgggaacgccaagacggtgatgatcgcctgcgtcagcccttcctcctccgacttcgacgagaccctcaacaccctcaactacgccagccgcgcccagaacatccgcaaccgcgccacggtcaactggcggcccgaggccgagcggccacccgaagagacggcgagcggcgcgcggggtccgccacggcaccgctccgagacccgcatcatccaccgcggccggcgcgccccaggcccagccaccgcctccgcggcggccgccatgcgcctgggcgccgagtgcgcgcgctaccgggcctgcaccgacgccgcctacagcctcttgcgcgagctgcaggccgagcccgggctgcccggcgccgccgcccgcaaggtgcgcgactggctgtgcgccgtcgagggcgagcgcagcgccctgagctccgcctccgggcccgatagcggcatcgagagcgcctccgtcgaggaccaggcggcgcagggggccggcgggcgaaaggtggccgagggacaggttgtggttgtggttgtgggcagtggggagtggtggagaggaaggaagagggtcttcagacagcagctgcgcccctgcctcctgcccattagcagggcacgttcgggattcggtcacttctgctgattaccgtggtcacttccttaacttcaccgagtctcaggtctccagctgtaaaatagggataaccgtaggacttaccccatctcttagtggggatgttgtaagggctgagggtgtcacatgtgcctagcatgccggtgaagacgcagtaaattgttcctaataatagtggtgatattattaatacaaatacgatggataattacaagagatgacccaaatggcttgcagagggcacccaggccagctggggtctggggtttcctcccaccagtgggtctggagttcccactgcaggtagggcttggaagagtagatagaaagcagggctaaacaagaagaggccgggtgtcc

SEQ ID NO: 27007 - DNA, 1171 bp, Artificial sequence
  DNA replication origin
cagatctcctattggatcttcggatggacacttaggatgtttgcattttttgaagtcatgaggaagagtgctgctctgaagttcctctgattatttccttgggataaatttaggaggccctttagataactgagcatggattaggagtaatcaaggcaaggttatttgataatctgttgaggatgcagtgaaggggatgcttacagcatgaaaggggttgattgaatcaggagaggttgcttccaactcttaaattttataattctgcctgaccacgctggagcatggccaagctcaggccacctgtcccatcctggcctcggccactgccttctccatcctagagcaccatcctccagctctggcaggggcctatgagcttccgggcctgggggccatgggccgtgtccagctgaagtggcaggaggccctgcggtgtctccccagcctccctccttgaggatgagcagggcattgtcccgagggccatggccgaggccttcaagctcatcgatgagaacgacctgcttgactgtctggtacatgtgtcctacctggaagtgtacaaggaggagttccgagacctgctcgaggtgggcactgccagccgtgacatccagctccgggaagatgagcgcgggaatgttggtgaggaactctggggtcctccactgacggagaggggcttaggggggcttcacctgtttggagtggagtgcttacctgtctgggaatggcaactcctcatggaaaacccaagccctgggaggttttgctttagcttcttgcctccactgagttcagtacatgcttctatacccagagtgagaggcactgaggtgggccagtgggaagccggagcccctcaagccggaactaggaagggcagtaccccgtgggcatggggagggagcagtgggtcaggaagggcaggtttggggctagttctgctctgcctgccctcctggctggtcagtctggcggcccctgccctggggctcacggccttctgtgcccgcagtgctgtgcggggtgaaggaggtcgacgtggagggcctggatgaggtgctgagcctcctggagatgggcaacgcggcgcggcacacgggagccacgcacctcaaccacctgtctagccgctcacacacggtcttcaccgtgaccctggagc

SEQ ID NO: 27008 - DNA, 927 bp, Artificial sequence
  DNA replication origin
aacaaaaatattttgaatcccaagggcagtggagagcctttttttgggggagttggggttaggcagggagtgaaataattgcatttgcattttgagagatgcctctgaggcgcagtggctgatgcctgtagtcactgcactttggaaggatcccttgagcccaggagttcaagaccagcctgggcaacatagccagactgtctctacaaaatactaatactaatactaatactaatactaatactaatactaataataaaattagccaggtacatgtctgtggtcccggctactctgaaggctgaggtgggaggatcacttgaacctgggaagccttggctacagtaagcagtgatcatgccactgtactccagtctgggtgaaagagagagaccctgtctcaagaagaaaaagaaagatgtccctggttgccctgcgggaggggacagggagactgatgccagggggaaggctgctcaaagtcatcctggcacgatgtcagtggccaggaccagggctttagcaacagaatgggaagcagcaggtgaacttgagagatatttaggagatggaattggcaggatttggtggtgagagcttggtcttgaaggatctgttgacttttttgaagaaggtggggcaggggatgtgagtgacttgacacaaagactgtggtaaacccagtgggtgttagggacaggagttccctggtgtggtgtggtgctgtgtgtgtgcgttcttctaggagatggggccataggggccatagggaagagtgcagctgaaacactggagttcaggagttagggcctcatttcgccagtgccggaagccatgacatgttcctgtgggggactatatatatcatggcccttgcaatttttgagcaccaggttggacatggggatattgtgaactttgaccacc

SEQ ID NO: 27009 - DNA, 1174 bp, Artificial sequence
  DNA replication origin
acctgactgcctggcccgggacggcgcttgcagccaggcaggtgagtgtgggccggagagcgggttaggggcgaggaccgggtgggtggagggaggcgcgcgctccctcctcgcgcaggcctgggcctagtggccctgggagccggcactcctgggagacctgacccggcatgaggagcccggcacccttgctccccagcctcctggaagctcttccttggactggccggcgccgtcttcccgacatctgggggctgaggccggcatcccgggcctgcgtggaggggcgagcgccaaggctgcgagagtcgggtcccgatttgtaatcacttcttccaactttcatggagctccgtcccgcgcccgccgcctccagccccagctgccctgccccggctccgaatagcgcctgcggggttgtcagagcaccttcggagcgggagcgctgtgcggagagcaggggcgcgcggaagccgggactgcaccgggctcggaacgctcacgcggaggggtgcgcgaaggcccacacggtattgcgaggcagagtttaccgctgtgtgcccagggtcgggagcccaataggggctgggtgattgaattaacgaaaggttactgtgctgagagagaggttgaagggtaaagaatgaagtgccgggctggcggtgggggtgaggaacgcggtaggaggagggagggcagggaaagttccctggatgaagattatccatcactatctgttgggcagcgtgggaccttgtgttgggcgctggtgataaagtgcaaagtggacccagagggtccctgccttccagctcctggtctgggaggtcggggagagaagcgggtagtaacctgcagttggagtggtcacgggcgggtggaacagcactgggggttgtgtgcgtgtcgtggtggggttacagaggaggggagcttccgtggctccctgaattagaaggtggctgcagcctcagccgggagggatgaggaggcttgggtaacacctagccgttgcaggcagagagaggaggcgaggaaaggcctggggtgtgggaagtgagtagtccagggaggcagggcctgatttaaggcttgtcttttttttttttccccttaatattttgaatcccaggccgggcacggtgacttacgcctggaatcccagcactttggg

SEQ ID NO: 27010 - DNA, 2157 bp, Artificial sequence
  DNA replication origin
ggagctattaatagatgaatacacatggtgtgactccacttacatgaagttcgaaaataggcaaaactaaggcatggtgacagagagcaggactgtggtcactcttgggggaatgtggactgagtggggacacagggagtctttgggtgttgaaaatggtctatgtcttgatctgtggtggttacacaggtgtgttcttataaaaattcatagagcttacactaaagatgtgtgcactttagtgtatgtagattaccaactcaataaaaagtttccagaaaagtctgctggggctgagccctgctcaccacctggcccggaccctgggggcgaggggcttgggctgctggggctccctggccttcagcaggggcagttgagccagctatctgctgccatcctccctcagagcagcctggcccagtggggtgcctcagtggccatgcaggcggtgtcccggcggaggagcgaagtgcgggtaccctggctgcacagcctcgcagccgcccaggaggaggatcatgaggaccagacagacacggagggagaggacacggaggaggaggaagaattggagactgaggagaacaagttcagtgaggtgagggggagagtgggagcctcaaggtcccccagcccacagaaggggtgagaagcagaggcatagggtgaactcagggcctctgccccagatgcaggggcacggcatgtgcgtgcaacacccttcaccccacccccaaatgcccagctggcgagggacttccatgtcattctctcagctgacccttgcaacactctgtaaataggcagggcagagattattgtcccattttgcaggagaagaaacagaggttcagagagggaatgtgacctgtccaaggccacactgctagtggcagaataggcctgaagttttgtaaatttggtattctcatgctttcccctctagccctggggctggtggggagggaagggtcaggggagttaccacaggaggcactgaccctgctttggcccccaggtagcagccctgccaggccctcgaggcctcctgggtggtgtggcacataccctgcagaagaccctccagaccaccatctcggctgtgacatgggcacctgcagctgtgctgggcatggcagggagggtgctgcacctcacaccagcccctgctgtctcctcaaccaaggggagggccatgtccctatcagatgccctgaagggcgttactgacaacgtggtggacacagtggtgcattacgtgccggtgagtaccacccctggcaaactgttagtgtcccaagggggcctggacatggcagataaagtagatttgactgaaggggctgcagtccccctcctttcccctactcctctggagaccgccccccactccagtcctcagtgccctggcaacattttaacatactgggcctctcccagccccaggagtatagaggcccatggctctggcctgaggcctctccccacggcccctcccacctgctggtagaggagtctccagccatcagtcccaggatcccagtggctcaccttcacccctttgctctcaactgaagggctgggcgggtttgcatgctgctgcctgggaaggggttggagaggcttccagggcaccctgaggggtgggccatgagttccaggggacagcagcaggctccacccaattctatcacctgtcaccaataggaaaaacccaggggataccaatgccatccctttgggagcccctttccaaagcaggttacagattatgcaggcctggggggcggggctggtcagggcagaaagcacccttagagctggtaagggggtgggttactcagtcactctaccaagcagcatgccagggatcttagcagcccgcctgttcatcctgcgctcgggccagccccaggaaggtgtaccggtccctggccaggtcactgtgtgggctgcaaggaagagttaggaaagctgatgacctcccattgagggttcccctcaggaaggcctaggggatcctgaaactttgggaggcttggcttgcctgagcagcctggtccatggagaagctcagagtgggcaggacctcagggctttccccggtgccccccaaactactgaaccgctccccagcctgtgtcctcctgacgg

SEQ ID NO: 27011 - DNA, 2115 bp, Artificial sequence
  DNA replication origin
tgcctgttcacagagccgacaacagtagccagcgtccaggtaggcgccccgtgccgggtggtagtggagcctccctcacctcagttctcagccccgctgcaaggtaaccccagctgcagggccactttaagaacaggagcgttaagaaaaaggctgcagatggtgggtggcagtgttgggatctggacccggctgtgactccagacctgtgtgcgtaatcaccaggtgtgctgccttcgcttcggctgaacaccagcttgtctcaagaacagagggtactggggggcgcctcacctcccctgaggcccagtcagggtgccccactgtggagtggtctgggccaggccccacgtgccgtggagggagtagtgagaaggactgcaccggcacaggggtgcccgctgaggccaactagctgcccgctggtccccactagtccccagccgccctcctcttctggggctctgctttcacagggccacctagtgagaaggccagcgcagggaaaccagcatttccagagcagcgacccttggccgggctgtgtgcttggggcttaaaatttgggctcagggccgctggcaaggtgggtaggtttgcactctctctgttttacaggcagaagctgacgcacagggaactcgaggaactttccataaggctagtgtgcagcccctggggacgggccaactgtgggctggtggttggtgaagcctgtctttgcaagagccctggcagcaaggtaggggtgtgtgtgtgtgtgtgtgtgtgtgtgtgtgtgtgtgtgtgtgtgtatgtggcagtggggctgtgtgtgtggcggcggggctgtgtgtgtgtgtgtgcatgcgcatgtgtgtgtggtggggctgtgtgtgtgcgtgagcatatgtgtgtgtgtggcggcggggctctgtgtgcacgtgtgtgtggcagcggggctgtgtgtgtgtgtgtgtgtggaggtggggctgtgtgtggaggcggggctgtgtgtgtggctggggcagcagggctctgtgtgtgtgtgtgtgtggcggcagggctgtgtgtgtggaggcggggctgtgtgtttgtggaggtggggctgtgtgtgtgtgtgtgtggggaggtagggctgtgtgtatatgtgtggggaggtagggctgtgtgtatatgtgtggggaggtagggctgtgtgtgtgtggaggcggggctgtgtgtgtgtgtggaggtgcggctgtgtgtgtttgtgtggggaggtagggctctgtgtgtgtgtctctgtgtgtggaggcggagctgtgtgtgtgtggaggcggggctgcgtgtgtttgcggaggcagggctgtgtgtatgtgtggaggttgggctgtgtgtgcgtgtgtggaggttgggctgtgtgtgtgtgtggaggcggggctgtgtgtgtagaggcagggctgtgtgtgtgtgtggaggtgtggatgctgtgtggaggtgtggatgcggtgtggatgtgtggaggtgtggatgctgtgtggatgtgtggatgtgtggaggtgtggatgctgtgtggatgtgtggatgtgtggatgtgtggaggtgtggatgctgtgtggatactgtgtggatgtgtgaatgtgtggaggtgtggatgctgcatggacgtgtggaggtgtggatgctatgtggatgatgtgtggatgtgagtaagtgaggatgctgtgtggaggtgagtaggtatggatgctgtgtggaggtgtggatgctatgtggatgctgtgtggatgctgtgtggatgctgtgtggaggtgtggatgctgtgtggagctgtggatgctgtgtggaggtgtgtatgtgtggaggtgtggaggtgtcaggtgtggatgctgtgtgaaagtgtggatgctgtgtggaggtgtgtatgtgtggaggtgtgtatgcgtggaggtgtggatgtgtggaggtgtggatgtgtggaggtgttggtgtgtggatcctgttgggaggagtggaggtgtggatgctctttggaggtgtggatgtgtggaggtgttggtgtgtggatcctgtggggaggaaaggaggtgtggatgctgcacctgggcattggtatgccttgctctagttccaaccataccctgagaagacata

SEQ ID NO: 27012 - DNA, 1388 bp, Artificial sequence
  DNA replication origin
cgggccagagcctgaccaagatcgagacgctgcgcctggctatccgctatatcggccacctgtcggccgtgctaggcctcagcgaggagagtctccagcgccggtgccggcagcgcggtgacgcggggtcccctcggggctgcccgctgtgccccgacgactgccccgcgcagatgcagacacggacgcaggctgaggggcaggggcaggggcgcgggctgggcctggtatccgccgtccgcgccggggcgtcctggggatccccgcctgcctgccccggagcccgagctgcacccgagccgcgcgacccgcctgcgctgttcgccgaggcggcgtgccctgaagggcaggcgatggagccaagcccaccgtccccggttagtgtccccttccccgcgcccccttcgtccgtgcccccgcgcacagccccaccgcccgccaaggtgaggaccaggcaccctgctgctccccgccggcagcctggccacctggccaccatagtatgcccagggctccaagaagcgaaggcagggaaaggccacgcagaggactgggtctcccctcgctaggggccccctgagagtggagcccacgagcgcggacacccgcacaaggccaccagtgcttgagggctgcgctgttccgtctctccctacagctccttccgggcgacgtgctggctctgttggagacctggatgcccctctcgcctctggagtggctgcctgaggagcccaagtgacaagggacaactgacgccgtctctgtgagcaccgaggctttttggcctcagcaccttcgaagtggttccttggcagactgcctttcctggaagagggcacgggcgatcccgacgggggcattcctgcgggtgagagccgtccccaccgcggcggcccttctcagcccctccctccatggagggacccatagggctagacactttgaggcaagcaggaggctctgcctaatgtgaatttatttatttgtgaataaactgtactggtgtcagttggcaatttcttcttcctacccgtggacacagagctccctctctccctccaaagaagagcatgggagaggtgggaggggttcttgcaatctttagccccccgacccccacaggcccagacccctttggccttacccccagccctggctcagcatctagtccagatgggtcagcctggaatgggtggggagggacgtcctgtgagaaggcagcggcaagtagaatctgctcatcttttctttgaacctggtggggaactggttaaaaccaaaatatctgtgtagaaatacaactccattattgagtatttattgtatgtacatcaggtacctattatactcaagtaaccattttacagaaggatgaggatcagcgc

SEQ ID NO: 27013 - DNA, 1552 bp, Artificial sequence
  DNA replication origin
gcccgctgcccaggcggctgctgcgcgcgccgcgcctacctacggagggggcgcgggggtcccggagggtgcctggccgcgcggggctcgccacggggctgtcggctggggtgctgccccatgagtctggggacgagacgagggagcggccgcagtccttgtcggagggcggcggccgccgagttgggccccaggccgcagagagcatccaggactcggagagcggcgggcacaggggctgggccatggcagcggcggcgcgtctgggggccggcggccggcggccgctttatgccgagcccgaggtgtgaagtggccccttccaggccgcatcagcacatcaaagtgggctcggggcttggagggggcggagcctgaccctttgaatccacggcggggggccaaggtgccagccccttgactgcgcctgtttcgccccacctgggccctcgcttgggcgcccgacccagcctctcggccttcccgcctgcgcccagtgttgggtgaagcccggggcgttgggccagccctgcaggttaaaggaagcggggtcagaaaaacgaaatctagatcctaggtttggggcctgccttcacctgttggggaccttatgcaaattcttagttcttttgcaccttagcttccaatttgtataatgagagcctcagggcatgcgccaattggacagtggagtagagtaaggaccaggagcagggaccctcattccctctaaaggtggagaaaacagtaaaccacttctcctttgaggcaggatggccctgggtagacccttccctggtaagaacatgtggacagtgcaaggaagcttgcaccccggcaaattcaataagctgccgagtctggtcaggatgctggaccttctgagcagagggagggggttaagcctgctccaaccccaggccacctctagcctggcaaggtctggagcttggcctgttgccacagctgtcaccactggcctttacctgatgttctgccgctattggacaggtataacaggttttcccaatgaaatgtgagtggaaatgacgcagcaaaggcatttgacaaaatccaacacccttcgtgatgaaaattctcagcaaactaagaatagagaggaatttcatcaacctgatgaaaggctcctacaaagaacctacaggtagcctcatactgagtagtgaaagactgaaatcttccccccaccccccgattgcaggaacaaagcgagggtgtctctcttaccactcctattcaacattgtaccagatggaggatctaggctatgcaattaggaaacaaaagacatacaggtcagaaaggaagaaataaaactcttttcgcaggttatggcagctctgggccctgctgcgcatgagcctgaccaatttaaagcggaatcctggctccaggaaacccatgagacgaccaaaaggtcggagaagaggtagaaaatgcggcagaggccataaaagagaaaggcagagaggaaactggctctgctgggctttggggatggccagactctattttacatcggaatcccaaa

SEQ ID NO: 27014 - DNA, 1335 bp, Artificial sequence
  DNA replication origin
aacacacacatgccccaggtgcagctgaggtagaaagaggccagaccacaagctgaccgaaactcgaaactcttgccagctctcgggtgagggtttgcagacctggctcagctgccaacttgggtgtgcccagcctgctcaggccctccagaaaagcccaagatggagctgtatccaggcaggaagtggaggctttgggccctaagtgccccctctcccctactgactgcccgcaacagtggtgaggtgctgggagggtggccagccccgggcagaaggatgaagagtgcagggccggcccaggtcaccagcctgggacctcatacgagctgcctggttcaggcccttggctagctccgggtgctccatctgaggttaggagaatgcccccaaggtatctgactttagacccagtaaaaagcagagtggggctcccggggcctagctggaatgcctgggcaggacctggggaagtgcagcgccagtgggcgggggtcctttgccagaggctggggatagggcatccctggacaggctagagaacattgaagggaagggggagagagcttaaattggccagatgtgaaataaaaagaggggtcttacatgatctgtactgaccacgtgccaaagaccgaggacaagaggaactctatcctcagctcccaaggcccctcaccaagagaaatccacgatccagcgcttggcctgagccaaggaagttttcttcagccttgtagattatgctccaccccaggccctgggagcacacaggatggccaggtgccttggccaaggtgccccaggtgtgtgggcagtgctgctggctgccattaaccaggtcagcctcaaccatgcacctcctggactcgacagggctgggctgaagcttcagaacagcctcaccatgccctttgcccagccattcccctgacagcaattcatcctgattggaaaagattaaaagtgcaagtttagacagactgcttagtgacaaaatcaaggtgcagaaatttcattcagtatggcaccactgatataagcaaaggcaaaagaaaatgaaatttgaaaaacagcccgtctacacagaaagtcatagtatgataccatgtattctgtaagggtctatcgtatatatgtgtatatgtacatagacagaggccttgggtacacaccaaatatagaaaaacataccaggacttgtttggagtgtgggtgggggcaggtctgagttctgggggctggtcaagcttgaattttgtcttcagtgtttacatttttcacaagaagactacattcatgtattacatgtgcaatttaaaaataagttctggt

SEQ ID NO: 27015 - DNA, 942 bp, Artificial sequence
  DNA replication origin
gatggaccgctcacttggggagcccaagtcagcatccgctggccccaggggctggtacatgggcatagccatggaggccctgccaagcagagcacctcactgggaggtgtcactgggaggcccagagactgacagccactggggcaaggtcacagagcagccactggaactgctactcgccccgactgcgtgtcaggccaacctcgtcttctgagccctttccacagacaagccgagtctgtgcctgctgagcctgctctgctcaaaccctgtgccctgcaccctgcggctttcccctggctcagctcaggaaacaggccccagagaggtcacatcacttgctgaaggtccctggagccaggactccagcccactggtatctggctttgagtcaaagactgtgcataacaccagtgggaacactgcctggctgggactaagcctccaggaggacgagttgcccgcttgggagtggaaggagaaggactgacaagttggcactgagtccggtggtggcctggtgtgcagggtgcctgtggaaggcagggaggtgctccctgctggggccatcagggcagattctggggggaaggaaaggacctgagattgtggattttctccaagtgatggcgggtgggtgttcctggcagagggaaaggtgtgagcccaaggctggaaacagggatgcccagggcgagcttgctggcagtgcccagtgggctggtgcctcaggctggcagggataagcaggagatgatgtggacaagcaggagatgatgtggacaagcaggtgggaactggacggggtggggaggtcctgctgagtgaggagttcagactcagggaggcagtgagatccacacgaggtttgaggaaagagagaggttggaaggcaaagatcctgaggcaggaaactggtccagaggctgcgctcatctcagg

SEQ ID NO: 27016 - DNA, 1508 bp, Artificial sequence
  DNA replication origin
tgcccctgcccctccgcctgcgtctgcgcctctgcggggccacggtcggggcacagcgggcagccccaaggggaccccgcgtccccgcgctgcctgcgccggcactgcagactctcctcgctgagacccagcacggccgataggtggccgatgtagcggatggccaggcgcagcgtctcgatcttggtcaggctctggccggccggcgccaaggagggaggcagaaagcggcgcaactcgtgcagggcgcgggccagcgtgcgcatgcgcagtttctcccgctcgctggcgctctgccgctgtccgcccgctggtccggtgcgcgctcgtctgggcgtcgtcgcggctgcctctgcggctcgggagctgcagctcggaggctgtggctgcgggagtccgcgggcgccgtcgcaggggcacgaacccgacgaatcggaggaggaggccggggacgtggagtcccagtggccggcccagccccagccctgggcgaagatccagtggtcgtggccgaggaggctctgcggaggaggcgactgggccatggccgggctgcaggctctgggaggctgggttggccacctccaggcctgagcttttatgttgaccaaaggtgcgaggtggccccccgccaggttgcagagaggtgtcaaaacccacagagcccagggaaagtctgggcagggggcccctgggaaagcgggcccatttgcggaggtgtggattctgactccttgggggctctaaatggaggcccctgcagcccgggaagtatgggagggacaattcgcatctggatggagctgctaagcttctcaccacgctcccacccacgcccctgccccgtccactgctcacggtgagtgcccgggagcccaacagaggcgggtagtgccatggtctgtgggtgcctcagggaccccgtgaggagtgggtgcctctctcatcactaacctcccggaggtctgtgcccaggacgctgtgcctactgttgtattaaataaggcatcaagacaagcccggagggccctgcccatggtggctgaggaagaagtgcaggtgggcccttctggggtccccaaaatccacagtttctgatttgttgagtgacacaccaagaaaggcatctcactgcccatggtctgtatctactcttgagaaatggaatagattaggttggggaagaggagttgggtaccctaggtgatgaaaaccggcgaaaatgggtccccaagccggcctctttattggctgtgaccttggttaagttatttagctcctctgagcctcagattccctcatcggtaccaatagtgatacaaaatacctatgcctaggatggttcctggactaagtacagcgatccctgtaaagcacttaggccctggcaagtgagctgaaggtttgccatgatcgttttataaagaaggtactggccaggcatggtggctgatgcctgtaatcccagcactttgggaggccgaggtggatggatcacctgaggtcat

SEQ ID NO: 27017 - DNA, 1716 bp, Artificial sequence
  DNA replication origin
ctgggactccacgtccccggcctcctcctccgattcgtcgggttcgtgcccctgcgacggcgcccgcggactcccgcagccacagcctccgagctgcagctcccgagccgcagaggcagccgcgacgacgcccagacgagcgcgcaccggaccagcgggcggacagcggcagagcgccagcgagcgggagaaactgcgcatgcgcacgctggcccgcgccctgcacgagttgcgccgctttctgcctccctccttggcgccggccggccagagcctgaccaagatcgagacgctgcgcctggccatccgctacatcggccacctatcggccgtgctgggtctcagcgaggagagtctgcagtgccggcgcaggcagcgcggggacgcggggtccccttggggctgcccgctgtgccccgaccgtggccccgcagaggcgcagacgcaggcggaggggcaggggcaagggcaggggcaggggcaggggcaagggcaggggcaaggacaggggcaaggacaggggcaagggcaggggcgcaggccgggcctggtctccgccgtcctcgccgaggcgtcctggggatccccgtccgcctgccccggagcccaagccgcacccgagcgcctggggaggggggtccacgacacggatccctgggcaacacccccttactgccccaagatacagtcgcccccgtattcgtcccaagggacaacctccgacgcgtctctttggacgccaccccaaggctgtccctggacgcagtcgtccccagagccccggaacccaccagtgccctggacggcggccccagcaactttggagctggccgcagtgtaccaggtatgtgtggaggcccttgctgtgttccccagcctccagtctgcagagaatctcgtactttttcgatcccagcttatctactccaggattatctaacggaggggagaatggaaggaacccccggctccgtgggagaagagatgggaccctgggaagttaaggccatctccacagtcaccacaagcagtcttcacagccatgggaaagagggggagcccgccgactttctcagagggtggaaagtagcagggtgggcgtgctggcttcaagtgctattaagactgcagtgggggaaggaagtcccagggtaagggcagcatttcctgagtagatgggcctagagctggtgatttcaagttttcttcaagattcgttcattcatgaggctcatgaatgactcatcgtccataaaaaatcatattaaccaaaatttgttgaacactttctatgtgcccatcatcattcttggcaccttacatgtattattcagccccagtaatgaccctaggaagtaggtattatcagcatctctattttacaggtgagaaaactgagactaaaagaagctacctgagttctcattactagtgagtagcagaactgggatttaagccttagcagagtgtctcccgagccagtcctcttaaccacttggctttgctgcattcatggcaccagggctgtccggatgctgccagccataccatggcaaccagccagattcaagatctctggatatcagggagtagcccactaaccaggctgctctcatctctcttgcagggtctctctgtgtctccagagccctgtctgtcgctgggagctccatctctcctgccccacccatcatgccagagactgcagcctcagac

SEQ ID NO: 27018 - DNA, 1779 bp, Artificial sequence
  DNA replication origin
ccacctgaccatgcctcagtgaccccatctgctcacttgaattctgaggggcgggtaacattggaatcggggtcaaggaggaagtgctcctgggaaagggtccccgtgctggtatccaccgtgatgaccgggaagcccatctgcagggtccagcggttcatgatgtcccgcacggtggtggggagttggatggaccggttgttcacagcctgtgggtggagcgagagggcgtggccatcagtgggaccctccagtccctgccatccagggcatctcctgcagattctcgcctcgaccccggggggccacttgtatgggaggcctgggaagggcactgggctgggagccgggagccagggtaccgtccagctctgcctctcctcggctgctcagtgctggacgagctggagaacttcccagcaaatctatgaggccctccattctgtggtccaccctgaggtgtgtatgtcagggagggggtgcccaggatgcccatggctcttcctgaacaacactgggaggaggacaagaaagaggagacagagatgagagaaagccagtgttcaggtgtcacaggcaggggtgggggacggggccctgggggtcgcatgagggaagtgcactcggactggggtgtggggcgggactcaggggcactgttgttgtcttcttgtcttcttggatctttgctcatgcacctgccttgcctttgtcatcacaacagaaagccaaccccatttgttaataactgaagaaaggaatcacctaagaacggggccacacagagggcagaagagcatgtggggaggaaccagctgggggctgccggccgagggtctcaggaaagaggagtgagagggaggagagcttggcttaggagggaacgcaaaggggaagttggggcagggcaaggaaggtagtgggggagacccaggcaatgacagtgtcattttgtcagcagcatcttggggtctagggggttggaaattgcccagcagggacccggacctcagctgtgactctgtgacaagatcctgggtctcgcttccctggtgagacaggcctggactggaagtgcagcagcaacagtggggtagaagctggacgggaatttgaggctcggaactctggaggggctgtcggtgaggagaggacatgtctgtcctctggcttaagacgctagcattgggcagagctgcagggaaggggtagggggcagctgtcagggaaatgatgtcagcggaaatgatgggggcaggatggagaggaggtggactccaaccctgggggagggagaggagcggcggcctctgggggaaggcaggagggtgtggcagtctggggatctgccctacaaacaggggctgtgcggggtctgatggagaggaactcgagccggggcaggggcagagggcagagttcctgctgagggtggtggagctgtgtgcagagacatgcccgtggcgccagcggggggcacagggcagccaggagtggggagaaggttgaatgtcaggctccagagttccaggcagaggcgggaaccatgagggcagtttcctcaccaccaggaaggggctctacagctcccatcaagaagcccgctgtagcctgaggtcagctgctggccaggacctcaaccacagcctcactcagacacctcttgcaaggagccatcccggcttccactatagggaggagcaacagaggctccatccaccctgcagggctggtcagccgcggagctggacccattctcttacgcatgtgctgccccca

SEQ ID NO: 27019 - DNA, 2316 bp, Artificial sequence
  DNA replication origin
ttacttccctttaaaaagacgggaaaggaggagtccagtgctggaggggcagggacggcggcggcgcagctcggaacccgccagggtccagggtccaggttccagcgcccggcggcccaggcaagtggggcgggagggcgggggctgcgggcgcgggtaggggtcgtggggcagttgggtgcgcgggaaccgagggagctgcagacccagcgcttggcgcgtgcggagctggacttctgcggccgcgacgcccctcttcccagatgggtaaactgagggccagggaaagcgaagaattcttttggccgagctcccactacgatctcgcggtcaagtgggtccccagcgggcctcgcaggggtcggaggggctcccatctggggagggggccccagggtgggcgagggcgacgggagcctggggaggacggacggggagggcggcggagcggagctaagctgcggcgggtggacccggctcggccgcggccactctgtccctggtgggtggggcgcggccgaaggcaaagggcgaacccggcccgcctgtggggtctctggccaacactgggctcagaggccctttctttaaccttagatctcgctcctcggtctaaagcctccgccgcagctctcagtgaagaggaaggggaactctaggtgctcaacgcccgcgttacagtcgcgttctccctcgctcctacaacccggccaagatgccggggcatggatggggaccgaggtttgggggttgtggagcctattccacgccctccctggtgagcaactgagacagatccagggccccattgcaatccactcttggtctgggaaaaggtcccctaaacagggccaatgggatcctttccccaaatgactccagaacgcaccccccccccccagcagtgcggtgggcagggacggcccaggtgggctatgtcctggggttttgtgactggatccccactcctcccccacctcagcccctggactgcaacccaccaggccgtgttcgggggtggtcagagccctggtctcagccagacctgaggtctgatgtggcttcatccctgagtctctaaacgccctggccttactgggcctcagttaattcacctgtgaaaggggaggcttggaccagagggcccctcagggtatgtgttttgtggaggggaggtgggcgtgtggggtaggggtgaccaggaggaagtggggacagcctctgtcccacaggaaggctggctagccccagtgggtatgggggagctgggcagggaagagggtggactcccctctccctgtgggagggtgtgctgggcccatgaggccctcatccactctcagccaccttcctgtggagccctagcctcgaaggccacactatgagtgcaaggaggccacccacagcgctgctcccgcttcacaggtggggaaaccggcccagtgtcttgaggcagcccagccgcctgccctgtgcttcccccagagccttctggggaatgagaccttcgttacacgctggcgctccttacacccctacagcctttaagctaaggcctccagccccatcgctgtaagaattgtatgctaggcattctgaggacatagatgggggtccccatgtcggaaggagccaaggtgttggaactgggtccagttcctgggctggctctggtgggagatctggaaccctatgctggggctcctggacagccctggaggcatggcatggacagtgtgtcagccgcacaccgaggccctggggtgtccttattcacataggctggcagccatctatccctagcccgggcttcaccccgggtgcctgtcactcctggccctacagtggtcccagtcacaccttggaggcaagatgtgggtcctccacaggcctgtgtctggaagcagcccccagcactccctggctaacaagttctacttctgagaactacccccagctcccagccctggtctggccaaatgggtgcgtgtcttctcctgtggtcttcaactccccttggcacggccacagtagatgtgaggggctgtatgggaggacatttttaggaggcatatgtagttaagctgtggaacctgctgctaactagctgtgtggccttgggcaaatcacttaacctttctgtgcctcagtgtcctcatttgccaaatgggggtgattatcctggtagggcacatagtaggtgctcagtttcacctaccatgtgtctcaccaggataatcaccccccatttggcagacaggagttgccaggcaggatctgtggccccacacaaaccctatgtgtacttcccccacc

SEQ ID NO: 27020 - DNA, 2007 bp, Artificial sequence
  DNA replication origin
gcacgcgccaagcgctgggtctgcagctccctcggttcccgcgcacccaactgccccacgacccctacccgcgcccgcagcccccgccctcccgccccacttgcctgggccgccgggcgctggaacctggaccctggaccctggcgggttccgagctgcgccgccgccgtccctgcccctccagcactggactcctcctttcccgtctttttaaagggaagtaaccggacccgaccactactccacccgattcacccctagcgggccgcccgcccgcagctccgcccgggctcctcccccgtccgcccgcggcttcccgggagccccccagggctcctccgctcctccgacggcccggccttccccccggggcctgggatgcaccagggctcctgctgcccccgacggggtccctgtcgccgcagcccgcgggacccgccggccacatctggacggcatctgccgcgggggaggggctcagagcctcgccctgagtgtcccgcagggagccttgtgcatccggggcaggaagccagcgcatcccgtgcagacgggtggtgcagataacggacccgccacagcacgcaattcaactttcttggtacctgggactcgtagttcagaaggcgcagtagcacgaccttgcgaaaaagcaccggagtcgggaacacgcgcttctcatttttttctttttcctttatttgtttttgagacagagtctcgctctgtcgctcacgctggagtgcagtggcactttctccgctcactgcaacttcctcctcctgggttcaagcgattctcctgcctcagcctcccgagtagctgggactacaggtgcacgccaccacgcctggttaatttttggagttttagtagagacagggtttcaccatgtaaggctcgtctcgaactcctgacctcaagtgatccgcccgccttggcctcccaaagtgctgagattacaggagtgagccaccacacctggcctgcgcctctcatcttgatcctgcttgcagaggttgtgcagccaccggagccccgccagggtggggctccctgtctctgagcagctttaatgggcggtaccagataatatttgtattggttccctgtggctgccgtaacacaaacataaaacaacactaatttactatcttacaagttttgtaaaatcagaagtccaaaatgggtctcgctggactaaaagcaagggggttgagggatacagctttcttgaggctggaagggaacctgtttctttggcttttctggcttctagaagctgcccacattccttggctggtggccccatccatcttcaaagccagcagtggcccaccagtctctcacaatctgtcactctgacaccaactgttctgcctcttgcttccactggtgagcatctttgtgattacatcgggcctacccagataatccagggtaatctttctattttaaatcaatggattggcaacttgaattccacctgcaactgtaatttcccttcgtggggtagcataacatattcacagattctgggcattagaaccagggcatcttttgaggaggaggatatgattatgtctaccacaatattcaagctgacttccagactttcagatttataatcaaatttaagctcttccttatccatgattggaatccttgggacagttaaagccttgcactgcatggtccaaattgatggctttgtgactggctgtgttttattattttacttgcacttgctcttcttttggaaacttcatggaggaccagggtacctctaggtagcagccttgcttctccttcctaatttgctctgtactcttaaaaaccaggtcacaaacatatcggaatatagaattgtgtgtaaagtaagagtaagtaggctgtgagtgagacctcagaggctattttgttttttttctctctccagtctcatgcatgtctgactctctccactatcatatctggcataatctcctccatgtctgacaagccaag

SEQ ID NO: 27021 - DNA, 1260 bp, Artificial sequence
  DNA replication origin
agttcacgtctccttcagggctttaggactatgtatcatagtaaaatgccctctcacacaccattctgaccacctggaagtgggcagataagggactggctcagggtcacacagtgagacaggaagctgggcctgtgcccccaccacacagtgcctcctgccctcaaggctgagtagagcgtggagcttcacgcatgttgagagggaaatggaaggagttgaatgcattcattgatttgttgagcaatctcgtacttactgacagctgaatatgggtcaggcactgtcccaggcaccagcaaggcagcagcaaaacaacagtgaaaaagagagtcgacatggcacacactgtcatatcgggtgacaagcgccacagaggacaaagtggggtgagggatggggagtgaggggagaagtggctgcttcagccaggtgggaccgggaagtcctctgcaggtgaaggctgagagaagtgaggagcaagggggacctgaagacagaggcagaggggatggcaagacaaaggccctgcgtgggaatgagcccggcaggtttgagaagcataaaggccagtgtggctggaaggagggagccaggcaggggtgcaagatgaggatgtggggtgggtgggggcagctaagcagggccttgggtttctttgaggctggtgggaagcttttgggaggctttaaaggctgcagggcagtgggggtctgatgaatgcatgaggtggttcactctgcggtggagcgatgacatgagccacaaggagacagagggggaggcagagacactgctgaggggcctgaggggttgtggtggtgtccgggcagggacactggggtggaggatgcagtggtgacatgtgggctccaggaccactgactatcgtgcaggatctggtgctggggggcagtgagttctcagggagggaaactcgtgtcagggatgagaagacaggggctggggatgccggggactgtgggcccagagcaaaggggagctgtgacacccagagaaagggtggcctttggcctctccagggcaggggagcccagggcagttgggcagagctgggctggggctgagccagttgggctgacaagaaggcttgggcgggacctgacaaggaggacttgcttcagggtgtcaacctgtaccaggctcaggctgcaaggccaggtagtgtcaccgtaaccctcacctggttgacacagggtctggacccaaggatttccttccaaccctgtaatatcatta

SEQ ID NO: 27022 - DNA, 787 bp, Artificial sequence
  DNA replication origin
ctggcactgcccgcccttgctcagcgtacctttcccatggcactctgacgtactggatgtttggtttctgaagttactggctgtttaccctgccgggatgtaagcccctccagggcaggggcttgtctcgtgttcagtgctgcatcccagctgctgggcacggtacctggtccatggcgttcaataaataactgttggatgagtgaacggttgaggcaaatggcagttcattctaacagtctcagcatgtgctctccaggtccctgtgctcagcacttgggaaggagaaccagaatagtggtattggaagcaggaagtgggaaggacccgatgatggctcgtggaggctgagggagaggagaatggcagagctggtgttggcaggtggagcccgtgtaacgaggaggcgcaaggatggggctctcgagagagggagggggtttgggagggtggcaatcaggagtttggatgtggaacgcattcggttggggttgtccaagcatctctgggggcagatgtccaccagccagctgggaaactgagtgggcaggagaggaaatgagtctccacccagagatgatgattggaggtgtgggggtgagcgctgtggccgagggacaagagggttgaggactgagcctgtgggcaggggagagaggagcatctggacagcgggcgacttcaagtcaaggaagcactttcagtggggagggggaccaggaagagacggcctctctcaggcttccattggccccagcccagccccccgagtgagaactgtgaagag

SEQ ID NO: 27023 - DNA, 1150 bp, Artificial sequence
  DNA replication origin
ccccccgcccggccagccgccccgtccgggagggaggtggggggggtcagcacccccgcccagccagccgccctgtccgggaggtgaggggcgcctctgcccggccgcccctactgggaagtgaggagcccctctgcccggccagccgccccgtccgggagggaggtgggggggtcggccccccgcccggccagccgccccgtccgggagggaggtgggggggtcggccccccgcccggccagccgccccgtccgggagggaggtgggggggtcggccccccgcccggccagccgccccgtccgggagggaggtgggggggtcggccccccgcccggccagccgccccgtccgggagggaggtggggggggggggggttggcccccctgcccggccagccgccccgtccgggaggtgaggggcacctctgcccggccgcccctactgggaagtgaggagcccctctgcccggccaccaccccgtctgggaggtgtgcccaacagctcattgagaacgggccaggatgacaatgacggctttgtggaacagaaaggcgggaaaggtggggaaaagattgagaaatcggatggttgccgtgtctgtgtagaaagaagtagacatgggagacttttcattttgttctgcactaagaaaaattcctctgccttgggatcctgttgatctgtgaccttacccccaaccctgtgctctctgaaacatgtgctgtgtccactcagggttaaatggattaagggcggtgcaagatgtgctttgttaaacagatgcttgaaggcagcatgcgcgttaagagtcatcaccaatccctaatctcaagtaatcagggacacaaacactgcggaaggccacagggtcctctgcctaggaaaaccagagacctttgttcacttgtttatctgctgaccttccctccactattgtcccatgaccctgccaaatccccctctgtgagaaacacccaagaattatcaataaaagaataaattaaaaaaaaaaaaaaagaatggactttcccaggccagctgtggtggctcacgactgtaatcccagcactgtggcaggccaaggcgggcagatcacctgagatcaggagttcaagaccagcctgaccaacacggagaaaccccgtct

SEQ ID NO: 27024 - DNA, 1163 bp, Artificial sequence
  DNA replication origin
cgatgggcggccaggcagagacactcctcacttcccagaccgggtggcggccgggcagaggctgcaatctcggcactttgggaggccaaggcaggcggctgggaggtgtaggttgtagtgagctgagatcacgccactgcactccagcctgggcaccattgagcactgagtgaacgagactccgtctgcaatcccggcacctcgggaggccaaggctggcggatcactcgcggttaggggctggagaccggcccggccaacacagcgaaaccccgtctccaccaaaaccagtcaggcgtggcggcgcgtgcctgcaatcgcaggcactcggcaggctgaggcaggagaatcaggcagggaggttgcagtgagccgagatggcagtagtacagtccagcttcggctccgcatgagagggagaccgtggggagagggagagggagagggagagggggagggggaggggtagggggagagggagagggagagggagaggggaaaagggggagttttcaaagcaagagaagagcccatggagaggtgtattgaggtgtctctgctggaatgactcccatcacccacctcctccaatgctgtcttttttatcaggcacctgtgagagtagctttgctagtggagagataggcagaatgcttagacaccacgaaatctgtatttgtgtgccagctgcttatagatgttgtctaggggccgggtgcggtggctaacgcctataatcccagcactttgggaggcctgaggtcgggagttcgagaccagcctaaccaacatggagaaaccccgtctctactaaaaatgcaaaattagctgggcttggtggtgcatgcctataattccagctactcaggaggctgagacaggagaatcacttgaacccaggaggcagaggttgcagggagccgagatcatgccattgcacttcagcctgggcaacaagagcaaaactccatttcaaaaaaaaaaaaaaaggaagttgtctgggaatgccagctgcccaacacctggaaacttagggacctgtgggataatacacacctggagaagacagctgtaggtgctgtgggaagttgtgcttgggtgcagcccctctcactgggagaaggggtagcctcccaaccccctagtctaagctagttcattgt

SEQ ID NO: 27025 - DNA, 1321 bp, Artificial sequence
  DNA replication origin
gcggctggccgggcggggggctgacccctccacctccctcccggacggggcggctggccgggcagaggggctcctcacttcccagtaggggcggccgggcagaggcgcccctcacctcccagacggggcggctggccgggcggagggctgacccccccacctccctcccggacggggcagctggccaggcggggggctgacccccccacctccctcccggacggggcggctggccgggtgggggggctgacccccccatctccctcccggacggggtggctggccaggctgaggggctcctcacttcccagtaggggcggccgggcagaggcgcccctcacctcctggacggggcggctggccgggcggggggctgacccccccacctccctcccggatggcacggctggccggatggggcggctggccgggtggggggctgaccccccccacctccctcccggacggggtggctgccgggcggagccgctcctcacttcccagatggggtggctgccgggcggagaggctcctcacttctcagacggggcagctgccgggcggaggggctcctcacttctcatacggggtggttgccaggcagagggtctcctcacttctcagacagggcggccgggcagagacgctccttacctcccagacggggtctcggccgggcagaggcgctcctcacaacccagatggggcggcggggcagaggcgctccccacatctcagacgatgggcggccgggcagagacgctcctcacttcctagatgtgatggcggctgggaagaggcgctcctcacttcctagatgggatggcggccgggcgcagacgctcctcactttccagactgggcagccaggcagaggggctcctcacatcccagacgatgggcggccaggcagagacactcctcacttcccagaccgggtggcggccgggcagaggctgcaatctcggcactttgggaggccaaggcaggcggctgggaggtgtaggttgtagtgagctgagatcacgccactgcactccagcctgggcaccattgagcactgagtgaacgagactccgtctgcaatcccggcacctcgggaggccaaggctggcggatcactcgcggttaggggctggagaccggcccggccaacacagcgaaaccccgtctccaccaaaaccagtcaggcgtggcggcgcgtgcctgcaatcgcaggcactcggcaggctgaggcaggagaatcaggcagggaggttgcagtgagccgagatggcagtagtacagtccagcttcggctccgcatgagagggagaccgtg

SEQ ID NO: 27026 - DNA, 1047 bp, Artificial sequence
  DNA replication origin
tcagccctccacccggccagccgccccgtctgggaggtgaggggcgcctctgcccggccgcccctactgggaagtgaggagcccctctgcccggccagccgcccggtccgggagggaggtgggggggtcagccctccgcccggccagccgccccgtctgggaggtgaggggcgcctctgcccggccgcccctactgggaagtgaggagcccctctgcccggccagccgccccgtccgggagggaggtgggggggtcagccccctgcccggccagctgccccgtccgggaggtgaggggcgcctctgcccggccgcccctactgggaagtgaggagcccctctgcccggccagccgccccgtccgggagggaggtgggggggtcagccccctgcccggccagccgccccgtccgggaggtgaggggcgcctctgcctggccgcccctactgggaagtgaggagcccctctgcccggccaccaccccgtctgggaggtgtgcccaacagctcattgagaacgggtcaggatgacaatggcggctttgtggaacagaaaggcgggaaaggtggggaaaagattgagaaatcggatggttgccgtgtctgtgtagaaagaagtagacatgggagacttttcattttgttctgcactaagaaaaattcttctgccttgggatcctgttgatctgtgaccttacccccaaccctgtgctctctgaaacatgtgctgtgtccactcagggttaaatggattaagggcggtgcaagatgtgctttgttaaacagatgcttgaaggcagcatgcgcgttaagagtcatcaccaatccctaatctcaagtaatcagggacacaaacactgcggaaggccgcagggtcctctgcctaggaaaaccagagacctttgttcacttgtttatctgctgaccttccctccactattgtcccatgaccctgccaaatccccctctgtgagaaacacccaagaattatcaataaaaaaaaaaaaaaaaaaagaaaactccccctttcctagtaaaatctatcct

SEQ ID NO: 27027 - DNA, 1311 bp, Artificial sequence
  DNA replication origin
ttaagccgatctgtgtcatggggtcgctgggcgggcgcggcggcaggggcgccgggagcggcggactggaggggcggactgaaggcggagaggcggctttggcaaccccagttttcccccacccgcatcccacccccccacccgatcctgttgcggggttcgagccggggcaggggaggccgacccgaggccgtgagcccaggcctacccctggtgggcggcggggtcccaggcccctggcagccggacgctctgcaccgccttgttccggagcgcgccgtcgtggtagatgcggctcattctcccgaccgcccgggcaccccggcacagagccggcgcactgggctgggggcgcggcgcgggaagtgctgcaggacgcgcggggacccgcgattcccagccggcggatccgggaatggcgcggcccggccctcaggcgttcctcggcgggatttaaagggaccgagctccattcctgcacgccaggccgcgcgcggcaggagttgggcttccgggaggaccctggctgggggcttagcacagtggggcagaaaggccatgcttttctcttgtctctctctcttcctcattcctagaggaagatccctgccccagcacacgcacaaaagggaaattgaggccccaagatcctattatagaagatcctttgtaggatcagcccgggaaggatgggtttctgggaagcaggaatggagaacagccactggggaggattgggtggtcagcttagaagctgtccattatgccccgcccgcggccctacaatggctgagtcaggtatcccagggatctgtgacgagggagctggggcatgggtgtcggaccaaagacgcctaagtttgaatcccagctgtgagcttgggcaagctcctcaacctctctgagcccatgcttcttcgtctgtaaaatggggtcagtatcagggggattgtaaagtttaatgagctcaccctttctacaacatagcattgccctccctccttcttcctgcacagctcctgaactcctccctggccccacaatgccctttgcccaagtatgtcatagtccgcaggtgcattttccaagcctggtacagaagattcttctgaccctgggattgttgaggaatctttgttcttttgtttggcttcttcgtgccaggcctcggggcaggtgggcccattcagggaggccaggtgtaccccgggagagggggcggcatttaaagggggtggtggccaggcaggtgcctaggagtctagcatgagctgtcaatgttggaagaagaaagcaccctctcccttccct

SEQ ID NO: 27028 - DNA, 1081 bp, Artificial sequence
  DNA replication origin
aatctttctttttttttttttttttttttttttctgtttaacaaagcacatcttgcaccgcccttaatccatttaactctgagtggacacagcacatgtttcagagagcacagggttgggggtaaggtcacagatcaacaggatcccaaggcagaagaatttttcttagtacagaacaaaatgaaaagtctcccatgtctacttctttctacacagacacggcaaccatccgatttctcaatcttttccccacctttcccccctttctattccacaaaaccgccattgtcatcctggccccttctcaatgagctgttgggcacacctcccagacggggtggtggccaggcagaggggctcctcacttcccagtaggggcggccgggcagaggcgcccctcacctcccggatggggcggctggccgggcggggggctgaccacccccacctccctcccggacggggtggctgccgggcggagaggctcctcacttctcagacggggtggctgggcagagacgctcctcacctcccagacggggtggcggccgggcagaggcgctcctcacatcccagacgatcggcggccgggcagagacgctcctcacttcctagatgtgatggcggccgggaagaggcgctcctcacttcccagatgggatggcggccaggcagagacgctcctcacttcccagacggggtggcggccgggcagaggctgcaatctcggcactttgggaggccaaggcaggcggctgggaggtggaggttgtagcgagccgagatcacgccactgcactccagcctgggcgccattgagcactgagtgaaccagactcggtctgcaatcccggtacctcgggaggccgaggctggcggatcactcgcggttaggagctggagaccagcccggccaacacagcgaaaccccatctccaccaaaaaaatacgaaaaccagtcaggctgaggcaggagaatcaggcagggaggttgcagtgagccgagatggcagcagtatagtccagcttcagctcggcatgagagggagaccgtggaaagagagggagagggagaccatgg

SEQ ID NO: 27029 - DNA, 827 bp, Artificial sequence
  DNA replication origin
gtggcgtgatctcggctcgctacaacctccacctcccagccgcctgccttggcctcccaaagtgccgagattgcagcctctgcccggccgccaccccgtctgggaagtgaggagcgtctctgcctggccgccatcccatctgggaagtgaggagcgcctcttcccggccgccatcacatctaggaagtgaggagcgtctctgcccggccgccgatcgtctgggatgtgaggagcgcctctgcccggccgccaccccgtctgggaggtgaggagcgtctctgcccagccaccccgtctgagaagtgaggagcctctccgcccggcagccaccccgtccgggagggaggtgggggtggtcagccccccgcccggccagccgccccatccgggaggtgaggggcgcctctgcccggccgcccctactgggaagtgaggagcccctctgcctggccaccaccccgtctgggaggtgtgcccaacagctcattgagaaggggccaggatgacaatggcggttttgtggaatagaaaggggggaaaggtggggaaaagattgagaaatcggatggttgccgtgtctgtgtagaaagaagtagacatgggagacttttcattttgttctgtactaagaaaaattcttctgccttgggatcctgttgatctgtgaccttacccccaaccctgtgctctctgaaacatgtgctgtgtccactcagagttaaatggattaagggcggtgcaagatgtgctttgttaaacagaaaaaaaaaaaaaaaaaaaaaaaaagaaagatttgggatccgaaaccctgtcatcatttgttatga

SEQ ID NO: 27030 - DNA, 1280 bp, Artificial sequence
  DNA replication origin
tgaagttagcaagtgggaggggctaaaatctgaatatttccctgacaccctcccctttttcccacttgtgctctatcctcactctccccccacccacttgtattctaagctgcagtaaacacttcaactcttgacagttctaagaacctgtaataatgtgccgtcttgccctggggcctttggacagactgttctctcccatgcatttggctagcacagcctaatctagacacgacctcctccaggaagccacacctgaccaccttagtccaagcaccctcttaggagctttcttggttcactcttgcctgtatcgcatggcactgaggttgctgtcttcttttcttgctccttcgcctgcaaagccaaaggccaaagcaaggactgcgtcttgctgatgattcggtcctcagcagccagcaccttcgccggcacggggtaggtactcagtaggcatttgttaagtgcatgcttggctctaagagctgcattctgcttttttggaggatgcagcttgggtgtactaagtgggaggctgcaagtgatgacggaaatgtggtttcctgcagacctgggcaaaggccctggggtcattgggggctcagggtgctgatgttaaaagaccatggtgtccttcttgttgaaccaaactctcaggctactgtttcctcactcctcgtcagagacaaatgtgttctgagtgactggagtcatagctcagagcaccaggagctggtttagggtggggcgaggggccgtggccttggggctctcgtttctaaaggcccagggctcagggctggggggaggggtgaggagtggcaggtcgtgtccccgggaggctgcagtcactgggggagagacaatggggctcagcatctgctcctccctgggagaagggacccttcagtgaaaagccagggagagcagggaagtgtgggaggaattgatgaggagaaggggtggagccaaggagatgcagccgggaggaaggaagggaagggaaggaagggaagagggaggggagaggatccaggctttccttcctcccggtgacctggtcctgagccgcagcttcccttgcattgttccctgagtttgctctcggggcccaccgagacctcacgtttctccccctggctgcagccccagtccgagggcccggcatccagcaggtgctcaatacttacttgggaaaatgacaaatgtgaccaactttgctttgggaactttcccccgtcttctccccactcctccggagaacccgaggacagagcagg

SEQ ID NO: 27031 - DNA, 1544 bp, Artificial sequence
  DNA replication origin
cgagcgaaagagggcgagagggaggagagcgcgcgaatgagagagagagagagagagagagagagagaggcaaaaatgaaaggaaagcgtcgcggcggcggcggcggcggcgcgggaggcccgggaggcgacggtggcggaggctctcgggcccgcacgtgggtgtcccggtgctgggtgcgctccccccacacccggcccgggactcaaagtttcaccccctcgccgccccgcccctacggctgcccacaaactttattctcggagcgggtggggttgttgcgcgtcccagccggccgggggtgggggagagctgagcgcgccgctggcggggctgggggcgtccccgagggccactggccgccgcacgctgggcgccgcgggatctccgccgggacagcgtcggggcgccgcgggccggggacccaggaccggcgctcgctgtctgggggcgtgggggtgggggtggcgggcggggtccctacggcccgtcttgagcctcccgcggctcagccccccttcctcctcgtcgccctctctccgtcttctcgcggtcattttcctaattggatggagctgtggggcgtgagcaccagcgtcagatcggggccctcaggctaccaggtgggcgcgcgggctcggggaccgacggggcagccccagcctccccaccctaggcgcacagatcccgcagatccggcccttgggccaccgcccccttcaccgcggacttgctaactagtgcgtatcgggtttttttccaacttgccttttaagatgacttttatgggcgctgcaactgcttccctccagtctaagctgtagtttggaaagatttaagaggccagggaggtgcttgtgtggattttaaccaacctgaaagggtcattcatgtatctctaggatttgcgagacggttagggcaaggcgtagcagtatccggggtgccttttcttttttcttgatatggagtcttgctctgtcgcccaggctggagtgcagtggcgcgatctcggctcactgcagcctccgtctcccgggttcaagcgattctcctgcctcaacctccccaatagctgggactacaggcgcacgccaccacgcccgtttaatttttaattatttttaggagagacggggtttcaccatattggccaggctggtctcaaactcctgacctcgtgatccgcccgccccggcctcccaaagtgctgggatcacaaggactcttcgaggtactcgtcctactgggtctgagggaggcctgccgggcaatccagtgagggaccaacgtcatggcccacccttgagctgcaggccgagtgcccacctgcaaagggcaccctgagcacctttcttgctgtgcaaaatggaaactcccggccggtatcgacctgcagtgtacataactagtccctgtgggcatctgggaaattcacaaaactcccccacaggtgtgcggagaaggactttgtgctcttgggggtcactcagccagctttgaagctgccctctcagtcctgcatttgtacacgtgtaagtaa

SEQ ID NO: 27032 - DNA, 1227 bp, Artificial sequence
  DNA replication origin
caggcatccaccaccacacccagctaatttttgtatttttagtagagacagggtttcaccacattggcaaggctggtcttgaactcctgacctcaggtgatctgcccgccttggcctcgcaaagtgctgggattacaggcatgagccatcacgcctagccatgtttaaatttttttgtagcgatggggtctcattattttgcccaggctggtctcaaaccccaggactcaagcaatctgcctgccttggcctcccaaagcgctgggattacaggcatgagccattgtgcctggccaaatacatgtttttgaatgcataaagctttactacttaaaaaactaatttcaattagtttctaatactaattgatttctaatactcatcaaaataagtacgtaacgataaaactaggagaccacctaaatggtcccatctgggactttggaaagtactggatgaaaaagtggcaggaggggcaggcagatgcccaggccctgggaacggccttaccttgtgggtgagggagtgctgcttgaggtggtgaatctggctgaactccatgccgcattcagtgcacacgaagggtcgcacgttctggtgcttgagcatgtggttctgcaactggctgcggtagtggaaggacttgtcacactcgaggcactggtagagggtggggccctggtgggaggccaggtggcgcttgagctgggtcagggtggagaagtccaggccgcactcgacgcagacatggcagcggccactctcatgcttcacttcgtgggccttgagctcgctggggtaggcgaagccgcggccgcagaagtggcagctgtagggcttgacctccgagtgcagcagcatgtggcgcttgaggtggctggtctgcgtgaaggccttgtggcatacctggcacttgtggggccgggtgccctggtgcgtcagcaggtgcgtctgcaggtggctgggctgcttgaagagcttgctgcagtgtgggcacgagtgtggcttgatgccgttgtggcccaggatgtgcgtcaccaggttgtacttggacgtgtaggacttctcgcacatgcggcactgccagcgcttctggcggtcgcccgcctccaccagataggagtcgtcaatctgcacgttgatgtccagccgatccagctgggccttcttgtggcgttccacggtcgaacccgccgtgtcagcctcgaactcactggcctcctgcca

SEQ ID NO: 27033 - DNA, 873 bp, Artificial sequence
  DNA replication origin
cgcgctcccctggcgagagggagggtcgtggctcggcccctgctcagacaaaggctgggaggcgggagacatgcacttccccttccttttcagccaggcgcgcgctgataccaggcccacgtcagctatttttggagccttttacacgacagctggaggagcgtcctttttaattttccccttttgtttggccgcccccacccccaccccttcgccttcatcgctgcacttgaggctccatcctggggcctctccttgacttgacctgccttggcaggcacatgccctccctgcctggctcactcgccgcagagacctggcagcccgcgcaaaatgtcactttgcggaatcgttcccacggcttctgggtacccttagttccctgcttaggagggaagacagtagtcgggtcgtaataagcaagacttagcccgagcctccgttgccaacgcaggctgccttgcttggcgtgtgggcatcggcctgccccctcaccctggctacccaacacagctacaaaaggcagggaacaatgtaggtcccttggccctgcctaatgcctgttgccatggaaacccctatcctaatctggccaggagccccttgcagtgagccaggagagtgaggaagaggggatggggcccgctggccctgacctggccagaggaggtaatggttaaccggattgtgggagcagctgactagagccgggggggtagggaggcttgggccccagtcctaccttccctgccaaggagaaaggggcatgtctgcttttgtacctctgggaatctacctcagggatctgcccaacaactcccaggttccaagtgccccaggacccaaagattcccatatagcacaccaccttca

SEQ ID NO: 27034 - DNA, 835 bp, Artificial sequence
  DNA replication origin
atggccggctacctgcgggtcgtgcgctcgctctgcagagcctcaggctcgcggccggcctgggcgccggcggccctgacagcccccacctcgcaagagcagccgcggcgccactgtgagtgccgcgcggagggtccaggcaggcgcgcgcccccagctgcgacgtggcggcttcccaggctggggccgggaagcacgtcccgccagcccgcagcccggggacggcggggtcaggcgcacaaagggccgcggggcagcttcgctccgcgctcccccgcccggcgcttcccggccgtgccaggcgctggggtggggacttgagggacggtggcaactggtggcccgggcgacggccagctctgcgcgggcgggggctcggggctgccgcgcgcccctaggtatttcgggagggggtcctgagagtgtcccggacccgaagggtggcctgcccgccctgcgcccctggaacgagacgagcacccgtggggggctggagcaccccgcgcgctcccctggcgagagggagggtcgtggctcggcccctgctcagacaaaggctgggaggcgggagacatgcacttccccttccttttcagccaggcgcgcgctgataccaggcccacgtcagctatttttggagccttttacacgacagctggaggagcgtcctttttaattttccccttttgtttggccgcccccacccccaccccttcgccttcatcgctgcacttgaggctccatcctggggcctctccttgacttgacctgccttggcaggcacatgccctccctgcctggctcactcgccgcagagacctggcagcccgcgcaa

SEQ ID NO: 27035 - DNA, 1651 bp, Artificial sequence
  DNA replication origin
cccgggctgcgggctggcgggacgtgcttcccggccccagcctgggaagccgccacgtcgcagctgggggcgcgcgcctgcctggaccctccgcgcggcactcacagtggcgccgcggctgctcttgcgaggtgggggctgtcagggccgccggcgcccaggccggccgcgagcctgaggctctgcagagcgagcgcacgacccgcaggtagccggccatcccaagctggagagcgaacgagcagggcgggagaggtccgagcgcgcgccgctcctcccggctgcctggccgcgggctaacgctgggcctggcgggcgctggccgcgcgggcaccaccggggcggggctgccgggcctgccgccccattgggccttgccggggaggaggcggggccagggccgccgacgcctccagcgtcccgcgggagccgggacccggcggccaggcccggctggtgcttctctgggcgccgctgaaagcccagctccgcaggagctacaggcgtgagacccaccgggacccgcgagcgggatcagggctgggggattagcagagccgcttgcgaggctgaccctctccaggatgccccatgtaaacctggatgtcagtttctgacgctttagcttaaacccaaaagccaatctgagcgaactcttgcttccctcgcctgccgggctgaacccaaaggcgcattagcccagtgcggctgcttcattcttgagctaagaccgccggcggcgtctgcgcctccgcgagtccgctgtcaggtccagctggtgtagagagagttgaaatctcactttgggccgggcgcggtggctcacgtctgtaatcctagaacttttgggaggtcgaggcaggcggatcacttgaagtcaggagttcgagaccaggctggctaacataatgaaacccctgtctctactaaaaatacaaaaattgatcgggcatggtggcgcgcgcctgtaatcccagctactcaggaggctgaggcgggagaatcacttgaacctgagaggcagagattgcagtgagctgagatcatgccactgcactccagcctgggcaacagagtgagactccgtctcaaaaaaaaaaaaaaaaaaccacgaaaaaagaaatatgattggaccagaaggccaataacctgagtggggaaacccagcaagtcctgtccgtgtagattcttcttgacctttctctgcagcattccttccttctgagtacggggcaggactctctctgggatggaggggtcttaggacctgcaagcaaacaaggtaggtcagataatttatggccagtttttacccagaaatgtgtgggagaaagagtaatatttttgggttcgatgtctggctttgggggagaagggctctggtttctatgacctgccttgaggaagaaggattccagtttctatggctggcctcggaggagagtgaggggccaaagacaggagggagggagagggtcagagagagctgctcctgaggcctgcattttggggtgttgttttctgagaccctagagtagtcaaacagccacagtagaaacagttccatttttgcctgtttgcatataaaagatgggtttgtttgtttgttttaattaaaaatagagatggggggatctcactatgttgccca

SEQ ID NO: 27036 - DNA, 1080 bp, Artificial sequence
  DNA replication origin
tcaggcccatcgcggtgcgcagcattcggagagcaggagcgacggtgtcccgcggctcgggctcaggtggctcggccggactcacgggcggcagctccgccccgcggtccgcccccgagtcgccccgggggcccccgcctccggacctggggggcgggaggtgggaaacagggtcaagtgggccctggcaaactcagcccctccgcggggcaccgcagtcctcccgccggcgccggccccgcagcctcggcttgggcagagctcacccgcaagcggcggagggcggggctgaaggaggaagtcggccgtgagcccggccggcccgcccccttcccccttcctccttcccgggcgctggcagcgcgaggggcggcagctcggggcgctgccgcaggggccaagcccgggatcagtagccccggcggccgccggagcgctgggacgcggacgaaagccgacccccagctccccgcccccactgctcagaccctcccaccgccgcccaggccctggccccttccggctcctctgggaccctctgctagtggcgttggtttggggacacgctgcgtccccgctatgcgcctagggagttagggggcggatggtgattaggccttggtctcctccctttaggcgccccctccgctcttgctcctggcgacccccttgttcctgcgaccaaatgaactcggccgagctcgtgctgacactggggctagcagcttgagagtccaatttttgcacaggtcaatccactgcaagtcatggctgggcattcactacaagctcagcacttagtctaggcaccctgcgggcttgtccgcttaatattctgtccacgcgaagccctcgggtgggggaagggcaagattagcttaagtgggataataggatttaatgtactgctgaggaggtaaaaccttcacaacctgcacgtgacccggcaggggaagggaacccctaagactggagtggaagcccagaggcacccacccctaatcctcctggctcctaacatctccacgggtggagttcagctctgctgagaccaggggtttccaactgcagcctggacca

SEQ ID NO: 27037 - DNA, 911 bp, Artificial sequence
  DNA replication origin
gaggaagggggaagggggcgggccggccgggctcacggccgacttcctccttcagccccgccctccgccgcttgcgggtgagctctgcccaagccgaggctgcggggccggcgccggcgggaggactgcggtgccccgcggaggggctgagtttgccagggcccacttgaccctgtttcccacctcccgccccccaggtccggaggcgggggcccccggggcgactcgggggcggaccgcggggcggagctgccgcccgtgagtccggccgagccacctgagcccgagccgcgggacaccgtcgctcctgctctccgaatgctgcgcaccgcgatgggcctgaggagctggctcgccgccccatggggcgcgctgccgcctcggccaccgctgctgctgctcctgctgctgctgctcctgctgcagccgccgcctccgacctgggcgctcagcccccggatcagcctgcctctgggtgagtgccggggacccggggacgcgggccgggggaaggaaggctgccggggacgtgcctcgtgcggaggtggccgtgacaaaggaccaaggaggggacctgtcggaggcacgggatccattaggaccccttcttttttcaaggcgctgcgcggagggagggagaggagaggggagctgtggggccgctggcccctttcttcagttttctttctgcgtagggatggggtctagcccgctctgtcgtcccccctagttcccttaggaggatgcactttcggcggggtccgcctgcccatctacttgtctttgatgctgaccagagccgaccgcggtgccgcccccgagggcggctcggggtagagggaggccactgcttgcagtcctataaacactggggttctggtattcccagcaagtcgcagcagggccgggag

SEQ ID NO: 27038 - DNA, 1212 bp, Artificial sequence
  DNA replication origin
gggacccggggacgcgggccgggggaaggaaggctgccggggacgtgcctcgtgcggaggtggccgtgacaaaggaccaaggaggggacctgtcggaggcacgggatccattaggaccccttcttttttcaaggcgctgcgcggagggagggagaggagaggggagctgtggggccgctggcccctttcttcagttttctttctgcgtagggatggggtctagcccgctctgtcgtcccccctagttcccttaggaggatgcactttcggcggggtccgcctgcccatctacttgtctttgatgctgaccagagccgaccgcggtgccgcccccgagggcggctcggggtagagggaggccactgcttgcagtcctataaacactggggttctggtattcccagcaagtcgcagcagggccgggagctgtggtgggcgggcaggcgcccgatcctccctctccgcccctccatccctggcttgccagtgcagccccaagccccagcatggagagacctccaggccctgggagcgaccagactgcggatgggggcagctctgggcgctgacattcccaagtcctgggagcgaacagactgcggatgggggcagctctgggcgctgacattcccaagtcctgggcgcgacccctcctcagagtgacctgggagtagcatcctggttggctgggttcctttcctggtcctcacatctgcttctgtggccacctcctgtttcagccctccgcccttccctctccttttcccttccatccggttgcttctccagctcttcttggggcacttgggctttagattcagagggtcctggatcccaagcccatttcttccactgggcaagtaagtgccttctgctcccagtgccccacctttctcatctgcaaaataggcagtcgtaggtgccttgcaaggtgtgttactcgggtatgaagtttataagtgcccaacagatgtatccgcaagccctttaacttgttggttgtcatattgtatgacttggaataaagcatgtatgaattagaggttacagactgaaactgtcccagacttccatctcctcacagcatccccacctctaaaagcatcctgtttacaaagggaaatagtagaatcagcacttaaattaaggcagggccctagcggcttcaagtaaccctacctgaacccctgtctgaaatactgcagatgacct

SEQ ID NO: 27039 - DNA, 950 bp, Artificial sequence
  DNA replication origin
cctggggagctcgcgtgcgggcctcttctcgggagcagggtccgggagctggctgcggggcggccgcggcctcccagcggtccgctaatccccgctctggctttgccttccaggacttgacgttcctgacgaagcaggagatcctcctgtaagtgctgccttgaaccctgcctccgaccccgggatcctctagagacagcttcgggggcgctgtcccgagggaggggcgggggctggcctgaggtctgcagaggagcgggagctggaggccgggagacctagcccgggctgcgccctcctcccggcacgccctccccgccctcgcctgaggccccagcgtggcaccgcggagccaccttacagcctccaggaaaagttaggcgctctttgaccctgggctccactagcttcagcactgccgaacttcctgccccagtccggcaggggccgaccttgcccagtggctaaaccacagaagccttggggagcccggctccttctcccaactttacctgaataatacagtaaccgttatcgctttctgagcactcaccatgtgccagggactgtgctaaatggttgcctgcgttacctaatttaatctttaggagagaggtactggacaatgaaacaggttcagaaaggtttggtaactgcttaagacaacactctgagtaagtagatttgaacttgggctggaagcccttttgccggatttatgcaggccaggttcctgtggcaaagataagctcatgggaaggaggtggaggccgaggaggacagttcagtgtggttgctaaaaaggaggctttgagggtaagagatccctggagtgaaggtgagaatgagatttttggttttgctcttttctccgtttttttttttttgagacagcgtctcgctctgtcgcccaggctggagtgctggggcacgatcttggctcactgcag

SEQ ID NO: 27040 - DNA, 1273 bp, Artificial sequence
  DNA replication origin
gcccgcacgcgagctccccagggccaggcgtcccgcgcacctggtactcggccagcagctccttggacaggcgactgcccgagccccccatcgccccgccgcgcgcacagctccgccaactcgcctcgagacgcagacaactttctcacttccgcccttgggccgcgtcactgcccggtccccgcggcaaccgctcctggggccaccacccccgggcccgccccctcctaaaagctgccaggcgttcccagccgggtttggcaggcgagctgccggctccaagcggtcctaggcgagctggaggcggggcccggggaggggcccgacgctccggggcggagcccgggactcacggccccgcctccggggtgggaggggggggcgggccacgccgcgcgcgtgcgtgctggctgcgtatgcgtcacgggcgtcatgacctcgctgtggccccggcagcggctgcggggaaagtcgcgaggtgcatccgcttcggctgcagtaggtggtggcggcggcagccctgggtggggtcccataggggcatctgagaagtcactggagctagcgtttccgggaaacctggagactcgctgagtggcgggggtcgtcggctgcccctctgcccagcaagggcttttctagatgttatcatcaggcaatcgctgcacctgtcgcagcccccaagccacctcttccagaagtaaccataaccttgcttccttcttaggctatttactgaggacccactggatgtcaagcattgtgcatagttttcttcgattgttgcaacatcccttgcgaggtaggttcccattttacaaagatggaaatacgtaagtccaaagggtgttagtgatttttccgggcgccggcatttagaaggtaatcggtccagtccaaggcacttttaaaggctctccactgctgttctcatcattccagctgacctgccgtccttttgactccatctcacccctagactgctgaccctttgctcttgtcccctcttaacctctaggataatgtttggcacatagtaggctctcagtaaatattatcgaatgcataataaatgaatgaacgtatactattgcaaaaggtaaggattccaaactgctgggaggaggaagtggaggttgtgttggtcaggctgggattaattcttgatccttccaatccattatacttgctgatctttgtaaagtctaaatctgagtatgttagtctcagtttataaccattaaatggttaaaaacccaaatcctggccctct

SEQ ID NO: 27041 - DNA, 1009 bp, Artificial sequence
  DNA replication origin
atgcccagccacccccaaggcccaagcatggagtggttgaagaaactgcaagcacttccattgacatggagaagaccatgtcccctgtggcccccaataaaaatgtgacccccccgcctccgaaataaataaatcattcagtttctgaaaagtgtttggtaaaatgtgctagacttataaatagaataatacaatttgtaaagtgaacttaaaagcttaagaatgaaataactttttactttgtaggcttaataaatgaaacccttgcccacttttctacaggggtgttttgttcttacaggttttcaagtatctttaatagtctgaaggaagagtgaatacattgaaaatagctggagcaaaacatctggagtcaggctatgatttggcatgctaaatcatgctgaacttggcccattatcttgaagggaggaatagaaaaaaaaatttaaaaagagaaacacaattgcatttgcactttagagagaacaccctgataactgtgaggatctagttggcagaagggcgactacagtgtaatcacaacagggatggagacaaaagtagacatctcagaaataaacacagattggatgtagggtgcgaggcaaggagcctggggtgttcccactgggaattgagtacttctgtgaatagagaatatagcaggagcagggtcagtatttgacacgtgggatttgaagtgtctgccctatacacaggtgaaagtgttcattagctgaaaatactgagggacttccagacgatctggtctggtgatacatatcgaggggtcctcagcagttataggcgagtgtagaaaagattactgagtaggcaaagaataaacggaagagggccgggcgcggtggctcacacctgtaatctcagcactttgggaagcagaagcgggtggattacctgaggtcaggagttcgagaccagcctgatcaacatggtgaaaccctgcctctactaaaaatacaaaaaaagtagttgggcgtggtgg

SEQ ID NO: 27042 - DNA, 966 bp, Artificial sequence
  DNA replication origin
tctccgccgcctcggaccccgagggggcgcgaaccaggggcctccccgcccgccgcccgccgccccaccgggacggctcttccgggtccgagctgccggcagccgccctgccccacccgcccggccgagcccccaggaaaatcgcgcctcgtctgcaattagcccagcccgaagcccccgcgccgcggagccccgcactcacagccatagtgcggccgggccacgcccagcccgtcaacctcgtctgcggcggacatggcggacgagcccgagtctctgctgaggaagccgtgaaaccttggaggcgcggacggcggtagctacagctcctgccaagtgcgcgggcttgccggggtccccgaggccccgccccgtgccgtcagccccaccccgcaggccccgccccagcggcaccgccccagcgacaccgccctgagcggccggaaagaggcggggccagagtcaccgtgccccgcccctaactccgccccctcagcccggccccgccctgcatcccgctatggtctccgtaggcggaaggaagaaggtagagcccatcctccaatcgggctcacgctgagcttgccctgccgggaatgcccgcccaggtttatagccccgcccccaaggccactgccctatccgcaactctaaccgaaaggctgccggtgtctgctgcctgaaatcaaaatagtgggtcatctcccttctcttgccggcccagctaacctctgcaccaatatttggagaagacaccctttgaggtgacccaggttgtcttgttggacacaagcaggccccaaactgccatgaaagccctccaaccccactctccgcagtttggcaacctggcctcagtcctcttagattcggcagcagtcaccagattacccaggtacccaggtatttgagatgcggatgctaaagccgaactctgtccaaattccctacctttggatcccttga

SEQ ID NO: 27043 - DNA, 1071 bp, Artificial sequence
  DNA replication origin
ataaaaacacaaactggaatgatatgtaccaacttgagcacggtgactatctgtggggcggaagaagaaatgagagtggggccgtcgttatgactaattttgtatgtctttaataaatcccaagtacatgcagcaaaatgtattgatgtctgtttaatcttgatagtggggggcgtgggtagtattaatattattttccgtactcttccgtaggcctctaatatttccctctttacagaacactgacacacgctcagggctccccgggacatctttgtgcacatcaacatttatgctgagagtagcttctggactccaaagaggaaactccccgggcactgtggcccacgcctgttatcccagcactttgggaggctgaggtgggcagatcgcttgagcccaggcgttcgagaccagcctgggcaaaatagcgagacccacccccgccccccattgctacaaaaacatttacaaactagccgggcgtggtgacccccgcctgtggtcccagctggtcgggaggctgaggtgggaggatcttttgagcccgggaggtcaaggccgcggtgagtcgagatcgcaccactacactccagaccgggcgacagagaaagacatccattcactcccccaaaagaaggggaaattcgctgaggctgagcgctggtttcccaaggtggggctggcacctgctgaagctgccacaggagtggagaggccgtagggagacttggaaagaacctggaaagggggccggggctatggagccaaggctgcagcagggctggatggtgtttgtagtttgtgcagaataggaggcagtttttaaagccgagatacagctctggttgactggagcggggaggggtgggtgtgagaggtcaggaaaccagcggctggaggccgggggcctggagcggcagggctggcgggcagacgttaggccccaggcaaaatgggcgcaccccctgcgggggcccgaggtgacctgctcgaggtccggtcgcccaggttccacctggagaagaaaatcttcgtaatttggctgggggaggggggatgcgggcacag

SEQ ID NO: 27044 - DNA, 1272 bp, Artificial sequence
  DNA replication origin
ggggccgcggcggctcctctgccgggtcgcgccggacgactggcttcgggcggcggccccggcggcctgtggacggacgggtgggccgaggtacaggccccacggccgccgtctcccgcttctgcccgcgcagagtccgcgccatggccgcctcgccgggctcgggcagcgccaacccgcggaagttcagtgagaagatcgcgctgcacacgcagagacaggccgaggagacgcgggccttcgagcagctcatgaccgacctcaccctgtcgcgggtgagggcccgggccggcgcgggcgggggcggccacggccgcgggcgggacccgcgcggcgggtgagaggttgcggggccaaggcgatggcggggccgggcgggggccgcgcccgggaaccggcggctgggagggggaccggagcggccgcggcctcggcgtttccccgcctggcgacacccgctagccgttcgcgatcccgggctgaggtgggagggtcgcccggccccgtgtgcgggaagatgggcaggggtgaagcccgtggaggcgggcggccgtgcgagggcggcctgagggggaggaggacgaggagccccgagaggaaatcgcaaacagctcggaggccggccgggtggcgcggcgcggcttctggtcgctccgaacatcccccaccatcgagccctgctgttctgccggcgtggaaggccgcgggcaccccagggtcccacgcgctcgtggggggagctctgtgcacaagtccatccagggcccggccctggggtggctcgggttgttggaaccacgacgggattccgtgtcgagtgtgaggctctgctccttttactccttggaggtgctttatcgggtccagtttactttgttcggcccgggatatttagtgagaactgacaagcgtcgctggtgactggagagggacctggaggaatgagtaaggcgcgagccgggacaaacacctggagaggttaggtaaccgctgagtgaggcagtggaggatggagagccaaccggagtgtccgcgcagggttgcagagaaggggggtcagcaggagtggggctggccttgaggatcctgaatgctgaccttggaggaccatcgggaggatgggggaggatctgcagattctgggggactgaggcgggggagacagtttgaaggagagctgagagcagagttgcaaaccagctgagttgcagacacattattttttggccagcgcagtgtttgggaaaaattattgaatctgttgccagaatt

SEQ ID NO: 27045 - DNA, 1036 bp, Artificial sequence
  DNA replication origin
gggaggctgcggcaggagaatggcgtgaacccggaaggcggagcttgcagtgagccgagatcgcgccattgcactccagcctgggcgacagagcgagactccgcctaggaaaaaaaaaaaaaaagggaagaaagtggttgcaggtatgcctgggaagaggctgttctgttgttcatttattaatgtattcatttgtcagtatttgagtgcctactttgttgttaatggggtgtgtgtttgtgagggagaagagtgaaaacatggggctgtcctttaaagatcttactgatttgttccacaaatttacttactgagtgagtccttagtgtgtgccaggggttaggatggacactgggtatatagtaatgagcaagcaaaacacagtgtcccagtggattttaggatttaatgaggaagacattcatttaataagtaaggacacattttggtgaatatcaccaaaacagaagtaggtggagctctggacctgtatggtagggaattctcacctcttccagtggcctaaaggctcagggggagtgggggaggcattcgagggtttgtgtgttgagggagggaatatgttgcaggtacagagaacagagattcagtaaaagaggatgaggaggggatgtgagatgaggctggaggcattcatagggatcaggttgtagagacaggatttggaacttgatcttaagggcaatgggaagtcactgaaggggttaaactatgtgagatttgcttttttaaaagattcctctagctccagcgtggtgggtagaagagaggaggaggaggattttagtaggagatgtgatagtggcatttactaagatggtggcagtcgggaggcagagcggtgagcagattgatacttaggaggtggaaagggccagattttgtgaatgggtgaggaaggtgagaaagagggagggctggaaccatttcagggtgttcttcattaagtggacactggcaggagcaggtttgtgcggaaatgctgagtttgaggtgcctgtgaggcacataagta

SEQ ID NO: 27046 - DNA, 960 bp, Artificial sequence
  DNA replication origin
ctgcctgagtggctggcagataccccatgtgacagccccattagtgcatgctctcctcagactggaacagaaggaaggcttcatggagtaggtggcacctgaggcgccattcattgaaggataatggtgaagaagaggataaccaacagccaacctgactgctcacttactatgtgccaggcgctttacacaggtgatctcatgggatccccacagcaactctgcgacgtagatgctattatcatccccaagatcacactgctagtaagttctgggactagaactctggcccgtgtgtcttcagaatgttcatgtccctaaccaatttgctgtagtacctggaagatttagacaaccggaagcgaagctgaaggggatgcccagtgtgaggaggaggcagaggcggaggaggaggcggaggaggaggaggaggtggaggcggaggaggaggaggaggaggaggaggaggagtggggggtggttggggaaggataagaaggagaaggaagatggaagagtgtggctgcagcacatggtgggaggactgggagatgggctggaccgaagcaggctgctggtcatttggcaggatgtaggggatggaaggtttcagttggagaagtgacatgatcagagttaagcttcagagactgctcttgcagcagagtaggaggtggattgaaaggagaaagccttaaggcagggaggccgactagaaaaccaatgcaatagtccaaggcaaacaggaaccaagtaggatactggcagtgaggacagaaaaccagaggcagatttgagacatactgctgggataaaatgaacaggactcggctactgaatgggcgtaggggcatgggaatgggagtaatcagatgcaactctcagggtctgggctgcggtgaccagaaggatggtggtggcaatgactgatatactggcaccaagctaacatatcatcaa

SEQ ID NO: 27047 - DNA, 742 bp, Artificial sequence
  DNA replication origin
tgtgccagaatgcacagggagacagcctggccctcagtccacgtccccttctcttccccctagttctgttctgtactgcagtacgcacatagctatcccagcctatgcagccaaactctgtccacaccctgctgactctctagccaccccccaggcctagtgcgtatacactggtggtacgttccctttgggaatgaagccctctcaagggcggggccccagggaggggcctgctagccaggtctgagaggaccttgttttggaattcacagatgggcaggagagacagcctgggaaagcaagtaactgcaacgtggcaggaagcgcgctatgctgggtttgagaaggggtgtgtgtaaccagtgcatataagtgacaccgggagcaaaaaagcaggagttgtccatgtcaggatgggctgtggaggggacgggtttgccatggatgtgacacagtgtgtgcgtggaattaagagtagctgggcatggctgaggtgtcaggtgtcagggcagagggtgaggagggagggtggcacatggggagggagaggcaggcgggagagaatgtgctgttctcaggagtctggatcagggactgtggaaagagggaggccaggttaagctggagaatggcgtttcagaaatgtcactgtggttccagtgtggaggatggcctcagcaggcagaaggagaggcagggagaaccaattagaaggaccacctgcagtggtccaggggtgata

SEQ ID NO: 27048 - DNA, 2591 bp, Artificial sequence
  DNA replication origin
ctgtcacccaggttggagtgcagtggtgtgatctctgctcactgcaacctctgcctgctgggttcaagcaattctcctgcctcagcctccccagtagctggaatgacagacgcccacccggataatttttgtatttttggtagagatggggtttcaccatgttgtctaggctggtctcgaactcctgacctcaggtgatcctccggcttcagcctcccaaagtgctgggattacagtcatgagccactgtgcctggcccaaaataagatctaaaatcattccttccagatcgaaaatttagtatttcaaaacaagtatacaaattcagtacttttcaagattaaagtatcctgtgtttgaaaagatggcacaggaggaggggtgaggagaaggaggggtgtggaggaggaggggtgaggaggaggaggggtgaggaggaggggtgtggaggatgaggaggggtgtgaagggggagggggaggggtgtgaagggggagggatgtggagcaggagggttgaggaggagggatgtggagaggagaaggggtgaggaggaggggggtgaggcggaggaggggtgtggaggatgaggaggggtgtggaggaggaggggtgagggaggtgtgaggcggaggaggggtgtggaggaggaggggtgtggtggaggagaaggggtgagggggaggggtgtggaggaggattgtggaggaggaggggtgtggaggaggattgaggaggaggggtgtggaggaggattgtggaggaggaggggtgtggaggaggattgtggaggaggaggggtgtggaggaggattgaggaggaggggtgtggaggaggattgaggaggaggggtgtggaggaggattgtggaggaggaggggtgtggaggaggattgtggaggagcagtgggtgtagaggtggaggagggctgtggaatttggaggggtgtggaggagaaggagggctttggaggaggggttggaggaggaggggtgtggaataagaggaggattgtggaggaggaggggtgaggaggagggttgaggaggaggaggattgtagagggggagtgggtgtggaggagttggggtgtgcaggaggaggagaggtgaggaagaggaggtgtttggaggacacctggtctccagctccatggcggtgatgggggctgagctccaagagaaggaagctgctgtcaacagttcggaagaatttgcggatttttcgagcccctactgtgtgccaggtgctggggaagtggcatacaagtaaacatgcccctgtgcttgcagagtttggagccctgtggggaagctggatgtcaattgcaggtggacccggatctccagaaaacaaggggtggggtgggcatgagcactggctgataggcaggtggggagagggctaagtatgagggtcgtctgcttggagggctggagaagttggtttgggaggtcgatggaaagaagatgatggtggagggggaggatgataggagacaggcatggcctgggtggtagaatatgcagaaaagccttactggagccagagaggatttcggaggggagagagtggccaaagggtcaggatgcggctgacatcagagggccttggacagaggcaggagagtagggaatcctggagggctccctggggctgcgggcagaaggaggctgagcaggagtgctcctccaggagaggcaggacacagggctgtggcatgaggggtagccggcggggaaaggagagttttctgtttgttctgaggaaggagactgggcatcttcacaggctgatggggaggtgccatcagagagggctaagtagaaggccctagaacatcagcaagtccttgcggaaggtcaggttgacgtggaaacaggacctcgtaaggcatagggacgctggggaaggcgcgacgggccatgggacggaatggggagcagctgggacacggcgggagctggcccaggtggcctggatgggaggcaagaaggcctcatgtggtctgatgagccttgaggagaggagggcgtgggtgccccacgtggcaggagagggctgggtcagcacagcctggaagtgctggttcttcccgcagggctcccagcaacagaaagctcagcccgagtgacgtggtggcaggtcttgaggaggaagagtggcgtggtggcaggagaaggggcctgggggtgccacggaggccacgagccaggtgggcccgggcagaagcaagggaagctaggagaggacgggcaggctgagaagaggggacacggaagaattctcagtgcggtcaaagaacagggtgtgtgtagaccagagtggaaatgggggctcaggaagttaaagtcagaaacaggatttccaggtaggatttcaggagacagtcacctttatgacaagtgctagatgtggctgttcgcgttgaaccctgctgggatgggggtctggggaagggacagggctagaggccaacccaggacagagtatctggtggaggaagggccgtgggcaggggtgtggagcgggtgctggctgtgggggcaggagacccagctgcctccagctaagggaactgagtgcccc

SEQ ID NO: 27049 - DNA, 1642 bp, Artificial sequence
  DNA replication origin
gctggaagaaactgggaagctccacttcccaccgcctctgcctgggtggcagtcatctgagcctaggctagcccctccccctccaaagacccactgcgggctcccctggggccagtctccaggatgggtggggcacctgaagcagcaagtattgctatttttctgggctgacctttcttctaggcctgaggacaagtgggtaggtggggccagccctgtccctgtttcccctcaatggagttctcttgctcacagcctaaggaagaagcgtgagtcacttcctgcctcagtctgactgctggagtattgttctcccaactgtggctggcgctacccagtgtggcccctacaagtcttagttccttggcggaggggaagtccccactttgggacaaggccaactggacttatcttcccgctcaactttgaggacccagcattgttcctccagtttccagttcttgcagtgtttgtaaaggtgcccgaatcgtacctgatcccattcactaaatattatctccattttatagaggggtaaattgaggaagtccctgagaaattaacttgtctaaggtgtcccagcaaaaaatagtgccccagggatttgaaccggtttgctgattgatttttcaccagttgccttaagaattatcatgatttaacctctctgggcctcagtttcctcctctataaaatgcagacagtgatacatcaaaggtacttaaaggaaaatgtactgtacccacctcatggggcatgtggtgaggataaaacgggttgacacaggaaaagagctctcaatggtgcctggctcatagaaaacactcagtggattttttttttcccattacccgggaacctgtgttaaggaggccacaggctgatcctgtgcagccaggttatctcacagggagcgagaagagatgggcacaggctactctgcgaccttggaataacccagcctgggaagctcctggccacattttccttcttttctttctcagctcaagcagcgtcggcctcagccaagtagcacaaacgttttctagggcccagggagggagaggctccggctggtatattgcaagtagcttggattcaggctctgccaaacaccccagtctcttgcaggatctgaggtctgctggttgtgggactttgcgcaaattatttaaacgttgtgcgcctcagtttccttatctgtaaaatgggattaataatctcagcctgaaaggattatgtggattaaatcatgtacataagaaggagataatgtaaagtgactggcctggtgcctggcaagcggttggtgtctaaaaagaaaaaaaagctaaaaatattaaaaggaggtgggctacttctgctcatatatccacctgtctatacaaatgcagacgaagtcgtgactcctctaacagtaggccaagaggaggctggtcctgccgccgtgcagtcctccctcgacctgggagtggaggaccccaggtccgccgtccctgggcacttaacccggtcaggctcaaattcgtcgcccaggagtggggaagcgggggacggagagggccagtcccccaagagtccggctgaggcagggctcggagtgcctcccccaagcctttccctttggttccgagttcgggtc

SEQ ID NO: 27050 - DNA, 1817 bp, Artificial sequence
  DNA replication origin
cccgccggctttccggaactggccccggggccggccccgagggtggagctgccgggagcagacagggcgctccgcagcccacctgagcgcgccgggcccgtctcggccccccggccgtggctggtacttttccgcgtggggccagggcgagccctctgacctcaggaagcgcctgcggggcccctgctgggggcgggatggggagaaaattccgcaggcgccgggtgctccagcctccccgccgccaccggggctgccgccggctcgcccactccgcggccgaggagggcctgcgttccgcccggggaggggaggagcggccgggggcgaggcgggggctccttcgcttgggcctcgcccccgcccgcacacctgtgcggccaggactcgggtgcgggatccgcgggcgccggcggccggcgcaggtaggtccctgggctgccttctgccgcggcctggccgaggcccctgtgcccccgctgtgtggctggaccaaggggcggcctgcttgccagacaggtctgacggcagtcacttgtctggtcagaacccgctttcccatcatcctctaccccctggcccctggggtgcagaccctcatccaccggagagtgttgggattcctattctgacttgggaagtgcgaggagaacccgggtgatatggcctggtgagggcgggtgctgagcaggtgtggacacagcataggagattagccaagcctgacctcttctcaagcagggcagccctcgttttactatttcctatattgggcttctacggagcatttgatttttaaaaaggattctgtggctttttaaaaagtttgaaagccgctggtccagcagtttttaccaccaaggaaactgaggcccagggagaggaagtgacttgttaagatcatccagcaaatagtgggcagggactgggagcgataaattcacgggagcctcccagggctggtaacaggaccccgcgtggtgtctctgctagagggagagactgattgggtgtccgagtggccctcccgtggcctgctctgtggctgtgtcagagccagacccccagtgtctgggaaacagcagtcggtcctggggtgaggcgcaatttgagtggcccagagtggctctctgtgtcaggaggttctggtgctggagaaaagggctttgcccaagaacacagccaggaagagcacccacagctctctctggccacagcctggaacagagtcccatgtgaaacaagaccatgagaaatacagcaagcctccaggtttgagacaaactgggactagagggtgagtcagagtctgggatgggggtggggagaaacccattcattcattgttttcagttcttactcttttcggggatcctcccttgtcccacatgctgtggcagagccgtctgtgggggtctcattttctggaagccatccccacccctcaccatggctggggttgttggatagagggaggctggccctctttctttggggggactgttcagttgcgcctgacgcctgctttctttccgagtgctgcaaggtaattaaatagttggttaatcacttttaacgccaaacagctgcggctccatctacagtgtgctggaatctgggctagacccagatgaacccagcctcgatttgggggctccagcaggactcacagcacggtggttggtggtggtgggggcaggggggtggttgcatgacatctggacccaagaggcagctgttgtggcagcaagagagaggagagagatgaggccccgttcctatatggctctgctcccagggtcccacatcctctgtta

SEQ ID NO: 27051 - DNA, 1338 bp, Artificial sequence
  DNA replication origin
caggctgaccatcatggtgctctcctgcacagagacatcgggaaacggctcgaggtgcggaagaccgtgaccgcgtgcctgggcgagcccaaccacatcactcggctggagcacgctcaggcgcggctcaccctgtcctataatcgccgtggcgacctggccatccacctggtcagccccatgggcacccgctccaccctgctggcagccaggtgcttgctctgtccctgcccgccctgcccagcgccgccgcctctcacagcccgcgtgcttgcctttgctcgctcacacggcccagggggcactgagtgctactcagtggggcactcttggcattttgggagggacaattttgtcctgtgggactgtcccatgttgcaggaatccctggcttgcaaccatttaatgtcagtagtgtgccccaccttgtgcggtgcctgtgtacctttctagaatcccccagttgagcacgtctggctcactgagaaacagccaagccagcaggcacttctggccccatggggttggtctgcgtgggggaagggtgtgtggcccatgtgctgtgggttagatgtccctggcttggggtcccgcagaggcctcagggctgtgtgcactcccctccccaggccacatgactactccgcagatgggtttaatgactgggccttcatgacaactcattcctgggatgaggatccctctggcgagtgggtcctagagattgaaaacaccagcgaagccaacaactatggtactgggggcacttgaggggtaggggtacgaggtggagggctggcaggatctcgagcactgggtgtggtgccagcactgtcttaactcttgcctcctccccgctctggaacagggacgctgaccaagttcaccctcgtactctatggcaccgcccctgaggggctgcccgtacctccagaaagcagtggctgcaagaccctcacgtccagtcaggcctgtgtgggtcagtagtgggtgctgttgggctttgggggcctgagtctgggggtaaggcgggtgcctgtcctgaagcccagctctaacagaaaaaagtctcaagagacctagggcccctggggctcttgggatgaccacagtcctggggctggaggatcctggggatgtggtgacttggcttggggctgctgtggtcctggggctacagtctgtttagctgacacacacttgccctctctcccacgccggcagtgtgcgaggaaggcttctccctgcaccagaagagctgtgtccagcactgccctccagggttcgccccccaagtcctcgatacgcactatagcaccgagaatgacgtggagacca

SEQ ID NO: 27052 - DNA, 1920 bp, Artificial sequence
  DNA replication origin
ttccctgtccctctaaagcaataatggtcccatccaggcagtcgggggctggcctaggagatatctgagggaggaggccacctctccaagggcttctgcaccctccaccctgtcccccagctctggtgagtcttggcggcagcagccatcataggaagggaccaaggcaaggcaggtgcctccaggtgtgcacgtggcatgtggcctgtggcctgtgtcccatgacccacccctgtgctccgtgcctccaccaccactggccaccaggctggcgcagccaaggccgaagctctggctgaaccctgtgctggtgtcctgaccaccctcccctctcttgcacccgcctctcccgtcagggcccaagtccctgttttctgagcccgggctgcctgggctgttggcactcacagacctggagcccctgggtgggtggtggggaggggcgctggcccagccggcctctctggcctcccacccgatgctgctttcccctgtggggatctcaggggctgtttgaggatatattttcactttgtgattatttcactttagatgctgatgatttgtttttgtatttttaatgggggtagcagctggactacccacgttctcacacccaccgtccgccctgctcctccctggctgccctggccctgaggtgtgggggctgcagcatgttgctgaggagtgaggaatagttgagccccaagtcctgaagaggcgggccagccaggcgggctcaaggaaagggggtcccagtgggaggggcaggctgacatctgtgtttcaagtggggctcgccatgccgggggttcataggtcactggctctccaagtgccagaggtgggcaggtggtggcactgagcccccccaacactgtgccctggtggagaaagcactgacctgtcatgcccccctcaaacctcctcttctgacgtgccttttgcacccctcccattaggacaatcagtcccctcccatctgggagtccccttttcttttctaccctagccattcctggtacccagccatctgcccaggggtgccccctcctctcccatccccctgccctcgtggccagcccggctggttttgtaagatgctgggttggtgcacagtgatttttttcttgtaatttaaacaggcccagcattgctggttctatttaatggacatgagataatgttagaggttttaaagtgattaaacgtgcagactatgcaaaccaggcccagtctccagtgtggtaccgttgctcctgcatcgcagctgaggatagggggccagttaggcctacacagtggcctgcctgcctggatgtgggcccaagtcagaaggccaaagtcctccaaggggcgggaggatgcgccagcccctagtggaggagctggtgcccctggggtggggctggtgacccctggtcctcaggagctgagcactaaactcccaaagtcctggtttccagcagtgtgaagaactgggcctattgtgtcttcctgggctgaagtgatctggtcgccacaggctatagggctgaggcctaaggtggagggaggcctgactgaatcaagatgacttcttgtggggagcctgagtcccaaatggaaaactccacgcctgtccgctccccaacccctgccccttgatttccccaggtctcccttgggacaggaagcccctgcctgggggtaggaggatggggacaaaaccactaggatctgtatccgagaagcagtctctgttcgggatatttacttggaaattttattcaaatggaagctggcgcctgagcctctccttagggaattccgtgaggtggggagggctgggaccagggttccctctttctcttctgcggtggccctggcctggtgctaggactgcgcgcctcccctcagtacccgcggacaccctgggct

SEQ ID NO: 27053 - DNA, 1165 bp, Artificial sequence
  DNA replication origin
ctgacccccaccttgcgccccttcccggtgttcccggggcgctgccgggccctggggcctgcggggcgcgggcggctcttggctgggccattctttcccggccccctcctcccttccgtttccgtggccgtgcggccggctagaggctgcggcccagcgcggagcaggggggctggcaggcgtcggggcggtcgggccggtcccgcccgccccttcccctccacaggcccgccccggggcctgggccaactgaaaccgcgggaggaggaagcgcggaatcaggaactggccggggtccgcaccgggcctgagtcggtccgaggccgtcccaggagcagctgcccgtgcgggtacctctagccccggggcctggaggagcggtgggagctgggggcgcggcaggcaggggcagagcaggcgttccgagggccagagacccacccaggtgggggtaggggccgcggaagggcggggatggccgcaggggcagggctcaggctgtgggcgcctgaggcttcagctggggcaggcttggcctgtcgaggacctgggcaagggtgtccctgtaaggggtggtgggtggaagggcctggggagggaggctccaggttggctcctgttcccgaacgtgcggaggagaccctgacgctaaggaagcaatgagggccagtccccaggccaggctgctgctgggtacccatggctgcgtgtgagcgaggcaggaccccacctcctccccgtctgcagtccatcctgaccctacagtccccagtctcctcgtcccatgcctccgtctccagctgctgccttgcctccagggatggccccttttctgtccccagaacagcactatgggcttctcttccgagctgtgcagcccccagggccacggggtcctgcagcaaatgcaggaggccgagcttcgtctactggagggcatgagaaagtggatggcccagcgggtcaagagtgacagggagtatgcaggactgcttcaccacatgtccctgcaggacagtgggggccagagccgggccatcagccctgacagccccatcagtcaggtgggtctctatgggactctggtgggtgctggctgtatctgccttctccttcctctcctgggggccctctggggcagtggctggagatctggcaggccaat

SEQ ID NO: 27054 - DNA, 861 bp, Artificial sequence
  DNA replication origin
actcgaaacacaacagtaggggggcccaggctgggcgccactcaccgagaacttggggcggaagattcctgagatgtggctcttaaggatctccagcgtgggtgtccttcccccctctcgctcctgctcctgaggccagggacagacgtcagcgggtggccaggcttagggagggggagggcgaaaatgaggagcgcagccccaggtgggcaggccggtggcgggcagcggccgcggatggggcagctcaccgaggacgacgtggagtggcggtcatcctgcaggagcagcacaggcgggggctcgccggggcccaggtgctccagcttggtctgcagcaactcctgctgggcctgcagcttggcctggctgcacagcgctacctgcagcccctgcagtgcttcttgcagcacttgcctcttgcccagcagctgcaccctgcaggcaggggcgggtgggagggtggatgagaataagggctcggtctgcggcgggtagccagcagcagttagggtaggtaggagggagggaggcccaggaggctgctgcaggcaggggcccactcaccgctcccgggggtgggtgttctcctcttcattccggagctcctgttgcagctgcgtaaccatctcctgccgcctgaacaccatctcggtggccacagccagctcatctgtcactgaggtcagcctgcacccaagagaagggcagcattagaaccgagccctcctgccccctcaacccaggtccagtgcatccctgtagagccaagcaagcccggccacctggtgacagctctgtgtggacagtctccacgacctagccctgcctacataaacactcgtggtctgctgggagccc

SEQ ID NO: 27055 - DNA, 1638 bp, Artificial sequence
  DNA replication origin
caggggatcagaagtctgaagaaaaggggtgctgggcccttagaagggctgtgtcctccattttttggcgcctccatatgtgaccaggggtgggaccacgtggggagcacactgagatgactacggggtccaggcaggtgccctgaccaggtaagcaccaacctggtgtgtacagcccatggcataggagtggccctgacattccaaacctagagcaaggctggccctgagggtcactcactctgcatcttgtatgtagacggagggcctggaaagccctttctgctcagacgctgggtgggcctgacccacactccccaagccctgccacaggtggcatgggccaggctgggtgcaggctcaccttgggcacagccctgtgcaggacaacaccactcttcttggtgaggggctgctgggtgctcagtaggtggtcgatgagcaaaggaatgctaggaaagccttccccttccagtcggtacaggttctgcagggcaggggacccggggtcagcagcctccattctgagggggcgtgagccctgggagggggaaagggagagcagcaggggagaaagggcctgcccaggaccaggggcagagagacctccagaaaagatgccatctgatggcacatgacatcctgctgccccaccaggggaggactcacacttaagcctctattttgttgcagggacagggtggtctctgtggccccttccagccagccctgctagggaggcatccaagacctggcagctaccccctaccctgaaaggccatttcccttggggaagggaagggaggggaagagtgaggcctggaaggctcgggtcccagccccactcacatccaaggactggatgatgaagtgccggggcagaccatcccacagcaccgacagcacgtactcctgcttgccctggctctcccgcaccaggaagtccccagagtgcaccagcagctcagccacctctgccctcgggatggccccgtggtaccacagctgctcatgcaggggcttctgcacctccggaatgagctgcagcggtggagggagctgggcaagggaggatcgaggaggagtcacttaaccaccttgttgaagaggccgtgggggcagccgggggtctctctctcccccctatatgccctcagcccttacaaccatggagtggcatgcagagccatccacaggcccctggagtgggcactggactggcccaggctcacgctgggcagagctgggaagggaagcccaggcaggaagaccccaaaccaagctggtgcctcctcctccaggccacaggcccccaacccgctcctgaagcagggagagccatggaatagtcgaggttgctggtccctttagcacactggggcgatggaaagggaggggtcacaggggcagggtctggggacatctgcagcctggaatcccagggaagagaggaacttcccaatacaagcagcctgggcagagcctcctctctaggacatcccagtgattaaactcgaaacacaacagtaggggggcccaggctgggcgccactcaccgagaacttggggcggaagattcctgagatgtggctcttaaggatctccagcgtgggtgtccttcccccctctcgctcctgc

SEQ ID NO: 27056 - DNA, 1385 bp, Artificial sequence
  DNA replication origin
ggtgtttagtcctcgaggccccccattgcgggtagtacccccttatagtgccgaagggtagaggctgccccaggtcacacgtccgggtctgctggccttggaggccaagctcttctcccatcatccctggggggccctggggaggcgggcctggccacgtagatcctgagcagcagtgccctccaggatcctgaagcagtacagccaccccaacatcgtgcgtctcattggtgtctgcacccagaagcagcccatctacatcgtcatggagcttgtgcagggtgagcgcggggcgctgagctccaggtagggcgcgcagcctggtcaggtggcagccttacctcaggaggctcagcaggggtcctccccacctgcagggggcgacttcctgaccttcctccgcacggagggggcccgcctgcgggtgaagactctgctgcagatggtgggggatgcagctgctggcatggagtacctggagagcaagtgctgcatccaccggtgagtgggcggtggccacgggccctgccaacacccccgaccagagtcaagaggtacctatacccctagggccccccgctggaccatcaggcatcagctccagagggggagttggcctctgtggtagacaggggtgcccagggccgggagcagcttttgtccttggctttcctagagtgttcagccagggctgggcaggcgactgttggccaaatgagcccctgccctgtctcacccagggacctggctgctcggaactgcctggtgacagagaagaatgtcctgaagatcagtgactttgggatgtcccgagaggaagccgatggggtctatgcagcctcagggggcctcagacaagtccccgtgaagtggaccgcacctgaggcccttaactacggtacctagtccctgtctaccctggactccatggccagaggccaggcctgggtcctgccggctgcctcgccctggccccagggagggtgcactcacgctgcctcacctcctcgcctcctctgcaggccgctactcctccgaaagcgacgtgtggagctttggcatcttgctctgggagaccttcagcctgggggcctccccctatcccaacctcagcaatcagcagacacgggagtttgtggagaagggtaagcaccctgtgatgacagcagcctcaggctgcaccctcttccagatgctccagccggactcttctaactcccttaatgccaaccttcccaccaggcagaataagaataacctggccagttgctcacgcctgtcatcccagcactttgggaggctgagctgggtggatcacttgagcccaggagttcaagatcagcttggacaacacagtgaaactccatctgtacaaaaaatacaaa

SEQ ID NO: 27057 - DNA, 1081 bp, Artificial sequence
  DNA replication origin
ctgtcggggcagccggagccctcccgcgcgcgcacccggcccgttaccgtcagcgcccggcctccgcgccgctccgggcccagtcggccgagctgccggctctcacacgcccggggacggcggcccgcgtgcaggcagcgacgcaggcgaaggcgggcgcccgcccacccgtagccccctgctccgcgcgccgctgccgcgctcccgctgggccccgggccgccggcgcgctccgctgcgccggccccgcgcgggtccgccagcctctgaagctgccgggcccagcagcgtgcggggcggggacagccgcgccgcccgccccggcctgcgtgtgcccggcggagctgacaggagctctggccgccgcggtccccgcccggctcctcccgggcccgctccgctgggctgcagtgcgcagccgcaccagcccgggccgggcctggccagctgcggaacctcaggagggacgcgcgactgaattttttcggaatcctacttgagtaagcgcatgatcgggcagtggtcgaaacgcccgcctccgtctcggcagacgcgtagcggggtgcgttctccgcggcctcacccggctccggcccaggtagccttaggtctctgtcgttgcgcccctcgggcaaaggggtgctgcctcctgtcggtacagcgcattcctcgagtccctttcctttccgtgcctgctctatgtttcctgccagcgagtgaacaagacacagacttttcttggctgtttcccttttactgggcatctaggttgtttacagtttttcagtgtaatccatactgcaatgaacatctccatgaattccacatttttgttctttttaagttatatataacattatctgaatgtgaccccccaaattcatgttcaaatcctaatccctcaaggtgatgatggtattaggagatgggcctttgggggtgaacagagtttgaagggagagctctcatgaatgggattagtgccggtatcaaatgaccccgagagtcggccccttcaaccacgtgagaacacagctagaaggcactatctgtgcaccacaggcaggccctcacccgacac

SEQ ID NO: 27058 - DNA, 1111 bp, Artificial sequence
  DNA replication origin
agtcgcgcgtccctcctgaggttccgcagctggccaggcccggcccgggctggtgcggctgcgcactgcagcccagcggagcgggcccgggaggagccgggcggggaccgcggcggccagagctcctgtcagctccgccgggcacacgcaggccggggcgggcggcgcggctgtccccgccccgcacgctgctgggcccggcagcttcagaggctggcggacccgcgcggggccggcgcagcggagcgcgccggcggcccggggcccagcgggagcgcggcagcggcgcgcggagcagggggctacgggtgggcgggcgcccgccttcgcctgcgtcgctgcctgcacgcgggccgccgtccccgggcgtgtgagagccggcagctcggccgactgggcccggagcggcgcggaggccgggcgctgacggtaacgggccgggtgcgcgcgcgggagggctccggctgccccgacagaggccgggctcgggcggcgggagtgcgagcgccactgcggcgtcagaggggccaggaagggacaggaggctgcctgaggcccgtacctggcgcctgtctctgcggtccccggggccgacgaagtcggagcgggtggggagggagccgggcgggcggccagagacctggcggcaggtgcctgccctctgtgatccaactctctccccagctccacccacattggcctagacccagtctctaagggctgaaaatattgcccggaagctcccgagcagaatcagatcgcgctaagtagggcacaacgcagaggcgacaaagctcctcggccccagggcccgcggagcagactccggagcgcggtcccgcccacgctcggctccgcagttagcgtcctccttcctcctgagcaggcaagcggagcccgagggcggtggcggcggggggcacgggtcccctgaagttgcctcgcagctgagcactgggccccgtctctcccttcccagggggccttcggcgtcactgcaggcttcctaggggtcccctaagtgctctgcaaaccgcggctggaagtttcccactgcagtgaacagtagagaaacagggagaacacacagggcttgctttatgctagaaac

SEQ ID NO: 27059 - DNA, 1171 bp, Artificial sequence
  DNA replication origin
ggcctagacccagtctctaagggctgaaaatattgcccggaagctcccgagcagaatcagatcgcgctaagtagggcacaacgcagaggcgacaaagctcctcggccccagggcccgcggagcagactccggagcgcggtcccgcccacgctcggctccgcagttagcgtcctccttcctcctgagcaggcaagcggagcccgagggcggtggcggcggggggcacgggtcccctgaagttgcctcgcagctgagcactgggccccgtctctcccttcccagggggccttcggcgtcactgcaggcttcctaggggtcccctaagtgctctgcaaaccgcggctggaagtttcccactgcagtgaacagtagagaaacagggagaacacacagggcttgctttatgctagaaacacaagcatctttcttctttattagaaagaaactcattctgtgtttctgagaaaggatcgtgccaggcactgtttctggtgagtgccagtttgacccgaaagggcactgagaaaggctttcctatcagtctctttgggttctggctaaacttttaaatcaaacaaaatagagactagcttattcacctgaaactagaagcacatggccgaggagcctgaacaggcacctcctatctaggcagggaagctgtgtaatcaggagcttgtgtggtgcgctccagtcggagctgggactcttatcctgggcccgtttttcatagcaccagccaaaggagagcgtcctctccaccctagcggcagagctgctaccaggaccaggtgggccagcctcagatgtgctgcttgtgctacttggagccaggcaaatgggtgttcctttggaacagccctcaggaactcactggggtatttggtggaaagactgccacgggcattttgcatgttggagctacagatggtgtccttcctgccaggtgtgtgtggaggccagtatgaagctgaaaaagcaggtgacagtgtgtggggctgccatcttctgtgtggcagtcttctcgctctacctcatgctggaccgagtgcaacacgatcccacccgacaccagaatggtgggaacttcccccgggtgagtcgtgcctggttgctaatttctttgtatacaagtcacctgggctcagggtatgcacctcccaccccgccg

SEQ ID NO: 27060 - DNA, 1064 bp, Artificial sequence
  DNA replication origin
cggcccgccgcgccgctggctgagcccgacagctccaagcggcctccacctgcggggcggattggagcagggtggccagaatggaggcggcggggatggggggagcggggtgttcctgggaaggggtcgaattggggaccaacccagaatgtggggctggcggcctgaacgggggagacaaactggactggccacagcggtgcggggaggcgactggggagcgcggctggaataagtggggacggggcggggagtgctcacgggtcacgaaagcggtgtagctccagctcgcgctcacgcggcagatgtcgacgcccgcccgcagcggactggggctgtgcacctggcgcccgcgtccggagcccagctcctgcccgaagccgcagaaaccgaagccgaaccaggcccccggccgctcctccgccatgcccgagcagcgccctctgccggccgccgcctggctgcggcgggcccggggggattcttgcgaagagcccgctagtgggacactggcaagtctctggccttccaggggctggagctgccttatctgtaaaatggagaaactatcattctcccgaccacaaaggcagagtccgtgccacgaaggttcgctgagcaggcgccctgactaatgccctaccggatttacaaagatgctcaaatatttagaggcactttccctgtcctcccttttggctcaagctcagcgtgccacaaagtgggtacgaagtggcctgtcctttaggcattggactaggatccgagcgcccccgacacccccaccccgtcccgcagcttcccagcatctggcactttatcccatgtaatcttgggaaccaaaatggtcgttttacagaggagattctgagacaaagtaacccttacacactcatacagccagacagagaggggcagagcgctgaaatcaggtcccaccaactccacacacagtgctctgcccctctccccacagcggaacgcagaagagcgtttgggaggcagtgcctctgcaactcagcggggccttgggaccgcagccaatccacctgagtccaactgcg

SEQ ID NO: 27061 - DNA, 1629 bp, Artificial sequence
  DNA replication origin
tgggttggtccccaattcgaccccttcccaggaacaccccgctccccccatccccgccgcctccattctggccaccctgctccaatccgccccgcaggtggaggccgcttggagctgtcgggctcagccagcggcgcggcgggccgctgcaaggacgcgtgggcctcggaggggctcctcgcggtgctgcgcgccgggccggggccggaggcgttactgcaggtctgggcggccgaatcggcgctgcgtggggagccattgtgggcccagaatgtggtgcccgaggccgaaggggaagacgatccggccggtgaggcccaggctgggaggctacccctgctgccctgcgcccgtgcctacgtgagcccgcgggcgcccttctaccggcctctggctccggagctgcgggcacgccagctggagctgggcgccgagcacgcgttgctgctggacgctgctggccaggtgttctcctggggcgggggcaggtgagcggaggcgggggcaggtgagggctgctgattggagaagcaagcggagcgggaccccttaatgcgactgtagctgacgacggtctcccttgctcaggcatggacagctgggccatgggaccctggaggcagagctggagccacggctgttggaggcgttgcagggcctagtcatggctgaggtggccgcggggggctggcattctgtgtgtgtgagtggtgagtgacttagtgcttctccagacgagctcatgatcttgtgcaaaccttcctcctcgttttccagtttgggtgggggcctacccaggcctccttccaaattcatccatccatcgcccagtcagttatgactcctaaatgcctctcaccctcggcctcctctgcctgcaccatggcccactcacgcctggactctggcatttgttcctagcttctctgttactggtctcactgcccctcccctcctctccccacctgctcccagccaggactgtctcttaacagtgctgccgagggagtatggagtgtgagggggcagctgagccaaggaaaacgcagaaacgctgcagttgcctagggggccatgatgtgtggcacagggtggacactggggtgcccaccaggcaccaggatggtgatgagtgtgtccctgtggtggtgccacagctggccagagtgaggagtttcacttggtgatccaggtgtagctccttcctaggctgttagagcccatgcagagagggtgaggctgggaacagatgatctttgtctgtgtctggggctctcattctggctgctacgtagatcacctggaagcttaaaaaattaccaatgccagggggccgggcgtagtggctcatgcctgtaatcccagcactttgggaggccgaggtgagtggatcacgaggtcaggagttcgagatcagcctgaccaacatggtgaaaccccgtctctaaaaaaaaatacaaaaattagctgggtgcagtggtgtgcgcctgtagtcctggctactcgggaggctgaggcaggagaatcgtttgaacctgagaagcagaggttgcagtgagccgagatcgtgccactgcactccagcctgggcgacagagcgagactcagtctcaaaaaaaaaaaaaaaaa

SEQ ID NO: 27062 - DNA, 1359 bp, Artificial sequence
  DNA replication origin
tggccaataaacacgaaaaatgtgcaatttcaattataatcaagtgccaaacaaggaaatgccagtattattattttacctacaaaatgagcaaagatgtttagaagtacaatagaattcagccctgctgagggtaacaaaaggagggtacttttccggtgaggctttgtgcagaaggcaaattaataaagggagcattcagtaattacacctctaggaatcagccgtacgaaaatgcaggatgcatttataaatacatacatacacaaagatttatgtatgaagatattcagcccagccttatcttttaaattatcatctaaatatcaatagcagaatgggcgagatatctacacaccaggattcatgccaccatgccaccatgaatcactgggaaaaaacggtgatatataagcatttagggatgtaacatgttcatcgaggaaaggaggctacaaaagtaatgtctattttgagttttaaatttttcatgtaacgatttagaaactcatctaatttgataacgtgacttaggcaaatcattcaaatctttttgcgtttcctctgcaatggcgattgtggaggttaaatgggataactggcgttgaaacgttccaggcccatgagcaggactcaatgttccttcccttcccctttagtgtatggcttcttacatctggggaagagtcccaccaaagatcgattccaagcttcgcttcttggatgagcgagggaaactaggcgctaacttacctattcacccccgcgcccgttcccggcagccgggactcagggaagccaggtagccgcggtgctctcaactccctccccgcccgcgcacttcgaatccaaactgcgcggggcgaggcggggcggcgctccgatgaggtagctggcttgggagaggagtcccttgaggctgccgccaagccagggaagcgggaggcgcaggccacgcccggccactcacagacagtgacgtcatcccccgccgccactccggcgcttcccaggccctgctcgcgagtccccaccccgattgcgcacccgcgacttcagcccgaggggcggggattttcttggagcgacgggacgcgacgccaatcgcgacgaggcttcgccccgtggcgcggtttgaaattttgcggggctcaacggctcgcggagcggctacgcggagtgacatcgccggtgtttgcgggtggttgttgctctcggggccgtgtggagtaggtctggacctggactcacggctgcttggagcgtccgccatgaggagaaggtgcgggttgcggggaaatcgaggggacgcgggagggagcgacgctcgtttcggctgcggggcctgttcaggggtgc

SEQ ID NO: 27063 - DNA, 1022 bp, Artificial sequence
  DNA replication origin
tatctccacacccagccttcgatcagaaggagatttagaagcagagctgcccgcagcgaatacttttaatgcccgggccgggaagaaagcgggttaggatctgatcccgctgagtagaggacccaggagcctcccgccccgcgtgctctgtagcgcgggggcgcgctgcgcgctgcgcctgggcggctggcgggggcggcgtgggcgcggtgatgcaggtgtgacacccgccggcgcctgcctccgcccggatcgcccagctccgcgttagccggagctgcacgcggggctgccggggcggacgctgctctgcctgcatccggaggcggccgccagcggatttgccacccaggtaggggactgcgttgctcgctgcggtgcaaccgacccagccggggcgcggaccccgcgtgcgccagggctcccagactcgcctgcctgggctgaaatatacacgctcgcacagctgagtgctgttcatagtaaatggcacaaaagatcggagagtcttgaaaaaccggcgcagaaaagcaaggacttgcccgctgcctggagctgtgcgcttctttgaaagcggcctccccaagggctgttttaaaaccctgtttgaactattagcgccataagtagttttgcaacttataaatgtcaggctgctggcatttatagctccgtttccataagcttcctagccgctgcttttagtttcagttacattctagtagatagattttgttattgttgttggcttgttcttaaagaacagaattcaaacgtgcttacacctggtggctcttggggtttgtgagtgtgtatttctgtatgtgcagggcgccctccgtgggcgtgggagccgtttcttagggacacagaaggatttgtttatggacgggttttagcgcaagggaaagaaaatgacttgttttgcagggatgggctagcaaatgcgtttagccagggaggagcaaggcaccgctgtgtcttcggcagacgggtggtagaaatctctgctgtccagggtt

SEQ ID NO: 27064 - DNA, 2410 bp, Artificial sequence
  DNA replication origin
gttcaggaagttcacaatggagccaccaccaggagacaagagaccccacctccagaagattggggtacctcctactcactctccctccgttggttcccctcttgagatcaggatttggagagattacagaccattttggaaattttttattcactatgtattttctatttattaaataattaagaatatctttaagaggataaaccatgagaaggaggaatatctttgtcatgagaatctcatgaaaaacgctgttgaaatgaggattcttcaaagaagaacacttccattactttattttcaatgaataagagtagaatgcaactgcagctttgcatccttagggaagctacttaaccttcctgagcctctgtttcctcacttgtaaaataaagataataatagtatttacctccaaagattattgtgaagattaaataaaatattacacatgcagtatttgacactctgtttgacacaagtaatacatcacaaatagtggcagaagtggtagtggtggtggcagtggcagcagcagaggttgtagtagtcatggtggagactgatagtcgtataagcaatggtggttgtggtggtggctgtggcagcaggaatggcggcaataatgccagtggttgtggtggtggtggcagcagagatggtagggtggtagcaagtacagggtggcagtggagattttagtcctgggggaggggtggtgtggcaatggtggttgtggtggcaataatgtcagcagtgatggtggtgacagttgctgtggtggtggtggacttggtggtactggaagtggaaatggtgatggtggtggtggtgatggaattgatggagatggatgtgatgaagatgaaggtggaggtggaagtggaggtggaggtggtggagatggagatggagatggaggtgttggaaatggagatggaggtggaggtggtggagatggagatggagatgcaggtgttggaaatggagatggaggtggaggtggaggtggtagaggtggaggtggaggtggaggtggtagaggtggaggtggtggtggaggtggtagaggtggtggtggaggtggaggtggtggtgggagcagtggaggtggagatggaggtggaggtggtggagatggagatggagatggaggtgttggagatggaggtggaggtggaggtggtggaggtggaggtggtggtggtggaggtggtagaggtagtggtggagatggaggtggtggtgggggcggtggaggtggaggtggaggtggtggtggtggaggtggtagaggtagtggtagagatggaggtggtggtgggggcagtggaggtggagatggaggtggaggtggtggagatggagatggagatggaggtgttggagatggagatggaggtggaggtggaggtggtagaggtggaggtggaggtggtagaggtgcaggtggtggtggaggtggtagaggtggtggtggagatggaggtggtggtgggagcagtggaggtggaggtggagatggaggtggaggtggtagaggtggaggtggtggaggtggaggtggagatggagatggaggtggaggtggtagaggtggaggtggtagaggtggaggtggaggtggtagaggtggaggtggtggtggaggtggtagaggtggtggtggagatggaggtggaggtggtggaggtggagatggaggtggaggtgaaggtggaggtggtggagatggagatggaggtggaggtggtggagatggagatggaggtggaggtggtggagatggagatggaggtggaggtggtggtgatgaaggtggaggtggagatggaggtggtggtggagatggtggtggtggagatggagatgaaggtagtagcggtggtggtggtgataatggtggtggtggaattggaggaagaggtggtagtggtgttggaattgaaggtgttacggttggtgggggtgggggtgagggtggtggaggtggaggtggttggaattgaaggtggagatggtggaggtaacaatggaggtggtgatggcagtggcagtagagatgatggtggtggaggtgctggcgatggtgctggcagtgatggtggtggaggggtggtgatggtggtgatggtggaagtgatagtggaggtgaagttggtggtggtggatgtggaggtggtggagatggtgctggtcatggtgacagtggcattggtggtagtgctggagacaatggcagtagaggggtggtgatggtagaggcagtgatggtgttggtggtggtgatggtggtgaagacagtagtggtagtagtggtagcagtgatggtggtggagacagtagtggtggaggtggtggtggtggtggtggtggtcgtggtggtggtggtggtggtggtggtggtggt

SEQ ID NO: 27065 - DNA, 914 bp, Artificial sequence
  DNA replication origin
gtggtggaggtgctggcgatggtgctggcagtgatggtggtggaggggtggtgatggtggtgatggtggaagtgatagtggaggtgaagttggtggtggtggatgtggaggtggtggagatggtgctggtcatggtgacagtggcattggtggtagtgctggagacaatggcagtagaggggtggtgatggtagaggcagtgatggtgttggtggtggtgatggtggtgaagacagtagtggtagtagtggtagcagtgatggtggtggagacagtagtggtggaggtggtggtggtggtggtggtggtcgtggtggtggtggtggtggtggtggtggtggtggtggtggtcatagtagtggtggtggtggtggtggtagtgatggtggtggtcatagtagtggtggtggtggtggtggtagtgatggtggtggtcatagtggtggtggtggtggtggtggtagtgatggtggtggtcatagtagtggtggtggtggtggtggtagggatggtggtggacatagtagtggtggaggtggaggtggtagggatggtggtggacatagtagtggtggaggtggaggtggtagtgatggtggtggtcatagtagtggtggaggtggtggtggtagggatggtggtggacatagtagtggtggaggtggtggtggtagggatggtggtggacatagtagtggtggaggtggtggtggtagggatggtggtggtgggagcagtgatggtggtggtagtagttctggtagtgctggcgatggaaatgcaggctgtggtgatgctgttggcaactgtgatggtgatggcggtgctggtggctgctgtggcagtggtggcagtaatatggtgtagtggttgtggctacactgtgtttaattattaaagccagttggttatcg

SEQ ID NO: 27066 - DNA, 1374 bp, Artificial sequence
  DNA replication origin
gcacgtctgtaattccagctactccagaggctgaggcaggagaatcactgaaacccgggaggtggaggttgccatgggccgagatcgcaccattgcactccagcctgggcaacaagagcgaaactccatctcaaacaaacaaacaaacaaaaaagaacaaaaagggctggacatggatgcaagttttgttcctttccagctttataaaagaggaacaacataagtcccagcctccccatcagatgaaccacactgcgtgataaacgagataatatgtatgtagttataaagaacctgggctatgatggcagacaacctggttttcaaagacttgccctgccacttactagacaagtgacactggtcaggttaacctttctaggcctcagttgtctcatctgtaaaacaaggctaataatagtatctggtttagaggattgctgtgaggattacgttgtaaatgcgggtgaagcactgagaatggtgtctggccataataagcacacagtaaacattagctcttgttattacaaagaatgtaaataagagttgaagactataaagcactccgcacatttcattagcaatggggtcaccattcgtagacaagtctcagctcagctttgcagcttaccgtcacagaggcagggaacagagctagcttgtcaagggtcttctcaggaggaagtggggaggtagcccatgaagcaaagtgatggggagggaaagagggggacataaagatcctgcagagaagttggctccgagtgataggagggtgtggggaagaaagaagggggcagtaaggattctcattataggactggccgggaatggtgtgaccactgattcaggaagtggggaagacgggaagagacttcaagtgtggggggagccaattcagataggaggtggcctagacaaggtgagggcatctcaaagcgacaccaagcctgggtgagatcacgtctggagccacagaaggatgaagcagtttatatttaaatgccatggcaaaacaacatccccaccattacaccctccattctcattcaagttcttcgggagaaaggaaaaatatggtcgggttcattgctattcagttttgaagttgagcctgcatttggacacaggcgcttgggagagtgggtcattttctttgacacaattattaaggaaaccgttttaaatgattccttgagtcccccaatggcccaggtggaaggtgctgtttcctggtacctgtccagccctctgagcttttctctcagcttccaaacgctgcagttgagaactagcagatcctattggtagtgccctgtggcccacactccttggtaacggtgagagtggggagtaattaggagcggctgc

SEQ ID NO: 27067 - DNA, 817 bp, Artificial sequence
  DNA replication origin
gccaatcacaggggctcgtcgcgccgcccgccgccgccgctgcctcgcctcccgcggccgcccgccgctgccatcgcccggttccccttgcccgccggccgcgcctgctctcaccccctcagccccagccccaaggcctgggcctgggccgccgctgcgcgccctcgccgagccgctcctcgctgccggtgcgcccccggggaggcacgggaggcgggcttgggatgcggagggcggcccggcggccgaggctgggagggtccggctgccgggagaactggggagacccggagtccttgcggagtaaggggggtgcccctgagggcgggaggcggcgcccggcccctaggtggcgctgcggggcacggggccccgcggcggagactggcggctctgcgccgggcgcggagatggggtgcggaggcgcccccgcggggctgggacccggcgctcgggaacccgggtgcccaggcctcagagggcaggctgttcccaggaagggagaatactgagtacccaggaagggcttggcgcgcgctcttctccgcccggggatttctggggacagatgttgtgctctgggtcttggggaggtgccagaggtcagagctgcttgaggcttctgccgcctgccggtttctgccccagctgtccccggccacagggggtgttgaaaaggccccagaccgaaaggacagaaaggggaagttagaggaatacgtcgggagccccacggaccgttagtgccccagcctcggtgtccaggcgctgcaagatcgccgcggccccagcagagggccttctccggcccttcatc

SEQ ID NO: 27068 - DNA, 1762 bp, Artificial sequence
  DNA replication origin
cccggggcggggacagcacgcagcctcgaggcgcgcacccccgcccggcagcggccccgacacccggggcgagcgggaaagcggcagcggcggcggcggcggcggcggcgggggaaggatgcaggggaagaagccgggcggttcgtcgggcggcggccggagcggcgagctgcagggggacgaggcgcagaggaacaagaaaaagaaaaagaaggtgtcctgcttttccaacatcaagatcttcctggtgtccgagtgcgccctgatgctggcgcagggcacggtgggcgcctacctggtgagtccccgagccaactccgccgcgggccccttccccagcccggctctcgagcggccgcctggcccgacgagggggccgcccggcgctgggggcaggcgggcatgacctcggcccggcgtggaggttggcgagtggtgcagaggcggccgccgggggagctgccggccggggctgccagcgagcgggtagcgggcgggaccgttgatgccggtagcagctcgcgcgcgtccggctggggcagggggtgccgggggaggagaggcggcgggcaggtgggcgtgaaactattcctctccccccataagagcggagcgagacggtgagttcagggttctccttggagaggaacgaaaaagcgtcggggttttcaggtgacctgcacatgggaagaaaaaccagttagcatcctgcgtcctctactctccattgcatcctcctcgagaacaaatctattatgcatcattttctccgggcgctttctacatccgccaattacagggggatataacagcttagagtgaaatgcgccctagtgtggccctggcctgagccggggctgcagggggaatattgccacccggtatccctatagccctctttgagcgtctgggataaagttacggtacctagagagcagctgcgagtttgtgtagttcctgctatccactcttagtgctaaattccccatcgtggtctgtcgcctacagaaggttgcaccattttccacaatgaatatgtattttatttgcctccagaaaggggatgttaatgctcagagggcccatgggtgcgtaacatttcagaggaaacagcttgtaatgactcagcactgtcaggtacctactttgtcgctttcgcctcctctgctcaggtggtcgcaacttgagttccagagagcgtgcttccacacctaagtacagtcctgtctaaacgggaaattttttttgagagtttatagtgttaaatcattacttggctattgacccgcaactggaatcaaatgtcatagactttgagtattcctgagcaagtttgatggagatagaattggacaagattttggccattgaataaccacatccagagatagaaccacgcgtatcctgatgctatgattaatccctcattcctggccttggggtaaagttcatgagggccagacgctgggggctgtataccattcataaactatctcttaaggctcagggctcactgttaaagggaaatacaagcagtgcttggtctccggtgttgaggaagttaggtggttgtgagagagggggtcttcaaactcagctctgttcctggggtgacagaatttcagggcttttgaaaatcaaatacatttctgttgctcattctgagacgaaaagcgtttacatcccggtctctgtcttgtgcattcgtaacttgtagactgcaagtgaaccctgtagtcaaaagcataccttgttttctgtt

SEQ ID NO: 27069 - DNA, 944 bp, Artificial sequence
  DNA replication origin
ctggcatgtgttcgttcagcccgagcttccacagcacaccacatgctagcttaagagctgtgcatacagcagcaaacaaaatagagaaaaatcccttcccactcagatcacatattccagtgagggagagagacagtaaacaatataactaagaagagtaggtggtggctcgctggtggcaaaaaagacggggataggagtgttgggagtcgtacagttttagtgtcagaggggcaggtctcactgaggttttggcatgtgtgtaaagacatcaagggagtgagggacaagccgggaggttatctggaggaaaaacattccagacagaccagtgagggctgaggcttattagggctggagcaggctggcgttgatgagctgggagcaggcgcatgggtgggacccagtgagggagggggaggagcagaatgaatgggggcgccatggcagatcacgtggagtcctggtgaccattgggctgatcttggcttttatgcagaaggacctgggaagccattgcagggtgctgagcagagaagcgacatggtctgacaactcctgggtgctctgtggagagtggactgtggaggagtgaggaggaaagtgggggctgtatgcagggatccaggagagggatcctggagacttggggccggggatagcacagatgcctcctaaaggaagcactgacagaatgttcagatggattcgatgtagagaaggggaagaggccagaagtccagcatgacctgagtaactggctaggtgaggctgccaatggatggggatggctcagagagagcaggctggggtggggtgtttggatgcgctatgctggagatactgctggaacatccaagtggagacgatgagtgtgcctggaagtcgggggaatgtgagtttatgagtcatcggggtagagatggtacttaacactgcgaggc

SEQ ID NO: 27070 - DNA, 1278 bp, Artificial sequence
  DNA replication origin
gccctggctcccagggtcaacaagggcagcagcccccggcttggaagcctccctcctgcccctccttacacacgaaggggcagaagggctctgggcacaagcagtactttggtagaaaatcagaaggccctcttacatccccgggggcgccatgaagggacttggctgctgccagcccctcgccaaactcctctgagtggtccaggggataaggccgacacgcccctcccattcactggggtgtggtttccagcacttaggacattccatgtagcttctccaacaggactcctcctccccacactcaaacccaaaggaccctttcataaaccagatgatcatttctggaaagttacatttcttaatttcaggaattgttccaattcgtgcaaagaaaataaaaggtaattatctaattccagtaaaacttaatggggcccttcccacccctggccaatggttggtgtgaaatgtaatttgacttaaactgtctaaggctgtgaaagtgtacaatattcggaagggtggggggcattaccccttgtgggagccatatttttctagaaggcattttgatcaagacaggcctcccgcggttattgatcttagggtcattgagagtccaagaactggggagatgaaggccacccggcgtcagcaccgcgagggcggagggaaggcgggcgctgagtctcccattggggttctagccgagggttccagccaggactgcgtgatctgggggcagctcggagagctctcccgacccagtatcgggtctataaatggagataaagatcagcacctggagggagtggtttctcgagggctgagagcctcgcccacaaactgtagtcagcatcttcactgaagttggcctgtcttggatatttcttctctcctccccttcccccacctcccctcctaattcatcaactgctgaaacatctgcctggctgaaaccgccttctcgccgcgcgctgggggctgtccccaggtgttggtctttgtgtcgagaaaactttgcgaggaggcgagggagctggacaaagagcgggcgagggagggcgtttgccagcctgaggggtgcgccgggcggtgcgcgcacttccctgggctcagctccgtacccggtcgctcgcggtggccagagcccagtctctctaggccaggagtggcgtccggctgcatccccgcgccctcgggagctgaataaagccaggcgggagaagcaaaggctagcgcctggacgctggagttggtgggaggaggcgagca

SEQ ID NO: 27071 - DNA, 880 bp, Artificial sequence
  DNA replication origin
gaggctccggcgtccgccgctgcgccctccggcccctgctcctcgcgccggcccgcgtgggtcccggcgggcgcgaacccaccatgcagctgcagttccggagctggatgctggccgcgctcacgctgctcgtggtcttcctcatcttcgcagacatctcagagatcgaagaagaaatcgggtaaatagctgctcccaggcccgtgccacgagccctggcgggatctctccctccttctgtactctccaccctccgaccccctttgtgtgcgccgcgccccgctgtagctccgctggagagatggggacggtttggcagaaggtggcggcgacaggggcccgggacggtttggggagaggagggtgggggcgcggctgctgtggggtgtccccgggcggggttcacgggaagcccccagctggcccgcgtcgggaagcggactcgcccaccctgcccccctgcctggcgtgtccaagcgcagtgtcgccggggtcgagggagggcgccggggagtgtctcgggcgggcggaggggccgagagtggagggaggcaggagtttctttgtctccagcacggccgctttctcgccttggcaaagtgggcagggggcgcgcagggatctctgagctgggggaggggttcctggggccggagcggagggcggggttctgcatgggctactgggaagcggaatgtcccctgcacacacagacaggcacacgcgcctcccgccggcccgggagcccggcgtaggagctggcaccactagagaagggctcgcatagctggactgagaccccccgccctcgcctggctttggacgttcagccaagccacggcaaccccggcgaccctgggttcctgtgcgctcgcagcgc

SEQ ID NO: 27072 - DNA, 1168 bp, Artificial sequence
  DNA replication origin
ccggagcggagggcggggttctgcatgggctactgggaagcggaatgtcccctgcacacacagacaggcacacgcgcctcccgccggcccgggagcccggcgtaggagctggcaccactagagaagggctcgcatagctggactgagaccccccgccctcgcctggctttggacgttcagccaagccacggcaaccccggcgaccctgggttcctgtgcgctcgcagcgcggagacggagacatttcgggaaagtctgtaccgccgcccggtgggcttctgggccctcaggcgggcgatctggcgctttttttctcccgacctcgccagaggtagggtgggaccgcgagcccggatcctcccggctccggacttcctggagtgcgcacttgaggcgcgggacgcaccggctgtgtgtcccaggggctgagactcgcgccccgccccgcagccttcggctcgccgggccgggcccctctccggaacctccaaagggcggtagacgacaggtggggaggcagccggggttctgaggaggcccgaggagagcttcctggccctgggcaaggggaaggtgaggtctcaaagagggcagaaggtctcttcttctgtgggatttgtgctctgccaggcgctcttctcgagtcccgcgccgcgtgcgcccctcctttgtcccatttgttacttcatttgttatctgtgctagttgagggtccgccacactgtcagtccctcaaatgggagatgccagtcctgggcccaggcgggatgccgaggccccaaggacaaaaacttgtgacaagtgccgcttcctgctctcattttctccctgcccctgcccatctccctggaattccttctgtgaactccgctgggcttccagaacccctctccctgcctctttctcctctcattctcggtttccccaagagctctgaaaactttcacaaatgctgcgcagttaatacacaacgtgccaccaattcccacgcagagataaacatgctacttttcatagctgctcgcctcagaaacgtggattggaaaggaaatcgggcaagtcacgtcttggggtaatggaagatgcggtgaggagggccttcctctaggctctccggcttctgattccggatgtgggcactgcccggctcagatcacttgctgacctt

SEQ ID NO: 27073 - DNA, 1141 bp, Artificial sequence
  DNA replication origin
ttatatttgatgaaaaagagcctaaacgcttctgatttgggataaggaaaaaggaacattaaccttgacaatgcctttagctccagccacctttttaagaggaaattgctgggcaggtggggaagggccagtcacggaacaaaactgtaagctggactgggtgtgaggaggggaggtgataaaaggattatggggtggaggagcagaggctgaggaagaattgggacctagcttggcctggcgaggagcggggaggtcagatgggtctgtagaaaaggaagattagaaagactcagcaacacttggggttgggactgaggggacagttgggagggaaggaagatttgggacgagttgcattgggaacagagactgggggggaccgatgtgtaaaagaatgcctggacgtcaggcacctcagaccatttgcccattttacgacaagaattatttagatcttgtaggatggaaaaattgaaagtgccattttctggctatttggaaccactgtcgagtttgtattggggtcaagtggcattgcagaataaaataaggcatttaggttttaggtcaggtgtgagttgaagaggttttaggtttttaagaacacaggctaagggagaagaagggggaatggagggtggaaggttgcccatagtgaaggaggcaagcccagagaaaagagagagtagagacacagagggaaggggtttgggggttcttactttccagaaaagcgggaaaaggatcggggcatggaaataagggatcagggcacagagataagaggtcggggcacagaaataagggatggggtacagagataagaggtcggggtgcagaaataagggattggggcacagagataagagattggggtgtggaaataagggatggggtgcagagataagaggttggggcatggaaacaagggattggggcatagagataagaggttggggtacagaaataagggattgggggttcttgcccccagaaaagcagagaaggggtagagacatggagagaaggggttggggggttcttgccccctagaaaagcggtacttgccgctaagggtgaaggagaaagggttggggggttcttgccctcagaaaagtggagaagggttagagacagg

SEQ ID NO: 27074 - DNA, 1565 bp, Artificial sequence
  DNA replication origin
cgggacctcagctactagaggggcaaaggaacatctatgaacagctcccaccgggcctgccatgctttcagacgcaagaaatagctccactgcctgggccaacgttctgctggctcctcctttgatagtagcagtcaggtcttgtgctgagagctgggcctacagggatttattatccagaacggctgctctagaggggcgggtagttgatttggagaaaaagcacacatgcatttgtcacctcagtgtaacagggctctgttctggcagtgacaggatcacagaggagggctccccatccagggcccctgtccttgggaaggttttggagcatggagagcctgagctgaatcctgatgaagaaagcgcttaagtcatgccaagagtgggatgtgggggaatccaggggtggggtgggtatggggaccccagcgtggggaaggcactgacgtgtgacatagcaagggtgaggacactgggggaactgagtattgaggaaaccagtggatggtaggattgcagaaggaatgatgggcaagggatgacaggcttgttgggcctggattttattctgtgaattcttctgggaagaaggacagccagagggccagatgggcattttggatggagcttgctggctgcagtgtgcaggggacagacagacctaagtgaagtcaagagttggggcacaagaggtggccactgcaatgaatgaggcaggagatgaaaagccccagtgagggtgggagaggggcaggagggctagtggggaggagggaaggggttgcaggttctgggtggccttgggtagatgccaccaactaaaaaaggaacagagttgggagatagggatgttgatgacattcggtctctgtggcctcaagggagatggaagtggaggtgtccattgctcctggccaggctgggcggttgggtatcaacattcacaggcttcctaaaccagagtcaatgagatagcgccggaagggtgaggggaacagtaggcagggacatattcctaaggatagattataaggggcaggtggagaagcaagacaggggcagaggaggctggggctggagggctggggagtgtgatgctgctgaagaagagggctgtccctcacaggctttgggggtcttcacccactctctcctctcccaccagtctatgaacgggttgctgaggggagtgaccagtcttaagggctaacactatgtttgacatacgcttggtgctgaattaatgttagtgaaatccactgaacacaaatgtggcacagaggccagtgagaggaggactggaaacattggtggctttggcaatggtcagggggatggtgtgctatttggtagacgagtttgggggacaggagaagcgggggtggaagctagacttcagcaggctgaggaggcagttttttgggtggagttgggtgggggtgatgaggaagtggaagagagtgagtgtctccattcctcataagagtttgtctgagacaggaaagagagaaagtgccgagctcacattttgcgactagagcatttgaaatttgttactcctc

SEQ ID NO: 27075 - DNA, 755 bp, Artificial sequence
  DNA replication origin
gcaaaatcctgaatcaaagatgatgcaaatgatgctgggaggagattggagggctggggagccctggagagaagcaggcggggcttggggtatgtcagctggtagggaaatctgccagaaaagccctttgggaagagaggcaggaggatctcttgacttccacgctgcttttctagagtgcaaatttcctctgtcctctcaagtgttcagaagtgccatgccttgttgctttgggctaagagaggtctctgtgtgtctcattggacagtgatatggggcacacgaaaatgctccctcggaggtggcggggtcagccccccgcccggccagccgccccgtccgggaggtgaggggcgcctctgcccggccgcccctactgggaagtgaggagcccctctgcccggccaccacccgtctgggaggtgtgcccaacagctcattgagaacgggccatgatgacaatggtggttttgtggaatacaaaggggggaaaggtggggaaaagattgagaaatcggatggttgccgtgtctgtgtagaaagaggtagacatgggagacttttcattttgttctgtactaagaaaaattcttatcctgttgatctgtgaccttacccccaaccctgtgctctctgaatcatgtgctgtgtccactcagggttaaatggattaagggcggtgcaagatgtgctttgttaaacagatgcttgaaggcagcatgctcgttaagagtcatcaccactccctaacctca

SEQ ID NO: 27076 - DNA, 1068 bp, Artificial sequence
  DNA replication origin
aaccgggtggtgttcccgggccccgggccgggcggtggccgcgactcgcgctcgggttcgggccacggcgcggagacggactcggctctgctggcgcgggcggcgggagcggccaggagcgcgagcagcagcagcggcaggagcggggcgggcagcggcacggcgcgcatagtgcggtgggtcggcacaggatcgggcagggcgcgcgcggctgagctccaggatccgcaccagcacggaggcctgcaccgggggatcctgcggcggaggcggctgcgcggtgcttggcaggaagctgcggcgcccggaagagcccgcgccaccgccgccgccaccaccaacacgttgcaaggagtcattcgacgggccgcggccccacgtgggcggggcaggccacccggcctgggtcccggctgcgctccgctcgcccgcgaccccaattcctcgggacttgagaccccgtggtgaagcagcaactgccacgatgacacttgggctggccctgtgttacacgtttcacgtgttttatttatttcatttaattctacaaccccctttgaagacaggtattctgttacccacatttgatagctgacttggcacccaaagagccagctcacagcaacccacattgtgtcagactaagaatcaaaaactatgggacctagaagtagactcccatcttgcagatcaaaaactgaagccgacagtgaagtggttgcctgatgtcctatgcaacgcataatttcagtatctcccctaatttccctctttctcaaaaggggtttcttatttcatgcgcctctgcttacgaaccggactgggatgtgaatctctgcctctcatacctttgttgtggaacaccagttggtgtggttaatgcccccctgcctggctgaagtttctccggggaataattggcttgctgcctctggtttgtaagctaaatgatgcttaggtggagaaagacaattaaggaagttctagtgggaggcccaaaggtggaaactgatggggacacagagcccctacctgaagtactaggagccattcccagggcttcagggt

SEQ ID NO: 27077 - DNA, 896 bp, Artificial sequence
  DNA replication origin
tctgccccgccgccccgtctgggatgtgaggagcgcctctacccggccgcgacccggtctgggaggtgaggagcgtctctgcccggccgccccgtctgagaagtgaggagaccctccgcctggcagccgccccgtctgagaagtgaggagcccctctgcccggcagccaccccgtctgagaagtgaggagcgtctctgcccggcagccgccccgtccgggaggtgaggggtgcctctgcccggccgcccctactgggaagtgaggagccccccgcccggccagccgccccgtccgggagggaggttggggggtcagccccccgcccggccagccgccccgtccgggagggaggtgggggggtcagccccccacccggccagccgccccgtccgggaggtgaggggcgcctctgcccggccgcccctactgggaagtgaggagcccctctgcccggccaccaccccgtctgggaggtgtgcccaacagctcattgagaacgggccaggatgacaatcgcggctttgtggaatagaaaggggggaaaggtggggaaaagattgagaaatcggatggttgccgtgtctgtgtagaaagaggtagacatgggagacttttcattttgttctgtactaagaaaaattcttctgccttgggatcctgttgatctgtgaccttaccccccaaccctgtggtctctgaaacatgtgctgtgtccactcagggttaaatggattaagggcggtgcaagatgtgctttgttaaacagatgcttgaaggcagcatgctcgttaagagtcatcaccactccctaatctcaagtacccagggacacaaacactgtggaaggccgcagggtcctctgcctaggaaaaccagagacctttgttcacttgtt

SEQ ID NO: 27078 - DNA, 1507 bp, Artificial sequence
  DNA replication origin
atcaacaggatcccaaggcagaagaatttttcttagtacagaacaaaatgaaaagtctcccatgtctacctctttctacacagacacggcaaccatccgatttctcaatcttttccccacctttcccccctttctattccacaaagccgcgattgtcatcctggcccgttctcaatgagctgttgggcacacctcccagacggggtggtggccgggcagaggggctcctcacttcccagtaggggcggccgggcagaggcgcccctcacctcccggacggggcggctggccgggtggggggctgacccccccacctccctcccggacggggcggctggccgggcggggggctgaccccccaacctccctcccggacggggcggctggccgggcggggggctcctcacttcccagtaggggcggccgggcagaggcacccctcacctcccggacggggcggctgccgggcagagacgctcctcacttctcagacggggtggctgccgggcagaggggctcctcacttctcagacggggcggctgccaggcggagggtctcctcacttctcagacggggcggccgggcagagacgctcctcacctcccagaccgggtcgcggccgggtagaggcgctcctcacatcccagacggggcggcggggcagaggcactccccacatgtcagatgatgggcggccgggcagagacgctcctcacttcctagatgggatggcagccgggaagagacgctcctcactttccagactgggcagccaggcggagggtctcctcacttctcagacggggcggccgggcagagacgctcctcacctcccagacggggtcgcggccgggcagaggcgctcctcacatcccagacggggcggcggggcagaggcgctccccacatctcagacgatgggcggccgggcagagacgctcctcacttcccagatgggatggctgccgggaggaggcgctcctcacttcctagatgggatggcggccgggcagagacgctcctcactttccagactgggcagccaggcagaggggctcctcacatcccagacgatgggtggccaggcagagacgctcctcacttcccagacggggtggcggccgggcagaggctgcaatctcggcactttgggaggccaaggcaggcggctgggaggtggaggttgtagcgagctgagatcacgccactgcactccagcctgggcaccattgagcactgagtgaaccagactccgtctgcaatcccggcacctcgggaggccgaggctggcggatcactcgcggttaggagctggagaccagcccggccaacacagcgaaaccccgtctccaccaaaaaaatacgaaaaccagtcaggcgtggcagcacgcgcctgcaatcgcaggcactcggcaggctaaggcaggagaatcaggcagggaggttgcagtgagccgagatggcagcagtacagtgcagcttcggctcggcatcagagggagaccg

SEQ ID NO: 27079 - DNA, 936 bp, Artificial sequence
  DNA replication origin
ctcctcacttcccagacggggtggcggccgggcagaggctgcaatctcggcactttgggaggccaaggcaggcggctgggaggtggaggttgtagcgagctgagatcacgccactgcactccagcctgggcaccattgagcactgagtgaaccagactccgtctgcaatcccggcacctcgggaggccgaggctggcggatcactcgcggttaggagctggagaccagcccggccaacacagcgaaaccccgtctccaccaaaaaaatacgaaaaccagtcaggcgtggcagcacgcgcctgcaatcgcaggcactcggcaggctaaggcaggagaatcaggcagggaggttgcagtgagccgagatggcagcagtacagtgcagcttcggctcggcatcagagggagaccgtggaaacagagggagagggagaccgtggggagagggagacgggagagggagacggagagggagaccgtggggagagggagacggagaccgtggggagagggagacggagaccgtggggagagggagacgggagagggagacggagagggagaccgtggggagacggagaccgggaccatggggagacagagactgagactgtggggagagggagagggagaccgtggggagagggagagcttttttttttttgagacagagtctcgctctgtcgcccaggctggagtgcagtggcacaatctcagctcacggcaatctccacctcctgggttcaagtgattctcctgccacagcctccagagtagctgagattatacgcacacgccaccatgcccgatctcattctgcctttttactagttcagatcttgctatttggcctggctcattcttgccttttgaatagcttcccctgaaagtctccataatagctcccacaatcagaggtcaaaatgttcaataaca

SEQ ID NO: 27080 - DNA, 1322 bp, Artificial sequence
  DNA replication origin
gcccgagcctcccgcccgcgccgggtccagccgccggggcccgggggagcctccgaggcggcaaccgcagcggcgctttcggcgtcgtgggcccggccgccctgggcgcctctgccgcgggctgtgacgccgacgcgcgcggcccgcctcgcctcagccgcggcagccccactcccgcgggcctgctggccgtccgggcgtagctccccgccggccggcgggcctcgcggccgcggcggaacgcctgacagctcggggtgctgctgcctctccggccatcttgtgccgtgtgtgtggtgtctctctcccgtctcctctctaggctttactccctcctcctcctccccccgccccacacaccacacaacatggcctcttcgctgcggcggcagcggctgcggcggcggcaggagctccgccgcgctccagcccgctcccctcccccaccatccccgcctcccgcccgcaggcccgggggccaacgcgcacgcgcgccgccgcccgcccgccgcggccattggctccacgagcttcctgcatcccctatccgggagcggcctcacgcacgttagctggcgtcttcctccctcccaacaacaacttcttccattctattggttaatttcaacaccaccccttccgcctccttcgtgcggataggctggccttagtgccattcactgtccgtaggcgtttctggttttcttgagaagccccgggccacgattggctggtgatggaacctttggggttggagctgagctgttgcttttttccccgcagtgcggacccctccaggctagctggagggttcctggtatggtctaggccaggctagaatggttagtgcagggtcgcacaaatagtggattcgcgtctagaaaaagctctggcttcggtgtttctaggttcagattttgtctttaaaaaaagggaaagaaaaaaatgactgacaggatgatgagcaaacaagatacaggcccacagcccttgggcaagcagccatatcctcaaaatatttgttctaagcacccaggccttccatgaaggtcacacagtcaggaccaatggttttaccatcagcacattccctagccccagtatccgagttgagatgcgatttatttgtggatttgtagactgcctgttgcgcatttacctgagagcctaaaagaatgtctagtgtcttgtgagctgtcgtcatggaaatcaaaaaaaacaattaaaaagaatgtccagtgtcctgaggccttagcgaatcaatctcaataccggttgactggattccaccctgtaggacaatgtttgttagagtagcagtt

SEQ ID NO: 27081 - DNA, 1198 bp, Artificial sequence
  DNA replication origin
gtggagctgcctgccagtcccgcgcggtgcgctcgcattcctcagccctcgggtggtcagtgggactgggcgtcgtggagcagagggtggtgctcgtcggggaggctcgggccgcacaggagcccatggagtgggtgggaggctcaggcatggtgggctgcaggtcccgagccttgccccacgggaaggcagctaaggcccggcgagaaatcgagcgcagcgccggtgggccggcacggctgggggaccgagtacaccctccgcagccactggcctgggtgctaagtccctcattgcccggggccagcagagctggctggctgctccgagtgcggggcccgccaagcccacgcccacccggaactccagctggcctgcaagtgccgcacgcagcccaggttcccgcttgcgcctctccctccacacctccctgcaagctgagggagtgggctccagccttggccagcccagaaaggggctcccacagtgcagggggtgctgaagggctcctcaaatgccgccaaagtgagagcccaggcaggggaggtgctgagagcaagcgagggctctgagggctgccagcacgctgtcacctctcacctgcacctgtggaggcaggaagcggagctagagaggaacagaacctgggttttccgagggagcctcgttcaggtgggggcgccaggggctctgacggcatctgtgggatgcctggggaagacaccagcaggcatggagatgggaacagcagagccagagatggccggaattgattcttgaagaccaccaggtgctcagcgggcagatggaggtgatggaggaggaagaaagggaccatgccctagaggcggagctggcctcctccacctgaggccgagagcagctggggctggttgcagtgaggggactcaagaaggttcgagtggccagcaggggcaggtcacagagggccccagacccaaaccagggcgcttggacattaaggtgaaggtcaccgagaacagccggtgatgccaggggggccttgtggctcagaagggtccctacagttgcccctcccaggtgggaggaaggagaggctggactgcagagcaggaccccctgtgcgtccccgcacaagggctggaagtagggatgaaggaggctggggacggggcagcctgtcccctcgcgtcccctgctcttggagggcagtgag

SEQ ID NO: 27082 - DNA, 1073 bp, Artificial sequence
  DNA replication origin
gcacagattttggataaatatgtcattaaatatgccatgtggtgccaggctcggtggctcacacctgtaatcccagcactttgggaggccgaggcgggtggatcacttgaggtcaggagtttaagaccagcctggccaacctgtctctaccaaaaatataaaaaaccgggcggcggcgggggccggtactggacccggcaggatgagcgaggtggaggcggcggcggtggtgacggcagtccccacggcgacgatgcccggggtggtagcggtggtggtaccagtgcccgcagggaagccccagaaagcaggtggcggggagggcggtggcaggggcggagtcgcctcgggccccgctgctgggatgggacccccttggtgcctggcccccgcacccgtggcaacccggcggcagccctggcaacgacggcggccttggaaacccccgccccccgtttcccccacctggagtcacgcgaacaagctggtgctgctggcactccgagtcctgggcactgtcaaatggttcaacgtccggaatggttacggattcatccacaggaatgacgccaaggaagatgtctttgttcaccagacagctattaaaagaagcccaggaagtttctgcgcagcgttggagatgaggagactgtggaatttgatgtcgtggaaggagagaagggtgcagaagccgctaatgtaactgggcccggggaggtgcccgtgaagggcagctgttatgcccccaacctacgtaagtttcgccgattcatcccccggcctccctcagttgccccaccacccatggtggcagagatcccttcagcggggacagaacctggcagagaaggggaacgggccaaagactccgcgcagcggcccagacgacggcgccccccacccttcttctaccgacggtggtttgtgcgagtccctcggccccccagccagcaacagcctacagagagcactgacggggtagagcccaaagagccccattggaggggcagcaacagcagggaggtgagcgggttcccctacctcaattctggcccagaccaccccagccagcc

SEQ ID NO: 27083 - DNA, 1789 bp, Artificial sequence
  DNA replication origin
tgaaagcatgtccatttcttaatttgcaccctaaacacacttcacggcttcatttaaatctgagcactctgtgtattccaactgcctatgcagggttctaacttaaccaagtacttaacgagtagcattaatattcgttgtcttctccacgggtgcctgcactcatcaaggtaaatagttaccggctacctccacggcccttgattgagctgagaattgtctgtccttatctagacagtggattgtttgtcccccaccatgggaaaaccctgctggttactttccaaaggcctcattttaaaaagacacgtttccacttacagaccttttaaaaatgccaggcaatttggaagaacagtaagaaatctactatctgcgtgacagtcattcagagattcttgtagtgtgccaggcaccatattaagtgctaggaatgcaatgatgactccaaggagtcctggttcctgccctcatgatgcttatggtacggtgggagaggccaacatgtagggaaaggtcactctaatgagcgcctaattaccgagtgagctcagtgttaggaaggaaaggcacggatgtgaggactccctagagggtggggaagatgttggagctgagctatgaaagatgaagaaattggttattcactgaatgtcagggcacagaatgtcagggcaggaagaccacacacacacacacacacacacacacacacacacacacacacaccctactattcatagatgaggaaactgaggcccagcagagctagatgacttgccgaaggtcagagctaattctagaaacccatccccaatcccttcctgctaaaccacttaattttatttatatcccagctatagattatacaaatacacttgacaaataaaacggagaatattgagttaaaaccacatctctgaagaccacacgcataaataacgatcgtgttttaatgcggacgataccttttcattttgcaaatccagagttctcatcatatcaaaattcaagacagtttgttctgtaagaaggggaaggtcataaccctgtctagaatgtactggcaaatctctctaaccgtgcagtgctaatttgggcctgagctgtgtaaccagaccgacttcacgctccagctggggtttcagatccacacatggcgattgggtggctctttgctgtttcacagcaagggtccttccctgggctcccggagcctctggggatttactgctcccgacgtggccgtgttcaagccactgtgtgcatgcgcttaatgttgaaaacattcttttgaaaagcccaggagattccactcgcaatctgtgcgtgtgcatgtaaaagcgcagagactggaaagaaccgcggcagagcacaccctgaccgaaggttaccgcgggggagccgcggccgtgggagagccgcggccgtgggagggagtgcgatacggtcttttcactctagacactcctgagttatgtacaattctacgcaagaatgtatgcgtgtgttagcatgtaatacatatgtattagttttttcaggaagattcttaaacaacaacaaaatctctatagaacaaaggtgcgtctccgcagagcgcaacagcatttgtcttggatgtaaccgccttctccagaaatctcagaggaactcccctcgaccaccgcctaactgaaggacaccgtgcgctccaccgcaaccctgcgggcgattcggaaagttggaggcgccccggggagtcgccgcacttgccgcccgcgccccctaacctgagcattcaaggagt

SEQ ID NO: 27084 - DNA, 1310 bp, Artificial sequence
  DNA replication origin
gtgctttacatgaattacttcatttaatccccacggcaaccctatgagggagatttcacatgctcccctattgtactaatgaagaaatggctcccagagaggaaattgcttgtccagctcctcccagccagcgagcagcagggtgggatttgatcttaagtctgactggccaccagctggcccatgaagccctgcactaggatataccgtgttttctatgctttattgactgattttgatcatttgcttttggtatgaacagatacaggtgacagtgcatgtgtgaattcattcattcattcattcattcattcattcattcattcttcaccagatgggacccaacgctgtgcttgctgccaagctcactgggaccccagttgagtaacacccgcccccatccccagggagccgaaggtctggttctctgcggaatcgagcttctgctgaaggcttgttctcggtagcacccagcctctttgatcctgtggggtctgggaggggcggggtgagggagcacccagttgcactacacagacggtggcaggatgttcatctgtacaggtgctcatgaaacattggttgattgctttaccttccaccttcaaccagagctcccaggccaggatgctaacctcaggatcaaggggaggaacaaaagccacatgtcagcattcatttatctgctgatccttggtgttagacattgcacttcgtctcatttaatctgcacattgacaactgggatatgtgggcttcaaatgtgtggctcaggaataagattactgggcaaaacggtgggcaggaataccctctgctcagcctgggctcagtgaggcattcagtgcaggctgctgaatctgcgatgagctttcgacctctttctctgacttccatttgcttctgtgcaggattgagcccaaaagaattgaactggtggatgtggcagaacctctgcctgcagatgtagggagctgcgtgaccagggtttgcaaagggcagaggcaggtgccaggagatgcctttgcaggtctgcactgagggcactcgctgggctgctccagtgacttcaggcttccctttgcctgaaagcctcagtagcgagtgatgctccatcagcttccaagttgcagcctatgcttcagctcactcccacactgggcccaaggaggggcagcagccaggctagatctcagggctaagcagggctgagctgctcatcaacacggcccatgcagtggtctttctctctcttccacccttcagcccttccttctcttgctgattcccttcttccctccttccctctc

SEQ ID NO: 27085 - DNA, 1006 bp, Artificial sequence
  DNA replication origin
gggaagactcgcagagacatactgcgtctttaggtgtaatggtcgtgaggcagcagggatacttggtcctgtggtctggggaagatgctgggatggaattgatgctgaatcttttggaaggagtcctgtcaggtatagttttctcctgttctgctggtcaaagagttgtgacaatagaagctgcaggctcagctgttctctgtcttgtgccaatgaaaactctcagagcaatgacagctgtagggaaatgtggccagagctagggaagagagaaagcgaggaatcaataaagataaaggataatctaaaagcagagtcgtgcctgccttcgtgccaaaacaaaacatatattaccatttaacatatgtgccctgactcacctgaattcctgtgacttctcagggcagatagtttcgtctgctttgttcatctctgtgccctcagcacccagtacagtccttggcaccaagttggagcatggtacttatttttagtggtgaagctggtggtagtggtggaagtggtagaggacaggaaagaggcagaggaggtcgtggtggagatggaggtagaggtggcagtgatggagacagagatggaggtgaaggaggcggtggtggtaggagtgaaggtggtagtggcggtgatgtggtgaatgtggtaaaggtggtagaggtgaaggtggaggaggaggaggtagggtgctggtggtggtggtggtgatggtgaaggtggtggtggaggtggagatggtggagatggaggtagtagtgattgtggaagtagagggggtggtggtcgtgatgacagtggaggcggaggaggtggagaaggtggtggaggtggaggtgattatggagctggaggtgaaagtggaggtggaggtagtggtggtggtggttgaagtggaggtggtggtggtagtggagacggaggtgatggtggaggtggaggtggatatgctgaggacttctttagatgaagttgttttttacaggagtgcggt

SEQ ID NO: 27086 - DNA, 1500 bp, Artificial sequence
  DNA replication origin
agaaagagtgagggctgaggtttcgggaatgaagcttaaagaagatttttcctttcctaaaaaccagcccctatctgcccagatctttagtccttacctcatattctgcctatgtgtgtaaagagaattgaatgtaaaatgtgatctatgcatgtcaattatatgtatggtttatttttaaaatatctttaccctgtcaatttttttttcagctaccaaggatgttttctgtggtcatcaatttactcttcatatgtgttcatttctttcctggagctcagcgtcttttgtgtaaaatattttaattgttcacaaacctggttggtttaccggcatgaggttttttcttggtgcaaagtgtgtacaaaggagacacaattttcttgtataaatgtggaataatgataattcactaactggtcataaacaacaagtttactgcgttggaatatagtgtgttctgagagcaattctacatgtttgatgtttaaaaccagacaccctggaattcaaagacacaactgtctcaattattttagcacatggagcagaatggcaataggctatgaagttgttctttttgcagtgacttcttgaggtagaatatggcttgggtttggttcttgtgacctgtactagtattatttcccatttggggcagaatctctgggtgcgttttaatgactatatgaatgcttaaaaggaacttgaggaacaatgaagtccgtactcaactgttctatgacctagaagcatagtcggtgaagtctttgtctgtgtacattgacaaatgtgcatctgatacatgtgcgcttacatgtgtgtacagagggtgtgcacaggggaggctgggcggctgcctcctcctgtccatcagtgggcagaggtctttcccctctcaccatgactgggtgtgtggcaggatgttggctggagagttagctaaaaccagcgagagagggtaaagttgaggaaaattgattctaattgcatcatgacaatcagatgaagtctatttctgcttctcagcatccgagatgctttatttgggcaattaaaatgtcaggccacatacctgtgaaatgttaaccctacaaggaataaacagaaacagaacggcctttatcctctgaaaagaatatatgtcatatatatatgtcaccaaaccgaacaagtgatcagagttaattaagagaagggtttgccatcacccggatctggccaactctttcgtttggaaaatgcctacaagctcagttcgtggcaccttcccaccctcactccctatccctctgcaaagaaaccagggaacttttctttggcattgtgggtactaagatgcgccaggagtcccgggtggtgcgcgagcggcggaattcgtgacatcgccaagttgcgagaggcaaactccccgattccatccaaagcctctcgcggagcctttaagagacgttgtgtgtgcgcgctgcgctagtctccccgccggggcggaaacctcgg

SEQ ID NO: 27087 - DNA, 839 bp, Artificial sequence
  DNA replication origin
aagtccagggcagcccacagtcagccattcaggaaagccatcgaaatcaggaggactaggagatcggaggcgccgggtgcgggcgcgcccagggagccaggcaggccggggcggaggccggcggcccgcggagtggccggagcgctgcccgggtccgggggaatcagcatgaaagtggtccgcgtcgggcgctgcgcggcgtcgtcctggcgctgggccgccgccgccgccgcctgccccgggcgtccggcgcgcgcctcgctctctccggccgccgccgcccgcagtcgctgggtggaggccgctcgccgttccctgcgggccgcccgggccgccgctgccgccggagccgccgccgaagccgccgggtcgggcccggagccgctgcgtctagcgccgccgccgccgctgaagtcgctgctgccgctgctgccgccgccggagccgctgctgctgctgctgccgccgccgcctcacacacatagggaaagagtcaactcgccggcggcgggggagaaatgataaaagagagagaggagggcagatcaccacctagaagcacatccttcgtgcgcagaggggggagaaaaagacggagagaaagaatgaaagaggggaaaaaaggcagtacggcacccggagaaaggaggcaactcggggagaggaggaggagaagaagaaaacacacacgcgcgcacgcacacacacaccgcggagagaaaagaacagagaatcaaagtgatcaaatatgctaaaaaggggggcgcgggagggaatgcgatttataggcgccggggctggcagaagtggcttctccgcgatcagctcactgagctctc

SEQ ID NO: 27088 - DNA, 866 bp, Artificial sequence
  DNA replication origin
gttccggttggcgcggcacgtgtagctcaggttcctccgcacgctgcgcttgaagaagctcttgcagccctcgcacgtgaactggccgtagtgcttgccgctcgacttgtctccgcacaccacgcactcgatgtgttgctgctgctgctgcttgtcgctacccgggccgccagggccgccctggccaccggccgccgtctgggctggcgtgctggctgggcccccttggccgggcgtctgtggcgtgtgcggggcgccgggcggcgggccgggcacgggcggcgcctgcgaggcctggctgccctgtgagccgggcacctcgtcctgggggtcgcgccacgtgctgactaccattgccatatctatgggggctgcgtccggacttcctgctcccctggctgcgggcggcggcggggcggcggcggctccccgggtctcgggctccggcgcgccgccttttgtgtgtgcgagggtgcaagagggcgcgggagggcgccccgggtggctcgggggctggttggttgaggttggttagtttttccttttttgtttttgcttttgcaaagttttgtcgatggcttgtctggcccggtgtgtttgttttgtttgtttctctcggctcagctttgttggtttcggggggctttccgccgggaggggaggggaaggggacaggagagcgagtgggagcagaacgtggagaaagagggaggggagggagagctgaagtcgattgtctggcttcaagacagaagtaggaggcaaaaaaaaaaatctctccaaagatctcgctcgctctcactctctccctccctctctcgttcactctcgctcttagagctggtgtgcagccgaggagttggcgg

SEQ ID NO: 27089 - DNA, 1101 bp, Artificial sequence
  DNA replication origin
cggaaagccccccgaaaccaacaaagctgagccgagagaaacaaacaaaacaaacacaccgggccagacaagccatcgacaaaactttgcaaaagcaaaaacaaaaaaggaaaaactaaccaacctcaaccaaccagcccccgagccacccggggcgccctcccgcgccctcttgcaccctcgcacacacaaaaggcggcgcgccggagcccgagacccggggagccgccgccgccccgccgccgcccgcagccaggggagcaggaagtccggacgcagcccccatagatatggcaatggtagtcagcacgtggcgcgacccccaggacgaggtgcccggctcacagggcagccaggcctcgcaggcgccgcccgtgcccggcccgccgcccggcgccccgcacacgccacagacgcccggccaagggggcccagccagcacgccagcccagacggcggccggtggccagggcggccctggcggcccgggtagcgacaagcagcagcagcagcaacacatcgagtgcgtggtgtgcggagacaagtcgagcggcaagcactacggccagttcacgtgcgagggctgcaagagcttcttcaagcgcagcgtgcggaggaacctgagctacacgtgccgcgccaaccggaactgtcccatcgaccagcaccatcgcaaccagtgccagtactgccgcctcaaaaagtgcctcaaagtgggcatgagacgggaaggtatcggcctctcatttctccttccctcgtcctgggtcccggggtcctgggtacgtttggctagcctgctctgggtaaggacaagaagccccaagctcttctcttcgtattgcagcggaaaagggttttatactagaagcgagttctgcattggaacccagaccccaaatccgcatgctttggccgactgatttccttctttactctctctttgggctgtttccatttcctttgcattgattgtgagttcactggagtctgcctttctgcaagggatggggtgtttgttgttgttgttttaaagcctagtttacttctctctctctgcccttgtttttcctgcatgttcaacatgtccctccccctcac

SEQ ID NO: 27090 - DNA, 965 bp, Artificial sequence
  DNA replication origin
ctttagccggcctctctctctccgccctctccctccgtctctttctccgagcacactgattagacagacgccagacctccgctctctgcttgtctctcactgggggggttccccgccgggctggggctggggcttcggggtttgtgggagagtcgttccggagtggccacaggccgtctggggtggaccctcgtgccttttgcaaaagcgcctcaccctccccccagactcgcccctcccgctccctctcctccaatcaataagaaatatcagctgtttagcagtaaagaagaaagatgccctcagaatgctacatcccgcccacagcgccggggaccccgaggcaaggtggccaattctgggtcctcggcggaccagccccgagcgggcctcggaggcaagtgtgcccctctggccctcagagctcgcctgggtggtggtttgaaaggaatggtgccaagagcctggcgactccagctctgtggcaggcctgcctggttcttgcgctgctcagggcctgggtcaggtgggggtcgggctggggcagaccccgccggggaacctggggactgaggctggtcattaactgtggagtgtctcctttcctccccgcagcggtgcagaggggcaggatgccgccgacccagccgacccacgggcagttcgcgctgaccaacggggatcccctcaactgccactcgtacctgtccggatatatttccctgctgttgcgcgcggagccctatcccacgtcgcgcttcggcagccaatgcatgcagcccaacaacatcatgggtatcgagaacatttgcgaactggccgcgaggatgctcttcagcgccgtcgagtgggcccggaacatccccttcttccccgacctgcagatcacggaccaggtggccctgcttcgcctcacctggagcgagctgtttgtgttgaatgcggcgcagtgctccatgcccctc

SEQ ID NO: 27091 - DNA, 774 bp, Artificial sequence
  DNA replication origin
gctcgctcggctcgcggtcgccctgcctcggcctttcaccattagctctccctgggccgcgaggagctggggctcaaagttagcgggcgacgtccgaggcttagcctctagccggctgcagggacgggggcctggagttggcagctgctacgggaaagtgcctgccccccagcccccgcccccacttacgtgcggcagaattccgccagcgccccgggaaagtccggggtgccgggcgcgcggagctgcactcctgggatgtgcattaagcggcgacaggcggggggggcgagggcgggggcggggggcggtcagggggagctcgagcgtgtgaaactctgcctcgaatctcgcttttgacttggtcctatgagctgagccaacatggcgtctcccactgcaccgcgagcgccgggctgccaggctcggcagggccgggtaatagaaaacacattggttaccaaaaagaaaaaaaggagggcggggggcgctaaaggccattccgtctgcaggcagaaaacccttttttaaactcttgctggcaagtgagtccggtcctcggttctttaattaaagcaacagaattcgtaaggaaaatattggtaacgctgtaccttctcccctccccctcccatattcaggagagttgatttcctgtcccctctccttccaagaaccaaattagaaaaataaaaagtctgtatccgcaaatgatcttaaatgtttgaatggtatagggggatgggaagaggacggtctttacagacctcggtc

SEQ ID NO: 27092 - DNA, 1732 bp, Artificial sequence
  DNA replication origin
ggccttttgtctccagacagagagcagcgcctgcttttttccactctcacggggcacggcactgggtcaccagcgagtctcagcctccagcgttagggggatgggaggaagagtcagagaatggagcaaaactctcccgttctggcggcctggagctggaggctagaacaccccgggggggtggggcgtggagggcggcctgagtgccgcgcctggcccctgccctgggtgcgcaccaggccgcgaaagccgggggccgccttctcggctgctgaagcccgggagtcagtcaagcgccctctggcaccgcgagggaggcgcacctcgcctggtgcagagttgccgcgacccgagcgggaggaggcacaggacgcagggctcctggcctggctgtgggcttggccttggcgcactaagcgctccccatctgcccgagcctggcctccgcggccctctcggcccagtctacgttcgtttaaggacttcagcgcgaagaagagcgaacgtggctagaacctgttgacctctcctctggcctggaagtccgcacagctcgtggcaacactggacggactggttgtcaggggacgaccgcgggcaggtggggaggaggccttggtctggctcctggattccaccctgggacggaaggggaagcggaaaccttgacctcagccacacaaggacacctatctggctgtctgcctgccctggcccagccacccggttcagaggcctacccttggccacagtggtttgtcctcaggcttggagtccccagagatgtggacacagtgactggcacatagtaagcgcttaataagtgttagattggcggtgtcaatcatttttaggcacatccggtttcctccgtgagcatctcccctctcacacacatttattccaggccaacaacatgcctagctaggtccttaagcaccgccactcatacccagaggcccatcagctgcctcgctccctctgagccctggagctgcagccctccacccttgacatgcgggagaaagccagaggcccctagagtccccccctcggggtgttttccaggcctgggacacctgagcaggagacacagaggcctgaagaagggttagcaggtccctaatatgccccatccatgtcagcactagaggaggggaattctggttaaataagaatattctggacagggagatggtggttggtcagttaaaaaagagagaatcattcagtaagggatgcatgtgtgggaagagtggggggcacctaggggcaggctgacgcagaagaagcaatagaggctgagtcagagcaccacaatgacacctttttcttccagaaagaattctttagttaagcctttaatcggccttcggtgagcagtgagttgtgggaggtagtgccattaactatacatacaatgttcatgtaaccagattttaatcatttatgatcttaataaataaatatgctgccttctgattctttttactatcaatgatattaatactgttgttgttgtttaaacgagattttagtcccggttcgtccccagagcggctgcaggagtagtgcccaggactattgtgacctgctgtgccgtagctcagacttcagcctgctcgtctcctcttccctcttccccagatcccccaggctgatggatattcttcgaccggggccctttttaaaatgaccaatgtgttatcaatataggctacccatccttatc

SEQ ID NO: 27093 - DNA, 1133 bp, Artificial sequence
  DNA replication origin
cctacgcccaaatctgaggcccgtgggacgggcaaggggcggggagggatggaggtgagagtgggaggtagtaatctggctgccccggtagcgctttcaagccccgaaattcgcttggggttcgttaacacacgcgcttggggtggtcccctccccccgggtacgaacccttcctgctgcagcggcggcccaggcttccgtgacttggggaggcgctggaacccttgtaacctttttggagactttgcgctttcgagagctctttacctgaaactgacacccgcaagcactctccggggtcctgttgggcagatggagtggcagggccaggcggggcctgttggcgagacacggggacatttgtcatgggtgacccggcgcctcggcttctgagcccacgccggcgcggggaagcccgcgctaatgtaataaagcgagagcgacaagaggaaaggcccctcttgccccggggccgccacatgctcactccgttttactgtcagggctggtcgaggctgtggcttcatttcatattccattaatatttacagcagctattgaatttcccattacaaagttcaccatacacactgctaatatgaaattttaatagtattgtgcacattatgaaaagtcccaccattaagaggggcgggggagggtcctagggagaagtggccctgggaagttacccacgactgaacactcaaaactccccgcaagcagctgaatgtattctgcaactattaccataaagatgtgagacagtaggtattttatcaatattgaaatcaaaagcaagtgaggaaatcaagagtgtaaaaagcaggctgactaaattgagtttgcgaagttctgggtgtgtgagacgctttgcccacatgtatagatgtttccgtttttccactttactagtgaacaagcagaagtatacaggttgtgttgggatgtggctgcagtggaggctggagggctgccgggacaggcagatgcgtggcagtggtaaagcccctgccctcttccctcggcatccctctccttccagacctccacccacctccagccttgggccccagaagttcccaaagctccagtcctgaaggtgaccccagggaacaaattctgccaagaac

SEQ ID NO: 27094 - DNA, 1027 bp, Artificial sequence
  DNA replication origin
ctggccttgaaaggctaaccatgggataagaacatttcaaccagaggataaagattcaggatgcaaaaccttaattcatttatgggcagggcaggcaggtggagtgatccaccgtcatggtttgcctggcactgagcgggttcccagctcatggaactgtcagtgctaaaacttgcaaagcctcaggaagactgagatgagttgattattttcagcaaggtgagaataaaaaagaaggtcgcagccagagtggggagtcatggtccccgttcatggacatggggcattgctcttccttgcgggatgtatgaggaaatctgcaggcactcacagaagtcatcttcagacactcatgtgaccaatattctttgagtcttagctcatggcccaggagtgtttagggcgcatcaggtccactaaaaggggcagcctggtggtttaaataaaagggagaaaatccctacatggagcttgcaatctagctgatgaagtaggatgagtgagccctgaactgtttcagcattaaaaagaaacaacactgatccggtttagtgttaatttgtgctttgcacacaattagattttgggccaggggctaattggactgaattgcagcaggagagggggtgctgggatgttaaggatgctcggggtcttggtctcactgacttcaagaatgaagccacggccccttgcagtgagggttacagttcttaaagatggtgtctccgcagtttcttccttctggtgggttcgtggtctcgctgactccaggagtgaagctgcagaccttcacggtgagtgttacagttcataaaggtggtgcgtctggagttgttagttcctcccatctggagttgttctttcctgctggtgggttggtgggttggtgggtttgtaatctcgcgggcttcaggaatgaagctgtagacctttgcagtgagtgttacagctcataaaggtggcacggacccaagttgcaagcagcaccaaaacttactatgaagagcaaaagaacaaagcttcc

SEQ ID NO: 27095 - DNA, 977 bp, Artificial sequence
  DNA replication origin
ctcgtcctcgaacaccagacccaggctcttcacgcggccctcggcacccacggccgccgcgcacccagcctccccgcccatcccgccgggcgactctttcctgcccctgaggtcggcagaggcccggagccggggtcgcgagcacagcggcgccgctgtcacaggcgctcgcggcagggtaaggccgccgcggcagccgtgcggtacccgatggggcaccggctcgccgagaggcctgtcgctttaacaaacccagttgggcctggaaaagggccgggacagcccacccccggcgggcggccattggtcagctgcgagccctgcttcttgctgatttgttgtagatggtcactgagtcatttcattggcgctcccacgcgtgggtgggcgcaggaaggccgtgcgtgatcagggagtgttggccaatcgggaggctccggcgtgcacgtgcacaggccgtttactggctgaggccaggcacagtcctggagccctggccaatagtgaggcggtgcgcccatgtggacagacagtgggaaacagtatctgtcagggagggggcggaacagggttatctccggctctcagcgtgtcagccgttcccatagttacgaacgggggcggggtttctagcagcgtaaggactttgcaggagccactgggttctcgctaaagcatgaagttgtggctgtaactggcttgtgtttatgattacatctgcaatactcgaggggaaatagatgctctgggaaacggaactcggcaatatttccttttgagatcttgggggccggccgcatcgggactttaatgaatgacttggaatcttctaacctccaggtttttgatcaccgcctctcccaggtttcagaattcccagcccatgtaagagccatagataagaaaaatgagggttgtggttttaaacctgatacatcccctaaggagttctcctcctaagctccgcagtgtcgctg

SEQ ID NO: 27096 - DNA, 974 bp, Artificial sequence
  DNA replication origin
ccgcgtgaagagcctgggtctggtgttcgaggacgagcgcaagggctgctattccagcggcgagacagtggccgggcacgtgctgctggaggcgtccgagccggtggccctgcgcgcgctgcgcctggaggcccaggggcgcgccaccgccgcctggggcccgagcacctgcccccgcgcctcggccagcaccgcggccctggctgtcttctcggaggtggagtacctgaacgtgcgcctcagcctgcgggagcccccggccggtaagcgcaggcgagcgcctggggttcccccgccaggctgcggggccggggaggggctgggaggccgcgcaccctcgggatgcccacctggcaggtgagatcagggcgggcttccgggggtggggtccggcctaccctcgcgggtaaggagagaccgcaagtcctgggtgcgcagctcttcctggcgccccgcccctggcccgccgggcctgaccgggaccagtggctcgggattttctaggaccgcgacgggagggggccattgggtgcggtgggaacctgtgattggacaatgggggatccagaaatctaggtcctgttccttctggtccaagaaagggacggtggaaccggcggctatgaggttccattctgcggtgcccgtgtcctatggcctccactcctccctatcctgcatacgttcttggttcatgatgaattagcagaaatttggtttggggaatagggaagtagtttctgaggggtaggagttcaaaggaagtgttttccagacttgatcatcatgcttggtttccctcttctggggagcagggcaacttagtaagagttgtacctctacctgatactgctgctgtttcctccgcatcctcttcctccccatcctcctcctcccctcctacccgcttcttcccctctcccccacttctctccactcaaaatgcctttagagacaagagcatcagggcgtgt

SEQ ID NO: 27097 - DNA, 1705 bp, Artificial sequence
  DNA replication origin
agagtgtgggtgtgtgattatgtgggggactgagtgggtgtgtggtgtgtgtgagactgatgtgtgtggtgtgtgtcatgtatggtgtagggtgtgtgtagtgtacattaggtgtgtgagtggtgtaggtgatgtgtgtgtgtggtggaggatgggtgtggtgtgtgtggtgtatgtatgtgaggtgtgggcgtgtggtatgtatgtgtgtgtggtgtatatggagtgcgtgtatgtatggtatgtggtgtgtggtgtgtgtgtgcggtgtatgtgtgtgtgatgtatgtgtgctgagtgtgtggtgtgtatattgtgcacacattcacatgtgcataatatgtgactcacttatatgtgagtcaggaggacacaggcatggttttcttgcctatatacaccacatacaccatatacctatatacctatacacatgtggtgtatatagaagggaagtgtatgtgctgtgtgtgctgtgcatactgtgggtggtgtagtgatatatgcatatgtggtgtgtgtggagtatattgggtgtgtgatgtgtatggtatatattgggtgtgtgtggcatatgctgtatgtggtatgtgtggtgtgtgtagtgtatatgggtattgtgtgtagcatacatggtgtatgtgatgtatgtgtatgtggcatgtgtggtgtatattgggtgtgtgacatgttatgtatgtgtatgtagtatgtgtgatatgtggtgtgtatggtgtacaatgggtgtgtgtgatatgtgttgtgtatgtaacgtgtgtaggtaacgtgtgtacatggtgtttgtatatgtggtttgtatgtggtgtgtgtagtgtatattaggagtgtgtgtgtcgtgtggtgcatgtgatgtgtgtgtgctgtgtggggtatgtggtgtgtggtatatgtaacatgtgtggtgtatgtgatatgtgtggtgtatattgggtgtgtgtggcatgtgtggtatacgtaatgtgtgtgtatgatgtggcgtacattgggtgtgtgtgtgatgtgtggtgtacgtaacatgtgtggtgtatgcaatgtgtggtatatgtgtagtgtatgtaatgtgtgtatgtgtgtatatgtggtgtgtgtggtgcatattggggtatgcgtggcatgcagtacgtgttacatgtctgatgtatgaggtgtgtgtggtacgtgtgttatatgcaacatgtgtggtgtaggcaatgtgtgattatgtgtgtggcatgtgtggtgtatgcaacgtgtgtggtgtatgcaatgtgtgtgtatgtgatgtgtgtggtatatatttggtgtgtgtgtggtgtgtggtgtatgtaatgtgtggtgtatatgatgtgtgtgtatgtggtgtgtgtggtatacattggatgtgtgtggtgtgtggtgtatgtaatgtgtagtgtatgcaatgtgtatgtatgtggtgggtttggtgtacattgggtgtatgtgtggtgtttgtggtgtgtgtggtgtgtggtgcatgcaacgtgtggtgtatgcaatgtctgtgtatgtggtgtgtgtggtatatataggatgtgtgcatagcatgtgtggtgtatgttacatgtgtggtgtatgtgatgtgtgtgtatgtggtgtgcatggtgtacattgggtatgtgtgtggtgtgtggtgtatgtaacatgtgtggtgtatgtgatgtgtgtgtatggtatgtggtatata

SEQ ID NO: 27098 - DNA, 1556 bp, Artificial sequence
  DNA replication origin
ccttcagccccccgctgcactgtgggagcccctttctgcactggccaaggccggagccggctccctcagcttgcggggaggtgtggagggagaggcgcaggcgggaaccggggctgtgcgtggtgcttgcgggccagcgcgagttccgggtgggcctgggctcggctggcctcgcactcggagcgcccggccggccccgctagccctgggcagtgaggggcttagcacctgggccagcagctgctgtgctcgacttctcgccgggccttagctgccttcccacggggcagggctcgggacctgcagcccgccatgcctgagcctcccccctctctctgtgggctcctgtaccgctggagcctccccgacgagcgccgctccctgctccagggcgcccagtcccatcgaccacccaagggctgaggagtgcaggcccacggcgcgggactggcaggcagctccacctgccgccccggtgcaggatccactgggtgaaaccagctgggctcctgagtctggtggggagttggagaacctttatgtctagctaagggattgtaaatacaccaatcagcaccctgtgtctagctcagggtttccgaatgcaccaatggaactctgtatctagctactctggtggggagttggagaacctttatgtctagctaagggattgtaaatacaccaatcggcactctgtatctagctcaaggtttgtaaacacaccaatcagcaccctgtgtctagctcagggtttgtgaatgcaccaatccacactctgtatctaggtactctggtggggaagtggagaacctttgtgtccagctcagggactgtaaatgcaccaatcagcaccctgtcaaaacggaccaatcagctctctgtaaaacagaccaatcggctgtttgtaagatggaccaatcagcaggatgtgggtggggccaggtaagaataaaagcaggctgccccaggtagtggtggcaacgcgctagggtcacttttgagatcaagaaagctttgttcttttgctgtttataataaaacctgttgctgctcgctcttttgggttctgactgcgtttatgagctgtaacacttaccacaaaggtgtgtaggttcactcctgaagcctgtgagaccacgaatccaccgggaggaacgaacaactccagatgtggtgccttaagagctataacactcactgtgaaggtctgcagctttgctcctgagctagctagaccacgaacccaccagcaggaaaaaactccgaacacatttgagcatcagaaggaacaaactctggacacgccgcctttaagaactgtgatattcactgcgacagtccgcggcttcattcttgaagtcagaccaagaacccaccaattccggacataggaatactagcagggactttctggacattcggctcggagttggttagttgttcaggatggttcaaaggtgagctaaaggcttggctgccagctgtcctggtttgcctgggatggaggggtgtctgggacgggacactagaacgtgctcaaaggggtaccgtcc

SEQ ID NO: 27099 - DNA, 1088 bp, Artificial sequence
  DNA replication origin
actgagccactgcactccagtctggacaacagagggagactgtctcagaaaaattaaaaatataaaaataaaaatagggccaggcgcagtggctcatgcctgtagtcccagcactttgggaggcctaggcgggcagatcacaaggtcaagagatcgaaaccatcctggccaacatggtgaaaacccatctctactaaaaatacaaaaattagctgggcgtggtggtgcgtacctgtagactcagctacttgggaggctgaggcaggagaattgcgtgaacccgggaggcggaggttgccgtgagctgagcttgtgccactgcactccagcctagggacacagcgagactctgtctcaaaaaaaattaataaaaataaagagctttgtgaagatcaggcccccagggaccagctgggatgctgacttggtgaggcacgtgtgggtgggggtgactctggatgtgctggtgtttgcaggagtgagcagccaccattccttccaagttgaccttctggggctcagggtctccagctagtggctctcagggggtgcttcacagctccctgaaaaatggaagttcttactctgggagtggggactgtgtgttcctttgcgggtggctgttgtagatgggtttgcaagccttgtgagggccctgtggtttctgggcgtatagatccctcttccttgctatgagcctgcacccccaagggatacctcacgtgcctcgggccccactcagggaaaacaggtaccagcctcagcttcctccctgctgggttgaaaggcaaggtctgagcctaagccaccagtggcaccttcgtgcccgccactcaagttatttgaagcgaatgaaccacagaagcagaaatgcctgtgatcctgattgtttgttaatggggcacagcagcaagttcgtttccatctggaattattagcaccaccagttgccattctttttttccctcagggaactatttaagacccaggatcaggccagtgcgcattccaggggcaggctaaaagcggcaacaaataggagagaaaaaaataatatagttttacccagtcaccaccacgcaactggg

SEQ ID NO: 27100 - DNA, 978 bp, Artificial sequence
  DNA replication origin
ccagccgcctgccttggcctcccaaagtgccgagatcgcagcctctgcccggccgccaccccgtctgggaagtgaggagcgtctctgcctggccgcccatcgtctgggatgtgaggagcccctctgcctggctgcccagtctggaaagtgaggagcgtctctgcccggccgccatcccatctaggaagtgaggagcgcctcttcccggcagccatcccatctgggaagtgaggagcgtctctgcccggccgcccatcgtctgagatgtggggagcgcctctgtcccgccgccccgtctgggatgtgaggagcgcctctgcccggccgccctgtctgagaagtgaggagaccctccgcccagcatccgccccgtctgagaagtgaggagcccctctgcccggcagccaccccgtctgggagggaggtgggggggtcagccccccgcccggccagccgccccgtccgggaggtgaggggcgcctctgcccggccacccctactaggaagtgaggagcccctctgcccagccaccacctcgtctgggaggtgtgcccaacagctcattgagaacgggccgggatgacaatggcggttttgtggaatagaaaggggggaaaggtggggaaaagattgagaaatcggatggttgccgtgtctgtgtagaaagaagtagacatgggagacttttcattttgttctgtactaagataaattcttctgccttgggatcctgttgatcggtgaccttacccccaaccctgtgctctctgaaacatgtgctgtgtccactcagggttaaatggattaagggcggtgcaagatgtgctttgttaaacagatgcttgaaggcagcatgctcgttaagaatcatcaccactccctaatctcaagtacccagggacacaaacactgcggaaggccgcagggccctctgcctaggaaaaccagagacctttgttcacttgtttgtctgctgac

SEQ ID NO: 27101 - DNA, 1159 bp, Artificial sequence
  DNA replication origin
atgattcttaacgagcatgctgccttcaagcatctgtttaacaaagcacatcttgcaccgcccttaatccatttaaccctgagtggacacagcacatgtttcagagagcacagggttgggggtaaggtcaccgatcaacaggatcccaaggcagaagaatttatcttagtacagaacaaaatgaaaagtctcccatgtctacttctttctacacagacacggcaaccatccgatttctcaatcttttccccacctttcccccctttctattccacaaaaccgccattgtcatcccggcccgttctcaatgagctgttgggcacacctcccagacgaggtggtggctgggcagaggggctcctcacttcctagtaggggtggccgggcagaggcgcccctcacctcccggacggggcggctggccgggcggggggctgacccccccacctccctcccagacggggtggctgccgggcagaggggctcctcacttctcagacggggcggatgctgggcggagggtctcctcacttctcagacagggcggccgggcagaggcgctcctcacatcccagacggggcggcgggacagaggcgctccccacatctcagacgatgggcggccgggcagagacgctcctcacttcccagatgggatggctgccgggaagaggcgctcctcacttcctagatgggatggcggccgggcagagacgctcctcactttccagactgggcagccaggcagaggggctcctcacatcccagacgatgggcggccaggcagagacgctcctcacttcccagacggggtggcggccgggcagaggctgcgatctcggcactttgggaggccaaggcaggcggctgggagatggaggttgtagcgagctgagatcacgccactgcactccagcctgggcaccattgagcactgagtgaaccagactccgtctgcaatcccggcacctcgggaggccaaggctggcggatcactcgcggttaggagctggagaccagcccggccaacacagcgaaaccccgagaaactaacaatttaaaggaagacacagaatggagttaaatcagacccaggctgtgtggtgtgatgtagtaacaacgtccagcagggattggtggagcgcaaagttgagcttgt

SEQ ID NO: 27102 - DNA, 1077 bp, Artificial sequence
  DNA replication origin
ctccatgggggagatgtgggatggggaggcagctgggctaagaaacagaaatcaagacactgagggagaaggaaggctgaagcaatagtgtttgcagttgttgccttccctgattagaacatctatccctccagccaactcccaggacgttttgtgaccaagcatagcactaacccttcaaatggctgctaattgatttacagtttttggtgattgcacagcatgtgcacccggagaaaaacaagcagagaatcaaaaaatgatgattttttcctggaaaagcatgcccgttatagcctacagggacagcaggggccaaggcaaacattcagctgaaaccagagccttggtgtagcctgccttccgcatggctgtcctgggccgggagattgcgacatggtggggctgtggccagaccctctctgggctgtgccgggggcaggtggtggttgggagggaacctcagggaacttctttggggccaggaggtcctgtctgagctgctcctctctgctgtgcaggctgcccagattttggggatgggtcagggatggagggctggaagcgggtggggattgtgaatttgggactcctagaagggggcccagctagagcagctcctggtctctgctggtgggccttgaagggaggggctgggccctctggtgggatggatgggtgcagtgcagtgctgactagcaggatgagggcagtttgtgtatatctagtgaaaagaatgaaaaacaactggggtggtgggagatggggagaggctcgctgacctagtgaagtctgggttttggcgtgtggagcggtgattgcaatttttctggctttgaagtgtgatggccccgcagactcatgaacacgaaggatgcagagtggagatttcccggagcctgcttcagggaccacctggttaggaggcaccctgtaaatatgcctgccatgagcatgtggacatagcgtctttatattttagtctgtgctttctttctggatcatgcaaagggaaacgtcagtccgaggcaggtcaaatcccaccctccacattggcagaaccctgctgaagtaggt

SEQ ID NO: 27103 - DNA, 1436 bp, Artificial sequence
  DNA replication origin
ggtggggcttggctggccaggggacgggcgcggagggggagggaagaagaggaggaagccgcggggcctcacaacccatctggttggaaacgtcctgcagtgccgcccgagccgcaggaaccggagccaattacaagtttatataatagagtcagtctccccgggcctcccctctccgccccacccctgccggctttggggatgggggaggaaacgctttccgtgaaatacaggctggatctaggacggaggatgccttttctggattgacaactaggggccagtcctgagtgtgagaaactcctggggtcctgttttgggatccggacacctcgggcgccgcgcaggcctccttgtgcctcgggagcggccccgcctacggaacgggacctggaagggaggtgtccgggtcgagcgttcgcgctgctccccgccgcacggtgtgagctcgccgggtttatgtaacgcctgcccttcgcggaggaccgtgtcatgtccgaatcgcggaggacggaggaggcgggggcctgggccgcgacgcccgcccacgtgaccgtcagatgactggggtctaagtttgcacgagctcctttaccgtaacgctgaaggctcctcatcaacatcggctcttagtcatccccgagtgacatttgatatgagcaacagctcaggacggggaaatggcaacgcggatgctgatggagacgaggaacggctgctgcgaccgcctctgatttgggctggaacgggagtttatgcggagtcaaggaaacccaccgcgaagggtgccagggaagaccagggcacttttctagacaaagaatcttagattctttggggctagatgcagagagtccgggagaaactgttcaccgggtgccaggcaggcggctgaccacgcaagccacgcttcagatttgtgggttggttttagaagtcacatgaggtctgcctggacgcccctcccgatcacgtcaattatctgtcacaacttctctgtgcgccccagggaccagccccatgcccccagcgggggagttggttacagctgcagaatcccggccccaccccgcctccagagcacgagcctgcgctagaaggatatcaccaggggatgggggggaatgcgaggggggcggggaggtggtcacggatgcagaggctgtcctggctgctgaggcaaaaagcccgtcccaagccctgcatgggctcctactgcacttcaggatttgggggaatgcagaatcgtggtctttgagttttcattaattcaataaagatttctcaaaagcctaaattctagacccaagacagtgggaattaaacagggctgaatatgacgctattggctataccaggaccacgcctgagcattgcatgcacgctccagctatgcataacttatttattttaaaagaaggaaggaagagagggag

SEQ ID NO: 27104 - DNA, 828 bp, Artificial sequence
  DNA replication origin
ggctcatgtctataatgagggaggccgaggcaggaggatggcttgagcccaggaggtggaggctgcagtgagccatgactccaccactggactccagcctgggcgacagaaggagaccctgcctctaaaaagaaagaaagaaatacacatttctggggcccaatctagagcgatcgaacataattctgggcgtcgggctcagcgctctgagttttgacaacccccctacgcccagctcatttgagaatgccggtctgagatgactgattcccagcttggaacatttgagttactgaggtgattgattctaagagtcagctggagccaggactagcagactgggaatacattcgtttaacaatggaataccattttcaaatcatcatgcatttcttttctgggtgccatctcctgtgcaggggaggactggaaagacagggaaattctggtagccttgggaaggcagaagggtggggcttggctggccaggggacgggcgcggagggggagggaagaagaggaggaagccgcggggcctcacaacccatctggttggaaacgtcctgcagtgccgcccgagccgcaggaaccggagccaattacaagtttatataatagagtcagtctccccgggcctcccctctccgccccacccctgccggctttggggatgggggaggaaacgctttccgtgaaatacaggctggatctaggacggaggatgccttttctggattgacaactaggggccagtcctgagtgtgagaaactcctggggtcctgttttgggatccggacacctcgggcgccgcgcaggcctccttgtgc

SEQ ID NO: 27105 - DNA, 969 bp, Artificial sequence
  DNA replication origin
aagagaggttaccaggcatttcttcatcccacacatattttttgagcatctactatgtgctaggccctgttctaagcacatgggatacagcactgaacaagacaagaaaggtctctgcttcctgtggtagacattctggtgggacaagaaacaataggtaggatgatgtcaaagtagtaaagtaaagcagacagaatgctgctaagtgatgtgaggagagtcatcagagaggccttcagaggaggtgggatttacactgcatcccagatagagaagggagtagctgaggctgggaggaccattccagacggaaggcctggcagaggagagggcttggcatgctcaaggcatttccgggaggctgggggtctgcagaagaatgattagggtgggaggagactggtgtgtaatggcggggtggggggggggaccacagggcaccattcagataagctggcctgtagcccacagcaagacatttggattctatggtaagggccatggaaagtcactggaggaggggccttaagcaggctagaagcatggcgcacttggctgggtaggaagattactctgattgtggagtaagggctggactaggtggggcaagaggaggcagggagacaggttaggaagccattacataatggaggtgagagatgactatggctctgaattggataatggtgtggcaggcggaaggaaggagtgggattgggggcatattttggagttggagcgctgggctgagatgacacggtagtaaggaaagagaggagtcaaacatggcaaaaaggctgttagctagacgacaagatggcaggggtgctatttaccagggtggggaggagagcgtgggggtatggagagttctgttttgaacatgttaagtctaagatgtctagtcattcattcattcaactctcttagaatgtacattctgtttcaaacaccaagcactctcactgg

SEQ ID NO: 27106 - DNA, 948 bp, Artificial sequence
  DNA replication origin
aggggaccccccccccaggctactacgccgggcactttcacgccaggctggggtgcccgcggcgttgcgaccgtggagcccggagtttgggggctcagggggagcggagggggaagggcgcggcccgtgtggctcggcccagagtggctcgaggagagaggaccccgccgcccctcgcgggccccgcgccccggaaggggggcccagacaggcagcgccgcgtgccccgggcgcgtccccgcggcggccgccagagggcgcggcgggcgctggggagggcagcccgcggagagtcgcctccctccctccgggggaggaaatgtgggggcccgggctgggggccgactcggctgggtcgcgctggcgtggcctcccggaccagccgcccgccctgagcgctctccgcggcctcgcgcagctcagggctccaccacgtgggcggctgcggggagcggccggggcgcgtgcacgctgcgggtctccgaagctcggggggcgtgtccgggtcccggggcgccgaggagggggtggaggctggggccgggaagcctcccttggccgcggtcccgacccgggaacacgccgcatgcactcgggatcagcggctactgcggaaacccacccgcacctgtctcgggtcctcccaggcacgttcctcttgcttcgtttgctacgtaagtgactggaaaccagtaccgaccctaagtctccgcggttgttttcttgaatgtgcaggaggagaggtttccccaaagcgagactcccctaggactgccatctaatgaataaatgctgcggagaccaggtcctcaaagagggaaacagcccagcagtggcaggagagaggagtttgaaatacgtggacttttacaaacagtgattggaccatgtgtcgcccttaatgtggtccggtttcatgactcaggctaattgatgccagtaataaat

SEQ ID NO: 27107 - DNA, 1503 bp, Artificial sequence
  DNA replication origin
tttctctttctccgtcctgacagcccagccgtgtttcccggctaggcgcgaggactcggtagggaagttggtgccggggcgggctccgcggttcccgggccccgcgacccgcacctcgccccttccatgcgcaagagcctctccgcacacagcgctgatcccctgcggcgcgcaggcagcagcgacagcaccctgggccgcaccgcgtctccgctgctggggctgaccgggcagtggggagcgggcagccgcccggcccgcggggtgcgagttgccctcgaggggggaggtgccctgcggagaggccccgaagccccaggacacgtctccaagcgcccgtcgctgcctcccgtcgcccaacgtgcttttgcccctcgggctcctcgggttcctggccttgcccgtcactttggcccgctcctcgttgggttacctgcccccggcgtcccggggctgggcggtggggtgaggggaagcgctctctgggcagccccccgggaagtgcgaggccgggagtcttcctcagcttgtctcttccggggagcgccactgggtccccagttcagagggctctgggatggtctcccagtttctcccgggccgggggatggaggggtactagggccgcatccgagtgtgcgttggtgggtgtgtggtcggagccgacgtgcattccgacacacgtgctcgcagcgcggggtgtagtcgccgcctcacggggacacctagacgcccgtccctggcgagaggtgtcgtacgctgtggtttcagcgccagggtctgcggcggcgcggggagggtgttgtgttttgcgagcgcggagccctggccttggttttgttgtggtcggcgtcgtgtcgccctctcttctgccgccccgcacttcctttgtacgtagttaataagcagtgtcgctccacattcgctgtcttttgcaatctgatagcttttgttttggtggtgtcgggtgggggttagtagggaagcgcggggatgcggggagcgagaactccccccggtgtctacggccggaggaggtgggggttttattcttctgaaaaagttgaaagtgtggcttactggtacattcaagatggtagggtaatttgaacacgattaaaagtttaaatgtcgcagaactgggactgggaacggtgagggcgtgttggtgagtaatggttgccgagggtatgcaggtggtgccgattaactttgaaaaaatcacgactgagccttcacgagtgaggcggggaaggaggaggcagcggaggttgtatggccccatcaccggggcaattcagaaaggctgtttctataaacaaatccttaaacgtctggtaagaaatgagtccgcgacggaacgagagcagatcgtggttcgcgtgtttactgccgagtgggacgcggactggggccggaccttccacagatctgggctctcctgctctttgttttctaaactttcagcggactcgattgggcgaaagccttccggctcccttt

SEQ ID NO: 27108 - DNA, 1099 bp, Artificial sequence
  DNA replication origin
actcctggcctcaagcaatccaccgacctcggcctcccatagtgctgggattacagatgtgagccactgtggctggccaaggagggtctttttttgcacatctacagtgaaaggtttgaacccggacgtctgagtctcaggtcagttgttgaaaccactaagtaaccaccttgcttctctgtgcctgaagagaatgggtttttaggttaaccaggctgactggttcaaggtcatgtccctatctgtggaaggggagtgggagtggaaggtgagtggtgacagagtatggaaccctgtttctgatatctagattatttgagggcctccagtggtctctgctccatggaaagcatatgaaagaatatgattttttttttttactcgagcttgttgtctagttgggaaaactcaactactggtggagagtaacagatgctatgagtttagtgctaagttatgggatgctgaccggagagaagtatgtgggctgcaggcagtggggtcacggaactgcagaatggcttgagaagctttaaggaggatgtctgactttagtgtgccctaaatatttgactctcaagatccaaggaggcagctccccaggagaggaagggaccatgtgtggtgtgggtggcagtgtgcactgatggagtggagagggtgtcagaatccggtgtttgtgtggtgggaaggaattgactgctggctagagaatgaggagcgctgaaacctttgcaccattgcagtggacccgctgagaagggtgttctggggaggctgctctggtctctcgatggagtcaggattgggggacagatagacaccccggtgtgagccagtgatggtatagatgagggaggcagtgaggacaggctcagggagggaagtcttgtctctagacctgagaccaggaagcaggaatggactggacaggttggcccagctgagggaggtgactggtgagatgggtcctcggtgtgaggggctgggttgccagaggagctgtgggctggggtggtttgtcgagagagcagtcccagttgatggagaggcaggacccgcaaaacaggttggctgcaggactgggggcggtagcaca

SEQ ID NO: 27109 - DNA, 1187 bp, Artificial sequence
  DNA replication origin
caatgtacctttgaggtaacgaattttcatgtcatttggagtagggctgggccagtgagtcactcatctccttgttcattcattacgtgaatacctagtaaatgcccactaggcaccctggagtcatttgtgtagagtggcatctctatacaactgttcgactaactgtcggagacaccctaatcaccccagccacaaacaaatagaacattgtatgtgtgctgaatcccacaaaggccagacatgatgccatgagaccaagaaggaaaagaaataatgtggaaagggtttggggtggaaaggtggggaacctggaggcgggccacatggggccccagaagccatgttgagggttttgtcttcaccaaaggatcagtgggagattagtgtagaacattaaacagaggtggggtatgtgtcatatttccattaaaaaattcatcctggccacagtgtaaagaatagattagggaggaagccaatcaggaagcaattggagtaggcaatgcaaaaggcaaagtgaacttggactagtggtggagataagttgactgcagagagagtaggaagtaaaattggccaggcctgtgttgggggtgggcttgtgagcaggatatcaaagataatgtccaggattctggcttggatgacaactatggcaatgcccattactgagctaggagatgctggaggaagatcaggtggggactgtgagcatgagtttgatttttgcagatactgggtttgagacacttctgagtcaagcaggcatttggaaatgtggactggtgccgagaaggaattcccagcagtgacttggtttaggtggtcctggaaagtagaaacacacatgagataattctggggatggagcttaaagggacgtcagcgttcaagggccaggtagaggatcatgagctgtaaagggacccaggtggctccagcacagcgaggaaagcatgcgagtgtgatggccaggcttccagggagagaggagggttttaaggagaacaacgtgctaaaagccactaagaagccaagcagagtgagaaatgaagacctccactgggtcttgcaagaggggaggcctttgaggacctcacctgagagctgatgaatgaagtgatggctggaagcagctctggagagggaggaatactgtggggaggggaggaactgaagaagta

SEQ ID NO: 27110 - DNA, 1046 bp, Artificial sequence
  DNA replication origin
ttcagtgtccacaccttgcagttgtcacattaagctgtgaaggacgactgactctagcactcagtggtcctcagtggcaggtgatgttgacctcagacaagagttgctcaggagataggctttgcagttcacctcgacaagcgtttgtggagagctaggtctgctacctcctgtatcgttgcctgtgggtgatggtaaggctcttgggggtgtggaagatgcggggatgatgatgatgacgatgatgacgatgacgacgatgacagcgtcgtcgtcgtcctggtcctggaaggataaagtcttgtggagaagaggaggcaattctgacagtttggggttgcatcatcttcttcacagaagagatgaagttgtgtaggcaccctaagtatggattgtcacaaaaagagcactaggaagcggggcggggcggggcaggggtggggggttcctggcagtgggaatgctgggcaggcatggcagtagggagcacctgctgcaggtggggttggtgaggtttcctcgtgggacttaggctgcagagagatcaagacaggcctcagctgttgtattaggcatcctggactaattctttaagccctgttaaggtttctgaaccagagggtgattagagctgtgcttgaagttcttgttagccggagtatacagctgcattgagcaagatgttgtaaccaaaggagaggtggtggtgggccaggcaagcaggatcctgcacactcagggagctctgagggacggaaggagggtgccagaccttggacagatgtgagcctgggtggacagttcgcagtgggactccgaggaggccaagggcatgggtgacagcaggcagactgctcgggtggaatgggcatcagctgcagggaagccgggggaagaacagggcacaaatcggagttcagtgtgagacgcagtgagtttgtgggtagcccagtaactgggaacttggaatggagcagttgggccgggagggccagggtgggagccgtgccgtgagaactggctgcctgcaagccgctgacacagcc

SEQ ID NO: 27111 - DNA, 841 bp, Artificial sequence
  DNA replication origin
cgcacctgttgttgcctcgggactgaactgcagcggcggaccggcgagcggggggcctggacgtcgagtgcggggccggcggggcccccgcactcaccctcgggagcgtttaagtccctcccgggaagaagggggaggaaatgctcgggggagccggaagaggcactgccagcatcaactccacgcgcgccccggcctcggcgcccggcctcggtcacggcttctctcggaggtcccccggggacaccgggcgccgggactgacccgggcttgcttcccaggcgcgggagcgtggggaagtccctgccttcccagggtctccgctgtcttgtctgtgaaatgggaaccgcacagtgggggagaattctttacggccgctcgggttactgccagcgccccttccgcccccgccaccttccctgcgccgggacgcctcggctgtggtcgggggcgcagaggtggagcgggtcggggtcgccggagcccgggcttcgtgccatttctggccctggagcgcgcgcgtccccgagcctgtcgcttcccgggccccagggggtgccatgcttggccctatctccagaaaaccaggcagagcgggtgcaccttctgaatctgaaagcacgtgaaacaaaacaccccaaagcccaccagcccctgaggtgctcggataggagcaagagtagcgcccttggatgctgagaaagtgcctctttacctcctgccccttcccttctccttgtggggacatgtggcggggccgggtgtgagaatgagacccgtttcccgagggaaggagggcgcggtgaccggctgttccggcccctacacgtccagtccgacc

SEQ ID NO: 27112 - DNA, 993 bp, Artificial sequence
  DNA replication origin
tccctgcgccgggacgcctcggctgtggtcgggggcgcagaggtggagcgggtcggggtcgccggagcccgggcttcgtgccatttctggccctggagcgcgcgcgtccccgagcctgtcgcttcccgggccccagggggtgccatgcttggccctatctccagaaaaccaggcagagcgggtgcaccttctgaatctgaaagcacgtgaaacaaaacaccccaaagcccaccagcccctgaggtgctcggataggagcaagagtagcgcccttggatgctgagaaagtgcctctttacctcctgccccttcccttctccttgtggggacatgtggcggggccgggtgtgagaatgagacccgtttcccgagggaaggagggcgcggtgaccggctgttccggcccctacacgtccagtccgacccgttaggcgccctggccgcaggtggcccgccctccccagcagcagctcagccgcagactggccactttctcccgccacacgtctcggtagggaacaaaaaatctcataaaggctcctctaccttttcttggaaggcaactttagaggcgatttacgctcttttatgacttgctctaaaagctgtgacttagagttgcttttctgctgattttaggcgagttaaggagggaaggtagcgattagccaattgtatggattagttacatttttcgtggacgttttagttggcctagagattgagaaagggttttttgtttatttgtgtgtttgttttgagacagagtctctgtcacccaggctggagtgcaaaggcgcaatctcatctcactgaaacctccgccccgcccccaccccctcccgggttgaagcaattctcctgcctgagcccctcgagtagctgcttctacaggcgcccgtcaccatgcccggctaatttttgtatttttagtcgaaacggggtttcaccttgttggccaggctggtttcgaactcctgacctcaagtgatc

SEQ ID NO: 27113 - DNA, 1111 bp, Artificial sequence
  DNA replication origin
caggggatggggaagggagacagggaagggagtcagtgcaaggaatatcagtgggaggctctctgccatgggcaatggaagctcaggcctgctggagatctcctgagggaccatgtgaaacgcattaaggaccgtcccacccacaaagcgaggagctaggtgcttatctccaaattccgatgctcttaggagaacactgatcccacagctcttccaacttgcaccctgagccagctggctgcctggctgtagccacagaggactctcaggcagagaggcaggtgttggagggacggagctgtcagctgggaccacggagctgtccaccaaggtcccagggcactcacagtgtctgccccactatcccagggtggggcaaaggtgcagaaattgggcaggggtctgagaaccaggagggatcagaggagctgacatgctcctctgaggtgtgtgtgccggggggagggggagcaggggggctgagggggccaggcggaacttgaaccatgccgagaaccatgtgaactgctgtgacagggctcacagctcacagagggatagaagcacccctctggctgcagtgtggacagtgatccagagaggatccgaattatgagaagagattgattgggtaggaggttcttgctggggtccagatgagagatgacgctagctgggccagaggagctggtggttgagttgtggggggtaggagttaaagtcagcgggattgccactctttgtctgccttgcctcataccctgccacatctttgtcgagggtgtggtggctcgtcgctggatccactcctatggatccctcatctcaagagaggatgagataatataaggaacacctgaaagaaaggagcgtgtgtgtttgtaagaggtgcatcaatttgagctcctggaaagtagtgtcaaaaatggactcaggcaagcttacataagaaaggcattcattgggaggctaacagaactcaccaaacctgatggcttaggaaatggacaggaaccaagatggctccagatggtcaggcagcaggaatcccctgttctttccttccccaaacatttactgtgtgcctactaggtgccaagcaacagcccat

SEQ ID NO: 27114 - DNA, 1211 bp, Artificial sequence
  DNA replication origin
gatcccgcctggctccccgcgcctggggctgcagggtgggcacgggccgggcccgcgggaggagggggaggccgggcgccgcgggaacaatgtgctcggttgttgccgactgtcagcctcgttcccggatcctcctttccacgccccttggcctaactgccgcgggcctggcgcgcagagggaagagcccccttatttggtcttggaaagaaaagggaaaggttatcctcggatgcctgcggcgttgggtcatcagcccgccgcggccggcgcgcacgcgggagcagctccgactcccgccggcagggggcggcgccgggcagcgccggggagcggccgctggaaaacaggcgcgtaggttccgccgcggccggcgcggatccgctcttgagcgtggggagggggtgggggtgggggtgggggcggagggagggcgggggagggggcggcgtcacgggcagggaagaagagagaaaagaaaaaaacaaaacctttttatggccagtcaagcttccaaaattggaaaaccgtttcagttcgaggctgtgactttgccatgtcgatttcatgtgaagcatctgggagtgcgcggagtgggggagaatagcggggggtgcggggtgcggtaatcagtgttaagataagccgtgccattggggtgaaagttactaagataattgaaaaggtacagtttggggatcggtgtcggctcgggtactttgctccccacccccttccctctcttccccactcctccctccgcccctgcttttccagcctctcaggtgagcctggtgatgtgtagcggagtctcgctctgacccccaggctggagtgcggtggtgcgatctcggctcactgcaacctccgcctcccgggttcaaccgattagcctcccgagtggccgggactacaggcacgcgccaccacgcccagctcatttttgtatttttcgtagagacggggtttcccatgttggctaggatggtctccatctcttgacctcgtgatcctcccgcctaggcctcccaaagtgctgggattatgtttctagccacgtgcaggctgagccttgcccaaccttcttattatcctgggcagctcaaaaaggcgaaggtgaccaagctgggattcgaaccgcgtccttcacgcttcagcgccaaggcttgttccacggttaagagcacattacctcgccaatgactcctcca

SEQ ID NO: 27115 - DNA, 1165 bp, Artificial sequence
  DNA replication origin
cgcgacgtgagggagctgcgcgcgcgcgccgccagccttaccatgcatttccgcgcccgcgccaccggccccgccgcgccgccgccacgcctgcgggaggtgcacgacagctacgcactgctggtggccgagtcgtggcgggagacggtgcagctgtacgaggacgaggtgcgcgagctggaggaggcgctgcggcgcggccaggagagcagactccaggcggaggaagagacgcggctgtgcgcgcaggaggcagaggcgctgcggcgcgaggcgctcgggttggagcagctgcgcgcgcggctggaggacgcgctgctgcggatgcgcgaggagtacgggatacaggccgaggagcggcaggtccgtgcgcggggatggcgcgctgaccccatacccgctgccgtcgccccagcaccctgcccttgacggcgtggggcagcggccccttcaccaggggcgcggcgtcgcggaccggtagggcccgcccagagggtgcccgaatggcatggggacccggactcggtccgctggtccatcgactcagcgggcgagcgcggggcggcaggtcctagcggatagccccgtcctcgtcatggggttaggtggcagctgctttaactcttgacaagcgtgactgggcgcatcctgataggccaccctgttagctctaggttttccttccattttccgtgctccgtagactcagtagacccagatctaagagtcaaccgagaaacctctctcacttgcagaagtgacggcttatggtagccccgctgtctatagcgctcctcaggggaaaactcaaattaatttccaaaacggtttttattttgccaatatgatttcccagttggaagccgcagttgtggctctctgggcggctgccttgtttgatcttgggaggggcagcaaccctcatgcagaacagagcttgatcgaagatgttttgctcacagcacacgctgacgtcagatctctgcgtagtgtaaaagttgtgggaaagtggggccctttggcaggatgttattacaagtgcagagtgatataaacagttactatttcagggaagcaaaccctctgacaccggcggggtgacacctgtggctgatgtaaactatgcccagtccagccctagcgtttggccctcgccctgccctgc

SEQ ID NO: 27116 - DNA, 1498 bp, Artificial sequence
  DNA replication origin
tcccaggtcaaaacctgctgtgataccatcaccctgcagcacagaccacagtcccaagcctcccattcttgactctaacaccagcccagcctgacctgctgcagggtgtggcctgtgaccacatctgtgctccgtccacgctgcttcgtccagcctcccacgccgatccccagagtagctccccgggatgctctctcctcatcactgcatctgccgcccgcccaggccctctgactttaccctcccgcaggcccctcccgtctgaggtgctctggaatgcctgtggtgtgattgtgcatgaacttttacgtgcctgcgtccatgctcgagagcggtcttgcctgaaccaccttgtctcaataatcagcatgaaactcctcaaaagaaacagagaggcccctcagaacatcacggaaaagacgatggctccaaaacagctagattctaatcccagctctgctgcggggcgcggcctcgggcacacctgtgctccgtgcatgtgacgtgactctcaaaagcatccatttcctcatctggaaaacgggacagttcctggactctgcgcacctggaagtgaccatgagggtcaaatgtttctcaaactgcaaatgcttttcagatgctggcgccgtgaccaaagacctggctcttacatctgctctgttttcatgggacacagccctgggtatacagtaggtgcttaatgcaggtgaccgtgaggaagggctgtggcccgtggagggcaggcaggtgggattcagctgaggtcctcaaaggctgcactatgggaaaggctgagcggcaggaaagggacagacaggccctcctcctggggcccagggctgggaaccagagcccctcctttggccactctgaggtggaagaacaaggagcacataggaggagtggcccaggctctccacctgaggacattcggaggacctagaagcactggcagagcctgaacgtggcaccgtagcctcctgctggctggagatgtgtctgggcggtgtgtcttggcatggaatccacagccagctagcctgaggcggggatggggccaggacccccggctgtacagacggagagccagaggcggttgcaggttcccaaccgacagcggagctgatgagtggcggggctttcatttgttgacaggagatgcatgtctgaggccagagccaacttcttccagggagcggcttccttcctcctcaaaggacacaggggacacagatgtccaggaggctgtttagagagggcccgagtggtgagctgtgcaggggtcctcacgccccggccccgtcttggatatggggctggagacttaggaagtgagtgctgggtcctggggttccctcatccgccttcaggaagatgtgaaggggcttcctgcggcctttggcagcattcatcccaaaccccaaagcctccttcccctggctccgtggcaggagcagttgcattctcctgtctgagaggggccacctccttccca

SEQ ID NO: 27117 - DNA, 1389 bp, Artificial sequence
  DNA replication origin
cggcttggcgccggggccgcgggttggagctcgctttcctctgaaggaccgtgttcccctggaagggatactggtcacttgatgagggcccgggcgcctcccagggcggggcggcccggcggcgtcgcgccctgccgcccccgctccgccgctcagccgccgccacctccctgaccagcccccgggagcccaggccgggagcggcccggtgacgcggcgcgtggcaaatcgccgcgcgtggcctccagggcagccaacccgggcggtggggcggcgcggcgcgacgggactgggcggggctcccggggcgggggcggggcgcgaggccggctgccgcccggagtccggggccgggcgggtccttcgggacgcccgggtcagcctcctccctccctccctcgaggcgcccttggcctccccgggtgtcggctcgccacgcccgcattgtggccagggccgcacctgtgctcgccccggggcacgggcaggtcaccctcaggagcaagcacaaggggactctgggacccgggcccggagagaaagggacttgaaggggtctcgagggcgagaaggccctttcggactggacagccgagctccccaggtcccaggacagtagcaacctccttatcgtgacttaatagtttctaggatgcctggggcggtgaactatgtgatggacattttgcatatgacagcttatgtaatacttacaaggccccatgaagcagattcagtttctattcccattttacagatgaggaaagggaagctgagcgctaaagtgacctgtcagggtcacagcttcagagtagggccctgaggacttgaactcctgaccactctgcatgttgccttttctgagataggtgcaaaggggataggcttgggacagctgttgtgttttctggggctactgattatgtttatcgaggtctttaggagatgagccattgttggccctctcatcctgaaagccgctcacctctgaagagtttttcggggccacagtgcctgcatgtgcccccagaggtgcctgtgtaatggacacgaagccaaatggttgtttgcatttgaagatgagaaattcaatcccgcagcacttaaaacaaagtggttggggtgggtgagcagatgagcagaggctgtgagtggaggaactgggaagttacaaaggaagccagagactggctggcttcctccctcaaggacaacggggcaatgtgctggggagagcccaaaacaaaggcggcacatagacagcagacgccagaaaataaacctggagctctgctcagagctccacaacaccagtgttcaggggagccagcaaaaggaactgcagggaggtttttaaaacatgtcaaaatgtggtgtaaatcagcaagt

SEQ ID NO: 27118 - DNA, 1384 bp, Artificial sequence
  DNA replication origin
aagaggcggctccgggcggcgcgaagcgctggtggcgggcccgggctgcggcgtgtgcgcgcccgccagctgctccggagatacggtgagggccgcgggcagcggggctcagtccgcgacgccggtagtgctggaggggggcggcgtctcgcttaggggaccgagtaggggttggggtggaggtgctggggcgggggacggcgcggccgagagggtcgcccggggggctccggggacccctggacgaggccgtgtccggcttggagggggccagggtcgcgttcgcgcattggcggggcgggtagggtgctgggaggcgggtagggtgctgggaggcggcgaggggtggtcgggtcggggtcggcgctgaggagctaggcgcccggggaggtgggggcggggtgccctgagggcgggccggtggggctggatggggctcggctgggcgggccgaggggagctcagtcgcgcgggctggtggcgagcagcctccccgggcgcgcaccccttggggccggggggcggtggtggacgtcgcctccttgaaagttgaaggagttctcgggagaccccggagaaggtgcgctctgagggccctttccttccccttttccctccaagcccgggggtctccccgaagggattagccccaagtgcggggggccttctgccctgttggacttgaagaagttcccccacttctgctttgggagaagattggtctaacggggtggaacgcttaggtacgaattctgtgagtgtgtagatgtcagtggcggggtcggtgtttggggcggacacctgcggttgcggacgcccgatcgtgcggggagacgtcgcggggacagaggggctgcacagggaaccgctggctgaacccctgccatccggctagatcccagctcgcagaaaatattttttgtgttagaaactttgctttttggctcgatttcatgcctttgagctgtgagggttaaagtaagtgagatagtgcaaacaagtttggaaaaggtgagcaatcctgaataagaaaacagtttttctttaaaagtgtaactatagaattgttgctcacatccgaaatagattccggagctgtgaagcgagcctcctgttatggtccagcagggaaccgtgtgtagcttgaatataacatagtgttaacctgcgttttagtttacagtgagattgggattccaataaatgccctattagaaaggcctgctgtgatgtgttaacaatagcatatgtatttttaaacaaacattgtcttaacattttttcgggtttttagcacagtatgtttcccatgtgtcttgtatcatctattactatatgaagaggaggttctctaaagctgtaattaggtgtacattacccaaga

SEQ ID NO: 27119 - DNA, 1260 bp, Artificial sequence
  DNA replication origin
tggacgagggggccgcggtctggctagggagccgcgcgggctcatggcggtacggcgacctggcctcgctcgagggttcgcgggcgggccgcccctccccgggctcctagggggacgctccagctggaggggcggtgaccgcgactgtcgtgggctggccccaggtggctagggttgggggtcagaggtcagaggttctgccctctggaatgttagggccccgcccgtggagccgtggagccctggggccgggccgctccccattttcctgtcagctcttgttgaggtgccccatcttttcgcagaagggacttggagggaagcgggcctggagctgctgccgccgcccctgagctcggacgcgaaggctggccccgtccccgggctgccgccgtggtcctgcaggtgaccctcaaccccccgaggaccgccggccgcctcccgcctccgggcaggctcaggagcgcgcggagcggggtgtgggcctgtgaccctcgaaggcgtgggcggggagtagggggtcgagctggggccgcaggctgtccccgtacgggctgctcccctgtggctccgaagccacctttttctgaagttgtcagcccgcgtgtttgagatttcgtttctggaatctcacgcgaacaatctggagagaggaacaggggtcttgcggctttggctgttgactcaaggggaaaataaaaaccagacaatggggatgtaatgaatgcaaagtgacccgtgagcaaactggacgcttttctccggctgacaggcatgagttctccccgtagcttgccccacatactgtgagttaaactgtgtcaaagtaagagcagtttagccccacagttctgagcaagagtccttagcgctgaccttcttagtgaagatactttgcaatgtgtaaaatattgaatacaaaattattgtgcaaagcttctgagttgaagattctgagtgcgcggaggctggcggcagcccttacttgccattgcaaggatctcaacttactactctgagagcaaaagtagttgtttctttacagatgtgggtttaggggagacagctatggatgaggaacaggggcggggttcgttttctgcacaaaacgtatgcgattagaaaaaacaaagggtttttattctgcctatcttcttccatctcagccagcataagcacattcttttttttctgttgatgatgtatgctgagtatttgcagcgattaggaaaaggaatactctctaacaagacacttctc

SEQ ID NO: 27120 - DNA, 990 bp, Artificial sequence
  DNA replication origin
cagaacctctgacctctgacccccaaccctagccacctggggccagcccacgacagtcgcggtcaccgcccctccagctggagcgtccccctaggagcccggggaggggcggcccgcccgcgaaccctcgagcgaggccaggtcgccgtaccgccatgagcccgcgcggctccctagccagaccgcggccccctcgtccaggccccggtacctcagcgcccaggctccgccgcgaccggcgaccggcgactcgcgacccgcgacccgcgacccgcagctgccaccgcgcctgcggattggctacgaacatcagcagggcccccctgggggcgggactggggaggcagccaatgaagtcagcgctgggcgggcactggagcgagcctggctgcgcggagagctcatcccgggaccacagggcccggggcggggctcggggcggggctcggggcggggctcgacagggttccacaccccggaagtggccctcgccccgcccacccgcctaccaggtctacccgcgcgggccctggcttgttttcgcgtctgttcggagtaataaggcacctcagctcctccctcccaaagtgcttggctttctgctgagccgcagctttctcgcccgtaaagaggcctttgaccccacttgtgggtaatgatctgtagctgtgactcggggtggattccagtagcgtggggtcccctgagccctcctgcggggaagggctgggcgcagatgggcgaggggtctttctgcggcgggatctgcgctcctgggcctttgagggccgcaccaggggaggcattgccccaccccgagaagaaaacagaaatccacgagtgtaaaacatggatgcggacaacagggaccaagaaaacttaagtcgtgtttatcaaatgtcaggtggccgaggatttcttaagatgaaaagtggtggaagaattctcacacactggccgggcgcggtggctcacgcccgtaatcccagc

SEQ ID NO: 27121 - DNA, 1103 bp, Artificial sequence
  DNA replication origin
gccgcctcaaccttcgtgggagcgcggatggaaaatgggaaggggcaccgaggcctcggcggggagctgcgcggcggcctcgggggctgctccctttgcgaccgacgccaccgataggaggggcggctcctgtcaagcctcagcttaaaagggcaacagcggccgggcgcgggggctcccgcctgtcatcccagcactttgggaggccgaggcgggcggatcacgaggtcaggagatcgagaccatcccggctaacacggggaaaccccgtccccactaaaaatacaaaaaattagccgggcgcgggggctcccgcctgtcatcccagcactttgggaggccgaggcgggcggatcacgaggtcaggagatcgagaccatcccggctaacacggggaaaccccatctctactaaaaatacaaaaaatgagccgggcgcggtggcgggcgcctgtggtcccagctactcgggaggctgaggcaggagaatggcgtgaacccgggaggcggagcttgcagtgagccgagatcgcgccaccgcactccagcctgggggacagagcgagactccgtctcaaaaaaaaaaaaaaaagaaaaagaaaaaggacaacagcaccaccgtccccgctaccgcctgggaaagggctgccccaaccctgccaccttccctgtcacccctcaacccggcgcgcacccgttttggcggttgcacgagtccagagcgtgcgcgcgctcccggctgccccctcctccccttgacccagcacctttctgcccgacccatctagtccctacattcctcacactcgcctactggaggctcagggcggcacaaccaccaactgtagtgtgtgtgtttctcccgagtgtgtgtgtgtgtgtctcccaagggaacagagcactgctgagttcaggttgattattaggtcgtggactgtcagcaaaatgcagtcacaagaaggctgtgggctgttttgtgttttgcggtgacatcatgttgctcatgttttatgtttttcagagttcattagtttctatttgttctcagttaatatccacctcaatagattgcataagtagaatacccccaaactgaaagtcacc

SEQ ID NO: 27122 - DNA, 1483 bp, Artificial sequence
  DNA replication origin
tgggagcccgcggcggccggagccctcttgggacccatggtcgccctcagtcagcgggactgctcccgggaccgcgacggggcggggcggggcgctccagcgttgtttgagcccaggcgcggaagggaaaaggcctctgagatgctcgcgtgttttgcctgggcgcggtggcgcacgcctgtaatcccagcactttgggaggccgaggcgggcggatctcctgaggtcaggagttcgagaccagcgtggccaacatggtcaaaccgcgtttctactaaaaactacaaaaattagccgggcgtggtggcaggcgccttagtcccagctacttgggaggcagaggcaggagaatcgtttgaacccgggaggcggaggttgcagtgagcccagattaagccattgcactcaaacctgggggacaagagcgagacttctctcaaaaaaaaaaaaaaagtttttttttcttttcttttttttttttttttgagacagtctcactctgtcgcccaggctggagtgcagtggcgggatctcggctcactgcagcctatgtcccttgacagtccacgggttaaagagattctcctgcctcagcctccccagtagctggattacaggccccgccaccaaggctggctaacttttgtgtttttagtagagagggggtttcaccgtgttggccaggctggtctcgaactcctgacctcaaatgacccacctctgcctcccaaagtgctgggattccaggcgtgagccaccgcgccgggacccaaggcccttaagttttaaggcctcattcttcagtcaggttttccctgttcccgcgtgttcggccaattttttgttgttgttgttttgtttttgtttttgtttttgagtcaattttccagacatctttaattagcaatatgtttaagtagttacaagcctttccttcttttcttgtgacagtttgggttgaatttctatcgtttgcagcctgtcactgtaaggcacaaacatgatcacgcaagatgcgatagtagatttaagccagttgtttttaagtttgtgtttaaggagaaactaacaatgaaaacggcctcgttgacggaggaaaagttggaatgcagcctctggtgctgtttgagcgatccctctccccggggcctggccgcgcgctgctgtgttctggaagggctcattgtacagtcaaggcggcaggtaagagtcccgtacaggtgtcttcgcgcttttcctttcaggcttctgtgtgagctgtttttcccctgtaggatgcgtccctgacctccaccccttcaccctacccaatttgtctttacatgtctgaccatcaaggctctcctgggtcgtattcagttcatgctgatattttcccttcctcccctctttggtcctcactgtttttgctttggtcatgttatgctatattctgtaggcctttttaattttttttttatggtggcaggggaaaatattttat

SEQ ID NO: 27123 - DNA, 1397 bp, Artificial sequence
  DNA replication origin
tgccttgacgtaacgcatgacccatctgttcccctcccttagaacccacccgtcctggcaaataggccccatgttcctgtctctaatcctcccaagagtcctgaccactttcttctttaccctctgttttaaaatatacattaagagagaatgtgaggaacagcaggaccaacagatcaggaggcagctgcccttgaaaagatggtttgttactcacagttcccaagacaagggagtgtgccatggggggtcgtgccaggaagcacaggactgggcgggaggcagaggcagcaggaataaaacatggacaagagcctctactgtggttccatgggaaggactgggcaaggcagggtagacaggccagggattggcctgtttgattaatttctgcaggctttggggtgttgggcctgtctctagttgcctggtactcgccctggggcaacgcggggaggtgggggtggctggaaggatgggggtgtggccaggggtgtggcctctggattggttggctcacatttgaggagcacgctgtgggggtgagttctttattctctctaggaaatagtcctgggaggggccatcccttcagggttggcaaggccccagatgtcaaagcatcaggaaacagaaaataaaagacatggttatatctcctcacacccaggagcacagctctctggcctccacgtggctctgcacctcagccctggattctcatccctggtggggctgggggtcctttgtggatgggcacgggcctcatgccacttgagagggggaacctggacccagcctatgtcctgcctagcacccaccagggtgtggcatgaaagagactgtggagaatggaaggggaagctctggtgcccaccaggaaggcatgtggggaggggtggtgtgggctgtggtatgggggatgcacggaagaacaagggctccgggaaggactggaacaacacgcaaggccacaggaaagaggctttgtccttgcctggaattcctatgcctttctaaaggatcaacttatacagaggggtagagcagactggatgcgattctcagagtagtcagaagtgtggcacccagagttacctgcaggcttttgctgaaagcgatcatgtggcacagctgggaatgaccccacagccagggactgggcagagggggtatccaaacagtgtggccggtgagccctggtttgtagacccctggcttggaacaatggggatcccaggcatgggcagggggcaacagggggagcacattgcctgaagggtgagctgggagagctttgagtaggaagcagtaaagggagcccctgttagcggtctgaaaagagtgactttggtattggtgaggtggtagggagcaaggcgagccaggcggctcct

SEQ ID NO: 27124 - DNA, 968 bp, Artificial sequence
  DNA replication origin
agtttcgagaccagcctggccaacatggtgaaaccctgtctctacttaaaatacaaaaattagccagggatggtggcatgcacctatagtcccagctacttgggaggctgaggcaggagaatcgcttgaacctgggaggtggaggttgcagtgagtcaatatggtgccactgccctccagcctgggtgacagagcaagactccgtttcaaaaaaaaaaaaaaaaaaaagttagagtatgtttttattacccagtataaacatgtcctggtacagtctttagcttatctgaacataatgtaagcaatagaatgggaactaacaaaggttaagtgtattcacttagggggtgcacatgctgggcaccagggctccagctatacaaaagtgccacatgagttctgtgtgtggggagcttgctttctagatgggaaagtgacactacacaagcaaaaacgttaataattctgggttgtgacaaggaccgagcggtgcttcaggacagcaaccgtgactgggaggccatgttagctggatgcttggaacagctgtgtgaggggtcatgtgggagctgaaacatggcggatgcagagatttcagcaggggaaagacccgcgggatgtgagatggcagcgttacctacgtggggagcagcacctgctgaggcccggtggggaagagggcagaaggctcgcagacagaagggagactggctgggcgtcctgtgcgggaaggacagggtaggagaggagggaacgggggtctgagaggaccacaggggtgagaagctatcagaggatgttaagcagggaatgccacttaagtttttattatgatttacgtttttccgatattaccctggctagggtgtggagagtgtgtcggagggagacggtcaggaagtgtgatagtctgaatgtttgtgtcttcccaaaattcagatgtcgaacttaattctcagtgcagtggt

SEQ ID NO: 27125 - DNA, 1048 bp, Artificial sequence
  DNA replication origin
acgccatgactctaggctattttccccagagaaccggctgccgctagcactctgttgtccagtatgttccttcccatcagcagttgagcttgcctgggtttgtccgtcagccgcagcctctttcgctttcctatcccacaattccttgaccatacccagtgactcctccgtggcctccagtagccctcttcctgacacctctcccacccattccgctacagacaagcaagaccccgctccggtgatcagaggatggcaggctccagggccctagtggctctatctccacctcgtgctgtagttgctgctgctgctgccgcccagtgtcgggcctccgatggcagaagcagggcttccccaggccagccgccacctctgtgcagcgtttctgaggatggtcttataaccgtctccaggtgtgccctcctgcccttttttgggccttttcactcttgacttcccagatgttttacttttggcatggaagtggggtagtttgtaggttgtcattcagagtcactttaaaacatctttaaaaaaagggcccgaggaatacataaacaaggccagtggagaaagagtcacctcctcaggagtgttagagctgggataggagggttagagccgggataggggtgttagagccgggataggggtgttagagccgggataggggtgttagagccgggataggagggttagagccgggataggggtgtcagagccgggataggagggtcagagctgggataggagtgttggagccggaataggggtgttggagctgggataggggtgttagagccgggataggagggttagagctgggatagaggtgttagtgctgggatatgggcagaggccctggagggagtttgaggcaggggtggagtgtgccaggccttctgcctctcaggggtactcagctgggtggtaaacatctggggcctatttataggaagctgtaatagtaattttctttcctcgcctgttctgccctcatcgtgattagcttttttttaacccaacctccaaaaagcatgtgtga

SEQ ID NO: 27126 - DNA, 1266 bp, Artificial sequence
  DNA replication origin
acgccacagcatggatgaactttgaggacagtatgccaagtgacacaaaaacacaagtgctaaatgactctgcttacatgaggtaactgcagtgtccaagtcatagaaacaaagtagaatgggggttgggtggggggcagtgggagttagtgtttcatgagtatagagcttcggtattggaggatgaaaagagtcctggaggttaattgtacaataacgtgaacgtaattaacactacaggtaagtacacggttgtgcactagtgggtgagatggtaaattttatgttctgtttgtttcaccagaaatacaaaaacaattgactgattctactcagattgatttactgggtacttagtgtgtgctagggacccttgcatcctctgctgggatagagtagggaccaccggaggtctcatcctccggagctcatgcagtaggaacgacagacagcattcaacatgcaaatcagtgagaaggaaaaccagagcgtggtaagtgccctgcagagaaccaggggacagcagtgacaggtatcagggccacctctctgagaggagtgaggtggccttagaggggaaggtgttaagccaacataagcaaccagccagtggtggtcaggctggcattggagaagcacagaaatagctggttgcttgtgggtgatggggagggtgatgggggcacagtgagaagcgggcaggccgaccttgcaggcggggaggccagggtgtggagagcagcctcattccaggcagtgggaagctgctgcacgggcttaagcagaagagggatgggctccagttagtgttttaaaatatgcttctgcctgcccttacctgggggaatggagttcggctcctggctctgtgtccctggcaaaccgctcacctgtgcaggtacatgtagagggcgaaggctccatcgggccaggcgcccagcagcactctggccctgcagttgtgggttttccagatgtgctgtgctggttttgtgtgtacatcatgtgattctcctttggttggggtggcggtgacacgggagcaggaatattttaaagaacaaattgcagacggaagcaggtggtgctgataccagaaaccgtgggtgtgggcagccaaattggaaaatggggcagtttaacagagctttggttgttcttagcttccttaacgaccgtggagtggaatgaaaaacctgagctgttccaggcaagttctgtttggagggaaaatgacatgaattttactcagttaccatgtggaag

SEQ ID NO: 27127 - DNA, 1528 bp, Artificial sequence
  DNA replication origin
agtaggtgcctggtgggagggagtgggtgcctggtgggagggtgggagggagggagtgggtgcctggtgggagggtaggagggagggagtgggtgcctggtgggagggtaggagggagggagtgggtgcctggtgggagggtaggagggagggagtgggtgcctggtgggagggtgggagggagtgggtgcctggtgggagggtgggagggagtgggtgcctggtgggaaggtgggagggtgtgggtacctggtgggagggtgggagggagtgggtgcctggtgggagggtggaagggagtgggtgcctggtgggagggtgggagggtgtgggtgcctggtgggagggagtgggtgcctggtgggagagtgggagggagtgggtgcctggtgggagggtgggagggtgtgggtgcctggtgggagggtgggagggggtgggtgcctggtgggagggagtgggtgcctggtgggagggtgggagggagtgggtgcctggtgggagggtgggagggagtgggtgcctggccatcagcacgaatcatgctatttcccacaactcggagagaaatgtgttggaatgaaggtggcaaccaactctagcagatttccttccaaatctggagggcttaaggagacagagccactcccatcccacagccccacagaaaacatgctctggagggaaacagatgggctcgctggcatcacgttctgctctatgttccagggggcttgtctaatgacagcccagccacaatcctttcccgtcctcccggcttaaaggttatctcacttgctaacggaaagcccttttctaaaacagccgcaggcaggaaagaactctttggatttcctaaactaggatttgagggattgagaaaggggggtgctggtggaggtggtcttgtttaaacaaggtgtcatctctgaacggaacttgtttttcaatttacttaatggtggtccagggctagagcggcaagaaagggctgctgcggtgtgagcccccctgtgcaagggggctgacgactctgcttccattcgccttctggcttggatcaaaaggccccggaaaccccaagtatagacgacagaagggctcagagtcatcgcacccagcccttctcacagtgggatcacccttattaggcaggcctcctcaggaaacatctcaatccaaacttcacgtgttagccccgggtctgccctcagccccgggctcttgagccaccagtgtcttagtacaagcagctgaagaggggtgcagggtgtttaatcaaaggcaaaaaacagagcccttcagtctttacggcccatgaggggtgcagggtgggagtgtctgtctccatgtaccaaccccattcccttcccactccctgcctgggatcaaacagccacccctgcctggatgataaattatgaaagcaaatatcaaagtcgaagctctgccttattactaccttagctgttgtaatgaatgtttattccttgcacttgtgccctggataattaaaaaaagagagaga

SEQ ID NO: 27128 - DNA, 765 bp, Artificial sequence
  DNA replication origin
tctgctcagtgatggggccacttgttaccagaaggcttccttcccaaaagtataagacccactccaagcggcaaagtcctgtgaatcccagaccctgctccaaggagtccatagtctagcggggggaacaaattccaacctctatgggaaaaagagcttactgtgttgacttagagaggctgcctagttgagagaaccaaggaaggagtcaggatgcccacgtctgtctatgtccgatttgtcaaatggggatggatgggtggtgaggctgactcctcaaatgttagacactgaaggaccttcaagggcatcctagctttacccacccattcattttcccaggtgtttttaaggaccaagtcatttgacatggcgggaacggggagccataagggtgtggaagttgtggacagggcctggtgagggagggcgggccaggcatcttgaggagcaggggctccaccctgagaagtgggaccactgaaggggaggggagcagtgtgccgaggttgatgttaggaagaacagcccagcagctgcatgcaggatggattggaatgggaagcagtgttgtggagcattggggctggcgtgagtgtgggagaggttggagtgggaatggaggagggcctggggtaaaaggaaggagctgcaggaattggtgactggcaggatgtgggggttggagagtcaggaagaggaggcaagagaaatccaggctactacacccaggcttcaagctgggcctctgggtgggtggtggag

SEQ ID NO: 27129 - DNA, 1111 bp, Artificial sequence
  DNA replication origin
tccgggcgggccccgccgcgctgacgcgtctcctctctccccgcagctgtcggcgacgcggcggccgacgtggaggtggtgctcccgtggcgggtgcgccccgacgacgtgcacctgccgccgctgcccgcagcccccgggccccgacggcggcgacgcccccgcacgcccccagccgccccgcgcgcccggcccggagagcgcgccctgctgctgcacctgccggccttcgggcgcgacctgtaccttcagctgcgccgcgacctgcgcttcctgtcccgaggcttcgaggtggaggaggcgggcgcggcccggcgccgcggccgccccgccgagctgtgcttctactcgggccgtgtgctcggccaccccggctccctcgtctcgctcagcgcctgcggcgccgccggcggcctggtactgcccgcgccacctccgggtcggcccgtccggtctgttgcgacgcagagtggtcgccgtggagggtgggggtggggcgcctctgctggaagtccagcctccaggggaaccggagggaaccccctgcctttccacctctccccatcccccaccccggccttcggtaccctctataggcaaagggggtgggaggggcagcatcccagtccagcgcctctgcagcccgtggaacccgcgcggagctggggttgcgtggggtatacgccgcccgctctagggagcgcagatctggcagggatgaaactgtcagggccctggacagaggcgccttggccccaatgtagagaacactgcatctgcaccgccgtgtcaaagtgtatgtcacgggagtacctgtgtacgtgtaggtgttatgttcttggacttggaggtgggggagtgggcattcacctcccttccttttgagtcttctctctgtacctggaacaggaagtttggagaggtacccagacaggccacggctcaccccactcttcctagctgaaacgtaagaaacaggagagaaagggtgtttgtctttgcttccttatactattagtaggcatttatctggtgcccacccccaaccaggcctgaggggtgtttacattggtgataaaccctattcctgcccccaggagctcccttgctg

SEQ ID NO: 27130 - DNA, 1226 bp, Artificial sequence
  DNA replication origin
gccgccgcccccgggccgccaggacgccgcgagaacgcagagggaaggtagccgcaggacgcggggtgaagagggctgtgggagggggcgctacctgtgcccgggtccagtccccaaaccagcagcagcagcacgggcaggacgagcggaggcagcagggcgccgtcacacatggtacccgggaccggcagcccccccggaccgtggcggcgaagcaggagcgcgctaggcggcggcgccagccggagtgaagccctccagcctttggaaaaagtaattagcgctgcggacaaacccaacgtggtaaaccccaagccccgccttcccctcggaaggcgggaggggattgggccctcgctttcctccgccccgcctcctccttccctactggttgggatgggtcgaaaccacagtgcgtagttaggttgtcagcgctttcttacacgtggtttctgggcagtggcggggacacggcaccaggtggcgcgcgggagccgaccggagccgtgggaccctggaagagctggaggatgcggggctggtcttcagagcttgtcctcattttggaactctctcagcctgctgcccagtttcccgggaaggtagggcggaaatcgccccggccaagcggtttcatccaaaactgcatataatctttacatctgaagttaggttttagttgtttgtggccgcaaagactcccagtccactttcccgcacacctgagttagcacctgaaggctatatccgcggcgtttatccaaactcttcacacctcctgtcttctttaatcccacaggagccagtgcaacacgcatgctcacaccctcttacagactgaaaaactgaggaagagagagagcttaaggaaaaacgctgaagttacccagagagttcctgttggagcagaggctagaatttgtgatcctgatttctggcttggtgcttcttattaacagcaggatccccccgccccgagggaagcaggactcagtgttacaggttaggaaacggaggcacaaagtcccaaagcctagccttgaacgtgagtctcccagaaacagaatgagttgatcctttcctgccacaatataactgaggtctgcagggaaggtgactccattagcttgctgaatagcatcttgtagaggctcatgcctgtaatcccagcactttgggaggccaaggcgggcgggtcacgaagtcaggggttccagactagcctg

SEQ ID NO: 27131 - DNA, 951 bp, Artificial sequence
  DNA replication origin
accttcgctttggggactgcgttttatccacgataaaccatttcccgagaaaggggtgagctctgctgctgcctccgcgagagcaggcgccggttcaagtcctgccgcccccgcccagccctgcacccgtccaggccaccccgacagccgcggcctcggccgtgggcaggacgggaaggctgcgaggccgggcggagaggcgccctgaggccggagcgcgtgaggacgaccttccctcgctggagacgccgccgccgccgcgcctggccgggctgcaccggggtctgggcggagggcgcgggcgcgcggggccgcgaggggaagagcagaagcggaggcgaaggcgaggggcgccgcgcacctgtcccgggctgcacggaagcggcttccagtggggactggcggtccctcccggccttcagggcctactcgcggctctgaaaccccagtgccaggcgcctgtcctggcccacgcttcgtccacctcccgcgggaaacccctcgcagcgggggtcggaggggtgccctgggagagatgagggggagaagcatgagaccaggtcctagggggaaaaagagaaacaaaaggtctgattccctccctcctcgcaccccctccgtctgtttctggcatcaacttcttgccaggggctccagggaaggggaatttgataaccacgtaacttcaccctcagatggcacaggccaaggcctttctgcggagcggagctgccggtgatttccagaatgcactcacctttctcctctcttcgctgtctctctctttccgtccctcattcccttcttcacttccttcccttcttcccgccctctgttttctctcccttcctccctccaccttccaccccccaacccctccccaagatctgagttgcacagatctgatgtaatcacaccctgcacggtgccagcagagagccatgccaagct

SEQ ID NO: 27132 - DNA, 844 bp, Artificial sequence
  DNA replication origin
ggttggggcgtggaagtaaggggttggggcacagagataagtggtcagggtgcagaaataagggattggggtgcagagataaggggtcggggcatggaaataagggatcggggcacagagataagaggtcggggtgcagaaataagggatcagggcgcagagataaggggttggggcatggaaataaggggtaggggcacagagataagaggttggggtgcagaaataagggatcagggcgcagagataagaggtcggggtgcagaaataagagattgaggcacagagataagaggtcagggtgtggaaataagggatcagggcgcagagataagaggtcggggttcctgcccctcccccagaaaagcgggacttgccgctaagggtgaaggaccaaggcaggcatccctgcgtggtctgacacctttgaaacatgggtgaataatcagagaggcgtccctgcaatgattaaacaccaagggaaggctgccttccctagtccgtgaccagtgccggagttttgggtccatggataaaacatgtctcctttgtctctaccagaaaatgaaaggaattgaaattaagagaagggagaaattgaagtgtggtgccaagattgaaaggagaaagaggttgagggatagcgagagaggttcgagaagacagtaaaaagaggccgcttaccggatttgaaattggtgagatgtttcttgggctggtcggtctgaggacctgaggtcgtaggtggatctttctcacagagcaaagagcaggaggacaggggattgatctcccaagggaggttccccccctccagtcacagcaccaaatttcacgcacgtcc

SEQ ID NO: 27133 - DNA, 1437 bp, Artificial sequence
  DNA replication origin
caactcagaaatacattgttacttggctgcctctattctattattgtacaccttgaaggcgaggttaattaaatcctgttgtggggttaaagggccggaatttaatttttggagttttatttaatgttgggagcagattgggtaataaaatttatattgagaataagacggcccttttgaccttttagggtctagggctgtaaagtgtctcagggttgctgccaaacgagtcatgaactgggctgggtttttatatttgatgaaaaagagcctaaacactatctgatttggaataaagaaaaaggagcgttaaccttgactatgcctttagctctccagccacctttttaagagtaaattgctgggcaggtaggggagggctagtcatggaacaaaactgtaagccggcctgggtgtgaggaggggaggtgatataagtattatatggtggaggagcggaggctgaggaagaattgggacctagctcagcctggtgaggaggggagaggtcagatgggtctgtagaaaaggaagattagaaagactcagcgacgcttggggttgggactgaggggacaggcgggagggaaagaaggaagatttgggatgagttgcactgggaacacagactgggggggactgatgtgtaaaagaatgcctggacgtcaggcacctcagaccgtttgcctattttacgaaaagaattatttagattttgtaggatggaaaaattgaaagtgccattttctggctatttggaaccactgtcaagtttgtattggggtcaagcggcattgcagaagaaaataaggcatttaggttttaggtcaggtgcgagttaaagaggttttaggtttttgagaacacaggctaagggagaagaagggggaatggagggtggaaggttgcccatagtgaaggaggcaagtttaaagagaagggtagagacacggagggaaggggttcgggtgtttttaccctccagaaaagcgagaaaggggttggggcgtggaagtaaggggttggggcacagagataagtggtcagggtgcagaaataagggattggggtgcagagataaggggtcggggcatggaaataagggatcggggcacagagataagaggtcggggtgcagaaataagggatcagggcgcagagataaggggttggggcatggaaataaggggtaggggcacagagataagaggttggggtgcagaaataagggatcagggcgcagagataagaggtcggggtgcagaaataagagattgaggcacagagataagaggtcagggtgtggaaataagggatcagggcgcagagataagaggtcggggttcctgcccctcccccagaaaagcgggacttgccgctaagggtgaaggaccaaggcaggcatccctgcgtggtctgacacctttgaaacatggg

SEQ ID NO: 27134 - DNA, 1285 bp, Artificial sequence
  DNA replication origin
gggtaccagctgtgcagcgcaggtgagccgcttagcccctctcacccagtcacgagtgatggtgtctcgcgaggccggtgtaggacgagtgtggtccaggcgcagtacctgaaaagggcgcccagggagggagccggcggtcgttgggcgctctctcggcccgcacccgggcatccctcgacccgggctggaggggcagtgtcccgggatgcaccgctgcggggaccccccgcccggcctcgcggacccgcctcggcccaggacggaggaggaggcaggtgcggggcccggggcgggtgcggggacggcaggtggagggaagagggcatcgggccctgctcaccgcggtgtgtggggctgcccgaccgcgccccccgcaggtgccgcccagaccccggccgagggtcctcgtccccgcgcaggcccaggtcgaggccgagagagggcccgtgtccccgcgcagacctaggccgagagagggcccgtgaccccgcgcaggtcaaggccgagagagggcccgtgtccccgcggaggtcaaggccgagagagggcccgtgtccccgcgcaggtcaaggcccagagtccccgtgctcgcacagatggtgtcctggggcccagtcgcgctccccgctcgcggcagcccccgtgtactgggccttgcaaagtccgttaggagcgctccagggcgacagtgcccagcggttaacaagtttgtaattactttcgtgggtttctacgttgcaaattgagaagagggttgctgggttgggcccccctcctctggacgctaaccccacccaggtaaacagggatctggcccaggttcctgctgggtgccgaggtgggggattcagtggggagcactgaaatgtgctggaggcctggacgtgattccactgccaccaccccctttcccccggctacaaagcctcctgcggtgtgctttgtttttcccaggtagcagttattagccctgtatcatgactaaacgaacactaaagatacccttttacttattctcaaattcaaaacatgtatcaggggtccagaattatacatgctaggacctcaaaggtaagaaaggcacccacccacagccacgtgcggtggcacacgcctgtaatcccagcactttgagaggccaaggtgggcgaatcaccagaggtcaagagtttgaaactagcctggccaacatggtgaaaccccgtctctactcaaaatacaaaaataagccgagcgtggtggtgggcacctgtgatcccagctactggggaggctgaggcag

SEQ ID NO: 27135 - DNA, 5733 bp, Artificial sequence
  DNA replication origin
tgtgaagtatgaacatttacatcattgcacaatttctgtggatctgccataatgacttctatatatacacacaggcgcgcgcatgcacacacacacacacacacacacaatttgtggttataattgaacaagtccagttcaaacttataaacttaagtctatgagaaaaaccaagacatcacagtaggaacacaacactaaaggataagataaaatctacaagcaaacaattttcaaaaccttcctacagtgtggaattccagttgcttaaataatgccagttacattaatttcaactgtgctctgatctgtttctatacatacaggcacaaagacagaaaagtggaaatgtccttatcacgtgaagaagacattgctactggtctgctcaggagcagctctttgttgcaggcagattccagccttcctgcttcttccagatgtgagctcctgtcctcagaaattcttgaagatttctaaacccttctgcggcacggtcgcggctgtgtcccagtcattctcggggtaagttccgaagttggaggtgtcgccttcgcgggctatcttgggcacgatgggaggcttcagttttctctgaggaacagcttcccagtccacagagcggaaccaccgatggcgtttcacatcattcgccccgttcttcatatttcctaaccaccttgttctgtcaaccacgagcagtttcttaatgagatctttcacatggaaatccaaatgtctggggaaatctatcttgtctgcaagaattttctgataaatgccaaacatgttgtcacacacacacacacacacacacacacacacacacacacacacaaatggaggaaatcccgagagcatctcgaatatcaggatgctgagggcccaccagtccacagcccttccgtgaccctcgctctgaatgacttcgggggccaggtactcgggtattccgcagagggtccaagtcctgtctaccagcttcttggcgaacccaaagtccgtgagcttgatgtgtccgtccctatccagcaggatgttctccggcttcaagtccctgtagatgatctccttagagtgcaggatggcacagatgatctctgcagagtagaagagcccccggttgcgcaggtagctgaagagctcacagcccggaacatactccatgagcctgcagaggaagcgctagtcatgccccgtccagcacagcctgatgagaaacgggtggatgattccttcaggacgcagatgagggacgggtggatgattccttccggacgcagatgagggacgggcggatgacttccttccggacgcagatgagggacgggtggatgacttccttccggacgcagatgagggacgggtggatgacttccttccggacgcagatgagggacgggcggatgacttccttccggacgcagatgagggacgggcggatgacttccttcgggacgcagatgagggacgggcggatgacttccttcgggacgcagatgagggacgggcggatgattccttccggacgcagatgaggaacgggcggatgattccttccagacgcagatgagggacgggcggatgacttccttcgggacgccgatgaggaacgggtggatgattccttcaggacgcagatgagggacgggtggatgattccttcaggacgcagatgagggacgggcggatgacttccttccagacgcagatgagggacgggtggatgattccttcaggacgcagatgagggacgggtggatgattccttccagacgcagatgagggacgggtggatgacttccttcaggacgcagatgaggaacgggtggatgattccttcaggacgcagatgagggacgggcggatgacttccttccagacgcagatgaggaacgggcggatgacttccttcaggacgcagatgagggacgggcggatgacttccttccagacgcagatgagggatgggtggatgattccttcaggacgcagatgagggacgggtggatgattccttccggacgcagatgaggaacgggcggatgacctccttccggacgcagatgagggacgggtggatgattccttcaggacgcagatgagggacgggtggatgattccttccagacgcagatgagggacgggcagatgacttccttccggacgcagatgagggacgggtggatgattccttccagacgcagatgaggaacgggcggatgacctccttccggacgcagatgagggacgggcggatgattccttcaggacgcagatgagggacgggcggatgacttccttccagacgcagatgagggacgggcggatgacttccttcgggacgccgatgaggaacgggtggatgattccttcaggacgcagatgagggacgggcggatgacctccttccggacgcagatgagggacgggcggatgacttccttccagacgcagatgagggacgggcggatgacttccttccagacgcagatgagggacgggtggatgattccttcaggacgcagatgagggacgggtggatgacttccttccagacgcagatgagggacgggtggatgattccttccagacgcagatgagggacgggcggatgacttccttcaggacgcagatgagggacgggcggatgacttccttccggacgcagatgagggacgggcggatgacttccttccagacgcagatgagggacgggcggatgacttccttcgggacgccgatgaggaacgggtggatgattccttcaggatgccgatgagggacgggcggatgacttccttccagacgcagatgagggacgggcggatgacttccttcgggacgccgatgaggaacgggtggatgattccttcaggacgcagatgagggacgggcggatgacttccttccagacgcagatgagggaggggtggatgattccttcaggacgcagatgagggacgggcggatgacttcgttccagacgcagatgagggacgggcggatgattccttccggacgcagatgagggacgggcggatgacttccttccagacgcagatgaggaacgggcggatgacttccttcaggacgcagatgagggacgggtggatgacttccttccggacgcagatgagggacgggtggatgacttccttctggacgcagatgagggacgggtggatgattccttctggacgcagatgaggaacgggcggatgacctccttccggacgcagatgagggaggggtggatgattccttccggacgcagatgagggacgggtggatgattccttcaggacgcagatgagggacgggcggatgacttccttccagacgcagatgaggaacgggcggatgacttccttcaggacgcagatgagggacgggcggatgacttccttccggacgcagatgagggacgggtggatgacttccttcggacgcagatgaggaacgggcggatgatttccttccagacgcagatgaggaacgggcggatgacctccttcaggacgcagatgaggaacgggcggatgacctccttccggacgcagatgagggacgggcggatgacttccttcggacgcagatgagggacgggtggatgattccttccagacgcagatgaggaacgggcggatgacctccttccggacgcagatgagggacgggtggatgacttccttccggacgcagatgagggacgggcggatgacttccttccagacgcagatgagggacgggtggatgacttccttccagacgcagatgagggacgggcggatgattccttcaggacgcagatgagggacgggtggatgacttccttccagacgcagatgaggaacgggcggatgacttccttcgggacgccgatgaggaacgggtggatgattccttcaggacgcagatgaggaacgggcgaatgacttccttcgggacgccgatgaggaacgggtggatgattccttcaggacgcagatgaggaacgggcggatgacttccttcgggacgccgatgaggaacgggtggatgattccttcaggacgcagatgagggacgggtggatgacttccttccagacgcagatgagggacgggcggatgacttccttccagacgcagatgagggacgggcggatgacttccttccagacgcagatgagggacgggcggatgattccttcaggacgcagatgagggacgggcggatgacttccttccagacgcagatgagggacgggcggatgacttccttccagacgcagatgagggacgggcggatgattccttcaggacgcagatgagggacgggtggatgacttccttccagacgcagatgaggaacgggtggatgacttccttcgggacgccgatgaggaacgggtggatgattccttcaggacgcagatgaggaacgggcggatgacttccttcgggacgccgatgaggaacgggtggatgattccttcaggacgcagatgagggacgggtggatgacttccttccagacgcagatgagggacgggcggatgacttccttccagacgcagatgagggacgggcggatgacttccttccagacgcagatgagggacgggcggatgattccttcaggacgcagatgagggacgggcggatgacttccttccagacgcagatgagggacgggcggatgacttccttccagacgcagatgagggacgggcggatgattccttccggacgcagatgagggacgggcggatgacttccttcgggacgccgatgaggaacgggtggatgattccttcaggacgcagatgaggaacgggcggatgacttccttccagacgcagatgaggaaagggcggatgacttccttcaggacgcagatgagggacgggcggatgacttccttccagacgcagatgagggacgggcggatgattccttccggacgcagatgagggacgggcggatgacttccttccggacgcagatgagcgacgggtggatgacttccttccagacgcagatgagggatgggcggatgacttccttccggacgcagatgaggaacgagcagatgacttccttccggacgcagatgaggaacgagcagatgacttccttccagacgcagatgagggacgggcggatgacttccttccggacgcagatgagggacgggcggatgacttccttccggacgcagatgagggacgggctgatgacttccttccggacacagatgagggacgggcggatgacttccttccggacgcagatgagggacgggcggatgattccttcgggacgcagatgagggacgggcggatgacttccttccggacgcagatgagggacgggcggatgacttccttccggacgcagatgagcgacgggcggatgacttccttccggacgcagatgagggacgggcggatgacttccttccggacgcagatgagggacgggcggatgacttccttccggacgcagatgagcgacgggcggatgacttccttccggacgcagatgaggaagggattccttccggacgcagatgagggacgggcggatgattccttccggacacacctctcaatgtgcacgtgctgctcctgccaggcggatgacatcaggaatgctcatcaacttgagggcgaagaaatgcttggcggtcttctccttcaccgggtgcacccgcccgaacgtcccagtgcccacggtggccagtgtg

SEQ ID NO: 27136 - DNA, 749 bp, Artificial sequence
  DNA replication origin
gcaagaaaaagcagagattttcctccctcctaccctcccagccagcactcttcccctcgggggaagtaaaggactttacctgtctcctcagctgctgcttctcttcctcctttcagcctcctctacactcaccaacttctccattgaagaaataccccaggcagggccggaccctggtgttcctgatcctcctcggtgcctcacggccccagcccggcgaacatccgaacagccgagaaggcaggaggtggcgatcccggccgccgggcagccttggggcagaggtgcagggaggcagggaggaagtcctggctcgggtgggggggcagtcccggtccagggctcggagcagggggctgccgcgctccgggccggaggcttccagctacggagggacccaggaggtctcgggacggcgaggtcccaggtcatacggggcccgaagtgccagccgtggggtctccggacagggggctttcgggatgcactttgcactgggccacccccgccccctcccttcagcactttggggtcactgggatgggaccaagccttcaacaaccaatcagcgcccgcagtggagcctgagcctggagccgtaaaccaggtccgggatgggtgggggtggagggagtagggacgacttggttggttggttgcttccttctctcctccttacccccggcagcccccaccctctgcctgccgtaaagttgcctttgcattcgcgacagttaagggaggcgtgc

SEQ ID NO: 27137 - DNA, 951 bp, Artificial sequence
  DNA replication origin
cagagggtgggggctgccgggggtaaggaggagagaaggaagcaaccaaccaaccaagtcgtccctactccctccacccccacccatcccggacctggtttacggctccaggctcaggctccactgcgggcgctgattggttgttgaaggcttggtcccatcccagtgaccccaaagtgctgaagggagggggcgggggtggcccagtgcaaagtgcatcccgaaagccccctgtccggagaccccacggctggcacttcgggccccgtatgacctgggacctcgccgtcccgagacctcctgggtccctccgtagctggaagcctccggcccggagcgcggcagccccctgctccgagccctggaccgggactgcccccccacccgagccaggacttcctccctgcctccctgcacctctgccccaaggctgcccggcggccgggatcgccacctcctgccttctcggctgttcggatgttcgccgggctggggccgtgaggcaccgaggaggatcaggaacaccagggtccggccctgcctggggtatttcttcaatggagaagttggtgagtgtagaggaggctgaaaggaggaagagaagcagcagctgaggagacaggtaaagtcctttacttcccccgaggggaagagtgctggctgggagggtaggagggaggaaaatctctgctttttcttgcctgcccttgccactctccagcccctttcctgagctcccccctccccacctctgagacactacaccactcactggtttctgtttttctaggtttgagctggctgaagaagacgcgaaagcaggaagaggtctgcccacctatcagagaagcagaaggcacagtgcctctgaccagcatcgtctgtaaaggtaatgagccagccctcccctcccccgttgtttattcctggcccctacctcattaagcagtg

SEQ ID NO: 27138 - DNA, 1083 bp, Artificial sequence
  DNA replication origin
aaggagtgaggaaggagtagagaggggctgaccacattcaccttggaagatgtgtaaggaacctttattcttatcagcagaataagggtttttaaggcagagaaagggaagcaagagccaaagaggtggttcagtatccacttttccctgaggagccccagcaagttatgggaaactctattcttcctctagatgtggctcaatacccatttatattaaaggctgtgacaaagcttacagtaaacataagcatttaagttttttaactcagcattttccaaatatgatcaagactctttcttttagggcacatttgggaaagtctgggggcatgtggtaagaagtcattgcaggctttaagccctctagaaaggtcactgtaacagctgtgtctaggccagatgggaggagaggaagatgaagagtgcagagctggatatggcaagattgacataggggcagactctagagaatttaggagaaagaatcactaaaagtaggtgacctgacccagtaggagtgtgtgcatgtgtgtgtgtgtgtatgcacacaaagttttgtgtatgtgtgtgtggtgttggaggtggaggtggaggtggtggtgaagactgtggaggtgatggaggtggaggtggtgttggtggtggtggtggtggtgatggaagctagaggtgacaatgatggtgatggtggtggaagagaagctagaggcgaagatgaggcagtggaggtgatagtggtggaagagaagctagaggcgaagatgaggcagtggaggtgatgatagtgttgatgttgttagtggtagaggtggaggtaaaagtagtgtaggtggagatggtggtggtagaaatggaggtgaaggtggagattatgatggtgtttatattggaggtggtggtggaagttgtgatggtggtggtggaggtggaggtggaggtggaggtcatgatggaggtggaggtggtggtggaggtcatggtggaggtggaggtggaggtggaggtcatggtggaggtggaggtggaggtggagatgatgatggtgtttatattggtggtggtggtggtggcagaggtaaag

SEQ ID NO: 27139 - DNA, 780 bp, Artificial sequence
  DNA replication origin
gtggtggaggtcatggtggaggtggaggtggaggtggaggtcatggtggaggtggaggtggaggtggagatgatgatggtgtttatattggtggtggtggtggtggcagaggtaaaggaggtaaaagtggtgacgatggtggaggtggaggtggtgggtgtggggatgggggtggaaatgggggtgaaggtggaggttgaggtcatggaggtgttcgtacaggtgatggtagagtggtcataggggaggtggtgatgatgagtgcaggacatagtaggaatttctgattcgtgtctgcatggattcatcatgatagagaatgtagaatgatggtaggtttgagaccaggatggaagttaaaaaatagctcatttggacatgctgagtttgatcgcagaacagacacaggatgtcctgaagaactaccatgtaggaactgaggctcaggggagggttctgggctggaaacacggacttgggagtcaacagccacagaaatggacggaacccctggaaaagtgagcagaaggaaagacaggttgatgtcgggcccaggttacgatgtgctctttaagctctagtaggaaggggcagttgtgcctctgaagtgttaaatctatcggaaaattcctgagtataagatccagcggtgcagttgctcatgctcttgcgggaaggagtgccaacccaattccatctgaaccaggatcggcctacccactgctattcctcaccgtggtcatcaccgcctcctccacaagcaccatcaccacaagctct

SEQ ID NO: 27140 - DNA, 3540 bp, Artificial sequence
  DNA replication origin
tgccagctctgcattgcaatgggcacgcagctggaggccacaaggccagagaggtgctgaaggcttggatgagcttggagctggggatgacagcttactgagccacaaggactttcctgtcaagttatcttgtaaaaggccaaaaggtttgagatcagactgacccaggttttaggggtggagcctcaagggtatcttcttggtggcaggcctgaaagaaggactggagaaggctcaagaataaatgtgtgtacttgtttcattgagctttccccagagggaagagggaatggactaacagctccattttggtcctgttccatgacagacacctcctagactgccaagtgagagtgccaagggggcagctagaataagagtacgggtggtgaggcaaggtctggagacatcctgttggcatcctcagagtacagaaggtatgtaaaagccatgaggctgaatgcgatcctctgaaaagagagatgaggaggagaagggacccagggccaaggcagcgcgctgcagtgttgaacgttggtcagacagggcgaggcatgggtggaaagtgcagttgcaggaagctgagtgggtgacaggcctaggaagtcgggaggggaaggtattaaaaaaggaggagtggacggacgactgtgaccaacgccgatagggagaaaaaagtgtctactggatttgtgaacaaggaaacattggtggccctaataagggagcttccacggagctaggggacaatagtcaggctggagagagttgaagaggtatggatcgtggaggtggggaaatggaggcagcgtgtagacagccattttggagaccctctgtcgtgaaggagggcagagaatgagatgaagaaatggggcggagggtgtggttttttcaggtagaaggtgctggaatctgcatgtccaaggatgatccagtgtacaggctgaaggctatggtgagagaggggaagggccagaggggcaggcgcaggatgccacgagatgagggctggggtaggagagcaggtcacagttcccaggactcagacgtgcttccatgggatgcaggaagtgaagggaggtcccttcacttctagtgtttcacgcaggaaccaggaggtgagggcagccctgtgggtggaccaggggaggagacagcatgagatggcctcagagagcagaaaagtcaactccaaggaagggattcgggaccctgagcaatgctgagtgcccctgagtcatgttctaatggatggaggcagaaccagtcgtcctggttgggagattttctctggcaacaacagctatgtggagaaggcaaatggctgcgtccattcaagattagggtcagtcatgggggtatagtactcacagtgccagggtgggcaggtcagtcatgggggtatagtactcacagtgccagggtgggcaggtcagtcatgggggtatagtactcacagtgccagggtgggcaggtcagtcatgggggtgtagtactcacagtgccagggtgggcaggtcagtcatgggggtgtagtactcacagtgccagggtgggcaggtcagtcatgggggtatagtactcacagtgccagggtgggcaggtcagtcatgggggtgtagtactcacagtgccagggtgggcaggtcagtcatgggggtgtagtactcacagtgccagggtgggcaggtcagtcatgggggtatagtactcacagtgccagggtgggcaggtcagtcatgggggtgtagtactcacagtgccagggtgggcaggtcagtcatgggggtgtagtactcacagtgccagggtgggcaggtcagtcatgggggtgtagtaatcacagtgccagggtgggcaggtcagtcatgggggtatagtactcacagtgccagggtgggcaggtcagtcatgggggtatagtactcacagtgccagggtgggcaggtcagtcatgggggtatagtactcacagtgccagggtgggcaggtcagtcatgggggtatagtactcacagtgccagggtgggcaggtcagtcatgggggtatagtactcacagtgccagggtgggcaggtcagtcatgggggtatagtactcacagtgccagggtgggcaggtcagtcatgggggtgtagtactcacagtgccagggtgggcaggtcagtcatgggggtgtagtactcacagtgccagggtgggcaggtcagtcatgggggtatagtactcacagtgccagggtgggcaggtcagtcatgggggtatagtactcacagtgccagggtgggcaggtcagtcatgggggtatagtactcacagtgccagggtgggcaggtcagtcatgggggtgtagtactcacagtgccagggtgggcaggtcagtcatgggggtatagtactcacagtgccagggtgggcaggtcagtcatgggggtgtagtactcacagtgccagggtgggcaggtcagtcatgggggtatagtactcacagtgccagggtgggcaggtcagtcatgggggtgtagtactcacagtgccagggtgggcaggtcagtcatgggggtatagtactcacagtgccagggtggggaggtcagtcatgggggtgtagtactcacagtgccagggtggggagggaggtaagggttacgatgatggaggagggtgtaaagaaagggagggagaaggtgctgagggtggggatgggaggactggggagaaagtggattgcagccatggggacattgagtgggtgagctgggaggaccctgtgtggcagccacagaggggatactggagatggagaccttggatgtggggaagctactggcaacagcagggtgagaccatgggagtgttgggggcggggaggaggaggacagctcaggcgctggggaggtcaggacctggctcgccattgagagagacagtctgccatgtggtgacaagagacgaagccaatgagcagctcaagtctgccccgaaatgaaggttgatggaccacagcagcggggagaggaagccagtggccaggaggaatagagaggtgtagaagcagccgtgggacactcccagcttccaacccacccccaactttcttacaccagcaacccttcccctccttgagaggctgcaggggaagtggggccctcaggggagggggcagccaggttcccgcacaaggaagatttagagaagaggtggaggagataggagagttccagagagcctggtgacgggtttggggtggggagggaatgaatggggagtcaggtcacattaaggaacaaatgaatgagctgccagtgaatgaaccgcagcagtgccacgctggttaactgggaagaggaaatgtcagtgctgtcatgctgtacgcattccacaccattgttcattgttgctatgctggtgccagcagggcggtgggcagatgggtcttgtgtgtgtgtgtgtgtgtgtgtgtgtgtgtgtgtggcgtgatgtgcctcaccggtgtacatttcagttcttggtaatcctgttttgagtctcacagaa

SEQ ID NO: 27141 - DNA, 919 bp, Artificial sequence
  DNA replication origin
cgtgaggagcccctctgcctggctgcccagtctggaaagtgaggagcgtctctgcccggccgccatcccacctgggaagtgaggagcgcctcgtcccggccgccatcccatctaggaagtgaggagcgtctctgcccggcagcccatcgtctgagatgtggggagcgcctctgccccgccgccccatctgggatgtgaggagcgcctctgtcccgccgccccgtctgggaggtgaggagcgtctctgcccggcaaccgccccgtctgagaagtgaggagcccctccgcccggctgccgccctgtccggaagggaggtgggggtcagccccctgcccagccagccgccctgtccgggagggaggtgggggtcagccccccacccggccagccaccccgtccgggaggtgaggggcgcctctgcccggccgcccctactgggaagtgaggagcctctctgcctgaccaccccgtctgggaggtgtacccaacagctcattgagaacgggccatgatgacaatggcggttttgtggaatagaaaagggggaaaggtggggaaaagattgagaaatcggatggttgccgtgtctgtgtagaaagaggtagacatgggagacttttcatttttttctgtactaagaaaaattcttctgccttgggatcctgttgatctatgaccttacccccaaccctgtgctctctgaaacatgtgctgtgtccactcagggttaaatggattaagggcggtgcaagatgtgctttgttaaacagatgcttgaaggcagcatgctcgttaagagtcatcaccactccctaatctcaagtacccagggacacacacactctgcctaggaaaaccagagacctttgttcacttgtttatctgctgaccttccctccactattgtcctatgaccct

SEQ ID NO: 27142 - DNA, 1135 bp, Artificial sequence
  DNA replication origin
caccgcccttaatccatttaaccctgagtggacacagcacatgtttcagagagcacagggttgggggtaaggtcatagatcaacaggatcccaaggcagaagaatttttcttagtacagaaaaaaatgaaaagtctcccatgtctacctctttctacacagacacggcaaccatccgatttctcaatcttttccccacctttcccccttttctattccacaaaaccgccattgtcatcatggcccgttctcaatgagctgttgggtacacctcccagacggggtggtcaggcagagaggctcctcacttcccagtaggggcggccgggcagaggcgcccctcacctcccggacggggtggctggccgggtggggggctgacccccacctccctcccggacagggcggctggctgggcagggggctgacccccacctcccttccggacagggcggcagccgggcggaggggctcctcacttctcagacggggcggttgccgggcagagacgctcctcacctcccagacggggcggcgggacagaggcgctcctcacatcccagatggggcggcggggcagaggcgctccccacatctcagacgatgggctgccgggcagagacgctcctcacttcctagatgggatggcggccgggacgaggcgctcctcacttcccaggtgggatggcggccgggcagagacgctcctcactttccagactgggcagccaggcagaggggctcctcacgtcccagacgatgggcagccaggcagagacgctcctcacttcccagacggggtggcggccgggcagaggctgcaatctcggcactttgggaggccaaggcaggcggctgggaggtggaggttgtagcgagccgagatcacgccactgcactccagcctgggcaccattgagcactgagtgaaccagactccgtctgcaatcccggcacctcgggaggccgaggctggcggatcactcgcgcttaggagctggagaccagcccggccaacacagcgaaaccccgtctccaccaaaaaaatacgaaaaccagtcaggcgtggcggcgcgcgcctgcaatcgcaggcactcggcaggctgaggcaggagaatcaggcagggaggttgcag

SEQ ID NO: 27143 - DNA, 1175 bp, Artificial sequence
  DNA replication origin
ccgcactccagcctgggcgacagagcgagactccacctaaaaaaaaaaaaaaagagagagagatgcgacataataccttgtcgaatgttccatttcctcacggcgttgcttaatggtactttgaaagttcagtctaaggctggcttgggttcaggttcaatgtcattggctccctcctgagtggggctgtgcgtcccctcgctgtttggaggggacgttcggagcagcccgagaggccaccatgccccccgccccccgctcccgggtccccgggaagaggcagcccgacggcccggctgcagacctcggctctcccgcaggctgcgggtgggttacctggctccgggagaccaggtttcctcgtctggggagcgcagcagtctcatagctgccgtgagagggttcgcgacagaatcaccgcgaagggcgggaggacccggatcgtcgggagaggtgggctgcgtgcagccactgcgcggggacccggatgcacgcacagggcgtggcagggggcggggcagggccgttcggtggcctgtgtggagcgatgccacctgctggttctgtacgtccaggggggcagcgtgtgcacagctctgggaccccgaggtcctcggggggacacactgctctctccagcgcacacagactccacacacacacgcccgcatcacaacggcaaacacgcgccaccccccagttacccggagacacatgcgggtaaatatgaccccaggaacttgctgaatacgagtaactgtgtttcattcctcctacccgtccgctgtgggtttactagagtttgtcttagatggcaaataagaaagctttttattttaaatgacagtcagggcaagaatcaggttgctaatttccctgagacgcatgagggtgtaatgacacatccaggctggaaaccaagagtcattttccttgaaagacttaacttgaaagtcggtctgtactagcgagttccaaggccctgatgaaaaacagaaagcggcagggaaaggaggaaggaggagagtgagagctaagtggatggcgttcgggacacggctctcgttggaaggcacagactctctgcagctctgtgcgaaacgctccttgctggttggagtcctggcaccaccggaatcactgtgctcagatgtcctttcaggggcagtgggtgg

SEQ ID NO: 27144 - DNA, 1206 bp, Artificial sequence
  DNA replication origin
ccgcggggccacggcgccccgctgcctccccgaagtcgggcgggctccccgcgcggcacatgcagcccactcccagccgccgcacggcgcgctcgcccgacttcggccggctcgcggcgctcgggaatgcgcgctctccgccgggccctgcgccgcgcccgggtcggggctcctggcggggccgccccgcgtcgctgcgcacgtgccctgctcttgggtccagccgcccgatccccgctagcaggacagacgcccgctgcgccccaccctgcccgagcgcggacagccggcgggcgcaccccggcccagccggcctggagtctccccggggccctggggcttcgcccgcggtggggcagaaggcgaaagcaaagcgccggacccgggcggctctccgccgaggagccctggcgccgctgggcctctgaccttcgcaggcgcacaccgccttccatcccagagcccggggggcaattgatctgattttttaaatgcataaattatacctcgattaaaaaatgataattaaaaaaaagcacatgagacctttgctgctaatcgttttaagagtttaaattcttgtcgcgcattacttcccaggagggggaggtaagtctagctcctctccttttgcgatttgggaaacgctccatcaactcccaggacttgacccaggccccatctgagacacggaagcggcttctgatgcatgccattcctcaggtcgctggaacaaagaccggaggcacggactcctgacaaaagctgtgctttaatcctcagataggctcagccccttcagttcatctctttctgtaggtaaccccaagtaatcaacaatggggaggggtctccttattttcctgttttgaggcctccgtgtccatctctctgtcccctggtgtccttctggatagagctggatagaggggtaagttttgaagcttttggaaaccccacatctgacccttaccctggggttgtggaaaggtcttgtgctgttatggcctggagtgcacagctgaggccggggaaaggggataatggaccctcgagcggggcagccttgaccgatatcggctggctaacactggcgagtctgagcaatgccagctctttcctcagctgcttctgcaaatccggggctccctgccctcttggctggccccatggctcccactcagatctcctgaaaacatctgggca

SEQ ID NO: 27145 - DNA, 1447 bp, Artificial sequence
  DNA replication origin
agctgccaccccgggagcgggctgcgcagtgtccgggccgagccggtgcgccgcagactagggcgcctcgggccagggagcgcggaggagccatggccaccgctaacggggccgtggaaaacgggcagccggacaggaagccgccggccctgccgcgccccatccgcaacctggaggtcaagttcaccaaggtgaggcgggcgcccctcccacccgacggccgcgggcccctgcgctgggcagccagactcggggcggcgggggcgagggagcagcgggccgggggtccgccgggcgccgccgagacccgagcctccctgcccgggcgcggctctccagaaaccgcacctttcgcgggacgtctcgggcgggatcgcaggcggcggggctcggcgctgtgagcctcgaagccgggaaaccgaggccgtccagcgcccgcgcggggccgggccgcccgcatccctgcgaggccccgacgtgtccctgcgctgcccgctttgatcgcgagtggaggtgcgcgccgcgttgactcggagcgcgctggttttggggagctccctccccaaaaacccctgcgatgatttccagggtggacgagtctggctttgagagggtcggagggtccgagagcgccaagagagagtccgggaggcagatggcggagctgcagttggaagactggggaagcgggtcctccgagcaaagcgcagcgggcgccttccgtgcttagtttatacccggctcagcagcagaacgaggaggagtaggaaggtgctcgcttactgacgaaacctccccggagcccagaggtcccggtgtttacacacaaggcgcgcgctccggaaggtcgcagacctgggcctttgggaagcggtgggtcgcgaggccgcagaagcgcacggttctctgcctcctcgctctgtgggctgggaggctacagcgttggcagaacggcgagattacctgcccggggcagaaaggaataaaagaagatggtgaggcctccgaggcctctgagctggggctgaggagggccgagagacccgggtccgggagcgcgacccgatggaggacacccccaggctgtctggcgtgcgcgtctgtcgtgggccggtgctggggcactttagaggcacaggccaggccgagagccattgccttaactttccccacctttggcttctcttgatttttgcttttacccatagcccccaactccagctgacaccgcacttagagaatttcctcatccgttttactttaagaagtagcaattatctttctcaaagaattttaatcaagcggagaaagttgcagggcactatgtgtggccttcagatttgggtctcttggcacttaattcccaatgtcggctgagcctctgatcacaagacatttaaattaactgttttcagaaggctctgtaatcaacaaagacacgtcgctg

SEQ ID NO: 27146 - DNA, 818 bp, Artificial sequence
  DNA replication origin
ggccgggaggcagccaggccgccggggggcgccggcaggagcggcgcttacctgaggcggcggcggggccgggtgcgggcgctccgggacgcggggccgggcggacacactggcggggccggggcctggccgtcccaccgccgtctgccccccgcgccggggccgggcccagacgcacttcctcaatcctgaggcgggcgggcggggagggcggcgcgaagagcgcgcagagcaaggccgccgccagctctcccaggaaccgtcgcgaggcgtcccctcggcggccgcctcagtttccctggccgtaaaacgcgggcgatggcgctcgatgccccgggagacgccggggtccgcgggcccttccggcaccgggtcctccttcaggttcgggcacccggctgcctccacgcggggcgagcgcggcgatgggatcggtccgtgctgcgctcagccccgctttcgctatccctctgctccaggggcagcaaaatcagcagatgagcccccagcgcgcctgcggcccacacactgcggccgtaacagttaaacagacggggaacattcatgtgcgtagagctcttcacggggcgatacagaaatgtgtcgttctaaagcgttaacgacctgcaatttgcatatcctccaacacatggattttactgattcaattatggatgtgtgcaaagaatctgctgctcggtgagtcattgttaattgtcggctttggggggaatacataaaacgtggaatattggcaatttatcgtgtttcgaccttttataaaggcgtcaccaggctgctgaggctaatacagaaac

SEQ ID NO: 27147 - DNA, 1226 bp, Artificial sequence
  DNA replication origin
agagctggcggcggccttgctctgcgcgctcttcgcgccgccctccccgcccgcccgcctcaggattgaggaagtgcgtctgggcccggccccggcgcggggggcagacggcggtgggacggccaggccccggccccgccagtgtgtccgcccggccccgcgtcccggagcgcccgcacccggccccgccgccgcctcaggtaagcgccgctcctgccggcgccccccggcggcctggctgcctcccggccccgcccggggaacccagagcccgcgcccggcgcccgcggggagcctcggcctctgcctgcccgcgggcccctgcgctccgggcggccgcgtggtcgggcacggggggccgttgcgcaggggccgcggcccgaggggcgcggagggcgtgtggggcgaccccggtctcacgtccccgctgcctcccgccgcgcccggagcccagccagcctgtgggaggggagcgcgcggggcccgagcagggaaccccgaaaccccgtccgggcagggtcgggaaagctgggaagcggaggcaagagacacgagtcgggagacacgagccggggagcccataggtttcctctgcctttggagcgaacccagtcccttagcggggagcgggcggagtgtgagcgcgcgggtgagcccgtgccggggtgtcggcaagagaccgcccgggagcctctcgctggtccggggcttcctggggttgcggggcggcccagcgaggcttcaccctcctcgatgtctgggtcacgcttcttgcccaggtggtctctggctggcgcagatacaactgctctgtctaccatggtctctgcaagctacaggggaccttcctggcaggcagggacgcgggaaggaagcctaggaaggccggggtcagcgaggagacgctggtggagaatctgagaacccccgtggccatctcaacctaccccttcacagtatgaggccgcgaagtttttctcccacgaacacttcccctgcaacaggtagagaaacgggggcatatagctttcagcaaacctctcaccgtgtacactaatgatagagtttgccagccactcacagggtatcaaaatgcccagacattaaagggatagctagaacatgcacaattttggaaaatgttaacattaaacgccttttatgatttgattctcttcatctttgcctatgtcctgaaagagaaaataatataacaaactaacctc

SEQ ID NO: 27148 - DNA, 1576 bp, Artificial sequence
  DNA replication origin
gtggtggggttatggttcgtatccctcgggactttctttaagtccacggcctgcccatatatgaggctgagtggacactgagagctccaggaagggcctttccacggaaccctgtgtgcctaccccagaatacgggtaccttctcgctttaggttgttttaggtggttggcgggtccttaggcagacaggccgtggatcacactcattgcttggagctcagggccaaccccagaaggggccccatcagggcagcctcaccaggggccctgtagtggacccccaggcagagtgcccaggccaccctgcacaggcttcagcccccggtcctgccaggccactgccaggacccccacgggcactcctccaaggcctggtgcagcctcttgtgtgcggcgacccccacaaggcagcgaaggccccttcagcatgtgtatcctcagagaggatgggctatcatgtcctaggctcctgacaagcacagggcaaagccagggacccagggacaggactcacgcttctcagaagaaaggagccacgcggggtgcccccgggggggggtggtcccacatcatactcctcgcagggtactcctggccttcaggccttgtccacagcccctgggcccctgttctgagtctgtcttctcgtatttcacaccaacaactagcaggcttggatttttggcttcccccaaagcccagaagcagcaaatcaggagaggcagagccttgtccagagcttcactgtgggcctgcagggaatgtgtctgctcgaggtctccttctccacactgggaaggggtgggtgggtatgtgggggcttgggggaccctgaggtctggcacatggcagggtctccatagaatttcagcaggagggggctggctgcagcggttctgatggtgggcggtggcgtgagccccttcaacaaggaaggagacaaaagcaccaggaggagagaatttaatgtggggcagcaaacagcctgtggccctcctgaggccgccctggttgtgggcgggatagttggtggctgtggtgatgtcctcaagcagggagatagcatgtctaaggtactcctgcaaagtaaaacgtgggccaggcatgatggctcagacctgggcacggcgactcagaaccgtactcccagcactttgcgaggccaaaatggggggactgcttgaggccaggagtttgaggctgtagcaagctatgatcacaccgctgcactccagcctaagaaacagagcgagaccctatctctaaaaaagtaaataaataaaaagaataacaaaaaaagaataaaacgtgttacaggtgcaaggtagcccctcatcccccttggtgactgggttccctgcagggtctgtttgcagtagggctgagggagggctacccacgaggggcaccccagacatgctgataatcctgaggggcccagcttgggactgtgtcggctagcagagggcatgcggctaggacagttacccttggtggcactgccaccccgtccccagacctgggctggcccaggaggccacccaccaggaggtggcagacaccagcactgtactgc

SEQ ID NO: 27149 - DNA, 1885 bp, Artificial sequence
  DNA replication origin
gccttggctggacttggagatggaggattgagtctcggtgggagagatgtcgcctggcacgcagcacatcccagaggccactttggaggaagggaagaggtcagctcctggtgctcatgtggtggaagccacaaccacctcgcagagccttctcgggtctgcgtagtgacgggtgtgtgcttggagggccaggcaggctctccagagtgtgcagaaaagtgcctcctggagattctgcacacgcccagcccgccacactcacatgagtgagaccgggactgggcagctcctagatgacaccaacgacgggacaagccagagcctgggaggaaatgaatgcaggatccaaaacggcggctgccgtccgagtcggcagaacgaggtttctgagcgggctccgggctgagcggcggcagatcctcgctccccgggcctcagcgctgtcgcgcatgcggttgaacggcggagccgcggccgcgcaggcgccggaggccgtgggaggtgacatagctgcagggggagctggggaagagccgcgcaggcgccggaggaggccggggtaggtgacgtagctgcagggggagctggggaagagccgcgcaggcgccggaggaggccgtgggaggtgacgtagctgcagggggagctggggaagagccgcgcaggcgccggaggaggccgtgggaggtgacgtagctgcagggggagctggggaagagccgcgcaggcgccggaggaggccgtgggaggtgacgtagctgcagggggagctggggaagagccgcgcaggcgccggaggaggccgtgggaggtgacgtagctgcagggggagctggggaagagccgcgcaggcgccggagagtcttgcggagcatccccctgtgctgagtcccggattcattccttggttttacagacgaggaagctgaggatctgagagctgtacagtagtggctgaggtggggtttgcagtgaaggatgtgacacaccccagatggagctgaatgggcgtgggacctcaggtcttggccacagtggcctgctgtgcattgatcctgctacagagtgtccattatcagccaggcgcggtggctcacgcctgtaatccctgcactttgggaggccgaggtagggcggatacctgaggtcgggagttcaagaccagcatgaccaacgcagagaaaccccgtctctactaaaaatacaaaattagccgggcgtggtggcgcatgcttgtagtcccagctactcgggaggctgaggcaggagaatcgcttgaacccgggaggcagaggttgaggtgagctaagatcgcgccattgcactccagcctggcaacaagagtgaaactctgtctcaaaaaaaaaaaaaaagtgtgcattatcagggacatggcaagaggacggtggtggaatgctggtggagctggcccagccgtttctggggacggggtcctcagcacagcctgagactgctctggtcccactggccaggctggggctctggggagaggcctgtgggaggctggtgaatcccaggtctgatggcgcctttgggcaacgtgtctggactcagaagtcaggagctgaggatcctgtggggtcgcgtgtcaagggggatttcgatgacagctgtaagtccaggcagtagatccagcagaatgcatgtggccaccagaatttacccagcgcctccaaaaagtacccagttgggaaggagacagacgcctgtgtggagggagggacgggtgagaatctggggccctgtcccttagtcctttgtaaatggcagagggagagggggcttccggatggcagtgatccaaaactcacctttccatagaaacagtgaggacactggaggcccagcttccgggccagccccc

SEQ ID NO: 27150 - DNA, 1580 bp, Artificial sequence
  DNA replication origin
ggttggtgggggaccatggatagtccccaagaacattgacaggaaagacctggaggcccttatgcacctgaactgtacttcaggagccagggtgggggctgcagcatcttccctgatgcgtgctctccgcagtggggatctgtctatgcatacacccttacaacttgctgttccaggctgtcatccctgattattttccatctctgtcattgaggaaacaagaatctaagaggcataggatcttgccctgggtctggcagctggcaattggcagagggaggattcgaacctgggcctgtatttccaaatcccaccctcaacaccacattgaggaacagccccttgaggctgagctctggcaattcctttagtcctcagtgtggcctcgagggagaggtttggagcgaagccctgggcctttagcttttggggtttccaggacccagcagaggcccaattcctggctgcccctgcttgtactcaggggtcttggggtctttggtcttgaggcccccatggcctccattgtgatggaacctagtagtttgtggcacacagccattggttcttcatcaaccaaggaggcagggcatggaggagccgcaggtcccaggagagaggaggtggctgtgggtcacccagccaggaggtgctggagggagtgcgagccccattttctgaccctgaccccagctgccccgcttcatattgcactacccagtgtgtctctgttctcttaggtccgacctctgaacgtaagagtgaatgaaagggaaaccaataacgggaaactcaaaggacaggggcctctggggtgggcagaccagtagctggaaggggtccagccctgattcctgagatcgcctcagccttgtgcaggccccactgatgggcaggctgggctccagccattgtctgctccacggctccattgcggagcagaaaccttgcaccgagggcaaaaacacctagtgtgccttagatccagtttaaacctttttgataaagaaagtccagataaagagttcattcacttccccttctccagctgcacttgatctgaggctttggtgacccgatgccgctatttcagagggagaaatgttttctagttccttccacctcattgtcagctgaagctccccccagcccccaccctcttcctcccctccttctcctctgtctccagaccaggggagaagttgtgctgcttgagggcagggttgacggggatgccttggctggacttggagatggaggattgagtctcggtgggagagatgtcgcctggcacgcagcacatcccagaggccactttggaggaagggaagaggtcagctcctggtgctcatgtggtggaagccacaaccacctcgcagagccttctcgggtctgcgtagtgacgggtgtgtgcttggagggccaggcaggctctccagagtgtgcagaaaagtgcctcctggagattctgcacacgcccagcccgccacactcacatgagtgagaccgggactgggcagctcctagatgacaccaacgacgggacaagccagagcctgggaggaaatgaatgcaggatc

SEQ ID NO: 27151 - DNA, 1029 bp, Artificial sequence
  DNA replication origin
ccccttcagggctgcggctcccggacgtgcgagggtgtcattgtcccagccacccgaggaaatggcatgcctgtaaggcgcgcccagcctggctcagctgcacaaatgtggcgtttaaatatttatttttagtggctgcgggtttaatagcagccttcattttggtgggggcaaccctgaaaagtaaaaataaatcagaccttcgccttgtcagtaaatcctcctggcccctgctgggtggactctgggcccggtgccccagtgtccagggtgagctgggaggcccgtgatttggggggccacgctgggagccaggccagcctgcaaccacagctcgtcacggagacgcccgaagccctcctttcccagtctccctgcctggcccgcgccacctccccacctggcccagctcaccggcctcacgctgggctcatcagcggctgccaggcacggcggccgggacagaggacctgggtctggcatgggcacctgctgacccctgctcaggtcaggaggcccggggtgctctgagttgcacatgtgactccctcagccagatgggctctgacgctttcaaactccgtctgtacctcctgctggcctcggctctcaggctacacctgctggtcaccctctgcttgcccccacctgagctggccctggagtgaggggtgagcaagtcccccgtggtagtgttgaggacgtggtagatctgaggccatgctttggcttggatttgagactgttgggtgctggaattcttgccccacagccaaacgggaggctggccctggagggtcttgggggccacttccccaggcccccaacaaaactttcttctgtcctgcctgatatggggcctggcatccctctggagaagggcttttcatgggtcaaggctgtgcctgtcagaggagcctggaccgagtaaccccagaggagagggaacacccaccacctatcaggcttctgccgcagacacatgagtgacagctggcccggacagaggccctgaccccagttttcaga

SEQ ID NO: 27152 - DNA, 933 bp, Artificial sequence
  DNA replication origin
ctgatttatttttacttttcagggttgcccccaccaaaatgaaggctgctattaaacccgcagccactaaaaataaatatttaaacgccacatttgtgcagctgagccaggctgggcgcgccttacaggcatgccatttcctcgggtggctgggacaatgacaccctcgcacgtccgggagccgcagccctgaaggggccgggcctcagcccagtgagaggacaaatcctgctgtccaagaacatctttattccccagtatctggggaaagcagcaactggctagaggaggggacagaaggagaccgagaaaggagaagcgtctccagggagtcctcccctcacgagggcgccagcagccccgagacgccccacggcccggcctggctgcctcactccagctgtgcgggtcctgccgagacacaagacaacacggccctggacacagcgaggtcagaaaccagacgcagcagggactgcgcgggctgggaaggctgggccctccagctgggagagggttgcctggagagaaggaagtccccaggctgccagcgacctgctgctccttcccaagcccaggatttcccaaagcagcttttcccttccagacgctggggtgcagggcccaagacttcccaaaacagcttttcccatccagaggctggggtgtagggcccatgacggttctgctttagtgtcggggatgaaagagagggaaaaagggctgggagagaaacagagaaacagaaagaaagaaacagacagaagacacagagacacagagagaggaaagagacagagacagaaagagagcagagagagacagacacagagagagagaggcccggggaagagagacacacagagagagaaaagaaataaaaagcaggggtgtggagtggggcgcttagcgacagaggaagaggaaagaggg

SEQ ID NO: 27153 - DNA, 1236 bp, Artificial sequence
  DNA replication origin
cactaatcattagggaaatgcaaatcaaaactacgagataccactgcttacccattatgagggctactatttaaaaaaaaaaacagacaatagcaagtgttggcaaggatgtgaagaaattggaattcttgtgatgctgggaatgtaagatgttgccgctgtgtggaaaatagtacagcagttcctcagaaagttaaaaattgaattacaatatgatctaacagtttcacttctgggtctgtagccgaaagaacggaaagcagcatctcaaagagaaatttgtacaccaatgttcatagaaatgttattcacaacagctaaaatgtggaagcaagctgagcatgcatggatgaatgaatggataaagaacatggtaaatacagacaatgaatattactcagccttcaaaaggaacaaaagtctgagacacattgcaggaggcatgaaccttgaagacataatgccgagtgaaataagaaaggactgtgtgattccacttggatgagataactggaggagtcaaaatcatagagacagaaggaacagtggttgccaggggctgggcaagggaagagcggtatggggagttagtatttaatgtgcacagagttttgattttataggatgagagttctgtggaggggctgggcaagggaagagcggcatggggagttagtatttaatgcgtacagagttttgattttataggatgagagttctgtggaggggctgggcaagggaagagcggcatggggagttagtatttaatgtgcacagagttttgatttcataggatgagagttctgtggaggggctgggcaagggaagagcggcatggggagttagtatttaatgcgcacagagttttgatttcataggatgagagttctgtggaggggctgggcaagggaagagcggcatggggagttagtatttaatgcgtacagagttttgattttataggatgagagttctgtggaggggctgggcaagggaagagcggcatggggagttagtatttaatgcgtacagagttttgatttcataggatgagagttctgtggaggggctgggcaagggaagagcggcatggggagttagtatttaatgcgcacagagttttgatttcataggatgagagttctgtggatgaatagtggtgatggttgcacaacagtgggaatgtacttaatatcactgaactgcacacctaaaaagggttgatatgtgatatgg

SEQ ID NO: 27154 - DNA, 1445 bp, Artificial sequence
  DNA replication origin
gtcccctcttaaaggcgcaggccgcggcggcgggggcgggcgtgcggaacaaagcgccggcgcggggcctgcgggcggctcgggggccgcgatgggcgcggcgggcccgcggcggcggcggcgctgcccgggccgggcctcgcggcgctagggcgggctggcctccgcgggcgggggcagcgggctgagggcgcgcggagcctgcggcggcggcccggcgggcggagcggcgcgggcatggccgcgcgcggccggcgcgcctggctcagcgtgctgctcgggctcgtcctgggcttcgtgctggcctcgcggctcgtcctgccccgggcttccgagctgaagcgagcgggcccacggcgccgcgccagccccgagggctgccggtccgggcaggcggcggcttcccaggccggcggggcgcgcggcgatgcgcgcggggcgcagctctggccgcccggctcggacccagatggcggcccgcgcgacaggaactttctcttcgtgggagtcatgaccgcccagaaatacctgcagactcgggccgtggccgcctacaggtgagcccctgctccccgggcaccgcctcctgcgtccggcatcccggcggccggcatcccgggtgctctcctggctctcgcctccgcccgcttcctaggcccttcttgggcttccggcgggatcgggttgcctctcgggagacgccgggccgagggagaaaagatcagaggcgggatggtgagcgcggcgctcaggaacatggcctttggggtcagatggactagtgtggcctcgctgggtgtacctctcaccctgatgaaggcactttagcctttgcaaatcgaagcttctcgttagaagggcccgacagatcgggtctccctcataatgttggaaaactcatagcacagtacctgatagtggaggcagttggggctgatactggattccctaaaatgtgcacctttgtccttgcaaagctggagcccgtgtacgttaatctagttctagaacctttccacatcatactctcacatttcgcagttggaggcactcctataaatgaaagagaatgcccgcagcatattggaccacaccagtctgttgagtacagagagagagaaccttggggaaaagcagttcttggcccttggtagattcagtggaaaactgcattctggtgttaattagttcagcttggtggtgtatgcatgttatccagtaactgggctctagttggccaaatgagtcataaaagcagctggaattgtgttcaggtttaacaaagggattagccaatgtagtctctagaagggagatgattttggaatggctggcatggttagaatcagatttgtattggagtgaatttgaagttggagagggttgtagactcgataaagggatttgatggaaaccctatatgtgtgaagtatagagacacttac

SEQ ID NO: 27155 - DNA, 752 bp, Artificial sequence
  DNA replication origin
gccgcgcgattggcgcaaaagtgaatgaggggcggttcacgtggccgaagtttgaccaaaaaaaaaaaaagccctctcgggcgccccgcccgcgcggtctgcgactggagctggcgggcggagggggcgtgggcccccgcccggcgcccgcggggccggagctgcccgtgatccgcacctagcacccggcgcaagggcgtccccgcgaggacggccgcttcccgcaccgcggcgcccgggcgcgaatctcgggagccagccttgcagtgggggcttctcggcccccagactccacgctgcgcacgttcctcccgcacgggccgtcctcgctgcaccccacggccacgcccttcctgccgccgggccggccccgcgctcccggccccgcgctcccgaccacactgcagctttgtccgcagtcccgcggccgcacgcagggaacagccgtcccggagccctggggacgtgcgcgcctgcgagtggaccgtgaattcagttaccttgttccctgttgctagtttctacgctaaataagaagaagaagaagaaaaagccatctttaatacttaaggtccacgcttctcatacagtactagcatttaatggatctcgaagacaaggaaaatgaagttaatgccctggatggtaaaccctactttcatttacatactgtgtgggcagatagccggctagtacccccagcctgggactttgtccctactttaatatagtccgtctgtaaaagtgccgtg

SEQ ID NO: 27156 - DNA, 1333 bp, Artificial sequence
  DNA replication origin
ggcacccgccaccactccccactaattgtttgtatttttaatagagaccgggtttcaccacgttggccaggctggtctcgaactcctggcctcaagtgatccacccacctcagcctcccaaagtgctgggattacgggtgtgagccaccacacctggcctaaaatattttttttagttagatacttagagaaattaaaaagatcctgacaatttcctcattctaaagctgttctctgcacagtccacgcacatctattttcaccctccatatcctcctcttgtgcttcctcccatgtgtccctccacagagtcaccattcttatttgatggccctggacccttctgttgttggacatgagctgttaaaggaggagctgtttgctctggtctcctcttttctggctgaatattgccctatgttgggagatcatgaactcaggacccagaacagggcagggcaacctgtcttattcagggtgggagcaacattgaggagtttgaagggacctgtgagggtgtgacgatggggtgagctgtgaggggtgacgatggggtgggctgtgaggggtgacgatggggtgggctgtgaggggtgacgatggggtgggctgtgagggtgtgacgatggggtgggctgtgaggggtgacgatggggtgggctgtgaggggtgacgatggggtgggctgtgaggggtgacgatggggtgggctgtgaggggtgacgatggggtgggctgtgagggtgtgacgatggggtgggctgtgagggtgtgacgatggggtgggctgtgaggggtgacgatggggtgggctgtgaggggtgacgatggggtgggctgtgaggggtgacgatggggtgggctgtgaggggtgaccatggggtgggctgtgaggggtgacgatggggtgggctgtgaggggtgacgatggggtgggctgtgaggggtgacgatggggtgggctgtgaggggtgacgatggggtgggctgtgaggggtgacgatggggtgggctgtgaggggtgacgatggggtgggctgtgaggggtgacgatggggtgagctgtgagggaagtaccaggcgttagcctgctttcacagtgctaaaaagaaatacctgaggttgggtgatttataaagaaaagaggttgaattggctcacagttctgtaggcttcataggaaacatggcgccagcatctgcccagcgtcttcactcctgatggcaggtgaagcaagggcagcacatcacatggcaatagcaggagcaagagagggaaggaggccgggcacggtggctcacgcctgtaatcccagcactttgggaggccaagg

SEQ ID NO: 27157 - DNA, 2824 bp, Artificial sequence
  DNA replication origin
gtgtttccttattgtttttaaacctctgcttgatctgcggttacatcctttttccacttatcatgttatttattcgtttgcgccttaatttttttctttatcagtggtgccatgggtttggctatattgccagatttttaaagaactgcatttggccttttaaattctattgtaaatttgttttctacttttacagagttctggtcctaattgtattaccttcttctcatttttttttcttttaactttttagtttgatgcttaatcccatgaattttcagcatttctcttaccacgaacacctcaggttacacacatctttcccggggtcatgtccacagttcccatgagttgtcctaaatagtattttcattatcattccattctaagtatttttttatcccaattatgatgttttcttttaccatgagttatataaacatgtgtttgtgaatttccaaatgtgtgacatgtttagtctttctttgccctgttgacctccagcttaattgcattacagccaaagactatgctttcttggaaatcagttcttagacatttggggggtgtgcttgaagtcctggtactgggctcagtctttgaaaacgttgtgtgtctctagagagaaatgttattctctgttgttgggcgtggagttctaagtctgctggattacacctcttgacagagtggctcagaccctttccactgccattggctttttgtctaggtgaccctctgctacccctgtcccttatggcccctggaatcagggagcttatgtaggaggagcaggtgtttgggctggccctggagggtgaggaagatttggcttgatggaggtaggcagggggcctgggtagaggggacagcataatactggtgaaggaaggccagggaatggtgtggcatctcgaaagagggccagagggcaggaaaaggctggggcagggaccagaggccctgggaaagacccctctttagaagaggggcaggagagagtcttctgaggggagatgagagagagcccacagagaggaggacacggaggggtggggttgggtaggcccaggccatcgtggggggtcttcctgggcaggagagggacctgtgtgacggttcataggggcatagtggtggccatgtggctgtgtggggaggaggccctcagttcagtgtggggcctgggatagtgggtggcaaacatcagatggaatttcacagaacctaacgcacatctctctccctcgaggtgaatttttctttacagacctgtgaatctaagagatgatgtaacgcctgaactcattttataacatcagaagtttgcgacttaaaaatgtttcagaaggtgggggcgtgggctgtctagggttctaaggagaacgtggttgaaacagctgcctaaagggactgagggtgttggaggacccggtggcaggcgcatggatggaggaccaggaaccaccaaggtcaccatgggtgggaggcatcagggtgagggaggggtgttggtgaggggcccagctggagctgtgttcatagttgctgggatggaggggacagggcaggattcagggtgtcagcagagtcagttacctgggaggcgtggcacaatggtgatggaggagggggagcccaatgatagtgcagtgaggaatggtgggggggacgggaatggtggcagctggtggtgtggacttagggtggggggacgggaacggtggcagcgggtggtgtggacttagggtggggggacgggaatggtggcagcaggtgatgtggacttagggagaggagacgcggagcaagccgggagaactgggtgggcctggatttgtcctttcctggtaggattactgtggccacagaatttattgtgcaaccaggatgtttctaggaagtaaaagggagagcctggacacttacagctgggcaacaggatggaggaagccagcacacacatgattccctgtgcaggcacgtaggggctttcagctaagccaagggtgtgtgaggaagcaccaaaggtgcagaggagtttctcccttgttttggcttcaaaatagatgtttgtatataatagggattcccaagggctcagtgggcggagctagcagtgaggctgggagaggagaggtggcctggagagggtttctcttctgtccggaagcctttctcccttggctgagagaagctacacacacgccacttctctctgaacacgtggctcgtgaaccacagtcctacagctgtcagtagtaaaatccaggcccatccagcatgcttgcgggatgtcggggtggttaaatgaaatggaaggcagtttgttttttccaagtgagatggatgtgaaggaattaggtagaagctgacagaggtatacccaaaactgctaaatttagcctggattcaagaaagaggttagagaggtggcattgtgagtaattagacgcgtcgcagagagcgtgaatgattgacagagtttgtgtctgtggttgccgctggggagaaacagagcagagtgggagtcttcggaaggagcgaggagccaatctgctgggtatgtggagcctttgggaccgtcagtcgcgcttcgggtgctggggtctgtttgcgctggagaagatacacatggtgaaagggagagtgaggcacagtccctggagacagacgatggtctgtaaatggtgagcaaacaacagtcaggagccttgctggagtctgtaccaagggccctcctaagaagccgggtcctgtgggggtccagtgactgtgtacagcccgggggtccagtgactgtgtatagcccgggccacattgc

SEQ ID NO: 27158 - DNA, 1194 bp, Artificial sequence
  DNA replication origin
ccgggaccgcttggggacggcgggcggccggggcgccctgcgggggggggtgtcgcccgggggggcgcgcgcgggacactcggcggggtgggggggactggggtcccgcgtgggcgcccacgcaggtccggcgcgccgaccgcaagtcccccggcagtgccgcccaaccccgcgctcggaagtgtggcctcagaagccggggcggcgcggacacctgccgggctccgggggagtctgggctgcctcaggcgtcgcgcgccgtccgccgctgggtcctgggcgcccacccggctctcccccgcgggggagcggcccctctgccctcgacgggcggcgcgagctccggacccggtgcgcgcgccaaggcggccgcggccgctgcttgggtgacatgagcgtggcccggcgtctcggggactcgcgctccctcggtgtccgcggctcccgggggtagatggccgggagcctgcaccctggagcccggccgccgtcggagaggccttgggacagcgcagggccgggggtcctgggtttaaaacctctccaggagcggagggagggcgctttgtgtgggggcttctgccgcggttctgatggccgagcggtgtgacctttggcaagtcgctcccctgacaagctcctttgcagtcagtggcaatgtctacaccgctgggttgtcggaaagatctaatgctgcgttgccacagagcctggaccggggcctgaccctcaccggcccccacggggccctcccagccccgcagccctcggctgtcccctcttctgtcagtgagcaagcaggccacgccctgggcacaaaggcggcattaccctcaaaggacctcccggcgggtccctttttcctctctcaaccagctaccgggctgaggggcggtgagttggggttgatccatgtttatggctcctggagaggccgttattttgaggtcacaccaggggacctctcagtgcagttaacaaatctacaaactacacactcagagggttaagtgaagtgacagggaagcaccgactcataactctaaaccttagtgccaggcagtgttaaatgtagtttcatcgttatccgtggcagaagccagcaaggtgtggtggcgtccctgattgatagaaatgacattagttctgcatcccaagccccacgttgatgtactattaggtgtgtggctggag

SEQ ID NO: 27159 - DNA, 1807 bp, Artificial sequence
  DNA replication origin
aacacccttatctctgcctgtcaaaatcactgccgttgcgggggctccgtcttgggaggcaccagctgctttataatcatttagctgatgtgcagttacattatcttgaagcaggccacatatttgaagaacggcaccagatccaggatgaatctgagggacatccggccagcaggggaaggggaagagaggtaacacatgctgcccagacatactgctgctaggtgacaatgcaatgcctccaaccccgtccccttgactcaggccaatgtccctcttctgcaagccagttggctaggcagccagggccatgtcaggcagaggcagactgagagttctgggtactgtttctgtccaacaagtatggccggttctcctctagggctgccagtttgcatgagggcctcatgtctctccactggcaggggctggtgagcatccagtccatctgtaggagggacacacggtggctgtcttctgcagtgtgggcaggcctggagtgacggcccaagcagctgaccccacttgccaggggaacgcagggaggtgaagttacatctagtgtagcaaagcgaaggccatgtgggacgttgatctccaggttccaagatgggcccttggcaggagcccttgtgaacatggatgtggcctgttgggatggggcctcccaccacgcctcctgttctcccacctccattaggggtgactcacacctgaagaaatgatgaatcacgtgggttacaaaaccaaagggctcctgagagcgaggctggaaaggacctcggaaaccatctatgcagatcctgtcctcagcccatcccctctcgccccagcctctcacctccagctgccaagccacagactccaagtgaatcctgcacgctcaacaagagaccgctcctggaactgaccatcagagaagcagcttccttcccacctcaaggccttctcgacctttttgttttacttcctatattaagcaggttgatggcttgctttctggaagtgggccagtaggaccaatgggtcctgggagggatgacagaagagatccagcagcgatccttacccttcataattccttgattatggtgtgaacatttccatccatctccagggtgcttcaaatcattatccactggataccaggctgctccaggaagcaggggtgaggatgattcagctgactttctactgctggtcccagctcagtgggtgcttttaagagtgtacatcgtctagtgaacacctaccacacggcaggccctgggctcataaaaacgaacgtttacggacagcttattgtacagcaaaagctgacctcatcctcaaatcagcccgacggggtagatgccactgttccccgcattttgcaggtggggcgcctgccctcagccaccacagtcatttgcccaagatcgcagcgaggctaagcggacggcctgggggttcacctgcacggcctgggggttcacctgcgcggcctgggggttcacctgcacggcctgggggttcacctgcgcggcctgggggttcacctgcgcggcctgggggttcacctgcacggcctgcctcccagcatgggccgcggcctccgccatgggctccgtgcggtggtttctcgggtacacgctcgtgagcccggctgatgcgccacatgcctttgccccgctcaatgtgtcccttcagccaggcttggtcccgggcgacccactgtcttccccgcagcttcttctccctgggaccccgcacacgggcgagccctccgtctagggaggcgggcgaggccgccaggcgtctgaggccc

SEQ ID NO: 27160 - DNA, 1528 bp, Artificial sequence
  DNA replication origin
ccatggaggaatttagagctgaggaacggcctgatctgacttctattttcacacatcctctgtgttgaggattgatggcaggaggcatggccagaacagggaaggcatttagaaggctgttgagtttcaccaggtgacaggtgggggtggctcggcccagggacgtagcagggggcgtggtgagaagtggccggactctgaacggatttcaaagtagaaacaaccagactcaatgacagtctagacacgggtgtgctggggtgaagggaggggttaaccatgacctcaggctttagcctgagcagtggaaatgtggagttggcatttgccgtaatggagaaagctggggacagggcagggcggcgggggcgttttgtggtggggacggggaggaccaggagctcagcttgtaaagtgctttagacatccaaggagagaagctgccggccgcctggagtttaggagtccaagccagcgacgggctccgagagtcacccacacgtaacgtgcacctaaagttagagaatgactgagagcgtcgcgggagtgagggtgggtacaaaaaagaagccacccaagagtcggggctcggggcaccccgatgctaagaatgaaccagcgatggagactgaggagaggcggccacacaggtgagaggagaactaggatagcaggggccgcttggcagccacaagcggaatgtgcttccaggacaaggggtgtcagccgtgtcaaaggtgcaggaaggcctccaacaggaggtcagagaacggccccctggagttagcagcggacaggctgcgggggatggtgatgacagcgtgggtgggcttgagtgcaggagagactgaaatagtgggtggggagacttgcttgaggagttttgtgttgctaaaacgggaagaatgggagagtagctggcgagagtcctgtgggtttttaaagatagatggtataaccacatgcttgtacgtgcatggaggtaactcagcaggagaaagggtgatactgtgaagcggcggctctggggagctggggtagcttgggatccagcaggtgagggaggggaggtcctcagtgggccccaccacctgcggcagtgctgtgaggcagagcccggcgcaggtgtgggtggaggaggaagatctcttccgagaaaggaggtaagaaggaagcaaggctgtcagctgagggtgagtatggaggacgccagttggacaggaggggtgggcgtttcgagagactgccagaggtgtgtaatgatggctgccaggcgacagcagccggggtggctgtgtttcttctccacctgcatccagccgagtggagggagagggagaggacggcatggagaggcccgagagtgaagagcggcgtcatgtgacctttcctggaaccccggggaagtgaaggcaggaggtcagaggtgatgtgaaggggcggcaggggcaggaaggcgtaagaagccttctcagagccgggtgggggagctctggcacacgtgcaactaaggggaaggatctgggga

SEQ ID NO: 27161 - DNA, 838 bp, Artificial sequence
  DNA replication origin
taaagagtataggaagtgcccggggtgggctgaggggttgcaatttacatagttgggccagagaagacatctgcaagatggagaaatccgagtaaacattgaagaaacccaggaagggggaccccgagggaacagccaggccctggagtcggggtgaggggaggaagagccgaagctgggagcagaggagccgaaggcgagggcactggggtgacagggccggatctcgcagccttgccgcagcctcaacactggctttgtctcgtatgggacagggagctggcggagggtagggccttcaaacagcaaagggacatgtggcttgtacgtgaaagagccaccctttccgcgtgttgaggcaagactgcaggggcacatgtgcatgcagggaggtgaggccaggcgcttgcgatgttccaggcgggaggtggtgaccacagggcccagggtggtggcaatcatgggggcaatagtggccccatggagggcgcacttccgtgtcctaaagtaatggtgtggaaggaggggagtcaagaagacgcaaatgcatggtgcgtgcgacggaactgccattctccggggtgggcgagacaaggtggagcaggggccagagacccgagaggcccaggtgtgcaggacaggccagtgggaaacgcgtgtagggttgtttgcacagatggtctttcaggccaggagaattctcggctcatgggtagagggagtgttgattatatgggaagtggctcccatggagtccccggtggtcaatggggagaggaggagggagagaccagcagccagtggagcccaaggcaggcagagacaaggatgaggacca

SEQ ID NO: 27162 - DNA, 886 bp, Artificial sequence
  DNA replication origin
acaccagcgccactccctctgaataccacccactcccagacacatgccagatgtagatattcccgggggcaggcctcattacagggaaaattgcaccctgagggaccacaggcagcgcatgcccaaggccagtggggactacagcccctagaaaccccccgacctaggctcctgcgccccctcctccctcatggctgcagacagcaaccaccaaacaagagtctgcccaagtggatctccccaccccaggacggtggttttaggtgctggagatggcaggggacgatggggagagcagtgctggggttgggtggggggtcagcggggagagcagtgctggggttgggtggggggtcaggggaagtccctcagcctcaggccggggaaagggcaaaatgaagtccctcagctgtgtgtgaggacagacaccgtggccgggacccaggggctgacagctgcagagctgagctcccctcacaaacctaggagtgtgggctgtgggggcttttcgagggttcccccagttctggggaaagtgggtcctggggattcccgtgaagacctagtgtccggcaggaggaggggcaggaggacagcgagggggcctgggaggaggagtaggatggaagggagcttgagggtgcagagaaaacagctctggaggcctggaggcttagaggaacctgggtgggcgggccccagcctaccctgcgctggcccaggtaaggcccgtgctctcctgcctctgtgccatttccaccctacatcccaaagtaagggctctttcctttattctgtccatccaaaccttacccagagtccatgtgcgaccccgtcacacccctgcctagtacctgagaactccagccagaaactcctcgcccac

SEQ ID NO: 27163 - DNA, 1207 bp, Artificial sequence
  DNA replication origin
gggggctcctgggcagtgccagttctgtgctgactgagaacgtccttgggaagtcctgctggctgcaagcagtgctgtgaacaacgctttctaaagtgaagccttccctgttctcatcagtccagcggcatgaacgtgagcttttccgaagcctgggtctttcgggttccaggtcattgttgtaatcctccattgctgtggaacagggactacattggctcagctgctgaggccctcggggacaggagcccgctcaggaccccatacaataaaaggtggtttgccatgacctctaggtgatttcccttagagtaaaataagaaataccacgcactaagccctaggcagtctggggtcttggtttggtgcgggggctccgcagccggcctgcctggctcagatcccatctgtcccacctgctggctgagccgttcacccgccccacctgtgcctccaccccctcagctgtagaaggacgagggtagcaggttctacctgcggggagagcgtcagtgttagcaaaagggcctggcacaccgtatgtgtctggtagatgctagccattgcttgtgtttgacttcctaggataacataaggaacataccacctggtttggtaaaggtaccgaaggcaggagagcaagggaagcggaaggaggaaggatggggttgccccccatgcccttcactcctgtaggcagagtccctccagaaccagctcagtgggcctggcagacacttgccccttggtctggctgcaaactcaagtgaggcctcctgtgccaggcaaggaccccggtcccaccgctgtgtgtgaggctttgggaggaaggcagtgcccaaggagtccgcactgacaccagcgccactccctctgaataccacccactcccagacacatgccagatgtagatattcccgggggcaggcctcattacagggaaaattgcaccctgagggaccacaggcagcgcatgcccaaggccagtggggactacagcccctagaaaccccccgacctaggctcctgcgccccctcctccctcatggctgcagacagcaaccaccaaacaagagtctgcccaagtggatctccccaccccaggacggtggttttaggtgctggagatggcaggggacgatggggagagcagtgctggggttgggtggggggtcagcggggagagcagtgctggggttgggtgggg
